United States Patent Application Publication US 2015/0315605 A1 - sequence listing, part 27

SEQ ID NO: 40807 - DNA, 2232 bp, Zea Mays
tgcagataagtccctgatccggtccgatgatcccgagtggttcttcttcgcccccaaggaccgcaagtaccccaacggtagcaggtctaacagggccaccgaggcgggatactggaaggctactggcaaggacaggataatcaagtccaagggcgacaagcgcaagcagcataccatcggtatgaagaagaccctcgtcttccaccgcggtcgtgcccccaagggcgagcgcacggggtggattatgcacgagtaccgcaccaccgagcctgagttcgagtccggcgagcagggtggttatgttctttatcgcctcttccgtaagcaagaggagaaaactgagcgctccagcccagaggaagtggatagaagtggctactcacctactccttctcgttcttcacctgacaacctagaggcgaatgaggaagctaatacaccattaaataaggaatctccagaatctgctctgcatgaaagcccgattgagctgccaaaatctgttgaaaccaatggtggttcaatgacaaggtggctggcggacagaaatgataacttgatggttactgcaccagatgtttcccatatacctttccacggacatgctgctggtgtagctaaggttgatccttctgttggtgcttcaggccacttagttaatccccacaatggaaatgatgattataacaaatttgtgtctgatttcactcccattctaccacttgaaaatgcattcttcactgatatacaacaaggagcttttggttttgatggcatcatgaatcctcttgatccccttgatgctttcttgaatcaaacacttgttgatcctgatgaacattcatcaacaacatcaaaagttcagtatgattctgacattccaacagaatttgagaaccattggaatatgaaggttgagcctcaagatgatcaatgctggtgggcaaacataggatttgagccagacgaaccaaatcctctgcttccttgtgacaccactgaccaagacatactttctgttgactctggtgctgattccttcaatgagcttttcaatagtatggaagagactggaattattgttaggcctcaacagttggactccactgtgcaaccaaaccatgtgttcgctagccagggcaatgcagcacggaggctgcggctacaggttgagtctagggagatcataactaaagatgagagtgaagatgaagtatcatgtgttctaactccagactgtttgaacgattctgttgaggagtccactgcagagaaggatgtggcttctgatggggatgaggctgagtcaacagggattgttattagaagccatcaccctgctccaagatcaagctcagagagttcattcactcaacagggaactgctatgcaaaggctgcggctacagtcaggccttaacaaaggccagcgtcctagtactgatgattcatcaagctgcattatagacgaaccaggaagtcagcacaaagcagaaaaagcagagattgaagaggatgcgagtacaaacctcgctggaagtgctgatgatctacctggtaatatccatgatgatgagcaaaagaacatccctgaacatgaagccaaatctgttctgaggttgcggaagacttctgaggaaggcaacaaggatgtcaagcaggagagttgtctcgagccacacgtgagagcaccaatgcagaagggaggcttccaatcatacatcatctggctggttcttccggtggctctgctcctgcttctctgtgttgggacatatggatggccgtaccctgcagtaagacatcccggcattgccaaggcagctgaaaaataaataaaaaaacaagtggtagaaatgacaaggtggaaaagagcgaggtgtgttattgttggttttagtacatcgtagtcttcttttgctgttgttgtagatgtcttgctaatgttgtcgctgttgtgtagttgcaattcaagcccagggctgccagttttatttcctaatgtaatgtagcaagagcgagaccctgttagacgggtgcgctgaaattctgaacctctgtaatatctgatgttcttgtggatacctgtttcagaattttcggttcctgaacccagttactgatggcttgttgatctgttggcgtgttcgaattcgtttggacatgccacagcatggtctgaggggatacaaggactgaatgcgttggtttataattttataatgaaatactg

SEQ ID NO: 40808 - DNA, 2173 bp, Zea Mays
gaccccggtcccgttcccacgcggagccgcggacacaccttcctcctcctcccgtcgccatggacgtctgctcctccacgatctagcctgtggctattggttagcacgccggcgccggcgccggcgaccctaaagggagcgttgacgttgtatcccgagattttatgctctaagctttcgagccgcgtcatgggaaggaagcctgacgcggtagccaaatcgtatcattccggtggcggcggcgctgccgcctcctcgccgagggcagcgaggaaggcgtcgccttctccggtgttcctgggaaccgcgctgttcgttctagggtttgtgtccctctttacgggacacgtggtcaccgacgctgactgggcgcggatccgcagtcgatggcgacctaaacagcatagaaactacgaacctatcgatatttgggaatccaagtattccagcatgtactacggatgcagcgagagaagcacgggtttcagatctgctgtgccagagaacagttccactggttacttgttgattgctactagtgggggcctgaatcagcagcgcatagggcttgcagataacagatgctgttgtagttgcctggattttgaatgccacacttgttgtacctgagttagaccaccactcgttctggaaagacgacagtgacttctctgacatttttgacgtggagtggttcatttcccacctatcgaaggatgtaactattgtcaaaaggatcccttatgaagtaatgttgtcaatggataaactaccatggactatgcgcgcacctaggaaatcggtgcctgagttttatattgatgaagttctgccaatactcatgcgaaggcgagctttgcaattaacaaagtttgattataggctcactagcgatcttgatgaagatttgcaaaagttacgttgccgagtaaattttcatgctttaaaatttacgagttctatacacgccatgggtcagaaacttgttcaaaagctgagactaatgaacacacgatatgtcgccattcatttgaggtttgaacctgacatgcttgcattttctggctgttactacggtggcggtgaaaaagaaagaaaggaattgggtgaaattaggaaacgatgggatacattacctgtaagactcttgaaacttggagttgagtgctgaagatgaacgcagcagaggaaaatgtccactgactcctcatgaagtcgggttaatgctccgagctcttggttttggcaacgatacacttctgtatgttgcttctggagaaatatatggtggagatagtactctccaacctcttaggggactcttcccaaatttctatactaaggagaagcttgctggggatgatttaaatcccttccttcctttttcttcacggctggctgcaattgacttcattgtttgtgatgagagtgatgtctttgttacgaataataatgggaacatggccaaagttttagctggacggaggcgatacatgggccacaagagaactattcgcccaaatgcaaagaaactcaatgtactatttcaaacacggaatcaattgagctgggataccttttcacggaaggtacagagagttcagaggggtcttatgggggagccggacgatatcagaccaaaacaggatgacttccatgaatttccatcatcttgcatctgctcaagaaaacctgggaacatatcggccacaacatgaaaaccaaccggacagggcaaatgcagcgaggatgctgctagttgggcacttactttgacagtagggaaacatatgcttacgttgaaagaaacacggtagaattaacaaggcaaggagggatgcatagtgcatatatgtcatggctcggtaagatgccacgtcaaggagagttgccaactggtgatgtcatgcctgtaaattattgttcgtacatgattaattctttaaacatgttgtccgctcgctgttcctcatccgctttcagactacgtcttggctatgcaccatcattgggcttaggtgggtctttgtagatcaagtagcttgaatcggctcgttagtgatagtgaattagtgatgggaggatagggtttagaggtttctcggtcggaaccgttgtcatgaccttttattaatgaaataaatattgcagggtggtctttggccgagttttt

SEQ ID NO: 40809 - DNA, 1103 bp, Zea Mays
atcccaaatattttaacacaaggagcactagactggtcggagatatgtagcgaccccagcctcacgcggtcacgcctcaccatcttcaccggcagcgcaccacgccgccgccgccgccgtcccacgcattgtctgttgctcagcttctcctagcccagctcctgctagctaggctaggcctaggctgctacatactgccatcatccatggagtcgcctcctgatcaggagagtacatctccgacttgggatttgtcttacgaccagcagcggcggcggcggcggcgcgccaggacaaggagcagcgggactacagactcatcgcaaaagccgtggacgaagcgtaccgggcggtggagtgcgacggcggcgggtaccccttcggcgcggtcgtcgtccacggcggcggcgacgacgaggtggtcagcagcagccacaactcggtccggaaggacgccgacccgtcggcgcacgccgaagtgaccgccatcagacaggcgtgcaagaagctggggaaaaccagcctcgccggctgcgagatctacacgtcctgcgagccgtgcccgatgtgcctggggctcattcgcctggccaagataaagaaggtggtgtacggagccaagtcggaggtcgccgctgccgccgggctcaacggcgtcctcccagaggtcttcagagagtactaccagaaatccggcgtggagatgaggcaggccgagggcgaggcggcaacccggatcgccgaggaggtgttcgagaagaccaagggcaagtttcgcaacaagtaaacgcgctggagatggcgccgggcggatggctgttgcctgttgctagtggaatggttgccgtttccaagctttttgtccgggggacctttgatcagaggtcacatgcccagagaccggaataaattcacccctttccccccctaaaaaatactccatttcacatggtttgttgtatcagtgtgttatttctttttttaacgcccgcctcgaccgtgtgacattttttttcttaataatgtagggtgttacttgttgggaacataattaggtgtactctcaagactcttaaatctcagctggtaaccctcatcagcac

SEQ ID NO: 40810 - DNA, 1411 bp, Zea Mays
aacgaagaaccgaatgcccagtcctgaatcacgtcttcacccgtgctcgtgcgctgcgcccatcccttccgcctccacgctccccacgtgcaccgtgcacagcaccacacagccaggtccccatggcggcggcggcggcggttgcgtctgcgacgacggcggaagacgaagcgcgcctgctgcgcctggaggagcaggcggagcacggcggcggcggcgcctgggaatacctctgcctcgcccgccggctccgcgcccgccgccccgctcacgtcctccgcgtcggcctcgccctcctcaacaacgcctccgcgcgctccggccttgcctcagaacagtggacgctctacgagcaggtggccacggcggccatggattgccagcgtctcgatgtggcaaaggcgaggactgtattggagtcctttcaaaacaatttcctgggagcacacgggttgcccggctagaagctcgtctgtttgaagcaaaaggtgaatgggctgaagctgaaagagcctacgcgctaatcctggaaaacaatccatttgaccagattgtccacaagaggaaaattgctatcgcaaaagcacaaggtggtatgtcgatagtgattgattatctcaataagtatctggaattgtttatggctgatcatgatgcttggagagaacttgctgaaacatacagttccttacaaatgtacaagcaagctgccttttgttatgaggagctaatattagcccaaccaactattccactatatcatatagcctacgctgaggttctgtacactatgggtggcttggaaaatctccaaacagctaagaagtattatgcatcaacaatccagttaactggaggcaagaatacaagagccctctttggtgtatgtctgtgtacttcggcaatcaatcagttgacgaaaggaaggaataaagaggaagaggactcggagctgcagagcttggctgcagaggtactgctgaagaattacaagcagcaggctccatcaaaggcgccccttatcagcagcatgttgaagaacatgaaactcagctgataccaaccagctccacacattcagagtggcctgatttgatagatagttaagttaaattgatgtggcttaatatatgcttgtttttttatatataaaaaaattgtggcaccaacattgtgcaaggcttaaaagtagatgctcccaaggccatgggttgtacaacacctgcttgcttacctcgaaatatgcatggcttcttcagtggatgttctactatatagatcaacaaacccccgattgtacttgagcacaaacaaaattttgaatcagtcgctggtgaagttgtacgtgttgattttcattggtacctgactattgtggtcttttagatgaacccttggcttggaacgtttt

SEQ ID NO: 40811 - DNA, 6214 bp, Zea Mays
aaggaccaccacacaattggtgtctcttgcttgattacaagttgcttgagaacaagaatggaggaagaagaaaagtgatccaagaacaagagctcaaagaacactagcaaaactctctctctagtcactatttgcttggagtggaaatggtacttggagaagctttgattctattgaatttgtgtcttgtattgattgcactagctcttgtatcgaatgtgaagtctgaaaacttggatgccttgaagtgtggtggttggggggtatttatagccccaaccaccaaagtggacgttggggaggctgtctgtcgatgggcgcaccagacactgttcggtgcgccagccacgtcactcaaccgttagggttcgaccgttggagctctgacaggtgggactaccggacagtctggtggtgcaccggacagtcactgttcactgtccggtgcgccttctggcgcctgctctgactctgcgcgaactatccgtgcactgtagctatgtcagccgtccgttgaactcgactgttgcgcttgcgaccgttgctccgcttggcacaccggacagtccagtgctacaccggacagtccggtgaattatagcggagtggctctctaaaaacccgaagctgagcagttcagagttgatctccctggtgcactagacactgttcggtggcacaccagatagtccggtgcgccagacgagggcagccttcggttggttatgctcctttctttttgaaccctattttggactttttattggtttgtgttgaaccttgggcacctgtagaacttataatttggagcaaactagttagtccaattatttgtgttgggcaattcaaccaccaaaatcatttaggaaaaggtttgaccctatttccctttcagtaccgccgccacgcagctctctagcatgtcaccgagggacgtctcccccactcttcatctacgcccaggatgcttgaccctgtctacctctcgacaaaccacattaagagggtggtaatctatacacaaccttagactatcatccttctttttcagaaataaggctggacatccctaaggcgaagtacttggacgaatgaatcccttgtccagcaattcttacaactatttcttcaattcgactaattcctctggtggcatccggtatggcctttttgatatgggtgctgttcctagctgcaattctatgccaaattctatatcttggtcgggaggcatttcagtaattcatcaggaaatacgtcgagatactcactagccacgagaatcctttccaagggtgattcaatcatggaaatggcacaagaacgtgtgtcaccttggctgggaaggtataagacaagctctccgcaggtgggggagtgtatttcaagggctcgggctgcgacatctagcaaaacctggtgctgtgtcatccaagtagttcccaagatgatgtacacattttctagcccaagaataaatagatcagttttgaatattttggttcccatctttataggtgcgtgttgaacaatttggttagatgcaattttgccccctggcgttgcgatcatgattgccccttttgtgtggaaaaatggtagttgtcacttgacactaaaccttggactgatgaagtaatgtgatgtgccagaatcaaataaaacaagagcaggatgattaaaaatggtaaaggtaccaatcatgactggtgctccttcgggaagttcagctaatgtggtgaagttcaatctaccctacctcacttgctcattctgtttcctccctgtctgattgcatttgagctggctttggctggttccgaggacaatccttggcgtagtggcctgtgttgccacaagtgaaacatctgttgccattgccctggcggtactactactgctgttgtgggggctggttgttggaattcctctgagctggagcttgaggatgattgggtgcttgctgctgtggtggcccaagtacccatcatccttgttgctattgtggtcccctactctggatgttggacaatatcctgaaacactgaggctgtgtagagggtcctgcgacaggtgttttcctcttcttctctgctctgtgggccataataccttcatcattttagtgagagaaaatatgaataaggacatactaaacataaaaagaatataaacaatcattccaaattattatactattcacctctttaattcataaacatgaataaacataaatagtaattatattacatttgtaccttcggcttgacagaaggtaaaagagcggaagtgacacaagagtgattacaagtcagcgtgaacagtatggtgttactgttcatctatttataggcataggacgcaacctggatgaaattacattcatgtccttgacattcattgttaaccataaggcaaactgtcgagaactagacaatctttcccccttaagtcggtttctcctttcaccatcgttaatgtgctgagccgaagctccttcagccacatcttcggagctagcttgtcctttgttcaggccgcaccttcataccatgcacaccttcatcttaaagccgaagcttcctgaaacagtttattatactggaaaacgtgttagttatgtttttgaggaccttcggaagaggaaggcccccaacagtagcccctcgcagtattaatttgtttttgcatttaacaaattcagactacgacatgaacgaaggcctttagccgaaggtccgaaaaaacaccttcccttcgctagaatagcgaaagtcaatgacatgtagggcccgcccagttgtaatacattgggcatataaataggaacccgcagtgataacatttgttgcgcctttcaattgcttgtgctattgtttcaagattgaaatttcttgctgtaagatttcacttgatttgtgggcttcgttatttacacaagtgctcgttagatgcctaaagagaagatgtctgaggagaagaaggttgtggaccctgctctagctgggttttacgaagctatggaaaagacacacagaaaagattacgaatgaaatattagttgggctgtctgaggattctgatgatagtgagaactttgatgtggaaagtgggaacgaagatgccgaagatcggccctggcggccaagtcatactatcttcggaaagtcgtccattaaacagagtcagattgatgccatgaaaggaagatatttccgagatatgtccattgtgagagctggaggggatagtgccgcccctgcacccgaggaagatgaagttgttgtttacaggagcttcatgaaggcaggtctttggtttccattgagaaaatttttggttgaagtgctgaagacctttgaaattttccttcatcagattacccctgaagccattattaggatgggggtttttgtttgggcggtgaggagcaagggctagatccaagcgcaaagtgcttctgtaacttgcatgagctactgtacgagacgaaggccactggcaaggagcaatatcacaacaattttggttgctatggcttcgttccttgttctgatgtaagttatccagttccaacatttcgaaaaaggtggcccgaggcctggatggaggaatggttctatgtaaagaataatctaattgaaagggaagacataaaggggattatctagcgccctacctggtcttgcttcggcatcagaaggccgactactgtacttgggaacgacatcgaagcctgccagaaggctttcaacaatgtttgcgcctttattggcataagagacctagttcaggagcacatagcctacagagtgtggcctcttgtgaatgactgggagatgccaaaggagactgctgccgtgtctagtcaaggtggtttggtttacttgaaatacaccttcagatatagagaccaatttgacgagccgaatgatgactggctgacatatgttgtggcgactggcgatgagttgcttggggcgtacacgagagccgaagatgatgccatgaccttagccttcggaggacgaggcaagaaaaggatgaacagagttttcgacgttatcgacttcgtgtacccggactacacttatccctcgcaaaagcagtgatagaaaagaaaaactaccgcttcggctatctctgttgtgccgaaaggcaaaaagattaaggttttaaagcattgacctaggtatattgaaacggccacggtgccgaagcttggtgaagggacatcttccatcgcggagccaggacagtctgctactgtcgaccgaagcgccaaagaatcggctgaagtgccaaaggttcctgcatccgaatcggcagaagcgccgaaacatactgccgaagccaaaggaaaggcagccgaagagccagaccgagaggaaatgacaggaccaccaaaaatcttaagtccgccaccggagctagaattgccgaaggtgtcaaaagctcctgcaataactccaaagaggaggaggatggcaagtgtgctggatgctgtcatggagtcaacaaggacattgactcctgcctctgcaaagaaggttgccgaagctgctacggctcgcgttgaagctaaagctgggccctcagtgcccactgaggcagtgcctgctggaactgagcagagaactgaacaagaatcttcagatgctggcttggctctggagaagaaagacgcgcccgaaaaagttaaatcttctactcccgaagcaccctcctaagatcttgactttattatacaacatgcttcgggtaaaaggttgtctgaagaagaaatcgcggaagccaaacactacgctcgggaattgaagtacccgaagggggcctagtgtacaatggcaccaacgaagatgattttctatactgtctcccgaacaacaaggaaatatctgtctgccgggagatggcaaaaaacatgggatttccgaagcttgaagttggcctctctgccatgtcaaaggatgacctcgcagacagccttgcgtacaacagtctgaagggctcaattcttagcaatgttttgagggcgcagaaaaatgctgaggatgaaagttgtcagatagtgcttagcaaccttcggtcggaggttatcagactgaggaacaaagctgcagaaaaagacaaaattctgctttccttagtggacagagtgaagaaagatgatgcaaaattcaatgctcgatctgaagtccataaagtcgaagttgagaaccttcaaaacaaacttgccgaagctaatgaaaattttgaacttgcaaaagtaaagcaagaaataagtgaatggtcgaatgctatgctggaaaagaatgttgaggagcttcgtgaatccaaggagagatgctttgagaaatccttggattgcgtaagaaaactaaaaaccagctttgccaaggtgggtgcgtattcttccaaagaaaagttcattcgaggtgaccccgagggaatcattgattggataggtgaagaagccgaagcttttgaagatatccttagtgatcatggtgatatttgtgccttcgccggtgcttggggggttgcagcaattctggagaaggctggttgtgaccatgttaaagctgtggctcagaccgaaaccgccttctccacagacgacacgaaggacccctcggccgaagccactttggtgggcgggaagttttattccgatgtctgggtgaacggtggccgagaaatgaccaacaagattataaagaaaaacgaaaaagaaactcatgatgctcaagaagaagctaagcgagccgaagaagctgccgagcgcgcaaggcgtataggtattatttttgaattttagcttcggtgtttgttttctagcttcggactaacgatttgtttactacagctgaactctcactgctacccgagccatacgacccccaggccgatcccgttatgaaagaggcgctggatgtgatgagtgttaccaataccatcgtcgacgaagtcatcgatagactgctgaatgaggccactgagaaaattctcaaagaagactaggcttttgatgtaatgatacaatgtaacatttgtgtatgaaacaattatcaaacatgtatattgatgtaatatatttctttgcgatgcatgaaatttacgcacataccaattttgagccttcggcgaaaaaacaccttcccttcttttcatgcttcgcaaataaaaaagcccttttatagcaaagctattg

SEQ ID NO: 40812 - DNA, 3429 bp, Zea Mays
cccaaaacccactccgcctcctccgtgtacggtgtaccccatggcgcccgccgcggccgtcatcggcgctggagattccgatcgtctcgcgcgcgaggtggcgcgggtgctggacgagtgccgcgcatcccacgccgtgcaaccgcgtaagctgcgggagctcgcggccctccgctcctcttcaggaggcggcggccgcctcttcatcgcagccttccacgtcgctgtcacgccgctcttcgccctcgcccgccgatccgctgaatctgaccgcgtcgcccgcttcatctctgccttcgcgtccgcttccgcatcatcggccgacgatggtgggaacgggttcctcgaggagttccttcggttcctcgtcaccgcgtccaaggccgcgcaccgtcccgcgcgattccgcgcatgccaaatcatctctgagattataatgcggctgccagatgatgctgaggtgagcgatgagatttgggatgaagtaattgatggcatgaaggtccgggttcaagataagaatgctgcaattcgcacttatgctgtgcgagcattgtcccgttttgcagttgaaggagaggatggtggcattgttgacctattcctcgagaccctagacaatgagccgaatgctgaggttcggaagacaatagttttttctcttccaccatcaaataatacactagagagcgtagttgaatcaatgcttgacattagtgaatcagttagacgagcagcatattctgtgcttgcaactaaatttcccctgcagactcttagcattaagcaaaggactactgtccttcacaggggcctatctgataggtctgcttcagtaaacaacgagtgcctgaagatgctgaaggatgagtggcttgttaagtactgtggaggggatgtgatttcccttctcagatttcttgatgtcgagacatatgaatcagttggagaatctgtaatggcagtgcttctaaaagatggtgctttgcgagtgcaagatgggcacagtattaggcagtacttcactgcaaatgcagaacgagattccaatattcaactcatggatgctgaggttgctctttactggaaaatcatgtgcaagcatttgcaagctgaagctcaggtcaaaggctcagaggctgcagcaactacaggtgcggaagcagcggtatatgcttctgaggctactgataaaaacgaccttctcgacagtgtccttcctagcacaattactgattatgttgatttggtaaaggcacacctttctgccggaccaaattatcacttcacatcaaggcaattattgctacttggtgaaatgcttgagttctctgatactatgaaccgaaagattgcaagttcttttctgcatgagcttctcgtcaggcctcttgaacatgaagttgatgatgatgggaaccagattgcaattggagacggtgtgagtcttggaggagacaaagactgggcgaaagcagtggcggagttggccaaaaaagtgcattcttctgttggtgaattcgaaatggtggtttccactgttgttgaagagctggctagaccttgcagggagagaacagctgacttcatgcagtggatgcactgtctcgccgtgacaggtcttctgcttcagaatacttcaaccttacggaatctccaggccacagcaattgagccttcagaactgcttcactctttgttgcttcccgcaaaacaaaatcatgttgatgtacaaagggctgctttaagatgcctttgtctccttggactgttagagaacagacctaatgcagagttggtgaagcagctacgcttatctttcatcaatgggcctgacttggttagtgccatagcatgcaaggccttgattgaccttgtaacttggcatgggccacaagaaatagatcgagccattggaattgaatcgccagatcctagctacgaaaaatctcagttcactcaagttgacctctctgatatgaatgatgatgatctaaacattggagttcttgatattttattttctggatttcataaagatcactgggaattcgatctagagggtgacaatcatgataatgtcccaaccattcttggtgaaggttttgcaaagattcttctcctcagtgggaattttgcaagtatacctgctgatttgcatactgttatcctcgctaaactcattaaattgtatttctcagaggaaactaaagagctcgaaagattgaaacaatgtatgtctgtcttctttcagcactatccagcactttcagataaacacaagagttgtatctgcaacgcatttgtacctgtcatgaaagccatgtggcctggtttatatggtaatgctgggggtagcactcatgttatttcaaagagacggaaacttgcggttcaagcttctcgtttcatggtgcaaatggtgcaaacccaattattttcaaccgaaagtatggaccaagcttcaaaaagttctgaaagtgcttcaggtttagcagatgcgtcaaacaattttgacatcagcgaggaagggcttgctatccgtatagcactagaggtagccagttgcccagataagaagaccgcagctgggaaagcatatgctttggccctgtgcaaggttgtggtccttctaagattccggcaatcagaacagaaggccatcaagtgcatgagaggccttgtgaatcatttggctgcttcagtggcttccgacaaggagctcgggaaggagctagctcaaatggctgcacggcttagatcgcttgatgcctgtccagacgaagaacttgcacaagatgacgcagatgccatattcaagaaactaggattcgatgatggcttcaagttggacaccaatcaagcagtgcctcctacaccagcaccacggtcagtccggcctccggctcctgccaggagaagagcgagacaggcaccgtcctctagcgatgacagtgacgaggaagcgggagaagctgacgtgcctgcaacatcggcaagcagggttccagccactcccagtatgactgctgctgcacgttctcagagagcaagcaagactgctgctctgagcaagatgtctgcaaaacctgctaccgcgtctgatgacagtgagctggacgggcagtctgacgtcacgagcgaggaggatgcatccgatgaggagtcgttatagccttataggttgctgttattgtctcgtgtaatcgtggactggagtttctgatgacgttgttgagcggaagaaccaagtaatctaactaaattaattacagcggtgacatattgtcactgcattatgtatttctttcgtgttactaagtatgatttaaagccttcatttgcgtttgagctgcagcaatctgcacagacggttttataagcagcaagtgattagttttaaataaaagtcctgacggtggtaaattt

SEQ ID NO: 40813 - DNA, 913 bp, Zea Mays
actagcaatttctccgtgttgaattttcaattgagaccgagtctacggactacgtctaccccggttccagtttccgcgttcctcgaactcgaagaaatgtgagcctggctgtgatttttcctccctcgctagtcatcttcaagcatcaggaccgaagccacacgacaccagccgtcctcgcgatctctcctccgtctcccattccccaccgcgcccttctccccgcgcctcctcactggaatcggaagcgactcgcggggccggtgcgcaggctgctggcagcgccatccgcggtggccggctaccatggaggatctaggcatcgaggcgaaggaggctgcggttcgcgaggtggcgaagctgctcccgttcccggagctcctctcctctatcgcctctatcaaatacgactaccttacgcggcagcagataaatgatgcacaactcagtacaatggtggcagaccaggtggagcaggcccatgctggcatcaatgctctagcattatctcagataacaataaacaaactacgtgagaacttcattgatatagacaagttgtgtcaggagtgtcaaactttaattgagaaccatgacaagatcaagcttcttagcaatacaagaaacaatttgaacacaactctaaaggatgtgggaggtatgatgtccatttctgttgaggctgctgctgcacatgactcattaagcaatgaccaggagttaattcacacttacgagcgactaatagctcttgatggtaagaggcgttttgctctagctgctgctgcatctcataaggaagaagttggaagattaagagaatactttgaggatgttgatcaaacatgggaaacatttgagaaaacattatggggccatatcactaactttttcaaactttcaaaagagaggt

SEQ ID NO: 40814 - DNA, 1709 bp, Zea Mays
cgcaagacttacaacatcaaagaggagcttagacggtgagagcagcagcttgcctcaaggaactagttatttgtgaccaattgtatttgtgaccaattgtatgaagctttggttgaatggaatcttgatgagaaaatctcaattgtgactttggacaattgtagtacagatgatgccattattcctgaacttgtgaagaagattgggaaaggtaaacttatgttagaaggtgagttgttacacatgcgttgttgtgcgcatattctaaacttgattgtgaaagatggtctacaagtgatacaacctgcgattgcaaaaatccgtggaagtgtttctttttggacaaccacacctaaaagagttcaaaaatttgaagaaattgctaagtattgcaaagtccccattgataacaagtttggtcttgattgcaaaactaggtggaattctacatataagatgcttagtgtagctttaccttatatggctgtttttaaccgagcagcacgtgtagagaagctatatgattgtgctccaagtaaggaagagtgggcctttgctagagaggtgattgataggctaaagatgtttgatgacattactgttttattttctggaaccaattatgtgactgccaatgtgcaacttctcaaaatttgtgaggctaagacaaaaatgaggcagtggggtacatgtgggatccatattatagaagagatgacaactagaatgattgagaattttgataagtactggaaggctattcaaggaccaatggccatagctactgtccttgatccccgttttaagattgattacctatatggattctttgagaccttgttaggccagtctagtgacttgtgtggtaaaagagttgatgaagtcaaagcctctctatgtgatttaatgagggagtatcaattggatggtgatgaggacaacagtgagtcagctgctccttcgcttgatagttctggtttttgtctactttgagtgctcgtgttgcaagtagaaggccaatgggtgcaagatttcgaactgagctagacaggtacttagatgatgagttggttccatatgacacagaaaacttcaagattctagattggtggaaggtggctggtactaggtatcctattttgagaaagatagcacgtgatatttttgccattccaattagcacagttgcctcagagtccgcttttagcacaagtggtcgtgttcttagcgagcactgcaaccgacttactccagagatcttggaggcgcttatgtgctcacaagattggatgtgacgcaagtatctagatgcatctaatgctgaccaacctgaaacattttggagttgccttcaagagatgcatgtgatatttttgagctgtcacacatgcgtatactctacatgtttaaatagacaaatactaatacttcttttactactttgtagaagcttttactctaagcaacaagactggaattggaagagaaggatgcccttaagctccaacagcttagaagtcttatatattcaaatattaagtattgtgtattgaaccattagatttgaaggcatgcttttgtccacagttttgtagaatgaatgctatgttttgtgtgatttgaaggcatgatattgcatttaatgttgaatattgttgaacctgtgataaaattatgttgggttcgatacatttgttatgttggtactt

SEQ ID NO: 40815 - DNA, 363 bp, Zea Mays
cccctgggtgacgtcaaccggaacctgtagtcgtgcttgcgactattgcgtcgaattagtcagggtaagttgattcgttttcctgtcaactagatctataaatagattaatagaattattagtcgcgataattgttattaatttagtatacacatattgtgatgttcgatttagataaataggtaaatcaagtaattaagatacacagtttaaagagttaataaaaagctaggaataaaaatagatattctagtgttattatgtcaatggatgtagtcgatgccctgttgtgatatccatggtgcttaatgtttggttttaagtgtttcatccttttagtgtagattatctatattatactcg

SEQ ID NO: 40816 - DNA, 2636 bp, Zea Mays
ttggtgaactcaatcaaccgtcgaggcgcttcacgttccttccttccagcttccacacgcaaaggcaaagctcagtactctacctgcttcgcatctcagcagcagtgctgtcagatgactggacttatttgatgctcttgccgttctcgacttggggcgcgagccgatggatctcctccggatgaaacttctcctgccctccttcatcagctgccttcttctgatgcaggcagcactatgtgatggcgccgccgccaccaccaccaccaccggcgaaaacggaacggcaaactggacatgtgtgtgcgcagctcatcctctcggtgaaccagactccaacagcagcttgctgtccaattgctcttcctcctgccattgccaccgagatgagaacggcggcggcggcggcggcggcgcaggctcgtggaactgcacgtgtgcctctggtgatgagggccttcagaaggaagagcatgctgagctacgtgacgggagctgtttcacttcctgcaactgcacgtcgggtactggaacttcagaggaagggagaaagcgtgtctcaagcaaaacagtcatagctacgctcctggtctgcgtggttctcaccaccaccgctttcctcgtcaccaccgtatactacttccgccgcaaggacgccctctctccgcgatcgcagatatactccttcgatagatacactactagctggagcagcaggtcgaacctcgtcagcagtcgatcgtctccgcttccccagatgaaacccaaaccaaagcttggtggtctgaaagagtttctgtgcagctgcaatcttgtcatctgtgggggagagagcggcgcattccccggtgtcgtcgcccggttctcgtacgcagagctggagcaagcgaccgggagattctcggacgaccaccttatcggagtcggtgggtcaagcaaggtgtaccgcggccagctcggcgatggcagagtcgttgccgtgaagaagcttaggccgctaggaggcacggacgaagacttggagttcctgtcagagatcgagctgctgtcgaggctgaaccactgccacgtggtgccgttgctggggtactgctcggagagccagggccggcagctggagcggctgctggtgttcgagtgcatggccaacggcaacctgagggactgcctagacctgaagcgagggaggaagcccatggactggcagacgcgggtgagcgtcgcgctcggcgccgcgagggggctggagtacctgcacgaggcggcggcgccgcgcatcctccaccgcgacatcaagtccaccaacatcctcctggacgacaagttcagagccaagatcactgacctcggcatggccaagtgcctgatgaacgacggcgtgaccagctgctcgagctccccggcgcggatgctgggcacgttcggctacttcgcaccggagtacgccatcgtgggcaaggcgtcgctcaagtccgacgtcttcagcttcggcgtcgttgtgctggagctcatcaccggccggcagcccatccacaagtcgtcgtcgacgagggccgacgagagcctcgtactctgggcgacgtcgcggctgcgggacagcgggctggtggtcacggagctgccggacccgacgctgcagggcaagttcccggcggaggagatgcagatcatggcgcacctggcgcgggagtgcctgcagtgggaccccgaggccaggcccaccatgacggaggtcgtgcacatcctcgccaccatcgcaccactccagcacggcgccaagcgtcggaaccttcccatcgccaccgccttcaacctcacgccatcgccgcacgtcgggcggtgtgacccggagcctaaagacgacgacatcgagaggcagatgcagcagcaggagtgctcgccgacgacggctgtccagtggcaacaacaacaagcgcgctgcacccacgcgccaacgggccgcgcgtcgtggcccggcgacagggggaacgttgtgagcagaggcgcggcggtgtcgggcgagctggtgaacgggacggtgctgatgaacccccacgggcggggcagctggcggcggccgccgccgcttggcgacgaggaggcagtggacgtggatctgacggagccccggatggaggcgttcacgcagccggcggcgtttcagcctttcaggtgacggaaggattaggatcaggtggtggtggttctgattggtgcggcggcggcgggtgctgctgtacatcttcttgttcgtgcctccacgatccacaccaggatcatctgcttctgcatctgcgttcatgaatgtacagtacaggcaaatacatctagattggcaacgggaaaagaaaagaaaggcatcgagatcgttatgggatataggacctagattgaacacgagatcaatgcatgaatctgaatccacggcgcgcgtcattggacacatcactgttgtacacaagcaaacagacaatgagtgttcacagaagcaaaaaatataagaccgagttcaatgcatgaatctcaaaagcagctcttttcagctttgtgcttcgtggtcttcgggtcgttagaatatacgtgtccataacgggcccaactttttgatttttggcccttattacaagatttttaca

SEQ ID NO: 40817 - DNA, 4375 bp, Zea Mays
cgatgacatgccgtgtataacctcaatttctgttcgcgtataatcgtcggatatctccctctcctcaaaatactcacaacccagagatctcacacccacgaccaccacgagggaaaaaaaacaacaacagaggagagagactagagagagagagagagagagaggagcgttggagtttggaagcagttcctgcgacctgcggccggagccccggggcatattcctcgcccggagatcccgtacccgaccctcccctgataaacagacgcaagcgtcagggagggagggagggacagagagaggtagagagggccggggcgaagggggcaaagatgcgttcttgaggagcctgtgcaggggaggtccaatccagaggccgccattccttttcttttccccccaacctctgcaggctcttcagatccagcaatccggcttgtttcttttgctggcacatcaaagcagtcagctgtccgcaaaccttctcctggaagctctcttaaggatctgtgccttgtttccaaacaagggtcaatagctgaagtagaatctgctttggccttgttgaaaaaaagtggtgggaacattgatggtagaaatgcatttggtcttagtgccctccaccttgcaacatggagaaatcatctacccattgtgaggcgactcctagatgctggcgctgatccagatgcaagggatggagaatctggctggagtagcctgcatagagcacttcattttggtcacctatgtattgctggtgttcttttacagtttggtgcttccctcgctttggaggacactaagggccgtacacctgttgaccttatctcctgtccagtatcacaggccaatggagattttccagatgcagttgcaacggaagtcttcagttggggaagtgggacaaattatcagctgggaactggcaacgcccacatacaaaaactaccatgcaaagtagaagctttgcatggatcatatatcaaaacagttgctgcatcaaagtttcacagtgtagcagttagttctaatggtgaactatacacatggggatttggtcgaggtggtcgtcttggtcatccagatattcacagtggacagacaactgctgtgattacccctcgccaggtgacagtaggattaggccgtaaacgagttaatgctgtggctgcagccaaacatcatactgtgattgctacagagctgggggaattgtttacctggggatcaaatagagagggtcagcttgggtacccttctgttgatacccaaccaacaccaaggcgtgttggttcgctcaagcaaaggataatttcagtagctgctgcaaacaagcactccgctgcagttgctgatactggcgaagtattcacctggggttgcaataaggagggccaactaggatatggcacttcaaactcagcatcaaactgtatcccaagaatggtggagtacttgaaaggaaaagtacttagaggtgtttctgcagcaaagtatcatacaatagtgttaggagctgatggagaggtgttcacttggggccatcgccttgtcaccccacggcgtgtcgtagtagctcgatgccttaagaagggtggaaatacaaatctgaagtttcatcgtatggaacgacttcaagtgatttcagtggctgctggaacaacgcacaatactgctttaacagctgatggtgctcttttctactgggtttcatcagatcctgatctaaaatgccagcagatattttcaatgtgtggaaggaatattgtgaacatctcggctggaaagtactggaccgctgtggctacatcaactggtgatgttttcatgtgggatgcaaagaaacgtaaggacgaaacgccaattttcactcgggtgcatggtgttaagcgagcaacatttgtttgtgttggtgaaacgcacatgcttgtgctctcaagtatataccatcctgagtatccacccaagcctaaaagccaaggcttaaaatccatgttagaatggaacggtggaacagaagagctgggtgaagatatcctgtttgatgatgttcagcccaacagtggtttatcaggaagcagtggtgaaatgagcaaaggtgtgcctagcttgaaaagcctctgtgagaaggttgcagttgagtatttattggagccaaaaaactcaatacagcttcttgaaattgctgattccttggaagctaaggagctcaagaagcattgtgaggatttagctattcgcaacctcgattacattttcacagtgggagcttcttcaattatgaatgcttcttctgaaattcttgtgaacttagagaaattgctagatgagaaatcctcagagccttggagtcagcaccgtcttcccacaatgacagctacctatcctgctgtcattgacagtgatgtagaggaagatgaagcaagagaattccccaagacccgtaaatgtgggaaatctgcatcaaggccatctgcgatgtctagtgatgacagcttccttcagaaagactgcaccgctgaacaagccgtctctaagcagatcagagcacttcgcaagaagctgcaacagattgagattctcgaggctaaacaacttgcaggtcatcagcttgacagtcagcaggtagcgaagctcgagtctagggctgcccttgaaggtgaacttgctgaacttggcattccctcagagatatactcaacttcctctgcttgtccagcagaaggtaggacaaacagaaaacctgaggtttctaagaaacagaagagaaagaacaagcagtcaacacagaccccgtcagtgaaaaatgagcctgggcaacaaatccccattacggaacttcaagttctacaagtcaatgtctctgctgaaaaggaggcgtatgccgctgatccaattaaacctatggaggctgccgcgttcagcaacacaaaggacaccgcttctccaccggagaagaaaccttcccaaccaactccatcaaagaagaagaacagaaaaggcggcctgtcgctgttcctgagcggcgctctcgacgacaccccaaaaccaagcctccctgcccccgctgtgcctgccacaccgaagcccgaaggacccgcctggggcggcgtgaagataaccaagggacccgcttcgcttcgagacatccagaccgagcagagcagaacaaacgagcccgcgtcggccaaggcgaaggaccgccacgagaactcgccggacagcgccggccgcgcgacaaggctctcctcgttcatccccgacgcgcgttccagcccagtagccgtcgtggcgcctgctcgcgcagcggcggcgccttcttccgaaggtgacaggagcacgccgccgtggtcgtcctctgccacctcgcccaacgtgtcgcagccttcgctcagggacatacaacagatgcagcagaggcaccatggcggcgtctcccacagcccgaaaacccagacatcgggcttctgtataccgccccacggcggagcgccagaggccgctggcggtggcggcgtgaaggacaacgtgcccaaccggtggttcaggccggagaccgacgccccgtcctccatccgctccatccagatcgaggagcaggctatgaaggacttcaggcgcttctacagcagcgtgaggatcgtcaagccgcaggtctagtagcactggcggcggcggcggtggcggccttggcggagagtgactgatggcacaacaaccccctttaggctcaccctcccatttgacactggctcgttgtacattcgagtgtacagttggttctgttcgccataggttccttgagctgaacaataaacaaacaccctttgctgctgttgctgctgctttcgcagtgagtggtctcgtttagttgtaacagaagattgtacaggccatgtgagatcaccaccccccggctttggcttaacagtttaacttgagccaatgcttctttttttttttttggcgccaaaatgtctttggttgttccaagcagaggtcataaaaactgtgtggtgcgtctgcacccaggtacccaacatttttagcttcgatcggacatgatctcactttggggctgtagcctagtgcttctatatgctctcgatctgcttgactggtcggtgtgagaatttggtagatagcggcatacttgtgctgttgtgcaatagtagcactatgcatggtcatctgctaagatcgatggcagctcgtaattaatggagctagtctgcctggttcagtagcttgtcgcctatggctatcggtaataaggccggttgcaatatttttttgtttggtgagcactagctagccatgaggcgatcaaatgtcatgtgctcccatgaaccctgatgacatgtatcttcac

SEQ ID NO: 40818 - DNA, 2720 bp, Zea Mays
atcaaatataaatagcatcgtctcactttttttcccaactagtgtgtgatctgtgtgtgagtgtgagattggttcaaattcctatttgaattttagcctttttttactatttaaacatgggagcaggctacccattagtaggtggtaccgtggtagtcagcggtcagcacagccttccctaactatctcgtcaatcgtcagctgcactgcaatctgtggtcgcaacgcaacgtcccccgtcgtggccgcgtgctatcttcctcctccctccctccttgccgcacgcgtcaaaccttgcaaagagagttcggtcgacggcgccagccggcgatggcagcgccgcgccaccgccagggccacattgcgcagtgccttggcaggatcctcgcctgccgcggcagcgccaccgccgccgtcgctgccggcccaggcggccgacggctcaccggcgcggagttcgtcgacggcgtgcggagcctggccgctggcctcgccgaccgcggggtgcgccctggccacgtcgtcgccgccgtcgccctcaacagcgtcgagtacgtgcagctgttcctcgccgtcacctacgccggagccatcatcgcccctctcaactaccgctggagcttcgaggaggcggcgcaggcggtggagctcgtgcggccgacggcgttcgccttcgacggcgcgttcagctcctgggcgcttcggctgatggagggcgacaggttcccatccatcggcctctacctcctcctgggcgatccttgcaggaccggccgcgctgctgcagctgtacccattaccgacgtcacggggagcctcggcggagctacggcagcggcggcgatggagcccgtgtcggctccagacgacattgctctaatatgcttcacatccggaaccacggggcggcccaagggcgtagcgataagccacacgtccttgatcatccagtccctcgccaagatcgccattgtcggctacggcgaggacgatgtttacctgcacacagcgcctctgtgccacatcggaggggtctcgtcgtgcatggcagtcctgatggccggaggctgccacgtcctggcgccgaagttcgacgccaggtcggcgttcgccgccatccaggagcacggagtgacctgcttcatcaccgtccccgcgatcatggctgacctgctgtcctacgctcggaaagaggagatggcgccgggctgcgggaggacgacggtgaccaagattctgaacggcggcggcgggctgccgctccacctcgtaaacgcagcctcgcaatcctttcctcgggctgctattttctcagcttacgtagctctgtaatctgcaacagggatgaccgaggcctgctcgtctctgacgttcatggccctcaccacgccaaagcttcaagagccggagccggagccggagacccaaccgtgcggccaccacggaggtgtctgcgtcggcaaaccggcgccgcacgttgagatacggatcggcatggatgacgacggcaccaccgccggttcttcgccgaccgggaacgtcttgaccagaggcttgcacaccatggttggctactgggcaaacggcaaggcggactcatccgagtgtgacaggaacggatggcttgacaccggagacactgggtgggtggacgaggagggtaatctgtggctcttgggaaggcacaagggccgcatcaagaccggaggcgaaaatgtttacccggaagaggttgaatcggtgctgtcccagcaccccggagtggcgagagctgtggtggtcggcgtgccggatagccgtctcggggagagagtcgttgcgtgtgtcagcgtcaaggacggctggaactgggtggatgcgagagctgagcacgagcaccgaggcggaggcgaggaggtgtctcctcagatcctccatggccactgcaggacgaaagaactgagcagatttaaggtgccaaggtcttattaccagtggaggcagccatttccggtgaccacgacggggaagatcagaagggaggagctgaagagggaactcctggcagcaattcgactgcccagcaacctgtagctttttgaggcgatgatctgtttttggaccaaatcttggttcagttcgactccgattgaagtcttctgttttttttggtctgtaggtgcttttagcttttacctggttggagtttaagatgcgaaaaaaagagcgtttgattattggaaacctgtaacatccatgacttttcttcaccttgacaaaagaagtcgagtcaatggcaagtcccatgaaattcagagcatccgattcttggagaactgaaaattgttgacgccttttcagagcgccaatcactcaagaagaaccggcggcggtgctctctggtcagccgcggacggtccgcggcctggggctggatggtccgcgacctggtgtgaggcggcggtgctccctggtcagacgcggacggtccgcggcacaggaccggacggtccgcgacctggtgcagcaggagcccgggttccctgcctgacggctggacggtccgcgcgtgcgcaggggcggcagaggatcgctggcggcgcctgaatctcgctcccgggagggaccccgtcggggaggagagatcctaggagttgtctaagctcgggccggccgacctagactcccctaatcgacgtagagtcgaggagaggcagagaatttgaggattggaatactaa

SEQ ID NO: 40819 - DNA, 514 bp, Zea Mays
agacatgtttcattccttgcaactaactcaagaagcacaagaaattgtgtttggagatagtgacaaaagtaagggattcgatgagtacatgaacttggtcctcgaagacgctgaggaaatcaacgtcaagaaaaacactaggaaatcacttggccggatactcctcaaaggtgacaatataactttgatgatgaacagtggcaagtgaagattcttatggcaggaacgatgtttggtgctcgcttcgattatctgtgacacaatgtactccatccatccgtccagacttaaatgatgtatcatgtcattgtggtttagtgagagttgtataactacctgaggaaactcacgtgttactatatgctaagatgctgtgacggtgagctattcagtgctcacttgtgttccaaagattagcccgacttgtgtgtgccatgctgacatcttttctggtttcatactcagctttacgtaaagctttgctctgctcacgcttgccttttggaagctggga

SEQ ID NO: 40820 - DNA, 3085 bp, Zea Mays
gcaaaagagagcgtcgcaaaaatctcccgcacgggtgtactagcattttaacgccgcagctcatcgtctctctctccccgcccgccgcctatattcctttgaccgaccgccgctgcgcccactcctgttcgttcgttaagccctctgaccggccgaaaccccggcggcctcctggaggttccggggttgagttcggtctgagctgctgctgccggcggaggcattcccttgtcgtttcttggagtgtcctggtggtggtgaccggtggatatgaacactgtgtgtgaagtttgtggggatattggttacagacaacttctgctttgttgcagagactgcaagcgttgtgctgtgcaccaatactgtttggacaaagttgtctacgaggcatcattaataaaatggttctgttatgaatgcctacaaaggcgtggtgaagttactcgcatcagttctctagagaagttgtcaagtgaaagaccactaagtcaggtccattctcgttctccagtacagcagctaattaccaagagtgtagagtcagtaagggatgcagggccttggagagatcggaaaaatgaatcaattgcgactaaatatccatctctcaacagaacatatccttcaattaagaagcacactaaaaagaagccgattgtgaaaccaatgggtaactgcacaaatagaaaagtgcgaatggctaaagttaccacccatacaagtgccgaagcgtcacgttcttgtgaaaccattgggacagaatcatctaagagcaaccatgggaagaaccagcaggtggaccatgcaaaccctgtcgcattgaacactgagcagtctttccctttgattgtgaatagcttgggtacattgggagataatcaccagtatcacctcttagaaacaacagaagggttggcttgcaaattcaagaaagttccacaatcactcgcagcaccattgaaaagattagagaagagagacaatgtggttttgggatcaaataatttagggtcatcttgtttcacagctgaccttggaagctcggttcttggaaaaagtggagacaaatcgaatagaatgaaggatattggtgcaaacttgtcttccaaacacaatgatcatggcaatcaggcaaatcaacacactttagttggctcgaagaacatggaaggcaagtctgtaaaggctaaacatactgtggttgatgcacataaaaacacgtcttggacagtggactcactgataaacgtcaaggacaagtctgaagtatatggtgatagtaatagggatatcttaaatgatgtcacagtccagctggatcatagggctagcaatgagttgctgccgagaagcacggccaccaatataccacagctagccactctggaaaacgatgttgtggacacagtcatgccatattcacccaatggtggttgtgaggaatcattttcctgccctggcataaaaaacaccccaagtgttcgagaaagaagtgtagatcccattaatatttcaagtgattctcatgataccatagaagcatccgaaagcagtgaaagattcatggaatgccaaaaagctagcttgtgtcgtcgcaggaaaactgtgaagatggctatggtgtcctcatcatctgaggagtcaggagaagacactatctctgaaaacgtatctttggggtatgttttggcatgtagaagttctctatctaaagcacaaaagaagagagtaacgaagcttattcaggaaattcaacctgaattcacagtttttatatcaataatgcggatgagcaatgtgaaactcccagggaattaccaaggaatatgcaattgcacatttcccagataaaaccacaaatgtcactcttgagacgcctggcaagagcaagaagtggcatcccaaattctacaaaagagatgaaagtagaaagaacttgcttatgggacaatggctagactttgtccgtgacaatcatgtgcaggagggagatatctgcctctttttaccgacaaaagatgagataagacacacatttatggtctatattcttcatgaaacaacccattctagatgtggggctggctttcaaagggttggcccatgccttggtggtgcatccagtgcaaagatggcttcagaagttcatattgaggatgaaccaaccgctggagaacatgtttcgtcggacagtgatatgccagaaaattctcatgaacctctggagagcggagactcggatgatccatttgaacctccatactttgtaccatgcaggagtcctctatctaaatcccaaaagagaatggttgagcagcgagtgcgagctatccgatctgaagttcccatttgtgtggcagtaatgaagaacaataacgttggcattgctcagcgttggatgctagaattatgttcacgatatgcttcggtatatctcccaactaaagggcaaaacatattgctccagtgcaaggggaagacgtgggaagccaaaatgatgtttcataatggcagaaggtggtttcttaatggaggttggcccgattttgctcgtggcaatggcctgcgcgtcggtgacatgtgtctattcgaactgaagaagaaaaagagtacgcttaccatggcagtccatatcattcgcaaggagcagttttaggttgggctggcatgtagttaatccatggttgtggctgatctctggatggattagagaccaatctcaatctgtaacgtttgttggtaggctggtagctatctgctgacaacatgttttagcatgatgtatatataacatcctttattatgccgaaatgtcgccttgcttttacttatgtgtacatgtagcacagttttgtttgcttttcaaaatttgattgtacggcagtaggttgaacatgcagcttgagtttcagccgcactaggtcgcctctccacagaaaacagaaagtgaagatggagaatatgcaatgtgtttggaagcaaaactaatttaggtaaacaaatgtaatgaaattctcaaagcggtttgcacaatcctctgtttcttatcttgatcttctctttgagtttgtcagctgcaataaaa

SEQ ID NO: 40821 - DNA, 3208 bp, Zea Mays
ctcccctctgctcccgcggcccgcgcagcgcacagcatacagcgcaccgagctgcggccaccgcagcgaacagcaaagcacctccgactccaagtcgcgagagccttctcattcgtcttcctcctcttccacccatcctgcctgctcacttccgttccgtagtccagctagatccccgggcaaccgatccaccgagaagcttgtggttgtggcggcggcggagagggaagcgggaggtcggaggtaggcgcggatgccactgttgtgccggcgccggcggggccggtgatgcccgcttgagctgggccaccgtgcgtcggaggtggacgagggagcgaggcggcgccagaccgaggttgcgtcgggctcgatttctactgggctgctgtctgctgagtttacggaagtgtttggccctagaagagttgaagataaggagtggagctaggtttaaactctggtgacttggttgttgcgtgcaacgaatcaactatgctgagtttttctgtagagtaacagaaattggatcaattcaagtagaggtctaggaggagatatgaggtactacttgcgtcaggtccagcgtttggttggagatatggaaggaggagctctcttgtttatagacgacctcaactccaagtgacaaagcgaacagctgttgaacgtttcccttctatttctgtttctttttgccggatttggagatggaggtgaattcctctggcgaggaaactgtggtaaaggtaagaaagccgtacacaataacgaagcagcgggagcggtggacagaggctgaacacaaacggttccttgaagccttgaaactttatggcagagcatggcagcgcatagaagagcatgttgggacaaagacagccgtgcagatcagaagtcacgctcaaaagttcttcactaagttggaaaaggaagctatgaacaatggtacttctccggggcaagcccatgacattgacatacctccaccacggcctaaaagaaagccaaacagtccatatcctcgaaaaagttgtctcagctccgagacacaaaccaaagaacttccaaatgacaagtcaacaaaaccaaatatgcccttgagcaatgggcatgtaaaaatggtaggcgatgcatctcttcagaattttcaaaggaaggagttgtctgaaaaaggaagtcgctcggaagttcttaatctcttccgtgatgccccatctgcatcattttcttcagttaacaaaagctcttcaaatcatggggcacccaggaggaccgaggcaagtaaaacagaaagccgagatatgtccatcatggaaaataattcttttaaccccaacacccaagaggatgtaaaggtgatcagtgatcaggaaatggaaaggcttaatggtatccagatcagatctaaatgtgaacattctcatgaggggtatttggacatctcaacgcaacaaatgaagctaatgccaaagtctgtggagacaacatatgtggatgaacaaactgcaagagcttcacacaccctagcagagagcgacgggacagctagcattccagtgactgtacctgaaggaactcatcctgatcaaacaagtgatcaagtgggaatcaatggaagcatgaacccatgcatccatccaatggtttctgctgacccaaaatttggtagtagtgccacaccacagactttccctcataattatgcggcctttgctccaatgatgcagtgcaactgtaaccaagatacgtacaggtcattcaccaacatgtcatccaccttctccagcatgcttgtttccacgttgttgtcaaaccctgccatccatgcagccgccaggctcgcagcatcatactggccagcagctgaaggtaacactcctattgatccgaatcaagaaaaccctgcagatggcgtccaaggaaggaacataggctctcctccaagcatggtttctattgtagcagctacagttgctgcagcatctgcatggtgggcaacacaaggtcttctccctttcttcgctccacccgtggcttttccatttgtaccagctcctagtgctgcctttcccacagttgatgttccacgaccttcagagaaagacagagattgcccagctgaaaatgcacagattgaatgccaagaagctcgaaaacaggtacagttcgaaggtttaagaattgctgcttcttcagagtctgatgggagtggaaaaggcgaggtgtctctccatacggagttaaagctatctcctgcccagaatgctgatgccacacctaccacaggagctggcacaaatgatgcattcaggaataagaaaaagcaggatcgctcttcatgcggttctaacacaccttcaagtagtgatgtagatgcgggcaatgttcctgaggaggacaatgctaatgagaaggcgaagcaagcctcctgcagcaactcttcagctggtgacactaaccaccgcagatttagaagcaatggaagcacaagtgattcatggaaggaagtttccgaagagggtcgtctggctttcgatgcgctgttcagtagggaaaagcttccgcaaagcttttctcccccacaagcagtagactcgaaggaggttgccaaggaggaggaagatgaagtgaccacagtggcagttgacctcaacaagaatgccacaagcattgatcatgatgacctcgacacaatggatgagcccagggcttcctttcccaatgaattgtcgcacctgaagctgaaatcgcgccgtacaggcttcaaaccatacaagagatgttctgtggaagcgaaggaaaaccgggtgccggctagcgacatggttggtaccaagaggattcgtcttgatagcgaagcatccacataattgatttcttcaaagttatatttacatctaagctactataggacttcagatcttgcaatgcagtgcttcattaaaactcaatctgttgtgtgctgtattttaatgcttgtcaagcagcccgctagactgctttaaaaccttatctcgtagagtctgatttaagcatcatgcaactatcaaacttttttttttggtcaaaatgtattttccttatgttttatatttttggaaaggaaaataattgaaatattatttattttgaaggctcatgcaaaggtttatttgatcaaggtgtaggataggctgagcgagagggtgaacattatgactaatatagg

SEQ ID NO: 40822 - DNA, 941 bp, Zea Mays
atatcaaaccgacaaattggttggagcaaatgttgtttagcttttgtgaggaaagaggcggcggcggcggcggtgattgtttagcaggagaagatccccttctgcactcatcgaacggccgccgccacctagatcagttgggaggtttaagtggctagctggtgatccatttccttcaagtggtttgtccattgccatggtgcaaccaatcactgaagagcagaaagggcattcagtattaagcttaattggaggccgataactgctagatgttatgcagagtctggttttataaggaagacaagtgaggagagaatttcgaatcgttagaacaaacactcaagcctggaccaatcctggcagcaactgaaaagagggaaacggaaagtgggtagacgaatccgatgggctgtgcatctgtatggagtcctctgagtttggctactatctgttctacataaggcgcagaaagttggggcttaaaaatgacggcgagcgcgcacgcgatcccgcgggaagggaataaggaaaagcgatgttgacaaagctggatgggaatcctgcgcttttttggaggcgaagatgagaaggaatatatcgcctgtgtcgacctcgccggcctgcttcttctgttccgtggcttggttgtgctcccgctggatcgtgccagccgccagcaggatgatgagcacgtgtgaaccctggcgtgggtatgttgttgtttgctctgggagtgttttgctcagtagtcgttctttgtttatttgtacaaactcgtccatttgtgtcggttgcagaaatacgaaaacacttcaaatggtacgaattggaatttggaaagtacagagtatagaccgctggataagctgtttttattgtttggcgtaatgaactggtgatccatatgttcgccttaaaaaaaaagacctgatggttcaagt

SEQ ID NO: 40823 - DNA, 2086 bp, Zea Mays
ccaaccgaacggacgtgacacgcacgcacggacgcacggcacgcggacacggcgcgcgcgcggcgactccgggctggggtctccctcttcccttccctcagatccaactccgtttctccattccctccctagcccagccagggaaccagtctcagtgaatcccgcgcccggatcaatctcgcccaaggaagcagctcttcacgacttgcttccagatccatccatccatccatccatccatccgaggttgggccgtgggggtgtcggtgcggtgggaaatggggaaggggatcagcggcgacgcccgcctcgccgcggcgccttacgaccagtgggtgctgctgagccccgccgggggctcgccgcgcccgcccgcgcgctacaagcatgctgcccaagtggttcaagacaagctgtacgttgtcggagggagtcgcaacggccgttctctatcggacgtccaggtttttgattttaagacatcctcttggtcagcgttaagccctgctagaggctcaaaacatcccaaccatgaaaatgatgccacaggtggatcgttcccagcattagcaggccacagtatggtcaagtggaaaaactatctcctggccgtagctgggagcacaaggtcgtcatcatcattaaataaggtttcagctcgagatggccaatcagtatccatacttggttctcgattactgatgtttggtggagaggataacaagagaaggctactgaatgatcttcatatacttgacttggagacaatgatgtgggaagaagtcaaatcagagaaaggtggtccagctcctaggtatgatcattcggctgctgtttacgctgaccagtatcttctgatctttggtggctcttctcactctacatgcttcaatgatctttacctacttgacttgcaaactctggagtggtctcaacctgatgcccaaggagcacacataactcctagaagtggtcatgctggtgctatgattgatgaaaattggtacattgttggcggtggagataatgcaagtggttccactgatacagttgtaattaatgcttccaagtttgtgtggtcagtggtcactagcgtctcagctagagatcctctagcttgtgagggtctcaccctttgctcaaccacagttgatggcgaaaaagttctaattgcctttggcggttacaatgggaaatacagcaacgagatctttgttttgaaatccaagccaagaaatttagtccaacctcgtcttcttcaatcagcagctgcagccgccgccgccgcttctgtgacagctgcctatgctgtaattactgccacagatgagaaaaccagagatattgttgctacagatgattttgatatcaagagagctcaacctgcaagtaattccaaaaagtttgttgctgaaattgatgtacttaatggagagaatggtaaactagcggctagattggcagaggttcgcgatgaaaactcaaaactaaaggataaattagacatgacaaacttgtcatatggtgaattagcaaaggaacttaaatcagttcaagatcaactagcagcagagggttcaagatgccagaagcttgagtcccaaattgctgctgcacggaagagactggaatctgctggttctttggagaatgaactagaagtattgcatcaacatatatctcaggtggaggaaaccattgcaactactcagagaagaaaatctgggggtgtttggaagtgggtggcgggtagtacagaggtctctgacgatgaatagtaagtcctatctgcagcatgcttggatggaacaatgctttatgtactcaggggttccgctacagttgtagctttatattttctatttcgcacgacctttttggtcagaaacttgtttaaatagagttttaactcatgaattgtctagagcacagtagcacactgcatcatgctgttgctaagttgtactctgtttcaaattgtaagtcgttttagtttttttcctaagtcaaatatgtctaactttggccaagtttatagaattagcatctacaatatcaaatatgcactatcaaaatatatttcata

SEQ ID NO: 40824 - DNA, 3823 bp, Zea Mays
gttagccaaatctattgacggtgctatgcagctttcgcatagatttggttttcaacatttggattttggacatactgttattttgtttgtgttgagtcttgtcgacatgctgattgattgcatcttagacgattgtggattgcccgtcacctctgctgatgaacatggcaacagaaaagatatgaattttaatggcaaggggagatcatttgacaggggagatgaacaccgtgaacatctaaggagaaagaatatacttatgtctattgaagttgttgagaaggatagacctgaaaatttcaattatctacttcggaaacttcaccttattggtgctcttaaaaagaagaacgctttgtctccatgcaatctgctagatagcttgattgtgaatatacagaatgccataagcacgggctaccaattagacaggaaaaggcttctgggagttcctgttagcatacagccttgcagttcagctatttacagtatattcgtaactggaaagggatcttgttggattccttttgatatgtttatggagaatgcaatggatgggagacatcttcatactatatcatcagttgaatatctgacagaactatccaaaacacttcaagtgttgaatcgggcaacttggcaagagacctttcaggctttatggatttcggctttgcggctagtacaggcccagatgcttcggaaggaccatttcctcatcttgattcacggatgtgcatgttgttggctattatccccttgtccattgcaactattgtgaaggaagaggcgggcaatctgaaaggggaaacaacctctgttataagaggacaattagtgtcttcacttcagattctgagacaattttttggtcttctttcaccacctccagcaactgtgcacttggcaaatgctgcagctagaaaagcagcagttgttctgtctaacctgaaaactgggagtgagaacatgtacagttctttcaaagacagttcctctattaaagcagttggaaatatgctacatcttatcgtggaagcctgtatcgcaaggaacttaatagatgcatctgcttatttctggcctggctatgtggttccacttaaagaatcctctccagttcaggcatctccatggtcatctttagtagaagggtctccacttatagaacttaaggatgcccttatggtcacacctgcttcgagtgtagaagagttggagaaattgtactcttttgcagtaagtgggtcaccggaggaaaagttggcagcttcgaagattttgtgtggtgcatcacttcttcgtggttggaacattcaggaacatgttgttcaaatggtgcttaagttgttatcgacattcctccctttggattctggatcagaagggcgatatgtacagcatatgcctatgctgcatgctcttgtatcaggaatttcttctattgacactgttcatattctctcactgtatggtctggtgccagaagtagcatctatgttaatgcctctctgtgagaattttggatctttacctccatctgatcataggagttgtaaacttgaagaggcttctgtgtactcagtattctcatgcgctttcctgtccctgcttcgcttgtggaaatttcatagaccacccattgagagtgctttatcaaggcgtggagtctctgtttggtcagagctccgtttggattttctcttgttattacgtaatagtcattcttctttgaaaaatctgtctaatgttactcaatcaagcatatttgaattagatccaccatttcaaaaaccattgtatattgattcatttccaaagctaagggcatggtacttccagaatcaagcttgcatagcttctacactttctagtgcttgcagcaggacaactgtcctccatgtggcaaacatgatactgaaaatcatatgccataataaagtgccaaaaggtggtgtcctgtctgtaaatcctcagtcaacagcaaattccactacgagtagttcacctgcaggcgtacaggaagatatgtgccagtggccaacacttccagcatgggaaattcttgaagctgttccttttgtgcttgaggctatgctaacttcatgcgctcatggaagactttcatcccgtgacttggttacaggtttaagagatcttgcagatttcttgcctgcttcacttgctgctattgtcagctacttctctgcagaagtcactagtggcatatggaagccagttatgttgaatggaatggactggccaagtccagctgcaactcttccagtagttgaatcggagataaaagaagctcttgcatttgctggtgttcatatcaatatctgtccacgtccacgttctgcgatgccaatgcttccattgccaatagcagcgctaatgagtttgtcaataacagtcaagatggaggaattcagccacctacacggcatcatttcccaaggaattgaaatttgtgcgacatctagttcatggcccactatgcaaattataggcgcattgtggtcccagaaggcacggcggtggcatgattttatcatcctgacttgttcgcagtcccccttcactcgagataacaccgcggtggcacaactgatcaggagctgcttctcgtctttcctggggcctttggttgatgggcgctcctgctccgtagcaaacagaggagttgcgaatctgctggggcagagttctgatgaaaaagcacacaggcttgctgtagctccagggtttctctacatgagatcctgccggttatttccaaacaacacctttgtttgtgaagagatcttggaggtggtcattgagagagcccatgcgctagcaaatgaccgcagttctgacagacctgcccgtttgaggtcagagtgtttgccgctatcagctgcgtcatccttggtagagcagatagcatcacttgcagcgactatgctttgccacgctggcggggtgaatctgattcgtctcctctacgagcagatcatgcccaccctgctgctttcaggtggagaagctaagctcggttccggtggtatggtatgcagcataatcgaaggatacacgctagcgtacgttctcctcttctcgggcgcaaccgtctggggagtcggagaaacgtcgccagcttacactttaatatacacatccaaaagacaacgggtcctcgacaggcacctggagttcatggccagggtgatggagggtaacattgtgctgggctgtggagatgccacgtggaggtcctacgttctgtgtttcgtcaacttgctggtcagcttcgtgcccgcgtgggtccctgaagtgaagctaaatacgctgcagaaactggcatctgggcttcggagatggcacgagggcgatcttgccctctctttgcttgagctagggggagccaagaccgtgacttcagtagttgaatctcttctgcggtgagctggtgctcaactgactgtatagttttctacgacaggttggtccatatacacattataacatgttaatgatctaaaaattcagtcatcagaaagatgaacagtacagttctaccgaagcttgattattcgtactgtcagtcagctaaagagatgtccagcagtttctatagtagttacatgatagtgtgtaattgatggaaatgtcatttactggcagtcgtccatttggagtgtataaaaatcatggaataattggaagaatgcagtattagaaaacagcattgctgggagccaggcgtctgttccatcggatgacccgtgcggatgtgccgttagccttgttgcttccatttggtaattcttgcgccgcc

SEQ ID NO: 40825 - DNA, 736 bp, Zea Mays
acaaaaagatctaaaatacagaaaaaaaaagttgtccggaacctacgaggaaggcttaggcgttttcctcgttcgctcgccgcggcgtcggacgatgcctctggggctgacgctggggtcgctggggcgggctatgcggcagaagcggccgtcctcgctcgacatcctctcctccaagcgggcgccgcgggactactacaagggcaagaactgcaagcccaccgggttccacacgcgcaaaggcggatacgtggttgtcgatgaaaagctgccaaggttcgcagttcctgacaatgactcatttcaagctgaagccgttcgtgtcgcagtgcaccagggacctcgcagcgtcgacgacatcctcggcctctctaacttcagcacagactactgagagcaggagctgattgtcatcggactgctctagccatttgcaggaagcgagcgaccaagccttgcagtattgcggctacgttttcctggagagtgcccgtgttcagaggattagtcattagtgtcggcgtcttagcagctacaggtggtcatttcagatgtatttttctctctctctctctttatcttgtgtaagggcaaacatgtggcgtaaggccctgtcggccctgtctgttttcttccagaattatataatctaacttatagattacataagcatctaatgatctgcttatggattatcataatctaggtatctagattatataatccactgataata

SEQ ID NO: 40826 - DNA, 2658 bp, Zea Mays
aagatgttaagtagagtatcttgcacttgcatatactgtacctagtcttggagtggcgctgttgtaggctgccattgtaaacagaaacagtaaactctgcctagtctaggatggtacgagcactgttccgtgtgacaggttgcactgtttggtctttggtgttgcggtgggaggctgaactgtacacgccacgccattaaaggcgggcataaatgtagcagcagcgtagcgtcgagcgaaccgtcccgtcgccaatcataaatgcacccgccgtttgcgatgcgacggacgacgacgcggccggaggcgaggcccgcgaccgaggcgaagcgcaggaccgccggcagtcgatcgaaaggcgctctcaaaagctctgcgctgcgctggcagctttgagctttctcgggccggagaaaagccgaaacaaacaaacggactggccgagtcgaggagagagagagggtgagagggagaagagaaggcggagagagaaagcgagctgaggagcgcaggcgctgtcgctggcgaggacatgctcgcggcagcgcggtatgggctcaaaccataggcgtgtcaggaacggtggagagcggcgaccactactcgtcttcgtctcggtcctcgcgcgctcctgggctgcctcttggtgctagaaaccctcgcgtcgcgggtgcttggttgcgactgcaagcgccaagctgctgtgctgtgccgtgggtggcggcggcgggagtggaagtggaaccgcagccggtgctgtgatggacgcgcagcagcagctggatttggtcatgcgtcaccagagcatggccaccgtctgcgagagcgaggacgcgctggggtcgtcggagtcggatcccgcgaggccggcgcgcccgcgcggcaagaggagccgcgccgccgaggtgcacaacctctccgagaagaggaggaggagcaggatcaacgagaagatgaaggcgctgcagaccctcatacccaactcgagcaagacggacaaggcttccatgcttgatgatgccattgagtacctgaagcatcttcagctccagatgttgtctatgaggaatggcctctatctgcccccaggaaacctgtctggagcacccgagactctggcacccttagaaatgtgcgcagcacttaaccaaagtggtgccaaggcatcaaattccggcgttgtcgttctacctggaaacaaaattcctgtagctcgtcttctacttgatccaccaaaccatgatcagcggcatgaaaacccgcttgtattacaaagtgttcctagtagttcgaccgctgtagagcctcggttccttcaacagccagcacagcccaacctccaatcctttcagctggctgtacctcccgaggtaaaccgtaatccttttgtgatgtctagaatctgtaacccaaatagcgagtaacacctctctctctcttttcttttactggtttttgttgctgctcgtctttatagatgatcttcgacgaggcggacatgatgctaaagcatcgcctagcttcaggtcgagaaaccacatctctaccagtaggacatgaggccaagcctggtaggcaggaagcatgcatggtaaattctgatatttctaacagaggttcactcgggaaagaagtatttatgccctacttgcatagcttgcagagcggcgatacggagggaggtctgagggcaggatcaaactaactacacggtggttcaccctgcaagattttccccatcgggatggacagaggtgcctagctaggagtcgctagtcgatctgaaatgttagaagctagatcaggttgcagtctagtaaaccatcttgtaaaacagagagctacccatctatatgcacgcatgaaatgaatctcggccacactgacctggcggccttgttccagcggcagatgcccaatcctacctctgtaatagcaatcaggaacagcctcgaccgaacggcagcggtccgccattggcgcgcacccaacgccagcgccactccgcgcagccactggatggcgtcgcgccgtcacccaactgcctcaccgctctcagccgtcagtgacaattcaaacacgcaagccagattcgctgatcaagaaagggcggcttccgtcgcagtcgacctcttgtcgctgatgatggatcagttggtccaatatgatgcccatcttgccattcaatgcaacctatagagaggagcctaaaagttgtgttcatgagtcatgactacttgctcgagacgaggatggaatagtcccatgcgaatgcctgagatggcaatgggtacccgatacccgatgggtatttactctattagggtatgtatgtgggctaaatattctacccatgagtctattattgggtaaaaatcgtcacccaatgggtaaatgggtattagaacgttccgccttcacccatacccgttaacccgtgggtataaaatacccaatataaacttatccgaagcatgaacttggactttagtcatccaacttttttactatttaacaacaatttaatgaccatgtaatggaacatgtaatgtgctatttagtactatcatagttttactactttatccaattatctttggtgtgttgaatggatggttaaatgatactagaaaaatttataatggtatttatatggat

SEQ ID NO: 40827 - DNA, 2164 bp, Zea Mays
ccccatccgtcggccgcctgcgccccctagcgttgggcacgatcggttagacccctccccttctcagtcgttgacccccctggcccgcctgttagcgctggctcgcccgcgcgctcgcgctcatatctaatcctagtcgttcatttgtgatcgtgcggtcgagatcacctgatatccgttcatttggaaaacttattaaaagaacccttagctttttaggaaataacccgcagtcctgtgctcttgcacgcaggcccctgaattcttgtagagaagccccaagcctttatttttatcacagaaataggtctaatttagtattttgaattccaaaacttgtttatttcatatattttgcatatgaactccaaattgggtggttcaacttgcaaaaggttcataaaattattctttatttctttaaattattatatttcactttctgcatatatgaattttatgactagacaataggttcatttgaagtaatggattatttattaaaaggaaaataaaaaggaaaaccctaatgaatagttaaatggttaactttgtgaaattaatctcatgtaatgtatgatcccatctctggaataactttaattaggtaattaattaattcattaagatgaatgaagttaagtaatataatccactaagataggcagtgcttagagaaccacaaacctctacgtgtattagcctaccctagaacctaggtttcacttttgtgtttatacttttctattgaacttgtgttcacttggttgcacatgtttggtgtactgtttatttatcatttcccaaatgtgttgaatgaatgattgctttgcgtagacaacgagcagtccgaggttttcgagtgtgttgcaggagatttacctgagcagcaacctagtgaaggcaagtgtcctttgacccattatgtcctatttactttataattcactgccccacattacataattaaacctaaggataaactagctttgtatttaccttatccttgattacattttgggttattatggttagcttcatgctattgctttactttaatcaacgaacatgatgagaacatttatgatacgatgatgttatcttgtttatgatgataaacttatgatactttaggggactcaggttgtttcctgagtacctctccgtaaggacctgctcattgagagaccacccaggataaaggtacaaccatgagggtggaatgggacgcccttagctgattaattagatgaacttaggggtgtagttggctttgccgtagggccgtcaatgggagacggggcatagtgcttgctctgctaagggtgggtgtcgaggttcattcattttggttttgttagtcacccaccttagggaggagtactgtgtttgtacgactggtgaaacctaacgagcaactgcacaccaggggaatctttgtaaaggatacgtagtgaatccctagccattcacctcgatagtgaagatcgggtctgtacaacccaggctgggaagggatcatgactcgtaggtaaagtgtgcaacctctatagagtgttagaaactgatatatcagtcgtgctcacggttaagagcagccttgtgatcctctttgattaggataactttggatacttttatgatgatggtaaatggtgatgattataactctgatttcgagtatttcctattggagggagtacttttgggtaataacttgggtttattactaaaacttggcttttctactagtaataaataccggaccaactaaaatcaactgctttaagcttaaccccacatacaactagtccactttaaccgaacgggacatttgctgagtacgttgatgtgtactcactcttgctttaaaaaccacccaaccctaggttgtccacattgccatcagtgctcaagtgaagatgaaggcaacatggaggactttcaggagtttcaagacttcgatgagttctagtcatgattagtggcaaacccccagtcagatgcctgtgaaggccttatctttctacgtttcgtatccacactttgattatgataatgactttgttaagttaatgactctatggatgtcttggacatcttgatgtaataaagtactatttccgctattattttgagcaatgtgtgatgatgtccaactatg

SEQ ID NO: 40828 - DNA, 1309 bp, Zea Mays
ccacgaaccaaacatggagaaaaacgccgaactttacagtcaagtagcgcactttggcttgtgggcagctgtgcccctatcacggtatccatacactcccggcatcccttccatccgcgacccgccgcgtccgtacaccggaccatgctctccacacccgccgcaggctggcgcttccgccggggaggtctgccctggaggcttcatacgtgctcctgcctggcgtcgccgctgtcttccagcggcggcgagcctgaaaaggcgaggcctttgctcgcggagaggtaccgggacggtgtcgtcaagagatatatttcggatggcagttctaagctgcaacttcgtttggagaagcatgaatctccagtgaacggtgtggaagatgagaatgcagattctttgatcccacaggctattttggactttgtgcttccagctgggtttccaggctgtaggtgttgggtcctttacaggaacttctgcagctgcatctgctgctgctatcagatgggtatcaaaggatggcattggggcctttggacgtcttctcattggtggacgctttggagcacttttcgatgatgacccaaagaagtggaggatgtatgcagatttcattggaagtgctggaagcatatttgagcttagcactacattatatccaggttactttctcccacttgcatcattagggaaccttgcaaaggccatagcaagaggatttaaagatccttcatttcgcgttatccaaaatcactttgcagaatctggaaatcttggagaggttgctgcaaaggaggaagtatgggaagtaggagctcagcttttaggcctttcaatcggtgtactcattatggtatatatgtacagttcattatgttttatatgttgtttatatctaaccgcctttttgtatggcaaccttattgatcagttataatatcgcactgatggagacagatgccatcatttttatatccatttacagttgctgtttttattctaggataagacaggtgtaaagtcatcatacttaactcttgttttaacttggctgagtgttcgtcttctacatctttggttgcgctatcagtccatatcagttctcaagttccgcacaataaacctaaaacgtggccggattcttgtgaaatcacatgttgcacaacatactgttcctggttatgttgcttgcaatgaggaagaaaacattttaacatgggaaagatacttgcgtccacaagtttctttcggtgtgcccatggaaagaatgcttggtggtgacaaatccagtgacatgcaaaaaaac

SEQ ID NO: 40829 - DNA, 261 bp, Zea Mays
aaaattattttttattcagagatgcggaccattcatacggagtactgctaccaaaaaaggcacaaggaactgggaaaaaaaatcacacagagatcaatcaccctagaggcttggatcgcagcctagctagcattgatgaagaaggcaaggcaaagcccagaggaagccgtctcgtctgccggtttgttgccgcgtcgccgtcgctgcgtcgttgcagcggccgccccatcaaatgcgtctcagcacttcagcagagtgcca

SEQ ID NO: 40830 - DNA, 1815 bp, Zea Mays
ccacgggccacctagcatcccgctcccacggtccccgcatccccaattcccagcggaaaacccccagccccctagcctcctagcaccttctcctgtccttctaaccctagccgcccaagcccaccagccgccgctagctgctgccgttctccactctccacggaccatggctccacggccagccgccaaccaccaggccacggccgagcagggcgccaagcacctaggccggccgagcggtggctgccagcaagacgaagatctacatggtgcttgagctcgtcaacggcggcgagctgctggacaggattgcggccagtgagggaaagctcccggagcaggagctccccaggtgctaattccttatgccgaatgcctgcaggttctgcagaacagagggtacgacggctgaaatacacacaatttagttgaatttaagttatgcctagtgtgctatggccactagtttgaatttaagttagatttaaaggttacacacaatttactagttttattatctgaatggttgaattggtctcgtactactgtacataatgacagctgaaatacatcatgtctctaccactttagcctttcgttttttatacactaatactgatctacatggactgcaatagtattcacaccacagtgaatgttgagcgtttattcagtaacactaatataggcaagaggtatatgtatttcataggcaaaagtaacactgaagacataggcaagaagtataggcaacaataacactgatatacttagagggaaaagggtatatgtatttctagcccttttataacagtcatttctagcagttttagcaaatgactggttcagtgtgtatttatatagcagtttcagttttatagcagttttagttctagcacttttagcaaatgtatatatatatatatatatatttcatagcagtttcatagcccagccgccgcggcctccggctgggcacgaggcccagttgcccgacaggccgtccagggcgtgcctgagaatacagatttgtcttcgaaaatcatctcacctgttttcttttttgcagattgtactttacttggagctttatgcaagctgtgtggagtacatcacgccgctaagagacagcatgtcatcagtgtttccctcagcacatttagcttttgccagcatcgacctgaatgcacacactgtctttgcgatcacaacggccttggcaattctccaaacagtctgtctcaggaacctcagtctcctctcgtatctttctgctgacggtgtgatggcgacaattgcagtcatcctctgcctgttctgggttgcctgttctgggctctgatactcccatgtgcgtgctacctctccatcaagaagggcgcagtgccattgtgggagatcatcctgtgcatagtcatcataatgatcggcgtcgtatgtgcatgcgtgggatcatacacctcagtcagccagatgattagcagcaccaaatagcgcacgctagctgatatttatctagtgtctacggatccttccaaatgctttgacagagttggaactggcagcttttcgtagctaagtttatttgttccttctttatggcagaaatttggtaagagagagtttagttgtgggaggacaggcggcgaaggagtaatctgagtttagtgtggtgcttttgtgactgatcatctctggagcttttgtgaatgatctagctagctatctgtaaatgatctagttgtgaatgatattataattgtgatgcttttgtgaatatataattgtggtgcttttgtatttatgtgatggatc

SEQ ID NO: 40831 - DNA, 2731 bp, Zea Mays
tcagacttaccaccaagtggacgcagcagctttaaccccccaaagcctcgacgccgcgagcacagctccgccgccaccgcccccttctcatccgcggtctcctccgcctgctgcatctctatcgatctagcgggactggctccttcccgtgctgggtccttcgtcaatcgtcagcgcgcaagatcggcacttgtgtacatctgagcagtttccggtgccctaattcaggcgcgggcgttgttgggttttcgataattttgggggttcacctgaaccctcatgacccaggtgaagcccgcccctgggggaaggatgctgaccgtgctgcgggtgcacctcccgtcggagatcccgatcgtcggctgtgagatcacgccgtatgtgctcctgcggcgccccgacggaggcgtcttcaccgacgacgtgtctgagaccgcgcccgtggatgggtacttcatgcgctacaagtggtaccgcatacaaagtgatcgtagagctgctatctgcagtgtacacccaacagaacaagcaacacttcagtgcatagggtgtctgaagtcaaaaatacctgttgctaagagctaccattgttcttctaagtgcttctccgatgcttggcaacaccacaaggttttgcatgaccgtgctataagtgctttaaatgaaaacggaaccgaagatgatgagttgtttggcagatttggtagcggcagttcgagctcaggggttattagtgctgcgttgtctggttcaacatcaaacctttcactgagctcaggtgttaataatggacctacacctgtgtatccaacaggcactgagaagagttctggtgaaacttggtttgaagtgggatggtcacgaacatatacggcaactactgatgatattggacatgtgctaagatttgaatgtatagttgtggatgtggaaacacgggggactgtgagagctcctacttcagtcatgacatcccgtgtaatcccagcaccgaccccgacaccacgccgcttgatccctgttaatgcagctgatgcaatggtccacttcgatttagatagccggacttcttcttttgggacatttactgtgctgtcctacaatattcttgctgatacatatgcaacaagtgatacatacagctattgtccaacttgggcacttacatgggcttatagaaggcaaaatttgttgcgtgaaattattggttaccatgctgatattatctgccttcaggaggtacaaagtaatcactttgaagattttttttcaccggagcttgataaacatgggtaccaacctctatataagaaaaggacgacagaggtgtacagcggaagtcctcaagcaattgatggttgcgctactttctttcgtcgggacagattttcgcatgtcaaaaaatatgaggataatattgcgctaattgcagttttagaagctaaatttagtaaccatggaactgaaaaccctagtaaaaggcaacttctctgtgtggctaatacacatataaatatccaccatgaccttaaagatgtgaagctatggcagattcataccctcctaaaagggttggaaaaaatagctgttagtgcagacattccaatgttggtctgtggagattttaattcaactcctggaagtacgtcacatgggcttcttgcaaggggcaaagttgatcatttgcatccagatctagcaatagatcctcttggaattttgcgcccactaagcaagctgacacaccagcttcctctggtcagtgcatactcatcattcgtgagtatggctggtgttggctatgatttggatcaccagcgaaggaggatggaccctgggacaaatgagccattgttcacaaattgcacaagggattttaccggtaccctagattacatattttacacagcggattcattgactgtagagtcattattggagctgttggatgaggatagcttgagaaaagacacggctcttccttctcctgaatggtcatcggatcatatagcgctcctagcagaattccggtgcaagcttagagttagacgatgatactttaggaggagctgtaggggagggattcttgacaatcgcatgagatgatgagaatgtaccctggcgaaggcaggaacgagaagcctaagggaaagaggcttgttatgttcctcacccttttacatttccgcctcgatgttctctagtggcactagttggaatgcgacttccaatagaagatatattatcaatgcaaagagaaatgatttaatagattcgtgtgccgtttttagttttccatcctcacattctcgcccccctcccccccccccccccccccctcttcaatgtgagttcattgtccacatttttgtttcctaccatgaatgtgctctagttcttacaaactaaaaatggccccttccatagtgtatgtatgtctcttgagcagggatcagctttggcgtagtttactgtgttgaagatgcttagttgaaaagtgatgtcgggttatctatgatggatattgaacgaatacctggtgactagagagagcttcacattggggaagctatactgaatgaaaactgtgaattttgatgtctctcttgcagtggtttctgaagcacccatctcaatctattgttatatatatatatttttattcctgaacttgttatacaaagtaatttgtttcacatggcaataacatgttggaactggtttggaagag

SEQ ID NO: 40832 - DNA, 912 bp, Zea Mays
aacggcaccttccatttcaaccagtactccatctatccagtagtacacaaacacaacacattacatacatcccacgctctctgccgcacaggccacacacgccccgctccgcccgtctacccttcacccaagaaccgcccgccgcgccgcgccgctcccatggagacgccgacgccgcgggtgaagcccgggttcaacggcgtcggcgtgggcatggggtcgtccgtgaacggcagcagccgccgcgccggctactacatgggcccggccggcgcagtggccgtggcgggcggcggcagggcggcagcagcagcgccggtagacgggtgcagcgtggcgctgcgcgtgtttgtgctggcggcgacgctggtttccgcagtggtgatgggcgtggaccggcagacgagcaccatccgaatcaccgtcaccgacgcgctgccgccgctggagctacttcgtggtggcgaacgccatggtgtgcctgttctcggcggcggcgctggcggcctgccggagccgcgccgccatggtgcccgtgatggtgggcgacctgctggcgctggccctgctctactcggccgtgggagccgccgcggagttcggcatcctgggcgagcgcggcaactcgcacgtccgctggcctaaggtctgcaacgtctacggccgcttctgcgagcgcgccatggcggccgtcatcgtctccctcatcgccgcattcgccaacctcgtcctcctcatgctcaacatcctcaccatccacaagagctcttcctactactaagctagctactatagtatagagaaaagaaccatatacaatgtgagctagctactcatatatagctgttgctgtttgcaattgcatgcatggggattaactaaagatcgaccccaacttgttgaaagagtcca

SEQ ID NO: 40833 - DNA, 6518 bp, Zea Mays
atgtggacgtgcccagatgaaattccagcggtagatgccaaccttgtgtccggcgaccggcgtgctccggttgccggggctgggtgggcaacacacaaatctagtgcctggcacctggcagcaacggcggagagacgatgcgcgccaggcgtggcttggcgttcagcgtcggccccaaccgcggccgaccctcgtgcgccggggctacgaccgttcggggccctccctgcctccacgcggaagctcttcttcctccctcaagacgcgaaccccgttgcctctcgggtcatcttcgccacaccgtcctgcccggaccgccgtggcgctctgcctcgatctaccaaatccatggctcggcacgaggatgcggacgcagaacaatcacttccatccgccagcgcgttgtctcgccgtcggatcgcgggatgggagatacgaaaccaaccagagttgcggactgtcgtggcacaaagtgtcttactgggaattcttgacggaacacttatatttttacaagctgagaggacttcatggtttcttccttactatatctgcgatatccgatatgttagttcacaagatgctgacatactaaaggcactgtatttatggccagttctgttcagtaatatcttcctttacagtttaacttgattcggcaagaactctcgtgagaacacaatctacttatttcattattatcttctgctgttctattttttttaaaaaacttgaactgagaacaaaccctatacatttgcattatgtgcaatgggagaaacacaaatgttaacttatattttgctcctcatccctagcaatgtactccctccgtcccagaatagtagtcattctaactcttgatttttatgtttatattcaaatagatgataataaatctagacacatatataaaacatatacatcacatattctatgcatctattaattacctaaaacgaattttaatttgagacagagggagtatatgccaccatctttacctgaattggctatgtgaaaaaagctcatttttcttgaccaaaataaaacaaatgcaaaagggagttattgccataaaattaaccctaactccttcagcatttgttcgtgataaatgcatgccaacaacctgagcatgtctttttttcttaggcttctattcgttgccactacataaaatgcatgctctacaatctgaatagaccttatgatgcagcttgatcttgtgcacaatctcttgaggcatttggacattacatgttcatgctgcaagtcaaattgtaaaaacacacacacaaaattacttctataacctgcaaaatgtatcaaaaccatcataattcataccctgtgagtctatttttttggtcctgaggaagaaaactggagttcatgtgctgatacatttctaacattttctgcagattgctcacttttacggttaaaccctaccagctctagcaatgtgaactgaaatgtatctacctctaaaaaatgataaatttccacgaacagaacaatcaaattttggcattactggaattttcaataggtacctaactacctacacgattgacatatattgcatttatttataactatttgttgaggcaactctacttaacatgtcaaatcagggattcatgcatcacatatattgcatattgaacattacatgtgcaaatagttcaaataacagcacaaaaaacgtgaaaaggtatatatgtattgggatttaagacacctttgtatattctgccatatcaaataacttagaacagtttaatgatttcctaaaagcccagtgaagtagcatgagcattacagtaactcacaatttcccaaaaaaagagacagaagtggagtatgatgaaaagaaactgaggataagaccgttcaagaaggcagtcacaggatgacaacatctgtgaatgtctattctctggtaacttttaaggcagttagcatattccagattggcattgtcacattctaggctgttttctgctaatgcatgcaatgtacacctcacaagcatttttggcacttccaacccaacaagttagtaattaattagtatcttggccttctgtatttactatttttttgaaaaaacatttgtctgtttcttaacttttggtgctggcaggagaggtacccaaaaatattgcatggttgcccctgctcataactcttactccgttttacccatatttttccagaatttgcaccgttgcccccttttttgaaacaaatccttcgtttgctgctattccgttataagcacataacggtgttaactcagcccataaaaagacgttcttactcttgcatcattgtccctcttattatcatctgtttgcaaatttgccctcacttttatataaaactttagagtataagtataacataaatccgaccataaatttggaaatcaattatttcaaatacccggaatttaatgaaaacaaattaaatctaacaactaaaagaaaatagaatgtgaactagaagtggaaaagagttcttaagcatttgaggttcccttgtagttaaatatgtaactgtactatcctatgaatatcttcaacaatttgttgctggatcacacgaactattataccattatgcattcaacttctatcagtaactcatgagtcatgaggtatttttttattgatggtaaatggggaaaaatacaaatacttctcctagatactgctgcaactaaaaatgcagaaaaaacattgcatccaagtgtttgaagagattgccagctagattagaatctgtcatcagatcgcttgagatagttagcatttgaaagtgaaacaaatggaaggcctattagaaaaactgagacaaacaaaatttaattcaccacaagagcttctttatcttttttgttgttgtcctgatcgtgaaagataaccttttcaaactgctattttaggtaccagtggcacatacatcatgagaatgaagagttgaaccaagatgagaagtggtagtgtgctggtaaaaacttgtgcaacctcttacttttaagaaacgaaagtatactacattccacgaaaagtaaggctaaccttagagtgctctccagcctaagaaaataacgtactggaaacttatatttgccttgagtttataaagtactaatcaatatcatcaattttttacttcttcctacagagttgcaacacaaacatatacctgggcaaactatggcttcatttttttagttatcaatacaatggaaataagaatacacagaaatccaggatagtgacaaaaaaaagagagtcaatgcatgcatcagaatttttgagaaacactttccaaattgtgttttacgggggatagaacacaaacacaactcttttgaggagataaaaaaggcaagcagaaaaggaaggcagcaataaactctcacacctatctttgctggaattttgtcaggatcctcccctcttttttttggaagaaggcaggagcgttgccttgaacaattaaggaggagcgttcctcccctcttgagctgtatccaatatatatctctctcccgcacatcttccctggataccgtgctcctcttgcactcccccaaaacgcagctccctcagccaatcttccccagagcgcggctaggcacaggcatatgacttttcactccatagaatcgagtagggcccagatctgattgattccctgatggtctggtagtactgggttacctgctatggggagaagagctcaacaaagtgcagtaattccccattcgatccaaatggactggccttgcttcaaaggcatctgaagtatggacccctctgaacttccggagctgtcccgtactgctatgttgatctgctgcaaggtgtgtggaggacctgaagaggtggacaagaggttcctgatctgtgaccactatctttgcctgtacaagtactaccacattagttgcctgactaccgagcagattgcaagtgatgtgcagatgggcagccagcgctgggctatcatctctactgcctcagtcctccaagaagaaaggtgcccaaggggcattgggactgcgaaccctgcaaggagcggagggagaaggagaagaggatactgatgctccacaggaaggattacgatgaagacatcctgaagagtggcgagttccatggaccgaacttgctgcttaaggccgcgaaaaaggtgaagcgcgatgaggaggtgaaggtggctaagactaagagcaccagaaagtaagaggcatggagattgtgagcgagcggattttgtgttctctgccatgatcagctagcgccaagtttctgccctgggaggctcagctctgcccagctgaatgggacgggcggctgagggccgtagaaacctgtgctttctgaactgaatggttagagaacatgaattcgctagaattgctccagtctatttctttacaatcgtttctttcaacccggcagggtcatacttgacaaacttgccagcgcctgaacttgagaaggttgtgatcacccgtgatgcttttaaaccccgtgatgcttttaatggtttatgaaactggatcttggtagacttaattacccgtgatgcttttaatggtttatggaactgaatcttggtagaattaaagtatctgttgctgtgttgagaaatgttatggtttctagttcgttcttgcaggtgcaaatttgcgttcacctttggaaattagcccatgcaattctgcctacatgatcccctccccctcattttttggttagtgcctgaacggtaaggcgttgctattctataatgcagtgtacaagcatggtactaaacccccgtttgaaacccctagagctgagttaactaacaattagctggtgtattagatgatggtttttgaaattttagcagttaactattagttctagatgttgcaaacaaaacctgattttcgcaccaaacatctatgtttgttcaacacaacatatgctgtttaggtttagggtttcttggatgaggatgatcaaaacacaaggatggtatacctgattgcatggatgagtagtcccaaaaccctcgatcgccttcctcttctcagcatccaatcttcccatgggcctagaggggttccagcttctgatttttgagggtgctagcaaagagaaagaaagtgaatgagaaggcagaggcacaaattgcaatacagtggagcgaatttttcatctggtgttatcccaacttcgcacccattaccttagttaaaaaaaattgacccataatttagagctgatttggtgactagggaattgaaagagatccataggatttctatttaatttttctttcctatttaaaattgaatagaagggattcctcctctctatggattcctccaattccagaatttcaatcacgaggcatggacctatttatttgtagaaaactggagggccgaagcccctacagatattatttagaaacttaacaaaaagtgaaaacagttcaaaccaagtagaagaaagcttacaaatagaggagggagtagcagcgactagctaattgatgtattatactatatccgttctctaatatttgtcacccgttagtttatttttgaactaaatatgacaaataaaaaaagaacggagggagtataatgcaacaatctgaatgacgataaaatggttagtgtaaggatctaacagcatacaattttccatcattcatctgtgaatacacataactagtcgtcgccaaggtcttaatggtatattagtttctgcttctttggtcttcttaatgaactggttcagagtagataaagaaatcttttatacttcattgagaagtctataaaaaggatagatcattactctgcttaatgttcaaatatataatgtattatgggtatacatatgtagggtgtttgtttaggattataatatgttcggattatataatctagaaaattttgaactagtgttatactgttatataatctgggagattttagaaaagccaaaaggtttgacccgttgaccgagttttgctgagcgagcgtcctcaacatggactgcagctgctctaagaattactcaacgaatcatcaacgaatatcgtttgcaacatcattagcaagcggagacaccggcgcggcactcttccccgtcgaagcatgatggctcacaggccaaaccaaaataagcatcaactgcacctgcacgacgacaaagactgctaatgccacacacactcgctgatcttacccattagtaaagtaagcaggggttgtcatgaggcaatctggtgcagaagccttcaacagtcacctaggtagctagcctagccagccaccgtttggtgcgctgggtatgtcctacaggcgaacaacaggagttaaattgagatggtcacccgaaattccgggcgtcaaatgtgttttgggatccaaggacagaccatgaacagcagtgcaagggaccccgtccttcgtcagacgtgaaattaaa

SEQ ID NO: 40834 - DNA, 593 bp, Zea Mays
ctcctctcttctttgggccgcacaccagaataaatcctgccttctttccatccctggaaaacacgcccgctattcacgttccagctgtttaaaacaagcaatttttcaaacataaaattggatgcagtgtaacagagcagtagcaaaaggctggaactggaagcacgcccacatcaagtatattcctttttcctagaaggatggaagcatccacacacacacccgttcagccatccatccccaggaagaaagatttggttttgacggaagattgcatgatcacataaggtaataatggcgaaaaaataaataaaaaaccaatcagcgaaagatcgagccaccttgtgatcagtggaaaacaagaattaaacagcatgaaggctttactaactattttcaattgtttttagaggcgcaaattactgaccactgccaacacaaggttaacttgtcccttatggttcggattaatgatgattaattgtcaatgggtaacactttgggatcctattgtatgtgtttgaggagacaacatgttatatgttgtttgtattttgtgaaaccggtttatatggcatcctatctcatataat

SEQ ID NO: 40835 - DNA, 548 bp, Zea Mays
caagaaaattgacgagcacacgcggggtgagcaactgagtgacgatggcggagcttgctggtttaacatggaaaggaccaacaaagtcaatagccagtacgactagatgatggagcgtagtccagcaccataatgacgacggccaccagaagggtaaagacgaggtcgagcaagggagaatgggttcaacggctcgacggcagatgcgagcatgcgcgaaacccgatggatgagagcgagtgcaccgcagagacgacgagcaggcgtgcgagcgccaacgcgagccaggagtaggcacgagcgctaggtacaacaaacgacacccggcgaacacgcaacgaggcacgcagcagcgacgacggtcgaatcggcaacagagcgttggcgaactcaatgaacacgacccaggtcgcgtgctgacgcggataggacaacggtggttggcgagcctaaaagaggagcttgcgcaacaacaaccaacagggaagcacgcacgcgcagccagagacaaaacacggaactggagctgagcacggccaagggagcag

SEQ ID NO: 40836 - DNA, 2266 bp, Zea Mays
gcccaaaattttcgtaggctgtccaccgcaccaccaccctgcgcgccgagcgcaccccgatccagatccacccatcctccctccggtctccggcgggcgccctcctccacgtcctcacgcgcctccggacgccagtgcgcgcgcagtgagcatcaacatcaacccgcctcttctctcgtcggtggcggcggaggcggcaggcatgaagcgggtgtcgtcgcacgtctcgctcgcctccgaggcggagatcaacctcgacctgtcgcgcctcgtcatcgacaagcccaggttcacgctggagcggaagcgctccttcgacgagcagtcgtggagcgagctctcccaccgccagaacgacggcttcgacagcgtgcttcagtcgccggcattcccgtccggcggcttcgactcgcccttctccgtcggcacgcacttcggcggcccgcacccgctcgtcaacgaggcctgggaggcgctcaggaaatcggtcgtctacttccgggaacagcccgtcggcaccattgctgccgtcgatcatgcgtcggaggaagtgctcaactatgatcaggtttttgtgagggatttcgttccgagcgcattggcttttctaatgaacaatgagactgacatagtgaagaattttctcttgaaaactcttcaccttcagagctctgagaaaatggtagaccgattcaagcttggagcaggagcgatgccagcaagtttcaaggtggaccgtaataaaaacagaaacactgaaaccttagtcgctgattttggtgagagtgcaatcggtagggtggcaccggttgactctggattttggtggatcattctccttcgggcatatacaaagtacaccggagatgttagtttgtcagaatcacctgaatgccagaagtgcatgaggttgatactgaatctctgcttatctgaaggatttgatacttttccaactctgctctgcacagatggctgctcaatgattgatcgtcgaatgggtatatatggttatcccattgagattcaagccctattctatatggcattaagatgtgctctccaaatgctcaagccagagggcgaagggaaggatttcatagagaagatagggcaacgactacatgcactaacctaccacatgaggaattacttctggctagattttcaccagctgaataacatatacagatacaaaacagaagagtattcccacactgctgtgaacaagttcaatgtaattccagattccattcctgattgggtgtttgatttcatgccatgtcgaggaggctactttcttggcaacgtcagccctgctatgatggatttccggtggtttgcccttggcaattgcattgccattgtatcatctctagccaccccagaacagtcagttgctataatggatctgatcgaggaaaagtgggatgagctagttggtgagatgcctctgaagatatgctatcctgctctcgagaatcatgagtggagaattattactggatgtgaccccaaaaacacccggtggagttaccacaatggaggatcttggccagttcttctgtggctgctgacagcagcctgcataaagactggtcggccacaaatggcaaaacgtgccattgagctcgcagagtcaaggctgctcaaggacggctggcccgagtattacgatggcaagctaggaagattcgttggcaagcaggccaggaagttccagacctggtccattgccggttacctcgtcgcccgcatgatgctggaggacccatcgacactgatgatgatctccatggaggaggaccgccctgtgaagccgaccatgcggcggtcagcatcatggaatgcctgaatgcgtggatagttgtttctgaaccaaggaaattcagaatcagctgttatacggatttgtgatttgtttggaccacaagagtgcagcctgcagcgttggtgtgatttgttgggaccacaaagttcaacattgattatagttggactctgtcaattaggacagagtttgtataccatagaggatcataggagttgcacaagattttgccatgcccttttggtttgtttcagaacaatactcaggatactgttcagttgaaaccttgattttggaataacaaatcactgtttatgcatacatttctcttcggctttaaaggtatctcagataattctggaatgccactttcttttttttaaagaaataacaaatcactgtttacacgcagcagaacatgtggattggtactat

SEQ ID NO: 40837 - DNA, 2976 bp, Zea Mays
actaagagcatctccaacaaatctcaaaattatttattccaatacatgagcattgggagccccctaagatttaaattcctgaaaaaagtgtcaatacttcaacaactctcaatattttcgaaaaacctaaaatgaatctgttgttgagcccacaaaacctgtctgtcgatcatacctgtcacactgtttttctgcgtcacccatccttcgttcctccctgcgccgccgatctgcttcatgtgttggcgcaagcttcagacgtgatctgctcctcgcctcaggttgcctccgttgacgtgtgggagcagctgcaggtgccaaggtggatgtaacccagccttcagtagttcaacagaatataaatcaagctgttggtcaacaatcatcatctggtacaggatacaaggaaaggaccatcacattccatttaatatgtctgcattttcttaattagaacaccacatcatcttggtgcgatgaagaagtgcatgccagtgccatatgcggaacttgtcatggacttgcaaatcttggaaggccattacctcgaaatcatcagccgccgtagatgaattttgtgtcactgtcgccaaagaagcttttgtcggcgattcaccatttgcgggatccatcgatgttgagcgtttgcgggaagagagcaccagccgcctcaacagggcgtcgtcctccacaacccacacaaaatcaagtcagcaggttctggcggaggcgcgaaacggaaaatagtgtggcaataagaaaaccggcaggtgattgggagctcagtgcgcggcgaaggtttgcgctgcggatgagcggagctcggaaaccacggtgagccgcccgcagtatgcacctctctcggataacagggcaaggaatgaccactcggagccacattatgcatctggagtgaacctttcacaaagtgctccttccactaatcaagtttctcaggctgccagtggaaaccaaatgtcgacagaagcatatcgtgctaagcatgagattaccatcatcggcaacgagtcacctgcaccattcatgacatttcagtccacatgcttcccatcagatattctaagggaggttctgcaagcaggattctctgcaccaactcctatccaagctcagtcatggccaattgctatgaagggtagggatatagtagctgtggcaaagacaggttcaggaaaaacactgggctatctcctcccagggtttattcttctgaagcgcctgcatcataattcaagggaaggtccaacagtattagttttgtccccaaccagggaattggcaacacaaattcaagatgaagcaatcaagtttggcagatcttcaagaatatcttctacttgcttatatggaggtgctccaaaaggtcctcagctaagggagttggagcgtggtgccgatgttgttgttgcaactcctgggagattgaacgacattttggaaatgaataaagtgagcctgcgccaagtatcatatcttgtccttgatgaagctgaccgtatgcttgatatgggatttgagccacaaataagaaaaattgtgaaacaaataccacctagacggcaaactcttatgtacactgccacatggccaaaagagcatgtggaagttatcccacatatggagaaatcaagacgacttgatcagatcttgcgttcacaagatcctggatcaaaaatcataatattttgctccaccaagaggatgtgtgatcagttggctagaaacctatcacggcagtatggtgcttctgctattcatggtgataaatcacaggctgagagggattctgtgttgaatgacttccgaagcggcaggtgtccagtactcgtagccactgatgtggccgctcgaggcttggacataaaggacatcaggatcgtggttaattatgatttcccaactggtgtggaggactatgtccatcgaattgggagaacaggtagggctggcgcaacaggatctgcctacacattctttggtgaccaggattcaaagtacgcttcagaacttgtgaagattttggagggtgcaaaccagtctgtgccaccacaattaaaagaaatggcccttcgtggaggatatggtggaagatcacgtcgatgggcatcttctgatgactcttatggtagtcagggatatggtgctaaaagatcaactgatagtttcaagaacagcagcttcggcaaccaggccgggggtggttcaagctttcactcgagcttccataacagctctagtggcaatcagttcggtgatactacaagctttcatgccagctatggtaacagcagccagaacaatcagacgggtgacaatccgagcttcccacccagctccagcaacaatcagtccggggatggtctcagttttcatgaaaggttctatggatcacgcggaagggacgagagcagatcaaacaatgatggattccgtgctaggagcagaagtcctggcaagcctgtggaagtttccaactggtgattgcatccactaggtgcaatccaatttttgcgatggtgacgaaaccaagtaaaagatggtacctcgacaagttatattttcctcttatcctgcttaaatctaaggatgtcctggaacatcactaacttaggatatgggtgatggtctgatcccaatggacaatggtctcctactttcttgatttgacgcctgagagacgcctgattccataccatatgcctgtggttgtagtttgtaaaatgttaaaaacttgactttgctagtatatttcctaatgctataacccaatcctgggtaaacagacgcatggggatgaattttggacggaaccatggacatttgatgtatgtgtttaatgttgtgtacaatctatgtcgaattctgttgtaagtgccgtccgcatcgttttatatctttgtgcccgttattacaggtcttaaagaatcatgctgcccgtatgtgactcttctcatg

SEQ ID NO: 40838 - DNA, 2248 bp, Zea Mays
gcgtccgccccttgccccctccctctccgtgtctccgattctggatctgcccatgccgtaacccgcaggctcccggcatctcgctcttgcctccaaaattcaccttcgccgattgccgtcgtgggccgccgcgatggcgttgcggacgcctcgtaccacctccgtcgcattctccgctgactcccccctcggcggcgtcccaatacgctcctcaacagcctgctccgttcccacgccacctcctctcgctccgctgcgaccaccgaggaccaccagagcgggacgccgcggaactcgtcggccacgtcctggccgtcgcgcatgctgacgacgaggctgttgccctcccgggcgccctcggcgcggagctcgcacgcgtcctgcgagcgcgcggcgccgctgaggcaccgggcgcgccggcggaggaacaagttgaagtaggtccggaacagaggacagggagggacctaaaattcaagcccaaaggaccaaagcccgaagtttcttttcttccccgcaaagaaagaaggcaagagttctcggcttctcgcaagtcgcgacagagaaagaggcggagttgcggagaagatgcagagcagcagcatgaagagggagatcagcgaggcccacgacaccattcgcttcggcatcaacgccggcgtcaaagcggacctcgccccgccgcacccgaatgaaatccagaaatcatttcttcgttctaaattgaaagtctagaaataggtgtttatagattcatcgcgacacgaattcaccagaaaaggttacaagagaaatgcagagatttattctatggagaaagcatcagggcattctgctttgcgtcacaaagtttcaaacccagcaaaacccccagtcgatatatcagataggatgattggtgataccaaaggaagcaaactcaaacacacaaagtttcagaagcacagctactgcttgctccctcaggcgaccttgacctcgatggtcttgggcttcttgggctccggcgggggcagcttctcgacggtcaccgtgagcacgccgtccctgcacacggtgtcgcatcgggcggctcgacgaggcggacaaagccggtggcagaccatgggtgcaatgggtgcagaacttaggtggatggttctaaatgttcacgacaaaaaaatgtgtggcgcatgggtttctgtcctgagggtgcgcagatcggtcgccattagaaagatgcagcttcaactactttggaccaggtgcaaagtcatggcagttctgatagggcaccctacacaaatctggagtttgaacacacgacaggtgatatgcttatcttttgtggatggactgttcgcttggcttttgctgattgaattggagctgcacttgtagtttggtaacgtttatatacataactatgcggattgcgttagctagaatatgtcttccagtacctgggtgacaatgggctctaaattttagagtgttgtagatttgttttgttgcaaatgtggcatggcatggcttggcttgcagcttcgagtactggtcgttcgagatccttgtgctgtttgcagggctgatgcccgactctcatctcagcacttccatcattgcaatgtgccaaaacaccgaagccatatcatacatgatcacctatggcttcgccgctgtcatcagcacaagggtgtccaacgagctgggagcccggaacatcgccaacgccaggaaggcgctcactgtgtcgctggcgctgtccctgatgctgggggtggcgttcctgctgctcctgggcctcggccacgacctctgggggtactctgcggcgtcgccaggggctacgggtggcagcacctggcggcgtggaccaacctggtggccttctatgtcatcggcttgccgctcgccatcctcttaggattcacgctcgccttccaaaccaaggggctgtggatggggcagatatgcagcctcctctgccagaactgcgtcctcttttttatcaccctgcgaaccaactggcaggagttagacctgaccatattcaacaaggacaacgattttgtctgctaggaatctagaaagagtttttcttttcttttttgccatgtgctgttgctgaaacattgaaccatcagcatcaggcttcgacagagctgtctgatgtttgttcatcaattcatcaccagtgtaacactacagattgtaacatttggaatctcaaggataggaattaaaaatgttctgatacaccaatata

SEQ ID NO: 40839 - DNA, 4028 bp, Zea Mays
ttaactcttgatacgattactggccccaccacgttcatcatggagagatttctgctattatgaaacatgacacgatcggcttcgacgaaataaaagcctaggagagggtttcgatcatttggaaatctacacaacatgcaaacaccgatatggactcgatcaccgcatcactgcttggatgtcacgccgtcagctacctgttacctttgctgcttcctgtggtagacggcgagcagcttgtagtacgtccagcgtcgcttcccaccggttgcctccagcaacaccacagagttggcgtggaagccgccattgccgaacgcctcgaacacgatgggatccgtagccacggtgggctcagcgtcgccgtcgagccgatcaaacgcgaacgtgaggttccgcacgaggcggcgctcgaggtaggcgtcgatgagtagtactcagacgccgccggcctcacgctgctgctccaggtcagcgccgtcccgaggctgcagatcaggaggtgcggtgcgtggatcagcgtcgaccccatccccgcgtgtttcgtaatagcaaaaatctccgtccatcagggaggtcggtcttgcagttggagttgggcacattcgcctctatcgggcgggcacattccctccgtcccgtgacttccaccttccttacccttcgtatggtgggggcccacctcgccgcccccaccccccgctgcccttctctcttccccgtctccgactccacacacctcccctttccactcgccgccggcgatcccgaaccgggagcagcgcacatggcaggccgggacgagaggtggggggcgcggggcggcccgggggacacgcacgcgtcgacgagccgcgcacccgcgggcaccgccggggagtcggagggcgcgtcgccggactcgctgcggaacacgccctccaacatcgcgcggctggaggacgcgatcgggcactgcgcggcgcggcgcaaataccttgcgcacaccaagagcccctccgacggcaaggacgtccgctggtacttctgcaatctccccctcgccgacaaagtgctctcttcgtccgtaccgcggacagagatagtggggaaaggagactatttccggttcagcgagagggactctctggcactggaggcgtctttcttggagagggaggaagtgctgcttgcatactggtggcgtgagtatgctgaatgcagtgcaggaccgagaggatccttggttgaaagtgatgattctgcatatctttataaggtggaggaagaacgggttggggttcctgtgaaaggtggactatatgaggtctgtaatctcttctctagtacgctctatcataaccggaatgaatcgtgtatggattattgagaagcattctacccattatcattgattactctcagtatgctatctagtgagttggtcttttcgcaacaacctactgttctgcaggttgatttgatgaggcggcattgcttccctgtgtactggaacggtgaaaacaggcgtgtcttgagaggccactggttcgctcgcaaaggtggtgttgattggattcccttgcgagaggatgtttctgaacaacttgagttagcatataattgtcaggtctggcatcgtcgaaaatttcaaccttcaggcctatttgcagcaagggttgacctccaaggaagtacactggatttgcatgctctttttactggagaggatgatacttgggaagcttggcttgtctttgatacgggtcctaagcttggtagtaacacaatcaaattaaggcgcggattttctccttctgaatctgcaagtacaaagccttcacaggttccagttggtcatctggtattcatggttcatggcattggacagaggctggagaaagctaatcttgttgatgatgttgttgatttccgccgagtaactgctaacctagctgaaagatacttaacttcttatcaaagaagtacccagagggttctatttattccctgtcagtggaggaagggcttgaaactcagtggtgaaagtacggttgagaaactcactttggatggagttaaaggtcttcgagtcgcattaggtgccacagttcatgatgtcctatattatatgagtcctatctactgtcagcatattattgactcggtctctaaccagttgaacaagctgtacatgaaatttctgaagagaaatcctggttacagtggaaaggtttcattgtatggccactcattaggaagtgttctgtcgtatgatatactttgtcatcaagaatcccttttggccccatttccaacagagtatctgaacatggaaacatctgatcgaagtcaaggagcaaagtcagccaatgaagttgctctgcatgattcagcattgtcccatcatgtgtgctcgaggattcattaaataacccagaaactggtgtgccacgtggggcagttgttgctgagcaaaatgaaaaagaaaataggattgagaatcatcagacggtgtatactgaggaaggaacaacttcaggtgtaagcacaaaagatgctgaagcatcacacatttcaagatctgctgaggatgtccatgaagaggtccttgacaaagaaaaaatgatcatttcactagaagaagaggtgaaacgtcttaaagctaaactagatcagcttgaacagcataagcatctagtgactgagagcaccagtggtgttgagtatcatggaggcaaaaatggcaatcatgccttgaactttggcgaacttttcactgcacaaggaagtataaaccagccctactcaccacaaatcaaatacacaaaactaaactttaaggttgacacattctttgctgttggatctcccctgggtgtcttcctttccctgcgtaatgtccgtattggtattggcaaagggcgagattattggaaagataagaacataattgaagagatgccatgctgccggcagatgttcaatatttttcatccttttgatcctgtagcatacagagttgaaccacttgtatgtgaagattatcaaaagaagcgtcctgtaattgttccctaccatagaggcggaaagaggatacatgttggagtgcaggagttcacagaagatatttctgcacgttctcaagccattgcctgtcaattgaagtcactgaaggtcaaagcagtagctgctttgctagcattgagcagaaatgacacagaagaggatggtgagagtgctaatgaggaaggaagatcgtatggttccattatgatggaaaggttgaccggctcaccagatggtcgaattgatcatgtgcttcaggagaaaacatttcagcattcatacctatctgctctgggagctcataccaactattggcgagatcatgacactgctctcttcattctcaaacatttgtatcgtgatatacctgaggatcctccaagcgatgtcgttgaaaggatgcatattaaactgttttatgagagagatccggttgaggaagaaacgcccgtgacattttcggaccatgcagcaattaaggagttctgcagaaaggtgagagcctactcaacaaaaatggaggatgatgccaactgctaagcctcttgatggtgtcatttcctgatggaaaccatgttacatccccacgttcctcgccaagaaggaagatgcaggcatgggaagggagaacgattccacaaaatcgtgatcccaggataagaatcctaagaaatgtagttccacgcttgacaccagaatcaggacacttgagaaacgttgtacagagtcggttccccatgttgcttcacttgttcccgtcgtcaatgcagtgctgtacagagaacgtcctgctgtacctttctgtatatgtaatcttgcgtgctgtgcatacagaatatgatggatttagtttcaaacgacagcttacagcgacaccaggctgaaacgaagggactcgtgagagaaaatccataataatttagagacattaataacacagaacacctagctttcaaatgttgtgatgtcacaaagcttcg

SEQ ID NO: 40840 - DNA, 445 bp, Zea Mays
tcaaacggtgataactttcaatttataactccaaattgagcgcataaatactcgttggaaaggtaaggtaaagttctacatgatccccaaactgatttcccttaattccgcacgaaaaaacacagaaactgctagactactgctgttcacccaccacctaaaattctggacagcccccctctaccccaatcgcaaacgcaacctctaatcaattaaattgcagcgcaaatgaacaagggatgaacacaaaaatcaccttggattctccccctttccttcctcccttcttccctccaccaaaacgattgaagactcacaccacaacgacgatgatccgagcggcaaggattggcaccttgggaggaggggattgagagggggggggggcggctagggtttggtggctgcaagaattgagagaggaggagatgggcacggggggcgg

SEQ ID NO: 40841 - DNA, 5192 bp, Zea Mays
gggcgtctctggtcggtcgctttccctcctcagcttcagccttcagctcctctcctttcctctcctctcctctcctctcctctccacagctgcagccagagccacccaccttatcgtcatcctcgctcgctcctcatcgccagcgcctcctcctcctcctccttcttccccaccgctgccgacatggctgcgcaagaagagaagaccgctgttgttgttgctgctgctgccgatgtcgcgacagaggagcctacgccggcggcggagcagcaacctcagccggctggggcggcgcgcagggcaggaccatcggcgcccggcggggctccgcccaaccccttcgacttctccaccatgatgaaccttctcaatgaccctagcatcaaggagatggcagagcagatcgccaaggacccggcgttcacggagatggcggagcagctgcagaagacggtggtgtccccgcggcagcaacagcagcagcaggcgcggcagcagcagcagcagctggacccgcagaagtacgtggcgacgatgcagcagctgatgcagaacccgcagttcgtggccatggcggagcggctaggcagcgcgctgatgcaggaccctgccatgtccgccatgctggggggcctcaccaacccggcgcacaaggagcagctggaggcccgcgtcgcgcgcatgaaggaggaccccacgctcaagcccatcctcgacgagatcgagtccggcggccccgccgccatgatgaagtactggaacgaccctgaggctctgcagaagttcggccgcgcgatgggcgtcggcgtcggcccgtccggcgaggccggcggcgcagagcacgccgaggcggaggacgacgccggggaggaaggcgagtacgaggacgagtccatcgtccaccacaccgccagcgttggcgacgtcgagggcctcaagaaagcgctggaggacggcgcggacaaggacgaggaggactcggaagggcggcgtggcctccacttcgcgtgcggctacggcgagctccagtgcgcgcaggcgctcctggaggccggcgccgcggtggacgccgtcgacaagaacaagaacaccgcgctgcactacgccgccggatacggccgcaaggactgcgtcgcgctcctgctcgagagcggcgccgccgtgacgctgcagaacctggacgggaagacgcccatcgacgtggccaagctcaacaaccaggatgacgtcctcaagctgctggagaagcacgccttcgtatagacgtcccacgccgccggccggcccgtcttgctcgtctgctcttgtcgccgctgcggccacgtcgcttgcctctgctactgctgctgccgtcgccgccattaatgctttgttgatttctctcctggtcgagacaacgcagttcaggaaaaaaattcaaaattttgcgacgttaccaccagcagtccaccaccagaacgaatccaatccaattgggagagggcgtgtatgaagggaatactaatttctaggtgcttatccgtaaaatgcttcacgccattgtgtgcctcacataatcaatcggacggctcagaatcgtccaagattggaccctgtacccggccgcagaactccgcgcccgtcggcgacatcctcctccctcccaatgcttcgccggcgccggcgtgtcatccctctcctcgtccggtgctcgcagctccgccgccaaagcaccgtctccaggtaccgtccgcttccgcggcgacgagcccgtggagacacccgctacaccagcaacgacgacaccctcaccctcggcctcgcgcggcggaggcgcgacgccaccggcaacgctgctctccgctgccacggtaccgtcgcggagccctctaccccgccgtggcagcgcgacgcccaagacgacgtgtgctcgacgaccggccacgaccccaggccgcagcacggcgccgcggccgctcgtgccgtgctcgatgacgacgagacgcctggcgctgacgcctacgccgccatggtcgccagccgactcagggagcgcgacctgacgcgcgcggaggcgctcttcggcgcggcgcccgcggctgcccgggggctgtatctggataccgccatgctcgacgggtacgccaaggccggccgcgtcgatcgcgcgcgcgagctgttcgacgcgatgccggtgaagaacgtcgtcacttggacctctatggtttccgggtacttccgcgccggccgcgttcaggaggcgcgggagctgtttgacgtcatgcctgaacggaatgactattcgtggacgacggtggtgcaggggtacgcgcgcaatgggatgctcagggaggcgagggagatgtttgatcggatgcctcagaggaatgtggtcgcttggacggccatggttaaggcctacgttgactgtgggcagattcagcaggcgtgggaattgtttgatatgatgcctgagaggaactcgtattcctggaatgccatgatttctggttttctcagcattgggaaagtggctgaagcagttcagttgtttgagaggatgccacacagacacaagaatgtggtttcttggactacaatggtcgctggcttggcaaataatggacttgcttgcagggcaagagagttctttgatcggatgccagcgaaggacactgcggcatggaatgccattatcaccgtttatgccaacaatggccagctgaatgaggcgcagagattatttgattcaatgcttgcaaaagacctggtgacctggagtaccatcattgaggcatattcgaagaatgagcgtaagcatgaagccttaaacatgtttctacttatgcgccattcagcagtgtctcctaacattagaacattaattagtatcctggttatatctgagagcacagtcgaagttaagcaaattcacgggttggtcattgcacttggattcctgtcagaaacttccttaggaaatgctctgctcacaatgtattcaagaagtggagatctgatgtctgcctggtttgccttcaaaaggttggaacagaaggatgccataacatggacgtcgatagtgcaagcttttgcagaccatggctgtggttaccatgccttactggggtttgctcagatgctgagacatgggtataaaccaagttcgactaccttcactgctgtgctgtctgcttgtaggcatgtggggttggttgggaaaggtcgcaagatgtttaaatccatctaccatgtttatggattggaaccaaccattgagcactattcttgtcttgtggaccttctaggtcgagcagggtatgtaagggaagccaaggaacttgtcgatggtatgcagcagggtatgcgcgatgaggccattcttgcgacgctcctgggagcctgtgtggtgcataatgaggtagaggtagcaagagaagtgggtgaggatcttgtcagatttgacccctctggtaccggaggctacaggctcctggccaatgtatttgcatcgcatggaatgtgggatgaaacagcaaatgtgtggaaggtcatgaggggcagtaaggcaaagaggactcctggttttagtcagattgaggtgaacatgaggaatcatgtgttctactcaagggatcaagagcatccacaatgtgctgaaatatatgagatgctgattgacacaattgctcctcagatgaagggttcatcatgcgtgggactctgggaactgaccctcttgtccgatccacgcgaatcgactgcctggtgaccttggttgcctcattgcctgggcttgcttgtcaagtgtaaaagagatgcgaccaatgctgcagcatccatttaccaacaatagtgatgataacgatgctggacctgtgggtcatgttcggtgctcattgttgatattgtggaagaaaccagcagaacttctttttggatatcgaagggctcagcaagaaactcaattcttcaattattatttccccttgcagaattgcaataatgttgagcatcttgtttgtagagagcagcgagcagtgtgccttgtcagcacctatagcttgaaaaattatggtaatcctgctaggacataatgattaatgaagctcccgggccttgaaaggaaactgtttatccaaggtttgtcttgtcagatgaagtgagcattgttctctccttggcctaccacaactggatgcagatacagcgagatattgaagggggtgtggtagcaacaattttagcgtcgatgggggtgtcaaatatattagagatgcatatataaatgtgtccctatcatgtccacaaatggtgacaaggccggctcgtgctcctaaactcggttgccgaaggaggatgtgttgtacaacatcgtcgcctccaattgaccacccacacatctcttttctcgatcgtcattctttcccgacaccaaatgtcgagcatgatggaggcattggagcacacgtgcgcgatggtggcgttggagcccaggcgtgtggcggcagcggtggccctgctcctattcagattaagccacacgagattgattgctgctgaagggaggcctccccagttgaatccacatccatatgcagagtacacagccgcatccggaggtagctaggtaccggcatccggcacccactatcgcaggtgccaccacagcctcctgttttcatgaacgtaaatgccatttagggactgaatcagccgccaccaggtcatggggcaagattggaggactgccacatgtgcttgaaggcattgttgcctcacgcccactctgatctgctggtgaatgagtatggcaatgaagtgcacggaggagctgctccttccctatatttatggatctatgcttgttgtttttctagctttgaaccacgacttatgatttcaaaactcctgggatctgctctagtagcatattggccttgttctgtgtttcagggaagcaagagaaggtcacttttttgttctgttggtctactgtaactacaatctgttcagttcagctttctgaaagtatttggtctgtgttatgtaaatgaagttttctagtccatcctatgtacaagttttaaatttgctggttgttattgtcatgaaaaaaatgatctgctgccattggtgcattggtcagtgtccttcctctgccaattgggaaaatagtgccacgcagagtagacaagtatcaggtcattttg

SEQ ID NO: 40842 - DNA, 1036 bp, Zea Mays
ctaggttctatttaatatatatatatatatatcaatttataaatatatagaataaaaagtctctcgacactgtagtaccagtactgaaaggtatctagagggtgcaaccatataaccggtgtcagactctctttattaccggtttgagtcaccaaccgttactaaaagcactttttagtaccggaccacgcagttcggactaaagattaatacctataattgtccagtttaaggatctggtatcgtagtcggtttttaaccggtactagctagcttagtagaccttttgtatagtatagtgtcagctgaagatcagaggagcaacgtactttgtgggcttgtagtacactggacggctacactatatacatgcctaagttagttggccgtacatacctacgtacgtactgggaagactaacctttcatgcatgcaggtcagcaaggctcggagagacgtggcctcacgtttcaaccggggagcgcgctacgtctacgcgtaccactgaaaaaatcaaccaaagcttgcgccctccgatgatcctgctccaagagtagtagtggcctttctaagcttcacatggccttgctagcacacagccccaacactgtgtcgaaaaactatggtgagcgcatgtgtcacactcgcttggaaaacgcttaaactatgccgccgtcgtcgtccagcctccagcagggtcagcttcagcctcagcagccggccgtgaggaaccctgcaatctctgagagagagaagaagaagagacaaacggacgtgcggcgcagtcgtgcagcacgtagacagacacccacagcgcccaccaacctactcgatcgatcgactccgtgcgtcctgcaatacattactgtaaaatcggatatgtgaaggccgtctctcaagacccggcggccggccggccggcgggagctcacgtaattattagcaaataaaatagacataaaaatttacgcgaaaaaatcctctgtaatataaaagagcaaacaaccacaagaaaacagatccattatcaaccgta

SEQ ID NO: 40843 - DNA, 1127 bp, Zea Mays
atgtcagagttttagtgatcgtaacaccaggggcgttacatccttcccccctaaaaaggaatctcgtcccgagatttaaactccaagccaagtaatggaaaaggaagcgcatcaatggtttatgtccccattactcttaaaagacaagaggcatacctctgttggtttacattaagaacaaaacacaccagacctaggtttacaagacactagaaactcaggaacatgcttttctagattctcctccaattctcatgtggcttgatcttccgtgtgttttggttccaccgtatcttgcaaaactcgataactttcttcgagtggcccgatccttttgatccaaaacctttatggaatgttccgagtaggttaaatccaattgaagattgacatttgaaatctcaagaacatgttcggggactcgaagaaacctcttcaactgatacacgtggaatatgttgggcactgttgaaagattctctggcagctgcaccgtataagccagaggtccaccaaaatctctgttccaaatcttggttcatcttactacttctagggtaattggagttccgaacttcaactcgatcgcaaattccacgaccctttccggaggtaaaccaagcaaattcttggggaacacctctggaaacttcttaacatcgggtatattctttacttctttcacttaaactcttgatgtagacaaaccttattatctcccagaacagcttgactaaccaccttattgtaaccttatgtcgaactggttgtcatcaggagttgaagcttcacattaaaaccatgtaggaagtatcaccttttcctctcactagtatccacaaaatccaaaccatactgggataggtgtgtaaacctctcaaaatactccattatactctctttttttgcatagcttctgacctaaaactcattgaactttatttatataggggctttcgaaatatcatgtgcccgaaataccccacggaactcaacccgagaacttaacgtccttctggctgcagcgcaaggtattctacctgccaactaaacttggctttgagtcttcaaaaacagggaaaggtagcatagaaaggcaaagacaggtaacatgaacaaggtagacg

SEQ ID NO: 40844 - DNA, 2148 bp, Zea Mays
ggtcacgatccgtgcgtactgagaccgtgcagcagcgtcgagggaggttcgtcggtcgggttgacttgggcgcggatgggcgggaccggcgcgagcagccggcggaggtgggcgcggcggtccttccggacggcgggtggtggaggaggaaggggaaccggtggggttgtcaggcggaccgtcgcggcgtcgacgaccatggctccgcggggtacccaagggtttgctcatgtggacaagcaacagcgtcatgttcatggagtattatcagatttcagatgcaacagtggatcaacagatcatctttctttgtatgtcgaggaatttaagcataagagctcacacagatcatctgttagatgtcttcctagtgcacagggaaatgtaacagaaatcagtcgcatgcaacctgttgcaaggaaagttcaggtagatatgaccttcaatgataaaggattgtgtcgtgctagcagaactgtttcaggaatgcgaattcaacctaaatattatatcagcagtcccaacaacaatttgaagaattctcctactgtgaagagttatagtgggatgagtgatttcaattatcaactggtcagaagtgctaaaaggtcagctttgccaaagatgggtttaaccagcacaaactgttccctttctgagaaaatgtcttttctgcgtcgaccacggcatggtgataatcatcagaaccaaagccgtatcagtgctttgaatcgaagaaacaaaattgtgaatcctaggggagcagctcacctgctaagtaaagataaggttcatgaacaccttaattcctcattggaaagacattcacaggctttgttaagtaatgcattgattcgagaaaagcaactgtgctgttcagatatactcaatcaaaaagaacctgaacagctatggagctctgcttacagtgaatctgagaagatgttatgcttttcctccagtgacagcattgatgatctgcaagtatcgtcttcaagtgacactagtgatagcttcaacttatcatctctgggtgtaatagatggtgatgaatggaatacgaccttcaagaggatctccaactcagacttgagcttggcacatctgcaccaagggagactgctgcagaggcaagtaattttcgcggaactagtgtctgtttaacctccgaagtgcagtcaagcgatgagaaacccatacaactggttgaagacatccttgaagaatttgaagatgatgaggaaagggacttctcttacttgctggatatactgattgcttctggaattcatggaactgccgaggatcaaatgtacaaggtgtgtcagtctctcgaccaccctgctggtgatgacgtatttgagaagctggaaaagaagtacaacaaagttgttcagtggtcaagatcagacaggaagcttctattcgacatggccaacacaatactatcacagatccttgccccgtgcttgaacatgcaaccttgggtctataccactaggaacttggccccactttggggcccagatggtcttctggagaaagtcttgcagatgctagttcagagacgggaacaccttgcacccagtgagactaagccagagaagaaaggatttgatccgaagtggccaggtttagcagactgcatcgacagggcaggaagggacattgagagaatggtaaaagatgacctgttggaagagctggtcgttgagctactgtccagttaggtttccacaattccacggccgtagtaggttttatcatagcagtacagattctttgttcttttgtttagtttttttagtcagttgtagttgttcctttggtccctgtccctgctatcactgctattttttttctcttcgttgttaaagcagtgggggagagttttttttttggtctagtcgccgtgcttccggtggtattatgacgtgaattccattggattagaggatctctgtagggaaaagttcttttctacctctccataaagagtaccttttgaagtgaggtttgtaagaatataaaaatttcctgtcgagctttgtcggctgtgagccctcaaatctgtatatgaggtaaaattataacttaattgtgttatgctttaaaggaaaaggaagatagtggcctatgctttggtct

SEQ ID NO: 40845 - DNA, 1316 bp, Zea Mays
gccgctgcccgctgagccgcacccgcacggctgcacaggcacagccgcaggctcctcccgcatctgcatgggcgctgaccgcttggcagacggcctgctcggctgctcctcatctccgacgctctgctcggctgctcgtgctcggcagacggtagtcccgctccggcgctccgctgctcgcccggccagccggcctgctcggctgctcttgcagactgcagtccttctacctctgcctgcttgtccggtgtcccgcccggcgggcggcagccgactgcagggtgcaggctgtggctgtttatcccggcccgccgaggcgccgacccggccggctgccgcagtgtcgctgcttccagcttgcttcctgcttgctttagttcattacttcattagttattacgtcattagttgcttgactacagagtgcttgagtttgagtgcttgactgcttgtcccatctgatggcctaaagatttttcaatttctaaatagcagtcttagatataaacaaaaacaagacaaagaatatggcccaaaaaaatttaaagacctatttcagtcaagtttctagtggaagtagaccaagcactcgcgctagtggagtttacaataaacccagaatacaagttggagttcaagagaataacaatgaagatgccaatggtgaaactgttaatggttaagtcgaaagtataaatcagttcaaactggatcacattatttctgatccgagacttcgtattccaatcgattattttacttcaatttgccattggtaactcattttttctttttttcagattttattcgctatatggcatttggttgtaaatggattgtaatcaagatgactattaaataaggtttctcggatgtggtaaaacagatatggtctaccgaaatggatggcaatacccctatggatagatggcaagcaaagattcgaaaattacgccaatatcttacgaggtgggcaaagcatacaaatgggattaataagaaggaaaagaaaagtttgttgaacaaccttgatgagctagacagaatagcagagtcaacaattttgacgcagcaagaacttgatttgaaatgttgtgttcataataggcttgccaatttgcttagggaggaagaaataaaatggtaccaaagggctaaggtgtaggatttgttacaaggtgactgtaatacaaaatatttttagatggttgctaatggaaagtttagaaagactaggattttccagttgaaagacaggaatcaagttattacggatgagtttgaactaaaacaatacattaccacgtactacaaaa

SEQ ID NO: 40846 - DNA, 6151 bp, Zea Mays
aattattgtaaaatacttttaatattcaaaaacctaattgaacagtcagacgagtgtgcggcaaaagctgaagcaaacaaacgcaaacggctcatcccattcccatcacatgattcccaactcagcgccgcatcgcgtcaccgcaatctcgcagtcatccccccaaattcccatgtactgctcttgctcctgataatggcttgatttctcagtccgcactcgtcactgaggctgggcgctgacgccttccccgtttttgcagctccgcgaccgctagccgtgaggatgagcctcctccgcaaccgccgcgccgccgccgccgcggctgcagcggcggcggcggcgggaggaggggggtacccggagccgccggcttacaacatcatcccgatccacgacgtggtgatgcacggggagcacccgtcgctgcggttcccggaggtgcgcgcggccgtggaggcgctggcgcacgcggcggacctgccgccgcctccgctagcccgcgcctgggacgccttccgtgccgacctcttcgactggctcggcgccaccttcggcttccagctcgacaacgtccgcaaccagcgggagcacctcgtgctcctcctcgccaacgcgcagctccgcgcaggcggcaccctccccaccgaccaccccgccgacgtgctgcaccactccatcgcgcgggacatccggaggaagctcctcaagaactacaagacctggtgctcctacctcggcaagaggccgcacgtccatgtgcccagcggcggacgccgtgtcgctcagggggtcggccctgacacacgccgcgacctactgtacaccgccctctacctcctcatctggggcgaggcggccaatttgaggttcatgccggagtgcctctgctacatcttccactacatggcactcgatctcaaccatgtcatcgaccagtcgattgatatcgagactgggcgaccatcagttcctgcggtgcacggtgtggatgctttccttgacaaggttgtgaagccgatatatgacgtgctcgaggctgaggtgaagttcagccggaatgggaccaagccacactcggcctggaggaactatgatgatgtgaatgagtacttctggagccgcagagttttcaggcggctccagtggcccctgtcaccagcgaggagcttctttataaagccaggaaaccccgggcgtattggcaagactggttttgttgagcagaggtcgttctggaatgtgtaccgcagctttgatcgggtatgggtgatgctcattctgttctttcaagcagcaatgatcgttgcatgggatggccacactccgtggtttagcctacgctaccgtgacatccagatccgggtgctgtctgtgttcatcacctgggctgcgctgcgcattgtgcaggcagtgcttgatgcaggcacacaatacagcctcgtgaggacggatactatatttctcgcagtacggatggtgctcaaggtgcttgttgctgttgggtggactatcacattcattgtgctctatgttcgaatgtggaatcagaggtggcatgaccgcaggtggtctttttctgccaattccagggtgttaaactaccttgaggcagctgctgtgtttctcatcccacaggtgcttgcacttgtgctcttcatcgtcccatggattcggaattttctggagaaaaccaattggcgaattctatatgtgctcacctggtggttccagacccgtacatttgttggacgtggtgtgagggagggccttattgataacattaagtataccacattctgggtgtgccttctcactgctaaatttagctttagttactttctccagattaggccgatggtgaagccaacaaagactattctcagcctccatgacattcggcgtaactggtttgagttcatgcctcacacagagcgaattgctgtaatctttctgtgggctccagttgttcttatttatctcatggatattcagatatggtatgcgatcttctcatcacttactggggcacttatcgggctgttctcacatctgggggagattcgcagtgttgagcaactgcgcttgagattccagttctttgcaagtgcaatgcagttcaatttgatgccagaggaacacctggatgctgtgcacggtggcctccgaagcaagctgtatgatgctatcaatcggctgaagctgagatatggctttggtcggccgtataggaagattgaagctaacgaggtggaagctaagaggtttgcgctgatatggaatgagattattcagacatttagagaagaggacatcattagtgacaatgaagttgagcttcttgagctaccaccagttgtgtggaaaattcgtgtggtgcggtggccatgcttcctgctaaataatgagctgcttcttgctcttagtcaggcaaaagagctagtagctgatgacaggacacactggtcaaggatacgtaacaatgagtacaggcgttgtgctgtcattgaagcttatgacagcatacgtcacttactgctggagatcattgaggatggaactgttgagcacataattttcagtcagctgttctttgcatttgatgctgcaatggagaatgggaaattttgcgaagaatataaaatagaactgttgcctgaaatccattcatctgtaatcgccttagtggaacttctactgaaagagaagaaggatcagaccaagatagtaaataccttgcagactctttatgtctttgcaattcatgattttccaaagaacaaaaaggatatggaacaactgaggcgagagaggctagcaccatcaacactagaggattcccgtctcctctttgaggatgtcataaaatgcccaggcaatgatgatgttagcttctacaaacaggtgaggcgcctccatacaattctcacctccagggattctatgaacaatgtcccaaagaatcctgaggctcgacggcggataactttcttcagcaactctctattcatgaatatgcctcgcgctccaacagttgagaagatgatggcattcagtgttttaaccccatactacaatgaagatgtgatgtacaacaaggaccaacttcgccgtgagaatgaagatggtgtctcaattttgttttatcttcaaaagatatatgaagatgattggggaaactttttagaacgtatgcagagggatggaatgactgatgacagtgaaatttgggctgggaaatatcaggaactccgactctgggcctcgtatagaggacagaccttagcacggactgttaggggaatgatgtactaccacagagctctcaagatgcttgcttttcttgataccgcctccgaggtagacatcacagagggtactaaacatcttgcatcctttggttcagttaggcatgagaatgatgtgtatcccatgaatggtggtttccggcggcaaccacaaaggaggttagacagaggaaccagtactgtaagccaactgtttaaaggtcaggaagatggtgctgctctcatgaagtacacctacgttgtcacttgccagatatatggaaagcagaaaattgctaaagatcaacgcgcagaagatattttaactctaatgaagaaaaatgaggcacttcgtgttgcttatgttgacgaggtccatcaacgaggctatactgaatactattctgtcctggtaaagtttgaccagagcttacagagggaggttgagatataccggattaggttaccaggtgaactgaagcttggggaaggaaaacctgaaaaccagaaccatgccatcatattcacaagaggtgatgcagttcagacgattgacatgaaccaggataatttttttgaagaggccctcaaaatgcgtaacctgttagagcagtacaactattatcatgggagcagaaaaccaacacttctgggagttagggaacatgttttcactggatcggtctcttcgcttgcttggttcatgtctgcacaggagacaagctttgttacccttggtcagcgagtcctagctaatccgttgaaggttcggatgcattatgggcatcctgatgtatttgatcgcctctggtttttgactcggggtggtttaagtaaggcatcaagagtgatcaatatcagtgaggacatctttgctggtttcaactgtaccttacgtggtggcaatgttagtcaccatgagtatattcaggttggtaagggccgtgatgttggcctcaatcagatatcaatgtttgaagcaaaggtttctagtggcaacggtgagcagacccttagtagggatgtctacaggcttggtcatagactggatttctttcggatgctctctgtgttttatacaacagtagggttctacttcaacacaatgctggtggtcttgacagtttatacatttgtttggggacgcctgtatctagctctcagtggtcttgaggctggtatccagggcagtgctaattcaaccaacaacaaagccttgggtactgttcttaatcagcagttcatcatacagcttggcttcttcactgcattgccaatgattatagagaactctcttgaacaaggtttcctacctgctatctgggatttcttcacaatgcaaatgaatttttcatctgtgttctacacattttccatgggaactaagagccattactatggccggacaatccttcatggtggtgcaaaataccgtgctactggccgtggttttgttgtgcagcacaagagttttgctgaaaattacaggctgtatgctaggagccacttcataaaggcaatagagcttggaataatattgactgtgtatgctgcacacagtgttattgccaagaatacacttgtttacataattatgaatatatctagctggtttctggtggtatcatggattatggctccatttgcttttaatccgtctggttttgattggttgaaaacagtgtacgattttgatgatttcatgaactggatatggtatcctggtggtctcttttctaagcctgagcagagctgggaagtgtggtggtatgaagagcaagatcatctacggaccactggtctttggggaaagattttggagatactgttagatctcaggtacttctttttccagtatggggttgtataccagctgaagatagcaaacaatagcagaagtattgctgtctatctgctttcctggatatgtgtggctgtgatttttggtctgttcgtgctaatgtcctatgctcgagacaagtatgccgcaaagcagcacctttactaccgggttgttcaaactgctgtcatcactcttgtagtgctagtgctggttttgtttctgaagttcacggaatttcaaatcattgacatcttcactagtcttttggcatttattcctactggttggggcttgatttcgatcgctcaagtaattcggccattcatcgaatccactgtggtctgggacagtattatttctgtggctcgtttgtatgagatactgcttggagtgttcattatggcaccagttgcattgctgtcctggttgccgggatttcaagaaatgcagacaagggtacttttcaatgaaggtttcagcaggggcctccagatatcccgtattcttactgggaaaagaacaaatacagtttgaggttctgacccagattgttgcggcggtgaaggtgaagcagcggtgctctatctcctatgtacagcttagcaattcagtgtggaagggctttgtgcttactgatatagcttagatccatattgaactcttccagtagcttttatagctatctagtttaggagtccagatttgtgattttggcgatttaggtgttcagttcttttgtacattggttgagctagttgtgtgtagctgattctattgcagcaccaccggtgagctctagtgacctatttgttgacctctgctggaagttgcatcttttgtgctagcaactgtgtcgtgactcgtgagtgctattgctctgctgaaggtataaaagttgctggaaaggatgttcctggatgtgaccgatcagatgagcgatccattttttttagtatttcactgaagtgcgctccaactcaatccaggcgcctcgtccaggctgctgctgcttcgacggctc

SEQ ID NO: 40847 - DNA, 740 bp, Zea Mays
acactttcctttctccctcctgtgactcagtcggtcatggcggctcagatccagactcctccggcgtgggcgggcgtgagatccccgacagcacggccctagcagcggccacccccggtgggcacggcttgtgcgcgaccgtcccggcctgtgcgcgggcgcggcgtggcccttgacggcgcgctggcaagcgccctgctggtgcacaggcgggcagccacgacggcgcgcgagcgaggacccccggcgacgcgtggccccggctccgatccagtctcgtccggcgggcgcgggccctgccccggcggctccccgtgaccctggtgcatgtctacgaacaacgggtaacagtagaatccaaggctacacaagatatgcatgcgtcccgacagcgagtgtgctgcaactgcagggccatgcaggaagatgttccatagtgctggaggtgaagaggtcattgatcgaccatctctctctcgcaacgacattatcattccagttttggtcccgacagaaatgtgcgcgcgctggctgttagcatcagctctgccaccagcaacatgcaaatgtcatggttgaacaaccccaatgatcagctatgagaagaaatgacacgtatctttcacacgcacataggagccatacgaagaacgtactaatgaaaagatcgatgaattatattgatatgatatgacgtgagtgttttgaaatgtttggtaggttctgtttatatggatttt

SEQ ID NO: 40848 - DNA, 3267 bp, Zea Mays
cctcccgtaagctccacgaccggagagagagagagcgcgcgctatccaagccaagaaactccccccgtagtccgcggcccgggctcacgaccgatccggtccgggcccgatggagctcctgagcggcggcgcgctggcgtggcagcagtaccgcgcgctgctccgcaagaacgccacgctcacctggcgcaaccgccgctcggcggcgctgcagctcttctcctcgctcgtattcatcttcctcatcttctgcatcgaccgcgccgtccgctccaggttctccagtaccaccgcctaccgcaacgtgcccgacccggaggcgctcgtcgcgccgccgatcccgccctgcgaggacaagttcttcatcaagtccccatgctacgacttcctctggagcgacggcgggagcgcccgcatcaggggcctcgtcgacgccatccggaggaacaaccccggccgacccatagcacccgaaaaggttttaggttttaggactccagatgatgttgatgcttggttgtttcaaaacccaatgcgttgccctggggctttacattttcaagatataaatgccactcagataaagtatggtattcagacaaactctactccggtagcacggagaggaacatatgaagaccctaccttcaagttccagataccactccaagttgcagctgagagggaaatggcaaggcttctgattggagacccaaattttagctggactgttggatttaaagaatttgctcacccagccacggagaccttctctaccattgctcaagcagggccaactttttttcttgccattgctatgttcggatttgttttccaaatcagtgcattggtggcagagaaagaactaaagcttcgtcaggttcagacttcactcaccacagtctgcctgcatatctttatgctcaaattcgatttcttccttcataataattttggaatcctattcctcctgttcttcctattccaactgaacatgcttagttttgctttcatgatatccacgttcgtagcgaaggcagcatcagctactactgttggatttgcaatattcattattgggttcttgactcagcttgttaccacctttgggttcccttattcgtctgactacaaaaagttgtaccggacattgtggtctttatttcctcctgatttatttgccaaagccctcaacattctaggcaaggcaacagccactcctgaggataaaggttttagctggaatcagcgtggggagtgcccatcttttgagactgactgtgtcattactattgatgatatatataagtggctcatatccacatttttcttgtggtttgtccttgcgatatactttgacaacatacttccaaatgtaaacggcgttcggaagtcagttttctactttcttatgccttcatactggacgggtaaaggaggcaagatggaaggggaggcctctttagcttttttggttcaagccgtcctgcagatgatgctacccctactgacgaggatgtccttgcggagcaaaacctagtaaaggaacaagctgcaaacaatgcggtagatcctaatgttgcagttcaaatacatggtctacgtaagacatatccaggaactttcagcattggatgttgttgcaaatgctctaaatctaagccgtttcattcggttaaaggcttatgggtgaaccttgagaaggaccagctattttgtcttcttggtcccaatggagctggaaaaacaactacaatcagttgtctgactggaatcacaccaattacaggaggtgatgcattcatttatggtcactctgttcgaagcactgtgggaatgtcaaacatccgtaggatgatcggagtctgcccacaggtggtgctttatacattttgatattattgatgcaagtggtggtatatttgaaaaaaaaacacataaatatgtgtgttctgttactttacagtttgatatcctgtgggatgcattaacagctaaagagcacatggaattgtttgccagcatcaagggattgcatccagcagcaatcacatcagtagcagaagagtcattagccaaagtaaagctcagccaagtaactaatgctcgagcaggcagctacagcggaggaatgaagcgccggctaagtgttgcgatcgcactgattggtgacccaaaattggtttttctcgatgaacctactactggcatggatccaataacaaggaggcatgtctgggacatcatagaggaggccaagaaaggaagagctattgtcttgaccacccattccatggaggaggctgatattcttggtgaccggatagctataatggcaaaggggaaactgcggtgcatcgggacatcaataaggctgaagtcgaaatttggaacaggatacattgctaatgttaatttctctggaaatggccacatgcagagccccaacatcaacagcaacactgaggctccggttaatccgaacatagaagctgtcaaatggttcttcaaggaacggcttgatgttaatccaaaagaggagagcaggacattcttgacatttgtcatccctcatcacaaagaaccacttctgacgagattctttggagagttgcaagacagggaaggggagtttggaatatcagacattcaactcggtctgacaacacttgaagaggtgttcctgaacattgcaaagcaggcagagctggagacctctactgctgaaggtaccctggtgactctcaacctgtcatcaggaacaacaattcagattcccaagggggctcgtttcgttggtattcctggaactgagacagaggagcatccaagaggcatcatggttgaggtgtactgggatcaggatgaaaatggatcgctctgcatttctgggcactctgacgagatgcccgtgccagttcatgctgagctgaggaggcctccgtcactttctcgtagggcctcaatggaccgtggacgtccagttgggtatatgattgacctgaaccaggtcccatgaaaaaaaggatgagtccaggtgcaacgtttagattggttttgatgcagattatctggtacatatagtatataggaatcttgtattcgtgtctttgtattagaagtcgtaaccttgtattgcagtagtaattggtaaagacatgctttgtaaaatatcctatagtgtaacacagtattttctgttgtatggcaaacaaaggctcgaaatatgacgcaatagaattacatggtaactacaccctgcgtctc

SEQ ID NO: 40849 - DNA, 2088 bp, Zea Mays
cacgtaagaaaagtttcattataccgtacccactaagagtgctgctggagttattatatgaaaacagacacttgaagttactgtttggcgtgatgggaaggaacacagacaaagctattcgcgggggaaaccaaccactaggctaactagtagcacactgactggtgaaacaagctctcgtcaagggacgcgcatcagattttggcctgataaagatatatttaccaccacgatcgattttgacttcaatacaatctccagtcgcatacgggagcttgcctttctaaatcctgagctaacaataatcttgacaaaggaagaagggcacacagttcaacgcaacgaatattgttatgctggtggccttgttgaatatgttaaatggttgaatactgacaagaaacccctgcatgacccgattgcgttcagaaaggagttggatggtataacagtggatgtctcccttcaatggtcctctgattcctactctgatacagtgctaggatacgcaaacagtatccgcactattgatggtggtactcatattgatggtctaaaggcttcattgacgagaaccattaataaccttgcaaagaagtcgaagactattaaggataaggatattaccttgagtggggagcatgtaagagaaggaatgacatgcatcatttcagtgaaggtccctagtccagagtttgagggtcaaacaaagacaaggttgggaaatccagaagtacggagaatagttgagcagtctgttcaagaaaacttaacagagtacttagagcttcatccagatgttctggattcaatcctatcaaagtcccttaatgctctcaaggctgcgttggcagccaagcgtgctagggaactagtcaggacaaagagtgtgttgaaatcttcatcactccctgggaaacttgctgattgtgcatcagctaatcctgaagaatctgaaatctttattgtcgaaggtgattctgcgggcggtagtgcaaagcaaggacgggatagaagattccaggctattttgcctctaagaggtaaaattctcaacattgaaagaagggatgaagcagccatgtacaaaaatgaagagatccaaaaccttattcttgcacttggattaggagtgaagggtgaggattttaagaaggaggctctccggtatcataagatagttatacttactgacgctgatgttgatggagcacatatccggactctcctccttactttcttcttcagatatcaaagagcattatttgatgaaggttgcatctacgttggtgtacctcctctttacaaggttgagcgtggaaaactagcacattactgctatgatgatgccgacctcaaagagatagttaacaccttccctgcaaatgcatcatatcatatccagaggtttaaaggtttgggtgagatgatgcctgcacaattatgggaaacaacgatggatcctgagaggcggctgttgaagcagcttagggttgaagatgctgccgaggccaatgttgtgttctcgtcacttatgggcacccgggttgaatataggaaggaactgatccagaaagctgctagcatgatcaacatagatcaacttgacatttgaaggcattaagtaaggctgtcctttctgtgtatgatatagaaggtccgccacctgctgcttttcttgccactccaacaggattctagcgttgcagacttgatgataccttggcaacatctttttggtgctagagtagcagaaaacgtagggtacaaacattggatccaggatgagagctgggtttcctaacgaaaactctgattcatttgtggcggtgctataaccatttcagcttgacagttcagagctcacgggtgtagttccctgctgacatcgttcctccgatacggtgtaatatgcttttatatctatcgcctaatatttgcttcatgattccgtgtctcctttcttaatctggcagttaagtatctgtatgagctatggattcgtctgatgtttaaattggacggtttgaacccagttgacatgtgagcaatatctggtttggtttataggtaccaggtttagagagc

SEQ ID NO: 40850 - DNA, 1530 bp, Zea Mays
cagctagctacatttacagcttgtttggatgctcagggatgaacatggtctgttttatgcactggaccttggcgggaccaactttcgtgtcatccgggtccaacttggcggaagggacagacgtgtcgtgaagcaacagtatgaagaggtctccattccgcctcatcttatggttggaacttctacggttggagaagatgttgtggctgaattgagtagggccatggaaaggcagggtcttgatatgaaagttgcagctctggttaatgatactgtaggcacattggctggtgggagatatgctgataatgatgttgttgctgctgtaatattgggcactggcacaaatgcagcttatgtggaacatgcaaatgtgattcctaaatggaccgggctgctacctagatcagggaacatggtaatcaacatggagtggggaaacttcagatcagataaacttccaaggtcggagtatgataaatccttagacttcgaaagtttgaaccctggtgagcagatatatgaaaagatgatttctggaatgtatcttggagaaattgtccggaggatcctgctgaaactggctcatgatgcttcattgtttggggatgttgttcctccgaaactggaacagctatttatactgaggacgccagatatgtcagccatgcaccatgacacctcacatgatctcaaacacctgggagctaagctgaaggacattcttggggttcctgatacttctctggaagcaagatacatcactcttcatgtgtgcgaccttgtcgcagagagaggtgcacgcctggctgctgctggtatatatggtattctgaagaagctgggtaaagacaaattgctaggtgactttagccaacaaaggactgtagttgctattgacggtggcctatacgagcactacaagaagttcagtgcctgcctagaggcgacgctcacagacctgctcggcgaggaggttgcctcatcggttgttgtcaagttggccaacgacggctcaggaattggagctgcacttcttgctgcctcgcactcccagtatgctgaagctgcatagttctaggagctcgggggtcctagtgtaacctttttttttgtttcccaccatttcccccttcaatcgagaagcccccctcgtgcgattcgcatctctctattttctttcctcagcagcgggatatagctaggatggtgccattgagcttggagtacattatcactagcaacaagcattagcagcggcaggaaagaagtggaagcggaggcctgaataagccgttccattcctgccgattctttttcttcccaatcccttgaagtttgtattatgaggcgatatcacaaaacagccagttcttatctgtgtgatctcgtctttcaaaataaggagagaggtgggggaccaaatcatacagtctttactcattttttattgaatcgtgcagtgcttctgcctttatttcagaaacaactgcaatggcaatatttgcttgttcttatgtttgattggtc

SEQ ID NO: 40851 - DNA, 4201 bp, Zea Mays
agggcccaccgtctcttctcacatcctcgcagttccacccctgtccccttccacctccctccccagtgcccccctccgctttctccatcccgcctccgatccggccacccgccaccgccgacaccgggcgacccgtcccaccgccgcgccgctccaggggaaccgtccgggcaggcgggggaggatggagtccatcatagcgcgggcgctggagtacacgctcaagtactggctcaagtccttctcccgcgaccagttcaagctccagggccgcaccgcgcagctctccaacctcgatatcaatggcgatgcgctgcacgcgagcctggggctgcctcccgcgctcgccgtcgacacagcgcgtgtcgggaagctccagatcacgttaccatctctatcaaatgtgcaagtagagccaattgaggtgaacattgacaagctcgatctcgtgcttgtagagaaggacgattctgaaaatctttccagccctagcagcactgcatcatctccatcagcaactaagagcagtggatatggttacgctgacaagattgcagacggaatgacagtgcaagtagggattgttaacctgctactggaaacacatggaggggctcaccgtcaaggggatgcaacatggtcaccgccactagcagcaatcacattccgtgatcttgtattgtacacaacaaatgaaaaatggcaggtagtaaacttgaaagaagcaagagatttctccaacaacaaagggttcatttatgtttttaagaaactggagtggcaatcactgtcagttgatctgttgcctcatcctgatatgttcgccgatgcaagatttaactcttctagtagtcaagacgacaaaagagatgatgatggtgcaaaacgaatgttttttggtggtgaaagatttttggaaggaatatctggagaggctaacatcacggtccagcggacagaacagaataatccacttgggcttgaggttcagctacatattacagaagctgtctgtcctgccttaagtgaacctggcttacgggcctttcttcgatttatgactggggtatctgtgtgcctaaacaggggagatatagatccaaaagctcaacagcttgcagaagcagcaggatcttcattggtgtccattatcgtagatcacatattcctctgcattaaagatactgagtttcaacttgaacttctcatgcagtctttgttcttctcacgggcaagcatttcagacggcgaatgctcaaagaacttatcttgcatcaaggtcggcgggatgtttctgagagacaccttttctcgccctccatgcacattgatacagccgtctatgcaagcagtttcacaagaacctccacctgtgcctgacttcggtcaaaatttttgccctcctatatatccatttggcaatcaactattagactttgctgctggagttcctttgttttccctctattgtcttcagaccaccccttctccatcacctccgaagtttgcttcaaaaacagtcatcacatgccagtctatcatggtaaccctccaggagcaatcgtgcttaagaattgcttcattcttggctgatggagttgtacccaatcgtggtgccatattgccagagtcttcaatcaacagcctgacattttcacttaaagagtttgatctctctgttccattagatactgatgaaatcgcaaggtgcagtggaaccaagaatactaacccccaatcatcattttcgggtgcaagactgcatgtggaagacctatacttctgccagtcaccatcaactaagtgtccattgctaaaccttgacagagatccagcttgcttccttctgtgggaatatcaacctgttgatgcgagtcagatgaagtgggctacttggtcttctcacctaagtctctcacttgaaacttctagcacttcaaatggacagagagcagtcagtgattctaatttgtggaaatgtattgaactagatgatatccgatttgaggtagctatggttacagcagatggtgggcctttgttggatgtaccacctccagagggtgttgtaagaattggtgttgctttccaacagttcaagtccaacacctcagttgagcaattgttttttgtgttaggtttttatacttactttggtcaagtagcagaacgtatctcaaaggtcagcaacgctaacaagtctgagtcagtgaagtcatcggctgacaagtcggagaataaactgccaagtgatacagctgtgagtttaactatgaataatctccagctcaatttcttagaatctttgtcagcaagtgatgtacatatgcccttggttcagtttggcggaggggatctgttcctgaaagtttctcaccgcactctaggtggtgcctttgcagtcacgactaatttgatgtggacaactgtttcggtgaactgtttagaaggagaaagtgctattgtttgtgagcatggcactgcagtgactggtgaacacagcattttagtgcatggaaatgggcaccccaagatgagagctgtcttttgggttgatcataggagcaaacaccaggttaaagaacctcagttccttgatataaacatcactcatgtaatgccttacgatatccaggatatggagtgccatagcttgaatgtatcagctaaggtatctggtgttcgtcttgggggtggaatttcttacactgagtctttactgcatcgatttggtatcctgggtcctgatggcggtccaggggaaggtctcttgaggggtttgaaggatttatcttcaggcccacttgcgaagctgtttaaatcctctcacctcactgaaaaggaagatgaaaggtccaaaattgatgatcacaattcaaagtttgatctcggggtgccagatgatcttgatgtatcaattgaacttagaaattggctatttgcacttgaaggaactgaagaagtaggataccttttttctcctcgtggaggtgatggtatcagtagagaagaaaaatgctggcattcaaccttcaggaatctacatatctctggcaagagcagtgaccgacttaaattgggaggcagaagaaaggtgtcacccgaaaaggcatttccagtggaacgctttacggctggaattgaaggtttgcaggcaataaaacctcgtctgagagatcagtgcactaaaaaaggaccatcaaacaatcatgagatgggcagagattttaatagttcaagttctgttggtgaccatggagttgatgtcgaagctaccatggtcattggcgaagacgagattgagggtgccaaatggacaatggataatatcgaggcggttgcaacaaaagaagaactagagcaccttgtgatgctttgcagatctgaggctgatgcaatggggaggatcactgctggaattcttcgtctccttaaacttgacaaatctcttgggcaaggaactatagaacaactacgtaacctaggaagtggaggcatggacaatatcttttcacccaggaggctcagcaggcagaacagttttggtagcataggcactcctcggactccaactatgcaagccattgcagacgtcatgggttcgaaaaccacactggaagcaactatttcctcattacaaggcgagatttccgaatccaaggccaaatgtatggcactgatttctcaggcaagcagcactgaggatcaaaaccgtgccgaggacatcaggcagcttagcgaaaagctcgagagcatgcaatcgttggtgacacgattgagaactttgatcatttgatctgactatctgagttgtgcatggttttttttgtgtacagtacacaaggtcgttctgttcaaactcggaagtggcaaatgctgcttcctggtggctggttgagttattcttttgtgtacatttatatatcttgggaggcggtgtgtaaagattaaggggggtggaataatcggttgataggcagctggaggaaattttgtaggcagctggtactggcaaatatgctttgtagcacggcatcatatgatcaaacgggtcactaagaagagtgcagtgccatttatatcattgtatgtataaaatgtgcacagaacgtgcttttcgcgcacaaaaactttgttcctcctaagtcactgaagtgtttatatgccacttgtgtcaactatcgaagtgtttcttgccgtg

SEQ ID NO: 40852 - DNA, 2397 bp, Zea Mays
atggatcagtacgaggtgctggagcagatcggcaaaggagcatttggctctgccctgctggtcaggcacaagctggagaggaagaagtatgtgttgaaaaagatccgtcttgcgcgtcagacagaccgcactcgccggtccgcccaccaagagatgcagctcattgctaatgtgaggaatccattcattgtggagcacaaggattcatgggtggataagggttgctacgtctgcattgttatagggtactgcgagggaggagacatggctgaagctattaaaagggctaatgatacccacttttctgaggagaagctttgccagtggctagtgcagcttctcatggcccttgactatttgcatgcacatcacattcttcaccgtgatgtgaagtgctcgaatatatttctcactagggaccaaaacataagactcggtgactttggtctcgcaaaaatattgaccgccgatgatttggcattctcgattgtaggaacaccaagttacatgtgcccagaactcctcgccgatataccttatggtaccaaatctgacatttggtcactaggatgctgcatgtatgaaatggctgcgctcaaacctgcttttagagcttttgatatgcaaaaccttatcaacaagattaccaagtcgatagtatcacctttgccaacaagatattctgtcgaagacttgttaggagcatgctacggagaagtccagagcataggccaagtgcagccgaactacttaagcatccacatctgcagccgtacgtcctgcaactccatctgaagtcacacctttctcgcagcatagttcctgttcaccagtctccaagcgagaagaggatgacattcgccgcagagcccgtttgcagaagcaagggcaggaggaactctttaggcagcgaaaggatgatagcagcctttagcaaaccttctcctgatagaagttctgtcagctctattcggagtgtcaaggacgactacaccgccacacagagtgtcagagagctatcggttgatgaaagcatggtcgaggttgctagtaaacccgtggcatcaaggacctcagatgtcatgaggactccgaaggcgactccgtggaagatgatgacgactctgaggaatcggctagaagctccacaagcatcatatgacagaacgagtcatacagagttttcaagaacaccggttgacaagaggaacagccgcgtggcccgcagagcatcgcttcctctgcccgtatttgagaccccgaagcagcgcagcagcatgagcgtcctggagcggctggagtcccccgacgtctccgtgaactcgcctcgcatcgacagaatcgccgagtttccgctagcttcgtgcgaggaccccttgttctcgaccgtgaagccaccgacacccgccagcgccagcgccagcgccacgcctccgttcgtggaccggtccatcaccaaggacaagtgcacggcccagacgctccggtccgcggcccacgacggtggcaacggcagaagcgaggacggcggcggtttgtcctcgggtcgcaccaccaccacggcagcgtcaagcggtgggacgtcggggtcgttgcagccgaaggggcggttcgacacgacgtcgtaccagcagcgcgcggaggcgctggagggcctgctggagttcagcgcgcagctgctgcagcaggagcggtacgaggagctcggggtcctgctgaggccgttcggccccgacgagatggtgtcccccagggagacggccatctggctcaccaagagcttcaaggaggcgatggccacgggcttgtagcggtggcctcctttcaccggcatggacggatcaggaattcaggatcgcccatcagccttgcaggctgtagacggccggatggcatcgccggtgctggcgtgtgtaggtcaggtaggtaggctatgagaattgagaagagagaggcgttagcgttgacggatcagttgttagttgctgggagtggacacaacaccatctcagtgttggccccccggtttattttgttactatgctagcagttcttagttagttaatggcgctctggctagctagctagtgatgtaccaatgcaacccccccccccccccccccccccccccagcagaattagtagcatcagggagtagcagtagaggtagagctggaggagtcttgagctaggaaggagaaggggattagtgagatataattcctatactgtgatgtagcccaagtatgtaccagtagcttcatatgcatcagtgctgactgctgaagaacattcagacatctatggattcagccattcaggccgattgctacgcttatctgcagttatttgctcctgcaatccaggagtgtggaatgggcgctgacactgttttgg

SEQ ID NO: 40853 - DNA, 431 bp, Zea Mays
tgcgcaaggtggactcatccttggctagttgctcgctggtgaggtgtgggcatcatggaccgcatatcgtcgtggacagacatctccatgactctcggagccggcgagcaaatgaccaaggagctcgaggcaccgcaggttaaagattatgagtaggagctcgtagaagttatctcaactcaagaggactattgcgcgtggataggcgcctgaagtactggtttagttctactgaagggtgggtgcaatcatgtgaaaacttgtactaaacccgacttcaaagtttctgcagacaatgttcgaagatcaacaatcgaagcttcaaagtggtcaaaaaagttcttgtttgatatatggaaggagggtggaaaggaatcaatattgaagaatcaataaaaatgatagaaggttcgtgcgtagctaccttcgtc

SEQ ID NO: 40854 - DNA, 3040 bp, Zea Mays
ttttagtttttttttaaaaaaatagatctcgtggaggtggacccgtttagatagaagaagctgaaatagacataaaattgttgacctaaagcttttctaaacatacccttaggtgccgttcggttttcacggaacgaaagactagaacaatttctagctggatttcttctctaaggtatataaattttgattatctaaaacgattctaagtccattattgaataaacgaacaagtccttgactggctctagataagagagcaacttgttaacatgaggcgtgagcgtgagacgccaccgcactgtcgccgccgtgcaggctccaaaagatttttgtacgtattttccttttcagactccggcaaacagaaactcatgttttccctagttctgtgggcatcctgaagttgacgtcccgacccagggcaacccttgctgcgttgccgcgttcgcgtccttcctcagcagccctgtgtctgtgtgctgggccggcggcggcgagtgtgtgcgatgcggtgaccctcacgcagcccacgcctgacgcctccaggggacaggacgggcctctgcctctctctccttcaccttcactttaaaatacaccagcccgcggctcctcagcgctctctctcgctctcgctctcgtcaggcacgcacgcacgagtgaacacagacgcgatctcctgctctctgcctccctcgttctcctctgcccgtgcgcgctccagggcacacacgtacggagcgtgcgagcaccgtcatggaggaggacggcggcggaggcgcgcggcacgtggagcggtgggagggctacgtggactggaggaaccggccggcgaccaggggccggcacggcggcatggccgccgcctccttcgtgctcgtggtggaggtgctggagaacctggcgttcctggcgaccgcgagcaacctggtgacgtacctgatggggtccatgggctactcgccgtcgcagtcggccacggcggtgaccagcttcatgggcacggcgttcctgctggcgctgctcggcggcttcctctccgacgccttcctcaccacctacaccgtctacatcgccagcgccttcgtcgagctcacgcttctctatgcatcccggctctactcgaagcgaccgcagccaggcttccgagcaaagctcgcggcgagcgtacgggcccagccaggctcagtacatgcaacggcacgtataccgaggggttggtgatcctgacggtgcaggcgcgcacgccgtcgctgatgccgccgcggtgcgcctcgccgggcgcgggcggggctgcgtgcgagcccgtgtcgggggcgaagaaggcggtgctgttggcggggctgtacctgacggccctgggcgtgggcgggatcaagggctccctgccctcccacggcgcggagcagttcgacgagcgcgcgccgcgggggcgcaaggcccgctccaccttcttcaactacttcgtcttctgcctctcctgcggcgccctcgtcgccgtcaccttcgcggtatgggtcgaggacaacaggggatgggagtgggggttcggcatctcctccgtcgccatcctgctctccgtcccgctcttcgccgcgggctccagcctgtaccggaacaagctgcccacggggagcccgctcacaaccatcgccaaggtcctcgccgccgccgcgctcgcgcggcgccgcggcggcggcggcggcggcgcgcagagctccagcaacggcgccgtcatcgaccgcgcgcccagccccgcggggagcgccgacgacatggatgagtactgcaagtccggggacatggaggagatctcgatctccgacgcggcgtcgccggccgccgagccgtcccgcgagctcgcgttactgaaccgcgcggtgcagtgccagccgccgcggcacggccgccgcctggcgtgcacggtgcaggaggtggaggacgtcaaggtcgtgctcatggtgctgcccatcttcttgtccaccatcatgctcaactgctgcctggcgcagctgtccaccttctcggtcgagcaggcggccaccatggacacgcgcgtggggaggctcaccgtgccgccggcgtcgctccccgtgttcccggtcacgttcatcatcgtcctcgcgcccgtctacgaccacatcatcgtcccgttcgcgcgccgcgtgacggggaccgagacgggcatcacgcacctccagcgcatcggcaccgggctggtgatgtccgtcgtcgcgatggccgtggccgccgccgtcgaggtgaagcgcaaggacgtggcgtccagaagcgggatgctggaggactccgggaagccgctgcccatcaccttcttctggatcgcgttccagtacctgttcctggggtccgcggacctgttcacgctggcggggctgctcgagtttttcttcagcgaggcgccgccgcggatgaggtcgctggcgacgtcgctgtcgtgggcgtcgctggcgctggggtattacctcagctcggtgctggtgtccgtcgtgaacagcgcgacaggccgcggcgggcaccggccgtggctgcagggcgccagcctgaaccactaccgcctcgagaggttctactgggtcatgtgcgtgctcagcagcatcaactacctcttcttcctgttcttggccgtcaggtacaagtatagaaacgcgggggtcatcaaagtgatgaggacatcactatgagtacgactacaccagcagcacctccacatcaagcgccacttccttcattagctgggccaatcactcgggcccgtgccagagatcttaacttcgtcatgctactgaagaatgagggcccagaagaatagacgaccagcccaactgcggcccatagtggacgacctagggttggccgcccctaggggctgcgccccctctatttatccaggagctgcgcctcctttattttcgagttttgttttacgttagccttagctactctcgaacacgcgcaaatctgcgctgtcttcgtgtattcagaactccaccctcgagtaatagattagattgctcgc

SEQ ID NO: 40855 - DNA, 1023 bp, Zea Mays
cgacgctggctcctagggatattcttcaccgccctcctctcttcttatctccagccgttcctatcctgtccacttcctagaaaattcctagccgctcgtgcaatctccggcacgcagccttggacatcgcctcatctcctcagctgctcgccctgtctacgcgccaggcgacgtaaccagtagcctctgctcgctggcgtcgtgctcctctgctgaattcgacgctccgctgtcctgcgagctcaaccgcgccgaactgccaagccagtggccgacatgctctgtcctcactgtccctgctcgttcccctgctgcaagttgtcgggcaacctgcagctcggacttcaccatcggctctttgcgtgctccgctgcaccagatcgccgcgtcaccgtgaagctacatgccttgccttgcgttgcctttcgctgctgctgtagccgagtcgtcatcgcccaagtgctgagcgctctgaacttgccaccgttctgcagccctgccgtcgactctctactcgtctcgctatgttgtcatagttcactatcctcgtcctcgccgtctaccttgccgctcctcgcgctcaacaagctgtcacgcttggcgtgtttcctccgtgtgacctcacgcgttcctctcgcttcatccggaagctagtcgtgtggtagagcaggtatggttatttggttcgaacatatgtgtggatgcgggataaattctaagagaaataggttcttgttgtggtcggctgccgttagagccatcgtccgatatcttatgtttgtgcgtgtggatcggcgaagaaagaaactagtttgtgtaaaaaatgaagtttcgggcaattttttgcctgatgcttggtgtgttaccggagtcgatttcgtcactattttggcgaatcttcactcggctttggtattgcatagggttagattttcttggagtatattttgatttgattggagcgtattcggttagtcgtcgattatctgcgtaattagaaatacatttttcgtcagttgtcaa

SEQ ID NO: 40856 - DNA, 731 bp, Zea Mays
gctcttacctgacattgtgttacatagtaatacaaataactttcttttgaggcagtgtaaccacagatgcctttatccccttccattccgattttttgttgaattcaggttcttgatgatgttctaatctacaaatgtgttagaagatggtcggatcctgtgtgactggcaagatttaccatttaaaaactatgcccccggagaatgaggagaattctatccgacttattacacgttctgatgccacatttgagaagagccagaactgagcacctacaacccttttaatatcgtacaactgacctgttacctagggggaaacactgcatgactgttgttggtatccttgtctggaggagagagtgattctcctagaggtggaggaggatgaagtggtgatagacttcaagccaactccaagtgtcgtgtcgacctctgcctccgctccctgcacacatccctcccggtcgtcttcaaggtccagacctcctccccgctcaagttcctcatcagcacgttgcgtggtgtcatgtcgccgctttcctcagtgtccatacgcgtcgtgcgaggcatcccgcttcatctctaatcacctttatgtgcacatcgtccatatgtgacccccttctccatataatttcaacaagttttactcttttgggctccgtgtaagttcattagtaaaatctctactaattattaatgctgcaaagttaacctgtcattctgtg

SEQ ID NO: 40857 - DNA, 1415 bp, Zea Mays
tgcactatgtttgcagtggcagagccagaccaaatcgaagcctaggcaccactggtggggggggggggggaggggtggcgatgccgggcctaggccagatgatgcaggcgaccatagctggctcacatcccctctccatcgaccatgctcaagttcgtagacaggtgcctttcacccatcgccaccgtccctagcactcgggagcctatcatcggtaccctccccactcacgacgaccacaagtccaagggggtgagacaacaacatgccaccaaggtaattgttctagaggtacacaaccacttcttgcgtggccatttctgatgcaaatcatagcttccctcgctgttgtcaatcgagagtaggaccttggtatcaaggtgatgcacgagcggatgcccttgtttagacacttctagccgcacgacgagagattgtagtgatctacaaggttcaagtctggtgtctggcccttgctaaacttgaagacgaaggcgaggatgacgaacttgtagttcctggatacacacatatttaacaggcaccaatggagccaatcttaggcacatgcctagatagggcaagccctgcctccacctatgtgtgtttgaacttgttgtcttggttgttcgctggtacacaaacattatcaccattggctcccactgcagccaaggatgaaagtgggtggtgatgatcatatttagaacctccagatggaaaccggaggtggaaatcaattgaaaagtggaaaataaagccatctccaacaactataatcgtcacctatgccttatatcggttgtgcctacgtcactagtaactaaagctaaaatcgacactaggagaggaatgggtggacctccacctgatccaccacacatgatgttgcatgtccgtccaatgcacttctgctagattccatcatgcaaggcggtcatcatgcataggggtcatcgtgtcaggcattctattgggccaatgtcatagggaggaagagagacgccatgatagggagagttcgtccttcatatgagagagaaatgtggggaacacagaggatagagagaaggtggtatgaccaaggatctacatgcttcacacacatacattttcaatgtgacacgcaagcgcttgcacatgtttcaccccctattagccacctaaagagaacacagacattgaggggagatacatacacatgcttctttgagcacatcttttcattgtaaactcttttcatgaactagattttgatgactgattgtattccaaacaagtgatcatatattattaaaatgtttttataaaacaacggtgaaaatgctattaaagaaatactatttatgtagtagtgtttgtagaagttagaagaaaataagcattggtgtacatatctttgcaagaggtatgag

SEQ ID NO: 40858 - DNA, 2574 bp, Zea Mays
gctacacgtatgacgtagcttccgcgcctccctccgcctccttggcatccacggccgcgcgcgcggttctccgccgtccgtttcgtggctccggagatccggcctcatccgccccgccccgcccgcctcccggcctcgtcgtctcctcgtccccccactcccgtctcgtccgctttctttaatcaatcctccgcgccccacaaccccaagcaactcccactaatcgtcccctttccttccctttcccggcgggggcaacaatggtcggtgacggcgatcggtttgctgcatcggcggttcctgcggcgccgtgcaggtttctcggtcacctgtgagctcgatttgaccgcccccacctggcgtcgtgctggttccgttctgggtattcttggcgctggtctgggctctggggcgatcgggacacacctccgctctgcttatcgagggtcgaggcacccgacgatcttctccggaaaagcgccctactcttcataccatcagttcctgaaagatatgtttagaaaatgtgcatagttctgtgacggtggatggtggattggtggtcatggaagggacagtaatcagaatagctagtgagtcaaaacgaggcaatgagcaaacagactctttgacagaggtgcctagagctattgggactttagtaacacataatcgtgaagtagaaaacttaattgtacttgaagatgacacggaattaacaccttatgaaggaatggagtttgagtctgaagatgctgcaagggatttctacagcacatatgcaagaagtgcaggttttcggattcggatcagcagattgtgtgttctaaggaaggcttccgtgaagttcggaccaagaaagtgttgacagatgaaggaaaaacaaagcgcccaagaatgataactagagttggttgcaaagctatgattgtagtgaaaaagatgaactctggaaagtggatggtttcgaaatttgagaaggagcataatcattcgctgtcatattctaaaatggtccctagtacctcaaacattacttctggagaaattgtcgatttagctgcaaagggtgcacatcctagtgaagtaaaaaatgaaggatacagtgcaggaacccaatgtaatcctgcagattccctcactatactttataacaacttatgccaggaggccataaaatttgcaaaagaaggttcagtcacagaagaaatttaccatgtggcagtttctgccttaaaagaggctgcagaaaaggttgctgaagtcaaaaggagtcgtccaacattgtcacattgtggtttcgttagagaaagcaaacatgatgtcttacaggagaaaagtatgagtgctttgcaatgttcaaatcaggttgaactgacaagaacatctcctgggtccaggcctcttcaagattctgcatcaaatcttctgctgataccaaccgacattttgactgattcaaggttatatagcggtgtcgatactgctcctctaacaggaggtttccccacaaatgagagtgaaagtacacatgcatcagaaagttcttttatgcattttaagaacacaaagaaaacctcttcagaaaaatctcagaacacttgttttaatcaactcatccatggaaaggagcaaggtatccatggatcttctaaagataccatggttgctattcctgcgatacctcttgcactgtgcatgcctgtgacgcagagcttacctggatcttctacagaaggaccatatagattgttggctgcacctattgaagcagttccaatttcatactgccctgcagaacccataagacagacacaaaaaggtatttgtgctttaggtccatttggaggtgttctgtctgaactgaagaaccaaggaacagtccccaaatctatagttcatgctacagctcttgcttgtggtgctcgtgctgttcctcttgaagatgcagcttcgcttattagtgccattgaatccaaaatcagatctggaggggccataatagcgaaacttccttcaaacaacctagcacctctagttcctccagccattgctatgtcatcttctagtgaagatgacgaggagcatgaccacagtgagccctcgcaatgatcgatgtcgatcgcaacgttaatcatcagagctccaacgcgatgaagcttcagagggagctatcggagttcgaaactgaagctggcaactgacctggtctgaagacgaaagaaaatgatcatactgattgctaacatacgcgaagtgaaggactgaagttgttctaaagatcaaagcttccctgaaaggtggcagatctattctatgatttgagacattttttaaaagattggattaggattgtagtcacttgtttctgttgagtttatattgtaatcagattaactcaagttaatacctccagtggagaattgtagaaaggagtaaccatgctatgtacatgtcttctgcataaaagaaaggcgatagagtttaaaatccagctgtgctaaacatgatgttcataacctgaggcacccgtgtaaaactactagcgcctaccacattgggattggggtacag

SEQ ID NO: 40859 - DNA, 12407 bp, Zea Mays
ccgggagagagtgcatcagcactgcaggggtctactgaggcactccaagtggggaaatggcggaggcgacgaattcgagcttgggcacgtaggcgtcgctcctgccatcgccgcagcggtcactggactctcacgccgccgccgccgccgccggagaccattagttctcctgcgcggcggctccgcggctcccgccctctcccttaccttcttcccgctagggttttctccgatccccaatcactgctggttcacaaatggcttcatctcagcatgttgagatggaggctgcgaaacttctacataaacttatccaggagtcgaaggatgagcctgctaaactagcaacaaaactttacgtgatatgtcagcatatgaaactaagtggaaaggagcaatcactgccatatcaagtcatatcaagggctatggagacagttgtgaaccaacatggaattgatatggatgcattgcgatcatcacgaattccatttgctggtggtcctcaggcaggggattctagtggtgtcatgtcaaaggacaaggaggtcattggtaaccagtctcccatggtcggaagtgatgcttcccaaagtagtggacaagctggattatggcagcttccatcaggttcaaccgatatgataagacatggggcatctatttcaggtagggtacccacagggccaaataggggagatttctcagcagctgatattcatcaaggctccatgtcacaaaaaagcggtagatcctctggcattgaaagccctgcaagtctgcagatggaggacaccagatctatgaattcacatgattctttgaaatccgatgagaaaacaagtaagaaaacctcttccaagagaaaaaggatggattcaaaaggagctggtgatttgcgttcagaagacaactcaaagtcagatgttatctccactggacagaataccaggaaggggaaacaggttggtaaggctggtagacaaggtcagccttccatgggaattgagcatgagcagcaacctcataaactgcaaggtggtactggtcaggtaccacctatacatggtggtgcaccttttctcaggactcgctcagaaggtccttctgggaggacaatggacaagactaaaccatcaaatccattctcaatgggtcaaattccaaattttcctgaagggctggcttctactggtgctccaatcgagttgcagaaaagtatacagggtggagcaagtttatttaatcctggttttggctggaaccaaaatccacaagttcaaaccttgaagaattctcaaggttctattcataatttagtgaggtctggagttactgttgaagggaaagttaatgtaggggcacaaggagcttttaactctgcctctgcaccacagatggaatttcccacagttcctccatacaacccctcttccttcggagctagctcacagtttctggacaaaggcaaggagttggtttccagcattataagcactgaacctcattcatctaaagttgcatctcagcctgggatttctcatggaagtcccatgcaagaaaggcaaggtatgatcagggtgccacagagaggcgaggcatcatttcaggaacgcaggccatcttcacttccgagtagaagtactgggccaagtccaatgtctcacatttcttccaacacaccatttaaagaacagcagctgaagcagctcagagcacagtgcttagtatttcttgcatttaggaataatttgcagcccaggaaggtacatcttgaaattgctttgggcagagggcctcctgcagaaagtgacagtgcaggtcaaaggggcagcgagggcagagtgtctgatgctctgggaaaggaaaatggtagcagtcgggagaactctggtgtcttttgtaggcaaactgatatctctagacttccagccacatctgcaggaagtattgcagaggatgattccttatcgaaggatccagaaaatgctacaaaaaaaatcaagttagctgaacaggagaagtcattgatggaagtagaaaatgtccagcaagcttctgttatgcaaggaactagttctgaaatgcgttcccaagaaactgcatctcaaaatccatatcgaccacaacagtcatattatcaaggagatacaagaagaatcgcctcggatatccataggactgatgctgaaattttgaaccagaatttaagttggggaggccagggatctactgctttgggtggtactagacagcttctgaatcaggaaactaaagaatcacttgcaccttcaaagtcacaccatatgcctgttgatggttacaactccaatatacaaggaatagatcggactccagagatagctggagctggtaatgatgttgaaaattgtagccacgtagcagatattgtgcctgagcaggctgctgatgaaggagatgaggacctctcagagcatgaggatttattgtcatctccaaagcacacaatgacggaaaaatggatcttagattaccagaagagaatttacaatgagaaacaaaagagaacattggagcagcataaggtacacagcagaatgtcagcaacatatgaggagctaaaggagagcgttaattcatccgaagatctttctgcaaagaccaagagcgtcattgaattgaaaaagcttcagcttctgccacttcaacgtcgtgtacgcagtgaatttttgctggattttttcaagcctaatacatccgacttagagcgcataaaatcactgaagaaacataggcatgggcggcgggtgaaacagcttgaaaaaattgaacagaaaatgaaggaagaaaggcaaaagagaattcgtgagagacagaaggaattctttgctgatattgaagcttacagagagaaactcgaggataacttcaaggttaagagagagcgcttgaaggggttcaatcgatacataaaagaatttcacaaaaggaaagaaagaattcatcgggagaaactggataggatccaacgcgagaaaatcaacctgcttaagaacaatgatgttgaaggttatcttagaatggtcaaggatgcaaaatctgatcgtgtcaagcaactattgcgtgaaactgagaaatatcttcagaaacttgggaacaaattacagagtgcaaagtccacagatggccgctcatcttttgttactgataagagtgacactgcaaacgacattgaagatgagagctaccagccacagcattatctggaaagtaatgaaaagtactatcaactggcacacagtgtaaaggaaactgtaaatgatcagccatcttatcttcagggcggcaaattgcgagagtaccaaatgaatggcttgcgttggctggtttcattgtacaataataatttgaatggtattttagcagatgagatgggccttggtaaaacagtacaagtaatctctttgatatgctaccttatggaaacaaaaaatgaccgtgggccttttctcgtggttgtaccatcatctgttcttcctggatgggaatctgaactcagcttctgggcacctagtataaataaaattgcttatgctggtcctcctgaagaaaggcgcaggatgttcaaagagatgattgttcatcagaagttcaatgttcttctgacaacatatgagtacttgatgaacaagcatgataggccaaaactaagcaaaatacaatggcactatataataatcgatgaagggcatcgtattaaaaatgcttcttgtaaacttaatgctgatttgaagctttatcggagctctcatcggatattattgacaggaacacctcttcagaataatctcgaggagctgtgggcacttctaaattttttgttgcccaatatttttaattcgtcagaggacttctctcagtggtttaacaaaccatttgaaagtaatggtgataattcacctgatgaggccttactttcagaggaggagaacttgttgatcataaatcgtcttcaccaggttcttcggccctttgtactcagaagacttaagcataaggtcgaaaatgagcttcctgaaaaaattgaaagacttgtaagatgtgaggcatctgcttatcagaaacttctcatgacaagggtggaagaaaatcttggtggaattggagccgttaaggttcgctccgttcacaactctgtcatggaattgaggaacatatgcaaccatccatacttgagccagcttcatgttgaagagattgagggctacctacctaaacattacctaccatctattttgaggctctgcggaaaacttgagatgttggacagattgctgcctaaactcaaagctacgggccatagggttctacttttttctacaatgacaagattgcttgatgtaatggaggattacttggtttggaaaaagtataaatatcttcgattggatgggcacacttctggccatgaaagaggagctcttatcgataaatttaacgatcctaattctcaagcattcatttttcttcttagtatacgagctggaggtgttggggtcaatctccaagctgccgatacagttatcatatttgatactgattggaatcctcaggttgatctgcaagcacaggctagggcccacaggattggtcaaaagaaggaggttcttgttttacgtttagaaacggtccgaactgttgaagagcaagtcagggcttcagcagaacacaaattaggtgttgctaatcagagtataactgctggtttttttgacaataacacaagtgctgaagatcgaagagagtatcttgaatcactcctacgtgagtctaaaaaggaagaagcagctccagtgttagatgatgatgctctgaatgacattctagctcggagcgaagctgagattgacatattcgaatctattgacaagcaaaggagagaagaagaaatggcagcttggcaaaaggtggttcaggatggttcaactagtgggctagaccctggagtattgccttctcgtcttgtaactgatgatgatctgaagcccttctgccatgctatgaaactttatgagccatcaaatgtgaaaacagtaaatgtgaatgtgaggaagaagggtgaacttgggggccttgatacacagcactatggaaggggtaaacgagcccgtgaggttcgctcttatgaagaccaatggactgaagaagaatttgaaaaactttgtcaagctgattctcctgaatcatcccaacctggtggcatgtcgaaggatttggatattcttaataaaggcattaagactgaaattcttgtggagagttcaaaagaaccagaacaaacgaagatggaggcatccccaactgtcggtgactctccaccagccaaacggcggagaggtagacctaaaaggtcagatgtttttgtatctcctactgctggtctgactgatgctgtcaaacaagacacaggaaccacacaggacggtagttctgctacaccagcaagtaccatccactctgatgcaccagctactgcaatcaattcagctgtttcagatgttaatatacattctattccaccagctgataccaagaaacaagagttcagtactgataccaaggtttccagttctgtttctgttttggaaggatctgtgccgaatgaaattggtacaccattacagagtgttcataatgtagcagtttctgcaccaccgcatcaatcagctaggggcaggaaatgccaagcaggagaaacacctcgtaggcgaggccgaaaaccaaaatctctatcttcatctggtgtagatgatgttagtcttaacccaaccttttcaactgttagtggtgtagcagacactagttatgttccttcatattctcaggtctcatcacaaggcactgctgtggcactggcaggaatccagaaggattttgtgacagttaagttggatacattgttaccagatagtggtaagggtgctcctcctgttaatgagggagataaaggtgctactgttacaacacctgtggcaaaagatatatgtgctgggactgtgacaacatcagacaacactgtcaccctgacaccaaatactcttaaggaaaacattggattagttcaagtggcatctgcaccttctatgctcgtggcttctgaagaactaatgaaaatagcacatgttgcggtggccgataagcctgttgagaagcaaactgcttcacgtcgccgcagaaagaaaacatctagtagcgaggatactggagtcagcactagacaaagatcagctatgaaaagatcttactacaacacctctgttgccgttgatgatattggttctgctgtgatcccaaatgaaaaatcaggaataacgaaggaaagagatgtcagttcaattcaaagtacatccaatgaactaccaaatattaactcaccattgtatgagaagtctggatatgattctcaaccaagcacacctatagctgtccccatcaatgaagacactcttcctagtggttttgacacctgtactaattctatgataactcttgccacatctgccaactctgctgaagatgataaaccagttgatttgcaccttaatgcacctgtttctgttgattcccaaaaccaagaacaacacatgacagggaaggaccatttggcagtgtgttctagaatctttgctactcagttacagacggacactgcaaatcctgctattgatcataaaccaggaactgcccagtttgaaccatctgcttccttgccccagaattcaggcaaggatgctactgcactaccttctgaggttgacagtgctgctccaaatagggcatcaagcaggaggaggaaagggtcaactcgagaaccacgcaccagaagtaattctgcatcagctgcaagtgaacgtcgtgcccgacttactggattgaagcaggcagaggacataaagaagttagagatgtcagcaacgccgaccacaacagtgtgtatttcatcggtagagcaacagggagctgcttctttaagtgcgaagattaccaatgcttctgtttctgaaggacagaagaatcctggaaattatatgccttctgccatttcaattcccgtggggagccatgttctgggcctgggcgcaacaagtattgaagaaacaactgccactatgataactcaggctcctgcagtttcaaaatcagaacgaagaaaacttccaggaggcagtcaacaaggtattcagtttgagagttcagcatcaaaaacaaagatggtatcagctgtggaaccagcacctgcaaatgttgaatgcatgcaaggtactgaagttaatagttcagaacagacaatagtttctgctactgaaccagcacctgcaaatgatgaacacatgcaagagcaaccaacaaatatcgtttcatctgtggaatcagaaccttcaaatgatgaagagcacacaaagcatgaagtgtttcttgcgactactggtgataatatgcttgcttctagtgcaggaactgaaatattgcgggatacagttgagcatgctgcttgccagccagaagcagtatgcacagatggaactgcaaggcagtctgaattgtcgcaacttgatagaaaagcctttcatgatgcctcatataaatacactcatgggtccactaaagatgatggtatcttgcccagtgaaggtacttctgttgatgttactggttctaagcaggatgatgtgaacattgttggcacacaaactgatgatgtttctcggggttctagtcattttccagttattttacaatcaactgagtcagatcggcctccaggtcaagtgaagaatttggagagtaggatggagcaggtgaaaacagaagaagctttggttaacagttctggtggcaatcaaactcacagtctgggcgatgaaccttctcataatacatcattagcaagaaattctccctcagaacactcgaatgagcgttgctctgatcaagtaattggtgaaaatttcaaaagtaaagaaaatattgttgaagtccattctggcattaatactgatggccccgatgaagctctgaatgcattgcacacccaatctaaggaggccagcatgacagatattggtgtacctactgatggtgatagatgtgaaggtaaagggactagtgtcgaggtctgtgctgacatgaatactgatgggcctgtggctacccaggatgcttcgtccacgaaatctgataaagagtcctgcatgatggaatgtggtgtgtctaccgatggctgtcccacagtttgcaaaacacacaatgatctccagggtcatgtatcttgtgaagaaacctttgttaggactggtggtgatgacacaacccatatcaccaatgcaaattatggttctaataatgaaagtgaggccaccattgctagtcctgttgaaaccacacaaaaactgatggaagggagcactgttattgtgtcggagaattctgatttaaataagcaatgccacacattgcatactagaaatgatcctcctgcaaataccctgttgatagttgagtctaacaaagttacttgtgatgctgaaattgtttgtgctagcaggttagaatcttctggcattgaggctgaaacagtgggtatccaagagtcagctcttactgattttgagggaacaaaaggaactggggatttgggtgacagaactaacagtcaactgcatgatgatgttcatgggacatcatgttccacgatagctcttgtatctgagaaagaaccttccgaagatcttaccaccggtagccattcagaagcatctaatttacttgctgctgtagaacaaactcaagaaactactgttgagaaccaagagatcatagatgcagtagtgtttatggatgcctgcaaggcagaacctgttggtgattttactattgctaaaggagctgaacagactgtagaaatggttcattatgttgataagcaatctgctgtattagactatgttgagacacagacaaaacgaacttcggtttgtggttctacgctaaatgaatcccctcaggctgcagggttggaagaagactgctctgtactgaagcatggtgatcctacttcatctgagcttcttactgtagcacctaatccaatcggtgaaacttctgttattcaagtggaaccagaggcaagaaactcagatggatactgcacaacagaggctggcagtgctttatctgaaactgtcatgggattggagccaaataaagaaactgcggttccaatgcaagagaatattggagaagctaatgataattttaataattgcgaagcacacaataattcggagattcatgcatttgaagtgtcgatggaaacgcagtcatcagaagtcaaggaagtatcttctattcagtctggtgcagcaaatttgagcacacagacaactgcactgcctgatgtaacaggacaaaccagtatggcatcgactggagaactagtatctacaaatgaacacatacacatgcaaggcactgaaatcaattcagagcaacaaacaaagatggtttcacctgctgaatcagcacctgctaatgatgaacacgtgcaagacattgtgattcttagttcagaacagcaaacaaagatggttttagctgcagagattgacgcattatgcgtccaggagactgcaattattgatcttgggggagcaagaggaacagttgacctgaatgacataagaacacaggttcctgcattacctggaagggatgtgctagatgtggaggcacatattttggagcaaaaaaaaacatcttcaccaggtgatgaaattaagggttcagaacaagcaaaaatcgaatcgattgcagagatcgaaacagtgggcgtcaaggagaatgtcattgctgatcataaggaaacaggtattgaggttgatgctcatgttttggaacaagcaaagatggtttcagctctagaaccagactctactccagaagtttgtgctgacaagttagaaccttctggtgctgatgatgttggaatgattgttgtccaggaggctgcttctgttgatgatcacaatagagcacaaggtggtgaggctcattgttcagaacaaataaagatggcttcaattgcacaagcggtgtctagcatggctttagtaggatattcttcttcagaagactcaatggtggatgctgctgcccgagtaactgatgctgattttgtggatagtaaagcagctggtgtttatcgccaagaaactatgcctactcaaaccacctctaccctcccagagaacatggattctcctgcaactgctgctaccatggttgaatcgaagtttgctgcctcgtctgagcacgttgcaggacccgagccaattgatgaaacttctgttatgcaagtggaactggcaacaagcacaggggatggatgtgcagcagatggtcacaatcttgtttcatctgaaactgttgttgaagtgaagcttgctcaagaaattgttgttcctagtccaggtggtagcatagaagctaataatacttctaccatcagcgaagtatacaaagatacccagtctcgtgcatctggtgaagcatgcaatgatggtcagtctcatggtgatgaaaatatgaaacttggtgaagcttacactgaactgcagctggcaccttcctctggtgaggaggccatgacatgtatgtgtagtgagctgcccagccaggaggtggaggctccaagcagtgaccctttggagaataatgaagaaacgaaaaatgaagctgctgctcaaggatcagtaaatgaggattctgctcctcgtgctgaaaatgcaaagattgatgaagctgacacagaacaggaactgcttccatctggtgaggccacggtagacgaatccagcgagctactcagccaagacgaaaaggtggctcgtaaagatgcaaagatggaagagtctgctgctgctgctgctgcacagagacagctaactactgaagttgctcatgcaagtgaaaacgcgaaacttggtgaagatggcacggagctgcaactgccaccaccttcaatggtagacatatctagggagcaactcagccaggaagtggaggttgcaagctctgggccttcaggaactgatgaaactgctgagatgaaacggctaaacactgaacattcacctggtgatgaaacttcaaaacttgttggaactgatctaggactgcaattgtcaccttctggtgatgccatggtagatatatctaataagccacccagctgccaagacgtaaaggaggccccgagcagtgacattttgggaaatgatgaaaattcagacaccgagaagactcctgctgccttgcatggacggctgaacaccgaacttgctcctagtggcagaaatacagaatttagtgaagctgacactggaaaacaagagacacccgtgtctgctgaggctatggtagaatcatcgagcgagcctcgcagccatgaggcaaaggaagctccaacccctgacctgtctggggatgatgaaaaagcgaagtcagcaagggctgctgttgttgcggaactttttggagatgcaacagaaggtggttcggatcagccattgccgtctcctagagaacaaggcaaggaagcagaggccgatggaggcttttagagtaaagttgcaaatattgtatcaagagatactagaatccgtgtaagtaagaactgctaatagtgcttttagttgtaactggtgtaagcttctactcagaatcaaaagcgacgtgctgagattacagcaacagtggcctacggcagtttactactgttttgtgcaatattgctgctgagttttgttgagacaggcaattgatctgtcatctgtctcgtcttgcatcgaagttggcagcaccatggtgaggtgctcccgccttaacctggaagcgctgacagagggaagaacaatactctctggtttcctaatgttttcctgttcactgttttgatttgatgctgcattgcagtagtgtgacttagtaacataatggtgcgtttggatagacggacataccgatccagaatcatctgaacctaaatattgagtacaagcttagattatctgtttggtctgctttatgtctgggtgcaatgctctctgatttctggacggagtggtaccgcaatccaaacagactttaatgtttgggtgcttcaggtcataatcaaccatctaatttactttgcaaatgaatgtttcaaactggactgctcaagcctaccaagtttaatggtccttcctagtattgaatccttttgagtctagcccgtttcctcatttgaattttcactgttagtgtgcctatacttgcctcacgtagaattttgaaagcttatggttgggtgcgttgtactcgac

SEQ ID NO: 40860 - DNA, 2279 bp, Zea Mays
cccgactcttccccagtgattctcttctacgcttactaggctatacttgacttcgtgtgtttccattccacagaggaagggatggccgggagcagcgtccgcggcggcagcaactgcccaccgctgttcgtgacggagaaaccaacgcggatggcgaggtacgcttaccggctgttcgcgagcacggtcctcgcgggggttcttctggtatggctgtacagagcaacgcacgtgccaccgatgagcagcggcgcccggtggtgggcgtggcttgggctctccgcggcggagctctggttcggcttctactgggtgctgacgctgtccgtgcggtggagccccgtcttccgccgcgccttcccggaccagctcttgcgaaggtacaaggaagagcagcttcctggggtggacatatttgtgtgtacagcagaccccactgttgagccgccaatgcttgtcatctccactgtcctatctgttatggcttatgactacccgaaggagaagttgaacatatatttgtctgatgatgctggttccatcataacattgtatgctctatatgaagcatcagagtttgcaaagcactggcttccattttgcaataagtaccaagtggagcccaggtcaccagctgcctactttggtacagaagctagccctccagatgcatgtgaccgtaaagagtggttttctttgaaggagatgcacaaagatttggcagctcgagtgaattcagttgttaattcagggaagatccctgaagtttcaaaatgcaagcttatgggcttctccaggtggagcgagaatgcaagttttagagatcacccttcaatagttcagattttaattgatggaaacaaaaggaaagcaactgatgttgatggaaaagtgttgcccacactggtttatatggctcgtgagaagagacctcaagaacatcatcacttcaaagctggatcactgaatgctttgataagggtatcatcagtgataagcaacagcccagtcattatgaatgtggactgtgatatgtactccaacaattcagggtctatcagagatgcattgtgcttcttccaagacgaacagctagttggaccatccttgcttggatggatggggtggaatgtgttactatggcacaggatgcttccatcggagagaggctctatgtgggcgaatatacagtccagactacaaggaagattggactagggtggcgaggaaaactgaagatgtcattgacttggaaggaatggctgagtcacttgtgacttgcacatatgagcacaacaccctttggggagtcgagaagggagttatatatggttgcccactggaggatgtcattacaggattgcagatccagtgccgtgggtggagatcagtttaccacaacccgccaagaaaggggtttttaggcatggcccctacctcactaggacagattctggttcagcacaagagatggacagaagggttcctccagatctccctctcaaagtacagcccgtttctgctaggtcacaggaagatcagcctgggccttcaaatgggttactccgtatgtgggttttgggctgctaacagcttccccaccctttactatgtcactatcccttcactttgcttcctcaatggcatctcattgttccctgagcttggtggagtccctgcaatgtggcgacactgctgtcgagtggtggaacgcgcaaaggatgtggcttttcagaagaatcacctcatacctcttggcagccatcgacacaatccgcagaatgcttggcgtcaccgagtcggggttcaccctgacggcgaaggtgaccgatccgcgggccctagagaggtacaagaaggggatgatggagtttgggtccttctccgtgatgtttgcgatcattacaaccgttgcactgcttaacctggcgtgcatgatgctcggggtggcaaaggttctgttgcgtaaaggagcggtgagtctgggagctatgtttgtgcaggccgttctatgtgcgctgatagtagcgatcaattttccagtgtatgaagcaatgttcgtccgcaaggacagtggcagattaccagcttctgtcagtgtcgtttcgctctgcattgtattaccattctgtatacttccaaccaagttgtagatgtggagctggtgaaagatgatatatatatttgaaacccgatggtgaaagttataagaactgtactgatataatatatttccaagagaattaaaaaaatatataacatgttcatttacagatctg

SEQ ID NO: 40861 - DNA, 1413 bp, Zea Mays
cagattcattaacatgcctatcctaccactataaaggtacacaaagcttccgaagggaagaagctcttgagaagatactgcaatgatggctcctctgtctcctagactggtagtgcccgtagacgtgaagaagctgccgcgggagcaaaaggtccctctccacaaccgctggcacccggatatccctcctgttgctgatgtaaccgaaggggaattgttccgcgttgagatggtcgattggagtggagggcgggttagggatgataactctgcagatgatctgaaattcatggatttcacaattgctcattatcttagtgggcccctaagaatagttgattctgaaggggttccagcttcaccaggtgatcttctcgcggtagaaatctgcaaccttggcccacttcctggcgacgagtggggttacaccgcaatacttgaaagggagaatggaggtggattcttaactgaccacttccctagcgcaagaaaagccatctggtatttcgaaggaatttacgcatgctccccgcagataccaggtgttcgttttccaggattgactcatcctggtgttgtgggaactgcaccgtcacttgagctcctaaatatatggaatgaaagagagaaaagtttgtctgagacaagcctagagactattaaactgtgtgaagttctacaccagaggccccttgctcatttaccgacccctgaaaattgcttacttgggaaggtccaagaagggactgctgaatggcacataattgcaaacgaagcggccagaactattgctggaagggaaaatggcgggaattgcgacataaagaacctaagcagaggctccagaatttatctaccagtgtttgtcgaaggagcaaacctcagcactggtgacatgcacttctcccagggggacggcgagatttcgctgtgtggagcaattgaaatgagcgggttccttgagctcaagatataaagccaaaacgcgtgaaggggagaccacttggaggaccacagttgagaagacttccagatcttctaagctgctcaaatcatggacgccttcctgccacccaagacagaagtggtacaagcgcgccctagtatatggaaacagatgcagtatcaatcgacatgcaactgtgccaaggctataatcaagaatgcgtttgtctttttttttttattttcttcgtctaataaaaattacgataaagcttttgccgttctttagaaaaaaataatcaagaattatcctcgattcatcaggttgtcatcgtgaatgagagtgagccttttggttttataccagccaggctctttttaaatggtactgcataaattctcaaatatttatcgtccgctagtttatttttaaactaaaccgtaataaagaaaaaagaacggagggag

SEQ ID NO: 40862 - DNA, 3082 bp, Zea Mays
aaaatcctaaaaattccaccaccaccgaaccgagcactttcgctacgcaaacacgcgcgtggaaaacaaaacggcacacaaattatttattttttttcctttttcgatcccagacacaacacaagactgaaaaagtcagcgaggaaggaaaaaaaaatctgcgaggcagcgcagccggacgaggaggaggaggtcaggactcaggaggagaggcgtcgcggactcgcggtggcagtgccgcgcacggcaacccaacccagctcagctccggcgaggacgcaaccgttgacgtcgctcttggcctcgcctcgttatttgaggtcgcgcggccgcgagccggggtccagatcgagtctcgcgcgaggtgtttcggcaccgcgaaatgccgcctccggctgcgatgctgctccttacggcggcctcggggcctcccacgctgtcgctgaccctggccgcgaggcgggcgccgctccgggccccaagccggcggaggctgcgggcgctgcggccggcgaggatccgcgccgccgcggcgatcggtggcgagttcggcggcctcggccggcgccgcgtcgtcgtgggagagttcatcgagcgcctgcgcaacgttctgcccgggggcagttggtggcgcctcgaggacggcgatgaggccggggacggggccggccgcgcagaggggagcggtaccaccgccgtgtccgcgctcaggcggatgtgggccctcgttgccggcgacagattggtcatctatgtcggcttcgcgtccctcgtcggcgctgcgctttcggagatcgccataccacatctccttgcagcgtccattttctctgcgcagaatggaggcgcggtgttctaccgaaatgccaagcttctggttgtcctatgtctggtttccggggtgtttagtggcatacgaagttgctgttttggtgttgcaaacatgatattggttaaacggatgagagaggagttatttgattccattctttcacaggatatttccttttttgatgaagaaacagtaggagatctgacaagtagacttggttcggactgccaacaagtgtctcgtgttataggcaatgaccttaacctgatttcacgcaatttacttcagggtgcaggtgcattaatttatctgctagtcttatcttggcctctcggattgtgtacaatgtttgtttgtgcaactctatcagcaattatgctagttcatggacgaaaagggcagctaaatttgcacaggagttcaccgcaaacgccaataatgttgctcaagaggtgataactttggttaggacagtgcgagtatatggaacagaaaagcaggagtttaaaaggtatgcaaactggcttgataagctgtatgatgtgagctttcggcagacagtggcttatggaggctggagcctgagcttgaactatctataccattctactcaggtcattggagtggtgattggaggcctagcaatcatgtctgggaagttaactgctgagcagttgacaaaattcacactctatgctgaatggctaattttgtccacatggtggattggggacaactggtcctccctgatgcagtctgtcggagcaagtgaaaaagtttttcgtttaatggatctccttcctagcaagcagcttagctctgaaggcctcaagttagagaagttgaaagggcaaattcagtatgctgatgtatcattttcatatccatcaagacctacggtaccaattttgggaggcttgaatttaacactgaatccaaacgaagtagttgcaattgttggtcttagtggaagtggcaagagcactataatcaatttactacttagattatacgaacctacaaatgggcaaatactaattgatggtgtcccgctcactgagcttgatatcagatggttcagggaaagaattggtttcgtcggacaggaaccacgcttattccgaatggatatcagctctaatattaaatatggttgcccaagagatgtcagtcatgaagaagtgatatgggctgcaaagcaggcctatgctcatgacttcataatggctttgcctgatggttataacaccatcgttgatgatgctcttctcagtggaggtcagaaacaacgtgttgctattgccagggcccttctgagggacccatctatcttactgcttgatgaagccactagtgcgcttgatgctgagagtgaacattatgtcaagagcgtcatcacaaaagttagtcgagattcaaaggctaaaagaactgtggtaatcatagcacacaggctatctacaattcaaacagctgatagaattattgtgatggaaaatggtaatattgtggaggatggtaaacacattgatcttattgagaagggtggtctatattcaagattagccaggcgacaaaatgacgatctcaagtagccctggatcacagaatgtggtttagtgcacgccttctttttaaatggaatggcagaagggagagtcgtctgtcattagtgtattctttgcaagaactgacctggacccaggagctcgaataagctggcattgtttttcccatgaaccagaaacggtttgtgactgatcaaaataaaccaaaacggtttcccccacgaggacgagcacattaagcatcgagagcggcagtatggagaacagacttctaagaggtccagtattgtaaaagtagcttccataacaaagtgtatatgcgtttttatcttgttatcgggaactctgaaacttatcttacactacacacggaggaaacgctccaattttgttacgagcactgtgtgccttatttcctgaattttcgtgtaaaaatgtactccctgcgtcccaaaacagttgacgttataatatttatagttaaacttgtaacttaaattattagcaacataaattattataaaaatatatttaaagatctattgaaatattttttttggttgttttaggatcgggggactatgccattcacgtagaatcgtgtttgtattttacgaagaaattggtctccttgttacgatgcactatgctttgccctggcagccccttcatccatgataac

SEQ ID NO: 40863 - DNA, 2332 bp, Zea Mays
atcaggtccccgccacacctcgatactctaacttcggccgccgccgccgccgccgccgccgcgaatgccggagccccaggccatcctcccgctgcgcgctctcccgccggacgcgccgctgcccttccccgtccccgcgccgttccacccccaagcccccggccccggtgggaccgccccggccacgcccccgaacccgacccctccgcaaccgttaacccccgccgcgccgccttcctcctcttcgacgcggccgccgcacccatgggagatctccgcgcgagcatggctagagtccttccccgacggacggccgcccaccgagcccgaggtcgacgcctacatcgacgtgcaccgccccgagctcccttccctcccccgctcccagctacaccagcgcctcctcgccctccgcggcgaccaggttctggatgcagaccagagcgcattcccgtacaggttccagcgtactgatctatggaagcctgtgtaccagtggttggaatctcttgagctggactcactagttgctacacagcagatatcagactggcttacatcgaacccaaagataatggacagaatggttgagaaacattcaaaataccatttgattcactacacccagaggatgcacttgaagatgctaaaaaagaagggaaagttgccaaagactctgcaactttctgcggctagagccacagttcgaccaattgctgctccgttcactccagaagaaaacattgtgccgttacagaaaactataactccagtgacaggtagacttcccagtgccagttcagggagacaacagagcggtaccacaggcagattttccagtgccagttcagggagacaacagagctgtaccccaggcagatttcaaggtggaaatgcaactcttagggacaagaagacgtcattgtccaaaaagaaagaagctttgctcaaatacgaacttttgacagacttacagaaccaattgactgctgtgctgttaaagcaatgccgtactgttgccattaaagaaacagattcatcatatgtggaatctccaaatccagagactaacatgagtatacaagggaccactactgcaaatgcttcagccccttcagaggcaaagaatgtgtttatcaatgaacagtcagttccagcaggagccacagaaagtgaacctgggcataagaggaagagaaaccctatcatcgttacacctgcatggtgttatagtgaagcatcagcaggaaccttgcagaatgaaataaatcctagctcaaatagtgatgtttcaagaaatttcaatatttggagaggacatgctaatccactagtttcacatagagatactaagaaaaatatattattctgtcttgagggacgcgaaactggtgtcagctgctctcaagctgcttcttatggaggttatgctggacgaaattgtgaaagatggactccatttcttgaaggatggaattcacctgcattccagtttgaagggcctgctgtacatgttgttagaaaaagttacctatcttggtgtccaacatcatgtgcttatacgtcaagtgcaccttctgctcagcctcatggcagggtatccgcaaagttcttgatgtaaaatttcatccagaagggttgcctcagcttgtttctagctctaatgaggcacccaatgaattactgctattcaatctgctttctggaagggcaattcagcttagaggccacaatactaagatccagtctatcgcctttgcagtcaaaggagcaagtgtagtgtcttgtgcttctaatttattaaaggtatgggactgcattactgggtcttgcctctatacgctgggtggcgatgatcaaaattcagtggggcatactcagaaaataaatgctatggcagtgaataaatggcaatcctgtcttgttgtcaccagtggagcaaaaggtgatgggaagcttctactatggaatgctttaagaggtgaacttgcttctgatctaaattcgaacttgaggtctcaggatatgatctatccctcagttgatacaatggagttctatagtgagaatcatctggcatgtggaagtgattgtgactatggtggctcagctgtggtacaattatgggatattgattctccagagtcttatttatctttctctgcaagtgactcttacattacttcccttaaagtcaaccctgctggcaacactctcattactggttctggcgatgggactattggcttatttgacatccgtacttgttctgcaattagccacttgtcagtgggatctagttgtgaggttacatctgtttcatttagcaaaa

SEQ ID NO: 40864 - DNA, 2031 bp, Zea Mays
gacccgcatcgcagatctcccccttccctccacgcctctcgcgtcgccgcgatggccgacgaggccctggaccagccgccggacgcgaccccttctccgactccggcgacgccgccggtacccgccaccccgtcccccacggtgctgctccgcccgcggcgggaggcattcgagcacgggctcttgcccatccccaagctcatcttcccggagggtacgctggcgcagaccctcgcccagctcaaggagaagctcgctgcctcggccccggacggacgcgtgcgcgccgcggccctggcggaggcgttgcagatcccgcaggagcaggcggcgctcgccctcgccacgctcgcggctgtgctcccggcagaggaccccgcgctcggcgacggcgccgtggatggttctgccgcggacatccgcgacatgctgctcttcctctacatccagtcttacaaacgtctcgtcccgcggagtgcgcacaaggactcgcccgtcgtggcggacgtctggccgtccacctccgcgttcgatgggtacctctccgcactctccccgatccagcttgttcgcagtaacagccgtcgttttatgccttctcaagctgatgaagaaattcatcagttgtcctatctgcaaaagcatatggcgaatattcttactctcttggcagattctgttgagggtgatggtgatgattcactggtgttgacaatggagacttttgagcaccttggatttctagttcaattctcagaaggaacttctttaagccaggctgctacattttttgcatgctcagatccagacatgcctgatgtgcctgtccctgctgctcaggttcttgattggatgtcacagaaaatagctttttcactggaatattctgctgagaggtccgcagcaaaggaaagcaaccagcaaaccatgtctgatcttgatgtgaccatggctgaggccaatacaagtcacccacggaacagtacaccaagtgccaatcctgcatactacagaaatgtaacatttgtggagggcttttccaaaacctctgttgtcaagcatgcatctgatgtcaaagggaattctataaaggttttgaactgccatgattctgttatctacatattagcaccgctgaagtatgctactgtgtacggttgttctgatgctacagttgttcttggtgctgttggtaaggtagtaaaagtggagcattgtgaaagagtgcatatcattgcagctgcaaaacggatttgtattgccaactgccgggaatgcatcttctacataggagtaaatcaccaacctcttgtgttgggggacaaccataaattacaaattcctagttggtttggggatgaaaggcaagggactacaaaccgcaatcctttcccactgcctgaaatttatgggacatcccaaagcaaaaagatatccaaaagatgattcgggagctgcagcttgatgagaaccggaaaagggaattggcaactgcccttcacgttcagttcaaggattggttatacgcttcaggcaatatccgccagctctactgtctacagggcgattaacgatgggatttgcaagactgactacccttttgccgactcctactccaaaacattcgacaattgtcgaaagctgaccttcctttccctgggagagaggattcccacccgcgcagaaggatgtgaagatgtactgttacctacttttttacagattcatttgggtatattccctttgctgcgagttggaggtactaattaggatgtaatctccaagcctactcattttttttggcccttgataacgtccacgagtatgtaatagggactggtgaatcatacgttgtaaacatttcttcatcccgttttgctaaatggctcgtcatgtcaaccctctattggatcaactgtattgtgctcatccttatagacatgcttgtttgcaacttttttcgttggtcaaggttttgccactctcaggacgattattgtcagaatttatttgcaacatgttttggcccag

SEQ ID NO: 40865 - DNA, 689 bp, Zea Mays
cttgagtaagtgattactcctactagtacgctacacttttttttagaaataatcttgttgccattgatttgtccgtggacttatagttttctactaactgtttttacgtagacgaaggaggagggatattactggagaacaaagtaaacaaatctaccaaaccttgttggctaaaagcacgaatgggaacctagggaagaatgtcacgaaagaagttgctgcacaatttggagttcatgttcgcactgttcagcgcctgtggcatgacggtaaaacctatctgtctcaaggcatttctgttaatgttggtcctaaaaagagaggtatcaggccgtaaaccaactccagttaatttggaagaattgtgcagtgttgaccttaaaaatagaacgaccctagaagatgtgtgcaagatacttagcattagcaaatctaagcttttgaaacacatacggcaaggtgatgttaagcgacatacaaatagtataaaaccacatttgactgatgcaaacaagaaggctcggttgcaatggtgtgtggacatgcttgaacatgaaagtttgcaagttagtccaaggtttaagagtttgtttgatcatgttttcatcgatgagaagtggtttttccttactagaaaatctgagaggtattatttgcttcccgatgaggacgaacctttacgtacttcc

SEQ ID NO: 40866 - DNA, 938 bp, Zea Mays
tctatgtacgatgctcctttgttctttattctgagatgagcatttcctggaagcacacacgcgctctcatctccagccatccagacaaacgaccgcgtcggcagcagcagagctcgctgcctgtgtctctttcaagctctcggcgctagctcttactagcaggcggcgcccagcagcatcggtgctccgtcgtcgctgagttctctcggcgcactgcgacgtcgtcgtcgtcgtcgtctcctcgccggccgtgctcgactccacagctccttcacgtcgtcgacttcgataacccacggcctctcctccaatcacatcgcactcactcgcggtgtcgtcgtgaagacgctagctgcctgcctcgccgatcacgttttcggtgaatcgatcacttggtgaagcaattttctagaggttggttatcccccaaaaggcttgtagcattttgtttctttttcatttggctttcgctgcaacaaaggcaagcctcagtgcattcaccattttccgtgttctttacaaaacttttatcacttgatataatgcattatgtgataggagttgcgtgatcaaacaattgatgcattaattccttgagaattttaataattattccttgataactgttgtatgaaaaaatagtgctgcttatccctgcttaatgagatagggttttgaaacttattttgattactggatgttgttattgttagagaaatagtcatttttagttttaatttaatccagaaaactagagtgatgtatgtgcatgtgtgtatcactactcacataagcagtaaacaacagtaaaacatacacaattactctgaacataatgtaccctgtggagggatcgttgctcaaggcattagtggctccattcacatgagacatctcgtgtgtatgttcgatgtagtcgcacgtagtcgatggaggta

SEQ ID NO: 40867 - DNA, 408 bp, Zea Mays
ggtaggctttggcattggtggcggtggtcacaggagacgcgggtggctccggcggtcgggcgaggcgcagtcgtctccggggattgagaccacacgaggcatgggtggctccggcatccttcggtgaccaactcctacgatctgatggcctcggtggcgtcctccagcaacgacctcccccaatcctttgttttattcatgcgtttgttggttgatcccgtattatgattttttttcattaattataatttacgatgtaggtatttatgcaactttctatgacgatttatgctttacgcgatatcagcatccaacatttgcgtgtatgatgtagaacaaaaatatcattcaaaatttatgcgcatgcaatgaaaactcccaagacctgccatatttttagaatctaca

SEQ ID NO: 40868 - DNA, 451 bp, Zea Mays
ggttttccttgccgccagccagcccattaaccctcgttcctgtcgcgcagccacgacctccacttccacatctcccccggcgtcggcgcggtcagttgaaccatggcggactccaaggccacctcggcggtcaccctccgcacccgcaagttcatgaccaaccgcctcctggcccgcaagcaattcgtgcttgaggtgatccaccccggccgcgccaacgtctccaaggcggagttgaaggagaggcttgccaaggcgtacgaggtgaaggaccccaacaccatctttgtcttcaagttccgcacccacttcggaggaggaaagtccactggtttcggcctcatctacgacaacctcgaggctgccaagaagttcgagccgaaataccgcctcatcaggtgctgctgcctcctctagatgatgacccaattacttccacaacatcatcatc

SEQ ID NO: 40869 - DNA, 5469 bp, Zea Mays
cgaaatttgaagttcccttcccctcctcccgctagagtctggttgtgtgatccaggaaggggaagcgccgcccgctacgcttgatcaatagatccattcacccggggagattcccgaccgtgtgctcgtgtgtggagttgagttgtgatggaggccacctccccgcatcctcccaccaccatccgccggaacccaccccgccgcgcgaggcctcccccgaccccgctcgccggcgacaaatccaaaccctcccccctctcccgcctgctcgagggtgaagcagcgttcgccgcctccgttccctgtccaccgcaggaggagcgcctcaaggtgttcctccgcatccgccccctcccggaccgcgatcgaagccggccactccccgctgccaaggacccgcgccggaagcccaagcaggtcggagcccccggggagctctgcctcgcgcccgacggacccaactccgtcgtcctcaccgtcccgcggtctaagctagtcgaccccaagcgaggccgcaccgaggtcttcgacggcttctctgccgttttcccatccgactccacccagcatgatatcttcgcgcaagtcatgaacccactggtggatgacttcctgggcggaaagagtggccttctggttgcaatgggtcccacaggctctggaaagactcacaccatctttggttccccaaggaatcctggtatactacccctcacgctgaggagaatcttcaacgcacaaggcgaaagcaaggtttccaggaaaccaacgcggtcatttttcttctcgatgtttgagatattttctgagggaaaaggggaacgcattcttgacttactgtctgatactgtggagtgtgttcttcagcagtcagtgattaaaggtcttcaagaggtttccctttcaaatcctgcagatgctgagagcttggtttcacgtggtatgctaaagcgcagcacggctgcaacaaatgctaacagcaactcaagtcgatcacagtgcatcattactatacgtgcagacagtgaacatctacttagtagtgctgttctgaccatagcagaccttgctggcgcagaacgggaaaagagaactagaaatcaaggttcaaggctgttagaaagtaacttcatcaacaacacatccatggttttcagtctctgtttgaggtctctgttagaacatcagaaaaaccagaagaaacccttggaaaagcatttcaagaattccatgttgacaaggtacttaagagactacctagaaggaaggaagaaaatgactttgatcttgaatgtgaagccaggggatgatgattatttggatacatcatttttgcttagacaagcatctccttacatgaaaataaagtacactagtcttgatgattcttttgacctggcttcgcaaaagagaatcaatgtttccttgatttgccaagagaacaagaaaaaaaggaaggttcagaagcctgcagtccttgtggttgaacgaaaggaaaatgttgatacagatgatatttctaaagtttctgaaaaagatggcgtgcatcacgtgtctcttaacccagagatgccaagggtatccagaagcgaagcaataatgacaaactttgcaagggctttattgactgtattaagacaatataagcacaaacttttggagtccgagaatgctgttgaaagcatgaaagaattgattagagataaagatatcgaaatcatggagttgaaaaaggagctgaaggctgtaaggtattgttcatgcaagagttctccaataaatgaagatgactctgtggaccatgatgattcttcatcatttggtcaagctgctcagagtttagttaatatatcaaatcaagctgacctgggatctaatgatgcttcagaagataatttccatgtagagttacaagcgcttcataaggaatcagataaatctgaaagttttactgtgccaacacctgcacccactggtggtgcaatgcctgcatctagttattcagatcaaagcttcacagaagatgatgcacttctgtgcctgaacactgaacaaacatctaccgtagggcaaagtgatgaagaaacggaagagctgagtaagatcacactagagaataaggatattcagcttgatatcaatataagagaagagaagcaccatgaatcttgtagctcttcacagcaagtgaactttgacacagaaggtacccgctctagtgaggcttccttgcttggaacggttggttctgaaaagaagcttgaggaactgaagcagaaatctggaagatgtgtgtctgctgtagaaaaggctaacgtggaactggagcatggtatagacggtggtcaagctctagacgaaaagtgtgatcatgcctcagcgaaagctgcaaaggctcctccaagcaagggcagggaggcagacgaaactgcggatacagataaggaagcttttggttctaggacagagaaaaccaggaggaggttacagccagctgctgctatgttgctcagggaattcactggcgctgacattgatgcggataacgaaagggaagaaagaggcagatcatcgtccagcgtggcaaccgggagatcagatgcgcttgttcaacttctgatgaaaggccgtccggcgcacggcgacgagtcgcgccagctccagtcgctcatgcagctctgcgagatgcgctccatcggctccgaggacttgctcgccgccttcgtcccaatcctcgtcgggatgctcggccagcctgccaccgctggtgccagcccaggcgtcatgctgctcgctgcgcgggcactagccaacctcgtttatgtgctcccctcctgctccgcgatctctgaggagcacgcacccaaccgcctgtttgcgagctggaatctgccggccgatgcttctgagtttgtcatggaagctgtcccatcgctcacgaatctcctaaaccaccatgattccaaggtactagagcatgcttctgtttgtttgacagtgacacgcattgctgaagcttttgcctattaccccgacgaacttgatgaactctgcaatcatggattagttgctcaagctgctagcttgatagctcttggcaactcctctggccaggaaccactgagtacatctacatatacaggcttaatccgtcttctctcaacatgtgcaagtggatccctgctggcagttaaaacactactacttcttgggatcagcggtactcttaaagatttcctttctggccctgctttgatttctggaacattagtcccccgtgctgtaacaaggcctgccgatcagatatttgagattgtgatccttgctgataatttgcttccgcatatgcctgcgataatcattgagttaccaacatactaccatgcatataaagactcttcaacaaataaatctgcttccatcaaacaagagggggctggttctacaggaaacgaaaagtctggcaatgagaggctattgcgtgaccaacctaagctcctagaacagttcggtatggatttgttacccacaatgacacaggtgtatggttctagtgtaaatgcaccaatacatcgcaagtgtttatcgatcattgggaagttaatgtactacagctccgctgagacagtccagtctctccttggcacaacaaacatatccagcttccttgcaggcattcttgcatggaacgatcttcaagtgttgattcctgctcttcagatagcagaaataatgatggaaaagcttccagagacattttccaagttgtttgtgagggaaggctccaacacaatggctcgtcaggtgccacctcaggataaagaacaattagacaaaataatatctgaaatgctctctgagcttagcaaagttaatggtgtttccacatttgagttcattaggagtggtgttaccacagcattgcttgactatttgtcctgtggaacatttgggaaggaaaagtctagtaggattggtaatggagggtcccgtctgacttcaggtcttagtgctctggctcaacccttcaagcttcgtctgtccccagctcaaggtgaaaaaccacttcgggattattcatcaaatattgtgcttatcaatccatttgccagtttagcagctgttgaaggatttctttggcccagagttcaacacagtgaggttgcgtcaaagcctataattccatctggtaataattctgaatctgtggttcctggcaccatagctggtgcatcattagcaactgcaatggatcaatctggtcggcgtccaacaacaagatcaaagtcatctgctgcatggggtggtacatcaaagaaggattctcatgatgaaagcactactactgccaaaggaaaactaggtgattccaatgagtgtaacattggctcagccagttttagccaggtgcagccatcatctggttccggtgctagaaacacttctagcagaggacccgattctactgaatttcaaagtacgagcacattcgggtcatttgttgctgcgacgatggctgggctagcttctgttggtggtcgcagtgttataggtggttgagatcggtgtggtctgtcacttggaggaagcatgaatgaccacaataaacttgtatgtattcactgctggtggggagcagcttagcaaacatttgactgtatgtcaagctatccaacgtcgtcgacttatgcttgacgaggatgatgaagaagtgtttaatggatcttgtatacaaaacgatggaaaccactactgggatgatgttttcacaataacgtaccagaaggctgataaccaagggacttgcacctcattgaacataaaatcagattcttacagattcagtcagaattgtcccctgagcagcagcatgcgtttctgccagtttgtaaccggggtttccacttggtggattggctgcccttagtcccaagcttactgtagttaggaagcacccttcaagtgctgcgaatacttcaaattcaactggggcaacagagtctgctgctgctgctgctgctgatttgcctagtgtgatgacgtgcgccaattatgtgaagctgcccccgtactccacaaaagaaatcatgcgcgagaagctgctttatgcgatcctggaaggccgaggatcgtttcatttttcataagaatatccgaactaacttacaggtggccagttttatgctgttctttaacaggctcagcaaggtcggatgcaggtgctgctgtcgatttctcctttcttttgcatttgttcagctacaagtttctgtttccattgggcaggctaggccatagaggaagagcccccccccctcttccagtacatacatgtaaataaaatggatttttagaactggtgatgttgatccagaattgttaataaatgtggcccagtgtaccatttctacccttccgatacagaaacgcaacgctacatcagaatgaaaatcatgctttaaacaagta

SEQ ID NO: 40870 - DNA, 272 bp, Zea Mays
accagttaaagggtcctcggtcagcacgcctacatacgcattaatccttaaccaacctaggtagaacatcacctgttcctaccccaagtctcaatttaagtatttccatccttaggattgtgtctgttccttaggatgaaagagcatcacagggaactttgcagtaagatcccactattgctccacatgaaaatattcttgcaggtagaagccatcctctcctgggttagactaaggacaacctctatccacaagatctaagcaaggctaag

SEQ ID NO: 40871 - DNA, 5526 bp, Zea Mays
ggccacctttctccccccttcgcgctcggcctcgcgccgacccatctgggctggggcacgcggcgacatttcactcgtcggcctagggaccccccggtctcgaaacgccgacaagcatatatcatgaaatagcacatcaaacaaccagataatatcacacatagtccaaatccaagtatgtagcacaaataatacaaatcacagttcaaaacacaaaataatccaaatcattgtgcgtagtacatagtccaattcatagccatatcagaaatagtccataccatagcccaaataagaagacatgcaccacctcacttcctcctagtcttacccttgcccttggccctaagagagtcggtgcatgtagtgtaagatcacgtggtcgtcgtctgcgtggcattggctgtgatggctatgtgcctagagcatcctgtagctaggatggaccgatctcgtcatgatgcacctggacgtcatcctcgtcactatcatcctcattgtcctccttgtcgtactcatcatcaaatgtgtcccttgtcaaatgtgatgagctttgtgctattgtggaaagtattacactttgcagagtgtcgacctagagctacataggaagttggagctatacaggagcctacatgtcaactactgcgctagtcaagcaaccacaatgacaagtagcacgacgtagacaacacgatatcctctgccatggtcaaaagctagttcaccaccaagttttggacattaaaatgaatgattttggttttaactgttattacttactgagaaaattgcaaatgtcctactgtcagaagtagtctatgataaacgatcagtatcgatcatagagaggtcgaaagactttccctatatagaaggtaaaacatgaggatagaaccaaggaaaggtacgacaatgcatttgaaaaattcaaaagagtgaagatcttaatatgactctgtccaagatgggtgcgacctcgacttgcgtcccttgctaagtagctaggttgtacgcattgtcttcaccatccgatgactctagctcggcgtagttcgtagctatccactaccccttcaacttgcacctagtcgcaccaacataccaataggaagttattgtctgtgttcgacacgtcattatggtagacgagatcacttagttggtcccattcatcaatgtaggctcgttggtagctctcaaagtcaatgacctttttctgcttctggcggtcgcactagcctgcaaatgggaaacatctctttgaggtcgcactacacattttaattatgagttagacaacgaagtggacgaaggaacttacttgtggagttcaactgatgtggagaagggctccattggaaactccttagtccaaattgtcatgccactcttgggggtaagtggtactcaacggcttagaagcatatgagcggatacctcattaggtaaaggccatcgtcctccaaacatgatgagctcaactaaatatacgacagaggtggctcactatatggttgccagcaaacctaaaacagaataatatttgtggcacatattatatttattatgtcaatgacataataattaataaaagacatagtaaacacaaagaactcaccatcagtaacataagtacgttgagctcattcgagaactcgacgtaggcccactcatgatgtgcgaagggctgctggacctggtcccaacgataggccgtcgtaggccgtaatcggtgcccgacgacgacgaaccaatcacgaggaggaaactctatcgggcacccaaccggtatgctcgaccacatccaaagctggagtaggtacagacaactatctaagctcgtggtactcgccctccgacgacatgcctcgtagagctgtctgtagaggaaggctagaattgatgaaccctagctatagactccagcgttgtaccgtaagttaggcagggcaggaacatcgaagatgcgttgtcacccgtcgtgtctagaaaaaggacacaaccaaaaagatgcaggatccaagctcggcagtggtaggtaatagcctgatcatctgctctagctgaacaatgctcgaaagtctgcctgagccaggtgaggggcacgctagatgtgtggctgcctgttctatctttgggaaccactataccaagaaaagcctggactctctatctctagccaccgggtgcttcatgaccgatcactggacgactacgaatcttgagacaaaatagcttctagcagtcttgcagtgtcacggtcatctcgctgcacggaagatggaaagtgtgagtttctggccaccacctacgggaatacaaacaaataataacttaaaacctaaactataaataaagtgttttcaatggattgcaaaaaaatcttgatgaagttacttgtcaaccaaaggcatgagcgacatagggttgactgtggccaacccatagcgaacctggaatgatatgatgtccaagccaactctccgaaggagaggagtgtacatgccatcgtgcaccatctcctcgaactagtcatgggtcctagaccgaaaattggcagtacctgacaacaagatttatttgatcaaacaaacatcatttacatttactcattcacaaatttaatatatatatatataggcattacctccccctctatggtcagtcgtcccctgcggtgctcgtcgtagtgtgggtccaacaaagtaagtaaagcaggttagtaaagtaaataaatattacaacaatttggacgtactaaaaactattttctactattcatgtgaggtcaacattgtatcacacctgactaagtgcccaaaggcatgtatttgagttgtggccaagtctgtcgcatttgccgcattcgttctactctgggtcaatgagaaagggggtcactcgacctctcctagtgcgactgtaaatatgatccatgaccatgttgaacctgctcctcttcctagttccatgtttgtctcaacggtgcgctggatcagcaatgtatgtcggaacggtgtacgttgtaaatagggactccaggtgcgtactaggctctccacactaaactcgtacttgcctaactcatcgtcaaagcattgtacatcatgtctatttgaccttgcgtttgcattgccttcgtgtcacacctagatttaaagacaaacccaggtgtgtttcaaatgtcaactaggatcaagtctcacacatattgtgactcatggtatagaaattaatgtcacatctttagtatataatagaattccaaacaaaaatagctagtaaaatacatcatatgacagcaacgatcctctccggccatagttgactcgaagacgacggcctagacctctctgaactcatcatagcatccttcatgctcctcatcttacggtacctgttcttgaactggttgattatagaaagggtgatgtaacaccctgaattttagggtataaaaatttatttgctctatactcaaaatttaactattactctctattttccttgcttttctttcctatttactaaaataatggagagttttcggtaaattttcatattttggaatatttttctattttccaaaaaccaaaatctatttatttgaggtacttaaaacaatttaaaaaactctaaatatgttttttgagttcattggggtgccaaatcatgtataggaatttttctataattttttgagccttttgagatatttttcgaacgttaaatacgatttcagtattttctggaattattttaattctacaaattgattcctttcaaaaaataaaatatctttaaaccctggcaatagcaatatatatacggctcggaacatctcgccgaacccgttccaaatatcagatccgttttgcgagacaagattcgtagcgccatcagttcctcgtcgaagttcggggcagttctaacttcggcaagcaattactttcaagttgtgcgtcgttggcgaaatctgagagtgttgttgcgttcgtctcatcgaggacttcgtctttgtgctttcgattcgttgatccgacctctggttcaccgtcaatcgacggatttctcctggactccggcaagggccttcctcttcggtgagcaaccaccatgattttggtgccttgttcttcatttttcacggttttgtggtagcccctccccagtcgacccctcccttgtgccgcccgccccctttctctcctctctcccctctcactgcgctccttctctctccccctcccccctcccttgtgccatgtgtggaagagagatggagggaggtagaagaaggcatttttgctaaaaaaagagcatggggttacgtctaagtgcgcgtagatgtttgatttattagaatattcgatatcttttgcgttataaatccaattcactccgttcaagtcgctttagattcgtattaaagttgtatatatgttaaaaatactatttcaaaatgtcacatgttttaaataatttattaaatggttgtttggctaacgtttattaaattatcgttccattttatagttttcaacttgctcttttatagttttcaattagcgttccaattaaatcacctctttctaatttatagtttttaacttgtgcttttataaataaatctcatcatggttaatattaacttaaatacttttctattaataattgtttggtataaatgtgtcatctatttagtagttctcgcgtgtcatgtttgtctatgcgtcgttcgcgcatcgttcgcatgtcgcacacaacgttttcacgtcgcacgtttttcttgcgtcgtgaatccgcctcgcttagaatcactcatattaattaacttacttatttaactaggggctattagcgtagctgattaattaaaactacctaatagctctaatgtatatttgataaatgtcgattaatacaggtatgtcaaattaaatgttctagttcatattttataacgtaaacgcgataacttctcaatcaaatctttgatctcagcatttcttttttttctcgtgtgaccgtagaagcgagctctatttcatatcgcacgttttataatgtttttccttatatggtgtaacgttcctttttgtttcaagaatgttgaatgtatgttcgcactcgcctagataacgttccgttcgtggagtctgaggaagttgcaggagaagcccctgagcagcagctgtttggtgaagtttctccacattgcaaccactactcgggagaagatgaaggctacgtgaaggagtttcaggagtttcaggacttcgaggagttctagactggattagcggcaaaccaccagtcggtagcctatgaaggccttatcttactgcgtttcgtttagcactttgatttctgtttaagttaatgactatgtgaatgtttcagacatcatgatgtaataaaagtaatacctatttacgctattatttaagcattgtgtgatgatgtccagttatgtaatctctgtgtgtgtgaatttctgatcctggcacgtacatgtttcgc

SEQ ID NO: 40872 - DNA, 859 bp, Zea Mays
gagatatgcgccggtgtcttccactccgtccctgggccaaccgggtggtggtgtcagcgccggtgtcttcctctccgtccctgggcttgggtttccatggcggtggcgagggtaacgccgacctcagccctattactcggaggtccaaccagatagccttttgtacttctacagtgctgcgagagcaaggagagtaggagcccaaagccccaaacgctctttgtttcgctctgcgtgcatgcacgcgtgttcgatgcattaggacggactttgaagaggctagagcaacagttaccgttaatggttaagccatctgaggctgaaaagaacttagctcaggcaaatgtgacatcaggtggtgccgcttcaggtggagcaagaaagttgtatgttggcaatcttcactcaaatattaccgaagaccaattgagatagatgtgggtccgacccatgctccaatgtcgttgcctcctatgagctcttggtcccatgagctgcatgtgggccatcctcgtcgtatcagcactatgcccctgctggccggctgcgtagcgaacacacagaggaacgctaaatgtagcacgtgtagacagcgtccggtattttaccgaaggctttaccgtctgttgctggaccagcaatagagctcggcgtcctgtaaatttggcggacaggaccacatacaggtccttgttggacacagtcttagtcctgtgagttccaggttttcgcttgtggtacctatgaacatgaaacctgtttactttgaggaatgtactttatttccatcttaagttagtctattcaaacggaatatggatatattaaccgaaattttctgcagtagcatagatcaatg

SEQ ID NO: 40873 - DNA, 577 bp, Zea Mays
atgaagcaaaagatcgtgatcaaggtgtgcatgccatgcgacaagtgccggtccaaggccatggggctggccgccaaagcaggggcgaacaagatggggatcaccggcgacggcagggaccagctggaggtggagggcgacgacatcgacaccgtctgcctcgtcaactgcctgcgcaagaaggtcggccgcgccgacatcgtcaaggtggaggaggtgaagcccgcggagaagaagccgcccgaggagaaggagaaggagaagcccgccgaggccgtgccgctgccctactgctgagaaccagtcagtgtttgctggagtcgtcgctagctgacttctgacgtgagagggctggtgacaggaagaatgagtcagcaaaaggtccaaggtgttagcaatacgagtgaacgagtggcatgtcgttcgtcacaaattaaaagaaggcagtgctggataagtagacgacacgagatcagagacgtgggatttgaaaatgacgcacgcactagcatcttttgcatgtacctgtaccgttgatgcatcaggtcaggtggaaataatgcatttacaattggat

SEQ ID NO: 40874 - DNA, 194 bp, Zea Mays
ggagtattaaatttattacaacatcatcggagttttagcaaaagaagtgatcattgttcggagtgcagcggaataaaactaacgataaataacggagggatggggaagcctgtcccatcactcctcatgctcctcctctgtcgaggtagggtcccactcgactgtccaacccggtggcaagatggacagccaag

SEQ ID NO: 40875 - DNA, 4325 bp, Zea Mays
gtttaccacttcactgtcggctctccagaacaaaagaagaagcttgccagcgctgtggaaaaagtgataatctagtctcttgttcaacatgtacatacaaatttcacagaaaatgcttggttccttgcttaaacatcacatctgataaatggagctgcccagaatgtgtaagtccattaacagagatggagaggattctagatattgaagtgctggaagcacctcgtgaagattctagttccacagagcctcgatcaaagaagatggagcgatatcttatcaagtggaaaggattatcatacattcactgctcttgggtttcagaaaaagaatattcagaagccgcgaatatacaccctcgtctgaggactaggttgaataacttcagaaggcaaaaggaagccatgaaaatagaagcagaaagatctggtgaggacatcgttgcaattagaccggagtggacaactgttgacaggatccttgctagcaggtatacaggaaaaaacttagttggcgatcgggaatactatgttaaatggaatgaacttacatatgaggaatgtacatgggaaaatgagtctgacatcacggtgttccaacctgagattgaacgcttcaatgagatccagttcaggcgtaagaaatctggtgacaagggcaaggccactcgggagccacgccaattcaaggagagccctacgtttctttctggtggcacactacatccctatcagcttgaagggttaaactttttgcgatattcgtggtttcataacaaacgcgtaatccttggtgatgagatgggtcttgggaaaacgatacaaagtattgcttttcttgcctcactctttgaagacaagtttggtccgcatctggtcgttgctcccctctcaaccctgcggaattgggagcgtgaatttgcaacttgggcacctcaaatgaatgttgtaatgtattttggagctgctgcttctcgtgacattattaggaagtacgagttttactacccaaaagagaaactgaagaagctgaagaaaaagaaatcttctccatctaatgaagataagaagcagtcaaggataagatttgatgtcttattgacgtcttatgagatgatcaacatggactcgtctattctaaaaaatatagaatgggagtgcttggttgtggatgaggggcatcggttgaaaaacaaagattccaagttgtttggtcaacttaaagattataataccaaacatcgtgttctattaacggggaccccagtccagaataatcttgatgagcttttcatgcttatgcacttccttgagggtgaaagttttgggagtataactgatctccaagaagagttcaaggatataaaccaagacaagcaaattgagaagcttcatggaatgctgaagccacatcttcttcgaagattcaagaaggatgttatgaaagaacttcctccaaaaaaggaattgattctacgagttgaattgacaagaaaacagaaggagtactataaggcaattctcaccaagaattatgaagtgttagcccgtcgtaatggtggacatacatctctaataaacgttgtaatggagttgcgcaaactctgttgccatggattcatgattgatgaacctgatcttgaacctgccaatccagaagaaggtttaaggaggcttctagattcatcaggtaagatgcagctgctggacaagatgatggtgaaactgaaagagcagggtcatagagttctaatttattcacagttccagcacatgttggacttgctggaggactatttaagttacaggaaatggacttatgaacgcatcgatggcaagataagtggcgctgataggcagatacggatagatcgcttcaacgctaagaattcaactaggttttgctttcttctttctactagagctggtggtctgggaataaacttggcaactgcagatactgtaatcatctatgacagtgattggaacccacatgcggatttgcaagctatggcaagagctcatcgcttaggacagactagtaaggtgatgatatacaggcttgttagccgaggtacaattgaggagcgaatgatgcagcttacaaaaaagaagattttattggagcacttagttgttggtcgactcaccaaagctaataatgtcaatcaggaggagttggatgatattatacgctatggatcaaaggagctttttgaagacgagaatgatgaatctcgccaaattcattatgacgaagctgcaattgagaggttgttagaccgtgatcaagttgacggtgatgaatctgtggaagatgaagaagaagatggattcttaaaaggattcaaggttgcaaactttgaatatatcgatgaggcaaaggctcaggcagaaaaagaggaggcacggagaaaggctgcagctgaggctgaaaattctgaaagaaactactgggatgaactattgaaggatagatatgatgtacagaaagttgaagaacatactgctatgggaaaagggaaaagaagccgcaaacagatggctgccgctgatgaagatgacattcatgatttaagttccgaagatgaggattactcattggaggatgacatttcagataatgacacaagtttgcaaggaaatatttctgggaagaggggccaatattctaagagaaaatcacgtaatgttgattctattccattgatggagggcgaaggacgtaccttgagagttcttggattcaaccatgctcaacgagcaatgttcctacagacactcaatagattcggttttcagaattatgactggaaagagtatcttcctcgtcttaaaggaaaaagtgtcgaggaaatccagagatatgctgaacttgtcatggcacatcttgttgaagaaattaatgattctgactatttttcagatggcgttccaaaggaaatgatgcgtgttgatgatgtactagtcaggatagcaaacatatcccttattgaggagaagatggctgccacaggaccaggaaaaattacaaacatttttcctaattacttgctctatgagttccaaggcttatctggtggaagaatatggaaagcggagcatgatctactgttactgagaggcatactgaagcatggatatgcaaggtggcagtatatatcagatgacagagagaatgggctttttgaggctgcacgacgagagcttcatctcccttcggttaatgaaataattggtgctcagttgaacgaggggaatttggaaggtgcacaggaaggccaagcgaacacaacaagcatgtcgcattacaaggagatccagagaaagatagttgagttcttgagaaagagatatcatcttatggagagagccttgaatatggaatatgctgtgataaagaaaaaaattcctgttcctgatgatattactgaacaaggtgttccagcaggacatgctccttttattccagatatcagtgaactgttgcgggaattgcccaatcttgagccaatttctaccaatgaattggtttctgagggcacagctggtcagttacaagttccccatctctacaataagatgtgtggagtgcttgaagagagtggtgcttatgcgctcagttccttctttggagacaagtccgcatcttctagtttggccaatagccttcgacagtttgaaactgtgtgcgagaatgtcgtcgaggccttgcgaccacaccaaaatggtactggcagtgccatcaaagaggaattggtagatgcagccaccaaagcagcagcagcagcagctcctcaacaagattcaggccatgatgcaccgcatgggcagtcttcgacagccaaggcggacatggaaatcgatggttgatttgtaggttccagagtggtaagaaagggaatccccctctaatcattatgtatactgtggtcagaatgtgcgctatatattgtaacatcaaagaaagcacctccaggcctgagggtgttactgctaatgcgtttggtttacttgttgtccttgtaatatgcatacacatttagaactcatgcagccattttgtgtgctcgaaccggtggatcgctgccctgttgtcttgtactgtgtttagggcctgtttggatacgaatggttaattataagacggggctaaagataagtacggataagtacggattagctatagttggctagcttgttggttaacaattagctaaactttggctagctagatggtaaacaattagttaaaagtttagcaaaagaattagttcacctattaactcagtttgttgcctcctttttattatgccaactaatttg

SEQ ID NO: 40876 - DNA, 278 bp, Zea Mays
ctcggagaaccacgacacctgttcggtggccgccatgggagcatgattgggctgccgcgtgtggacttcgattcgccgtcctggagttgtgtcctagggcttcttctggcctgcgggtgggaggctgtggttgcgccgtggaggatttgtcacctgcgccatcccgattgctcaccggagcagtccgtgtaacgcagatccgctgtctgtcgcaggccggcttcaccagggtgccctcgatggtatgatgttcctaaccctattcggtttgatgtccg

SEQ ID NO: 40877 - DNA, 589 bp, Zea Mays
tcttaatgtttttttgcaatatatattatattgtttagcaataaccagaagagctcttatttttgaaaaaaaataatcatggtccggatccctaaaagcatgtgacgcaccttgttttttttttattgatggcatggaaaccaagtacgtacatatatgcgacacatgattgaaatgaaagtcacacacctcgcccgatggtgtgatcgcggattcgccgtcgacatcagccggcggtgaaggtcaagaagagcattagtagtgagatcaccgattccgtacagcagcactaccacctggaactagcttagcacgcagtacttctggctagcgaagtactaattaacgcccgcagtgaagatcgaactgcgactgcgacgccgcgggtggcgatcgaaccgagcgcccggcgcccgtacgccgtccatccgtgtcgacccgcgggggtgaagtccaccgggtatatgattggggccgtggcgcgagaggcgatagcgacggccgcggatgcgccagcccacgcgtccccgccgaggcgcgccgggcggcggcggcggcgagcccaggacgcgacgaaatcggccagccg

SEQ ID NO: 40878 - DNA, 2784 bp, Zea Mays
gtctctcttcctcctcctacctcccagtcccacctttctttctttcttttttctttctttttgggtttctctttctcctggtccggtccgggagacctgctggaccagacggtgccgactcactgcaggcgttcgcttgacagccttcctattacgagacgagctcttggttttccgcagacacggactctaacaagcgagggcctgtcatggcctggcctgctgttaagtctcgtctcctgcgtgactgcgtctctcttctctctctctcgctctttctcccggagtagattttattcctattcattcctcgtgtgagtgaggtccctccgctcctcctctctctctctctctctccctctccgcggagtggagccggagtcgagaggcaggcagacgagacgaggaatgcttccttcttcccatgccgccgccgtccctgttcttctcctccctccctaattccagtgctctcacgtaccagatctgaggccgcggcggagcgtgacgacgacgaagtcggtcaggatgagccgcgaggataccctgaaagtgcagaccctcgagctcaaggtgaacatccactgcgacggctgccttaagaaagtcaagaaggtgcttcacaagatcgatggtaaaacgttctccttctttataaagccgcgaaccgcttgccttttttttgttattgtttgccgttctttcgtgttcgtcttctctgcctgccagggtgagacttgagagtgagaccagctcagccggaggggagaggctgctcgcctgctctcttcttctccgtaacagaaacgatggacgataacccttgtgtccattccgaaaataacttgttttcttctgttctaatacaaatgcgctgggcatggattggtgggtgttgcaggggtgtaccagagcacggttaatgcggcggagggcaaggtgacggtgtccgggctcatggacccggacaccgtcatcaggaagctgcacaaggccgggaagccggcgcagctgtggggcgccaccgccaagcctgccgtggcgacccagctcgagaaactgcagctcaaggatgccgggggcaagggccagggccagccgcccaagaacgcaggcggcaagggtcagccgcccaagaacgccgccggcaagggccagggccagggccagaagcagcagcagcccaagggtggagcgggcggcgccggcgccggcgcgaaagtggtggcgctgccgcactcgcagccgacgccgcagcagctgatgcagatgcagcagcagatgcagatgaacgggatgaagtttgctcatccggagctcatggccatgggcgcaggtcgcatgccgatgccgatgccgttcccggcggcagcgcaggcgcaggcgcaggccgccgcggccaaggaccccaagaccgtcaagttcgacctcccggggggcgaggagttcggggacgacggcagcgacctcgacgacgagttcgacgaactagacgacgtggatttcgaggacgacggcctcgacgacgacgacgacggcgacctgtacgacggccccgggatggtgatgaagcccatgggcatgcccccggccgctgctgccggtggcggcaacggaaacggcggcggcaagaagggtggcggcgggaacgaggtcccggttcagatcaatgggaacgccagcaacggcggcggggcgaagcagaacgggggcggcaaaagcggggccaagaacggcaagggccgccgcatgcgggcatgatgatgaggccgccgaacatgatgggcggcgcgggcggtttccccggcatgggccagatgggcggccacccccacatgggtggcggcggcatgccgcaggcaggcgggggcgccgcgcacggcatgccggctggtggcagcatcagcatggccgctggcggaatgcctggggccgggttctttccgcgcggcgttggcggcggcatgccggccggcgcggagatgctgggcatgtcgcagctgcctccgcagcagcagcagcacatggcggcggtgatgcagcagcagcagcagcacatggctgcgatcatgcagcagcagcagcaacagatgatgatgatgaacgggcacggccacggccacggccaccatggccacggcgggtacgggtacgggcgcccggcgatgccgcagtacccgccgccgccggcgtactactacccgatgccgcagcgccacccgcacgacagcatgttcagcgacgagaaccccaacgggtgctcggtgatgtgaggcgaggcgcggcggcggcctgcggggggctccggagaaagtgaaccaggcaaccagccagccagccaaccggaaggagggagctcgggcccgtcaggtcggaggcggccgccgtgagtggaagagtcgtcgtcggtatacatgaagaaaaaaaaaactagctatatgctatagcaccagccgtaacctcgccgccccatttcgttttcgtctttcccctagtttgttttcacctttggtactttttgtttcccttctctgaacaaagaaagagcggcatgcagcttcctcttccttgagtggaaggtaggtatagtggtaacaacaatgatagtggtgatgctagctgatggctgtcttccttcgcttctttctttcttgcttgcttgcttgcttgcttgcttgccccatatctaatgaatggacaatgtgcaagagcagtgcctctctctgcctgcctagcttgttgtgtgagagagacagagaagaatcatcatggatggaggtagat

SEQ ID NO: 40879 - DNA, 5894 bp, Zea Mays
atggcctcacccacggtcgcctccccgatccgggcgagccccgtcgacaaccccaccgtcgcgccctcactggcctcctgccgctgcgccttatcgctagatgctcgacatccccatccgcgcgctcgaggcagaggccagggacaccaagatgagcccgaccgcgaccgcctagccatcagctccaaagaagaagccaggggaccgatggacgtcagtgttccgtcgtggtggcccgctagatccatattcagcaagaaagatatctcgccatgccggcccagggccgcagcccgtcaccttcctccccccgcacccgccgtgacagccgcctccccacgcccgcttacccgactggccgcacaagatgcccacagtggcccccatcgcgcccacccgctccccccatccaccgcgacctcagccgccacgccgacgccatccccgtcctctagcgcgttgtcgccgtcgtcacaccgccaaaggtgcctgccccctgctaccgaggtcgacgaccagcagcggcaagctgccgagctcgacgacacgcacgccatgcttggccatatggacgagtccatcgcctgctacgagaaggggctccagatccagatgtccgcgctcgatgagcgcaatccctgcctccctgagacctgcaggtgattgacaaggtttaggaggaaacttccaaaagccggtcaagtatggagtgcttaacatcactttggcaacttatatttttttacatgtttgctttgtttgttaacaacataatttatgggctgacaatgtgatcatgtattctttctggtagtcttcgtgtcactgcttgcagttgcaggggagggatcatggctttcttttattttccatgtgcaatgtttaatttaggtgatgaactccaaagcttatcccattgttttctagcaagagctaagcaatactggatggagaacatttatctttttaataacgagtaaaagcataatggcatgcttgtgtttagttctctgtttgttgaccaatcgctatatttaatcttgattttttttatctataacttgaatttcaaagattcaatattttttattcagacattttctcttctctagatattcttttatgcaaataacgcggttacactagatcagccaacattctgggaaataagctatatggtcagagtaagaggttcaagagttgatagttcaacaactttaactgagagcaaatctacaagaaaaaggaaacaagcaacctggaacctacaactgcaggagcttgcttgaaagtgaacaatcaaggttgtgtgtatatattatgcccgacatttttgaaggatattgcgagggccattgtatctgctggaaaaatcatttcaacttgtcgaacatggtattaggatacgaattggagtggtcaacagaaattctggacagatatgtcaaatttcagaatccacgatggtcctccaagaaataaagatgctcttgatcatctattgagaagtggaatactaattttttgctgcagcgtgatggataaaggtttttgcgtattcttgggtttttttcctttcctttttggctacacacaactctttttaaatatacattcagtaggtggcaatgcctcctatttccctaaaaatatagcgccaaagagttcaaaattgaattctcataatctgctattaggaaaagaggtcaacttctatattttttacatcaggtaatttggctataatacaacggcatgctgaggtcaacttctgtatttttttctgcaagtaacttggctataatacagcggcatgctccattctgaagctggtcaagaaataaatatagcacttgcaatattttccagtagtcaaacctctccattacttcaattctcgttctcatttttgactatgttcttcatgtcagttcaacataataattaagaggtcgcttgcccctgagacggcttcatggtattttatttgttttttacaaagtattttttaagcgctaaacttacagtgcactttctctattcgttttggtgctgcttataagtcttttgtgttttagatccatcgaagatggcgcttaatctcgagagctagggagatgaaatgccttttgtacatgatggaaggaaacaaattacgtacatgtatatgtggatcgaattgactgttgcattctgcctgtatttaagcaacggtttccacccaaaacgtctataatttggtccttcctagatgtgtcaaatgtgtttactgcactgcgtttgcttttgtggcagcgccctaatagttgtttataaagtctgatgttaacaaactattgtcatgctatgtaatatatagtcttaacatgttggtttgttgagtgttcgaatatcagttttatattattatgtcaggtgttattagtgttcaattttttaagttcttgttgtacatcctatcattacatgagacaatgttgtgatgtttacaatattgtgttatgtatgttatatcattttggtattatagtataatttaatttgtatcagtttagttctgtattggttgttgccaaaaaaaattatgagatattaaggtcgataataatgttcgtttttatataatcgttttgcactaatattttgttaatttttttgtataccgttgcaacgcacgggcacctaactagtatgagactatgagtacatcaagtgcattcccttagaactcttgttgtgtaaaaaaatgtgtaacatgtcttggtacagagattaatttggtttgtgttttttagactgcaattatatctgggttctcagccttgccatggttagtcaagcccctctatgattttatcaggtttcaccaaaatactgaatagccttcctatcatccctttctttctgtatatgatatatgcatttaattgcaatgatgtactgttgctatttccgtacacagttgattcaggtggttgattatatggtggttcagagagctcgaggtgaatcacagagtacatatagatctctccactccagtcactatgttgggaatcctcagcctttggaggaatcatgagtgcatacttcagtggttctccagtcacttatggcgtaagatttgtctttggtgttacagcacttttgccactgttccgagtagcagagaaggacaactctggcaaactgtgaagaaaataaaagattttcacaagcggaatcttcagaatctgaataaaggagttcgtgggaatcagttgtaccaaaaactggttcagttttcgtattccaagcatactactggaagttcacactgatcggcgacaaactctcgcccaaggagaagttgaaggaggatcagcgtgaacacccactgaaagagagatggagttgaatgagaaatctgaaaagaatacgcaagagagttacaagtgcttcataagcaatcagatagatctgaaagttttactgtgccaacacatgcacacactggtggtgcctgcatctagctattcagatcaaagcctgacaggtaccatagggcaaagtgaagaagaaacagaagagttgagcaagatcacgctagagaataaggatattcagcttgatatcaatataagagaagaatcttggagctcttcacaacaagtgaacttttacacagaaagtaccagctccagtgaggcttgtttgatggagccgaccctatggagctgcatgtttatgattttaaaggacctggtgtaaccttatcaatgtacaatagcgatgagtttattaggccttttgctaagtcctccatggatatggctctttcaaaaaagtcgtctcttcatctcagcaccaagaatacaatcatcaagaagtatgacgacaggcatggatcatctatgtttctacaagctcgcggtcacatttattaggccttttgctaagttcatggatatggctctttcaaaaaagtcgtctcttcatctcagcaccaagaatacaatcatcaagaagtatgacgacatgcatggatcatctatgtttctacaagctcgcggtgatcaacttgctattgggaaagaaactgcacgtcgtttgggaatgggtactaatatgtacccttcctctgctttactcagacagaataaggatgagtcaattgcttccttgccaattgatgaattgatcgagaaggctgatggctttgctggtgtctttccagaacacaagtatgagatcgtgaaaggcttgcaagcaagaaaacatatatgtggcatgactggggatggtgtaaatgatgccccagctttgaagaaggctgatattggtattgcagtagcagactctactgatgcaactcgtagtgcttctgacattgtcctaactgaacctggccttagtgtgattattagtgctgtgctgacgagtcgggcaattttccaaaggatgaagaattacacgatctatgctgtatcgattaccatccgtattgtgcttggttttatgcttcttgcgctgatatggaagtttgacttcccaccatttatggtcctgatcattgccatcctcaatgacggtaccattatgactatctcgaaggacagagtaaaaccatctccacaaccagacagttggaagttagctgagatttttgcaactggagtagttcttggtggttatttggccatgatgactgtcattttcttctgggctgcatacaagactgactttttcccgcggctgttccacgtcgaaagcctcgagaagaccgcccaggatgactttcagaagttcgcctctgccgtgtaccttcaagtcagcacggtcagtcaggcccttatcttcgtgacacggtcgcgcagctggtcgtttgtggagcgtcctgggttcttgctggtcttcgctttcttggtggctaagctgattgccactctgatcgctgtatatgccaactgggcgttcactgcgatcaagggcattggatggggctgggccggtgtcatctggctctataacatcgtcttctacttcccgctggacatcatcaagttcctcatccgctatgcgctgagtgggagggcatggaacctcgtccttgagcagaggattgcgttcacgagcaagaagaatttcggcacggaagaaagggagcgcaagtgggcgcatgcgcagaggactctccatgggctccagccgccagaagcatccatcttcgagaacaagacgacattcaatgagctgaaccagctcgcggaagaggcccgcaggagagccgagatggcgaggttgcgagaagtgagcaccctgaaggggaggatggagtcagtggtgaagcagaagggtctggacatctagaccatccagcagtcctacactgtgtgactgactgactgacgacgacggggtttatagaggtttcttcttatactatacaatctgtactaggtagcaataaggatcaaggaaggaacccctatatattggctgcggttcgcaggaaatgaatgatggtaatatttatgatgtcggtgtggtgcttctgtcgccaactctcgaccatactaccctcaactcacccccggcaccaccggcaggcattgatattcagagatgaggttttgaatgagacgttcattatttgtacgtatttggaaagtcgtagaacaacatgatcaatactttgttcagaaaaggaacgcagctggcactctagccctttctagtctgcaaaaaattactgcagcatttcgaatgttatcttatggggtagttgctgatgctactattgattcacccctagaagtattcacaaacatgaaatgcagttctcttcttcaagtttgatgatgaagatgtttagtactacatcctgatgaagatgttctgcatgcacatgtact

SEQ ID NO: 40880 - DNA, 4971 bp, Zea Mays
tgaacccccatgcccgacgccactgggcttgaaatgggccttaaaggctctaagggagctccagtaccaggaatggaagggggtgtggcaaaggctcctgcttccttggaggaaaacaagtcctctgctgatgaggatcttggcagagggcctgccttgactgggaagaaaaggagggactgcaggggttctgcggatgaggacagaaacgtgacaaaaagggtgttgagatccgacgcaatgaagctgcgggctgaggctgaggcagcttgtgtggtagctgtggaggttagtaaaactgacagtttggagaggaaacgctgtgaggctattgtggaggctgagccttgtaatagcaggctgctgatggaagttacttgcaatggtgaggaagccaacgaattggttaacttggactccagtgacgtctcggaagagtcagctaggtgttctgagaataatatgggaatgcctagtgttcctgcaacagattcttctcaagataacggtttaggcacgcaaagtagccttgcagaatcagatattaagacaatgaagtcagatgagaagatgtctactgcaactctttcagagtgcaatgactccagagctggaatgaacagtttgagtgttgatgaggctcaagatgacaaagtgagacatgggccttgtcagggtgaggtcatagactcagcaatggctaatgatgctggcacaagtacaaatttaatcaaaatcagccctaccagcggatcagaatctgttaagcaggagaataatgtggttggtaccgaggaagtgatactccacagtagcgatacgaaagttgagaagcattctcacattgacgatgtttgtacagaaactgagatttctttgactgataatggaatatgcgcagtagataaccacaccgatctaactgggtgcactaagcaggaggagaggggcagccccatgaatgaagccaatgatgtttcatcacatgacattgtatttacaaggagaggtagaaaatcatgtgaggcaaagcagaggacatgtgaagaggaggcacggtttgagaagcgaatcacaaggtcagctacagttaggcagagagaagtttctgcgagctcacacaaaacttccacaaatgaggctgcactagaaggcagagggaggaagggagatattgttgctcactatacaaggaaagtaagcagtgcagtatctccaaaaggtcaccatgctgagctgggagactgtaataccagtatgccgaaacaaacagtgaaagaaacggtggttgatcgaagagactcaggtgtccctgagaatgataatcatgcgaatgtcacagagaataaggagtcagaaaatggaaaggagatcaatttgaagacccaaccacctgtgggaattgttaagaaaacatccggaggaggtgtttctgcggtggatcagaatgtctctggttcagccatcactgagagaaatgatacggagcatactgattctgatggagttaaatcggaaaataaaactcctgtgcagaaaccactactgtctgttggtgcgaagattgttgccagcaagaagaggatattggaagcagagcttgataaatccactgggagatcaccaattgctttgccatccatgaaaaagacaagaaatatgtcttctggtcctgagataaaccaacctgataagtctactggagataaacttattgagaataattgtgattcgggcaataagcgtgttctgagggaacggcagcatcgcaatcaaacaaatttgtcaaccagatattctaatcactctaatcaaaatgatatggagcagacacaggatcaatctgatgatgatgagatcagcagcgatacttcctacaggagaactcgtagcagacgtcgttgtggtgctgcccgtcttgctgtgccaaaacaagaggactctagtgattctgaagattttattgctgtgaaaaagaatcggcggaaacggaagaaatctgtgcataaacaaagggctggatctaagttgaagcatacttctggtccttccaaagcaggtcgtttgggtagacctcctctgatcaaatctgaatctagttccttatctctgcagccaggaaaaggggaaaggaaggtgcctgaaggtacaggaactcttcgcgaagaaaagcaaaaaataagtgatcagataaaggccatgcttctagatgctggttggacgattgatttaagacccaggaatggtagaaactacatggattctgtgtatatacctcctagtggcaaagggtcttactggtcagtcacaaaagcatattatgcgtttcgtgctggtatggaatctgagcagcaggaaagtcctaaagaccagtctttgtcaacaaaatctgttggtagccccgacaaaaggcaggtctctagttcttcaggttatactttaacagaggatatccttagcaaattaaaaagagttgttgtaaacaaacgaacaaccaaattagagattcaaaggttgagacagaaaaggttcaaaaaggaaaagaagaagaagaacgtttcaaattcaagaagcctgcatctaggcaatgaaaggaaaaagagaggtggctgtgctctactcgctcgtggatcgaacaaggagtctggcagcagcactgatggttttgttccatatgaatggaaacgtacgatcttttcctggctgattgatctggatgttctatcagtcaacactaagctgaaatgtatggatggaagccactcaaaggttttactagagggttttgccactagggatgggattaactgcagctgctgtaacgaggtctattcagtgcttgaatttgtgactcatgctggttctgaagtaaataagccatacagaaacatacttgtggatgggctagacattgaccttttgcactgtctcattaatgcatggaatatgcagtctgatgttgaaaggcaagatttctttccagttagcattgagggcgatgaccccaatgatgacacatgtggtatttgcggcgatggaggcaatttgatctgctgtgatggatgcccctcgacatttcacatgagttgtctaggactggaggtacttccctctgattattggtgttgtgcaaactgctcatgtaaattttgccacgaacattctagtgatggtgctgaagacactgctgatgttgattattcattgcatacttgttcccagtgcgaagagcagtatcatgaagcctgctctcctgagactgattccataactaacctttccagtcagacaggcaatttattctgccaacaaagctgcagactgctgttcgaggaattgcagaatcttcttgcagtcaagaaggatcttgaaccagaatattcatgcagagttgttcaacgcatccatgaagatgtaccagaagaagtccttgctttggacaaaagagttgagtgtaactccaggattgccgttgcactttcattaatggatgagtgcttccttccgattattgaccagagaactggcatcaacttgatacgaaatgttgtgtatagctgtggatcaaattttgcccggttggatttccgtggattctatatatttattttagaacgtggagatgaaataatagctgcagcatctgtccgaatacatggaaccaagttagctgagatgccgttcattggtacccggaatatgtataggcgacaagggatgtgccgccgacttgtagatggaatcgaaatgaacttgtggacacctggacatcgaaatttggatttagtccacttgaagattctgagaagcaagaagtgaaatctatcagcatgttagtttttcctggtacaggtctcctccaaaagccattgctaaaggccttgcctaatgaagaacaatgttcccaaggagacaaaactgagaaagcatctgatgtagtcaatgaagattctccttgctctgatgcaagtgctgatcccctaggtttgggggtcaaagagcatgaggacagcagcaaagacgctgatggcacttgtaacggtgacgtttcacaggaatgtccccattcttgatgggaagatttggttgcagttttctaggccccaagctttacatggactaagcctccatttgtttttgcacctcgagtttttgatccagcagttagcatgacatccatccgttgttttactcagaaattgatgattgacgcgtcggcctgggaaaagaatcaacccgtgcagttctgaaaagcgtttactccatccagccagctaacttaatgtgcagctgaaaaatcggcatgtagaagaatgtggaggataacgtcccttcttttgtttctcgtcgttaacttgagactccgagggcgaatgcagccattgaatcgtcgtaaatgttacagcagttgttgttttgttaataggtttttttatgtcttcgctagcgcattcctggaatctaatctcattcctgtaagataattcacatgtctgtaagatcagctaatgtatgcgcaaagctagaaatcatccgcctcatccctgtgttcgttcctgtggaaaggattcgctttgctggaatgtgtttgtttgttcttcctgtgaaggaaagcttttgcaggtcaaatcatcagttcatcaccattaagatgtgcatgcaatacaatgcccctggagaagcaaaatctacaggcaggcaggcgtctgcgatgctggtgctgctaaggttatcgaggatcttgttcttgacatcctgtggaagcggggcggacggccctgccagcctgccttggagcagaactccgccagcgatctgatccccttctccagcgcgacgtgactcctgcagtgcagtgaatagcgtcggcacggcgttcctgtaactgtgtcgactatattttgtcaattcgctacccaagacatttggaacctgcttggaacagctttttatgaatagcttttctgagaa

SEQ ID NO: 40881 - DNA, 1267 bp, Zea Mays
gttttggtctggatactgaaatcacaggcgtttcctttgagattcttgctggcaataacatgaacatggataagacaccaatcgcaggcgacggcggcggcgatgcaggaggcggcggcggcggctccggcaatggtccggagatgcaatcctcgttggacgcggtggcgccttcgccgactcctcatacggagttggacatcagcagcatgccggacacccccctacgcaagcccggccaccggcgcgcgctctcagagatcatcggcctccccgacgacctggacctcggcggccccggcgccggcgacgcgcccgcgctgtcggacgagaacgaggaggagctcttctccatgttcctcgacgtggataagctgaactcgcggtgcggggcgtcggagtcggagccatcgtgcgccatggccggcggtccgggagaggcaacggagacgtctgcggcggcgtctggggcagcgcaggggcagatgcatcatcacaaccggcactcgatggacgcctcgagctccatcgacgcagagcatctgtttgggacaacggtgacggagggggtgtcgccggcagaggcgaagaaggcgatgtctgccgcaaatcttgccgagcttgccctaatcgatccaaagaaagcaaagaggattataaataatagacagtcggcggcaagatcaaaagaaaggaagatgaggtacattgctgagcttgagcggaaggtgcagttcatgcagagagaagccacagcactggcaacccagctggcattgctacagagagacacggctgggctgactgttgagaacggcgacctgaagatacgtctggagagcacagagcagcagatccacctacaagacgcactgaacggggccctgaaatcggagatgcagcggctgaagatggcgacagggcaggcgggcaaccagatgatgaacttcgccgaaccgccgcacacgttcggcggtgcgaaccagcaggtcttccaccacccgggccaagcagtgccgccattcctggtggcgatgcaacagcagcagcagttgctgctgccgcacatgaaccagccgttgcaccctctgcagagccagcagctgcatcaggcggcgacgctcagcatcgacatggaagggctgccggcggctccacctggccagtggcaatggggtggtgacacgtggtcggagagcagcagtagctgattcggcggcgacgacgacgtgggttgtggatgtatgccatgttcgcatgattagga

SEQ ID NO: 40882 - DNA, 549 bp, Zea Mays
cgccccacaggtttggtactttgttctcgccggtttaagccgtcgtcaagcgtcatcagccataaccggcacctctgtaacaacgacaatgcccctgtgctcactagtcgttactcaaaacggattgcagtactccatttgtcgcttcctccctcgctatactctgtggtcgctcgtcggtagtctccgccgagtactcctcttcgtcgtagctctcttcgttcctgcactgtcgcctctgcgtttttgtcctctcgatgcttcttcgtcacatcagcttgtgtccatgccttgtgcctcaacatcttgtccacatgccttcttcctctcagctgcttgtccccatgtcttttccccacaacagattgtcctcgtgtcttcttgatgtgaacttgtgccactggtgaaatcttcagcagaaattggttgtgcaaattccccaacgaggaaagcaaggagagttgtactgacttgataatgactctgtatttgtgtcaagtgtttctagctgttggtgaatgaggagagtcaggtggatttgaagtgttt

SEQ ID NO: 40883 - DNA, 1882 bp, Zea Mays
tgaaatgcaaaaaacctcagttctggccatgttacagtgtgctgcactgccggagtatcaggggaaaacgctgaaatcatggaaatcaccttattgcatgatgaatctgatgcaggaagcaccagtttgctaccgccattgttgtcatatggtccaagatcaatgctgctagtgctctcgattatcaagctgtgagtgttctacttagaaacaatagtgtatcagtagaagtgaatgggatgatctttctaagcatcaatgcatcatcatgttccaatacaagtaccatcgtcatcagaccttgagagtatcctgtcaccagatccagtctgcagtgatcttcagttgaaagagataaactacaatgctgcagcaatggatgaaagcactgagctccttcacttgattcttggtggcaatgatgaaggatacaataccacaactgaattacaagtttgggatgttctggacttctatgtctcagaaaacttctcggctctccaatttgatagtttgatgggttttacaaatgaagttagtacttcctacaatgattgtatgaatttagttgacatggtagagtggcccgtggctcgtctgtctctagatgatacaccaaaactcagtaacagtgatgatgcggttctggcagacaatgtcacaacggaccctgatgaaacatccttataccttcgtacaaaaccaacagattcagaaactgaaagtagctctgacgcaggagatgttgaaactgaatatctagatcaaaagctactttctagatgtctgcctgatttaatggatgttgactcgcccaaccacttactgaaaacaccagtgagaacaaaacatgtgactcttgtgcttgatttggacgagactcttgtacattcaacattggatcagtgcgacagtgctgattttaccctagaagttttcttcaatatgaaaaatcacacagtgtatgtgaagaaaaggccttacctgaaagtgtttcttgagaaggttgctcagatgtttgagcttgtcattttcacagctagtcagagaatctatgctgagcaacttatagataaacttgatcctgatggaaaatatatctcacggcgtatttatcgtgaatcttgtatattctctgacggttgctatacaaaggatctgacaatcttggggatcgacttggcgaaagttgcaatagttgacaatactccacaggttttccagttgcaagtggataacggcataccaattaagagctggtttgatgaccccgcagaccaggaattaatcgagttactcccgttcctggagagcctcgtggactcagatgacgtgaggccaataatttcgaaggccttccatgacaaacctgagtagaaatagtcctggagagctggagaggttcactggaattaatccagtgaacctctcgctgaagttagcttcgctccacacggtgcaggccattcttgggaagttaggtataggatcaagattcaccatttatgttatgttagctgttacaaatagcaagcataaactgcggtcgtcgatgaaaatggcttgtgtgtgtatgtcccttcggtgttccgtgtcacagatcattgtacagagacgaacaatagtgctgaataaagtgatctgagtgcaattttgctcatgaggacggctcgagcaggaagccgtgcttctgttcataataacgtgaattatgttaggacgtatgcactaaccagtttaatttaatagaaaaagttagccaatccatttatacactccaacattagtcaatccatttgtacacttcaacattagtcaattcatttatacactccaacattagtcaatccatttatagaaagacgtaaacatggaaataaaa

SEQ ID NO: 40884 - DNA, 1694 bp, Zea Mays
gctcctccctctatccacttgcaacggtcgagaggaagcggaggtccatatcgctcattcccgcccgtcccgcaaccaccaccgcggccgcggtgccatggcatccgccgccggcgccgccttgtgcccatgctctttctccaccgtactctcctcctccccctcaactcccttccgtcccgcaaggacgacgcctcgcccttctctccgcccgctgccgcgccgcgccaggctaccgctgcggccgggccactcgcgagtcggatcgtgtctgcaggtactgaggtgcctcccgaaatgcgactcggggaagccggacggaggaggagatgctgggttatcgggtcggaaggcggcccggccagcgggtcagggaggacccaggcggcccgcacagttcggcgcgtcgtcgtgcggactcgcattcacgacggtggcgggggtgataatgctccaggcatcgcagcaggcgcttgccgccacgcagttcgctggcctgcagcctgcggacgtgctgggggatctcggggacgtcagtacaggttttgcttcagctttcctgttgatcttcttttctgagctaggggacagaacgttcttcattgcgtttcatgtgtttgataggcactgttagcagctagaagttctggagctgtcatttttctaggcacatttggagctcttgcggtaatgaccattatatctgtagttcttggtcgagcattccactatgttgatggcatcattccgttcagctttggtggtactgatttcccagttgatgacattgctgcggcatgtctcttggtttattatggggttactacattacttgatgcagcctcaggtgatgatgaaaagatcaatgaggagcaagaggaggctgagttagcagtatcgaaattttctggaaatggtgcgggggtcatgtctgctgctggtactattgctagcacattcgtattggtttttgttgctgaatggggtgataaatcatttttctccacaattgcactagcagcagcttcatcccctctgggtgtcattgcgggatcactagctggtcatgccattgcaacattgattgcagttcttggtggctctttgctgggaacattcctgtctgaaaagattatagcatacattggagggagcctattcttggcctttgctgcgattaccatagttgagatagtgacttgaaaagggagttccagcttccacaattcataaaaagtactgatcttttgtcagggcaatgaaaaatcagcttgatcgtaatggtagtacattgatgtgttaccgaacatgattgtccacaggaacttcattgttcgtatgggacgtcctaggcttgcgtagagtgttttgtttctggtgatgagaatttctgcttctttatccaagaacaatgtttttgtcatcatcatgatttgtagtggaaacactgatagtcaggttggtcggaagatgggactgggagcaaaactatgaattccatgtagcttttgaacttcctcttacattatttacaagtatatgaatcagccttttcgtatttatggggaagacttccctggtttatgtcttccctagactttattcacactagttcaaccctttttatatgaatctaagtgttagattggaagccctaaccctaactagagttgggatgttgtattaataagtag

SEQ ID NO: 40885 - DNA, 2692 bp, Zea Mays
aagattctcgctacagagacgaccatgtgaaagaatttaaatctagagtacaacgtgaaggaatggcgttgccgtcggccaccgtgctgtggacggccagcatcaccttccggcttgcacagaacatggtggtgttgttcttcctggcggcgctactggcggccccggcgcgttcgtcgtcgccgtcgtccaacaacggcgccggtcttcagcagcccaccctgaccctctgctccggtcactccactgtcgccaagagcggcgagttcgccagcttcctcgcagccgtgtgcgccggagcctacggcggcggcgtcgcccacatgtcccacagcatgtcctcgtacgtcgccgccgagaaccggaccatgtacggggtcgcgcagtgccgccccgacgtgtcggcctccgactgtactgcctgcctcgctgcagcctcgtccaagctcatcaccgggaccgcgtgcgcgacgtcggcggtctggcacgacgcctgcttcctccggtactcggaccgcgacaccggccggttccgcgaggacgaacacacggagaccgtgttcaacgcgagccgcgcgctgtcgtcgttgccgccccacgttggcgccaacaaagcggtggtggtgaggcgcctacttgccgccgtcgcggacagcacgaggagcggccacatgtgcagcgacatcggtgtcggcactggtgcggcaggcggcggccggatctacggactcacgcggtgcgccgccgagatctcgtgcgcagactgccgccgctgcctcggcggcgctctcgcggtggtagagcgcgagtacaacggcagcgcggggatgcaggtcctgcggctcagctgcatggccaggtacgagagctaccccttctacaacaccaagttcttgacccggcgattgctggcgtcggcgacgagcgggagcccccggccgactcatggaggaatcgtctttaactcttctatatcttttgggccttttgggctcgtgcactctggcggtcctaacccaccgccttcaccgccagtatcacctccaccaccagcattcacgaccatctccgtgcctgctagtgtgggcactgcacaacccaccccaccgccttcacggcctgcacaagcacagccatcaccacctccaccagcagcatccatgatcgtctccgggcctgcgactgcgactccgagggctgcacaagcacaacccaccccagcgcccccaggcggtcataacccaccgcctgcatcacctccaccagcatccatcatgaacatctccgggcctgcgactgcgactccgactccgagggctgcacaacccaccccagcgcctcctggcggtcctaccccacagcctgtagctgccgcaacgaatgatcgtctctattgcaactgggttggtggctgctttcatcatcctcgcactcaccgtatggtgccgtcggaaacagcaactgtctcagagagaacatgtcatagaaccccatgttttgaatcatcaagcagatggagtgccaggtgagactatgcatcacctagaaaagaaacatttgggctccgaagaagacgacgacggaggaagaacaagctgccaactctacagctacctggttcttgaggctgctacatgtcgcttctcaagtagaaacaagctagggagcggtggatttggaacggtatacaagggcacgcttgagaatgggaaggacgtagcagtgaaaaggctcagggactccaagagggcgatacaagaactagagagggagatctccatcgtggctagcttgcgccataagaacatcgtgaggtttttagggtactgcttccaagaggaagggaggttcttcatctacgagtatgtgcttaacaacagccttgataaattttggtacaaagcatcttctcaatgccagaagctagagtgggctacatggttcaacatcatcttaggggttgctcgcggccttctgtttctccatgacatggggatcattcatcgggacctcaagccacacaatatacttcttgaccgtaacttcaacccaaagatcgctgatttcgatctcatgaggatgtatgatcaacagaaaactcacgagagcactgagaaggtcgctggaacatttgggtacatggctccagagtgcacgtccggacgaaaattcctactttcgatcaagtctgacgtgtacagctacggggtgttagtgctggagatcatcaccggccacaagatctacactttcgaaggccaaaactctgaaggcctcgtcgaatacgcccttggcatcccttccctgaatcgaattgaattcagagctggtgtggcagcactggtccactggatagagaagagagcgagcgacgtcatggatgctgacttaggtgtggaagggcatgagcacgcgccacggcaagcgctgcggtgcgtgcacgtcgcgcttctctgcgtgcagtctgaccggtcgaggcggccaaccatggggcaggtcatcgccatgcttagcagtggcgacgacgggacagatgacctgccggagccatctctgcccgggtacgtcctccgtccaatggcggcgtcaggtgtccagctatgctttgggtgcaggtagcgccgcttgatgacgtacgacggtccatggccagtacaaacatagaaaacacgatttttactgagagctatag

SEQ ID NO: 40886 - DNA, 3582 bp, Zea Mays
cacactcgtcccttccctccccctccatctccattctccaatctccccttcgacgctctcccctcgcttctcgcgcacactaaccaatccgagcgcccgacgctgccccccgatcgaatccaccggagccgcccacctagggctcgcccgcgccattgtcgaaccaggagggttcgtccgcccgcgcctgctgccccgcactcccgcgccgtggcggtggcgttggcggtatgtatgatcgctagagggagaggaggaggtggcagcaccggtggggattagggtggcggcagtgctggtgccgggaggaggaggaggaggaggaggaggaggaggcgtagcccatgaaggcgacggcgccgccggcaaagcggcggaggggcccgcggctggcggtgctggcgctcgtgttctgttcgctgctcgtgccgatcgccttcctcttcaaccgcttccccgccgtgtatgtgacggatgagcgccctcagcaggagattgacttgccttcattcgatcgcgtggcatttgaaagtggtggatctgtaaatgaagatgtgttcaagaagacttctgggagcagtagtgtgtcgcaccatgattaacgttgacaagattaggcctcctagagttcaaagtgctgatgaggtggaaaaggctaaggcttgtcaacttgagtttgggagttactgtctctggtccatagagcacaaagaagttatgatagataccattgtgaaaaggctgaaagatcagctgtttgtagcccgatcttactacccaagcattgcgaaacttaaaggaaaggagacattgactcgtgaactgaagcaaaatattcaagagcacgagagggtccttagtgaatccatcgttgatgctgatctaccatcctttataaaaacgaaggtcgagaggatggaccaatcaatagcaagagccaaatcatgcactgtggattgcaacaatgttgacagaaagcttcgtcaaattcttcatatgacagaggatgaagctcattttcatatgaagcagagcgcatacctgtacaaccttggtgttcacaccatgcctaaaagtcatcattgtcttaatatgagattgacagtagagtacttcaaatccatgccattggatccaaatgactcttctgcccatacgtttaacattccagacaataggcactatgttatattgtctaaaaatgtccttgctgcttctgttgtcatcaactcaactgttagtagctctgaggatactgaaaatatagtctttcatgtactaactgatgctcaaaatttttatgccatgaagcactggtttgcaagaaactcctacagggaatcagctgtgaatgtcataaattatgaacaaattattttcgagaatttccctgagtttggaacccagcagttatatttgcctgaggaatttcgtgttttcatcagtagccttgagcggcctactgagaagagtagaatggagtatttatcagtgttcagtcactcacatttctttcttgccgaaatattcaaagatttaaagaaggtaattgtgttggatgatgatttggtcgttcaacatgatctctctttcttgtggaatcttgatatgggagataaggtccatggtgctgtcagattttgtggtttgaaacttggccaactgaggaaccttctgggtaggacaatgtacgatcaacagtcatgtgcatggatgtcgggggttaatgtgattgatttggaaaaatggagagatcataatgttacagagaattacctgcaactcctgagaaagtttgggaacaatggtgatgaggcctcattgcgatcttcagctttgcctataagtttgttgttgttccagcatcttctttatccccttgatgagagattgactttatctggacttggatatgactatggaattaaagaaaaacttgttcagagttctgcatcattgcattacaatggaaatatgaaaccttggcttgagttgggcataccagattataggaagtactggaagaggtttcttacacgagacgagagattcatggatgagtgcaatgtaagtccatagtgcacttgagcttgagagccggatcatttttgacagtagatttcagtctacactgctgtaatatatactaagaggaccaacacttccattgagaaaagacttgggaagcagtcactagccatcaattttgacagagtagatccagcgccatctgttgagtgaacttgtgagctcgatggatggttttttctgcagttagaggactttagtgttaagtttgaaggataatgcagtagacaacgttggtggtgtgtggtggtgaggctccacgtaagagggagcatcacactacgtaacaggaatgatctttggtggattggggcgtcttaattcaaattggtgccttccatctcatcgattcaggttaattcttttctttgttgattgatttgttgacccctcttgctttgtccttctgtcaataaggacatacacaggttaaaattcaatttctttgctcgtagttgttgcacattgattgttctatcattattatgttgatgcaaagtatattatgatgtcagactcatctgttacaaaaatgagattaacaactgttctatttggatgtcttctgagcactcaaactttatctcatgatccagtaaatttgaatctccatatatggtcgtgactgggtttaactgccgacataggtttcctctgtgtgctccactgtggcctagaaagaattaaaaagtgcagtgcggttcatagcaatacatatacttgacattgcagaagtaaaaacgtgttccgggcacttggtgaatggagaaccttgtcactgtaaattggttcttaaaccttgttgcgatgtaataatcatgtaaacactgtaaaacatgcgaattttccaaggcagcaataagcttcagagttgaagaaaccgttaacctggatgaacatgcgaggacgcttcttatctttgagtaaaaggtggcttagggtttgtttggatgacgtgtggattttgaaaaagtgaaaaaaccgttgtaaggtatagaccatgagaattcaaataattctacgtctcctttgatgacttcacaaagaatcagatctctttcgatccttttctcaagcgatcaccaagatcgagcttcagttctcttatcaaatcaaatggtgagtgcaatctctcccacaaggtactccacaaaaagtcggaagctcttgtttgctttacaatttggagcagcaactctatacaagaatgatagtaaatcttctctcttttctcggagtcaaaactcaacacaagtgttctagccactcttttgctaccttaggctcttgcaagatgctatgctaagcacacgatggttttgtaagcacttaagatggtttggatgctatggagatgatcctctaacttgtatatgatgtttgtttgttaatggattgagttgtttttggttggaggggtatatataggttgtccatctcaaaatagctgttggaaccccactttagcttctgcgtacccattagacatgtcca

SEQ ID NO: 40887 - DNA, 1760 bp, Zea Mays
aaaacccgatagagatacagaagaaaagagagaaaaaaactaagctcgcctgatcctttttaagagacgggacccctcaccactctgtaggtcccgaaggcccgaaccttaggatcgccggcgaaccaccggagctgagccccacaaacatcactgtaccacacggtttggtggtgtggcgactggcgacgaagcgcacaagaacaaaacaagagggcgagaaacatagggagaaaggaggagaggaacggagagctggaaaaggcaggaaagacccggcttttgaccccaagtaccctgttgagggcaatggcggccacctccgaggaggcaatcaagcagttctcggcgctcatggagcagcaatgtgcatcaaggaaatctgagagggactttgatgcgttttctgaaggctagagaatggagtgtgcctaaagcttataaaatgctaatggattgcttaaactggagagtacagaatgagattgacatcgtgttagctaaacccattctgccatctgatatatatagagttattcgggacacgttacttgttggattgacagggtactccaagcagggacaacctgtttatgcatttggtgtgggtcttagtactttcgacaaggcctcggtgaactactatgtgcaatcacacatacagatgaatgaatatcgagatcgtgttgtcctgccggctgcatcaaagaagtttgggagacagattaatacctgcttgaaggttatggatatgactggcctcaagctgtctgcactgagccaaataaagatgttgacgatgattactactgttgatgaccttaattatcctgagaaaacggaaacttattacattgtaaatgctccatatgttttttcagcgtgttggaaggttgtgaagccactcttacaagaaagaactaaaaagaagatccaagtcctgtatggctctgggagggatgagttactgaaggtcatggactacgagtcacttccgcacttctgcaagagagaagggtcaggttcatccagcgactcgctggatggagtagattgctactcctacgaccaccctttccaccagcagctgtacaactacatgaagcagcagcaatctctgaatcaggactccgttggtcccagaaaacaaggctcggtccacgtggatgtgccctcgcctggccttgaggaggccaagattgcggagacgatcaaagcagagctccagaatttgaggggaagcggcggtctcgcccattcattcagcagcatccagatcgaaggtccatgagggcgcgcgccagtgacccgaagagaagctcttggtaatggtgcctcctgcttgcagtcactggctgcaggcttgaccggggcgaatagagagcgggattctaataactgtatccgcgattgttgtgatttctaattaaccaagtgggcgtgtatcgccatgcttgtactatccctgtatgtatgtatatataacggccaactggacggagtttatgtaactccctgctaattacttagaatgctcatcttttattttactccaatatagtgaaaatttcgcttagggcccgtttggttccttgaaatggtgacctcgaatgatttctagccactttcaacaatttctagccagattgctttgtgtaaattctagagaggaacgaacgaggccatcttttattgttatcgaatatttgtcgctctaaaatactataaataaaaaagaatggaggaagtataatgtagtg

SEQ ID NO: 40888 - DNA, 1387 bp, Zea Mays
tggtactgaaggcatgttataaactgcgctgaagttaacttcctgagtaattcttctttttcacttgtaagagaaagcaaggattgaggctcaggtgaaggctgctgaagcagctgcacaacaaaagtttgaggaagaaatgagggtgaagcgagagcaggaaagggaagcagcacggctggcagtacgcatggtacaacctgcttgcggttttctgacctgcaagtttatatgcttgatggtatgaagggataaatctcctcttgtgcagatgaagaagactgttgatattgacaacagtgacttcctaaaggagctggagaacttcagcaaaacgtggcagtcgaatccacctggcaaattaatcgtggattttattgatggggacttgccaccggggttagggagccctctggagaggcttggcctgttcatgaagaacgatctcgaggatgaggtggaacaggaagtcgaggacagcgcatcaccctcgatggacgttgacatgaggaaagatttagcagggcatgaaatgcaagacagcatatcacccgtgaaggtcattggcacgaaggatgacttccagggagcggacattaacacgaggaaagatttccaggaagacgcagcagggcatgaaatgcaagactgcatatcagccgtgaaggttattggcacgaaggatgacttccagggagctgtagggcatgaaatggcgaacagcctatcaccatccactttcgttgacacaaagaaatattccgaagggacagaacatgagatggtggatagcatatcgcctttgatggatcctaacaccgaggaaggggagatcagctgctgacgttagctacacttgtcatccacatcatttgttgagttcgtgaggcagacatccttgctgggttgttggattaggcgacatcataagcagagtgacgaagaaacgctattcccctctggttgtgtcgtagaacaatgtggagaacatgtgtcagccgaactgagtagtggttttggctttgttgcggttttttttcctgtcgtggtcttgtcagtcgggcactccgctgtatgctgggttacctgagctcgtcagctggatgacctgtataaaaacatgatgaaattagggaggggttaatttagtgctagtatatattgtaggtgtaggactgtaggagcttatggtggagccggctgcagcacacaagctatagcattgttctcagatttggtcagcgcgccgtagtaccttgttactgtattcattctaaaacttgaataaaatgatgccagtcgcacaagttactgtaggagtagctatgacatgttatttgaaatactgtgttcggtttattcgatgaaagtgacgcttcctgagttc

SEQ ID NO: 40889 - DNA, 482 bp, Zea Mays
ctcctggccgcgccgcgcacgtagggaagaaaatcccgccgccccctgcttagatttttcctgcggcgttgtcttcttcccatgctgcgcgccgtcgagctcccacgcgcgtttcttcctctgcttcatcccccaactgttgcgcgcctgctctctccccagatgtctcacgtcgcgcccctgctcctttctctccatgccgcgtgctgagcactctgctccctgagcgcaggacctctaccgagctccgtccatggccgcgtttctctctcccttcccttcttctttgctgtgctcgccatggctccctccagtcctccctgtgcccagccccttttccagtcgcgtgctcctctctgccggcacccacgctccctgctcaccagcgctcttcctcgcatccatggccgtcgtgtctgttgaaccccaaattgagtaggcggacggtccggccctgaggccggacggtccgcggtccagac

SEQ ID NO: 40890 - DNA, 2658 bp, Zea Mays
agaattccatcaattgctctatacacgacgtcgtcgacgtgtaatgtaaagctacagcggttcaacttcgacggcggccccagcctcgctacactgtcgctatccattttccccgtcacgagctgccatgagcaattaagtcttcttcacttcctggttcccagtattggtcgaggcgatctgacggagggagcagccaagtcagcaagtaccgcagcaccaagcagtcgaacagcgccgaagatgccagggctcgccgcgtcggcgtccgcagctccggcgccgttctcgttggcgacctcgcgcttaaccccggttgcaagacctgctccaagtttcagaacgcaagcttgtggattgaggtgctggattgctgcaaagctgaaactccgcaaggcattgaaaaggcatcacggatggcaacttcaaagaaatctagatgctcgagggaatgataacgttccagattgcttggaggctgcatctctgactgaaaagagaagtcattggaacatgcatcttgcttatggttgtcactctattgggaaatccgttgtcttgagtccgttactttgcatgtgcagatgtgcttatcacagttgtcattattgtcttaatgccttatgatttcgtcagtgctgctgacactggattgcttcatacttttgatagttacattcaatttgcattagcattataagcaaaaaaatgctcaagagaaactttcttcgtcatattatcttacaactactttttactgcaaacttcttggcaatttttgtctttatgctttcatgttgccctgactgtttcccctttatgcagattctggaggtgaaatggccaacacaagctctgatactttggatagttcaactgttcaggaaaaaccagtggttccgggacacatcatctctgaaatcagttctcatgttcaaaaggaagagtctgctgtgtccaaaagacgctctaacaatgaaccatctctttgcattgctgtaattggagctactgaatgttggtatatttgggtattctaggaagaaattgacagatgagggcttaagatctataattgaagccaatttgacctgccgggtggatcaccatgaaaattgtgatgacaagctaattgagttcctcaaaaagacgtattatgtagatgccggacatgacaaccaagaagggatggttagattaaattctaggatgtcacaaatagagggcattggtgctgcaaacagaatattctaccttgctgttccacaagaggcactccttgatgtagcattgccactggctgacggtgcccaaactaagcaaggctggaatagaataattatcgagaaaccatttggctttactggtttgtcctcactgcgggtaacacaatctatgctgtcaaggtttgaggagaagcaaatttacaggattgaccaccttctggggaaggatctgatcgaaaatcttactgtcttgagattttctaacttggtgtttgaacctttgtggagtcgaacttacatacggaatgtgcaggtcattttttctgaagaaacatcaaatgaaatacaagggaggtactttggaaattatgggataatccgtgacatagttcacagccacattcttcaaacaatagctctatttgctatggaaccacctgtaagtcttgatggagaggatatccgagatgaaaaggtgaaggttctcagatcaattcggaaagtgaaccttgatgatgttgttcttggtcaacttaaagatatgtctggtaaagttgacagatacacaaaatccatgataccaacctattttgctgctgctatgtacattgacaatgcacgctgggatggggtaccattttttatcaggacaggcatgggacttatgacgaatagagcagaaattcgaattcagtttcgccatgtccctggtaatatctaccgtgaacgctttggccatgacatagatctcgacacaaacgagctggttctacgcgatcaacctgaagaagcaatcctgttgaaagtcaacaacaaggtcccagggcttgggctccagctggatgcttcagaactgaacctgctttaccgggataggtacaacaccgaggtaccagattcgtatgaacatcttctactggacgtgctagatggagatagtcatttattcatgcgcagcgacgaactggctgccgcatggaatgtgctcactccgataatccatgagatagatcagaacagagtagttcctgagctctacgaggctggggacagagggcctatcaatgcttaccatctcgctgctaaacatggggtgcgatgggatgacgactggtgagtcgatacatggcaaagattctcgatgcgcaacgagattcattaccaatttttgtcgttgtatcgcagtcagatgtacaatatgccttctgtaatcggcctgatcaaggactttcaaggagacatgcctttcaaggagatatgcaaacatggtttctttcctgtcctgtagactgtagcactgttgattcaagttggaaaaagaaaaaaaggagaaaagaaaatatgcttgcgacaagccgaggccccatgtcttgtgcgtttagcatctcgtttgccacaagtatggcagtgtttggaaaatggcaatgaaaag

SEQ ID NO: 40891 - DNA, 4271 bp, Zea Mays
gcaacaaaaagactatgcaaaagctcgtgaacttctcgaggatgttttaaaggacccactaatatcaaatgttcaggctgataacattggcagtgatcagcatttgctgcagctaaggtttttgacattgaaaaatcttgcatctgttttccttcaacaaggttttgagttctacgataatgctcttcactgttacctacaagctgtagagcttgattcaaatgattcagttgtctggaatcatctgggaacactttcttgttcaatgggtttgctgagcgtatcaagatgggcatttgagcaagggcttgtatgcagcccaaacaactggaactgcatggagaaattgttggaggtgcttatatcaattcgtgatgaagtcgcatgcctttctgtagcaaatttaatacttaatagttggccatcacatcatcgtgctttacatgtgaagaagaccattgaatgtgctgaaccggtaccttttgcacctcgtggtattgacatacttgaacccaagcatgcaaaactcatcttttcgaataaaagaaaatccgttgatgatgaaatctgtcaagaaatagggacaaagaagagtaaacacagtgctacattgcaattgaatgaagcaaaatggttggcccttttagatggtatcctaagcttaataagtgcaaacaccgagaaggctggtgaatataattgctcaaatactgttgataggtgttcaatcagtgagggtagtgccaaggggcttgcttataacattatagacgttgtcatatctacagatacattgaaaagtgtggaaactgctggtggaaatggaaatgattctcaccatggtgagattctgccatatgattgcaaagctacagttaaagagaaagatggtaattcagatagggaacatccccatgaaagacggagcacacgccttgagaggctgcgaagtcgcaaatctggaaaagatgaaaatggatctgatggtaaagatatatcccatgctatgacccagtttctagaatcatttattctaaaaggaccaagccctgtagaaaaggcttattgttctggaaatgccgatgcttcaaatcctgatactcataactatacatccaacgaggaggcaaatgatcttaagcaatttctatgcaagatatccaagaattttggccctcatcacattggttatatgttacttgaggagatggctcatctcaaagtgccattccaagattattttgtcaagttaattgaactggacaaacttactagaggctgggctgaagacagatctgcatcgtgcaatttatttctagctgaactgtactatgatcgggctttgtgttctggaagtccaccaacatcttctgagctgtctgattcatcttaccatctttgtaagatcattgaatcagtagctctggaactgccattcaacatatctgttagagaaatacattccaccaacttggatacggaaagtagcaggacaggtgaatcttcaagtgaattaatcgagagaagtcatgaaaatggtcacatcaacatgcttaatgaccaaaagtccaaacatgattcttcttcaaacatgaattgtgcattctggattcgcttcttctggctgagtggttgcctgtccctttcatcagactgcaaagagaaagcttataaggagttcaatattgccctgtcaatactaaaaaatagcaacaaaactaaaagctatggagaggtcattcttctacctcacaccaaacttgtaaaatcacttacaactgacaggattcttcgtgaaatcaacttgatcaggcttgaatctctactttggaataatgatgagaatatcaacaaaataactcatacagagttcatgcagttgctacctccacttttgctttccaccaaagatgcctacgttggaaatgcatatggtccacaaagagaaagcgagaatgttatttcacttgagttgtctgccttggatgtcttaatatctgcatgtgaaaaagcaaaaccaatgaacatccaggtatatcttgactcccatcgaagaaaaattcaagttctaactgtggcagccggcatggttggatctgtcacacccctgaaagcgaaaggttcaagcaatgtggaatttgtggaagcaatgaacaggaaccggctagaaaatgttgtggaagcagtcaaagatgtgtctcgaaatgccagtaaagcaaaagacataatcgatcaatgcgataattccgtaccaagtatcactattgtgttaattcataagtatatcagtcaaggttatcaagtcgataagtcgagtcgagtcgacaaggcgtccattaagcgtcgccttagcgtcgctttagcgctaaggcgtgctcacagggcaagacgtctagctcgccttccgccgtggcgtaaggcgtccgccgcggcacaatgcgtccgctgcggcgatgggcaagatggctggagcccactaatgtctatcgttggtgatattcaatcattgctcttgacaatcatgtgtgctgctgtcaagataatactatcgagaaaactctcatgctctggaacctcctatcaggttgaccacttggaatgttcctgtctcatagatgcagccattgcattttgcaagctccagcaccttgatcctacaatatccatcaaaactcaggttgacttaattgttgcagtccatgatttgcttgctgagtatgggctctgttgtgctggaagagatggtgaaggggaggaagggatgttcctaaagttcgcaatcaaacatctcatggctctagatgtgaaactaaaatctcaactcaattcaaatgggatggaagaagatgcagttccaaaagacgtcagagcagaagacagtgtggccgatgaaccatcggttagtgacaataagcagaactccgatgatgaggaagaatcggagttagatgagattcagtcatgtcttgatagtgccttggaccaggcttttttctgcctgtatggtttgaagatcaacccagattcttgcagtgaagatgatctcgctgtacataaaaatacaagccgcggtgattatcaaaccaaagaacagtgtgctgatgtgtttcaatatgtcctgccatatgcaaaagctctatctaaaactggcttggttaaattacggagagtgctgcgggctatacgtaaacactttccgcagccaccttatgacttatttgttaacaaccctattgataatttcttggatggacctgactcatgtgaaaaaatactctctgaaatttgtgaaagcaatgaatctagggaagctatcctgaatgtattgttcccaggtgaaagaggctatgaagcattcaaaaaactctccactgccagctctgagccttattcagatgtttatgagaacttatattatttcatagctcaagccgaagatattagtgccaccgacaagcatacaggttttgttttgaaaaaggaaggagaagaattcgttgaacagagtgccaatattttcaagtatgatttgttgtacaatccattgcggtttgaaagctggcagaagctttccaatctttatgatgaggaagttgatctgttgctcaatgatggtagtaaacatataagcatcttggattggcgaacaaacacggatttaatcagaagggttgagatgggccgtcgacatagtcgacgctgcctattgatgagttcactactggccaaaactgcccctgagcagagcgaggcacatgaactgttggctcttgtgtactacgatagccttcaaaatgtggtgcctttttatgatcaaagagctactttgccagtgaaggattcatcatgggagacattttgtaaaaattctatgaagcactttgagaaggcttttgaaatcaaggagcagtggcttcatgcgttttaccttgggaaactgtgtgagaaactggggcattctttttctaaggcattatcatactacaacaaagccatgatgctgaatccaactgcagtcgaccctgtttacaggattcatgcatcacgcttgaagttactttacactcaaggcaaacagaatcttgaagctatacaggaatcaggttgttgccgtgacctactgcccacaactgacctggcctggcttttcgtgaacttggcatgttatattagctgtctaacagctgtgggatgacaagcatgtttggagatttaactgcaatggtttgtttagctccaaatctgcctacaaagcttttttttgaaacgca

SEQ ID NO: 40892 - DNA, 3249 bp, Zea Mays
tgggctttggattcctagcaattccgttcccccctgcatccgcgcccgcctgctcctcgtcctccctccacccgtctcctattcccttcctcccgccgcagcagcgagagcagagagcagagcggaacgagcaaatcttggggggggggggggggtgtcgcacccgctctccccgtgctgctggtggattcgttcaaggcgggggccgcctgcctgcccgcccgcttttccgtaccctggtccccggttgggttgggttggatttggttgcgaggtgttgttgggggtgggcgctcgggtggcggagtggttacttccccgcttggcctcttgctgcgccccgctgggccgtgtcgtgccattaaagccggcgcctttggtttctctctccacctctctctatccgcccccgccccggctctctctctagctgcagattggtgcctcacccctagcggtcggtggttggggccgggttccgacggctgctcgggagctcgactggggcttggaagtccaaagccgccgcctcctcgtggcgcgccgctccggaattcttgccttcttgggctccgaatctcgccgcccggtgtttgatttgcggcgttcctagcgaattcggggctgatttgcccccctatggcgaggatttgagtggactcgagaggaacaagtagaggggagtcctgatttgggcccctgccgtggtatgtgccatgaggaagctcttcttctccgagtcggcctgcaaggagaccaagctccactgcgcgccccactcatggctgcccctcgagagggggaagctctccaagttctccggccatgccgccgccggctcctccatagaggcattgatgaagatgccggagccggcagtgcttccgtacttcaagcccgcgaactatgtcgacatactggctcagatacacgaggagctggagtcctgccctcctgacgagaagtcctgcctgtacctgctccagttccaggtcttccgcggccttggggaggccaagctgtcacggaggagcctccagtctgcgtgggagaaggcgagcaccatacacgagaagctcatctttggggcgtggctcaagtacgagaagaaaggggaggaggcaatctccgacctgctcagctcgtgctgcaagtgctcacaggagttcaggctgctggattttgtgtcgcaagtctccactgggtcacacatgatgaactatgatgatgatgatgatgagtctgatgagtttcggggttctgcggtggttcatttccggataagagatgatatgattgcatgcgatcgacggaaacttgcagctctgtcaactccactgtatgcaatgcttaacggtggatttagggaatcctatctggaggtcattgacatgtctagaaatggtatctcccctattggcatgagggcaatcagtaaattcagcctatcaggaagactaccttatttgtcagcagatgctatcttggagatgcttgattttgccaataagttttgctgcaagggcctcaaggatgcctgtgagcgaaagcttgcttctttcatctcttcaaggcaagatgctatagatttcatggagtgtgctcttgagctgggctgttccattcttgctgcttcatgcttacaagtgctcttgaatgagcttccagagtgcttgaatgatgaacaagtggttaggatattctcctctgcaaataaggcacagagattgacaatggttggcaatgcatctttctccctatattgccttctcagtgaagtctccgtgagtaccaacccaacatcggatgtcactgtgagtttcttggaaaaactggtagagtcggcatcagattctaggcagaagcagctggccttacatcagctggcatgcaccagatttttaaggaaagattaccctgaatctgagtgcttgttcaatgctgccttttctgctggccatctttattcgttagtgggtttggctagattggcctctctgaggggtaataagcattttgctctcaagttgctagactctgtgatgtcatctcggtggcctcttggatggatgtatcaagagagagcactctatttggatggtgataacaagttagaaaatcttaacaaggctactgagttggaccctacccttacatatccctatatgtttcgagctgcatctttgatgaaaaggcaaagtgttgaagctgcattgatggagataaaccggatccttggatttaaactggtgctggagtgcttagaactaaggttctgttgctaccttgcccttgaggattatagggctgccttatgtgacgtgcaggcaatcctcactcttgccccagattatcgtatgattggtggccgggttgctgccaagcagctgcgaatgctagtgctagagaatgtagagcagtggacacctgctgactgttggatgcaactttatgatcgctggtcgtctgtggatgatatagggtccctctctgttatatatcaaatgctggagtcagagactgccaaaggagttttgtactttagacaatctttgcttcttctcagattaaactgtcctgaggcggcaatgaggagtttgcagcttgctcgtgagcatgctgcaagtgatcatgaaaggcttgtctatgaaggatggatattgtatgatactggccactgcgaggaaggactgcagaaagcggaagcatcaattgcaatacaacggtcatttgaggcattttttctgaaagcttatgctttggctgattcgagtcttgatccttcgaccacagcaacagttgtatcacttctagaagatgcattgcggtgtccctcagatagacttcggaagggtcaagctctaaacaaccttggaagtgtttatgtggattgtgggaagcttgacctggcagctgaatgctacattaacgccctaaagatcggccacaccagagcgcaccaaggccttgcgagggttcatttccttcggaacaacagagtcggtgcgtatgatgaaatgaccaagctgatagagaaggccaggaacaacgcgtcggcatacgagaagagatctgagtactgcgagcgggagctgacgaaaacggacttgcagatggtcaccaaactcgaccctctgcgagtctacccctacagataccgtgctgctggtatgtgcttttggctgttgattagctggagcgttctttcttgctactactattactatactacccgtcggtcaggattag

SEQ ID NO: 40893 - DNA, 1182 bp, Zea Mays
aacggactaagcatctgaccgacctcttgctagggtttcattccccctctccctctcggccagcaccacctcacatcaccgtgatcctatgacagccatggcggccgaagcaccaccgtcggcttcaacgtcctcctcctcgacctcgcggctacctctgcctccagcggtggggtggtcagatccgcatagttgtacatcgggagctgcattagcttgactttgaagagcgagatcgggtatgagggcgtcctttacaccatcaacaccgaggagtccagcatcgggctttgcaataatcttggaaatgaacactgaggattaagctgaggaggatggtgctaacattgatttaaactcacaaggaaaggaaaatgtgttgttctaaaaacctccacaagacaactatcagctaggaacttgtgagatgatattattgataaggattacaacacacatggatatgtgaacttaaggtgcgaaggccatattagttgtttgaagaacaaatttaatcgtgaaaaagtacagtatccacaatgcacaggctcacagtcctacattgcaaaggcttatatattggttgacttggaagaaattgtggcagcaccagttcaggatggacaacaaccaaaatctcctacaaaagttgtttctaatgtgctatcgagctccagtgtgttcctatgcaatctggtcttcataccgcctccaagaaaagctccgcaatgacagtttctgcaaaggttcaacaactttaggatcaactagaggtcgagcaacaagaaaaagatggacttcatgaagaagtggaaaccttagagactggagcatctcaggacaccattgatagtatgaagaggtcaatgaaaggaaataacaatattcttcatcaactattaagcttcaatcgaggccaagtttttccatcttaactccgcttgaccccaataggacctgcaaccttatgactactttagtagctagttacaatagctctggatttgtagttataggattattttcaattatgcttactgtttaatactttgagttgaagttattggattatatttggattttaagttaaaggatttgcatctatatgttttgaagttatattattatctgttggatgaaatatttgtgttgaacaaattcatatgatattttggttgtgat

SEQ ID NO: 40894 - DNA, 1389 bp, Zea Mays
ccaaggtctacccaggactacatcattctttacataaaggggcctcaagtctcccttaaattacagttctagactcgggggctgggtgcgaaacccaacatccaaaagaaagaaataggactcagcgactaagaaaggagggaagcccgattgtctccccacctttcgtctgacgcccggcacagcgacgagggcggctgctcgtgccgggaaacccaaaagacgaatgccggagaagggccctagggagcccaccggatcaagtccttcgctgacacgatgtcggccacttcgcatgtggccttgtcgtacccctggataaggttcttagagactatggacggggcaccccgagaaggcattgccagggcacagaggtcaaccccagtgcgaagataggcgacagccacggtaatagcagtcccatggtggatgtcgaggtcgacgatgttctgaatgcggcttgaaatgtcgagcagacgttgtaggcaaattgcaccatgtgcatggatgcttcgggtcaccgaatcgacctcccggcatggttcctcttttttcttaccaatttatatggctcttttttctattttattattctgaatctattagttattattgtattaggcatggttcctctatatctagatagttaaaacctcaacacgattcaggcgccctccgcgtttcacggcagttccgctcatggcgtgctgacgcgtggctgcgaactcgaatgcttattcaattcgacggagacgtcgatgcgtccgcccctcccactacgtgcaaaaacaaaaaaacaccgactctcctccccttctctcgacggcaaaatgttcgaccaccaccgcgacaagagaaggcttgcgaccatccgccgcaagtgcgagcggaagcgctctcgatcccggtctccatcgacagatcgggaccgctccaaccgccgccactctcagtcgcgccgaggccttcgacggtgggtgacgacgacgtgaatgtggaggaactcgagatgacgaatatgatgagcattcccatcgggttggactccacagagaaacacaaaggcatagcaagtcagatcgagattgagaatccaaacctggtgaaaactaagaatgtaaaggtcaaggacattgatactgcttattggcttattgctcttctcaagttcatggaaccatatcccagaggcgttgcaggagcaatttatcacgaatacgaccagtgagcaccgcacttcaaaaatagaaacagcttctacaacactctaagagacacatttttcttagttctgcatttccttacttttgtattaggggaatatagctcaattctaggaatccacaacctttgtagcagatacctgcaccgaggtgcatgttgcgg

SEQ ID NO: 40895 - DNA, 1921 bp, Zea Mays
tggaaattcaatgcttctggggactactcttctagttcagcctacaaagttcttctccttggagcggttgattttggcccggctgagcggatttggaagtcttgggctccgggtttatgcaaagggtgggaaaaccattgttttcactcgcacaaagaaagatgcagatgaggtatcattggcactgacaaccagtattgcttctgaggcacttcatggtgatatttcacagcatcagcgtgaaaggacactaaatggatttcgtcaagggaaatttactgttctagtagctacagatgttgcggcccgcggtcttgatataccaaatgttgatttgattatccattacgaattgccaaacgatccagaaacttttgtccatcgttctggacgcactggacgtgctgggaaagcaggaactgcaatcttgatgtttaccagcagccagaaaaggacagttatgtcacttgagcgtgatgttggttgcaagtttgagtttataagccctccgtccatagaagaagtgctggagtcatctgctgagcatgtcattgctacattgcgaggggtgcacccagagtcaactcaatactttcttggagcagctgagaaattaacagaagaactaggacctcatgcccttgcttctgcactggcacatctgagtggattttctcagccaccttcttcacgttctctgatcagttatgagcagggatgggtgacattgcaactaactagagaaccgggatatggcagaggcttcttttctcctagatctgttactggttttctatctgatgtttgttcagctgctgcagatgaagttggcaaaatatacataacagcagatgagaatgtccaaggagcagtcttcgatttacctgaggaaattgcaaaggacctgcttactatggaggtccccccgggaaacacattaaccaaaatttcgaagctgcctgcgttgcaagatgatagtcctgctactgatagctatggtcgcttttcaaacgaccgaggttccaggaacaggcgttccaggggtggaggtgcttcaagaggccggggtggttgggacaccgacagtgaggaccgataccggcgtggtggcaggagcttgaggtctgacaacgatagttggtcagatgatgactggtcaggcggtgggagaaaatcaaaccgttcctcctcatcctttggtggccgctcatcatcctacggcagccgtggctcaccatcaccatccttcggtgtccgctcatcatccttgggcggtagggagagaagcttcagtggcgcttgtttcaactgcggcgaatccggtcaccgtgcatcggactgcccaaacaagtagatggcgcattcttccctgcccaagcaagtagacagctcgagcatcaggacgcacgcagagcgaaaacccaagcgcgcccctgatcgaccagtatactacgcctgacagccagctacagtttttgtgtggctgtctcgtcaggactgaagattttggcatgctgattccagttatttagatccagaggagtccttactctacagggatatgttgagtctcagtagaattgtgtaaccagtaaccacacacacgaacaatggcggaggactaaaatataaaatcatagctggcatattgaacacgtaacatatattgcagttggcatggctcttttcttttccttccaatttgactccagtggtcgcactgtgtcgatcgtttttacatgcactactacacatgcagcctcctttgcttgctggcagctatgcatagttgcgtgtgcgacacagcatctccaagctctggcaatcgcttgtcaaatgtctgctcctcagagttgtcctccgtatcaatcctctttctgtacttttctagtcttctctagagattttatcttatatatct

SEQ ID NO: 40896 - DNA, 2129 bp, Zea Mays
ggcacctcgagattcgagcgctgctcccgtactacttactactcgagagtcgagactgctttgttttttttgttgatggaaaagaaccagaagggtagtactcgagagcacgaatcgccacgtccgccagaggatgagcttgagcagctccaactccaacgcgtgacaaaacaaacagaaccgtcacaaaaataaataaaccaaacggggcctaaataaaaagtcgtcgacaaaaatttggcagccataggccatagcccccgctgccccccgggcgcagatcttttctgggcttctggctcccctctcccgccgatcacgccgcctcacctcgccgggcggcgtgatggcgacttccggggccggcgaccacgggcagggccagggccaggggcacggccgcttcgcgtcgtccctgacggcgcgctactcggactgggtgctggagacgctggacgagctcccagggagcttcctgctcacggaccccgccctgccgggccaccccatcgtgtacgcttcccggggcctcgccgcgctcaccggctacgcgccgcgcgacgtgctgggccgcaacgcgcgcctcttccagggcgccgccaccgaccgcgccaccgtcgccggcgtccgcgaggccgtccgcgcgcaccgcccgcaccaggccgccatcctcaactaccgccgcgacggcgccccgcactgggtcctcctccacctcgcccccctattccacgcccgcgacggcaccctgctccacttcctcgccgtccaggtgcccatcgcccccgccgccgtcgcgcgcggggcgacgtgccacacgacggggcatctgctagccgcgtgccgtgacgaggccagcagggtcgcggaggatttcccctgcgccacccacgcgggcaaggtgtttgtcgatatggacaagagagtttgctgttgcagggctggagaccgaggaaccacgtgtacctagcgatagtgagaaagatatggcaataagtacggctaacagcattgtctctgcgctgaacagctacagcaagctaactggtctagtggtcagcaggaagagatgtgactcgattggcatcccagcactcagttcgtcgttaaaactctctctcggtagaatcaaacagagctttgtattgactgactcccgcttgcctaacatgccaattatttatgctagtgatgcttttacatcattaacaggttactcaagagaagaaatattgggctgtaactgcaaagtcttaaatgggccaggcactagcttggaggttttagaggaggtgcgggccaggattatatagcttgcatgcacggtggatctactgagttacagatggaagttcattctgtgatcatctacatgtatctcctatccgagatgcttcgggcaaggttcgcttacatctttctcaggtcttccctgaaagaaactgtctctcaaatgcattaaacaatcactacacaattgctatgtttgtgtgctatgaagctctaaactacggaacagaatagatttgcagtttgctatcagtcagatattccgctcttgtacaaccatcatggggattttttttttcccgactgacttcatacctacgcaggtggcctttcatatctgggttcaccttgacatgggtgcaaagcacgattttagtgggctgacccccgagaaatggctgcttggcgctgttggtgcggtgagggttgctgtgagaggcttgtcggcgtcaggtagcctgttgagaccatcccaatagcagttttagtctcctcgccatttcatgaccacggcgaccggccttccacgatgtacattgctgcttgctattctgtgtaaagcaactgcttagcatgacaaagtaaatgagttcgttttgaaggaaaatccatggtaaatacaagatgttgctgtgactatataaccaggtggggtgaagtaaagaaaaaggaaatagaagctgctgttaggatttatgggcttggcccaattaagaatttctaataattccaggaaaatctcaaaagcccatataagtggatggcaaagggataggtggaaccaatagcatcatattgctagctcttgtggagtagagctagcttaaatatggaagcca

SEQ ID NO: 40897 - DNA, 761 bp, Zea Mays
ggtgctgagtgctgagttgttgaccaacgggaagtccagtacccaagcggagccaccaaggaaaggaggaatggaagccaccggcgcagcctcgcagccctcggcgccgcagacaactcacccggcggtggcgccgctggccttcctactggggaagtggcgcggggaaggcgagggcagcttccccaccatatcctccttccgccagtgatctcgtacacgcagaagacgtggaagacggcgtctggcgagccgatgcacgccgagagcgggtactggcggccccgccctgacggctccgtcgacgtggtcatcgctcagagcactggcctcgccgaggtccagaagggttcatttgatgctgaaaagaaaacagtgacactccaaagcgaactcgtagggaatgcatcaaaggtgaagcagatcacgagaacttttcaggtggcagatggggagctctcgtacgtcgttcagatggcaacgatcacaactagcctacagccacatctcaaggcccttcttaggaggatttgaagttgaccggcaaaatctcctacaacgacgtcgctgcggctaaccacaaccgagggacacctgtaatacagagcatacttctggtgattactacgtagttattagtgaatgaacttacaggttaaataaagctcattttcaaaaacagaggttccgctgataggaactaccgtatatgtaaacggcttaccattcagcccatgctccacaaatcgagattattattt

SEQ ID NO: 40898 - DNA, 3733 bp, Zea Mays
actgcgactgcgttacctgtggcgcgaaaacgccaaaagcccaccccgcgcctgttcacctcgcaggccgcgagcccgcgcctgttcgcttcgctccgagccccctccaggcccaagcccgcccatctcccgaccacacacgcgcctattccttcccgccccgccgcgcgccgccacctctacggctccccggcggccatgctgaccgggcgggagagcctggtccgcctcatcggccggcgccgccgctcccctctccccgcttcgctcgtcgccgccctatccttaccctccccttccccctccacctccctcgcccaggcagacgatgggggtggctcgggagaagcggccgggggtgaggctggttcgacgtcgggaggaagccgcgtcgttggcatgggcgcggagtgggtggtctgccccgtctgcggcgattcgatccgagggtcggactactgcgtcaacactcacctcgatatgtgccttacaaggggaaccaaaaggaagttaacacagagcacccttcttaatttccaattcagtaaaaaggtttctgccgagcctacaataaacaatttgaacaatgagtccgagacagaaaatatgaaacagattgatgaaggtttgtcgagtgatcaagcattcttcgcattcgatagtgagattgggagttcaaaggctggcactactatttcatcgcctacctgtatgaatgactcacttggcacttctgagactattacttcctatgcaccttcaaatactgtcttatcagatgcaaaggatgctgtaaatgatggcgcaggggaacttccaacggtggcaacctcttgcagttttgatgaatgcgcagtcatggattctagcaccgttgtagtagttgacactgttatagttggccggaggttccatgagaacattgaattaagagaagatgcagacattacctttatgagagatcctcagaatgctaaggaccctgatgctataaaggtgctacatgcagggtctgaatgtgaggagatgcttggatacttgcctcgagatcttgctaaagttttggctcctctagtggacaagcatcatgttgaatgcgagggatctgtggttggtctgcatgaacagcagtttggcaatgttcccatccagattactatccagaaatgtaaatctgacaatcaaagaaacaatgatccaaattgttgccaatccttatgggaaaatttcgttagcattgtcaaaagagaaaatttccggcgacctcacagtgcaagatatcagacaaattttaatttgatgatagctgatgttatggttaaccatgcacatgtttttagtgatatagaaaaatcatttttagcttcttttaagtcgttatcagatgatgggcaacggcttttcattaggatctacactcgaaaagggccatggttccggaagggcagcatctcatatcaagagatttcagatctggagcatgcagtcatggagttggagttggcaggttatattgacatgctttcttgcaccattgatccttttgaatatgatatgaaggagattcttgatgtgttaagtgttcctgaaatgaaggaaattctcaaggagcttcctaaggataacacaatctgcacacgtcgacatgagcttgttagcacccttctgtcttcataccgtaatggtacctgtgcatcactaccaaaacggatcctaaaatggactggaacctgtataagaatttcgaagatggcagatgaacttctgtggcgtatccagaggctcttttttctaaatggtgatcaagatctttcttcatttctattagtggaatttggtatagtgaagtttccagactatgtttgcagcatctcccatcgcatttttcaagaaagaaatgatctacttgagtacgaagacgtaagattttgaccccttttcaaaaagaacagtgagccactcattgatcatgtttaatatcttacattgcaaacaggctattcgagttgctcaggtgatggatgaatcccttgataataataaaatggacttggtgacaagatgcatcgatttatctgagaatcgattatgcattatgccaaaacgagaaaacacaattacacctgaacgtctccgatcattcttttctcgcttttcagcgtcctgggtctattcgaaaatactcacattaggtgtctctgtttatgaaagagaccgcaggtaagttgcaataactgctataattacggatcagatcaaacactctcattagatgcatggttttcgtgtttcatagaattttggttgaaagtggaaaccttagccacacaagcattcttttctgatgtgtttcactttcacatgccttctggtttatagtacatattgggacgttttaagtgtgatatgtgatagatacttgaacatgtgatgcaatggtaatttgttgcacttttacaggcccttctgttaaagggctcataaattctttgctcagaaacaatcttataaatcttgttagtttctggggatccaaatttcatgccaaccaaatttatataggtatgaagatgcagtcaggattctaaagacactacttagcacagttgcttgtgatagacggcgaggatattgggcattgaggctatccattgatttggagcatatgggtcgtccaaatgagagcctatccacagctgaaggaggggcaactgatccatgggtccgtgctggttcaaagttcgctctgcaaaggagagttctgcgtttaagcaaacctccacgacgctggaaagttcccagttacgctgattatgttaagagaaatataagagaggtaagcattgaaggaaggccattgaattgcgagacaggagcaaagaatgtattttacggttacgatggggaactttgtggggtagaacagttggctttacaatattatgctgatgaaggtggtggttggcaaggtacccattcggaaggtagcatttggatgactatctttggccttctaatgtgggatgtgatgttttcagacatacaagatgttttccagtctaaattccagacagccccccttgatctgggaacagacgatttttacaaatctagagagaacattgcagaatctcagttgaagaggatacgggacggaatggccgaagagatgctaatcagctcatgggagctacatcaggggacatcctgccagggtgttaactgggcccgttattcgttaactgatctacgggctgttgttgcatgcgttggtggccaccgtttggcatcgctcctccgccatctagccgttgattacaggagctggtcgagtggaatgcccgatctgctgctatggcgtttccttgatgaaagaggtggaggtgaggctaaacttgtggaggtcaaaggacccagggaccagctgtcagagcaacagcgtgcatggattcttgttctcatggattttggatttgacgtggaagtttgcaaagtaagcccggtcaccaagcggagatagttcgcttgctaaatttattctgattattacgatgcaaaatgtatttggttgattagatagaagggcaaatctgtaacgcataagcaatggcattgttgtcgtgttgcactgaagtaacagtcaagctctacttgacatgctatctataactttgagagggaaggatgcatttaattgtctgaatcggcacaagttagaagaggaaattctgat

SEQ ID NO: 40899 - DNA, 1115 bp, Zea Mays
ccggtgctcgtcccgagagatttccagagcgctcgctagcaatattccaaatctctcgtggagtcgtggctgcttgcccatcccatcgactacaactcaacgacccgagaactttccagagcactcgccactcgcacatcgactacaactcaacgatccaagccaagcgacgcgtgtgttctcttcttctccgaggccatcatccttcgcgcgaattagccgctcagcgaccgggattcaagggttgcgatcagatgaggggcgcagcaaggcgtctggtgcagagcgcaaccaaaaccaggcaaatcaatcctgtcaatggactagcaaggatgccggcgatcactactcctcagaggcatgggaacgagaatacttccagtgaatctgtcgtcacgaaagacgaaaacgttgagccccttgtcgccttcagcaggccacctcctttgccgcctgttctgggtccgctcgtcgtgctctcggttttcgagatgtcgtccggtggcggcgacgaagacaccgaatgaggcagcaaatgggcacccatggaaattagcttttgtgttgtctgttaagtttgctccgttctacccctgtggacatgaggttcgcacgagggggctgatcttccctgagcagctccgaattaggccttgtagaactacagactacagactaagatgtactgttagctatcaactaggtggcgtttggataatgtgatgtgcaaggtgggatagggaagtggagggtggtagtacaaatgatttaccacgttgtggttggcggaatagataaggagatgagctggagtgaggaaagggaaccgtctgtctcactcgagaggtggatgcattatggcgtcggcgacgtactaatcgtgagtaaccaaggtagccgcagccgccaactcgcgcgtcgccactgcgcaccgggggtgcgagcctgggctgcattcgttgcttacctctcgcctaggcctccgctggaccgaattttttgtattttagcccttaaacagaagtaaatttacgtttagacctaaaaaaattttaaatgcagttttggacccttagctcggcgccatagcctgtggcgccgagctaacacagctc

SEQ ID NO: 40900 - DNA, 771 bp, Zea Mays
aatctccaacacctactcatcaagtgtgtatttgccaggtgatgtatgatgcctttggtgttaggctacaagcaggaaagcaagcaaaggtcttgaaccagattgtgtatgagcttccatcagaacatccactggctgaaacaagaccgctgcgagagctactagggcacacacctccacaggtatttgctggcgaagtgcttggatttgcagtagccacatttatagcgatgatcgctgggcttggtagttgactccgcatttgaagaaatggtcaacattcacattgaagttctagaattcaaattggacacatgtttcctagctagcttatgatagataatgtgttgtgtataggtgtatttaatatgcaaattgctgtcaatttgttgaagagaaacttgcgtcattcttttgtagttaatcgacgagtgaactatatgttgtattcgttcctgtccaaagtatttggactgattgaaagtacctcttgataaagcattcatgagatttccgcacagccattgcgattgatttccaaacctcatgttcaagtgcaacatcatcaatatgtgagatattgaggatccatatttttgccgagtgtcgaattggattttcatggaaagcaaggtgtttgtaacttgcgtattatgatagttatgcggtaggttgcatctttcataaatttttatgtatgcaaaatcagtgatgatagcatataaacatattgtggattttgaaacattcatggtacaatctacaatccag

SEQ ID NO: 40901 - DNA, 3981 bp, Zea Mays
ctctgagctcgcatacctcctcttcgctctcagctcctcacgcaactctctccgtcgtactaacatgatgcatctggacggcgtcgacgacgagctcggcgatggcgactgcgccccctctaccgcgcgctttgagctccaggaggatccttccttctggaaggacaacaatgtgcaggttgtgatccgtatccgacccctgagcggcagtgagatatcgcttcaggggcagaagcggtgcgtcaggcaggatagtagcaagggccagtgccttgcatggactggaaatcccgagtcccgcttcactttcgatctcgtcgcggacgaacatgtctcgcaggaggatatgttcaaagttgctggggtgcccatggtggagaactgtatagctggctataacagctgcatgtttgcttacgggcaggctggaagtggaaaaacacatacgatgcttggtgacatagaaaacgtaacaccgaggaacagtgtgaattgtggtatggcgcctcgagtatttgatcacctctttgcaaggatccaaaaggaaaaggaattaagaatagatgaaacgctcaggtttacatgtaaatgctcttttctggagatttataatgagcagattctggatctcctcaaccccaattctgtaaacttgcagataagggaggattccagaaagggtgtccatgttgagagtttgacggaacatgaaatctccaatgctcgagaagctctgcaacaacttattgagggagcagcaaaccggaaggtagcagccaccaatatgaaccatgcaagtagccgctctcatagtgttttcacgtgccttataaaaagtaagtgggagtcaaaaggtatcaactaccaccgcttttctcgactcaaccttgttgaccttgcaggctcagagaggcaaaagagctcaggtgctaaaggggagcgattgaaggaagctaccaacatcaacaaatcactctcaactttgggacttgtcattacgaacctaattgctgtgtcaaacaaaaagtcacagcatgttccgtacagagattcaaaattaacattcctccttcaggattcccttggaggaaattcaaaaacgaccataattgcaaacataagcccatccagctgttgtgctgctgagacattaagcacattgaaattcgcacaacgagctaaatacataaggaacaatgctataattaacgaggatgcttctggtgatgttcttagcatgcgcttactacagatccagaagcttaaaaggaaagattgtgatgctgcccttgtcgctgcttttaagagggaacaggagaaggaagcagcacagttgaaggcaatgatagatgcaaatcagattgctgaacagctggaagctcaaaaaacagaagaggtaagaagtttcaagatgaggcttaagttttgcgaagaacggatcaaaatattggagcaggttgcttcagggaaattatctgttgaagcacatcttctgcaagagaaggaaaaccttgtaaaggagttagaagttttgcagtgtcaattagatcgtaatccagaaattacaaaatttgcaatggagaatctacaactaaaggaagacttacgaaggttgcagtcatttgttgatgaagatgaacgagaaatgatgcatgagcaaatcattgttttacaagataggctgcttgaggctcttgactggaagcttatgcatgagaagggacctgttaccaaggccctctcattattcgaggagccacccagtgatgaggaaaaagagtttcttcgtttgcaggctattcaaaacgagagagaaattgagttgttgcgtaaaaaattgacattctgccttgaagcaaaagagaatcttgagaggcatgtaaatgagttgaccacagagttggagcttacaaagaaacatgataacacagataaagaatccaagcctgcccagctccaggatcaaggagaggcagatttacataacttgtctgatgctcagatggaatttaagactttggttgacgcgatagcttctgcaagtcaacgggaagcagaagctcatgaaactgtgattggtttggccaaagataatgaagaattgagaatgcagcttaaggttttgattgaggataacaagagattgattgagctctatcaacacgcttttgtcaatgtcgaggcaaaccaagatggaaaccctgtgaacgaagatctgctcaatgcccaaccagcagcaacatcagatttgcatgcacataactcatccaatgtggaagaagagcctaagatagtagatgaaaaatgcacaaatgaggacaatttctcaagagttacatccgttgaattgtgtcttcagctggaggagatggatgaggaaaatgaaggacttatgggtttgcatgagaaaactatgcaggaaagagatgtattcaaacggaagattttagagcaaagcgactctgaagctgtaaaagatattttattgggcgagaaagatgctgaaatgagtgaagcagctgagaatcctgaagtgaaacatgttcatgactccataattgtagctttgaaagatgtgctgcagattgttcggagtaagctggagcttgtccaagataaggttgtgtctactcaggatgcagtaaaatattttaagctactagaaatggctagtggtaaggccacagaactttattcaagaattgagcttcagtatctaggcgcacagcgtcttcaggaagacatcactgtccttaagtctgtgctgtcagaatcacaggagaagataattgcttttgaaggcaagtatttcttgcctgcagcatcatgttggaacatggttttgaagaccaaaagtcctgcagagtccaggttggatgccagctttgaatcaatgaatcagaagaaagaacggttcaatcatctccaaactcgcaaaaatgaactatctgccgcaagaagaagagcacgtgaatctgaaactgagttgagaagcaaaattgatggccttaaagtgaaacttggcgcgtatggagctcaaagaaaggaggaagaaaaggtcctgtttgctattgataacttggatacttccactgcaccaatgcataaacccaagaactatggcaaggcaaccgcgccgctgaaatccgatgaggattggatgaagcttcggtgtgaactacagaaggcccgcgaacagttctttatggtgcaaaaggaaataaagaacatcaataaatgtgattatattgattgtgagattgcagtccttgaagcagaaatagaggactcctggttctccatgctggaaagtgacatcgagaggtttgtccttgacagtacgttcacagagatttgggagggtagggcaaaggacatggaggcctcgctggttgagtaccaggactgtgtttttcaagtcagtttgaaggaggaagagatcaagatgtgtaatgagtccttgcagtatcaagccagggacagggagtcggatgaacttcagtcgaagctaaaccaagcgatgcgggagctgggtgagcttctgcaagatagaagatgcttaacagattgcagtctggatgaacccatgctgcccgttgttgaaaaggtggcaacagaccttgaagccgtccggatttatgtcgatgaagctaaacagcttttgcttgtcgacaaccaagctaatcagtgaacatacgcagctagtttgaggctctggcatatctagggctggctgtacaaaccaacaactgttattttctgagatgggtcatttaggataacggctctgaataagatgtaatagtagtacagactacagacttcagtttgaaaacgtgtggatacaatggcataaagtcaagtacatattttgcttggttccttgggctagtgagagcaatctgtagacccaccaaaagttgtaagacatgtcgttttctattaagagcatgaaaattaatctacttgcacggtaaaaat

SEQ ID NO: 40902 - DNA, 2275 bp, Zea Mays
cagaaataattgcctcccttcattggcctcatctctccctccctccttgacccatctgcgacttcccctgcattaaggatgacctcttctctctaggtcttacaaccctagacgtggaatcaggatcagtgtgcacggggaaccagcaacggcagcacgtacgtggaaccggcaccgacgaattgcacggggcagcagacaatcgtcgcctccttgactccatccgcgaccttcctccatccgtggtgccagcaaactgcacgagaagacctaggttggaacaaaaacaacagaaggacataaccaagcaggaaacacattacatccatatgaagtgcagcgccttagacaagttatgagaaacaatgcaaggctgcaacaactgggaattcctggtttatgcgacacactgccaaaggcatattcctttcatcacaacaaaaataagccaaattttacaaataatgaagattcagaatctgattataatccttcatcaaatgacactggtgaagaagatttacttgatgatgacaatgttcagggctcgaaggattataatatgaggactacaaacatgtctaatggtgtaatcaagctacgcactaaaagacttcttgcagagaaagaatctattagaattacaaggtcaaaaaaaactgctgcccagcctaatggtactgaagtgtttgacaacaacgatggccatacccaggctacagttcaagctagtgaccctgctctatttgacgagtacacccacatggctaatggaggtcattccattgctcgccctgatgggcacaacctgatgggaaacaaagataatgtaaacatccaagttgatgacaacatgaccagtggaggtgaagctagcatcgagcctagtgtacatgtacaactaggtgaaaatgatcgatgggaaaggggagttaatatgggacatggtctccataggatgaaccgagctatgcgtggaaaactgccggttgttattcctgaagggaggataaggcccgtggcacctcttgttgctgcaaagttttcaactgaatgcaatattgcagttaggaaccatgtgccagtgtacaagcattggaaggattacaagaaccataatggcatgtttaacctatttacagataaacttagtgcaaagtttgatatcaacacaaatgatgcaccagtccaaaaggcttgttcccaaatgatgaaaaatgctataaggcaacaacggtacagactaaagaaaaaattctttgatccttttccactacatttggtgacaaaaacatcaccaatcagatcgatgagtaatgaagagtggaatgatcttgtggaatattggaagagcccaaaaaggatggagacatcacaaaagaacaaagataaccgatccaaagttaaatttcatcaaacaacgggatctcgtagctatatggttcatgtagaaaatttgggagataaaaacattggtcaagagcccgatgcattagatttgttcaaggagtgtcattacagcaggaaaaagaaatgttacacatctaccgtgcaacaagctataactcaaatggataacaagcggtctgcaactacagaaggtgaaaaatcaatgtctgcaactgaagttgttgctaatgtgcttgctgaaaatacaaagaagaatttgttccttcaaaatgtggggatacaaaatgttggtcctaggtctagtctgagaaatattgaagcacagttggaagtggagaagagggcaaacagtgaccttaaatctattgttgatgctcaacatgaacaattggatgcattgttaaagcaaatgcaagaaactgaagaaaataggatcagggagcaagaggaagtgaagaagaagcaagctgagatggaaacaaagatgcaacttgtgttgagtcagattcattcaagattgagatagtatttatgtcatgttgacaactttttttgttgttgcaacaactttctttcttttttatggaaccaactataatgttttggatatgatgtggtgttctggttggatagtctttattgtttgggattgtccatgtgaagttctagttggatatttgaatttaaatattgatattttgtcattataattgttatgttatgtgctgattgtgcttttgatgtgagaatgaaattattgaaaattattatgggctgtagttataaatggtcgataaaatttctagattttagccttggcaaaaataattaaactgaataaaataaatgcacaaattaaaatcaa

SEQ ID NO: 40903 - DNA, 243 bp, Zea Mays
cttcgaaatgctcctgaaaatcatcagatggtatctccagaaattcaaaaggatattgctaattgctttgcagaggtcatagtgaattctattattgaagaaattggtggtgatgtattctgtttgctggttgatgaatccactgatgtttctgataaagaacaaatggcagtggttttgcggtatgtcagtaattgtggagaactcaaggaaagacttatcggtgttgtccatgtcgctgag

SEQ ID NO: 40904 - DNA, 313 bp, Zea Mays
ctaactatatgtaaacaacgcacaatcaaagtaggtttttttgtctatataaaaaagagtaagatgacaagaccatcagagcagataagataataagataaagtacatgtacaaaacaataagataaggagagcacaatcatgtcactaactcgtaatgttagccatatatttggaaacatcatagttgtgattatcacaaatagaacaaagaagaataaacataatagtttatgatcttttaccaaacaacatggaagaaactataatgagcaatctagcacctaaataccttacagtggccttcatcagat

SEQ ID NO: 40905 - DNA, 2826 bp, Zea Mays
aagcggaagcggcggatgggtaggcaaggaccaaggagagagggcttttaacgcggattagttgggcctcaagacataaaaagcccaaacacatctagttgagcaagcccgtcccatgagcccacgaagtggaggatcagcaagcacgagcgtctcgagctcgcgtcgcgtccgtttgctgcgccctccgccgccgccgcaatgatgcagccgcatctgccctccccggcgaggctggggctcacagcctcgtcgccgtcgctcccgcccaatccggtccccttgaatcccacatcctcgccttcacacggtagcctgccctcgagcgcagccgctggcaccagtgctgccccaaccctaaccacctcgccgtcgctgctaccgctcctgccgccgcttccgcgcgcgcaatcgctgctccagcttatatcgtcgctcgcttccaacctcttggaactctcggcgaaccgcgccgcgtggatctcagcgtaccgaggatcgcttcccaccttcctcccatcggcgtcctccgcgccgccgctcgcaaccccgatctcctccaccaaggacgcgctctctcttgtcaccaccctgcagacgcagctcttcgaggccgtcgccgagctgcaagagaccctcgatctgcaggatgcgcgcgcgcgccttgtccgtgaggcgcgtggcaaggatgctgcgctgctagcctttgcgaagaagctgcatgaggctcaccaagtacttgaccgcctcgtcgacgactacgctgactaccgtcgcgatcccaaacgcccgcgtggcgccgctgctgctgacgatcccgagccggcgtcagagggcgacttcggcacgtccctccactccagccttaagcttgatgacatcctgacctacgcgcaccgcataagttacacaacctttgctccgccggagcatggtgctgggttgcctctccgtgttagcctgccacctgtaccacaggagaatcagatgagagcgtcgcagctgtatctgtttgctgatttggatgtaggggtacccaagaagccattggatgcgaaggacgggatcgcggcagaagtggaggttgcgccgctgtatgaggcaccacaggaggggccgtcgaggctaccaaacaccttgccacccatgttcccgaaggagctaaagccgccgccgggatggaagcctggtgatccgatcacgctaccacttgatgagatactacctggtatcaagggtgaagagcgggaggcacaggcccctgtgccgcaggcacctgtttcagtgcgaccagtggcaccaatgggaccagagacaatacaggtcaagcctgtgcagcttgattttgggagcagtagtagtgacgagtacagtagtgacgttgggagctcagaagaagatgatgaggattagtgctcggtgtctacagatgcagtgcattcagctgtcccaccacaccaccttctcagccgaccgaaaggcatcttacttatcccaatcagcctgccacagtggcgagaatggaaccgtacctccagtggttagggatacagctcatggagctcggcggtaccgcaatgtcgctgctgctgctgctcgtgctcgccgcgtcgccattgcagcaggccagggcggttggcggcggcaggccgcgggtgccggccatcctggtgttcggcgactccatcgtggacacgggcaacaacaacgccgtcctcacgctcaccaagtccaacttcaggccatacggcaaggacctcaacggcggcgtacccaccggacgcttctccaacggccggattccgacggacttcgtagcttcacggctcggcttgaaagatctggttccggcgtatctcggcaccgacctcagcgacgacgacctctgcacgggcgtcagcttcgcgtctgggggcaccggctacgacccgctcacctccactctcgtgttctgccgatgcaggaggagctcaacatgttcgcggagtacaaggagaggctcgcaggggtcgtcggagacgaggccgccgccgcaggaatcgtggccgaaagcctgttccttgtctgcgccgggtcggacgacatcgccaacaactactacctcgcccccgtcagacctctgcagtacgacatctcggcgtacgtggatttccttgtggagcaggcctgcgacttcattaggcaactgtaccagcaaggggccaggaggatcgcggtcctggggatgccgccggtcgggtgcgtgccctcgcagcggaccctcgccggcggcctagccagggactgcgaccccgctcgcaaccacgcggcgcagctgtacaactccaggctgaaggaggaggtagtgctgctccagaaggagctggcgtgccagagaatcggctacgtggatatctacgacgtcctgcaggacatgatcacgaacccctgcaaatacggcttcgaggtctccacgagaggatgctgcggcaccggggacttggaggtgtcgctcctgtgcaaccagctgacggcgccgacgtgccctgacgaccggaaatacgtcttctgggacagcttccatcccaccgagaaagcatacgagatcatcgtggactacctgttcccgagatacatagagaacctgctataattacttctgctttaccgtcgcttctttaattcgatcgtttctagttgttgtcaagtttagacatgccgtctttgtttcccaatttaagcttttgctttaaaactcaagacttttcaaggaaatgaaatgacacctgctagcttgttgcaagctgtaaagattgattggttttgtttacttgttccgtgtgaaac

SEQ ID NO: 40906 - DNA, 284 bp, Zea Mays
ctccattgaacatcctaagacgtctagactccgcaagcacgcatccggattattgtgattgagatttgagcacttgttgagttgtgaacttgttgcgctgtgtttgtgtgctcttctcttgacttgtgtgcgtgtcgttgctgtgactctagcttttgtgtgtgtttctttccctcccttactcttgtggttttcattgagatcaatattgtaagggtgagagactccagcttatggagattccccacaaagggaacatctactataaggaagaaaattgtggt

SEQ ID NO: 40907 - DNA, 2905 bp, Zea Mays
accgtggctccgcccccgagattgtcgcgcccacagcctcgcctcccatggatcctctcgcctctgcatctcgccattgttgccgccattctcgcgcccgtgcccctccattctcgcctccgcccccggatcctctcgcccccgcgaccttcgatggaagcccgcaatctgcgcccttccatcgccgcaatgcatcgatcccattccattttgcgagaagggcgggcgcgtgcagggcttcgcaatggctgacggttcaattggaagatcaaccacagggagtgcagcgtgctggggtcgcccaggcacggagtcggccaccacgcagcagccgtcgcccctccacctcgttgtcgtccgtccatgggtgatagaagatgcagaggagaggggttggccctctttgctatttagagaggttacaggctcattgcagttatgccgactaaatactcgcttgtcatgcagatcttgttgtggttcatgagcactgagctatacttcaacttaactgattcagcccttggctttctgggcatgtttgacaaagttgaatagctatgaaaccgaaaacaactgccaaatgtacatgttctgaatcaagttatgatgctaatgtctcagcgaatgtacatgttctgaatcaagcaatggcgaattttgaagcccactttagattaatcggacctgagatctagaaggacacaacaggcaaggtggatgtattcgtagctggttcaggcacagaagggtcgttttgagatactctctgtctgggtcgtttcttcaataagataacggtggccatcatagtcgaattggtgggcctgctagcgtccccaatggtcgtgtcctggcctgtgtggtagtgttgccggacttctgatagttgcttcgccagtacagatcatagtggaaccatcatggatgtttaatattgcagtccaaggtaagaaagtattgcagaaccaagcacaaaagcatccaggaagaaaaatagaagggacaagctgaatgagagaggtatgtgccctggtgagacaaatcattttagttcttagatataatacttgcatcattgtctaagctggtagcatcgtagatatattttttatccaaataatgattgtgctcatgtaaaccatgccaaatattattctacaatgaatagcccatcgctgaaaaatgcagaaatcaagaagagcttttaccattgcattgcaaagtccacatgttcgacgattcggtcttatgatttgtttagaattttgtttcacttattaacaacttattacatgtatgggttattggttatgaacctatctaaaagttgaattttaaattaattgtaccttttgtcatggacaaaatttggttatccttgaaatgttaacctggtacctagcataataagatgttttgctggttttaaccaaagtggtcaagtttgttagtataagcatgccacgggcagccaaccatacttcatgttaaacattataaaaatgatactgtattgattagcattatcttttcatttttacatgaaaaatcttgttgcattttttctggtggtttttttctaagcttctacccaggcttacttcatgtgtgtcaccatttaaaaagctaatacattttgtttgtggtgccacaggaattaggtcagcaattttgaagttgggttaaggtttttgacacttccatcattccctccatctccctgtttacatatttgtcatatcactccctaattatttagttgggatctcggtaattgctacttgtaatagagctctacacgccaatcttgttacacttttttacctcatagtgatctttgtgtattgcgcacaacattatgtaccttactacgttttctcagtaattgctacttgtaatagagctctacacgccaatcttgttacacttttttacctcatagtgatctttgtgcattgcccacaacatcatgtaccttactacgttttcctgcttattgaaatcctgtgagccctactcagtttttacctatcttttgattttacccatggagaaatattggctgggtgactgccatgaaggcatgaaccttaaaaaaagtttgttttttcaattctaaatatcttgtgacttatttatattgagcatgtgtttacaaataatgttctcatcagctcatgtggtattttaagctcgcctctacatggacgccggcctcgcttccgcagtcaccatgctccggacctgcaccgatgtcgtgcacctcgcgcacgttctcgagcagtttcgccttgcctggtgcggcaagctcgttcgggacacccgcgccgtcgctccgtcaagggcctctgcttcgacctcttcatcattaggggtggaaacagagctttcaatgtatgctggaggtgagcgatgtgatcgatattatccatgcttgataaattatgacaatggtgatggccatgatatatggtcaggttctatccggacatccggagaactgggcaccggtgatcggatggcggcctccggcgctaagatctggcggtcacaacctagccgcgccgtcgacgaggttttcgcctgtgattccataattcgaggaagagccgtgctgctcgcagcaccggtaccgcccccgttggcgcggacgcctgccatcggccgcgagctgttgatgggggaaacaaaaataggaagggacatcggagacaatccctgccgcgttcatcctttattaacgagcagaaaccatggttcgggacttcaggtttcagtaaatcttgccagaaattaactcatgtgctcgctcttttgcaagagcagaaacacgtgtgtacagtttggttgtcagcgtgaaaaaaaaaatattgtacacttccccgtcaggcctggttcagtt

SEQ ID NO: 40908 - DNA, 866 bp, Zea Mays
gtcttaaaactagaagaatgcaattgcctcgagtcacaactacaagattgacaacttagtgattggatttttggtggtgattttggtgccgcactgcaaattaagagagaaatttcggttcccaagcagcccacagattctattgattgcgggtgtctttcagcatctgagggtttctaccagtccaggttacgcacaagcttcaaattatcgcaaaattcctcttacatatctgcatctcataccgaaccaggtctcataccggaccagaaaaatggaatacactttattacctgatttagcaccgcataagatacacgcaaagattcaagtacatgtatctagaaagtggcttttccgaggtgctactgatagtggaccactacaacatgttgatatggttttgtctgatcgagagggtaatgctatttatgctgaaatccctggaaatttagctgaacaaaaagcaacaaatattgaagaaggaggagtttatgatatcagcagattcagagtgtgcgcagcaaaaactgttttcaaaatagtggatggggacaaaatgatccaattcacatttcataccatagttaaacgtgccacaagccctccaacaacatttccattatatgtttatcggctaacatcatttgatctaattgagcctcatgttcaaactacaaataactttgttgatgttcttggtgtcataactgaaattcatgaactgacacctgtgcatgtccgaagtcaactaacaccaacagtgacaaggaccattatcatagaagatctcaggtgtctacctaagtggtggtcctgcctgtagatggtacttcaatccaacaattccagaggcagaaccttat

SEQ ID NO: 40909 - DNA, 4158 bp, Zea Mays
ccaagctctgcaaacgttaaaaaaattaactctcttctcgggagagcccaactagactcgcagtcgcgtccatggcgatcttggtaggcctcgtcgccgtcctctccgccctcttcgccgccgcgcttcggcgcctcctaatctcttgtcgccaccccgcatacgccgccggtttcttccacccgtacaccaacgacggcggcggaggcgagcgcgtgctctggtgtgcggtgcgcgccgtgcaggagctttgcccggacctcccctgcgctgtctacaccggcgatgccgatgcggcgcccgaggccctcgccgcacgcgctctcgaccggttcggtgtccgtctcctccgcccgccgcaggttgttcacttgaataagagaaagtggatcgaagcaagcacgtatccccacttcacaatgatcgggcaaagtcttggctctgtttatcttgcatgggaagcccttactaaatttaccccgcagttttactttgatacaagtggctatgcttttgcgtatccactagctcggctatttggttgcaaagtcatctgctatactcattaccctacaatcagttctgatatggttgaacgtgttaagcaccgcagttctatgtataataacaattctcttatcgcagggagcatttggctatcccgatgtaaaatcctctactataccatattcagttggttatatggtctggtgggttcatgtgcgcatcttgtaatggttaattcctcatggacaagatcccacatcacaaatatttggaagatcccagagcgtactaagagggtgtaccctccatgcgatacttctgctcttcagatgcttcccctggaaagaccaacaacacctcctgttcttatttcagttgcacagttccgcccagaaaagatagaaaagctctatagaagaccaaatacaaaaaaacctccttacggaggccagtagcaggcatacacaaagagatccatcagaaaacaaaccaaactaccaaaaagccaccctaaagatctgctaagggtgcagccaaatgagagaggccctttgcaccagatatttcccattttcttctttcctcatcagcagttctgagactcagagaaacacttggattccctccatcaaagacacatttattccgatacttccataaagttcaagctcctaatatgtgaagagagtcaagtccttttttggtaagaccaaagactgctccttctacctcttcccaccagcccaggaaggaatctgcatccggctgtggtgcaagcgaatagagaccaaatttcctcaataaaagataccaaaattctcttgagaaggagcatttcacaagaagatggtacaaagtttcttcctcttgttcacataagggacacttctccgggtgattcaagcctcgttttgccaacctatcagctgtccaacatctcttctgggcaaccaaccatatgaaaaaacgacattttggcaaggcccatgttttccatattcatttataatgaccaaaactcacagatcctaggaacaagccctcatatgaagatttggctgagtatgtgccgtctagagcaacactgaaaatatgcttatcctcaacctcaggctgcagctctaatcctgaaatcaaatcccaaagtcaagatttaaatataaaagcttaacttccattcacccacttcagagtaacatttatctatcttgctcttccaccaggcccatggccttcagctggaggcatttgcacttgctcttcaaaagctagaccctgactttcctaagccaaagattcaatttgtcggtagttgccggaataaagaggatctggacagactacaaaagcttaaggacaggtccactgaactacacatagatgagcttgtggagttccacaaggatatttcttacagggacctggtacaatttcttgggggtgccattgctgggctccattcgatgacagatgaacatttcggaataagtgttgttgagtatatggcagctggagctattccaattgcacataaatcggcaggaccgatgatggacatcgtgctagatgaggatgggcatcaaacaggatttctagcctccgagaaggaggaattcactgaagcgattatcaaggtcttgaggatgccagagtcggggaggcaagaaatggcagctgcggctaggaaacgtgcacaaagattttcagatcagagattccaccaagatttcactgagaccgtccgccctattttgtcagcaagggaaggctgactgacaagctgcagtttccacctaacaatctgaattctctgtcaagtttcacacggtacagtgaaagacttgcaaggggcactgaattggcagattattgctgctcccttttcccagactgcttgtgtattgtgctgcatcgtgtaacgctactgtgcagaaatagatcacagaaagaaaactttcgtcagcgatatagaattcaaaatggtgatcgtggtgcacggttttgaatctttcttgcggcactctagtaccaagttcatctttgtactgagcaaaagcttctgcttgaattgtgccactgactggcggacccatggactttttatactaattcaatctgtcttccactctagaatttccatgatggagacgcaaatattgatgaactataatttactaggaattccttagataaaacaaatgggtaagcacgttatcaccagggctttctgatcttagtgatctgccatgcacgtaacgaagtacacgaataacaaactcaaccaatctctaagctgatcaaccatgtctcattcaacagatgggagccaagtccagggagctccacagcagcacgtcgccgtcactgtcaccatggctcgcctcagacgacgaacttgtcgcctccggggcgccgtcaccgggtgaacgctcctcacgaggcggcttgacatcctctgctgtatccattgatggttcctgctcgtgctgctgctgaactatctctcgctgcttcttccggcacgcctccctcagcccggagagctgatcacgcacggcgtggccaccggcagcggcgccgaggcgcatcttgatgcactccgagacgccgctgagcgcgtagagcgacgccgagatcttcctctcgtagtccatcctgctcatcatcagctcctgaacggccgtggccggctcgccaccgccggcctccaccgcgccgccgagctctgccgccaccacctcgaacggcgagcagagcccgccctcgcaccccgcgcccggcgacgcggtctgctggtccatgaactggaagtccagctcctcctcctcctcctcttcctcctcttcttcctcgtcctctatttcttgtgagctgttctcgtcgctgccgcagtcgtagctcaagaagtcgtcgacttggaaggcgcactcctcgccgccgccgtacggttccgcgcacagcggcccctgcagcagcgccgccgccgcggcctcctgctgccgagctggggtggcgttgaggaggagctgctgctggttgttgcgggccctgagccgcaggagcaggaggttggtgaccttggacggaagagccggcggctgcgttggagaccccatcagccccggcagcggcggcggcgtcggaggaggcggcgcgggatgcgcggcggcggctactgcgacggaggaagccggcgaggggcgcggccagaagttggtgcgcgtgttggcgccgcggaggaggcacgcggcctcgtcgtaggcgcgggcggcttcctcggccgtgtcgaaggtgcctagccacacgcggatcttctggatggtgtcctttatctccgccacccaccgccccgacggccgctgccgcacacccacgaaccgcttccttccccgccgctgctgctgcgccgccgccgcctcagccaccgcggccatgctagtaccgcccgacgatgcccatgcacacgcgtctgttgaagccagagccagcggtggtggcagcgagtggacgccgtcgatacccgcggcggagtcggaggccttgcgcttcctcgccatggatgtagtagcccgatcgagctcagcgcggtggagggaggagatgatgaacaagcgcactccactgcaatatatagtgggagaggagggagtg

SEQ ID NO: 40910 - DNA, 600 bp, Zea Mays
aaaaaatccaaaaccaagattctgtctatcagtggatattaccaaacaaatggcatcgaactgctacaacatacaacctgcctaaagttctcctaagcatacttagcgctccatctgtgcactcctaagtaaagggtgaacatttcagttctggaactcagttgcatgctccggttgctgcggagaagtttgtgagtttatctattctgataatggaactgtaaccatggtatatcatgtgaatatttaaaggaactgatagagagatacaatcaatctcaaatgaacttaaggataataagggtcaacatgagatatgttgttctaaaattgaaacaataaagggtaaatggcttccaactctgtggattcattcgtaactttcaagaaatggcagttgctcactactaacagcttatctacaacctaatgaaattcgttggtagtgtccacttcatatgtcataagttgaagagcataaatattctgaaagctcacggtaaaagcatcaaggatagttacatgctaaatggctatgcactaaagactaaacacaggccgtgcaggtcaaggaatgcctatgagagtaactcctactag

SEQ ID NO: 40911 - DNA, 4433 bp, Zea Mays
ctgcaaaccactgcagaagaaggtgtcgcctgacggaccctggtccgggcaattacagccctagatagccccgcccgcaaagactcaacaatcctcaacggccctccgccgtctgggcccactgctatggcaagaagcgccatccgccgtgccgtgctcgccgcccccattttgaagccgtcgctctctctcgcggtctcacactctcacccaaggccggcatcccgctcggtgactgtgccgttcatttccgccgcgtacacatatctaacagggaaccactttgaaacttgaatatattggcgttgctatagtggagtaacatggccttctgcactatgtataccattcatctgtccgtcatagttttgttggcagtcacctacatgcatgtaccagttactgctatcatcgttgttccaacctctaattgttatacatttgataatgaaagccgtcttgttgattttacacatctgattggaaatgttttcgaatataaggaacagggctcacctcgctctgatttggttgtcgaattctgcaaagatgtgcagaaaagatctcaagagagaacgcatttccccgggtggtcaaggcctctacgtgctagacgatccgctgtccagcacctattaagggaagcaagccaaatgaagaatttgcacttagggggcgcccaactcttccatatcctttcacccggctcaaattccacagagccagccaagaaacgttggtaagctgttttaacatagtactcccccgaagcacctggaagccaacggaaagcatcaggtactccaggttgcaactgaatattctgtgttaagtcccaaattattaagaattcgacaatcacttctgtcggtaaactgccagagatgtcaccaacccaactgttatccctgagggcttgctgaactgttttccttttcctcattcgtattgaaactctatttaacagggaaggggcaatttctgagatacattggccatgcagccaacggtcagtccaaaatagcgttccagcaccatcccccactatggagcatagtgaggctgagaacatggcaatgacattaggatggacttgtacatcaaactcagcccaaggcctgtctggctgagttttcttgagccacaaccacctcaggttcaatgcccaaccaagaatttcaagattgtgtattcccaaacctcctagacttaagggtttacataccttattccaccccacaacacaatggccacctctgacatcctttctgcccttccacaaaaaacctcttctgattttgtcaatagccttgaccacccatttagggcaaggaatcacaataaggtgataaatagggatggcagtgaggacagatctgacaagtgttcgagaaaaaaaagatctgacaagtgttagtcttccagcttggttgattaaaggagccttccaacctggcagcttgttagcaactttatcaataagttccaaaaacacatttctaggcattttcttaacagaaagaggaaaccccaaatatttgcaaggaaagcctattatgttgcaagggaataaagattgtgcctcaccaacacattgatcattacattggatagggagtcatactgcatttactggcattggtttttaagcctgaggcctcccaaaaatccttaaaatctccttgatcactgtgatctctcttctgtttggctgtaagaaaagtacaacatcatcagcatacagggacatccgttgacaatttccatgtctcaatagaggcagcaacagtcccctttcttgtgcttttagaataagtgaatccaaggcatccattaccaggatgaaaagcattggggacaaagggtccccttgtctaagccctctatgatgcttgataatctcccctggttccccattcacaagtactcttgttgaagaagagtacaacattttagaaatgatgctgcaccaaacaggaccaaaacccaaatgcctgaagatttcaaacaagaagggccaagataccgagtcaaaagcttttccaatatccaatttcagcaggatacgggacaccttttgcctatgaatagcccttgcagtctgctgaaccgaaataaaattatcatggatgcttcttcccttcacaaaggcactttgattttttgacaccagaacagggagcctaggtgcaagtctggtggccaacagcttagttacaatttttgcaaaactgtgtatcagacttattggcctaaaatctttaacttccaaagcctcattctttttaggtaataaggtcacataagctgaattaaggagatgcagtttagaaatatccccatgcagcaatctgttaatagctgccataaaatcacccttaacaactggccaggcctttttataaaatctcccagtatagccatcaggcccaggggctttgtcagatgggagggccttgatagtattccagacctcctcctcactgaagttttggtccagatcatgtaagttcaaggccggcctatggaaggcatctagatttagagtagagtccctgtaagatactgtcccaagaagatgattatagaaatcccacactgcctcttttttatcttcctgctcgaacaataatctgtccccgacctgcaacttcccaatgaagttttttctcttcttatacctggcctgtcgatgaaaatatgaggtattggctgttggaatgtgaaccctaaccctaacaggggttccttgacgacccatttggggcactgaagagctataaaatagtagatatgggctgccgaaagcactgatttaaccaaggttgtcctcccagctgggttaattaacgcagctttccaaccaggtagcttatcagccaccttatcaatgagctccagaaaaacacttctaggcagcttcttaatagaaaggggtaaacccaaatacttgcatggaaaatccacaacgttgcaggggaacagatcttgtgcagcaccgaggtcttgctcaacacaacgaatggggtcaggctgcatttgtttatgtttgtgacaagaccagaagcctccccaaagatcctcagaatttctttgaccacccgccgtgacttcgttcctgttgggcttcaaatagaccacgacatcatcgggttaccttgaatttggacgctttgttagtcctcactcttttctaactggttcaggtcctattgactatattcagaaaatgcataatggagatttagtgcactgtgaaactacattccacaagatgggtcgtacagcacaggtaaacatcatatgtggacattgctcgaacaaagtgtgcaaagatgaacaaggatgcatttgcaacatatcttaccatgaacgaatgtgcagggtgattgtcgaactagctattcgttgtgttaaaagtggtcccagagtatttaaaggtttcacggtgggcttccatccccgctcatcagaaattgtttataatggattcactcagcctggatttgaacaacctcaccatggatttagcttccagactgagcagattcatgtgtctctttaccttagcgccaagtcctcactctcaggccttgttgggaaaccgaccttcaaggttaatccagtgaaagggcttggtgttacacttgcaggatcaggattcaatgatgccatgcctagtaccctgtctcctacagttttgaatgtggattggagatgtgaaattgttcgaaccagtccttatgaggtccatatttttatccctgtggagggctatgacccaattgaatttacactaacgaaaaaatgtggttacagacaagaaaaagagagtgatcccatgaaaggctgggcaaaatttggaattgtttcttgcgtgttcattgtcttatcatgcatactttgttgtggagggttcatctacaaaactcgcacattgcatttgtacggtttagatgcgctgcctggtattgcggtcttgtctgccctattggatgctgttgggagaccaagaggctacttgcctgcagttaatcctaatgaaaaccatgcaagccatgcatcttgagagcacgtggttggtaccacacaagtaggaagtagcacaatggataaatcatagggcatatgggccaatgtgaactaatggacataattcgttgacacatccagcatcagcctacccaagaaattttccctctgctacaagcaagtgagctcatggagcgttgctaattatcgcactattagtgtagcttttatgcacaagttctttacatgttcaaaaatgaaaagcatatacaccatcctttgtatcacgctttgtaacatttaatatcttattatcttgcagtagagtaggatactcaaaatttaattgagctcgtagcatagagcttacgtgtcatcaacatcagaaaagtcaaaagata

SEQ ID NO: 40912 - DNA, 744 bp, Zea Mays
cggctctccgctactcctccctcgaagcccaaggtcctgcgcatgttccttaaggagaggcaactgcacgacgatttcgtcaccaagatctctgacatggtctggaggaggaatggcggcaatgttgatgcggttgaggcgaccacggaccaaggcagtgctatagaggttgctcagcctgaagacctcaaggatgaattgctgctcttgaccacagggattggagcagcatgtagtttatattgtctcctggttttctctcttgagaccgatgtgagttatgctttgggggttggtttcagaattggcattacaagtgaagatttaaagaatacaatagagaagacattgggtggtggaggagtagctctttcatccccaaggcttgtgattcctaccgtgatttttggattgtcagctttaatagaccacttcaaaaatagttttttcagttttgaggttcttccaaggatgatgggtttcctcgcatacaaggttgcagctttggttcaggtctacagagataacgaggatctccgcttgatacttcatgaggaagaggatgctgaccgtgaaagcacttgatgcatacaaattagagattatgttaacctgttgataaaaacagaacagtctgatttactgagtcatgcttcagttctgaaaaaaaatctcttacaccccgtttggatcattagaattgaatttcattctaataataataatttaggcatttatcaatta

SEQ ID NO: 40913 - DNA, 2141 bp, Zea Mays
gccgtgagtccccgactccacaacagcggccggcactcttccccaactctgcccaaaaatttgaaatccttttcgcttccatcttcaccgacccccgagcaccctatctagatggcggatccaccgcctgtgctcacgctcctggtgaagaagggaccctgcgaggggaagaccgtgcatcgccgcgccggcgccacggcgctccgtgtcggccgcgttgccaagggcaacgacctctccgtgggcgacgctggcgcgtcgcagaggcatctctccgtcaagttcctcccgccgcctgcggcccggtggtccgtcaccgatttatgctcctccaacggcaccctcctcaacggtacgcctctcgtggccactatccccgccccgctctccgacggggacctcatcaagatcggggaggccaccgtgctcgccgtctccatatcgaccgaggcaggcccggtaccgggcgccgccgcgactaggcgttccgcgcgcaacgcagcagccgtggcgacggcggcggaggaacaggtggccgctgtttctcgcagggtcggacggaggaaggccgtttcggctgaagcccccgaagctgggaatgaagtggaggaggaagctgcactcccgactcgccgaggcgggcggaggaaggccgttgagcccgctggggtggagacggaagaggaagacgaagaggaggaagcggcaataccgcgccgtagcaggccgaggaaggctgcagcgacggttgtccttccgccacagccgcaaaatatgaggtctacgagggctgctgcaaggagagttgaggttttggggtgcgaaaacgatgagggagaagtggtgaggaccgggtccgggaggggtcgaggacgggttacaagggcaaatgcaaggaatggtacgggtgttactcccggggaggaggaagacgagagtgaggtggctctggccagagatcgggaagggacagctgccgagcgcaagggtgaagtggtgccggcggctgggagaggacgatcaaagaggagcagaggaggccgaggccgaggaagggctacgagggcaagtacaaggaagcctgagggtgctattgttgggaacgatgaaaatgagcaagaggaaacggatatagttgatggcagagaacgattgagtgtgttgaccgtaaatgatggttctcaagaagataaagtggcaaatgaggttgataagttggatggaaactcaaagacacccttagaggatgagaagatggtggatgtggagcatgcgacattgacagagaggacgatagaggggagggtcaatgctcagcattctcctgctgacagtggtggtctggaagaagaggaggtgaagaatttgaccaagggaggggaaatcgaagtagaaaaggaattgagggaaagagtgtcaccagagtcaaagctggatggtgttggagaagtggaaaagaatgacaagagggaagttattggtgccggtggagagaaaggccatgtgtgggagcgcaaaggaagacacagattagagaatatgacattgggggagtggtttgttcaaatcgagaaataccttctagcaaagaatgaagaggctgctgaaatggcgatatctgaagtgcaagagaaacaccggcggttttgtgaacatgttaaaacgttcgagctcaaaaagggataatctggaaatattttggacagcctagtgttggataatttgacaccatcagatatcacaatgaagacaataacactgaagcgttgcaaactatgtcagaatgattcctggagtccagtcctgaacaaacgaacaaggtcgctgagctgccggggtgaggccactgttcaagccactggggtgaagacactatgatcttatcgctggagatatagcagggtgctacatttcactagcattaccgtttgtaatttgattcaccctcctttgtacataagaattcgtgatgttaaaggtcggaacaataaagttccattcgttgtttggccaaagaattgcacatatatcagataaaagaaagcagagtgatcttcaaatatctaaagaatttcatgtgcaatgcaacatgccaacatgctatactatatatacaaatttgtacggtttcatgacatttt

SEQ ID NO: 40914 - DNA, 3738 bp, Zea Mays
cccgccgcgaaacccagcacgaccgatccatccacctcacaccgcgtcttcgtccagctcactcccccgccgcgcccccgctccgctcccctctcttcctcgccgcgggtcgcgcgcagccaggcgccgagccgccgaccagtaaccgacgtatatctcatccttccccctcccccctgcacagccccctctacaactccccgattaaaccctagaatctcccaactcccaaatgcgcgcccccacctaggcccccgaattcggcatccgctccgcggaaggtgtgcaagccagggtgcacacaatgagtgcgggtttcaacaagcagatactggctcagaagctttcgaagcttaatagctcacagcagagcatagaaactttatcacattggtgtgtctttcatcatcgttactgccaacaagttgtagaaacatgggattgcgagtttcatgcagctcctggagagaggagggtatctttgctgtaccttgcaaatgatattatgcagaatagcagaaaagaaggcaatggatatataactgaattcatgagggtcatccctgctgccttgaatgaagtgttgactatcagagatgattttgggcggaatgttccaaaaagactgattgacatatgggaagaccgtaaaatatttgatactcaggcacaaagcctcaaagatgactttttcagaaggttaaaggacattagaaacaaattgaaaaatacgggcagtgagctgctggagaaggttgtctctagctacaaacatgtcctgaatgctcctatggatgaggatactctgatgcgaaaatgccaagcagctcttatcaattttgatgaactcaataaaacgtattcagcctcagaattcagaattggtattggacagcttgattaccgttgtttggatgcacaagaatttggcactggaatttgagtccagtaccaactcgacattcacttcacctgtgcccccttgccaccaattcggagcctcacccctccgttttgtggggaattaggccactaggaaaaaaaaacttcggcctttcaattctgtgttctgtacatccaaacagatatcgagtttgatggtttctatgattccaaaagtcaattttatggccatccaaacaacggatttcaattgtgttccatttcaatatcaaggctgatttggtattctctccaattcaattccttcccttccaatatcaacatccaaacaaagcctaaggatattctcacatgtcctgtcattatttactagttaatatgtagctcatagcatgcagaaactagtgattatgtggagttatagtttggtctgcaagttcttcacctcagttgcggtgcaccacatatgcagggttttcacaaaaccaacaaactaccatggtctcaagcataacacattgatgtttatctgtgcatgggtttgctgggttttagcaggagctaaggagatcggtagtatgggcttagttgctgccctgggcgaggtcgggtctagtttcagtactactatgtaattcccttcgggataatgtgggtctttgggagatttgctctgcaacatctcctcttttgtaatgtctcctttcctctttaatatataagatgcgcagttctcctgcgcgttctcaaaaaaaaaactgtgcatgggtttgttgtatctaggttgatgtagctaatgtgcaaatggtttgcatcacacctgtgttgcaactgagacatccttgagcctagatggtttgtataaagagatgcactgtacgttaaaaaccctcatttccatctttagcaagaggatgtccagtgactagatttattgtgtttcagccctatgccctgatggcattgtcaatgggacttctccgcaatttctaccttgagttgcttcataacagatacagaaattggattcttccactacgtagtttcttcagccttaactagattcaggggttggtgtcatgttctttcctctgaaatttgggcagcaagcaaaatgacctatgcttttgacggccctttcatactcactgttggtttataagggttatgacaaacaacttcaagcttcgctttgtgacaacaatgaatggttcccatggcttttgagggcacacgctagataaagcctaaacaagtgaaattgaatatcatatgccacacggtgtgctatgggaaattgattcatagcctcataggtgggcttgggctcgacacaacccaattgttatcccaacgtcagtccaacctgcttagatccagctaatttcaatgaggttgcaagggggtgcaggaacaacacaacattctcagaaactccattgaacaactcaaattgtcagaatcactcagggccactctgatttctcatttgaaggaagcgctgaatgagcaggagctcaaagtggaacaagtcagaagcctgcttcaggcagctcagcctcgattcaagagagctgctgagctctgcgtggggcttggaagcaacatggaaatgcatgagccatcaaatcaagggcataagaggtctagcctctctgatccacttagtactgttgctccaggagctgagaagtctcttcaaaagggacagtcaagtgcagtgttgtattcacaggagggaaatggttttgagcacatcatgacagagacaaagcttgctgcaggtgatgcttcagacaatatacgtggtggtgatttgccttcacaagtgaatgggggcaacaccaagctgaaaatagaagagcacacttctggtaacaagaggcagaagctagaggatgacacagatatttctcagcctcaatcacagtcaccgccaccgccacccccattccctcatcctgacgcattcgaaccaccaccaccaccaccacctgaggttcctccatcaccagagcctagcccaccaccaccgccaacttcaccgccacccaatatgatccccccgccgccgccggcaatgccaccccaaatgatctcacatgtaccacctccagctggtacatttgtaccttttcctgctggaccacctggtccaatgtattccagctacccaccttttactcctgtggtcaacttccccataaccagcccaccagctggtttccctagtccaagcccgcctccgccttttcaaggattagtgggtacattctatggccctcagttccccaccgcacccccaccagcagacaggaaatgagtgtagtaacctaccggcagcccccctcatcatactagtttatttccccttttcaacagagaatatgactcggggggtggggggggggggggggggcgctccatcagcatgtgttgtggagctcagaagattgttgtaaatttagccagtcagtgcgcagcagtgaattttctgaactagttgtggtcttggtcctggagtagaagtgtagaacctgtagatttcgactgctagagagaattagggattctgagagccgagaacaaatgcctgcgacagattaataataagttgtggtcttgttggagtaaaaactgtagattcccacagcttagagagagagcatggaactcggtagcatgacatgttgtaactcatgtacaattgtgttcattgccagatcatccgagaacatgtacatgttcccgtgatgttttgagcgtgtaattctgttgttctgtgtaagatatggcttgagccgctgtcgatggttgaaactttttgctctcggt

SEQ ID NO: 40915 - DNA, 2988 bp, Zea Mays
caggaatcaggaaaggaaaggagcaaccgccgctctctccatccatcgccttccccatctcccccagttcccctcgtcgtcgcttcttccaaaccctagcggcctagcctgcctcctacctcgcccgccgacctatctctgccagtcctattccccgcggcagcgcgggatctcctcgctcccgtcgctccctgcacctacggtacaaccgctccatccaaacgagatccagcggatggaacccccggcggcgaaggaggcgccgccacttcagcctgcggcggaggaggacgcgatgctctctgcgacggcggccatggcgaaggaagccgctgtagcgttccagggctgccgctacgccgactgtgccgcagtgctcacgaggctgctggacaagaaagagggcgatctcaaggtacaccataacatggccatcactgaattcttcttggatgattgtcctgattcaaacaggctgcttaaaattcttggtgattttaagaagtgaagagcttgcatgtgcatctagagaacaagctgattctgctaatggggtaggaaacagcgctcattcaggatcaagagggagtggtgctttactacctttttcctctacacataatgcgtcaacttatggggatgaatttgacacgaccataattacattcaacatggctgtcatcctatatcatcttcatgactatgaatctgcactatctgttttggacccactgtaccgaaacattgaaccaatggacgagccaactgctcttcatgtatgctttctattattggatattacattagctttgcaagatgcaacaaaggctgtggatatagtacagtacttggaaaggtcgtttggagtagctaacacaatgaacccgaatgaaaatgcaagcatagctcagcagcaattagctcaagcgaagcctcctgtgaaaattagcatgcctccagattccgattcaaatgcttatgctggtggatatgagaacctttcgtcaggaattttcccagatgagcaaatagaatttgaatctctatgctctagttttgatggacatcagaatgtgggcaggcgtatcttgaatgatttctcaagggcgtctgctgatcttgctgctactgctgctgatttgaaagttagacttcagatttacaaggtccgtcttctactgctcactaggaaccttaaggttgcgaagcgagaactcaaagtactaatgaacatggcacgtggtagggattcatctacagagcttctcttgaaatctcagctggagtatgcccgggggaattataggaaggctgtgaagctattgagcacaccaaataatcggactgaaccagcaatgctagccattttccacaacaacatgggatgtatactccaccaacagagatcgtatcacgcctctatatggtgctttagcaaagcgctgaaatacagcttatcatttcgttcagagaaaccaatgaagttgtctacattatcacaagacaagtcttgccttatttcatacaactgtggtatccaacatttgatgtgtgggaagcctttgttagcagcttcttgttttcgtgaagccatgccgctcttctacaagcgaccccttttctggctccgtttttctgagtgcagcctgctagctctagaaaagggtctcctgtgtgcaaatggtgcttcctcattcaacgatgagattgaaatcaatgttgtggggtcaggacaatggaggcagttgattgtcaacccagtgaactcgagaagtaatttagattctgcaggtgtgactttaggcgaacataaaaatttggtttcacttggatttgctagacagtgtctacaaaatgcgctgctattattggatgctactgagaaggaaaattgggtaatcgcatctgatacagaggattgggaccaaggaaccgtacatggatataaaagctcaggccagaagaatactacaagtacagattctaaaacaccttcaggcccaactctagctaatgtaaatggagaacaaaagggcacaagcttgaatgctaccttgcagagttctcttgctttctatgacgagatccgtagaaaagagtacatcaaaatcagacaggctgtcctggcgaacttggcatttgttgaattgtgccttgataatcccttgaaaactttgacgtatgcaaagtcagtactgcaggtgacagactgttccaggatgtatgcgttcctcagccatgtatacgcagccgaagctctatgtactttgaacagaacagaggatgccgccgagaatctatcagtttatataagagatggtaatcatgtcgagttgccttatagtgtggagaattctgaaaaggccttggttgagaaagacagtgatggtgaagacttggttgctcctgcagtgacaaaactcgccacagaagaacctgagcagctcaggccggaggaggcccgtggtgtcctgtatatcaaccttggcatgattgctgcaaggcagggagaagttgaaaaagccaactacatggtgagccgtggcctggcgatgttgcccaacaacccccgggcagtgctagcatcggtttacgtagaccttttgcaagggaagtcccaggaagctgtcgtgaagttgagacggtgtaggaatgtgagatttagacccgctagcatagcagccagcagtcagcagtcgagcttagaaaagcctcccctttcatgatttctgtagtttacaattaccgttataatcttttttggaccctgaccccaatgtggatgatcaaagatggtaatgcttctcctgtgtaacatatataagaaatgaactctaactccccttctagctccctcccagattcaggggtggaatgtgttggaactgtaccgttttaatttgccctctttggactgaagagagccaagtgatcaaaatagtttcctatgtttattcaagaatttggaaaataatgtgcagtcagcag

SEQ ID NO: 40916 - DNA, 1096 bp, Zea Mays
tggcccatctagaaaaaaccctagagatgtccgcaggctctccgtcggtcgcggctctcgcgcggcggctcctcacccgccgtcggtcgctcctcacccgccccacgcctgaccagcgccattactcctcatcccgcaggcagtctcgggtccctgttcccgctgtcgctcgtggcccgctccaccagcacgcaggcatcaccctcggccacggcctccgaccaccagccacgcttcgccgctaaccccctcgcggcggcttccattcggtccctgccctccacgccattctcttcctgacctcgccttcaagttcatgtccccgtcgtcgcccatgggcctgctccatcggcccgcctcaccctcggccacggcctccaaccgtcggccctgtttcaccgccgactgcacgccctgccctgtgccggctcttgccctcccctgactcgtcggccccgtttcgccgccgaccgcacacgctaccgtgcgccggctcctgccctctcctaacttgaggctgtcaaaccacggaagtggcttaatccaacggattgggggaggagagcctggtgccgttcgagattggggcctcatgaggtaaattcagaagcaaggatggcgacgacgatgaccccgacgacatcgtccccatggacacccaaggaatggaaaatgtgcatatatggtgctgattgcagtgagattagcctcgtccaagttaggggatctgccatgaactagacaagattagaagtttaaagaggccttacatcaagagagtacaagatcgccataaggaagtacaagtctttgaggaaagtgaccttatgagaagcttgagaaaaatcaacttgaaagtgaccttcatgatgatacaataaattgtctcaaacgcaacactattgaaatggagggatacattcgccctcttgacgtagtcataattgtgttgcagtatataccttgctctgatgaccagcattctgatggtgttgcagatgatcatcccagcgattccttattctctccaacataccatcatcacaaggttcgttatttgaataaataacctaacgaaaggtataaagataataaa

SEQ ID NO: 40917 - DNA, 1654 bp, Zea Mays
cagttgcactggtagcagcagctagcaatggctcacgttgccggtgacatcgccgttctggtgctctttctctcgttgtcgtgccaaagcacggtgtcggccggtgccgccgtgcttggccgtaaggcaggagggtcatctccggcgacgacgcacgagggtacgaatccagccgggacgggcactggcacggcacagtacgcggtcattttcgacggcggcagcacggggagccgcgtgcacgtcttcaagttcgacaagcagttggacctcgtcaagatcggcgacgatatccagttcttcgcgcaggtaaagccggggctcagcgagtacgctggcgaaccccaagaggctgccaggtccatcgcccccctcctggagaaagctcaaggcgccgtccctgcgtcgctgcagagcacaactccccttaaactcggcgccactgccgggctacggctgattggagatgagaaatcggaagagattcttgaagcgatccgtgatcttgtgaagagcaagagcgaattcgaatacaacccaaactggatcactgtgcttgaggggtctcaggagggatcttacctatgggtggggactactcagacacggtaggcgtggtggacctcggaggtgggtcggtgcagatggcctatgccatctctgacgacgcgtccgcgaacgctcctgcggtgccggagggacaggacccttacgttaccaaggaacacctcaaagggaaacactacaatctctacgtgcacagctacttgcactacgggcttctagccgctcgcgcagagattctgaaggcgaacaacgggccattcagtccctgcattctgcgtgggttcagtggtacgtacacctacaacggcgaggaatacgaggcggcggcggcaccagaaggcgcgtcctacgaaaagtgcagggacggcgcggtggcggcgctgaacctgggcgcgcgctgcgaggcgaaaaactgcaccttcaacggcgtgtggaacggcggcggcggcgccggccaggccgacctctacgtggcgtcctacttctacgacagggcctcgcaggtcgggatcatcggcggcgacgcgcccaacgggaggagcaccccggccgcgttcgccgacgccgcgctcaaggtctgctcgctgagcgttgccgatgccgaggccgcgttccccgatgcctgggacgccgagtacctctgcatggaccttgtgtacgagtacacgctgctcgtcgacggcttcggtttggagccgaccaaggagttcacgctggtgacaaaggtgaagtacggagaatactacgtcgacgcagcatggccgctaggcgatgcgatagaaaccttgtcgtcccagaagctgaaccaaatcgcgtgaccagtaataataatgcttaatggagtggtaaaaagacgacgtgctacagttgatgtaatggcgtaataaatggatgtatatatctatgtcccttggctacgcctgctaatatatatcagagaggaagatcgatgagaggaggaaattgtaagttctgcaataattagcatgttcacgtgaaaaaaaaccttctatgggtaccaacaaatgacgatcatcattgtatgaatataaatcacgtggaatacaatgagttatcttgctctttt

SEQ ID NO: 40918 - DNA, 522 bp, Zea Mays
gccgcttagagatgcgtaacaccctacgtcctgatgagtgttcgagtgtggttacaagaggactctctgggttgaaggcacagagagtttacgtgggtggctaagtaaagtagggtcgatcgttctgaaggggtgccccctaggccttatatactcgaccgtggggcagtacacgtggatatgataacaacaagtagctaaaagatagtgaacctcttgagtttatccctacgtaaccctcgccgacttatcctcgcatggctccgttgcatgggggcttcagcgcgggaaagtcgggtctctgttgcgattcattcgttcgacgttgtgggccgtccgggtttgcaccaatccagtctcatgtcttctcttctttgttggttgtctttccccaggcccacgaaagaatgaccttacgaattattgggcccttgggcctttcgtgaggtcttttacttctttagtggacccaggggatatctatcccccacacaagggtatgctggataaataggaatcaag

SEQ ID NO: 40919 - DNA, 4417 bp, Zea Mays
gaagattgtgcctatatcgattgttctagttttgaggcaaataacatcccacggtctatccgttacctatccatttccatgcaagatcattgtgctcagaatttcgaggaacaaatgggaaaactgaaagaaaagatatacattaacaatttgcggagtttgatgatatttggaaaatacattatgttacatctgctcaatattttaagggacacatttaaggaaataagacgtcttcgtgttctatctatattcatatactcccatagttccttgccaaacaacttttcagagcttcttcatctccgctacttaaaacttttgtcaccttattactcagaaatgtcattgccaaacacggtctcaaggttttatcacctgaaatttctagatcttgaacaatggggaagtgatcgttctttgcctaaggacattagccgccttgaaaatctatgccattttgttgtttcggaaaagattgattccaatgttcctgaggtggggaaaatgatcttcttacaagaattgaaagaattccatgttaataaagagagtgttggatttgagctacaagaattgggtaaactagatgagcttggagggaagctcaatatatacgggcttgaaaatgtgagaaccaagaaagaagctaaagaggccaagctgatgtcaaagaggaatttagttgagttgggattaatttggaacatgaaacaagagtccaccgaagatgatatcctagatagtatccaaccacactctaatgttaggagtctttttattgtaaatcatggtggtaccctcggtcctagttggttgtgcagcagcgacaccatatacatgaaaaacttggagactctacatctagagagcgtatcgtgggctaaccttccacctattgggcagttctatcacttaagagagctaaggctgagtaaaattgttggcatatcacagattggacctggcttcttcgatagcacgacagaaaaaagtgtctcacacttgaaggcagttgagtttaatgatatgccagagcttgtcgagtgggttgggggagctaactggaatctgttctcaggaattgaaagaatcaagtgtactaattgtcctaggctgacagggttgctgttgtgccttccacccttgcctcacacttcaaaggtatcccgtattcatatgggagacttttcttatgaaggtcgtaccatgttgaaaattaataacccctctagatttgccttcgaaaatctgggtgacctagagacattggtagcttgggatgcactacccttgtcctttatggatcttaaaaagctacattccttgagacgtataaatgtcactagatgtgaggaaacatttttgagaggactggatgatggtgttgtgctacccacagtccaatctctctaccttggacgatttacacctaccaaaaattatttgtcaaaattattcaaatgttttccagcactttcttctttgcatgtgatggcatcaccatcagatgaggacaacgaggaagtggtactgcattttccaccctctagctcgctgagagatgtcaacttcacagggtgtaagaatctgatcctacccatggaggaaggagctggattctgtggcctctcgtcgctcgagtcagtgaccatacacaaatgtgacagaaatatcacaatggatggattcaatcctcacatcacatccagcctcaagtatctatgcgtgtacaatgagagaaatgatggaactgatccgtattctgtagcagcagatctacttgtagcggtggtgaggaccaaaacaatgcccgacgtttccttcaaactggtgggactttatgtggacaacatctcgggagtgcttgttgctcccatctgcaagctgctctccgctaccctcgagacgttaaacttcagtaatgattggcggacagagaacttcacgaaagagcaggacgaggcgcttcagctcctcacgtctctccaattccttgagttttataactgcagggctctgcagtccctcccccaaggactgcaccgccttccttctctccacggaataactatctatgggcctcaaaacattagatcactgcctaaggagggcctccccgattcactacgaatactacgtataactaactgttgtgctgagatttatgaggcatgccagcaattgaagggaacaaggccagatataaatgtacttgcctccaaagctcgtgtgcaaaattgaatacctgcttctgcatgtcttcacagtcagctctgcttcaacatgcctttcactctacaggttagttgcaaatatatctaaaaacagctcattatgttgagtgatttatgatttcgttgactgcgaaccgaactgtttttttattttttgcatatcgatatgttccatcctcagatgctattgtattacaactgccaactggagccaccattcataattcctgtccatccattcatttctttaaccaagaaatttaatttctcttacatactatagtttcaacttttggatcgtcatcttactttctagcgtttttcctgtttaggtaaatactgtgaaaacatcttcctatacgtgagatagttgatcttcatcgattctacagccaggatgatgtcttattggatgatgtgttggtcatggttggcacaaaattcagtagcgttcaaggcaataaacgagaacaagcatgggatgtggaaaattttagaaagtaaagacaagtgaattcttgacgacgttggcttggcaccttagtttgagtacataatgaaagaacaaccttttagcaaccctggagcatctagaaaatatcagtcatgtaactatcgttaatcatttgaaaaccactggaagacaggagatgtagcaccacaagccattcctttgatcatttgaaaaccattgcggctctttctgattatatcaaccagttgagtggatgaaagaccaaaaaatgctttggaagaagggctcacaattgtggataataaggcatccagtattatagaggaaacaaaggaaattcaaattagacggaaacctgctagtccaagttcttatatgccaaattcatcaatttgcatcctactggagacattgctggcagaggaattgagactggcataggagaactcaatatatgcttgtgaataacgcatccagtgaaagatagtagattttcatcaattcactacccaggatgttgtcgcattggatgagaatgacatggaagacggcgaactagaggaagacaacaacctcatctaagctgaaaatgtgttgcctgtggttgaagaaaatctagcagatgaacaacactgccttccctgtcctctctagacctgaatctctctgatggtttggattcgtccatgattgatcctgtacgatgaaggatcagctcgtccaacgtttttcaaggaacgaactcaatctgaggaattaccttttcattggtcacctggggtactacgaggaatgacttcacgatagacgactcggttttgcgacgcaaaccaaacgccatggttaggctcagatgttggatcagatgattcctcgtggcttcgtgacgcaaaccaaacgacatggctaggctcagatgttggatcgtatgatttctcgtggcttcgtgacgcaaaccaaacagcctgtaagtccgcacaccttatctatcatggtcattgttgagctgatcagtaattggagtcgtgtgataagcttaatggacctcctatttgtcgtgatcttcacagatcaacaagtgagcggcctttgcatgctgcatgagatcaagcaagccgccgactggcaatgctccacctgccattcagttcgttggtgaggtattaatcaccagccatgttggcacttggcggcatgcagatggagcagaacatccaggtgaagcggacagatacatgatcgatcatgagttggcgcagacacaggccagacaaccagaggctatattccaattcatacattccatgataagcaaaggaagatccaagacaacacaaatatacaaatagttagttatacaagcaaaaatcctgttgttttgtgcctcccattttctagtccagaattaatatgacaatttttcactgaaactggttggatcagagaccaggaaaaaaagggaaatgacaactacagctgtgttttttttttcaaagaaggcagctgcccgtcgatgatgtgctcacttgaggatttcctctgccttttcagtgacactgcttcatccttttcagagtcaaatgaatctctacctcatttcactgcacatacttccaaactgatttgctgtaacatacttgagtttcggtatgacattaatttttaactcataagagaacaaaatcagaagaaaaaaaaacaacaa

SEQ ID NO: 40920 - DNA, 2481 bp, Zea Mays
aaatcattgaatagaaaaccaagagggcagaggttcacttacagctctgatgtagggggagtcctggtgcttgagcaggttgtgcatctgtttgacggtgagcttcatggtgaataacttgtagaggaggcagaaggcggaggagggcccacggcagttgccggtcatccagggctcgacgtggtccacctggttgtagatctcgtcgacgacctcgtggtaggtcttgtacttgaagagctccttgaagtagtccgaggagaggatgttcacggacagcaccttctccatcagcccctcgatggagcggccagacgactggatctcgatggaacacgagctatgctaggggcgcccggggagacgtcatcgcggcggcccggaggaatcactttggattgggagggttttggtcgggggcggctgcgcgcatggcggcgggggcgggagcgaggcaatcagacggttgggatggaggcgggggttgatccggcaatcggacggtcgggatggaggcgggagcatggttgtgcttagtctacactattgccttaaggattagtagagatcaagagaggaaaatggcacagtttccttacataaaaaatcaattaagacaatttaatttggttggcccgatcctttttggattggtcatctctgtcaagcacggcctaagtcctaaacagacacgggccggacttagccgtcgacctcaggctggaccggcccacgttcgctccggtccactcagaacggaaaccagcaaacgacatctctccccggcggcccggtcccttcatctctcgccgctgtcgtcgccgccgcgccgtatctgcagcttcccgcaccgtatcctgcggaagaagtttctaacgggctacatcccaccaccgcacgatgtcggcagcggcgcgagtgctgccgaaggcggtgaccttcgtgacgggcaacgccaagaagctggaggaggtccgcgccatcctcgggtcttccgtcccattccagtcgctcaagctcgacctgcctgaactgcaaggggagccagagtacatatccaaagagaaagcacgaatcgctgcatctcaggtgaatgggcctgtactggtggaggacacctgcctatgttttaatgcgctcaaaggcctaccaggaccctacataaagtggtttcttgagaagattgggcatgaaggtttaaataatctgttaaaagcttatgaagataaatcagcgtttgctatgtgcatcttctctcttgctcttggacctggagaggaaccaatcacatttgttggcaaaactgcgggaaagatcgtgcctgctagaggccctaattattttgggtgggatcctgtgttccagccagatggttttgaacaaacatatgctgagatgcccaagtcagtgaagaacaacatatctcacagagggaaagctcttgctctggtgaaagaacacttcgcatctgctagctatacagttcagagcaacgactcaacttaaagtttgacttggattcctagacgaatgaactgtcattctggaatgtggtgactcgttccctggcctgccgcatcggccttccaagagatgatctgcgcaagaacgggtgcccaggcttctcgctgccggaagcactctctggatcgatcttgcagctgccgattgcgagctggacgtcctctatctcgaacaagtcctccgtgcggctgctcaactcgggtgttctcatggacttcctgcagaggaaggccaatgatcttagcaaaactcaaccgtgaaaactttagcaaggttttaagctttttagtgtttaccgtctctgagaggcatccctatccttcgaaagcatcggtttcgaagatgccgtaggtcctagagctgaaaaacattgggcattcggtcagggattcagatgaaatcgacaccaggtcttgtggataatcggctaacttaggattgggggttattattatacatcgagatctcagcactcgtttcctgctggcgttcccggccctctggatgctcctcgcagacgatgcgtccgaagcgggctccgcatcgactacatctccatccctggtctgcacagctctgtcaggacccagatgctgcgtcctttgcacaggtgcgttgcgccgctgcatcgtcttcttcacatcctgtagcaagaagccaaggagtcggccattgcacaccgttgttcattaaaagggataaatgactagacatggacatgaactgattagattagggagaaaaggtagcttcctgtcctggatccgtcgtacctccagttcagacgcttttgctttaaggctggctcttgagcacgcaagctcatgttgcaacgctttcaacttgagtgagaaaaaagaaaccaaggctcagattattgctcgacatgttgtgaagaaatctgccgcctctgacgaggtcaagcttgtacttaccctttttcttccgaggttaacc

SEQ ID NO: 40921 - DNA, 3580 bp, Zea Mays
gtagtactaggtaggtagcgagaacgaaaccacttccacaccttgtcagagcagcagcagcccgcagccgaagataccaaaccaacgccacctggatccccaccggacccgacccgacccgatcccagaggagaaggagagggggggggggggggggggggggggaaagaagaatcgccagaaatcttttgctgcctcgcagagtcgcagggcgaacgaaaacccatcttcccgattccgcccgcggcactttccattcgtcccgatcggattcctccgtttgctccagcaatggcgcacttgggcggccgcgtccagggagccgacggcgggtggttcgtgccctgcgccgactccgggcggtcgctcccgtgggcgaggggcggcgccggcgccggcgcgagcgaaacgctggcggcggtcatggcgaggagggcgccggcggcggcggcgatccggcgggacgcgctgcgcgccgcggaggcggccgccggcgaggtcgtgctgcgcgtccaccccacccgggaggcggagcgccgccgccaggacgtcatcgcctacctcaggcgactcatcggctcctgcctcggctgcgaggtctttgcgtttggatcagtgcctctgaggacgtatctccccgatggcgacgttgatataactgtactggggaacacatggttaaacagtacattcatcgatgatgtccgcagcatgctccagtcggagcaggaaaactgtgacgccgagttcaaactcacaggcttgcagttcatcaacgctgaggttaagcttataaaatgtgttatcgagaacattatagtggatgtctctttcaaccagattggaggggtgtccacgttctgctttcttgagctggttgaccgtcagattgggcagaaccatttgttcaaaaggagcattatgttaataaaggcctggtgctaccatgaaagtcgcatattaggagcacaccatggactgatatctacttatgccttggaaacacttgttctttacatattcaatatgttccacaagtctctgcatggtcctcttgaggcactttataggtttttggaatattttagcaagtttgactgggatcggtatggcattagcttaaatggtcaggttgatttgtcatcattaactgtggaacctacagatgtacaaggcgaatcattgcttggcaaagaattgcaacaaggctatttggataggcttgttgtaattccaaatgagtttgacggatgtggcacacaatttcgccagaagtttttaaacataatcgatccactcaaggcgaataataacctcggcagaagtgtcagcaaagcaaacttttatcgcatacggagtgctttctcatttggagcacagaagcttggtcaaattctcctgttaccatcagagtacattcgtgatgagatttatggatttttcgcaaacacactgaagagacacggaaatggtgaaagaccagacgttgacacttgtagttcattccatccctctcgtggtcccgagagtgcgcttactgaagacggatcgaagtttaaattttgttgcatgaatgagggtgaaaacggaagttcatgtcaatgccattcatcgaaactgcctgacaaggattcgagtgtgacagatgcgcataaaaattcaggtaagtatttgcctggtcttgttcaggatatttcttggaacaaaatctggttcatggaatatgcatctgatttcaaagaacatacatcaactttagcaagcttaagcagccactcaccctgttctcaagataatagtaatggaagcagtgatgagtgcttcgagaattatgcagcagaggaagatttacaccagaatgtgccgcagcagatttatccagagcatccatcacatatattgacaaactcgactagtgcaaatatcttggatttttccagttcttgttttggtgatgagtcagattggactgctccccgcgcaggaaaaaagctactcccacccttcttgctgtcaaatatgctggatctctcaggtgatctggagttgcacttagggtgccttcgcaaagttcagtaccacctggagtcattgtttgatgaactcctgcaggctgttgaagaagcatgtttagctgatgtgctagatgaggattctttcaagatgtcggacattatcttgaagttgaaaactagcactagatcctcaagcctgtcactagtttcatctactgatagcgagagaaggaaactatctcatgtgtattgttcccatagcacaggagacgatttacaactatcacatgctgaggttcaagtggatatggtttggcagcagaatgtgccattgtcccccaacggatcaacatttactccatctccttcaaacaattcagataactatcatgtttcttggttttgtttctctcctacatcgcatggaactggcacatacattcccaacatgagttatcatacatacagggaacgtatgatgcttgaaagagaaaccatacgagcaagaaaacaacgacagaggtttcctgatcgtcggtattactcagctgagcaaggatttgccgattcacaaactgaagacagcgtagctcaaagtggaacaaatcaatcgccgactaagcaaaacagtgcacaacagagtggttattcgagcaagagctcaatttcggatggagattttgttcgtttcaaggagcatgttgcaacaaatggtggaaccaaacaggcagtaggaagagattttgttgagaagggaagacacacaacgccaccatcatctccgccaatgacagtacttttacaaaatggacaaggaaaacctacctgtcagccttcctcacctgtcacagcagatttgttcaatgcggcgaaaagtttggagttcggatccttggggccattctcattgggacttccctcaacctcgacacagtttgaggaagaattcccagcgcttcctactagaaagagagccgaaggccccatttcagtggcgcccagcgctaaggctgttgaaaccaaaagtcagaagagagtgaagagatgttccgactgagaaatgaatctgatttccctcccctccaagctggctgccgctgagactgacaggacgtcgagataatccatgctaatcgtagtggtagaagttaatgacgggacgaggctcggagatacagcaggatgtcggataggtgccccggcaggattttcgtccgacagtgtagcaagtttggatgcttggctactcacctttgtgatgtggtggcaatgtggtgtcgtgtaaaacaataataatcctcatctcacctttatttcattttattagatgaatccttagataaacaacacccagaagtcggagtgagcaatatagtttcgtctttagcatagacagtccaaaaaaattggataggggaagtagaaaatgttccccaaaaaaggaatcgtgattctgtagatttttttaagcttttgatttaaaaatagagaaatgaagaaaaggcatttaggtgcagttgtttgttgtatcttttctattgcttccatgcatttcttttaccgag

SEQ ID NO: 40922 - DNA, 1058 bp, Zea Mays
ttctataattgcgaaaatatcccgaatccgtggcttcccttccctggcgcgcgagtgacgagcgtgcgcagaagctagccaagcgatgccgctcctcttccccgccacgccgccgctaccgctgtgccgcgccgcgcgcgtctcacgccgcgccacggcctccgtggcgtccgcggccaggagctcgtcgtcgtcctcggcctcgttcgacgcggccgccttcgaggccgagcggctgcgcctggacgccgcggcgcgggccgggatggagtccaccgccgcggcagcggaggccggcccgcgggcctggaagtgggcgatacggaagcgggtgtgggacgcgctcgaggctgagggcatcgcgcgggacccgcgccccgtccaccaccgcatccccaacttcgacggcgcccccgccgccgcagacgcgttggggaggcttgacatatttcagaagtcccattgtgtaaaggtcaatcctgacacacctcagaagcaagttcggttcttaacattgtcaggagagtgcgagccatttattgaacaggaaagagtatccaagtgtacaacaccactcacacaagacagtaggtcctagaaaaggtttcaaatgtccctatagccctgactccctgagtgcgcactgtaaggctccctcctctgctgttcacaccagcaagcttgtgctcagagaaaaattaccaaagagtgataaaaagctgttgactccgcaacctcggctaaggacaggatttttctcagttatggactctcagatgatacctgttgggtgcattcctgaagcatgcacttctgttggtgcagctaaatatgggaggccaattggtttagatgaaagccttaaggtggatttgattgtgattgggtcagtggcagttgatccaagttcaggagcacggttagggaagggagagggatttgcagagctggaatatggaatgcttcgctatatgggagctatagatgattcaaccatgatagtaactactgaaaaccaaggcttgatggatgtcagggcctttggctgttgttcaccg

SEQ ID NO: 40923 - DNA, 3568 bp, Zea Mays
caaaaggcaggacgcaagcagcagccatatcctccaggtttcatgattcttctcttcatcctctgcttccatcttcctcctttggaactggagaaaggagaggagacaaaaccatccaagcgatccgtttctcccacttgtctcgcgccaccattattgcccgcccaatgggacgccgccgtatcctcgccgcgccatagttttaaccttgcgtccacgcctgcccaagtgcccatcccacttttcttccacgcaaaggattttctctctctctccttttccattttaatactgcacgatctctgatcgattgattcggccgagataactggagccttgtgtttttatttcgggggtcttgtaccaaaatagcgtcgattttatctacttgacccctgacccattctctctctctctctcccttttcaatttcgggggctttatttctctcctcccacgccttgcatcttcttgatgcgttgcgtcccgactcgaggcagacatcggaggcgcgccactgacttagctcgcgatttctagatccgcaaccctgcgctgctcaactccgattcttttagttcggattcgggtagcagcagggcttcggtggcgatgacttgattgatacgaattggggatttcttgctgtttgcgcctctcttcgtatcggcgctgaagggctcagctcgagattagaacaatttgggttttggggtcttttcttcttctactactgctggtcaagttcacagaaatcgctggctccgtggtccaatggacgagtccggggaagcgagcgtcggctccttcaggatcgggccgtcgacgctgctgggccgcggggtggcgttccgcgtgctcctcttcagctcgctgtggcgcctgcgggcgcgcgcgtacgcggccatctcgcgcgtgcgcagcgcggcgctgccggtggcggcgtcctggctgcacctcaggaacagccacggcgtcctcctcatggccgtgctcctcgccctcttcctgaggaaactctcggccgcgcggtcgcgggcggcgctcgcgcgccggcgcaggcagcacgagaaggccatgctgcatgccgggacgtacgaggtctgggcgcgcgccgccaaggtgctcgacaagatgtctgagcaggtccacgaggcggatttctacgacgaggagctcatcaggaataggctcgaggaactccggagacggagggaggacgggtcgctccgggacgtggtgttctgtatgcgcggcgatcttgttaggaacttggggaacatgtgcaaccctgaacttcacaagggcaggctagaggttcctaagcttataaaggagtacattgaagaggtttctactcaactaagaatggtgtgcgaatctgacactgacgagttgctgttggaagagaaacttgcctttgttcaggagaccaggcatgcctttgggaggacagcgctactcttaagtgggggtgcttcactcgggtctttccatgtaggtgtagtgaaaacattggttgagcataagcttctgcctcggattatagcaggatcaagcgttggttccatcatatgttcgatcgttgctacccgtacatggcctgagattgagagcttcttcacagactcattacagaccttgcagtttttcgacaggatgggcggaatttttgcagtgatgaggcgtgtcaccacttatggtgcactgcatgacattagccagatgcaaaggcttttgagggatctcacaagtaacttaacatttcaagaggcttatgacatgaccggccgtgttcttgggatcaccgtttgctctcctagaaaaaatgagccaccccgctgcctcaactacctgacggcaccacatgttgttatttggagtgcagtaaccgcctcttgtgcatttcctgggctctttgaagctcaggaactgatggcaaaggataggttcggcaacatcgttcccttccatgcaccctttgccacagatcctgaacaaggtcctggagcatcgaagcgcaggtggagagacgggagcttggagatggatttacccatgatgagacttaaggagttgtttaatgtaaaccatttcattgtgagccaaactaaccctcacatttctccactcctccggatgaaagagcttgttagagcctatggagggcgctttgctggaaaggcataactgtgatctgatctgtgtagcttgctcgtcttgctgaaatggaggttaagtatcgatgcaaccaaatcctagagatcggtcttccaatgggaggacttgcaaaattgtttgcccaggattgggagggtgatgtgaccatggttatgccagcaacacttgctcagtacttgaagatcattcagaatccaacatacgcggagctccaaatggctgccaaccaaggccgcaggtgcacatgggagaagctctccgcaatcagagcgaactgcgccattgaacttgcacttgacgaatccatagcggttctaaaccacaaacggaggctaaaacgaagcatggagaggacggcggcggcttcgcagggtcactctaactatgtccgacccaagactccgaggaggataccgtcatggagccgcatcagtcgagagaactctttggagtctctctcggaagagatctctgcggttgctgcttcgtccatgcagcaaggcgctgctcttgttgtcggcgcaccaccaacgactctttctcagcatgttcggcgcagttctcatgacggaagtgagagtgagtcagaaaccattgaccttaattcctggaccaggagtggagggcctctaatgaggacagcgtccgccgacaggttcatcagtttcatccataacattgagattgacacagaattaagtaggccctgtgctgtggaaggtgatgctgcaggtattttgtcagaatctaccttcccaaacggtccacgaccgaacaatagctcaagtgttagtatgccaggtagatgcacagaaaattctgggaccgagtcgtgcaacactgtcaacaccagagcttctactcccacaagcatggctgttcgtgaaggagatttgctgccgcctgaaagcactactgataatgtcctacttaacattgtgaaaagagacgccctgcaggatggtgtaactgaattggcggaaagctcctgcgctgaaggatatgcggcaaactgtgacaccgtctcagggctagactgctgaaggtaacaagacgctcgctgctgacttgagcaatcaacaattagctgatgattagattcttcttgattttgatgatgaaaggtcatttatatgtagctcactacagcaacgcagtgtaggaaaattgtacctgctcgatttaaactttaaagagcatgccatgagtagctttgttaatgttaatattcacatccattgtggaattgttggttgatgcatttcttagcacgtcgagcaaccatatcacagcatgccatgagttcggcactggtacttggaatgtccaaatcatctgttcgctacatgtaacatgcagtggtttattagtcttgcagacacttcat

SEQ ID NO: 40924 - DNA, 1950 bp, Zea Mays
aagaagaagaaatgccccgcgacccacgtcccctccggccctccctctatctttcgctcgctctcggcgacagctgggtgaccgtcgtcgccgccgcccttctccaggtgcccaggtcttcgcaggtccctttgccgcctcttcgccgccgacgagcaccagccaggtatgcgcaccccttctcggtccttcctgctgcgcgaaaccgagcgcccgaaccctaatttgagctatctgtattcggatctaacccaattacaagagcgcgcatgtattatggctcctagcttccattttttacacatgcatgtcctttgctgggcccgcccctgtccgaaccctaacctaagctatttggatctgatttagttacgagtatatatgtgtatttgcatctatttggatcttgcggttcctaaggataacggctgagatgtcgtttatgaaggtgctcgatgttttgattgttttctccaccacatcctaagctatgtcttctataataactctcttatataataagtatcacacaaaaaaattccctataatgtttacgtaatttgcacatcatcgtttattgtaaagtaactcaaatacgtaacagagcgtgcccaagggtgcacgcttgctactagtatgtattagccaccacacagattacagtagacttcattgtatgcatctgttgcagtggagtcattgtatgcatctgttgtgtgtattgttgccttgtggcttgttacttacagctacaactgaatatgtctgtacatctcaaggttgtttaggagacttaattactgtaatttgggttggtttgaaggaagaaaagaagctgaaccatggggaagagaaagtcagctgctaagccacctcctaagaagcggatggacaagcttgacactgtattttcctgcccatttgcaaccacgggagtagttttgagtgccgaattgacatgaagaatctgattggcgaagcatcttgtagaatctgtcaggaaaacttcagcacaactattaatggtatgccaaacctatgtataaaattgtactggttgctcctaatttcacttctatgaactgtactaatttgcatcgaagaaagtttggtcccaaacaactcgtgaactcgttttcttattattgggctgatggacaaggcaacgtgaaatttttcatggtacctgggaacagaacatagcctacaaactgcagaaccattcccatttcatcttgtagtcttgtcttgctaataatggactttgtgggttgtctgttccctacaatcgtaatgtaatgtgctggtattctcgaatgccatagcccatagtcagccatggcttggaataacgtagtggctgactgatatgccagtaggcaccttatctagtacttacagaactacaaaaagtttgtactatacatgtatggacaaccttataagtggctatgtgtgtacctatcctaacgctcatcccagatggtgtatcggcgtttttctgtgagattgttttcaagcaagggttgttcattcattgggtcttctcaggacaaagagaattatgctacagtcaaccagatggccgctgttgcgccgacaatacaggggtcatccagttcattttaagggctttgtagagcaaatgcaaccagaatataatttgcagctaaagatattcataggtagaattgttttcagttcattcaacgctgaaagcagtttcggtttggaggctgagctttggatcattggatggcacttggcagctttggcacctggagtaccgctcattagtttttcatcaagtcgtttatttcttgtgcacattgctggagtggagactcggagatcgagatcaagactgtacgcatcataaaccgatcagtgtattcttagtgtattcttcgtagtagaaaataagcagcagcaggtatagctgctttacgc

SEQ ID NO: 40925 - DNA, 336 bp, Zea Mays
tgtggatagaggttgtccttagcctagctcgagaaaggatggcttctacctgcaagaatattttcatttggagcaatggtgggattttactgcaaagttccctgtgatgctcttttcatcctaaggaacagaaacaatcctaaggatggaaatacttaaattgagacttgggttaggaacaggtgatgttctacccaggttgattaaggattgaatgcgtatgtaggtgtgctgatcgaggaccctttaactagtcacatgcctcgtcatgggtaagccttgcctcgggcagactaagaccagaataagataacacgaaatgggcgtggagcggtg

SEQ ID NO: 40926 - DNA, 1092 bp, Zea Mays
cagtttcttaccgcatgggcagcctaatgtcatgaactttaaggatgctgccctaaatatcttcatcagagaagccaaagatgtgggcaaaacgacggtagctaactttatgccataccccttggataaagaagtacataactaggtagtcatacccatcagcttcttcatcaactttctttacctagagagtggcatagaactgagccactacttcattgtttcaggggtattccatagtcattatattttcaacctctttctctctaagttacggagagccgacgtcatgttagcatccccatattctcacacccctcctagtcaatgaaacgttgtctaacgactgggtgcttcttagacatgatgacataattataaaagtcagcctgaaaaaggttctagaactgagggtcctggacaccaggatgtctgggtgtgagagtgagatttgtgaaccttaagcgttgaagggagtccacccccttcaaagagaagtcgacctgaggttcatttggcccccgggaaacggtcgccagatgcatgtggagaccggtgatgaggggagcgtcggacgacggaggttcaacctcgtcgtcgaaagctccatcctcctcctagcagggagcgtatcctgcggaggaggtgcttcggcggggacgagtggcgccaacctttcgacgcccccgcgcgcaggttgcgagggcatcgaggatccctccccttccaatcggccagaacctcgtcctctcttggagagagaacgacgaggcggaggggaagaaatatgagattcttcctggatttcgtcagagtcactactgaactcgaccactgagggattgcggcgtcgcaccatcttgatgagtatctccgagaagatgagttccaagaggaaatagatgaaatgcgagtggttttagagagctcaagtggctggaaaaattgaaggcttgaatgtgtgagaaacttgtgaggtgaggagtggcctttaaataggcagttgggtcggtcagcccaagaccggttcaaccggtatggcgaccgattcaaccggtttcgaacagtgcgggcagccgagcagtgttggcg

SEQ ID NO: 40927 - DNA, 1757 bp, Zea Mays
tctccttgtcctcactcacctacccttctctatcaatcttccattgtccaccaccctcacgcctcgccctcccgtcccggcgacggcgaggccccctccgcctccgactcccgcgcgactgccccggaccccagtctcgcccttgtccaccgtcatggccgcacccgcggttgcctccccgagccgggcgacccccaccgacatccccaccgccgcgccctctcccgcctccccgccgcgccgccttgcgtcggcgccgcccgccgtcgacgcgtccgggtcctcctccccggcctccgcccattcgggggaccagctctccgcccccgacgcctcgagcccgctgctcgcgagcaggagcgaggagtacaggcttctgttccggctgccgcccgacgaggttctcgtgcaagattttaactgcgctgtccaagaaaatattcttcttcagggacatatgtatttatttcttcaccatatatgtttctactctaacatatttggatatgagacaaagttgctccaaatggcgtacagatgagcaagggggacttgtaagggatgtctcatttttgcatccaataaaaatttatcttggtgcaaaatttgggacttgtcaagaggttcagaaacttcgtctttacaaaaacaggcgtctagtcattcaaacctctcaatcaataggtgatgccccatatggggaccattttactgtagagggcatctgggatgttgaacaagatagcctagatgagaactgttgtgacctcaggatatacatcaatgtagccttctcaaagaaaacaatatttagagggaaaatagagcagtcaacaaaagatgaatgccgggaagttttcagtctctggattaagctcgtatgtctattctcatacttgaagatatttctcagtgctacttttcatctggagggtcatgatcttttgaagcaggagtatgatcgatcaaaaggcgcctccagcacacctgattctggtgttcaaccaggggctacaacaaacgaggaaagtgccgtggaagtagcagttccagtggcaagtattctggagactagatttggtcttcctgctggttcttgctcacctatttgtgaccatcatagttctactaacaagacccccccaggtccaaatggatcctcatgggatctggacgggcagttcagggtacagcaaagaaagcatagagtgggtgcagaagcgcctcagcttactaagcgaggagatgcagctcgcggaggcacacatggagacgatgaggcgcgagtttgcctggctcaggtcttacctggagagactgcagaggacgcggggcagcacatgacggcggcgcgtgtacatggcacaggggcacgagttcgctacgcgaattcggaggtgtatacaaatacaatacaatacaacccggaggtggtgttcagtgtttcttctgttgttacagatggtacagatgcaaacagagagaggtggattgttgtttgcagaggtatttgccgtaaggcagaactgcaagatcccggtatagcgttcgatgtaaatagctggagcttccccattgcgctggggtgatgtacaatgtcagggacgagtcactgcgatcacgctacggcggtgacgcgttatgttatttataaatttctgactgaattttaacttctaaaagctacccggtccgtccgcggtccgtccaaaaatgataaacagtactacctccgtttcacaataatgttcttttta

SEQ ID NO: 40928 - DNA, 425 bp, Zea Mays
ctcaattacaagtgagtttgatcgcaataaagaatcaagaaagaagaaagcaatccaagcgcccgagctcgaaagaacacaagcaaatctctctcactagtcactaaagctttgtgtggaatttggaagaggatttgatctcttgagtgtgtctagaattgaatgcctagctcttgtaagtggttggatgtgtgaaaacttggatgcaatgaatggtgggtggttggggtatttatagccccaaccaccaaactagccgtttggtggagctgactgtcgtatggtgcaccggacatgtccggtgcgccagccacgtcaccaaagccgatgggattcgaccgttggagcactgtcttctgggcccgcctggatgtccggtggcgcaccggacatgtactgtagagtgtccggtgcgccagcatggg

SEQ ID NO: 40929 - DNA, 243 bp, Zea Mays
ccatgttaaactagcaagctccgccatcgtcactcagctgctcgccccgcgtgtgctcgtcaattttcttggtcgtgtctgccgagctgaccaacgctttagctcgccgttatcgccaagtcccacgcagccgtgctgttctctcgtcgtcgtccattcctatttctttcttttctccccaccatatgccgcctcgtcatggcgcgtgtcatcgtctttaatttcagtagctcttccgatacg

SEQ ID NO: 40930 - DNA, 3622 bp, Zea Mays
caaaagtggaatgccgaaagggtttctccaaaaccctctccaacaaaatcgcaaccgccggcgaggatcggcgccgccatgtcccagatcctccgccaccgcctgtcggctcactaccacggagtctgcggccactgctgccgccgcctcagctccgccgtctacggcggcggcgggagtcgccgcgccgtcgccgcgccgccgcaggacggcgagggcagccgagcggtgagggtgtctgtgtggtgggacttcgagaactgccacatccccaacggcgtcaacgtccaccgcgttgccccgcgcgtttccgccgccctccgcgccgccggcatccgcgggccgctctccatcaccgccttcggggacgtgctgcagctcgcgcgctcctcccaggaggcgctcgccgccacgggcgtctccatctcccacgtcccaagcagtgggaagaatagttctgaccgctcttttatggctgatcttgtctactggattgctcagaatccgccaccagttcattttttccttatatctggcgatagagattttgcaaacatcttgcatcggttgagaatgagcaactacaatgtactgcttgcttgtcctagtagtgctaccagtgtactgtgcagtgcagcaacaatcatgtggccttgggaaggcttagttagaggagaggatttgtcaccaaaacgttttaacaacccgccggatggtttacatggatcttggtatggtcactaccgaggagcccttgacgacccccccctggagaaggaatcagaggaacccatcaaggtagcatctgttccgaagcagttttcagtaccatctaataccaagcactgcccagttcccaaacatgtaaaaaatgcaattctggaggtactacgttcatatcctgaaggggtgaacatctcactcctccgaaatcagcttgtaaagaacaaaattgatctgggtacaaatttctttggccacaagaaattctcttcctttcttgaatcaatgccacatgttgttaaattattaggttctcgattaggtgaaaacgaactatatgcaattgctgccaacaaaaaatttctgcagcctggtgatggggctcttgatgaccccttcctggagaagggagcagaggaacccatcaaggtatcatctgattcccagcattgttcagtaccatctgataccaagtctagttcaatccctaaatatgtaacagatgcaattctggaggcgctatgttcatatcctgaagggatcaacctttcactactccaggaagagcttgcgaagaaaaaaatttgtcttggtccagatttttttggccacaaggatttctcttgccttatacaatcaataccagatattgttgaattagtatgtcctcaaactggtggacaactatatgcaattgctgtcaacagaagatcactgcagcctggtgacggaagtactaagacccttagctcagctcaaggtaatgccagggagaataacccaactggaacagctcacagtaataagaagaatacactaagttctcttcgaagcatttacaagagcagaagcttcacagagacactaagtgaacatccacctacattttctgtcttaccttccccgtcaaatgggctatctgaggaccaaactgagtgcccagtggtggatgtgaatgggtcgacagagtcaccagcaaagcacagggaagttggtgaaatgactacccctggaactccctcttcctcaggggtggaaaatgctgctaatgaatatggcttctttaaaaggatctggacaatgtggaatggtcccaagaatgttaagtctgaggtttctcaaaattgtgaaagcacttctgctgaagtgattgatgatttgatacatgaaacctcttccaaaaatgatcgctcagatggtactgagggcatgttagcagtaagtgataatttatcgatttcattaggtgatgatcattctgaaaaaataaagagagatccatcaattcctgaaaacccagaaccatgcagaaaacctgctgctgtttccatgattaaatctggaaaaaaggatgatatttctgaaatgaataggggcatgtttaactgggcttcaaggtggtggccatttgggaaatcagatgcagatagtagtacaaccaacataaatgccactgatgaaccgaggactgactctattgaagaatttgaatcttcaaacgctccaactaatggaagtgcacaacaggtggttcatgaaatatttacaaagcctgacttgtggtctgttttggagcaacagttatcagaacctcttgggtctgaggttgttttgaaagcaaagacaaggcaggaattggcacacagattgcagaagttaaattgctggcctttgaaaggcctccttgataaagacctgcatcacctggtacatctgttaatttctgaaaagaaatggattgaagaaacttcttccagaattttccctttccgtcttaccctccctcgcaagagaagatgtgtcccatcaagttccagcaaatccaacggcctcagttacattttttcaagtgggaagccacaaaagggcagatacgttgacaataacagtaggaaaagcaggtccctcactagagaggagatactatcagattgtcacaagctggtgaaggagcttctttctgagcatgaatatggattcaacatcggaattttcaaacgccgtttttcccaggagtatggatacgagctcgaacaccggaagctcgggtatctggaccttgaaacgctgctgcatattatgcctgatgtaagggtgaaattcccaagggtcatgcgctcagaacacgggaacgggcaggctggcagcaagggagacggaaaccgaagcagcggcgatgacttgatctgggaggagcttggtcctgtatctgccacaactgaaaccgccgccgccgccgctgatgcaggggccgacaaggaaacatgctatcgtcctcccactccttcagacgacgagttctcggacagcgacagcataaaagaccggcagcctagaaggaacgccgagcagcagagctcgcttctccagatcattggagcttggaacagcagcaagggtggcgacgtctctagcaacaagcctcaggacatcgacgggttggtggactgttcgagaagcagcccgggcagtgctggcaccagcgcagcttcaggaaaggtgcagacgtcgtctccgaagctaccgcacaagcagtactccttcgtgtcggactccggagaggagagcgatccggataagctggtggagagcgtcttggacagcctgcagaaagcacggggcggctcgaagctgcacaactgagcgtctgctgccatcgaattattgtttttgcaacctaacgagtcgtgcttatggtggtggccatggctgactgtcaaggacagcggcgcctgcaagcatcagccggagagactggtgaataaagctcgtcttttacttggactaggccgtagtacaatcggaacagtccttggtaattggaataatcatgtttatatacaagtgacaggggtcatttttaaagggtgtgttctttggagagaagccatccagcctc

SEQ ID NO: 40931 - DNA, 1416 bp, Zea Mays
ccgaaggtcttgtaggaagaagcggctttcggatgaagctgtttgtatgggatggccgaaggttcctcttcatgaagcttcggtattacaaaccgacttaaagatagaatgaccttttagcccataagggtctgagtcaatgttgtaaacttttatgaggggcgtaattgtaattcttcacaggctgcgatctgtgcctataaatagtgaacagtattcctttactgttcacggactctggtgattgctgtcgcatctttcgggaaccaatctttgccaaggcagagcatttgagaacaagtccccaacatttaccaagcctctagatgagcggaccttttgcaagttgcgtagtgagctaaatgtcttagattcgcggaacttggattgatttatagcatacatatgtttatgcctttgatcatgatcattaatgcattttgttgtttatttatggtgctcaagttgtacaagcactccccggacctcacaagtcctttgcaagtgatgcacaaatttagggggagatgtgctacaacttgaccctttgagactaactgtgtgcttgagtttgcttaatttagtctcaaaggaggtttaaaagggaaaaggtggacttggaccatgcaagacttccactgcactccgatgaaagagtaactttttaccaagttcatatttgtactcatactgcctttttactcttagttgaagattttggtgaggcaatagggttaaagggccaaaattgatcccattttggtgcttgatgccaaagggggagaaaataaggccaaagcaagaaatggatcagctaccacttgagaatttttgaaaaagtagagttagagttaagtagagttagagttttgtttgtcaaaatactcttggttgcctcttattgtcaaaaattagtctcttgtggggcgaaggtttaattatgggaaaaagggggagtttttgaactctttgatcaatttctcttgaaatatctctctttatgtttcaacaagtgtgtttgacttagagataggaaattgaggttgatttgcaaaaacaaaccaagtggtggcaaagaatgatccatatatgtcaaatttgaatcaaaacaattttgagttcttattcgaagtgattttgcacttgttctacttgctttatgttgtgttggcataaatcaccaaaaagggggagattgaaagggaaatgtgcccttgggccatttctaagtattttggtgatttagtgtccaacacaagtgcctaagtgttaaaaggtggacaaagtacaaatcaagtataaaggtatgtttctcagacttagtacattgtttagagactaatgtattgtgtctaagtgctggaaacaggaaaaatcaagttgagattaaagatggctttgttcagccaaagtcaa

SEQ ID NO: 40932 - DNA, 753 bp, Zea Mays
ccttcccctaactccgccgccactgccgtccgcgctcgccgtcgccccgaacctatcgcccactgcatttttccggcggaggtatgcgatgaggctgctgcaagcggaggagctatttcggaaggttctggaggtcgggtcgaagaataaggcggctcggctgctggggctcgacgtcggcagcaagtacgtcggggtggccatctccgatgagaagaacagggtcgctatgcctctgagatttggtaaactgtgcgagtctgttacacccgaccttcatccgttttccctttgctcaatcaggctgggtcaagcagttaagtctgagaagattcgaatatcttcctttccttgtcccttgtgtacttgcctggagttttgcaataattgcctctgttgctgtcacaaatgttttgtgtcggacaaaaacaaacatcaacttgatggcagatgatttcaaaacattggtttcgatgtattccatagctgggttcgttgtgggctatccattcaaaatctatggtcaaccttgtgcaagtgcaatccaagtaagtcttgctggggaactttgtaaaacagggaaacttgatgatctgccctacgcatattgggatgaaaatttcacctcaaagtgtgtagaagccctcttgcatcccctgaatctaaaagacttggacgatgccaaaacaatgacagacaaatttgctgcagtctgtatactccagacatgagctgatgctgcgcatacatacc

SEQ ID NO: 40933 - DNA, 338 bp, Zea Mays
ttcacgatcataaaatcaatagcaaaaatagtaaatcggctcaccgttccaatagctgtctcgaatccacgagatcggtaatgattctctgatttaggaaatttgtcgagcgcttggcagatactatccgaacttcacgcaccccactatccaacctttaaacatcttctcctagggattcttttgtcagcgcgattctaactcggaggcatcacgaagggaccaacatcgagacgggtgaccgaacaacgacgacaagacaaaggttggagacaaccggatatcaacgacaagcactagagttttatgatgggctgttgtaatgggacgttgataca

SEQ ID NO: 40934 - DNA, 1193 bp, Zea Mays
cggagatgaccgtgaagcagtcgtacttgtacactccttgtctccttcgctttggcacactggacacgtccaccacgtgaacacgtcaacagaagtgacccatcaaggggcccacaggtccacgagcccgagtgacgactgacgacagatcgcttgtgcgtcgctaacccgccgctagtcggctagtgggtgggaaatccgcagattcccgtcgctacttcggccacatggctgcagcggcggcgtggaccggcgccgcatcccccaactcgctgctgctctcgcgctcgcctccccacgccgccgcgctcgcgccttcgccgggaagctccatgcggaggcggctcctcctcggcgtcggcaccccggccgtggcggcgctggcggccgcggcgccgccagcggtgctgcaggacggagcggtcactgtgctcatcaccgccggcgcctactctcttgtgcgcgtcttcgacgagctcaccgagcggcggctcatcgaaaagagcttgagcaggaaggttgtgcacgtgctatccggcgtcctgttcatgtcatcttggcccctgttcagaagcacggtatttcgccgcggttgtcccgttcctgaactccatgaggcttctgatatatggactccgtctctacactgatgaagctctggtaaaatcagtgacacgtgaaggaaaaccagaggaattgctgagaggtccactctattatgtcctggtgctgctgttcagcgttttagtcttctggcgtgagtcccccatcgggatcgtctccttgtcgatgatgagcggtggcgatggttttgctgacattgttgggaggaggtatggctcagcgaagctgccattcaatcggaagaagagctgggccgggagcatctcgatgttcatttctggtttcctgctgtccgcgatgatgatgctctacttctcaagcctgggttacattgatgttatctgggaagaggcacttggtaagctggcgcttgttgcactagcagcgacagtagtggagtgcgttcctgtgaccgaagttgtagatgacaacatatctgttcctttggccaccatgctgtacttgatggcgacggcctaacatctcccagtttttggtgtctccctccctgccttggctgttttggtggaaaagtattgttcgcttgtctaaagtgaatctctcactct

SEQ ID NO: 40935 - DNA, 331 bp, Zea Mays
ccccaaccaactcggagcaacttgctgaccgaaaccaccctaaaccatcctaaacgaactgcccccgaaatttttccctaaacttaccaaaaataaacctccactttcacttgcgcctccgagatattagggaacaaaccaccaaccatcaccattgttctatccatcgtcctaccattttcatcattttttgaactgaattcacatgttttgtgactggtgagattcgaacttacacacaacctctctctcgcgcaacttcctctaccactacaccactatatcacttgtgtctatattacgtttttcttccccatgtattataaaaaac

SEQ ID NO: 40936 - DNA, 2027 bp, Zea Mays
gcgcccgccgcgtgctcgccgaaacgcctctgtgcctccggcctccggcctccgcccctgacgcgatcatgctcggatcctgccttggggttctttcttgtctttcagttaccatccaatccccatggtgttttccaaaggagaaggttcacacatagtggaccccgaaggcaacaaatacattgattttctctctgcttattctgcagtcaatcagggtcattgccatccaaaagtcctgagagctttgatagaacaggcagaaaggcttacgctcagttctagagctttctacaatgataagttcccaatctttgcggaatatctgacaagcatgtttggatatgacatgatgttgccgatgaatactggtgctgaaggagttgaaactgctatcaagctggctaggaaatggggttatgagaagaaacatataccaaagaatgaggctttgcttgtctcttgctgtgggtgtttccatggtcgaactcttggtgtcatttccatgagctgtgacaacgatgcaactcgtggttttggtcctttggttcctggccatcttaaagttgattttggagatattgatgggttaaagaaaatcttcgaagagcttggagatcggatttgtggttttttatttgaacctatccaaggtgaagctggggtagtaatcccaccagatggctatttgaaaggtgccagagacttgtgttctaaacacaacgttttgatgattgctgatgagatccaaactggcatagctagaactggtaaaatgctggcatgtgactgggaaaacatacggcctgacatggtgattctaggcaaagcactcggtgctggagttgttccagtcagtgcagttcttgcagacaaggatgtcatgctgtgtatcagaccaggggaacatggaagtacattcggtgggaatccgttagctagcgctgtggcagttgcatcactgaaagtggtcagagacgaaggtcttgttgaaagggctgcaaagttaggacaggagtttagggaccagttacagaaggtccagcagaaattccctcaaatcctaagagaagtgcgcgggaggggtttgctgaacgcagtggatctaaacaacgacgcgctatctcctgcttctgcatatgacatctgcatcaagttgaaggagagaggcattttagcgaaacccacacatgacactataatccgacttgctcctcccctcacaatcagtcctgaggagcttgcagaagcatccaaggcgcttagtgacgtgctggagcatgacttgccacagctgcagctgcagaagcagataaaaaagccagaatctgaggcagagaagccagtctgtgacagatgcggccgggacttgtacggatgaatgaagcctccgaacagagataacttcattttcgtaggcacccatctcgccccagaagaaataataacagagcagaggatgccagctgcctagctacttgggttaccgtaatgttatgcgacttgttgcatcgtataccaagtatatgagctattgcaaccttggtgaatatgtcaaataaatggcagcattcacatgctcaaatatgggcagcattcacatgcactgtgacttctttgcaacgttttatcaagtatccgaaagttccaacaggaagttggtcaacaatcgataatcagagcaaagaaaaaaaatggatgatatgttcgatcacggtactgatgacatagtattcccttcaaaaaaacagaaacgataaaaacaagggagtattaatcggtcgagtaatatcgtatatcctctttccttggaaaccgtgatgccttgtttttttttccggttcttttcagaattttgatagggaaccaacaatgaccatattaccctcatgtaaacgaactgttgtaatcttacagttttgggataggatagtctttttatattaattatgaatataacaataacgacccatataaatatcccacaatctatattgttcacggatatgagaaattttattcaataa

SEQ ID NO: 40937 - DNA, 1629 bp, Zea Mays
aaatattgcttagtagacaatatttattactttacaaaaataggggaaggcctgggggtcggttctaaagaacggatgcccattccatagggtggtccggagcctgtgtggccggttagcctggttccgtacccaaaatcctgcacactccaccactccgtgacgggtgtcctagtatttaaaactatagtcctgtgtgtccaacaacctggaggtccggctctgaagaacgggcacttgtctcctggggggtccggaaaccgtgtagccgctcagcctggtcccgtaccgtgagcctgcatactccaccgccctgcggcaggtgtcttagtacttgaagccaccatccagggggtccgaacacacaacttggcttcccaggctaaaatcctgcatacatatgttattacattttgcttccaagcaaatacattcccttacaaacgggacccagctccatctctgcaggaatggaccacgctgcaccaataagagtcgcgctagaagctggctccgggctgcctcaccagcggcggcgaccacctctgcatcgacgaatcgccggcgacagcgaccacctctgcatcagcagcgacaacgacctctgctccgagcggtacgccagcagcagcgaccacctcagggtgagcgccggtgtgaaaggtcctcgtcccgtctccctaagggggcgacaacgaggccattaaagccaaagagtcagggactcagcggcaggtggccctaatagtctcggcagtggaggcaaccacctctgcaagcggcagccaccacctcagcaccgacgaccacggccacctccgcacaaaaggtcctcgctcctgtcctcccacggagtgaggactagaccatccaagaacgctgccgccactcccgcagcgtgcgacgtcttggacggtcccccgtatggctggcggcgcgggagaagccgtgggtgtggcagacccgcgcacggcgcgaccgtcgcccgtatggtggatggacagccacgccccgaccaaacggcaggaggcagcgtcggaggcggcgacagggccacctaggccaagagccagggcacgcggcagctgtcagcgcctgcacctggccggcctcacgtagccgaagttcgcctccttcttgtgggggcagaacccctctcctcccccgaatgctggaggaaaaagcgggccactggcccacgcgggaggtagaaccctggctcgacgcgccttccgccccagcgaggatgatgaacatccttgaagctgagggcaggagggaggccacagcccggtttgcttctccccaccacaaggctggtagtcatccttctggatgaccaccgacgggggactgcagccgggctgcatgatgaaaatccttgaagccgaatggtggtggaaggatgccaacccccattgggttgcacccctccaacggtggcaggaagaagacaagatcggcgacaccaccacgagcgcacgctctccgacagtgaagtcgccggaagagacgaccttgacgcggatccctccagagaacaccagcgcaccccatctgggggcccggaaggcgaaagggcgcggtggtcgtaagaggagcgaggcatgtctactgcccaggggatcg

SEQ ID NO: 40938 - DNA, 2096 bp, Zea Mays
cggggcgcgtccatccggtccggacacccgagtacccgacctgcttgctcatcgcgcgcacccgccaaagcaaccaaccgccccatcgtccccgtcctgttccggcaggcagccgctcccgctcccgctcccccaccccactccccctcgcgcggcgcgttctcagatcccccgcccggttggcaccggcaccccggtccgaaatgcgaggagccttgtagcgcctcggagcacggacggaatcgcgccgcatgcatcccaagcccgagggcggcggcgacgacgacggggccgccgcggaggtgggctccccgcggtccggctacttccggcagcggagcatgcacgccgccgccgccgccgcggatccggaggcggcgcgccggccgttccacgtcgagaacccgccttgctccgccggcggggggctgcggcccagcgagtccgtcaccaagctggagtcgctggagcgtgccgcgctggcgcccgccgtggtgctcaggaccgggttctacatcctggtgtgatataacaagacgctgctgggggataagctcggcaagttcccggcgccgctgctgatgaacaccgtgcacttcgcgctgcaggcggggctctccaagctcatcatctggttccagcccaaggggcccgaggccgccgtcgacatggggtggaaggactacttcatgagagtcgtgccaactgctctcgggacggccttggacataaacctgagcaacgcgtctctggtgttcatctcggtgacgtttgctactatgtgtaaatcagcctccccgatattcttgttgctctttgcttttgcatttaggttggagaatcctagcatcaagcttctaggaattatagttgttatttctactggagttctgttgacagtttccaaggagacggagtttgacttctggggcttcatttttgtgacgcttgctgctgttatgtcaggattccggtggtccatgactcagattctgttgcagaaagacaattacggcctgaagaatccgattaccttgatgagccatgttacaccagtgatggccatcgccactatgatactatctctattactggatccttggagtgaatttcaaaagaattcatattttgatagcccttggcatgtcatgcgcagttgcttacttatgcttatcggaggatccttagcttttttcatggtgttaacagagtatatacttatttcagcaacaagtgccataaccgtgacgatagctggggtagtaaaagaagctgtaaccattttggttgcggtattttatttccatgatgaatttacttggttgaaagggtttggtcttttcaccattatggttggtgttagcttgttcaattggtacaagtatgagagattcaaaaggggtcagataaatgaggatgacgtcagctctccatttactggtgacgtcaagtacattattatagacgacttggaatatcagaatgaatttgaggaagatacataattctgtaatacagtgaattctaactgccactggcttgttcatgcctgaacctattgaaatagtagttacttatcgaggttttctccggaaaacatgcacgaagaacacagctaaggctaggtgtgattatactatgcacaccaaaatctgatgtgagctatgtttgtcacgatggatgttcaattctcgtcttggttgaacagccaggctgactacactgtcaagcaaagagctaactccatcggatcagaattcccattttgagaagactagcagtgggttgcatattgatatacatgcttatagcgggaactgctgagaatgctccggcatctgtatatttgttgttctcttcgcgttagtgcgctgggcgcatattcattcttgaacctccacatttttagtgacgaggtgtattcattctctatataggtctgttttgtaaatgtgaccagaggataccatacacgtgctgttttcccttgaaacctagggagcggcatttgattttttctgtagactgtttcggggtaccgaatatgttgtggatatttgattgaagaattaagaacagcagggtagattggctaa

SEQ ID NO: 40939 - DNA, 2776 bp, Zea Mays
gtttggtccataactcattctagaatttcattatcagctaaatagctcctagattttgtattggtttttgccagaatttcacaatctcaaaataggttgataatagaattcgtttgaattttgcgtagtatccaactcctcaaaatatatgggaaccaaacaccagattatttgtcatttgcgacaggtagcttggatccataccgtcaatcgcatcagatcgtgaatccctttcctcctaccgcgctagggttttgcaacggcctcaatggcgtccaccgccgccactgtcacgtttggcggcaagggcgccgccctatcgccggccgccgtctacgcgctctccatcggcctcgccgccccgggcatcgacccttcggcgcacaaggcgctctccacccgcgcgccctcgccacaggagacccccgcgccccttgccgccgcgctcccggcgctggcgcccgccgagtcccgcgccgccgcggccgtgttgctgaacaagctggtcctcactgcgtccgactctgcctccgcgctcgtcaccgccgccacggccgtcggcctcgcaggctcgctcgacctcgccgccgcgctgccgctcggctcccgggacgaggtcgcggtggcagcggcttccgcgcctgtcgcggtcgggctcgcagcgctggtcgactgctgcgccgcgccgctcgcccgcgttgccgacgccgtcgccgcgctgtcgtgcgaagccgtgcgcggggacgccgcggccttcgacgtgcaggcctccggcgacgggctctcctccaaggacgaggccgacgtcgctgccgacatcaaggtgctcgtcttcgggtccaagcttgtcggcgctgccgggggcgcccccgccgccgccacgttcgccaaggtgcccgcgctgaacgggatcttccgccaggcggttcgggcgctgcacgcccaagtgcgcatcgagctcaacgcgcctgtgaaattggggaagaaggatgccggtcaaaccgatgctgtgtcagtcttgaagggggtgtacaaccacttgctcaagttcagggactttctctcctgggaagcagctatggccatggcagtaattgaaacagacagttcaattgagaagccgcaatctgctgttgacaacgaagcagctggttcaagtgaaaaggcacaggctggtggggacaaagcaaagggtgacaagaagagcaagaagaagaaaactttggggaagggtacatctgctgtgctgatgctgcttagggaccatgtgacaaatggaagtactgttgcttccgtgaattctgtgcttgttgcagagtgggcagcctctctctcattgctctttgatcctaaatgtcccggattggtgtcccttgtggagaaagtgaaggagattgttgagagcaatgaagtcaggagattgcctaaaattcctaagggtacacgtgactttgggaaagagcaaatggcgataagagagcgagcattttcaattataactagtgtattcaagatgcacggtgctactgcacttgatacccctgtatttgagctgagagaaacccttatgggaaaatatggtgaagactcaaaattgatatatgacctggctgatcagcataagcgcactgaagagataccagattgcaaaagtatataggagagataatccatcaaagggaaggcacgtatgagataaaattaaatcacagaaagttgctggatggaatgttggagatttgtggtgtgcctcctcaaaagttcagaaccgtttgctcgagtattgacaagctggacaagcaaacattcgaacaggtgaagaaagaactggtggatgagaaaggtatatcaaatgaaactgcagatgaaattggcaatttagtgaagactagaggagcccccttggaagttttgatggagttgagaaaggatagcagcaagtttatgaataatgaagggtctgttgctgcactgaatgagctggagatattattcaaggctctggataaagcaaatgcaatagacaagatagtttttgatttaagtttggccagggggcttgattactacactggtgttatatatgaagccgtttttaagggttcagctcaggttggctccattgcagctggtggtcggtacgacaaccttgtgggtatgttcagcgggaagcaaatccccgctgttggtgtgagccttggaattgagagagtctttgcaatcatggagcaacaggagaaagaaagaaatgagaagatccggcctacagagacacaggtgctggtgtcaatcctgggaaaggaccttacactagctgcagagctcgcgagcgagctgtggaatgctgggttaaaggcagaattcaagctcactactagggtggcgaaccacatcaagtatgccttgcaatcaggcattccgtggatggtgctagtcggtgagtctgagttgcagaagggaagtgttaaattgaaggatgttgaagccaaccaggaagaagaggttgataggaaggattttgttcaagagctgaagaagagattgagtaaacccaacattcatttgaggcaaaatcaattacggcagaggcggagaatgatactgcagcattgtagtttaaagtgctggggatgtttttgttagattacccgtctagggtttggtgtcttccccatgtaattaccttctcacccctttgtaatggaccagccccaattacctaagtctattaataccacacccaaccctgattagggttagggtttttattccaact

SEQ ID NO: 40940 - DNA, 1885 bp, Zea Mays
cacacacagcacagcaccgcaccgcacaaccgtataggtcggccggccggccatccatccatccatccatcctcttgtagtacatgtctagctgggtctccatcgatccgtcgtctgtgtgtgtgtggcgtgtgcgtgggtgtagttagggctggtggtcttgtactagtcgtcctcctcctctcctgctgcgtgcggctataaagaagctaggctgcggggaggggaggtaaatgacacaagcggcaggccgccgtcgatcgatggggggagcatccggaggcgaccacccgcagcagcacggcggcggcgacgatgggcacctgcagcaaggcggcggaggcgacatggtgatgccggggttccggttccaccccacggaggaggagctcatcgacttctacctccgccgtagggtggagggcaagcgtttcaacatcgagctcatcaacctcgtcgacctctaccgctacgacccatgggatctccctggtaaccataagccgccgctgccgctaagcatgtgaaccactgctagctagctcctgctcataaggggatctgctggcatatgtgatttcatgcatgtgactttgttttcttttggtttccatctcgtgtgagcctttatatctagcctgctttttgctctcttgctttacttttcgtgcatgcgatgatggtggcggtggtgtcatggatggacgatgctcaccatctcacgctcttcataatacgaacaaccacgaacagctctggcttcgatcggggacaaggagtggtacttctacgtgccgagagaccgcaagtaccgcaacggcgaccgccccaaccgggtcacgccgtccggctactggaaggccacgggcgccgaccgcacggtctacgtcgaggtcaagcggccgatcgggctcaagaagacgctggtgttctacgtggggaaggcgcccaagggactcaggagcagctggatcatgaacgagtaccgccttccttcaggcgaggccgaccgctaccaaaaggaaatttctctttgcaaagtgtacaaacgaccagggattgaagacaactttcacctcagcaccaccacagcaagatcatctggctcaaaggctgcagcaaccatggaaaagaagcaccaccgaacatcggcgtcgccccgcatggcgccagtgttcgacggtggccactcatcaggttacatgaacaagccatacagtggagcaaacaccaccatgctgggcatggcatcatcagccgcagctcgagcagctacactggcaccacagacgtcaatgttcctatcaaccccctcacttagctccaccacgtcgacagaggaggacggtacatcactctaccacatgaagggtgttaacccaccaatgctgccttcttccacacacgccctgcttaatgcaaactccgctacaatggcaacaattccaatagatgagctgagtagggcaattggatgccaaggagaccctaaccagaccttgccaacacaagctccattgcttccttttcctaacttggaaaagatttgggattggaatccactcctagaatctcccaaggtttgcacaagcttcaagtgactttcaagtggctcgaagcatatatgtgcatgcttgcatgcgtgcacctattatttatgaatacaagtgtgtatatgtgcagacacataattattatttgggctagaatgtggttgagatgtaatggaatatataggatgagatagttctagtcctatctaatgctccactatattaatcaattcaccatcacaaatatgtactatgttgcagtgatcatttgaacttaatttattgctcccaaccactagcattattttacatatttcatgtttacatgaaat

SEQ ID NO: 40941 - DNA, 1542 bp, Zea Mays
cggctgcttgtcccgctctgcacttgatttccaccgcgataaaggttcgcttagtatcaatccaggctctgatttggtggctgaagctctgtttctccatggcgcttcgtttcgagatattaggaagattcaatcgcgcccgcgcagctcgcttaactcttcccccactttacttgtcaaacaccactttttatgcctgttggaactcaaggtttcgttgctgcatttggctgatattactgaggaaggagttacgtttcagtcacctgttgatgggaagcccatgctcttgacacctgaggaatctattcatattcagaacaatattggagctgatatcatcatggcacttgatgatgttgtaaagaccacaattactggcccgaggataaaagaagctatgtatcgcaccattcgttggattgacaggtgcatagctgaatttatttgggattgtgcaaggaggattggatcctgttcttagagatatctgtgttaggagcttggttgagcggaatcttcctggatatgcaattggtggtcttgctggtggcgaagacaaggattcattttggcgtgttgttgcccaatgcactgctggattgcctgaaaataaaccacgatatgtcatgggtgttggctatccacttgatattgtagtatgcagtgctttaggtgcagatatgtatgactgtgtttatccaacacggactgctcgttttgggactgcacttgtgcctgagggtgtcctaaagttgaaacataattcaatggcgactgatgaacggccaattgatcatacgtgttcatgcatggtctgcaaaaaatatacgcgcgcctacttacattgcctggtcacaaaagatgctatgggttctcagctgctgtcatatcataacttatcatttatgatgcggttaagtagagacctccacatgtctattcttgaaggacgatttccagaattcgtgcgaggattcttgagggtgcagtttccaacgggagacgttccgcagtgggttcgcaacgcgatggaggtcgctggcattgacatatccgagtgctgtgcttccaccaatgtctgacaccaagcgtataggggccacctttaactgtaccggttgactgcaaatggagttgtgccgagttaagactcttcggcaagcaaaagacgacgacaggctttcacaaagaagtttttttccgtcatacatgtagggtctcacacggattcagcataggattttccaatagtatgctgaagcttggcgacaggttttgttagtgttttgtgttgtgtttggaaaccgcagaggtatgctatgctattcttctggggtctaggttatgcttcgtcttaatcactggatgtgatttttagtggtacggtcagatcaaaggaaggtgtacccaactctgacgaatattttttgttataacgaaaagaatgttatagtccttgcaatgatctgaacctgactggctgactgggtctgcagcatgcagcagctggaacagtccagtcccggcgtgctgctgctg

SEQ ID NO: 40942 - DNA, 254 bp, Zea Mays
tctaacccagggaccactacagaggtgttgggatccttgtgttcctgctgagattaactctcctcagcccctgggtttgtcttgttccagaaccctgcatgccatcccctgggtggtgaccaccagcagcagtttgtccacctcgccgtgaccagaacacctagacgaggtcgtatttgaagaagtctactccagtgcctgctcctcaagtggatgaagccagctaacttggtattggatagagggatttagag

SEQ ID NO: 40943 - DNA, 2911 bp, Zea Mays
ccgcctcccatcgccgcatcagatatccgcacaaaccaagccatcagcgccatggcgatctccacctggagcgcgcgccttctcctcacccctgcttcctcccgcgccaccctatcaccccctcgccctcccactacaaacccgctctcatcgttctttcctcgcaatcgtctccatttcgtgcgcccgcgcccgcgcccgccgtgcgcctacatctctgcgccagcgccgggcccggaggccgcatacgcgccgccttctctcgacgccaccgccgcggcagccgatgtcgccgctgcgatatcctcctccgacgcggtcacttgggccggcgtctgggcgctgctctcgcgacacagggcccgcatcgcggtctgcatcgccgcgctcgtcgcctgcaccacctgcacgctctccatgccgctcttctcagggaggtttttcgagaccctgattgggagggggaacgagccattgtggaggctcttatccaagattgcgatactgtacacactggagcccatcttcaccatcatattcgtgatcaatataactatcatctgggagcaggttatggcaaggctgcggagccagatatttcgaaggattctgatccaaaagatgttattttttgatcgtcacaaggttggtgaattgaccggtttgttgacatctgatttgggttccttgaagagtgttgtaagtgataacatatccagagatcgtggactgagggcactctctgaggcaagaaattttacactatgagaatatcattggtacactttgtatacttttcacactatcaactgagctagctccagttcttgggctccttatggtgtccgtctccgtgctagttgctattttcaagaggtcaactgttcccacttttaaatcttatggaatcgtgcaagcacgcatatcagactgtgcatcagagacattttcagctattcgtactgttcgatcatttggtggtgaaaaacgacaaatttctttgtttgacaatttggcacatgcttaccaaaataatggcacaaaacttggagtgctgaaatctgctaatgaatcattaactcgagtagtcgtctatgtctccctaatggcactttacattcttggcggtagaaaggtcaatgcgggcaaattatctgttggaaccatggtatcttttattggttacaccttcacattaacctttgctgttcaaggagctgttaatacccttggtgatctgcgtggcacattggcttccgtagagagaataaattctattctttcagcgaaggacattgatgattcacttgcatatggtttagccaaagaacttgatggcaaagagtttgatgattccaatggagtgtatgaaaatggatctgttaacaaacatttcatgtcagagctgaaatcatccagtagctgtagtaatctagcctggtctggtgacattcgtctgaaaggtcatattattattacatctggtctggtgacatttgtctttacatctagggtgcccttatatctaagcttatactatatttcaccttttgtatgctttatatattattactatatagcgtattgttccttagcttatgggtcatgattgaatatcctcgtaacttaaaattgtgtcattagctcatcttttctaaaatattgtttcaccttctttatctaaaaacatacttaagatgaaatatgttcacacatcaaatttgtgaatagtactggtaactcaccagtgtatcattacctcgatagaacattatttcttttgattgtttttgtaatgtcgatagaacatgcaacattcaacctctaatgcactaacataacattcttggatgacttcagttctacttgctcatgtagtcatgtgtttctgacagaagtccatttctcttatccattgagatctaatgtggagattttaaatggccttgaccttacaattgagtgtggaaaagtcacagcacttgtcgggcctagtggtgctgggaaaagcacagtggtacaacttctagcacggtattatgagccaactcaaggttccatcactgtcgcaggagaagacatccgtgtatttgacaaaagggaatggtctcgagtagtatctctagtcaatcaggatccggtcctattctccgtgtctgttggagaaaatattgcttatggtctcccagatgatgttgtctctaaggatgagataataaaagctgctaaagctgccaatgctcatgaattcatcatctctcttccacaggggtatgatactcttgttggagagcgaggtagtctcctaagtgggggacaaaggcagaggattgcaattgcacgagccctcttgaaaaatgctcctattctaatacttgatgaggctactagtgcactggacgcgacaagtgagcgactcgtgcaggaagctctcaatcacttgatgaagggaaggacttctctggtcattgctcacaggttgagtaccgtacagaatgcacatcgaattgctgtttgttcagagggcaggataactgaactggggacacaccgagaactggttgctaagggaggcagttatgcatcacttgtcgggacacagagacttgctttcgagtaatcacacgtcaactgcgaggaacggatcgactgcaatgtaggggattctatatattactctattttccttcagggcccatcggaacataggaattctcgtggaaatcagaatgaatttcatgggtaaaatatagaaaacagaagatgaaaaaaaacccaccttctgaatgtggccttggttataggttgtttcttatccacagaagcaacacatgaatcagaaaacacatgtatgtatcgaactttataatatattaacctaaacaaaggacaacaaacttcttatcctcac

SEQ ID NO: 40944 - DNA, 3299 bp, Zea Mays
cgattgcatcgacaccacaccttgcttgaatctgcacatcaccttccgtggatataaacgagatgtcaatttcgatgtgaccgagggagatgtgtttgtgtgtgtgtgtgtttttcttttcattttggttcttggccggctcttcatcgcccttttccacttggtttttgttggctctgttgtgtttgtgcttccctttcctcgcgaccgcgactcggatcggatctctctcctgtgtagagccatgctgtgctgtgctggtagtagcagcagcagtagcaatgagtagtccagtccacagctccaagaacacgtggccgtcctttccttgcctctccctatcggtattcggtaacgcagggggagggcgccaccggctttaaccatggcctgtcgcttttgcctcgtctggtcggctggtccctctgctctatcccatcccccttgagcaggcttagattcttcactgctcggggatttggaacaaaggccgtggttcgaagctggtgtgttcgttcaattgtgcggaaagaaaggccagtgttatgtgtgaagtagtgaaggctagcaggtaggctggctctcgcctcgccgagcgatggatctcgagttcggtaggggcctgaggtccccaaaggccgtctggggttcttcttcttgcagagagactcgtggaagaccaccttgctgctggcgtaccagagcctgggggtggtctacggcgacctcagcatctctccgctgtacgtgtacaagagcaccttcgccgaggacatccagcattcggagacgaacgaggagatcttcggcgtgctctccttcgtcttctggacgctcaccctcatccctctcgtcaagtatgtctccgttgtcctgcgagctgacgacaatggcgagggaggaacgtttgccctctactctctgatttgcaggcacgccaatgtgagcctcctcccgaaccggcagatcgccgatgaggagctttccacctacaagctggaatgccctcctgaaatcaccgacaagtcccgcatcaaggtgtggcttgagcggcacaggaagctgcgcgtcgctctgctggtcatggttatgatcgggacatgcatggttatcggggacggtgttctcacgccagctatatccgtgttctcggcagtttcaggcctggagttctcgctgtccaaggatcaccgtgaatatgctgtcattccaataacctgtgtcatattagcattcctatttgccctccagcactatggtacgcaccgggttggatttctgttcgccccgatagttctagcctggctgttctgcatgagtgctcttggcctttataatatcatccactggaatcctcagatctaccaagctctaaatccgtcttacatgttcaagttcttaaaaaagactagaaaatatggatggatgtcacttggtggaatcttgctctgcatgacaggatcagaagcaatgtttgcagatcttggacatttctcatacagtgcaatccagcttgctttcacttgtctagtttaccccgcactgattttggcatacatgggtcaagctgcttacttatcaaaacatcatgacttttactctagctcacaagttggattttacatcgcagttccagataagatcagatggccagtgcttatattggcaattttggcttcggtggtcggaagccaagcaatcatcagcggaacattctcaatcatcaaccagagcctgtccctgagctgcttccctcgagtgaaagttgtacacacatctgagaaaattcatggccaaatatacatccccgagatcaattggttgcttatgatcctctgcattgctgtgaccgttgggtttagagatacaaaacacatgggaaatgcatctggtttggctgtgatcacagtgatgctggtgaccacgttcctgacatccttggtcatcgttctctgctggcacaggccaccgctgctggcgttggctttcctcctgttctttggatccatcgaggcgctttacttctccgcgtccctgatcaagttcctggaaggcgcgtggctccccatcctcctggcgctcatcctgatggccgtcatgctcatctggcactacacgaccatcaagaagtacgagttcgacctgcacaacaaggtgaccctggagtggctcctcgccctcggggacaggctgggcatggtccgcgtccccggcatcggcctcgtgtacacagacctgacgtcgggcgtcccggccaacttctcccggttcgtgaccaacctcccggcgttccaccaggtgctggtgttcgtgtgcgtcaagtcggtgccagtgccgtacgtattcccggcggagcggtacctcatcgggcgtgtcggcccgccgggccaccgctcgtaccggtgcatcgtgcgctacggctaccgcgacgtgcaccaggacgtggactcgttcgagacggagctcgtggagaccctggccacgttcataacgctggacgcctcgtaccgctgcagcgaggccagcgagcgggagctggagctggatcccggggagcaggagcggcggctgaccgtgatcgcgagcaacccgctgcggcgccgcgccagctacgacctccaggacagcgtgcagcattcggcagcgtccaccgtggaggtgcgcgccacggccgccgacagccttagccccagggacgcggagatcagctcggcggcggggccgaagcaggtgcggttcttcatcgacagccacgtggtgagcccggaggccgcggagaacaagcaggttgcggatgagctggaggcgctggcggcggcccgggaggccggcactgcgttcatcctggggcactcgcacgtgcagtgcaagcccgggtcgtcggtgctcaagcggttggcggtggacgtcgggtacaacttcctgcggcgcaactgccgcggcccggacgtcgcgctgcgcgtgccgccggcgtcactgctggaggtcggcatggtgtacgtgctttgattgaggctgagacgatgcgactttttcttatgaacatctgatatagtaatcacgactgttgtcagttttcccagtaacataatgaggccgttctgtatagcttagcttgttcgtacttctacagctgcaatatatagagtcaaaatactgtagaattagtaggagtcggtaacgaactctgtgtgcacgtctgtgcgtgagcgtgtgcgtttcaggcccagtttggttttgcttttggacagcatcagtctgtgcgttttaggcccagtttggttttgcttttggacagc

SEQ ID NO: 40945 - DNA, 1098 bp, Zea Mays
taaaaaggtaaaacaaattttaatttgggacggagggagtatatattttgaaacgagatacctctgcttatattgaaatgagatacctctgcttatattaaaacgagataccatcttaataaattgtattatttattgagtctatgtggctgtatctagggtgcttccagaagatgattctcccaatttatagtactggactactggagctcgctggctatattattaatgtttgggcatgaatatgtcgcagcatgtaatgaagcaagtaaatttttgcttgttcagttttatgatccgctgcttgtgtacttactctattcaggagaagtacgagggagctatggcttcacttgctcaaatggagaacagagcagttatggcagaaactatgttagaggcaaccattcagtaccaatctagtcagcagaaagcacagcttccatcgccctctccttctccaaggaccccaactcgagatgcatcaccaggccaagggaaccaagattcatcgcaggagttccagcctagaagaataagcttgcttgccccattttcttccctcggatggcgagacaagaacaagaacggctctgatgagtcaacaaacggtaagctcaataatagcaccgatcaaggggttgaaacacccaaaaaggacgacgaaaagaaggccgactcgccaaaagagagtgaacagattgtccgaacaccggaaagagacaatgaactgagactagggacacccaagatggatagtgaggtaccaagtgtggaaatggcggcaaacagtacgaatgggctggaggaccagttggaggagataaaattggattgatatcctttggctggtcgctaagccgcaacataaggtgccattaaattatgtattggtgtatccatcttccacctctattcttttaggtttatagattcttgtataacttgaggagagagaatgaataaactatgtttgccctcttataggtctgttgatcgcctgtaagctatcataagtacacatgaaaaagacgtaccaaatagaagattaccacgaaagcaatttttggaacagatcgcgccctaccgttgtcctgg

SEQ ID NO: 40946 - DNA, 1380 bp, Zea Mays
ctggctcacaggtcacctcgcccgccgcaccaagaacttgcgcagttaacttcacagccgctcaattttacagcgcagagcaggaagcatcagctgcacgcctctcgccttgcttgccgccttcgctcctctcttccctagctcgtgctagcccttcttggcaagaaacggtttgctatggccgttcttgcgctcaggcttggtttcgtggctccgcctcatcctaggaccagcagcggcaggttcgccttctcccccccgtcctcccgcgccgtcgccaacgcgggggtagctgcaggaccctcgcgcccgatcaccgtcgacggggacccgcccaccgtcgtctccgcgcccggccgccgcattgtcgccattggcgatgcccacggtgacctctcccagacgagagccgcgctggtgctcgccggcgtcctgagcacggaatcagagggccacgtgtggacaggcggacgcacgatacttgttcaagttggtgacatccttgatcgtggtgaagatgaaattgccatactctcactgttgagctcactcaacatgcaagccaaatctcaaggcggtgctgtattccagttgaatatgggattgagcgtatgaacagggaggtatcaatgtggatgaaatgttcaggcgaagacagtggtgacgagacagacatccccttcatagctactagaggttatgacagcgtcgtgtggagtcgaatgtactcgcaagaccctgccgaaagaacacgacgcgctttgatgctatcttctattgctgctgaacaaacgctagaagctgtaggagccaaagggatggttgtagggcacacaccacagacgcatggggtgacctgtaaatgtgatggcaaagtctggtgcgtggatgtgggcatgtcctgtggtgttctttgctcaaggccagaggtcctagaaatagtcaatgacagaccaagggttttgaaggagcggagagaattatatgatgagatggaagtgttggactatttgtaaaaccttgagaaacttatgtacataatagaaaacattaattgtcctgagaatcatcgtttcagacaatttgagtgggaatactgtacgcaacatgctacagagagagagatataatcagaaggaaggttttttcactatggttaccgtttgtctgaaaccagatgcaaacatagatcaaaagcccaaaggcgctttatttgccatggtagaccaaagttttagtggtgcttatttgtatcagcattcaaacattgactctagccttattaagagctgtgggcatcaggaaccgtgcaagttgtagaatgagatggagaacaaatgaatatgctgagctctcatgtaaattaggtatcttcctttc

SEQ ID NO: 40947 - DNA, 4864 bp, Zea Mays
catcggggacgtgccaattcttaggaaggtccctggtgtcttggagctctaagaaacaaactttcgttgccctatccaccactgaggtcgagtacgttgccgcatgacagtgttgcgcgcaactactttggatgaggcaaaccctcagggactttggctacaatctgagcaaagtcccactcctatgtgataatgagagtgctatccgaatgacagataatcctgttgaacacagccgcacaaagcacattgacatccggcatcactttttgagagaccaccagcaaaagggagatatcgaagtgtttcatgttagctccgagaactagctagccgatatctttactgttgggactatgcttcgtcgccgaaggtcttgtaggaagaagcggctttcggatgaagctgtttgtatgggatggccgaaggttcctcttcatgaagcttcggtattacaaaccgacttaaagatagaatgaccttttagcccataagggtctgagtcaatgttgtaaacttttatgaggggcgtaattataattcttcacaggctgcgacctatgcctataaatagtgaacagtattcctttactgttcacggactctggtgattgctgtcgcatctttcgggaaccaatctttgccaaggcagagcatttgagaacaagtccccaacattggcgcacacctccggtgaactcacttccacttttttgagctgatggctttgttcaacgatcaagctggagctgcttcggacccgaagctggtgcttccgattacaggtggttcgtgctcagaaccagccaataaaaagcagaagaaagaggcgcagagaagggtacaacatgttggagtgcaaggaccctttatcaagtcaaggtggtcccacatcccaatcaccttctcccaggaggaccttcagctcaaggattttcctcataacgatgctatggttatttcttgcgttatcaaagggtttctggtccacaatgtcttggttgatacatgcagtgcagctaatatcatatttgctaaggccttcagacaaatgcaagagccagaagataagattcatgatgctacacatcctctctgtggcttcggaggaagacagattgtagcactgggcaagatcaccatgtcagtgaccttcgggttcatcaacaacactagaactgagcaagttgtgtttgacattgttgacatggaatacccttacaatgcaattattggtcgtggcaccctcaatgctttcgaagcaattcttcatcctgcttatctttgcatgaagataccttcggatcaaggacccatcgctattcatggaagtcaggaagctgccagaagggccgaaggaaactggactgactcaaaaccaatccataacatagatggagctgaagcttgtgaacagtacaaattcagaagggagaaagcagcttcagcagatcagccgaagcccatgctcttatgtgaggacatagcagagcagaaggtgctgttgggctctcaattatccgaagaacaggagaaaaccttgataaggtttttgttcaacaacaaagatgtttttgcatggtcagccaatgatctctgcggagttaatagggatgttattgaacactcgctcaatgttgacccatccttcagacccagaaagcagaggcttcggaaaatgtctgatgataaggccgaaggtgcttgtaatgaagtcaaaagactcctcagtgcaggagttatcacagaagtaaagtacccagaatggctggctaacactgttatggtaaaaaaggccaatggcaagtggcgaatgtgtatcgattttacagatctcaacaaggcttgtccgaaggacgaattcccattaccaaggatagactctttggttgatgcagcagcttcttcagagctcatgagtctgctagactgttactcaggctaccaccaaatctggatgaagaaggaagatgagtcgaagactagcttcataaccccaagtggcacatattgctatcttcggatgcctgaggggctcaaaaacgctggaggaagtttcagcagaatgactgcgaaggttctccagtctcagataggcagaaatgtgctaacttatgttgatgacatcattgtaaaaagcacgaaacagaaaaatcatattgttgatttgcaggagaccttcgccagtttcagacaagctggtttaaagttgaatccagaaaaatgtgttttcggagtaaagaaggggaaatttcttggatgcttggtttcaacaaagggaattgaagctaatccaagtaaaattgaagctatacttcaaatggagccaccaactacaaaaaagggggcccaaagattaacagggaggttggcatctcttaatagatttatatccagatcagcagaaagaaatttatcattcttcgaagtgctgaaatcagccgaagtctttcaatggggaccaagccaacaaaaaaccttcgaggaactgaagcaatatctgatagatttaacaacattaactccaccaacgccaggggctcctttgttattatatgtggcagcttcgcactcagcggtaagtgcagcacttgtccaggagaagcttgatggccaagtcaagaagcaggtcccagtgtattttgtatctgaagttcttagtatatcaaagaaaaactatacagaattagagaaggtgttatatgctgttttgatggcatccaggaagcttcggcattactttcaagcatacaatattgttgttccttcttcgcagccgttgaaggatattatgagaaatagagaagctactgggcggattggaaaatgggctgcagagctcaatgaattttgcattgattatgtgcatagatcttcgatccagtcccaggcattagcagacttcattgctgactggacgccaggggctcaggatgaagaaacaaataaagatgccgaagtatggacagtgttttgcgatgggtcttggggaaccttcggggcaggagcagctgctgtgttggtctcgccatccaaagttaaaacttgttatgcagcaagactcgatttcagttgtacaaacaatattactgagtacgaagccctgcttttgggtcttcggaagctaaaagcaatgggaatcagaagggccattcttaaaactgattcccaggttgtttcgggtcatatcgacaagagttgcaaggctaaagatccgaagcttgaaaaatatctggacatggttcgaagagtcgaagcttccttcgaaggattttctgtcaaaaatatccctcgaggacaaaatgagcatgctgatttgctagctaagtcagcagcgcaggggctgcccttacctttggatgtgttcttcgaaacaataaaagcaccttcggtggaacttcttgaaagagcagtcctcaatatatctcctgtttatagcgaagattggagaactgagatcatctcttaccttcagggtaaattcctttcagatgacgaaacttataacaggaggatagaggcaagagctcgtccatatgtcatgatagaaggggagttgtacaagcatggaatttgtgctccgttactcaagtgtttatctagaaccgaaaggcatagagttgatgaaagaaattacatgcaggcctgtgtggatctcacattggatctaggccattacttggaacagttttccgtcaagggttttattggccgaaggcagcttcggatgcaacggaattagttcaaaagtgcgaaggttgtcagaaatgtgcaagagatcaaaaacaacctttgtccttaacacagctcatacaacccatctggccattgcaaaggtggggccttgacttgttaggtccattaccaccggcccaagggaacttaagatatgttgtagtggctgtggaatatttttccaaatggattgaggcaaagcctttagccacaataacttcggccaccattcaaaagtttttctggtagaatattgtttgtcgtttcggggtaccaaaggccatcactgtggataatggaacatagttcgactccgaagctttcagagatttctgtgatcaaattggtacgaagattcattttgcatcagtcaggcatccggagtcaaatgggctcgttgaaagagccaatggcattataatgataggaataatgaaattaatcttcaatcaacccaggggaaagtggccagatcagctaaccaaagtggtgtggagccacaacacaacaacatcaaggtctacaggctttactccattcaagttattattcggtgacgaagcaataactccggaggaagctaaaactggatcaataagagtagtagcttcggcagaatcaggttctgaagatgcttattctgtggaaaaagatgctttagaagggatcaggcttcaagctgtggagaatatcaataaatatcaagccgaaacaatcaaatggcgagatagaaaagttcggctaaagaatattgagccaggacatttggtgcttcggagagtggccaacccagacacagtgggcaagttgcagttgaaatgggagggacctttcttagtagcatcttcgccaagacccggttgatacagattgaaggatatggacggcaatgacattcctagatcttggaatgcggatgagcttcgacgatattatgtgtaacttgatgtaactttttatgttttttctttttcatggcacccttttcctttctaaagggggagaaaggtttttaatggggccatcatatgtaatttccttttttagttctataagagcaaaatcccccaaggaatgtaaatgtaaaagctgagaacgcaccatcgagtgccgaaaagtaaaaagcgaa

SEQ ID NO: 40948 - DNA, 1629 bp, Zea Mays
gttctctcgttcctctcctttcctaccgcacccgtctcctggcgcacctcgcccttgccccaccccggatctcagcctccagtcctcgctgctgctgctccagcgccacgaattgctcgcctcgtctccctctcccttcgaccccgcctcgtcgtggtcgtggtgaccaaggaacccaagctcggtggtggcggatcgggggccggcgacggcgacgacccgagggaagaagtctcagtcgccaccccttcctcgcagctcacgccgctgcacctggccgcgagcccgcgacactagcggaggacaagcgcgacatcctacggtaggccatcacaggggcgttgggggacgacggagtggctcgggacttgttcgagcacgcgttgagcaacgcgccggagaagcttccattgcagtcctcgccgtcaaaatccgtccgggtgtccacgacactggtcgaggtcctgcgccgcgcgcagtccacgcagaaaaagcgcacgaacgctgctcgatctgctccaggactcacagatctccgtggagtagctccacatccccactcgctagataagatcttccctcgcttgtttcttccgctgctggtccgctgtttgctcactgttctgatgttttttcaggtccacatgccgaaagcaatggcgacgctgaggagatagctgctcgtgaagcctgcccgagcctcctcgtgccagatctggccaaacttgaatcagttgtttactgatttctcccgagcatatgtgtgctgctggcaacttaccacatggggtattcttcatcttactagatcaagtctcacctaaattgaattgaaactgaatatttttaacaaattgagcagcgacttacagctccaggtttataataactgtagctaacatatattttcaatttgcttctactggcagtggcggtgttgtatgtttcttttcttataaggtggtccaaagcaaaatctgagtcgaaatagtcatgattcgacaactatagaaacaacttcatatatatttgttggatgttgccatattagctgtaaaattggccatgattcttggtatattttcatatgacacagtgtttcgtatctgcctccaaactacccaacctaatgcagatgataaatatgtagctattgataaatatatgattattacagttgaagaggccaaagagttctacccactctttgggctaggtgccaatgtggcactcatcttttctggacacacattgaagtatttctcaaatatgaggaagattaggtcctagagtggatggttggccaaattcgttgaaggacatgacgagcatattggttgtaccgggtcttgtcatcactggtgtctattggggagtgaacagatttgttattgatacctcatcaatgtagcggaaaaagaaggtcaaaccaaagctcatcatgggtgagagcttgaaggttctattgtcatcttggtatgtgagggattttgcaacattggtcgttgattatggaataagcattaaccttatcgaggtggatcctttgattctattgaaaatgcaatgctcaacatttttattgttgttaacttttctaattaaacagaatgcagagtttttaacaac

SEQ ID NO: 40949 - DNA, 295 bp, Zea Mays
tctaattccaacgtttgctctgggaagagctcagctggagagtgaattcgaggaacgatgggccaatggagaaatacctggatggggaaataaaggcgcagaaaaaaggtctaaaatagatcttgattactacagcacagttgaagaacttgttgagcttggcctagaaaaattaaaacaggctttatctgctcaaggtttgaagagtggtggtactgttcaacagcgtgcgtatcggcttttcttgctaaaggtacttgaatgctatacagacaaatgcacaccatcttattag

SEQ ID NO: 40950 - DNA, 2575 bp, Zea Mays
cttagaccagccccgattcggtcacgtcaggccgtcgcgtccgacgcttcgcttacgccttcgggcgagcggcgctgctctcccgttcataatggtgaggtctgacggaaatcgagatcccaaccaaattcgttttttttagcgtgggagaagcgcggcgccaagacggcattgagctcgtcggcggcgctttcgaaagctggagcacgcgaagagcacattgccagaactagggttcaacaaattactttccatgatgtcagcgtgtccactgcttgaaccgaaatcaagattagaccggtgaagtgcaagcaaaagaaccccttctggaagatggaatcaagaacccaccgagttacatttgctagggaatcttgcaaaggccggtgtggcccgggattggagatcggtgaaaggcgaatatgaggggctggaaacagaccgacaatcgcttcgtgaaaactgtgcgcgtgaattggctccagtagagcatcaaaagcattaatggaaagagccccatagtggttggaccttggggagggacaggagggtacccttgggatgacggcgtgtactcaacaatacgccagatcgtgattggccatggtgcagctattgactcaataaggattgaatatgatctgaaaggaaggtcggtttggtcagaaacgcatggaggtactgatggtggctccgaaacagataaggtgaaactagattttccagatgaagtcctcgtgtctgtaagtggacactacggatctgtctgcgggacaccggtcatcataagatcgttgacgtttcagagcaacagctcgacgtacggacccttcggcaccgaggatggcacacctttctcactcccagttagcagtggcaagatcattggattccacgggcggtctgggtcgtatctcaactcaatcggtttctacctgaagcaggtgcattttccaactccagtgaatccttctccagcttcacctctgagcctcccgagtccacaaagtagaaacagcgcctatggcctcaccggtggcgacgctagacctgacatggttctcgccgtgcgagacagaggagacagctatgctgtctacgcgagcaatcaccccaaacagcagtacacaaacccgtcaccggacggagcaatctggaacaagatggtttctgtccccagttactacggagatactacaggagctgcagccgtgggcggcagccctcagacctatggcccctggggtgggagcggcggcaccatatttgacgacggcgtgtacactggcgtgtggcagatcaacttgacgcgcgcagtgggaatctcttctatcaaggttctgtatgatcggaacgggcaggccgtgtggggtaacaagcatggtttcagcagcggtgtcataccagacaagataatattcgacttcccgtcagaggtgctgactcacataaccgggttctacgattcagcaataatcatgggcccgaccgtggtcaggtctctgacgtttcacacgaacaagcggacgtacgggccgtacggcgatgagtacggcacgtacttctccacgagctttaccaatggaaggatagtggggtttcatggccgggaggggtggtacatcgacggcattggagtccatgttcaggaaggcaaggtggcgcagcagcggtttgttagcagaccgaagactccgactagcccattggtgcattacaacatgctcgcccaggcgccgagtgctacttacacggacggcgaggttgcttatggcatggtgaaagaaccggtcccgatgggaccagggccatggggtggggagggaggtcgggcatgggacgacggggtttacactggcgtgaagcagatctacgtcatgagaggagcgttcatcgggtcgatacagatcgagtatgacaggagcggccactccatctggtcttcaaggcacgggaacagcggccacatcacccacagggtgaagctggacttcccgcacgaagtgctgacgtgcgtgtacggctactacaacacgagcaaggaggacgggccccgggtcctgaggtcgctgacgttcctcaccaacaggggcaagtacgggccgttcggcgacgagttcggcgcctacttctcgtcggcgacgacggaggggaaggtggtggggttccacggccgcagcggccagcacctggacgccatcggcgtgcacatgcagcactggctcggggacaggaggcctgcccccaagtacgtgctgtccaagtacctgttctgattcatcacctggctgctcgggttacacgtatctaattttgggcgggtggattctaattacttgtatcatcaccatttattggttcggggcatactcatgcttgatttcgtatcgattaattgaaaagaagtacatcatctctctctctctctctctctgttgaatttcaagacattctttgtcagttatgatgcccaaatattcattgtgcctctgcttgttatggacgcagtacgcagatgcagggtgctccatctttttacgagttcttttttttctgtaagaaaagtaggttccct

SEQ ID NO: 40951 - DNA, 462 bp, Zea Mays
gccagagacatttcttcacggagagacgactctattttttttgcaaatacctcctttaaacaccttaggatcctctacgttaaacatcacttttacatgccctaaagaatcagactatagcaggctctcgacttttctatagcaggctccacactcgttcttgttgcttcagtatatagactactagtgtatgaagcgcgcgccatgcgcgcatgttaaaccatggtgcaaaatcttgttatataagcatgtaaaacttgtcaacgtgtcatgaacattttcacatccagaatagttgttactaaggataatgaatacataagtatcagaccaaagcagcattaaagtagcgtgtaccaagagctggtaacagtgtgtttctaggcgctacatttacacataaacgtcttctgtccagaagtgatactgctcttgatgtgtgggcaaaaaccaaatatgtac

SEQ ID NO: 40952 - DNA, 3358 bp, Zea Mays
ctggggctaggatatcataatccactcccttagaagactgatgtcctcgtcggtcaaccccaatccattaaccttccctcttaggcacatctgtgtatctagtgtcgtcatatgccatgccatgtgaccactccgggcccacatgcgccatgcgccatatactcgaacccctaactcacacatgcccgtgaaactcgcgagggtcggctctgataccacttgtaacaccccgtccattcccggaccggtggtacttactcctgacagctctctaggatcatatattgtctccacagaccaacacgagtcttttgtgcgcactttgtcctcactcatgcgcacccgagaaaacttcctggccggtcacccatcccaaattgctctaagcccaagcacgcttaacttgaaggttgtttcgatataggcccgaaaaagaagatgcaccttgttgatgagtactctattaattctattaagccttgggccaggatatcaccatcccctagggccagaatatcacaatgacgagaccttcaaccccgtggtgaagcctggtaccatccaaactgttctgactctggctctctcacgggcctagccaatgcatcagctcgatgtcaagaatgccttcctccatggcactccgatggaaacggtgtattgcactcattcggtcggctttatggactaggcgcaccccgacatggtctgcaagctcgatcggtccctctatagcctcaagcagccgtcccgagcttggtacaatcgcttttctctcacagggcttcgtgtaggccatggcggacacctccctattcgtcttccgtcgcggcctggacatggcgtacctcctcctctacgtcgacgacatcgtcctcacgacctcctcccacgacctcctgcggcgcatcatttcctccctccagcaggagttcgcgatgaaagacctgggtgagctgcaccacttctcggggatcaccgtggagcgtcggtcccagggcctgtttctgcaccagcgccagtacaccgtcgacatcctcgagcacgctggcatggctgactgtaagccctgcatgactccaatatacacttaaggcaaggcctcctcctccgatggttcccggtggttgatcccactagctaccatagtcttgccggggcgctgcagtacctcgtcttcacacggcttgacatcgcctacgccgtccagcatgtgtgcctccatatgcatgcccagcgggagcctcatctcactgctatgaagcggatcctgtggtacctctagggctctaccgactttggcctccttcgccacttctcgaccatcgaacttgtcatctacactgactccgggtgggctggttgtcccgagtctcgacgcgctggtccacttctggctatgtcgtgttccttgcgacaaccttgtctcttggtactcgaagcggtagcctgtcgtctcccgctctagtgccgaggccgagtaccgcgttgtggctaacggcgtggctgaggcggactggcttcgttagctgctccaggaacttcacagtccgcagacgaggagcacactggtctactgcgacaacatcagcgccgtctatctctccaccagccccatccagcatcagcgcacgaagcttgttgagctcgacctccacttcgtgtgtgagtgtgtcgccgtcggagatgtgcgttttcttcatgccccgactacgtctcagttcgccgacatcttcatcaagggcctccctacatcggtgtttgaagagtttcggtccagtatcaacatttaccgtggctagagtttcgactgtgtgtgtgtgtggggggggggggtgttagatgtattgtgtgtgtactagtgtattgtgtgtgattgtctctatattagcctaggcccacttaccactattattaatatatcacctaaccttggtttagggttagggtttcaatttctatcgcatatgacaccatctagtacaggcaagaactcggagcttccagatgagccagctaatgtgcccccctctcagtttggcagccaaaagcaagctcatgttcctataactcaagcttttgaggatgatcagggaatgaattgtgtggcaatatctgcagtagagtgggcagatacccttacaaatatcagttttgggcacttactgacagaagcatctaaaggcactcatttggactgcggaggaactagtcctccaggaagcaagaaggttcaaacactcttagcagctctcctgatactaacaatggagttcatccctcaaattctgaaggatttaaaggttttcttgaggacttggctggagaggctgatgctgataatcattataataatgatgatgccaaagacgaggagttttatgccaaatcaccacctcgaaatgatgaaactaatgagttgaaggatcaatctttagctgacatatattggcctgattcactcggaccactggacttggacataccgtctgtgagatacgaagccgatgacatacttataggggacagtcaaaatagttggaaccgtctaatggcaaatagcctcgacgcatttcgaaacctgtcattcttctcagataaaaatgactctattccatcgatcatgtagaactggggatgttagggcttccacgatttgttttggtaaggaaggaacctccaatctgccattcccggaagagggagctttatattgcccaagtgagctgtttgctgctgatacgggtatccaacagatgcggatttgatgcatatgagaggggctcgtgctgttgtaagataacataacggatgtgctaacctgtactccatgtaaatgtgttgcccttgtacataaagcacatacaagcacttgggtacaggtaaagcttcctggggccgagtataagataagtttgcctaatgaccatcaaatgattgtgcacttcattcttccggtttacatctaatatgtccacgtgggttatctcaaggcaatcagatcggagaattgtgacaatggaggacttctgttgagtagtttagttactttgacacgaaggatttctgtaagattcagtttttttttacgagagcctttagaacataggattgcaaagggaaggatccaatgtaatcctttcttagaatatagggttgcaaagggtccaatgctctttcctatgcctcacggaaagaaatcctacgtcgagagtaagcaccctcgcatgcaggaggcttatgtataccgagactttcgtgttctatcatgcacggtttttaggtgagatcaatcgatacatactctttacattctagattgtgcttcattttagatcttttagacatgtaactgttg

SEQ ID NO: 40953 - DNA, 838 bp, Zea Mays
ctcctttatcttctagtgacgccgactccctgggatatttgctgcgcactcatctccctcagctagctcgaccgcctctctctggtctctagcgctgtggagctccttcctacgtgcgctagccgccaggtcgtcttcaacctccatccgtggagctcgcctctgccatggccgccctctgccctcctccctcaagccctagctgagtttttccatggtgccctggatgccagcccctttactcgatgcccctgctaggttcctggcatgttcgcccagaccgatgcctagctcccatggccgccctggatctccatggttgagttttctccctgcaggatccccccaaatagcgcctggtctttttcccttggtcgaaaacacctctgcacttaacccccctctgttgatggtcgacgtctcttcatccatggtacctaggtctccatccccatgcccctgcagcttgttctcaagccgccaaccatggtgcgttgtccgcctcggagaaacttccggtgttggagggcgaagagctcgaagttctaaaggtaacgcccgccgggtgcttggtggaacgtctcaaccggaggttgttgtcgatctctcggattcgaggcgatttagttgtggtacgttaattgatcacgtgatgtggaagacaatagttggattaatctcaaagtgatgctgatgaataaaccagagaagtggatgatttgatcatgtaccaggatgggagatgctcaccaagtgatcgtcatctaacaacactgacttagtgttatcccaggcaagccccggtgcatttgccaccttccttgtgtttacaaaattt

SEQ ID NO: 40954 - DNA, 1152 bp, Zea Mays
cacacacacaacagatctgctacagggacaatctgatggtcggcgcatcgcctagaggccggtggtggcgagtcacgcctcctcagccctcatcctcacgtcgtcgccaccgcagatccgcccaacggcccctgacccgacaatgacgattatcttattgctagcaccgatggggtggggacaaagctgaagcttgctttcgaaactggtattcatgatacaatcgacattgacctggtggcaatgagcgtcaatgacattgtaactctaggtgcaaaaccattgttcttcctagattactatgcaacgagcaagcttgatgttgatcttgcagagaagacagcagaaatgcctggtttctatgcagagggtgaatatgatctaagtggttttgctctcccaagaaatgatggcataacaactacagttggtgaagctctaatggcaccaaccttcatctatgttaagcaggtgcttgagattattagcaaaggtggtgtgaaaggactagcccacatcactggtggtggctttactagcaatatcccaagagtattcccctctggatgcggggcaaaaaatttactgggtcatgggaaatacctccaatcttcagttggcttcaacaggcaagaacaaatgatcttcaaacttcgcctttgattttcagtagcaactattctgagaaacatcaggcactgcattggcgtactggtcataaaaatgattgcctccagataataagttctgctgcttcaaattcagttctgccagctgtaggaatagggtttgtccgctggtttgctaaggcaagcaacgtacatagactgctcgtcttggatcctttaggaatcataaaagcatatagaggaactatgtataggctacaaagaagcataagaagcatttttatagcagaagccaagtgttctgatgattttgttttttcaattgtgttttctgttattggttcagtatgcacatatattgacatgatttatggcatggcatctgccatctttgttatatttatgacatcgttcttgattgatgtgtgcgacatgaatgatagatctttttaacatcctgagcatcattgtgtcactcattatcgtattttgtatatcatttatgggttcacggatatgaaat

SEQ ID NO: 40955 - DNA, 2175 bp, Zea Mays
cttgatgatgtttgggtttataaaagcccagcttttggttgcccacctcctccaatgatctcttccaacgcctggaaggaatgttgtcttggatgagtttggaacccccaaagtggtcaatgatggagttaccattgcccgcgctattgagcttgctgatcccatggagaatgctggtgcttccttgattcgtgaagttgctagcaagacgaatgactcggctggtgatggaaccacaactgcctctgttctcgctagggagatcatcaaattgggcatgttgagcattacttcaggggcaaatccagtgtccgttaagaagggcattgataagactgttcagaaattggtggaggaacttgagaagaaatcaaggccggtcaagggtagtggggatattaaagctgttgctgccatatcagctggaaatgatgaatttgttgggactatgatcgccgaagctattgacaaggttggccctgatggtgtcctctcaattgagtcgtcatcgtcgtttgagaccacagttgaagttgaagaagggatggagcttgacagaggatatatctcccctcagtttgtcactaaccttgaaaaatctattgttgagttcgaaaatgctcggattcttgtcactgatcagaagatatcatcgataaaagaaattattcctctgttggagcagacaacacagttaagagcaccacttcttataattgcagaggatgtaagtggcgaggcgctggcaacattagtcataaacaagcttagaggaattttaaatgtggctgcaatcaaagctcctggttttggtgagaggcgtaaagctcttcttcaggacattgccattgttacaggtgctgaatatcaatccaaagatcttggtctactagttgaggatacaacagtggagcagcttggcatagctcggaaagttacaatctcaagttcctcgacgaccattatagcagatgctgctagcaaagacgatatccaggccagaatcgcgcagctgaagagagagctttctcagacggactcgacgtatgactctgagaagttggcagagagaattgcaaagctttctggtggagttgctgtggttaaggttggagcatcgaccgaggcagagctagaggaccgcaagctccgcatagaggacgcgaagaatgcgacttttgcagcaatagaggaaggtattgttccaggaggcggtgcagcatatgttcatctatcgacattcgtaccggctatcaaggagacgttggatgatcctgaggagcgcctaggtgctgatatcattcagaaggctttggtggcacctgcagcgctgatagcccataatgctggggtggaaggtgaggtgattgtggataaaatccgggaaagcgagtgggagttcggttacaacgccatggcggacaagcacgagaacctggtggaggctggtgtgatcgaccctgccaaagtgactaggtgcgccctgcagaacgctgcctccgtggctggaatggtgctgactacccaagcaatcgttgtggagaagcccaagaaggctccagcagcagctgctgcagcggcaccatagggttctttcaccatgtaataatactttctagtgaaaaacaattttactaggcatggaacaggcacgttagagtgacgaggagaaaaaactatttttgtcatgcgtgggccggaataaattgagtcaggaattgcatggattttgggccaggacgatttgcaaattggttggattagagtgtggatggctgattggacattgtatcctatctgcattctgttcactcagttggctaattcacatttctctccagtccttccctcccttttgtgacgatgcagttttttatcgtctggtaaaatggcaaggcaacaaattcatggtgctgcttctatctccccgtctccatcccgcaccacaggtactatttgctctttcatccgctacgatctggcagcggtttccaatggtacatgacaacaccggcagagcatcgacggatcgcttgtggttgaagggcgaaaaggctttgcttgagttgctgctaggaccttggcaagagtagacaggcaagctgacagaggaggtgaagttggcagcagaagaaccagacacccagttggagttggatcagatgtagcacagca

SEQ ID NO: 40956 - DNA, 2188 bp, Zea Mays
cggctaccgcgcatagagacccgggcagacgagagggcttgtggggtcccggtcgatttcttcttcttgctacgcaagtcgaggtctccccgccgcgaccgcgagatccccctccggcaagtcaggaaataaaataaagccgtgacgtcgtccgatgattctccctctccctcgtcgccttcgttgtcatcttcttcgtttggttggacacttggacttccctcgcacgcttgaaggttgaagcagctgctcccgcagatggcggcggtgtggtctaggatcgggaggggagcgcagctgtcgctgtcgctgtccctgtcgaggaccttctacgacggcgcgtcggcggcttccacgctgcgcagtgctgccgcgctgtcccgcgcccggggccagcacgcgtcgtcgctccacagcctcgcgggaaggtccgccggccacctcctccagccgccgagcaggggcatcgtgaccacgcccgcgaggcttcacccggcgtcgtccgcggcagtggtggcagagctctcggacgcggaggcgagggagtccgaggccgtggcggcgccgcctcgccagatgccgagcctcggcccgacgcggcccggggagaagccccgcgtcgtggtgctgggcaccgggtgggcggcgtgccggctgctcaaggacgtggacacgcgcgcctacgacgtcgtgtgcgtgtccccccggaaccacatggtgttcacgccgctgctggcgtccacgtgcgtcggcacgctcgagttccgctccgtcgtcgagcccgtcagccgcatccagtcggcgctcgccacccgccccggctcctacttcttcctcgcctcctgcaccggcgtcgacaccaaggcgcacgaggtgtactgcgaggccgcgtccagcgacggacagctgccctgccacccgtaccggttcaaggtcgcctacgacaagctggtgatcgcgagcggcgccgagccgctcaccttcaacatcaagggtgtccaggagcatgccatcttcctccgcgaggtgagccacgcgcaggagatccgcaggaagctgctcgctaatctcatgctggccgagaatccaggcttgtctgcggaagagaaggagcggctcctgcactgcgtggtggtcggcggaggacccaccggcgtcgagttcagcggcgagctcagcgacttcatcacacgcgacgtgcgccagaggtacgcgcacgtcaaggactacgtcaagatcaccctcatcgaggcaaacgaaatcttgtcatcgttcgatatcggactgcggcagtacgcgacgaatcacctgtcaaagtatggagttaatctggtgcgaggcattgtgaaggaggtgaaggccacggagatcaccctgagcgatggcacccgcgtgccctacggcctgctggtctggtccacgggcgtcggcccgtcggagttcgtcaggtccctgcaccttcccaagtccccaggcgggagggtcggcgtggacgagtggctccgcgtgcccacggcgccggacgtgttcgcgctgggcgactgcgcgggtttcctggaggggaccggcaagccggtgctcccggcgttggcccaggtcgcggagcgggagggccggtacctggcgcggctgctcgggaggatcgcggcgcagaacggcggcaaggcgcactgcgccggcaaggccgacctcggggagccgttcgtgtacaagcacatcggcagcatggcgtccgtcggccggtacaaggcgctcgtcgacctcagggagaacaaggatgccaagggggtgtcgatggctggcttcctcagctggctgatgtggcggtcagcgtacctgacgcgggtggtgagctggaggaacaggttctacgtggcggtgaactggggaacgacgcttgtgtttggcagggacaacaccaggattggctgacgacgtttagcagcttaagctggtgttcctctggatagtaccacgggaacaagagactgcctgtcattgttgttcttttgtttgtaattcaacacgtgctgagagatttctattggcttccatactctctctctctctattggtcagatgaagtcatgaagtgcagacttgcaaatgtaagtcaccagtttcttttttaaaaaaaagattaaagatatgatgccgatggagcttgtacaacagacgaaaaatacat

SEQ ID NO: 40957 - DNA, 3754 bp, Zea Mays
agtactagagggcccacccctacccctgcccccaaatcgccaaatcctccccaccaccgcacgctggtcctgcccgtctcccgcccccgccggccgccggcgactggccgccgccatgggctccgaccgcgccgagctcgcgcgcctctgcagcgcccgcaactggtccaaggccatccgcctcctcgactccatcctggcccgatccccctcctccatccacgacctctgcaaccgggccttctgctactcccagctcgagctccacaagcacgtcgtcaaggattgcgaccgcgcactgctgctcgaccccgccctgctgcaggcctacatcctcaaaggcaaggcactgtcttcattagataaaaaagaggatgctctagctgcttggaagcaaggatatgaaattgctgtccgtgacacaacagacttgaaacaattgcttgatctggaagaattggtttcttctgttaaaatttgcgggacaacccagtctgcggaccatgtcatggatgcatcaacttgtgataccaaagttgttatctcagaagatcgtgttgctgacacgtcgttcgctgcaactacaatggctgatacaaaaactgttgtctgtgaagaggccattggcagttccaaagtttcatcaaatggtgataccaagttgacgaattataataaaaaagcggaccataataaagtctctagcagttcagtgaaagacatcacagggactcaagctcccaagaaggcaccgaagctagataagaaaaacaaagcaaaagctgtgaaagaaataaatggccgagctgaaggtgtaactggcagagctagtactgatgaaagtgaaactatttcactggatcaagcactctttgctacaaaaatttcaaagtcatcaaaatctataagcttggatttccgactttcaagaggcattgcacaggtaaatgaaggaagatatgaccaggcgatatccatttttgatcagatattgcgggaaactcctacgtatcctgaagcactgattggaaggggcacagcttatgcatttcaaagagaattggattctgctatttctgatttcaccaaggctatacaatctagcccatcggctggggaggcatggaagcgacggggacaagctcgtgctgctttaggagagttcaaggaggccattgaagacttgactaaagcattggaatttgaaccaaattctcctgatattttacatgaaagaggaattgtgaacttcaaattcaaggactacaactctgcactcgaagatctttcgacatgtgtgaagcatgacaagaagaacagctccgctcacacttatttaggtcttactctttcagcacttggagagtacaagcgtgctgaagatgagcatgtcattggtttaaagtatgacgagagtttccttgactgttgggctcaccttgcccagggtaacaactcggcacggagatctgcgggatcgagctcagcgtcaaggcattgtccacattggcaccaggtcaccaacacatttgacgccacgctaagcaccatgtgttaccttggtgttgtgacctacaacaccgagcccagggtccaaaacaggaattaaaacacacaggctttatcttgatttggcatatccagagaagttgttgaattgccttgagaaagctattcaaattgattcaaggttcgcaaaagcttaccatctgcgtggaattctctaccatggaatgggtcgacataggagtgctattaaagaattatcggttgctttgacatatgaaagttcaagtatagagtgcctatacttacgtgcctcaagccatcatgcaattggagaatataaagctgcgataaaaggttatgatgatgtacttgatttggaacttgattccatggataaatttgtgttgcaatgtttgtccttctaccagaaggaaatggctctgtatattgcttcaaaggccaatttagagttctctcagttcaacattgatgatgatgttgacccactatttaaggaatactggtgcaaacgactacatcccaaaaatgtggctgaaaaggtttatcgccagccaccgttgcggatctcattgagaagtgggcgccttaacaagcaagacttcaaattcacaaagcatcaaacaactcttcttctagctgcagattcaattgggaagaagattcaatacaattgtcatggcttcttaccaaatcaacgtcagtaccgcatggccgggttggctgctattgagattgctcagaaagtgtccaaggcttggcgctttctaaggaatccgaagaacatcgcaaagttagttaggaaaagggataaacttaacatgagccagaacaggggaggttattgtagcactagcactttggctggatctccaacttccagcccaaatgaagacagggtctcctccgggatctctctttcctggcaggatgtctataacattgctgttaagtggagacaaatttctgaaccttgtgatccagttgtttgggtcaataagctaagtgaagagttcaattctggatttggttctcataccccaatgcttcttggtcaagcaaaagttattcgctactatccatattaccaaagagtcttggaaactgcgaagactataatgcttgacttgaagtatgtcaataatgcagaggaccgtgcaatttttcttacagatattgacaagttgaaaaagatagaaattgcatcgtcatgctcagatttgtaccatgtagttggtgagacctactgggttgctacaagatgtgatagtatggcgtttcgggggaggcgccttgaagggacaagaattaccactcaaaacataggcaagacaggatttgactttgcaattcgaacaccttgcacgccatcgagatgggaggagtatgatgaagaaatgactgcagcctgggaggctatttgtgaggcatattgtaatgacacaaaccccacacgagaccctggtgtgcttgatgctgtgaaggacgcgatattgcggatgacatattactggtacaattttatgcctctttcgagaggctcggctgttgttggctacgtagtgttgctcggtttattcctggcagcaaacatggatattactgccagcattccacccggtgtccaagttgattgggaggcgatcctgtctccagatcccggcacatttgttgacgccgtgaagccctggttgtacccatccacaaaaataagcaggtgcctgaaagattacacggacgtcagctgcgcgttcagcacgacaggttcggttgtagcggccctaacatctgttgacccataggttatttgtccaagtgttataggttgctccagttgttagtgtatttgtttcaaaatacctcagctttgcttagcttgtcagaatttctcagtttgcaaaaagtttgtatgtttctgtgttgtatacagatatgcagtaatgttgtaacttgaaaaaaaataagatttattttcattggaacaagttttttttttttttttgtaataaacagttaaacaccaataagttttgcagttacttcttggatgtttgtatgccatggtatatggtcttgaacacttagcctagaggatttccctcttatttatagagctattactcaaggccttgtggtatttgacatttatcagagtccataagcacgaatccactactttcaccatcatcattgactgacttcgagctctacacatacgcaagtcaag

SEQ ID NO: 40958 - DNA, 994 bp, Zea Mays
acgcatgctagctgcaacaatgtactatcacaataagacgaagatgccaccaccaccttgctcttgcttctctgctgtctctgttcccttctcctccttcaaaaccataacaatgctcctcctcctcctcctcatccttcagcaactgtctgcggctgcggttgcagggatggccacaggtgaactacaccctctgcgtctcgtctctgtcgtcggggtgtaccgcaactccctctacgacctcggcagctccatcgtagccatccaggagaggaggtacgcggacgccaagacgtccatgagcgccgcggtggatgcgcccgtcacctgcgaggatgagttcaaggagcagggcttggagccacccatgagagcggagaccaaacgcctgtttcaacaggcggtcatctccctcgcaatcatctccctgctatgactatgggtgtgtttggtttggcttttggctttggcttttgccccctaaaagccaaaagccaaccaaagggctggatccaggaagcagctttttctaaaagccgactttctcgtagtgcaaaactgaaagcacccctagacctgcttttagtggcttttggatggtactgtgaaaacatatatcgaagaacttttaacgacttttagtggtttccaccaaacgatttttagcttttaaacagcacacagcctacagcagctttttccacagctcacagcccacagcaactttttccacagccacagcccaaccaaacagaccctatgactatatatattattgcttcttcgatcgatctcttctcttatgttgatgtcgtgagttatctctagatatatatatgtctcatatgctatgcatgatgtttgatcttatcaagttacaatccgaatgagtataaattattactacagagaacataaccgagatgtcatgtaccatatcccttcataatacatgtgggctaatccaccagctgtcagatgtttagtttctata

SEQ ID NO: 40959 - DNA, 1911 bp, Zea Mays
aactaattttagcggttaactactagttagctactgaagattccaaaaccaaccccccatccacgccgcgatgctccgccgccgccgggcaccgctcctcctggccgccgccgccgcgggcgccgcgctggctgccacctctccctccggcgaaaatggtcgaagcgtcgcctccgcgctccaccaaggcatcgctcgctcctcccgttccgtctacacgattggttttgtgatggcagattacaagtattcgctgaggggtctggatgctggatcggcggattaccgtgttaagctctccaaggttcatctgcggtcagcaaaaaaactacttaaactatgtgaagtgaatggagggttttatgtcaaagctggtcaatatgtatcttcactaagacaagtgccaaaggagtactcatcaactctctcctgcctgcaagaccaggcaactccatccaagtttcaagatattaaagcagtaatagagcagaactttggcaaggaattgtatgacatgttcaatatcctggattggagcagcgaatgaagatagacattatgacaatgtcattcttgtcaaaaatggtctcttgggtttttcctgattataaatttgacagaatactaattgaatttgagaaatccatgacaatggagcttgattttacgcgggaggctaagaattctgagagaacagccagctgcttcaggaaaaatagtgttgttaaagtgccttatgtgttctggcaacttacaaccagggaggttttgacgatggagttttgttatggacacaaggttaacgacttggacttcctgcggaaaacagatattagccctacaaaggtagctaaggctttgattgaactctttggtgaaatgatatttgtacatggttttgttcacggtgatccacatcctggaaatatattagtttctcctgaaggccatgggaaattttcactagttctgttggatcatggaatttatagagaattggaccaaaagttcagattggactattgtcggctatggaaagcactgatattgttggattcaaacaaaattctggaattaggcgaacagtttggcgttggcaaatatgcgaagtactttcctgtaatattcacagggagaactatagaaagcaagtcagctcttggcacacaaatgtctggtgaagagcagaggcgtctgaaggaggacttaaactctcttgggatggatgatatatcttcatttatggaatccttgccaccggacttctatgtcatactacgaacagacggactattgaggtccattttagggaatcttggggcaccacgccatgttcggcttctcacttatgcaagatgtgctatacacggtcttgagaagcagcacaaaatggagtctggtgcaatcagacgtatgttcttgaatgtcaaaacaaatgtcagctatctccgtctgagagtgattattgaaatagcggtattattagctaaagcaaatggtgccaagcagaaagtcgtgaacaaactcagacagatgttacaggagaccagtcaaggttttcaccgccgtatgtgatgcccagaagtcagcgacgtggtgaaattaaggctacgagaaaggtgggggaagttggaagtacgtcaggactccggagtagaatcataactgtgattgttctgtttcaacttgtaaattggaggttgtattgtgtcaaggagtccaatcataactgtgagtgctctgttgtaacttgtaaattctacttctacgtcgagtctgcgctcgagagtccaggtgttttttttttgttggaccaagtacgcatcccaaaataagtctacatcccaaaattcgaggagtcaaacaaatcttaatttgaagtttgcctaaatttataaaattggtattaac

SEQ ID NO: 40960 - DNA, 683 bp, Zea Mays
ttgcattgcactgaggtcgtgggatatggcagcacagtacacgaatccacgccacgggtttgtccgttgggaccggcccggcccgccggtcgttggcgacggcaatcaaacgcgcagggggttttaattccagggccgcgttctctgtgtggcgctgggctccgggcctctggtacggcgatctcgccgcgatcgtctcgctctccatgccgtcggtgaccagcacgggcgccaacggtcgcggtccgcatccggcctggacgacgcagctgctgccggctgcgcctgccgccgccttgcacgcgacggccacctcggtcctcggcccatccggttgaaacccacgctcgcgcattatccgtcgggggcgttggtgggtgccaatggcagtcccacttcgaatgcaactgcggttaaccaaatcgtttctcggacaccagcgaacacgagaaactcgaccggtttttgtcgaaatccgaattattcgactggcttgaaatttaaatcaagaggactggttttcgtttgtctccgcccacaaaccggtaatcccggcctgtttttttttgttttttcatttgtaaagttcattttacttgcaaaaaaaactaatatattgtttggttcacgaaaatgctaatggtaatgattcaaacccgattaccagcggtaacaagtttaaa

SEQ ID NO: 40961 - DNA, 1898 bp, Zea Mays
gttgagtcataactgtgccctagtcgtcccaccaactgataagcagaatcgatctcctcccatcacctccatcacaacctctcgacggcagcttcatccccacctcaatcggcggcagcctagggcttcatcccccacccccaattccatgtcatgtggatctgaatcagcccactcccaaatctccaatccactcgccggcttttcctcgtgcccagttcacgacatttgctcggggatctgaccaatgtcgtcttctgctcgtgttcctcgcagccgctcagattggagatcaagtggaaattttctcaatggtcggacagggtcaagttggtggacttgcaccccacataggcatggatgtcgagcctgtactcgaggagtgcctgcatctgggattatcaaacacagtcaatttgtaggagagaggacgccatacatcaaagatgactgaagaagaggaagatgaagaatacctcgaagaggaagaagatgcccttgctggtgcaggggggaacacatttagtttcacaaccttcatctcttaacccctccgatcccggtgcgtggcggattagactccgatggggaagtctctggcgaggtggatcaagttcgtgctcttcgggaagaagtcgtcgtccaggatgattttggattcaagctgaaagaagaggctatgctgaatagagtactaaaggagacaatcttgtcaaaggtagttgccattgaacaattgcaatctgatctggcatcttcatttcgcatccaagatgttatgagaaatgagatccagagagtccagaatgaactttcttgcataacccacaaagctaagcagttggagcttcaggatttccagtaatctacgaaggagctggctgctcttcgtggaacactgaaaacggtgatggaagacagggacctgtagtggcaggaggtgaagtagctgagaagaaacatgagcatcatgcagaacgaggttgtatcgctgaagaagaagatcgaagccttggacgaagacatacttgtcaaggagggacagatcacgatattgcaggacagcatcgacaagccgttcaacatcatctgcagcccaagttcgatgcaagagttcgacatggcgtgaagacggctgctgttttgtaagtgagttggtggatgaaaattcaagttattgtagaagacaacatatttttttgcttattacagcttgctatgatgttctgaactatgatgggttcagcaggcgccatttttctcttagagcaattgttgacatataagaaatggtggcagcaccagcttaggatgtacaacaattgaatctcctacagaagttgtttctaatgtgctactgagctctattgtattccagcctacgcaatcttggtctccagtgtgcctccaagaaaagctccatagccccatagtttctgcaaaggttcaacaacttcaggatcaattataggatgagaagcaagaaaaaatggacttcatgaagaagcggaaaccattgataatatcaagaggtcgatggaagaaaataacaacctccttcgtcaactattaagcttcaattgaagacaagtgtctccatcataagtctagttgactactataggatctgcagtcttgtggcagctatagtaggtgtttatagtagctctagatttcaagctataggattattttttattatgtttaatgtttaatactttgagttgaagttataagatttgctttgaattttaagttaaaggatttgcagatatatggtttgaagttatatgcttatttgatggatgaattatttgtgttcaacaaattcatacgatattttggctatgatgtgtaatattctatgacgatatcaattcatatgatgtgttccttcc

SEQ ID NO: 40962 - DNA, 2827 bp, Zea Mays
cttttttggccggaaacaatcctggcctcaagaggccagacaattctcccgactcgcctccgacggacgccagccgcaacgccgcgaaccccatcctcgggagcctctcctccgacggtcgatggcccggctccctgacgccatcctcgcaacgccaaccccagcctcgagaccgtcatctccgacgccatccccaagtgcctccgccgctgctccacatcctcttcccctctacaaggtgattctgatatcatcaagactacaccagaagagaaagagcccatccacacctcctcactcactggtgctaaaaaggttagagaaattcttgaaggacatgagagttggtgcaaatctgagtttcaaatggagccagcaatattcgaaaccacaacaaattttcttagaagagagaatttactacgagacacacgaggagttatcgttgagaagcagcttgggatgttcatgtacatgatctccaacaatgctagtaaccaaatgctacagaaggcttttcaacatagtggagagactatccataggaaaatatctgaagtatttgatatagttcccacactaactcaatgttttgtgaagcttcctagctctatccaaactcacaccaaaattgctacagattctaggttcatgccatttttagaactgcattggtgcaatcgacggcacacatatacccaccaccatagcagaacatagggcccctccatatagaaacatgaaaggaactctttcacacaatgttatggtagcctgcgactttgacctcaatttcacatttgtttcatgtggatgggaggggtcagcctcagatgcaggggtgcttcgatctgctattagcaaaggatttagtgtgccagaaggaaagttttatgtagtagatggtgggtatgcaaatacatcatccttcattgcaccatatagaggggttcgataccatctcaatgagtttaggaggcgtcgttcatcacaaagtggttatgcgaactacaaagagctgttcaaccatcgccatgcaattctctgtaaccatatagagagggccatcgatgttctaaagaaaaggttcccgattctaaaagtaggcacatttcgtcccatagagaaccaaatcaagatcgcaactgcaactattgcatttcacaacataattagagggcaaaatggagacaaaagatggcttgacaaccaaccagattacatctctccaagtcaatatgttgatgtcccagagggagataccaactatctcaatgacacagaatcaagtgatggaagctctctaagagatcagatcacacttcagatgtgggctgcctacaatagctagatgggtgcttataatggcttctagtttgtcatgtagctagttgcctagttcgtcggttatgtactattattacttatgaagtctttatggtttgtagtttgtcatgtagctagttgctgagttcatttgttatgtacaattattacttatgaacttaaagtagcctatttatgaacttaaaattacctagttatgtactattatttccacaatttcagttttgaaaaaaggatgatttggaacaatgtgtatgagaaaggcttatttgatgtgatgcatgatcacaaagataatccaaaattcaaaggtcaaaatggttggaatcgtgatggatggaatagtatcactacgaagttcaatggaaagttccctctagctcatttctctaaacaacaaccacaagagaaggagagagagcttaaaggatactacaaggcaataagggattcaagaaaaaaaaagcggggctggttggaatgacactctatgcatggtactggccaaaccagaagtttggccatggctgattcgtgctcacccaaaagtatcaaagtttcgcaacaagccattccctcttttttacagtttagaagggctatatgaagtgtggctatcggagagttaaatttcacatcaactgcttttgatcttcctccaccttcagctccatctaggagtgtgtctggacaaagtccaaatcccttgagtactaattcacttgatttggatggacaagaaaccacaagtgtgttcaatctgtctactaatgctcactctgtcccagtcagtactaatgaacccaccgaagctcagtttgtcccatctaatcaagaatcaagccaaagagaaggtgccagtgggagaaagcgtaagcaaagccatgttggattagccttgaaagttatgtggagtttaaaaagatcaattttctattagcaagtgtcaggctgaattgaaagaaatggatggattaacagtcgtggacaaatcatatgctttggagcttttcgtatctacgacaaacagagagattttcttaacaacaacagagcatgatgttagagaaatttggctcaagcacaaaattaggttgcttcatggcagtgatgcatggcctggacaattgatatgaggaaatttgagtgcaaagtgaaagcaactcatggagccgacatggagaagaaaaatgcaacgacagtctacatgaagcttgtgaaaaaagagttaaatctcaaagttcataataaagagacttgtattacagttttatgttatattgtttatctttttgtgatggatggatgtattacagttttagtttgttgttgcttcagtttgctgcccatacttcagtttgcttgacaaactattgtgatgatggataaagcgtgatgtgatgacggccaaccagtttactacttcagtttgctttcagtttactatgcttcagtttactgtttactaagcagatttggc

SEQ ID NO: 40963 - DNA, 827 bp, Zea Mays
cgaaaagttccaagacacagatctaccccgtggtggatggcgggttgattccattaaaatccgagggctcttaagtaaaactccccggccgaaagggtacgcgacgatatccaccgtccgatcagattctgacgcgcttgattagatcgcgattcccccgagctggcgcgcaaagacgaccacatgatcgaggatcaacggtccagaatcgctcacctgcctaaaaccgctctagcctttggatctctgatctacggccacggatcaaatcccgcaaaagggtatgcgctttcaatcctagtcgtttgctctataaccaatgatgccgatatcaaccgcgccaaccagcacctggattaaatcccaatcgtcaaaacccgatcaaacggttgggcactcttctccccaatcggaccccgacgcgacggcgcaaaccagcccgcggcggtggccattgtcggcgatcccatacccctcgaccccatccacgcgagctcgaaccgactagctcattccaatgtatggattatggcagagtcaggggcggcgaaaattactagaggagtaggtgagcgcagagatgtccacgcggacacgacggaggagaatcccggtgagcaattccacgtggacgaggccgctatcccgttggccaacattatgcgtagcaacgctacgcgatgctgaagccctagcactgcctttactcgcccatacaacagtgcaacgtggaggtcgacggcagcggcgtgatgaagtcccacagcggcggtgggcctccaaattccctctctcccgctttctcccccccctctggcgaatacgac

SEQ ID NO: 40964 - DNA, 608 bp, Zea Mays
cttccactcccgattcgttctggcgcgtggtggtctcccgactcccccattggcccaatccctcatgccctgcctctacctccagtccatgtctcttccctcctagacctaggtgccagtggcggcgcctccgcactacggcctccagtctatgcctccacctccatgctccactgcacggatccggatccggcaacgacgacctccctgcggtataatgaagggttgaccatgtacaccttcgatcggaaataatactcgagcagtgcaagcatgaaaacgaagctgagaagcttcagttccgtgttttggacacgcaacgaaggatcagtaagaggaagcgataagatcttagaggcttggacaacatgtctaatgatggaaaaaacttttatacccttaaaatatcttgtagtttgtgtgcataggactgagtgcatgattgtaatttttacaacactataaatagagatacaatgtcatgcacaggggacactttgtataagatcttcaaggcttcatgattctgtgaattctgtgatgtatatgtgatgattatgtgatatatgttctgtttgtttggatggaataacaaaaacaaataaaat

SEQ ID NO: 40965 - DNA, 796 bp, Zea Mays
cgcgcatccttctgcgcccggcccccaacgccaccggtcatcttcggctcgccgagcgtccctgtccctgctcgccgttccgagcttggccccgcggtgagctcgccgctggccttctctggtgctccctgctcgcccctatctctgtcctctgcctggtcgccatccccaagctgcgcccctctgctcggctatggcccccgcacaccatgctgtccgaatccccgctcctgctctggctcatctgcgccaccaccgcatcacttctctcctatggcgcccggatctccactccccttcctccctgccctctgctccagcttgcagtcgctgcgtcgctcagtccctggccacgtctgtgtggttgtgttctttcgtcggaatgctcaatttgccgtggtcctgcgctctctgctcggttcggcgtgggttttagttgtcggtcaaacgcacccctgtttcctttatcttgtcgtcgtcgttcggtcacctcacctcgacttgtgttcacactgacaaaggaatcccaagaagatgtaaagaagcaagccctggtcgatacctcaagtgctcggcgaaaggctagaacaagaatcatcatcgtttatgcggagttctagttaatatggagagattataagagttgtggatggaagagaaagtgaagctctgttctatactcgtcagctatttgattgaagacttcaatcgaagactgtcgtcgttctcgcaaatcttgaatcgagttgatcacgaagacgaccccaagtcgacctaggacgatgcagagattgga

SEQ ID NO: 40966 - DNA, 1645 bp, Zea Mays
cccgtgttaagaataaaacaatcttcacgaacaactaattcaaccaatccattcatcagatcagtcaataaaaatagcaaatcagcttaccgttccaacagctgactcgaatccgcgagatcgataatgattttccgatcctggcaatttgtcgagcgcttggcaggtgctacacgaacttcacgcacaccaccatccaatctttcgacatcttcacttggggattcttttgtccgtgcgatcacaattcggaggcatcacggagggaccggcatcgagacggggcgacggaacaacgacgaactagcgagttgaaccacggcgagtgatattttgacgtggatgagcaatggtaactggcggacacggaacggcgaagtgaggtgtgcggtcagctagcaaagatgaatgtgtgcggcacggaagcgaaaacagaacttgatggccagcttggagactcgacgagacggtaacatcacggcgacgtgcagccaaggcgcgtggaactcgtagggccagatcttggcgaggacgagcacacacgatgtgacgacaacgacgataaccggcgaggtcgacgacgcgatggggattaagacccagcgagtcgagagggcgtgctgacgagcaggaagccgcgtaagcactggacagggaaaacgacgggctcaacagcgtccgtggccagagcgagcaccagagaaaaacagcggcaaccagcgtccacggcgaggtccgagcgtccagagttttttttgccgagggcgtacagagagggatgcacaaatcctgggcgcgatggtggccatagccaagcagaagggcgcgactgcgcgcagaggagctcggctaccatggcgagttggacaaccgcggcactggggctgggcgcgggagggcgcggctagaggagcgagctaagggagcttcggccggccagcagcggagaggaacgagcgcccgagctgccgagcgatgtgagcaacgacaaggtcgacggtcggcggcacggaggaatggaggaaaccaagatcagccgtgacagagaagctgcgatagcaagataaacagccgtctaacagccacgacgaagcgagtgttggatgagctcgacgaacggcgacgcgaagagtaaggcgagctccacatcaacggcaacggtacagtatcgacaagaacgccgcgcgcagctatgggcgagctcgaagccgagcgctgggcagggagcaggcgtggctggggaagacagaacgcggccatccatcggggaatccgtgtcttgttgaagctgagcacatgggagagggagctcggcacggccagggagggcattgagctcgtgcggccagggaagagggagactgccgtgccatgggagggacttcggcaggtcgcgcagggaagcagaggcagtgacggccaggcgccatgggtgggcagagtggaactcggttgcttgcaggggagatggagaggacgcagggacgcgcgagatacgacgagtcagccatggcgagcaggagctgttgcagggaccgagcgccggcgttaagggctggggcgagagcggccggacagaggagcgcggctgcgcgctactgggaagacagcgcgcgcaaggaagataagcacgacgcgcggctga

SEQ ID NO: 40967 - DNA, 11530 bp, Zea Mays
ttttacttcgcctcgcctcgccataacgacacgcgcatctccctacctcgatacgattcttcgtcttctcttccccgcgatcgcgccagcgcccccgaaaaaccctaactacctggagcctcgacggcacctgccgcaggcgacggcgagcgaccccaggcggtggtagacggcgcagcgggttgccccttgtggaggcggacggcacggcgcagcctccaagtataaaatctttcatcaacagtgttaccactgttcctcttgaggatgtagaattgccgctgaaggattttgcatgggaatttgacaagggggattttcatcactggttggaccttttcaatcattttgattctttctttgagagttatatcaaatcaaggaaagatttgcatcttgaagataattttcttgatgtggatcccccatttcctcgagaagcactacttcaaattctccgtgtatcaaaacttatattggaaaattgtacaaatagacacttctctagtttttttgagcatctgtctgcccttctagcatcaacagatgcggatattgttgaagcaagcttgcagacattaatggcatttgtagacaagtcagttgggaaaagctcaatacgcagtgcatctctcgcttcaaagttatttgccttatctcaaggctggggtggaaaagaaggtggtcttggattagtagcatgttctctacccagtgtatctgatccagtttccactgaggttggatccacactccattttgagttctatcgtgctgctgataaatcagagaaatcccagtgtctagagaaagagaacaagttggaagtaattcatttatcgaatgtcaattcgtgcaaggaggcagatcttgaaatattggacaggttggtcaaggattacagtgtgccacaagctttaaggtttcttcttcttacaagactgagatttgcaagggcttttgactctttaacatgtcgacaccagtatatctgtatccgcttgtatgcttttattgttcttgtccaagcaggccatgatctggaagttgtatcaacatttttgaacaatgaaccagaattcattgatgagctgttatcactacttagctatgaggatgagatacccgaaaagattcggatactgggagtcctttcattagtcgcactgtgccaagatcgacctcaccagcctactgtattgtcctcggtaacttctggtggtcatcggggtatccttcctattctcatgcagaatacagtggattctatcatcaatggttctatgaaatggtccataatatttgctgaagcacttctttcgcttgtatctatgctggtatcatcaacaccaggttctctagctctacaagaagcaggttttataccaactattttgcctcttctcaaagacacaaacacgcaacatttacatctagttagtaaggcagtgcatgttattgagagcttcctggattatcacaatccttcttcagcagtgttcagagatctaggtggactagatgacactattgctcgtcttaagctagaagtatctcaagttgaggttgattcaaaactaattgaccattctaccaatgaaggaaacgaggttgaaagttatccacctgtgcaagatatacaaccttcatgttctgaatccttgattttgtatcataggaagaacttaataaaagttttattacgtacaatatctctggcaacatatgtgcctggtagttctgctcgtgttgatggttcagaagagaatgtgttacctccatgtttatgtgcgatttttaagagaggcaaggacttcggtggtggtgttttctcacttgctgcaaatgttatgagtgatctcatacataaagatccaacatgctatactgttcttgattcagctggtttgccacaagcatttcttgatgccataatgtgtggtggactttacaactccgatgcagtctcatgtataccacagtgtttggatgcattgtgcctgaacaataatggtcttcaattggtaaaggaccggaatgctttaagatgttttgtgaaaatctttacgtctagatcatatatgaaagctcttagtggtgacacagcgggagctttatcaagtggacttgatgaattaatgcgtcatgcaccatcattacgatcctctggagttagcatgtttattgaaatcttgaacactatttttaaagtgtggtgtggtgtagactctatcccctataaggaatctgataattactctgcagttattcccatggatactgatgtggtggttgctacctcacagagtgagggtgtacctcctgaggtaggatgctcaggcgaaacagttgatgctcctttagatgctgtaacatcatcatccattgagttatttcttcctgagtgcatatgcaatgttgctcgcctgcttgaaactgttctgcaaaatgctgatatatgtaggctatttattgagaaaaaaggcatagaagctgttcttcaactgtttaagttgccatcaatacctgtatctgtctcaattggtcagagtatttctgttgcattcaaaaacttctcacctcagcattctgtttctcttgcacgagcagtgtgctcattctttagagaccaccttaaaataaccaatgaactgttgggttcgatctctggaactatgctggttggtagtgaacctgcaaagcaatcagctcttctgaagccactttctacccttgaagggcttttgtctattgccaattttctcctgaagggaactaccattatggtctcagaactggcttttgctgatgccgagatattgaaggaattggggaaggtttatattgaagtcacatggcagatatctttactcagtgattctaaggtggatacgcaagatgcagatcaagatgatttggctgaggaagcttcaatttctgaaagggatagtgatgatgacacaaatacagcaccactttcaagatatatgaatcctgtttcagcaagggcttctatatcaccgtggagcatggagcaagattttgtatcaactgtgcgatctgtttcccacatgcaccaccatggtcgacactcattatcaaggataagtgggcgcctaaatggagtgttgaatgcaacaagtactgatttggatggtccttgttttccagcagagacatcaaggcgtcatgatgctctaaagagaatccctgatgatgttgtttctgaacttctgaagaaattttgttgtaccatgcgttccttcctttctacccttgtcaaaggattaccggctcatcgtcggcctgactctaaccttaacccaaattcgagaagtcttgtgactgcactagctcaatttttccttagtgctcttggtttctctgggcattctactgctggttttgagatgtctttatctgtgaaatgccgttaccttggaaaggttgtggaagacatggctgtgcttacatttgacagtagacgtcgcttatgcaattctgcactcgttaatagcttctatgttaatggaacattcaaggatgttctaacgacctttgaagcaaccagtcagctactgtggacacttcctttctctgtccttgctgctgccacagatcaaggttcctctattaatgagaaggtgtctcacaattcctggctgctggatacgttacagagttactgtaaatttctggaatattatgtgaactccacgttcttattgtctccatcctcttctcataatcggcttcttgtccagcctattgtaactgagctgtcaattaatctattccctgtgccttcagatccagaatcatttgcgcgcatgctccaatctcaagttcttgatgcagttcttcctgtttggaatcatacaatgtttcctgtgtgcaacccagcttttgttacctccctggtgtcaattatgaacaatatatgctctgttgttggagatatgaagcaaagccgcagtagtgttggagttgccaatcagcgtgttactggcccccctcttgatgaatctgctattgctacaattgttgaaatgggattttcaagggctagggcagaagaatctcttagaagtgtgagaactaacagcgtggagatggcaacagattggttattcaaccatccagaagattctgtccaggaagatgtgcagcttgcacaagcgttagctttgtcacttggaagctccattgaaacacccaaggaggatggaagcaataagaatgatacagtcattgctgaagaaaaaggtgtatttgtgcttcctttggatgacatccttactgtatcgaccaagcttttccagtctagtgattccaccttggctttcccattgactgaccttctagcgacactgtgcaaccggaataagagcgaatactgcaagcgagtagtattgtatctttttgagcagttaagacatttttcgtcagatgccacggatatgggtgctttgtattctgttgctcatgtgctggctttgcttctgagtgaagacagtggcatacgtgaaactagtgctgaaaatggtgtcatctcccaagttcttaacatattaggaagtcttaaatcaaggacagaccagacagatcatacttggaattctatcagtgctctgttgcttatattgtataacatgctacaatttaatccaaaactcagtatggaaacaatggatggtatatccaagtcaatttctgatgcatccagtgctgacagcgaggaaaatccattaccaactgctgaacatagaactgaaattattgattcagcagatgatgcaagtgcaaatgtttttaaaaagattttagggaaatctactggctatttgaatgatcaagagagccaaaaggcactggttttctgctgtgaattcattaagctatgtgtgcctgcaacagttatgcatgctgtgcttcagctcagtgctcgcttgacaaaaacacacgcgcttgctgctctattctttgaaagtggtgggttagcatctctcttaaatctcccaggcacttgcatctttcctggctttgagaccttagcatctgctattgtgcggcacctcattgaggatccccagaccttgcagagtgccatggaattggagatacgacagtcattaagtaaccatggcagtcgtactccaagctcatttcttacaaatatggcaccactgatatctagagatcctgtgatcttcatgaaggctgcaacttcagtctgccaattggattattcaggagggagattgaatgtagtcttgttgaaggacaaggagaaagacagagagaaacagaatgttcctgtaacagaaagtggtgtgccatgtaatgagcctgttcgggtgactgctgaggttaagacggttgatacaccaaacagatgttcacggaaccacaaaaaggttcctgctagtcttcctcaagtgattgatcagcttcttgagatcatcatgagctatccatctgcaagcaaagaacatgggtttgatggttattccctgttgactccaatggatgttgatgaaccaaatacaaagggcaaatctaaagttggtgatggccaagaactggatggtgatgctttctctgagaggtctgccttgctatcaaagtttgcatttgtccttaagttgatgagtgaaatactccttatgtatgtgcatgcagtagggataattctgagacgggatacagagatatcagtgtcacgaagttgcgctcaaggtgctggacacagtggtttactgcatcatatattctatctgctacttcctctaccttcagtcaaaattgctgatacctcagatgattggattggtaatttgtctgagagagcttcctggttcttggtagctttatgctgcagatctgctgaaggtcgtagaagggttgtttctgaaattgtaaaggcacttaaccaattcattggttcagcaagcaacacctccagaggatctttaatacctgacagaaaagttttggctttctctgagcttgtgaattccatattgtcaaggaatagtcagagcaatttgcctgttcttggctgctcacctgatattgcaaaacctatggtagatggtggaatggtgcaatctctttctgttttgctgaaagtaattgatcttgaccacccagatgctgtaagggttgtcaacctgatattgaaggctttggatagcctcactaggactgcttacaccaccgatcaagtcctcaattcagatcgatttaccaagaacagattaccagggtcacatgaacaaacacatgaagctgatgacattgtaatccctgaacaaactacatacgattcacatcatcatactaatgacatcgaatctgcaagtcagcaagctcaagaactgtctcatgttggtggaaataataacgaaaaccttgaccaacctgctgaacaagaaatgggagttgatctagcagacaatagtacttctaatggcaatcctccaacaagagctgtgcagttcatgcgggaagaacctattgaaggtaatgtaatggctcctagtactgatattggtttggctttctcaatgcaacatcaagttgatggaatgggtgtggaagacgaggatcttggggaggaaagtgaggacgaagaagatgaggaaatagcagctgagggagctggtttgatgtccatagctgacacagatatcgaggaccaggagaacaatgcaattggtgatgattacaatgatgaccttatggatgaagaagatgacgactttcttgagaaccatgttatagaagtaagatggagggagagcttaactcgaatggattatgatcatcatctgagattttccaggggtcgtgcagactccagtggttttattgatatatcttctgagtcatttcatggtgtggggacagttgattcatttaatctgcatcgttcgtttggtcttgaacggcggcgccaaatcggaagtaggtcgcttcttgatcgaccaaggaccgatgtgaatgcctttcttcatccactgcttgtcaggccagcacagtctagggagggaactaattcagcgtggccctctggaggaacttcctcaagagattttcacatgctgtcttttgacatcccctcgtacatgttagatgctggcttttcaccagaaactgctcccccagtgtttggtgaacgtgttgtcagtactgctccaccacctttgatagatttctcacttggtatggattcccttagaattaggcggggccctggagataatttgtggaccgatgatggtcaaccacaggcaggtaatcatgcagctgctattgcccaggcagtggaggatcattttgtgtcacagttaactgtggctaataattcaaatagtgctcctcaggtgcggcctgaacagactggcaacggtgcgaatgcgcactcagagttaccagatacaggaaatgctgaacctgttacaaccgatccactttctcaacctgttggtcggcatcagctagtttgtactgttaaccaaggacctgtccctgctaatgatgtcctctgtcctacagatgtgcacgtaaatcagcaccttgttgattccatttatgatagccgcgttgtagaaccggtgcagcaaacagcagccggtgatcctaacactatacctcagagtgatgaaatgatgtgtattgctggtacacagcttggtggtcatcctgaaagagattccttgtctggtaatggaagttatggtaatattatgcaaaatgagattgaagcacctcaacaagttcacttgggtaatgatcctagggaacccccatctgatctggagtcaagttgccatgcacttgtcacttctgcaagtgctgctcctgagctgagtgatgctcatgtagattcttcagcagtcaatgctgatgttgacatgaacatcgttgatattgctgaaaatgaagttgggaactcagctcctgcttctgatggcaatgatttgtcttctaggagatatgaagatgctcttcaagagcctcagacagtgcaaactaatgctattaatgaggcctccagcgctaatgaaattgatcccacatttcttgaagcattgcctgaggatcttcgggcagaagtccttgcttctcagcagaaccgttctgccccagctgcttcctatactcccccagctgcagaagaaatagatcctgagtttttggctgctcttccaccagacatacaggctgaggttctagcccagcagcgagcacagaggattgcccactctcaaccagctggacagccagtagatatggataatgcttcaattatagcaactttccctcctgatttacgtgaagaggtgcttttgacctcatcagaagctgttctgtctgcccttccttcagctttacttgctgaagctcaaatgctacgggacagagagttgagtcgctatcgtgctagagggagcctttttggtggaagctacaggcttggagggaggaggctgccaactgataatcagacagttatagacagagctgttggtgttactgtgggtagaagggttatttctactacatgcagttcaaagggtaaagatgtggaggggaccccacttctagactcagaagctcttcgggcacttattcgccttctgcagcttgctccaccactcagcagaggccttcttcaaaggcttatgtccaatttatgtgcacatagtgtcacacgtgtcaccttggttggccatctgctcaacatgattaaacctgaatatgaggggcttagcgtatctgattgcatggctacatatagattacatggatgtcattggaacattgtttatgcacaatcttgctctgcaaatggtgtaccaccacttgtaacacgccgacttcttgaaatattgacatatcttgcttcagctagtccttctgttgtggatcttttgatctatttcaatccttcagctagtccaaactgtttgacattacagcacaataaagagacatctcaagaaagttcaatgcagaatatgatgccaccatattcaaaggcttatacacctattatattgcttcttaagcttctaaataaacccttatttctgcggagtcgagtataccttgagaaggtgttgtatttgcttgaagtagttattaacaatgctgcatcccaagttgattgtccacctcactctgtacagataactaacaattcagatattgaattcgttgatgggacaccatatcaaacacaggtggaaccatctactttggaacaaggtcatatcccggataataaccaaagtagagatgttgaggtcccaccatcttgtgctaaactggatgttaatgtgcatgcaatccttacccaacttcctgatgctgaattgcataatctgtgcaatattcttgcacttgagggataaagtgtactcacttgcggcagaggtggtgaaaaaattggctagtgttgcagcatcgcatcggaaattcttttccattgagttagctggtgttgctcagagtttaagttcttctgccgttgaggagcttgtaaccctgaagaacactcaaatgcttgggctcagtacttgctctatggctggagctgcgattttgcggatactgcaagtcctatctacactaacttcgtgtgtgatggatagtagacatgagcaagatttaggacaggaagagcagtcttttttgtgggatctgaatgctggtcttcaacctttgtggcaagagttaagtgattgtataagtgccacagaggcaaaacttgtacacaattcatcattcgcttcccatgccccatcggtggatgctttagcagttagtgcttcatcatctgtttcttcaccgcttcctccaggcactcagcgcttgttgccgttcatagaatcattctttgtcctatgtgagaagcttcaaacaaatcaaccagttgcacaatcagattacactgttattgcccctgaagtaaaagaatctgctggaagttcatcttcaccttcactgaagactggtggaacttgcaatgttacttttataaggattgctgaaaagcatcgacggctgctcaacgttttcattagacaaaacccaagcatactggagaagtcactttctatgatgttgaaagtgccaaggctgatagattttgacaacaaacgtgcttactttcggtcacgtatcagacagcagcatgatcagcaccttccagctcctctacacattagtgttcgcagggcttatgttttggatgactcatataatcagttgagattacgtcgtacccaggatctcaaaggtcgtttgactgtgcaatttcaaggggaagagggcatagatgcaggaggactaactagggagtggtatcaactgctctctagagttatttttgacaaaggaactcttcttttcactacagttggaaacaatgcgactttccagcctaatccaaactcagattttcaaacggagcacctttcttacttcaagtttgttggtcgagtggttgctaaagcgttatttgatggccaattgttggacgtccacttcacccgttcattttacaaacatatcttaggtgctaaagtaacatatcatgatatagaggctattgatcctgattactacagaaatttgaagtggatgctggagaatgatgtaagtgaccttccctatttaacatttagcatggatcctgatgaggaaaaacatattctctatgagaagaccgaggtattgaaaagccatcacgggttttagccgaaaccttttctgcttgcgtcagctattatcttagctgtgcagtttaacaaattttcaattcaggttaccgattatgagctaaaaccgggtggaagaaacatcagggttactgaggaaacaaaacaagaatatgttgaccttgtagctgaacatatactgaccacagcaattcgtcctcaaatcaatggtttccttgaaggcttcacagagttagttccaagggatctaatatcgctattcaatgataaagaacttgaactgctgatcagtggtcttcctgaaattgacttggatgatctgaaggccaacacggaatatataggatattcagctgcatctcctgttatccagtggttctgggaagttgttagagcattcagcaaggaggacatggcgagactactacagttcgttaccggaacatctaaggtaccattggagggtttcaaagcgctacaaggtatctctggcccccagagatttcagatttacaaggcgtatggatctcctggtcgacttccatctgctcatacctgctttaaccagttggatttaccggaatatacctcaaaggagcaattagaagaacgactgcttcttgccattcatgaagctagtgaaggttttggctttggttgattggttcctcgggaggttgtaaagcgtgcactgggtcattggttttctgcttgacatgtacagacgcagggtgttgaggccgaacaggccaccgccgaggtcgatcagactacctcca

SEQ ID NO: 40968 - DNA, 1285 bp, Zea Mays
tccacccttcctccatggtatagtgttactaggctgtccatctattgcaaaaatggattactaactcaataatggctatatacttaagcctacaaacttactaagtaataaatatatactaactaataactatatagtaaatattaaatgaccaaatcaaacgaaattacataatctatgaataatgtaagaaaacaatgtatacctgagatcgcgtacgagtccagctaacggtggagaaggtcaagtcggaagaacacctacgtacaaaaaaaactattgtcaatacaaaatttgacagcacctcccctataaagtgatgtttatagaacctgcaaataaacgacaacacgatggttgccaacacacaaaagtgcacgatatctacataacaaacaatatgttgaacatgtaatattaatgtgctaaacaaaatgaaaactatataatcactaacaatttactaaacactaactatatgttaaataacttaaagaacatgccccgagcttaagtctgattcctctgtttagcttgtttgggttgctctgatctgtgatcgaatagcggggcgtttgaaagtttcgatctcggcaactacttgggcaacaaccagttacctatttcagagaagttctctctctatgtgatcatccagctctcctggacaaaagtgaaactcatgctttgtacagttgatctgaggagtcaagatttaatgaaacggcgagcgcggtggggaataccttctgagttctgcgcggcggggaacggcgagcgcgacagggaacggcgagcgcggtcgctgagctcgctgcgcggtggccggagctcggtggccgggacagggcgcgcgcgcggccgggacagggcgtgcgcgggcggccggaacagggcgcgcaggcgcgcgcggcggccgcgcccggtatggtggcggtggcttgcggacgacgagcgcggcgttggctagcggcgacaatggcgaccggcggctaacgggcaaacagagaagaaacagagaagaaatggagaccccgagcttaagtcctagctcggcgccaagatctgtggcgccgagctaggcgccacgcggacggccacgtcagcgctgccagccttggccacgtcatagctcggcgccacagcctgtggcgccgagctgtgttagctcggcgccacaggctgtggcgccgagctaagggtccaaaactgagtttaaaatttttttaggtctaaacgtgattttacttcgatttaagggctaaaatacaaaaaattcggccga

SEQ ID NO: 40969 - DNA, 344 bp, Zea Mays
tcttgttaccatgcggtagtaatcgtggcacccttaggagtattatccttgcgccattgcacctgtgaacgccacggttacaaccaccgtgttcttccctatctccggctgccagcacgtcgtgatcaaattgagagccaccgcccccggagtctataaatcgagtgcaccatcgacttcgttatgtattcaagcagctagcgcacccgtccgcacctcaaatcctccaccagagagcttcaatttcgcatttcccccaatccactcaagaacaccgcacggtttgccctcgtcgtggccagcttgccccaggttcgttcaagcgctctggtcgattgttctag

SEQ ID NO: 40970 - DNA, 2748 bp, Zea Mays
attgatggtggccctgatgaatggctactgcaagcaatgttgcatttcgcagtggaacgaagaaaaacaaatccatacaaaaaaatagtttttgtttttgttatcgtaataatagaatagtggagtcgagtgattagtataagatgggcatgcatccatccactgatccacgccctcatcagttgaggtctgaaagctgagctgagctctagctgatagaggtagccctccacaccacaccactcgcaatccacacaactacactgatacacctgcgctgcacttgcctctgcgagcacgtactggctgtggctgtgcctggcctcctcttcctcggtggtggtggtggtggtggtgcactggtgctggtcttgcgcctgcttgttcggttgttcctcacttccacttccacggctcccctcccaccaagcagactgcagtagcacatccccctccgcgcaccactcgcttcgacaccaccgggcaccgcccggcatctagctctagcggcagctcatctccctccctctggctggctgtttgtttctctctctctctcctccccatcaggataagctcagcagccccccctgctgatctgcggcatttgccctgttcccgtgctcgatttgttcgcttctgtgcgcgcgcggtggtgcccaggcaataactcccctcggtgtctggctggctcgttgccaccctccccgcggcagagcggcctataggatgagagggacaggggaacccaacaaaccggccgcggcactgtcctggccgtgaaagacacgcacacagagctccagctcggccacgggcacgggcacgggcacgggcacgcggcgcctagctctgcactggccgacggggaaacggtcgagcttgctatccatcgcccgcgccgttcccattcatggattgggatctcaagatgccggtttcctgggacctgcccgacctggagcacgacgccgtgccgccgcccatcgccgccgccgcctccgccgcgccttcccccgcggcggcgtcgggcattgccgccgcagctgctgggcctccccccgcggcggcaccgcgcggggcgccgagccgggcggagtgctccgtggacctcaagctcggcgggctcggcgagttcggggctgcggacgggacgaaggagccggtagtggcagcggccgcggccgcggccgcggcgccgccgtccgctagcccgatgaagcgcccgcgctcggggcccggtggcgccgccggggcgcagtgcccgtcgtgcgcggtggacggctgcaaggccgacctcagcaagtgtcgcgactaccaccgccgccacaaggtctgcgaggcgcactccaagacgcccgtcgtcgccgtcgccggccgcgagatgcgcttctgccagcagtgcagcaggtttcacttgctcgcggagtttgacgaggccaagcgcagctgtagaaagaggctcgatgggcacaaccggcgtcgcaggaagccgcagccagataccatgagctctgggagctttatgacgagtcaacaagggacgaggttctcgtcgttcccggttccaaggccggagccgagctggcccggagtcatcaaatccgaggacagcggctcatactacgcgcaccagcgccacccggtcctaagcagcaggccgcacttcgccggcgggggctccacgccgccggcctactcgtccaaggaaggccggcgcttcccgttcctccaggacggctgcgaccagcagcaggtcggcggcttcagcgcgggcgcgggggcgcagcagctcgaggtctcttccacgtccacggtgtgccagcccctcctcaaggccgccgccgccgccgccccaccgccgccgccagagagcagcagcagcaacaagatgttctccgacgggctcgcccccgccgtgctcgactcggattgtgctctctctcttctgtcatcccccgccaactcctccagcgtcgacgtgggccggatggtcgtccaccagcccgcggagcacatccccatggcgcagcccctcgtccccggcggcctccagcagcagcagcagcaccacccgttcggcggctcccccgcctggttcgcctgctcccaggccggctccagcgccgtctccgccggcggtttcgcctgccccccgggcgtggagagcgagcagctcaacaccgtgctggtgccgagctccgacggtggcggccacgacatgaacatgaactaccacggcatattccacgtcggcggcgacggctcctccgacgggacgtccccttcgctcccgttctcgtggcagtagctagctttccaattcaagcgtccagcagtctatcgtttcagctgtactagtggtcgttttatttatttattcgctgctccctcgctccgttttaacttgtcctgtcgtttgctcgtttcttcgttttgcatgcctgatgcatatgcggcctggaaaaaaaactcgcataaaattactgagaccgtccgtgtgtctggttctggaagcgtacctgtctccatcaaccgaatcgagacaagtttgctgcacgggcaacactgcaacaggcttgtcatttgcactaggactatagccagatcattgttgtttccttgatctttgccattcacgcatacattcgtaaccatccatctttgtcgttggtgtgccagggaggcagggagactagcgaggtcagggatctttgccattcacgcatacatttaaggatgtactgt

SEQ ID NO: 40971 - DNA, 3001 bp, Zea Mays
ggcccattaactcactcgtcgtttactctcctctcgtcggcttctttgcttcgggtggacggcagggcgagcggcgacgccctcttcgtcggggaccttcgccggcgacgagaatccaacctgataatccggaagatacatgtgccagatgtgtcgatcacagggatagtaaagctctcgaactgggtgtaaagagatgataacatgtctgattttgaggagccctttaaaatttctgggatgtggcaatgctccatttgcacgcatgaaaatactacatatagttcatcttgtgagctatgtggtgtgcttcatgatctctcactgtatttcaatgatatcagtgaagacgaagatggagctaaatgcagacacaagtattctggagtatccatccttgcaagatctctttttacaccacctagtgcaaagtcaaaggctattgttttctctcatgatttcaaagacagaagaaatacaacagggaataagcaagctacaatggatgctctacataagacattcatgactcgcaaaaagcgccacattaacatagtgcctttcaagtttgatacaccatctcctgatgacatggtcactacaggattaaaatcatccagaaactttagaaaagttgacacagaggttctagttaaggattctgttggcgtgactggaaaggagatgatgaataatgatattcttctaactgaaaagaatacaagcatggacccaagtgcattagtacagttggatgatggtggaactagtagcaatgttccttcgagtagtcaaaatataactcttgctttggaccatgagctacaacatttgagtttggagagcaaactgaagaacagtaaaacgaatgttaagaaaacagcttctgtttctcactacaagccagaaccttggatgctccagagtgaaaatcaagaaatccgtaatcagctaagtcttgccattgttggtcatgttgattctgggaaatcaactttatgtggtcgattgcgacatgctctgggattgatttcaaaaaagcaaatgcataaatatgagaaagaagctaaagaaaagggaaaagggtcatttgcatatgcctgggctatggatgagagcagtgatgagagggagcgtggcattacgatgactgtggctgtagcatactttaatagcgagaaataccgtgtggttctgcttgactcccctggtcacaaggattttgtgcctaatatgatatctggtgctacacaagctgatgccgccatcctagttgttgatgcatctatagggtcatttgaagcaggcatgggtgtcaatgggattggtcagacgaaggagcactcgcagcttgttaggagctttggtgttgagaacttgatagttgctgttaataagatggatggggtggaatattcgaaggagcggtttcagtccgttaaatcgcaactcggcgtctttcttcggtcgtgtgggtacaaggactcttcagtcacctgggttcctttgagcgcaatggccaacgaaaatttagtcacagcttgttcagacactcgacttttatcttggtacaatggaggctgtctgctgcaagccatcgactcgttacctcctccccgtcgcgacgtgtcaagtccactgcgccttccgatatgtgatgtcattgcatctcacacgctgggccaggtggctgtctgtggtaaagtcgagtctggagggatccgaactggctgtaaggtccttgtcatgccttctggagacatagctacggtgaaaaccatggagcgggattcctctacctgcagcttggctagagccggggacaacgtcgccgttggtttgcacggggtggaccctggccacatcgcggcaggcggagttctctgccatccagatttcccggtgcgcgtggcgtgtcacctggagctgaaaattctggttctggaaatcaccgtgccaatactggttggccttgagtttgagctgcacatacggcacgccaagtcgtccgcgaggctggtgagaatactgtcgtccctggaccagaagaccggcagggccctgaagaaagcgccgcgtctgctcaccgcgaggcaggcggccctggtcgaggtgaggctggacagagaagcgtgcgtggaggaattctcgacgctgaaggcgctcgcgcgggtgttcctgcggtcgcagggtagcacggttgcggtgggcgtggtgactcgagtcctggaccgggctttggacatgggctagctgcattggcacgggcgcggataatttatgaacgtcacgcgcgcggggggaggcaggtaggtcggtctcctggattaatggcacccgggaccgggagggagagagagagggcctttcggcgcccaacgaacgattcaaaggcggccgacacgagtttcgtccacgcacccccacggttcaaagggaggatccgcccgggacggacgggtcaaaggcccgcgactgcaatgaattcaatgaatctggggctgtaagccggccgttggcttgttgcaatctgtccctatttttcttccatccaatccaagggcgcaccgacaggcacactgcgtagttagtgccccttgtgctgaccgtccgaccgcggctgaggaggggggtgtgcggtggcatgtgttgaatgagctgtggtttctgccgtattagtctagtatctatatagcgactcgtttgccggattacccactaagccatgtgtgttgtttgctggaacggccgcgcagctagcatgaacaatcatcggctgccagccatgtggcgcctgcctgcccgcctccattatgcatgcagctagctgctcggcccctgcaacggagaaatttgcaactttggcactcccgtccgccgccgccgcaaacgatttataatcatacagacataaattatgtcttctgtttctgtttgaaatagagatgagataaagagatctactgaagatggccttagactgtttcgcagcggcaggttc

SEQ ID NO: 40972 - DNA, 955 bp, Zea Mays
tcctcggccacgcatggggaacgcgcggcgccccgccgctgactcggcggcggcgtcggaccgggaggtcggatttgcgaagctacatggcgagtgcttcgagtactacatgcagacctactccatcgttctaggtcgccatagccgccgtcgcagcaagggccccgtcgccgccccgccggaggccgacgacggcgtcgacgtggacctcggcgccctcggagcaggcatgaacgtctcccgccgccacgcgcgcattttctacgacttcctgcgccgccgtttcgcgcttgaggtgcttggtaagaacggctgcctcgtcgagggcgtgcaccacgtccccgggtccgcccccgtcaagctcgactcccaggacctcctccagatgggggacaccaagttctacttcctcctcccctcccgctccgtcttcgacgccggcatcacgcgccggtcatccgccgttcagcgcgcgatcccgccgcctccgtctgatgatgacgaggatgaggatgaacatgaagaggccgtggcagcggcgaagcgtcggagggacggttataacggatcaaaatcttacagggaagcagatgatcaactattgcttcagttggaagagaaagatgtcatctcatctgctgctactatcttgtctgatctctgtggacctcaggaatggatttctataaacaagcttcatgaagtgatgtttgataagtacggcggtatgtggcaccacagcagggtgcgaaaatacctgacatccgaagactttgcggaggctgaaactgacggcaggctatggcatggacttgcgttgctgctgagaaagtaccctgagcatttcgtgatcaacattaggaaagagtgaggatgggatttacggcgtttccgcaatctagggagccaaaacgaagaaagctacataataactaggagaaggggagggcaacaa

SEQ ID NO: 40973 - DNA, 1263 bp, Zea Mays
tcactgcttagtcagaaatagtgagaggctccaactcgcaactccgcagctgagcacgccgaaaagctcatcagtgctcatcccctgctggcccgttctcagtcccagtgagaggctccatgaagatcctggtcgcggtgaagcgggtggtggactacgctgtcaaagtgcgcgtgaggccggacgggaggggcgtggagacggccaacgtgaagatgtccatgaatccattctgcgagatcgccgttgaggaggcgctgcggctccgggaggccggcgtcgccgctgaggtcgtcgccgccaccgtaggccctgcccagtccgccgacacgctccgcaccgcactcgccatgggcgccgatcgcgccgtccacgtgctccacgacccggaccctgcgcggcccctcctccctctcgccgttgccaagatccttcgcgccgtcgcgctccaggagaagcccggcctcgtcatcctcggcaagcaggtcctggtgtcgtgcttgcttcaactgttgtttatttttctgcaagcaccagtagagccctacatgtcaaaagttgatcctggccaggacaggaaaacaagaattaaaaaaaagaacaggaaaacagccacaccatttgttgtggcacaagataggcaattgatgatgattgcaaccaaactggacaaatgttagctggattgctcaagtggccacaaggaacctttgcctccaaggttacattggacacagaaaaacaaaaagctactgttgagcgagaagttgatggtggaattgaaaccatctgccttgatctgccagcagtgatcaccacggatttaagacttaaccagccaagatatgcaactttgcccaacataatgaaggcaaaatccaaagttattaagaaagtcgccgctgaagaccttggcgtagatattagatcagacatggaggtgattgaggtcaatgaaccaccaaaacgaaaagcaggggtgattctttcatgtgtcgacgagctccttgacaagttgaaaaatgaagcacgtgtcctttaaccatttgtatattattcctcgctgaatatggtctgacgttcatttatttaagttctctctccaaatgttcagacttcagaccatttacaaataaaataagtgttaacatgaaccaattaagatactacccctgaaacatttacctgctgaattccttccaaatagctgtttacttgattgtgtacaggctaagctatctcttttctgaaatttggaggaat

SEQ ID NO: 40974 - DNA, 3123 bp, Zea Mays
ctcagactaaacaaatccgaagcacaaagcaggggcctcttcgcaaatcccaccaccaccatcaccgcctcccagatccgcctggccgtcctcctcgtccgccactgcggcggtgatccctcgccgccccgcccttgataccgtcgagaggatcgtcgaggacttcgccatggacctcgccatcaatcccttctcctccggtacccgcctccgggacatgatacgtgcgatacgcgcgtgcaagacggcagcagaggagcgcgccgtggtgcggcgggagtgcgcggcgatacgggccgctatcagcgagggcgaccaggactaccggcatcggaacatggccaagctcatgttcatccacatgctcggctaccccacacacttcggccagatggagtgcctcaaacttattgctgccgcaggcttccccgagaagcgcatcggctatctaggactcatgctgctgctcgacgagcggcaggaggtcctcatgctcgtcaccaactctctcaagcagtatccaccctgtctgcacttaacagttgtgtttgttgattgttatgcgttgtttctgattgtaattacttaacgtgggcagagatcttaaccactcaaaccagttcattgttggtcttgcactctgtgcccttggcaatatatgttctgctgaaatggcgcgtgatcttgctcctgaagtggagcggctgttacaaaatagggaccctaatacaaagaagaaggccgctttatgctctgtgaggattgtacgaaaagttccagacttggcagaaattttcatgagtgccgccacatcattactgaaggaaaaacatcacggtgttctgatatctgctgttcagctttgcatggagctatgtaatgccagcaatgaagcattggagtacttgaggaagaattgccttgaaggactggtccgaatactgagagatgtatccaacagttcatatgctcctgaatacgacattggtggcatcacagatccattcttacatatccgagtgcttaaactcatgcggatactgggccaaggagatgcagattgcagcgagtatatcaatgacattcttgctcaggtttcaacgaaaaccgagtcaaataagaatgctggaaatgctattttatatgaatgtgtggagacaataatgagcattgaagctacaagtggtttacgtgtgttggcaattaatattttgggtcggtttttgtccaaccgcgataacaacataagatatgttgccctaaacatgcttatgaaggccattgctgtagacacacaagcggtgcagaggcacagggcaacaatattagagtgtgtcaaggaacttgttgattaccttgaagtgagtgatcaagatttcaaggaagacctcactgctaagatatgctcaatagttgaaaagttttccctggacaggctatggtacttagaccagatgttcagagttttatctctggctggtaatcatgtgaaggatgatgtatggcatgctcttatagttctagtgagtaatgcatctgaacttcaaggatattcagtcaggtcattatataaagcattgcaagcatctagtgaacaggaaagtttagttagggtggctgtttggtgcatcggtgaatatggagaaatgctggtcaacaatcttagtatgttggacatggaggaaccaattacggtaacagaatatgatgctgtggatgccgtagaggctgctcttcagcgctactctgcagatgttactactagggctatgtgtcttgtctctcttttgaagctttcctcccggtttccaccaacatcagagaggataaaagaaatagttgcgcaaaataaagggaatactgtgcttgaattgcagcaaagatctattgaattcagttccattatacaaagacatcaatcgatgaaatcatctttgcttgaacggatgcctgtattggatgaagctaattatttggtgaagagagctgcttctatacaggctgcagttccatctgtaaattctgctccagcagtcacttctggaggcccatttaagcttcctaatggtgttggaaagcctgcagctcctttagctgatttgcttgatttgagttctgatgatgctccagtgactacctcggcccctacaacagcacctaatgattttctacaggatctgttgggcattggcttgactgattcgtctcctataggcggagctccgtctacaagcactgacattctgatggatcttctatctattggttcatcttctgtacaaaatggaccaccaacggcaaactttagccttcctggcatagagactaaatctgtcgctgttacacctcaagttgtggatcttcttgatggtttgtcctcaggcacatctcttcctgatgagaacgcaacctaccccacaatcacagcattccagagtgcaactttgaggatcacattcagtttcaaaaaacaacctggaaaacctcaggagactacaattagtgcttctttcacaaatttagcaaccactacattcacagatttcgtcttccaggcagctgtgccaaagttcatccagttgcgtttggacccagcgagcagcagcactcttcctgccagtggaaatgggtcagttacacaaagcctcagtgtcaccaacaaccagcatggccagaaaccacttgcaatgcgtatccggatgtcttacaaagtgaatggtgaggacaggctggaacaagggcaaatcagcaactttcctgctgggttgtagggccacctgtgtctatagggtttgggttgctctttcagacttatgcttgcctgctagtgagttgtgtacactggtagttggtttttggccgtccattatctctttatatatatagtgtacagtagatgacagcgattaatgatatatcctcagttttgccgaaatgtatttttatcttggtgcatatcggacttcagggtaaccaaaattttcacccttttccccgcgtaccaagcaccaaaggaatgtgttgtaccatgatattccccaatgtaattatttatttttctaatcattgtacaagcttattgtgcagacaaattatttgtttttcatgtgcgtttcttcaggc

SEQ ID NO: 40975 - DNA, 2059 bp, Zea Mays
tgaacgtccacattaggtcatcgattgacgtgttgatattgtgactgactcgagaatatgtgcaagaaaaaataagaaaaataaggtaaatctgacggcccacgagagcccataaattctgccccgccgcctcgtgtcaaccccgtcactcttgtgtcctcctaaaaccctaaccctccgccgcccctcggacccccaaccagcagctgccgcggccatccgccggcgagatggcgctgtacctgctgttcgagtcggcgtccggctacggtctattccacgcgtacggcatcgatgagatcgggcagagcgtggaggccgttcgctcctccgtgctggacctcgatcgcttcggcaaggccgtcaagctcaccgccttcaaccctttctcctctgccgtcgatgcactcaatcagtgcaacgctatatccgaagggatcatgaccgatgaactgaggagtttcctggagctgaacctgccgaagcccaaggaggggaagaaggccaaatacagcctcggggtcgtcgagcccaaggtcggttctcacatctccgaggtcaccggcattccctgccagagcaacgaattcgtccaggagctgctccgcggtgtccgcctccacttcgaccgtttcatcaacgagcttaaggattctgacttggagaaggcccagcttggcctggggcatagctacagcagggccaaggtgaagttcaatgtgaatcgtgttgacaacatggtgatccaggcaatctttctattggatacgcttgacaaggacatcaattccttctccatgagagtcagggaatggttctcatggcacttccctgagcttgtcaagattgtgaacgacaattacctatatgccaagcttgctaagtttatcgtgaacaaatctgatttgacggaaaaagatattcctgctttggctgatatagttggcgacgaggacaaggctaaagaaattgttgaagcagcaaaggcttcaatgggccaggatctgtcaccagttgatttgatcaatgtccagcaatttgcccaaagggttatgaatctctctgagtatcgcaaaaacctttatgagtatcttgtgactaagatgaatgatattgcacccaacctgacatcgttgattggtgaagtagttggagctcgcctaatctctcatgctggcagtctttcaaaccttgctaagtgtgcagcctccacccttcaaatacttggtgctgagaaggccctattcagagcactgaaaactcgagggaacacaccaaagtatgggcttatattccactcctcctttattggccgtgcttcaactaagaacaagggcagaatggctcgttacctggcaaacaaatgctcgattgcttcacgcattgactgctactcggaggctagcacctctgtctttgggcaaaagttgcgtgagcaagtcgaggagagactggaattctatgacaagggtgttgcgcctcgtaaaaaccttgatgtgatgaaagccgctattgacagcatggtcaatggcacctcaatggatgatgatgatatcgagaagaccgatgcatctcccaagaaaagcaagaaaaagaagaccaaaaccaaggctgatggtgatgcaatggacgtggataaaccctccaacgttgctggtggagaagctgagcctggaactgagaagaagaagaagaaaaagaagcataagctggaggaggaggcacaggaggagaacggtgcagcagatactacccctaagaaaaagaaaaagaagagccgtgaagcttccgaagaagctgaacctaagaccgccaccgatggtaagaagaagaagaaaaagaaggctaaggccgaggatgatgagtagccaagttatttgttgtatggcgtatgaatccgagagtatttgttgaaaaacagagatgaacgcctgcctagctcaactagcttgtagttcatgaggcgtttgatgcaaacccaactcaaagtacgaagttttcctatcgtctttacaaaaaaagaaaaaagaaaaaaaagcttctgcaaccatcagattaa

SEQ ID NO: 40976 - DNA, 2024 bp, Zea Mays
cgacgggccaagcaagcaagcacgcagtcacggtcgaaaccagcggacgactactagacgaggaggaggaggagggaaactgaaactgaaaactagcggcggccggagaaagagagctgcgttgcgccgctggtctccatccatcgatttgttttgttggcttcttcgcatgtgattccgccagtaggagtgttgcttatctacccctcctcctcggctcctccacaacgtccagatcatcagagccagaggttcgtcgtccttgcgcagcagatcgagaggctgaggggagagggatccatggagctgggaaagcccctttcggcgcacagatgtagctacaccgctacctacacccactgttccataggcttctcccctcgggtcgtccgtaccagctggatccgcgcggcggctgagggcggcgacggcggggcagaccggcgacggagaggtgccagcttcgccgccgatgggcccagggtcgtcgaggtcgccgctgccccggtggctactagcggaggcgccgccggagcagccgggagcgcggggttcggagcacgggacgcggaactcgccatgtgggacaagctcggggcggtcgtcaggctcagctatggcattgggatctacggggccatggcactcgccgggagattcatatgccaaatggccgggatagactgcacggggggcttccatccgtctctcacggcactcgtcgagggtcttggctatgcagctccaccaatcatggctctgctcttcatcctcgatgatgaagttgtcaagtattcgcctcacgcgcgtgccatccgtgatgtggaggatgaggagcttcgcagcttcttctgtggcatgtcaccatggcagttcatcctcatcgtggctgctagctcaattggcgaggagctgttctaccgcgccgccattcagggagcattggccgatattttcctgagaagcacggagctaatgaaggatgctcgagggattgcatcactgagtggtatcgttcctcctctggttccattcgctcagacgttcgcggcagtcatcactgcagccctcacaggaaccctctactacgtcgccacaactccgaaaggctccagctaggtagtgttaatcttgaaatctattaaaaccctatatatgtgaggtgacaatgcgctgttcactcaaaattttcagaccctacgtatgtggtgacaccagcgatgcgttcgcgcacagggcgtgagaacctcaagaaactatttgcagcttggtacgagaggaggcaaatgaggaagatatactcgccgcttctggaaggaatcttggctttctaccttggcttcgaatggatccaggtacgcatatatagcagaccgacaatatcctggcacctatgatcacccacggcatatactccaccgttgttcttggccatgggctctggaagatccacgaccaccggagaaggctacggcagcggattcagaaggtcaggagtgaagggagtagctctgcagacgacacattgtaactgcagcatatgtagatcggcgtggtctactgctggatagctagctgctgattgcacgcacgtactgggtgatcgatcgatctaccgatcagtcagaagaccagaggcgtacgtctcacaagttttgatctacttaattaatatcaacaaggtaggtataagattgggcaaaaatatatatataatgcatgtagtcatgtaatgtagatacaatgtgtacatatatggataaatatatgcaggctgtaatcaatataggaagtatatagtgtacgattgcgacatccaagtatgttataatcctagtatcacgtatgcatgcaaggaatataccagccacatcctttctttctcgtccctctcccacacttgcaatgttacatctattcggaacatccatgcacgagaaggctcgatctatggtctaatagttcgatttagtttgtgagtcttagaaagaacatatatgttcaccctatttaagctcttgctg

SEQ ID NO: 40977 - DNA, 3231 bp, Zea Mays
atccaattttgggtccgcagaacctcctcctctcgctccgccgccgccttcccctcgcccaccacgctttggtcccaaacccacggtcgctcatcctggacctccacgccatcgaggcagtgaagctgggctcattcgtgcaatcgtgctcaagtctggcatcaactcccccatctaccgggacctccacgcgctcgtctcccacccacgcctgctctccgttgttgcctcgctcctccatatgcccggcctcgtctgcaacgtcccctacacagcgctcccgtcgtcgtcctctgcgtcgaccgctccatccccatgctcatgcgccgcaaggaggccaagccttacgacatgattggtgagaccagaggagcacgagcgcaacctccgtcacccctaagatctcctcaccattgtggccatcctgcaagatcagtactcattatctattaagaaggttacggttagcttgaggataggcactggagagtttgacttgcgatatttgagtacatcccattgctggcgctccgagtatctggccatactattgattcacataccagctaaatttaggaccatcccgattgaaggctcttcccacttaagtgattcttccttctgaatccattttttagcttattcattcggattatgacccataattatgtttttttgtttgcttgaattcggtcaaacaaactgagaaaagcgtggatcctctgaagaatgtctgaaaaaaatgatagacaagtccctagatttaccccaatttcacttgctctatagatttatagttctataatatgtgcttccttatcaatctttgttactcaattatgctagataatcacttgtccttaatctaattaacagtgttgtcatcatagatgaagctgacaacttagttgattccttgaataagatatacaagtcaaagcttacatcttcttaggttactctcacctttcattaacctttccatcacagtctggcaaatagtattttgccttgtgccataggtcattatacttagttgcaattgtattgctttgtgtttcattcaatgaacataaacatctacattccatgttgtccattagttatgatttttgctggaacataaatggcatatagctctgtattttgtgtgcctgatgctcattcagtactattgtcaaagcacaaaagggagatttaggaatttatttggcttataaaggggcataaacaaagagggtcttttagtggtggagttagcttagcttgcctatggggttgtatggcacattataagagattctatatatggtttcatctggtttaggtttagaattttcattttgaaagcaacattcagtccatacatgacttgagcatgctttctaaattgacatttttggtgtttacttgggctaaaaactaggattcttgcatttttctgccatgtgctgtttacaggtgaaattgtgttgttcagaaacaaactttggcatccgtttctcattctcctaactgcatttacatgtattcattttccttttggattgtagctgaaagcagtcctttcccacctagatgaataccttaatagattttacaatgttttgggagctaggaattgatgatacatccagaccttggtagttttaacaaggtcttccacacatgttctgatcaacaatcaagatggtagcactgtgtcttctatgaccacaaaccaattcttgttttcccttgacatcgataacataaacatagttgaattttgtcactttgtgaaagacatcaatataatccacaaggtaaatttcttaatctataaccactgtttgaaattggtagtctacaatctatttgatgctttaagtgaactttagaagtttatatcatttccaagaaaagtttacattaccttttccaattaatgttgactcaacatatataagtaactaccaaaatttatttggaatagaaattgaatattaacaaacaaaaaatatcttgtacttaaaatttgtatactaatataacagaactgcgacaaactcaatgatgggcacaaaagagctttgcacaatctcattccaggatcaacgactcatagatgtttttatcaacactgcacacattgtttgctgaaattagctcatgttattgatggtgtttgaaagaaacattaaagttttgcttcgacaaatgtcttttgctcagggcatctggcttggtgtttcttgtttggtgatacctgtacaagcaaatttggtgacctgctacttaaaaagtccgtgtttggtttacttgcttgttggcaccattgcaaaattgcatgttccttgtttggttgtatgaaaactgactatattatgacttgttgtatgcattattggtgtattatgcagctgtttctgcaaagaggtcgtcttgactgatcgcaatgatgaagttctggagtgttgttgttatgatgaaggcagacccaagtattgaaagggatgatctgattttgctctaggagattgccatgtacatgcttcttgcatgtggagctgtctatgtgatcttgataagaaagatttgtggatgttgacccaacaggaaattgctactgaggtgcaaagtgaatccaagtgaaagtaattaggggagttagctatgtcaaatggaaagagagtggttgctaaaggataggaagctgaagctggatgaaggaagcaactacatgcaaccgatggcaataatgcattgcagggttgaggctcgttagaaatgtcaagttggtcccggacgtgggtatggtgcccgcaaggccgacagagctgagatcaagcactgagatcgtgccctcgtgcctacggctgcatgtcacacctggccagaggcataggctaccactactgttctaagaggacaacctgctcgatagctagcctaggatggccttcagttccagcaaggcttgtcggctcgtctcactgcagaacgctattgttggcgcctaattgaacgaagttgataccggtaggatcccatgaagcaacataagcagcagaagtctgacgaggaatgacatagatgcagtgctttcgtttgttgctactgaaaaaagatctgaaccaagtatttctgtaagtataccaacaagttagttgctactactttgtatattgatcttcgttggccgaatgtttgagtttttttcaaggcacaaacactttattttgagatcta

SEQ ID NO: 40978 - DNA, 3413 bp, Zea Mays
ctcacgaacacacccatttggtgccctaccgctaagccgctaaccctggctcacgaacacacccagtcagccgccaggccgccgctgtgccttccgccgtccgccgaggcaccgagccgctgtccctccccgtccgccgagccgttgcccctgtggctgtgctgtgcctccgttcgccggccgagccgctgtccgcctgtcactgtccctcagtccgccgagctgctgtgctttccggcttcgccgtccgccgaacaggggagcggagagccgccgccatggcggaggaggcggaggggatggaccggttcgatatggagggggacttcgagggcgggcggttcggccgcgacggggagttttactaccggagccggcgggagcgggcgccgcagacccgggatgacgccatctacggggtcttcgcggagggcgactccgactacgattcggaggacgacgaaggtacccgccgccgccgccggaagcgccgcaaggacggcggcggggaggccgacctcaccaagcccgtccagttcgtctccaccggtaagttcatgcccacccaggagcccgagcctgaggagaggccggggctcgggcgcgccgccgccgctgctgccgataaggaggaggaggaggaggaggaggatcaggacgatgagggggacaccgagatgctgccggcgatgttcggcaagatcagggacggcgcgcgcgcgaggcgggaggagaaggagcgggagcgggagatggcggcccgtcggcgacaggcagcgggtctcggggccggggagccatccgccgctcctgggagcctggagtccaactccaaggtggccaagatgatgcggatgatggggtacaagaaaggcatgggccttggcaagaatcagcaggggatcactgcgccggttgagtccactctgcgacccaagaacgctggcctggggagcgttgaggggttcagggagcccaagatcatgtctgctaaggagaatgtgccagccccaccacctccaccggcatcagcgaagaagaagcgttggtccaagaaggctaccacaaagaaggctccaatcttgacgaaaaatgagctcctggctatgcgtgctgagcaggaacaggaggaacagcccgctgttgtccagaaggtgattgacatgcgagggccacaggcgcgggtgctgacagacttgaagggtctcaatgaagaacaagagatggaggcgaatgacgtgcccatgccagagctgcagtacaatgtccgcatgcttgttgatgaggctagggctgatattgtgaggttggacgcccagctgcggcgggagcaggagaaggtggctagcttggtgcgggagaaggaaaaagtggctaagcaagaggcatcgcagaaacgccagttgcttgtgatggagagaattgcagagacactggagaaggtccaggacgatgatgcatccggcatgctcactctggatgggttgattcagacattccacggattgaaggtgcagtttgaggaggagttcaagatgtgtagcatcgcatggattgcttgcagatacgctcatccgctcctaatccgcgtcttccaggggtggcagcccctgcatgatccaaaatttgggttagaagtcatgaaaaaatggaaggacctgctgcagggggaccaaccatatgacttctcagatagtgccgcatcaatgacaccatatgtgcagcttgttagtgaagtcatcctaccggctgtgaggatatcaggaaccaattcgtgggaggctagggaaccggaaccaatgctccactttcttgagttatgggataataagaagttgctgccgcctgttttgcttcaatcattactagagcatgtgatcatgccaaagctctcagctgccgtggattcttgggatcctcgcagggaaagcataccgatccatgtctgggtgcatccatggctgccaatgctaagggaaaggatagagaccttgtgccattctattcgatacaagttgagcactgtcctccatgtatggcaagcacatgatgcttcagcatatgcagtgttgtctccgtggaaagacgtgtttgattcggcaagctgggaagacctgattgtgcggtatatcattcctaaactgagattggcgttgcaagactttcagatcaacccagcaaaccagaagctcgatcagttcaactgggtgatgttgtggacatctgcaatcccagtacagctcatggtccatatgttggaagtcgatttcttcagcaagtggcagcaggttctttaccactggttgtgctcaccaaatcctgatttcaatgagataatgaactggtataagggatggaagggccttttcccaccagagttacttgccaatgagcgcatacggatgcttctaactgctggtcttgacatgatgaaccaagctgctgaaggacttgaggtggtgcaacctggggctagggagaatgtgggctacttgagggcaacggagaagcgacaatttgatgcagcacagcaagcttaccatgctgtgccaggagcagccatggcggatttgagcttcaaggagtctatacaggcatatgcaatggaacaagggtcatctgcacaccaacagggtctacgacaatgtctggaccttcattctaacagatgcaaccttcaagagcgctgagattcaagaaacactgagcaagatgggtctcaatgccgtggtggccgcctgctacgtctttccattacttgtctttgtgctcacagtccgcttcttctacgtactgtggcacagtggccaaccagagtcaaggttgtgcgccaccagattgcgttgtctcattgtccttggctccgaaaaggtccagattaccagctccgggtgatgctgatgagctatctgtcattgaagaccaaattgcatggatagttcacataattgcatccattgtcaagtaaggcaggtaacaggtgttaggaagagcccgtagagaggtcgaggagcagcactggctgtttctctggcattgatcaaggcgagcacatcaaggggtctcaggcacctccctctcattggtgtcgtcgttgaaccagttatggtacattggaatggctgcaaattgagggagaaagacctggaaacagtgatgcagcatgttcacacgaagatggcaacaatggtaacatttgcattggtcctgtaaataaggtattgaatatgcttgcttgatggattgaagatccaaattcgaatataacttcataagttcatatcccacgagtctaattacttgtggcttgctgaagatggcatgaagatgcaggtgattattgcttgttctgtggcttatttccttttacttagttaacttcctattaggcagctactgcaccagcaaacctg

SEQ ID NO: 40979 - DNA, 1597 bp, Zea Mays
gggcgcgctccccgccggggacggacggttggtgcaactggaaagcgaggcgttttgttttctcccgtgctccccctcccggggaaggggcaacgagaaatcgaacccacacgcaacgcgacgcctccacccgctcgcctagtccagaatccagatccagcgcccgcatctctctctctcgcgcgcgcgcgcgagcgcgatgagctgccgcgacgggcgatcgtgctagcggtaacagcgagcggtgcgcgagggcggagtgggagtgtggatccgaggggcggcaaatctggcaggcgccgcggtggggctgcgggcgcgggggagggcggggggctgggcggacggcggggagggaggggaggactgcggtaggctcaggccctggcgcaggaggctgctcgcgtccatggcgctctcgtggtcctcggccctccgcctcgccgtcgccgccgtcctgctcgtcgccgtcgtcgtcgcgctcttcactctccccatcgagaaggaactacttgcatccagctcacggcattacctgccctggtagctttcatcttgactgagagaatttttctctgtatacaatgtgctatgggagcatgggtctatgggaaatataagaaactattcagagtcaggagattttgaaggactttctggtttggatcaaggagaatttgggtccatggggtcctttggtgttggccctcgcttacatccctctgacagtcttagctgttccagcatcaattcttacacttggagggggctatctatttggcttgccagtggggtttgttgctgattccattggagcagcaattggtgcgactgctgcatttctgcttggcaggacgattgggaggtcttatgttctctccaaatgcaaagattaccctaagtttcaagcagtagctattgccatccaaagatctggcttcaagatcgtgttgctactaaggcttgtacctttacttccgttcaacatgttgaactacctgttatctgtcactcctgttggtgttggagaatacatgctggcttcttggttgggaatgatgccaatcactcttgctctggtgtacgttggaacaacactaaaagatctatcagatgtgacacatgggtggagtgagatctcgactactcgacggattctgataatatctggttttgtattatctgtggtcttgattatctgcgtcacaaaaattgcaaaatcatctctggagaaggcattggctgagaatggagagctccatgtaggaacatcgcagcttccaggtgtaacctctcccttggatctgcaacaacctcttgtaatcaagattgacacatcaaatgaagaccacgagaagtaaaagtgttgtgtttacaatctcagatgtaaattctttggttgttgagtcggtagactgtatatacacccatactctggtgaggcccgtaaatgggtaaaaaagacatcatccccccttccaaaaaagggaatgaagtttagtttactgataggttatagtaatacgatatgcgctttgtttcactccacgtgctaccttatctttggtgaaaatactcgcacttaactgggttgaga

SEQ ID NO: 40980 - DNA, 811 bp, Zea Mays
ctctcccatgcgcatagcttatgaatcatctcccacgcgatcgtattccattgcaaccacctccgtaaacattacatgctcaagctcttcgttcctagtccgttgagatcccttccgggattttcgtggtcgctgcaacaaaccccgagtcgggctctgaacaacctctgcgagatctttggggccgacgtggccaactcgccagcgcctctgggctataaaagcgagcccccgtgacctcctcatccctcgaatcgagttctgccttggattagcgtcaccatgtctacaggagaagaagagtgctaccgcagggaaagagaatctggtccgccgccatagccatcccgcactcccgtcgttattaggtgcctggggcttggtccgagagcttcggaccacactatcgcttgggtatctggcgaatcggagctctgtatcgtcgccgggtcgcgcggattgctcatcagagtactccttcgccttggatccgcagttcgccgtgacccgtggtaccgggcatccttatacctagtaagaactccctcatccgaatcaatttgctctgctcatggcgtcgatcgtgtgaattgtcgaattgggtcgctgctgcgcgtactccagtttgccggtggtgaccaccgccgctcggcagctgggagctgctgcggtctgggtaggagggcggcggggtcgttcagaccgcccgatcggaatggacgtctcggattaatcggtcacatacaccgtcgcatagatcaatcggaggccttagatggcaatcgtgcggctagaaccggatcgggtcgta

SEQ ID NO: 40981 - DNA, 557 bp, Zea Mays
atctcacatgaggggaacgacgttaccatgctcaccaagatggaattggtggaaggcgaactcgggagattcgcgatgataagaggggaggagccaacccaaacatacaacaggctcaagaccctcatcaacaagataaggagctatggaagcacgcgatggacggaccacgacgtcgtccgcctaatgctaaggtcctttaccgttcttgatccacatcttgtgaacaatatttgagagaatcctaggtacacgaagatgacgcccgaggagatccttggaaagttcgtaagtgggcggatgatgatcaaggaggcaagatacgtggacgacgcgttgaacggtccaatccatgagcctcaacccattgctctcaaggcaacgaggagcaaggaggcgctacctagcaaggtagcacaagttgaggcggctgggctcaatgatgaagagatggccctcatcatcaagcgcttcaagacggcgcttaaggaacgcaaaggacagccttacaagaacaagacgaaggggaagcgctcatgcttcaaatgtggtaaggt

SEQ ID NO: 40982 - DNA, 1673 bp, Zea Mays
caaggttgcctcctgaacctggtgggtgcctcaaccgctcatgctgagctgagacatggttgggagactcggtgggtggaatccgactggaaaaggagtgaagggaaagcaggaaggttcaagcacacagcggggagatactctgcagatcctgatgacaaaggaatacaaacaacaatagatgccagacattttgctatctcagccaagttcccggaattcagtaacaagaaccggacgcttgtggtccagtactccattaagtttgagcaggatattgaatgtggcggtggctatattaagcttatgtccggttatgtcaaccagaaaaaatttagtggggacactccgtacagcttgatgtttggaccagatatatgtggtactcaaacaaagaagctccatcttatactctcttaccaggggcagaactatcccatcaaaaaagatctagaatgtgagacggacaagttaacacacgtgtatactttcattcttaggcctgatgcatcttatagcctgcttgttgataaccgtgaaagagaatctgggagcatgtacactgattgggatattctccctcctcgtaaaattaaggatgttcacgccaaaaggcctaaggattgggatgacagagaatatattgaagatcctgatgaagttaagccagagggctatgattctatcccaaaacagattcctgatccgaaggacaaaaagcctgacacatgggatgaagatgaggatggaatatggaagcccagaatggtatcaaatccagcatacaagggaccttggaaacgcaagagaattaaaaatcctaactacaagggtaaatggaagaccccatggatcgataatccagagtttgaggatgatccagatctttatgtgctgaagcctttgaagtatattggaattgaagtttggcaggtaaaagctggttcagttttcgacaacattctgatttgtgatgaccctgagtatgcaagaaaggttgttgaggaaacttggggtgcaaatagggaggctgaaaaggaagcttttgaagaagctgaaaaggagaggaaagctagggaggatagggaaggtcaaaaggcaaaggacgatggtggccggcatcgaatacacaggcgtcataaaaaacactacagagatcactgggacgactaccatgatgagctataaaagtccccaaatattgcattcctcaaaagcataagctggaagttgcttcggacattgtgggtgcttttcaataataataattgattcgcctggtcagaacaacctgaagtgtttcttgctatgcgccaacaaattattgaactacaggatttgatatgtaatggacaaccgaagatctgcagggcattccagcgaaaacttggctctggtactgaaatagaggggacgagagactgtagtttgtgtctgtacaacggtgccggccatgtgctagctttgtaatctcaaaacattgtctttgcatgaataatgtaagttacccaaaaattactgcataccaagttacaaagtgttgtagctgacatatgaggaacactttaattttaatcttcatatatatacttctgtaatcttcaaaaaggatacgatgcaattggtctatctctgtcatcaccttgcataaatgaacacacaggtttcagcaa

SEQ ID NO: 40983 - DNA, 1810 bp, Zea Mays
ggccgcatcctctccccccgcggccgagctccacccccacccacccacacgcacacactttgccggcggcgagcaccaccaggacagcaggtgttccctcctcttggttttcccttcatgcggtgcgactgggtctaacccttctggaatcatctccgattcggggggttttagacgatatctgggcgggatacaaggtttttggatggaattccggggatctctgtcgacccatatgtttagtggttggggaattggggaaagcggtagaaaggtgtgatgttttagtcctttttggttgaagcggagcttgagtctttgagaagccatttgggcgtaattcttctttcgttgattggggtcggccttgtgtgcaggttacgcagatgtttctttttagagttattgcatctcctcagttgtagtttatctcggttgtgtatccacgagtgctgtgtacaccaattcctgtagaaaagatgggtgaacatgttttcattgttcaagaatgttgttatatgtttttaaatcatgtaagacatgttttagttttaccatggggtctcgagaacaatattgtttatttcctcattctgttttgaagccgtcggaattatgcttgtaatcattgctgaagtttttgtgaacatatattttttttcaatcgattttgctcgagccagtatcttttattgcaacaccatgaactcccatggtgctggttcgcattcacggcttttggacctcaactatccccctgctgaaggggctggtgagggggcttcacgtttcagcagtatccctgtctctcatagagagggttcaagcagcatgcctgtacaacacatccaggcttcgagtagtacaccaccggctactggtgagcctcgcattggtatgcgtagttgccccatcgatgtggaagccatcgatgatgatgccgttatctattcttcaagaccactgcctcgagcaagacagcagttgaccacgacagaaagtattactatcataatagatgatgattccgaaacaaacctagaaacagcaggcgatgctcttgacgagcatgtgaacttactgctatctctgggcatagaacgctcgcatgagcctacaagtgcaaccaacaccttccctggaataagcatggtggacacaccaaaagtaaacaccttcaagtggatccaggtgcctcctgaacctgtgaaggaggttccgaaggaaccgaagctcagctgcccgatctgtatgaacgagataaccgaagcggcgtcgaccgtatgcggtcacattttctgccagccgtgcatcaaggctgccattaaggcccagaagaagtgccctacctgccggaggaagctcactccaagacagcaacaccgggtgtacctcccatcgccttagtagcccagtgcagagtcattttgctacaagttctgccgtgccgggggctgtatgttggaggcaactggggggggggggggggggagcatagaggtcctgtttggttcgttcatttagtgtcataatcagttaacagggtaatctattaccattgctttatgtttggttagactatactgtaaacgattgcagtgggatgcaataccagccaatacaaaattattgccgctgctttttgactgttagccaactccgatccgtctttttggatcccacgttgcaaccaaacatagactggtaaccgttcacagcaaaggatagcaggtgcaataagttccattctcattaccactacctgttgccgaaccaaatagcacgtcttagtgttacgggaaaaaattgc

SEQ ID NO: 40984 - DNA, 4148 bp, Zea Mays
gcgcactaccccgagaaacgtgcgacgggaacctccgcggttccccaagttcgcctccttcactactctcgcgccccggcacgcctgaaaaaccccacccctcctgccgctccgcctctcccatcacttcccacgcccctcgccgcctcccattccagcgtggacacgacgccactcgccagcacggagacgcgcgcctcgaagcactactgcactagccagccgtcgttcttccgcgccggcgccatgcaccgggtgctcgtgagctcgcttgtggccgccacgccgcgatggctgcccctcgccgactccatcctccggcgccgccggccgcgctgctcccctcttcccgtgctgatgttcgatcggagggcttggtccaagccaaggaaggtctcacgaggcatttcagtggcgtccaggaaagctaacaaacagggagaatactgtgatgaaagtatgctgtcgcatatcatgtggtggaaagagaaaatggagaggtgcagaaaaccatcatccatacaattgactcagaggcttgtgtattcaaatatattagggttggatccgaatttaagaaacggaagcttgaaagatggaaccctgaacatggagattttggtatttaaatcaaaatttcctcgtgaggttctactttgcagagtaggagatttctatgaagctatcggttttgatgcctgtattctcgtagagcatgcaggcttaaatccttttggaggtttgcgttccgacagtattcctaaagctgggtgtccagtcgtgaatttacggcagacattggatgatttgactcgatgtggttattccgtgtgcatagtcgaggaaattcaaggcccaactcaagcccgtgctcggaaaagtcgatttatttctgggcatgcccatcctggtagtccttatgtatttggtcttgctgaagtagaccatgatgtagagttccctgatccgatgcctgttgttgtcaaatactgaatttcatgaggccactggatgctgatttgagatagcacatcatggtgttctcattcatcagggatttcacattctgcaaaaggttattgcttgatatctgtgctagagacaatgaaaacttattcagctgaggagggcttaacagaggaggctattgttactaagctccgcatatgtcgttatcaccatctataccttcacaattctttgaagaataattcttcagggacatcacgctggggtgaattcggtgaaggtgggctcttgtggggagagtgcagtgggaagtcctttgagtggtttgacggttcacctattcaagaacttttatgcaaggtacgggaaatatatggccttgatgagaaaacggtttttcgcgatgtcaccgtctcattggaaggcaggccccaacctcttcatcttgggactgctactcaaattggagtcataccaactgagggaataccgagtttgttaagaatggtgcttccttcaaattgtggcgggcttccatcaatgtatattagagatcttcttcttaatcctccatcatttgaggttgcagcagcgatccaagaggcttgcaggcttatgggcaacataacctgctccattcctgaatttacatgcatatcagcagcaaagcttgtgaaactacttgagtcgaaagaggtcaatcacattgaattttgtagaataaaaaatgtccttgatgagattatgctcatgaacagggatgctgagctttctgcaatcctgcatgaattactggtacctgcttctgtggctactggtttcaaagttgaagctgatatgctaatgaacggatgtagcattatttcacaacgaatagctgaagtgatttctttaggtgttgaaagtgatcaggcaataacttcattggaatatattccaaaggagttcttcaatgatatggagtcatcttggaaggggcgcgtgaaaaggatccatgctgaagaagagtttgcaaatgttgatagggctgctgaggcattatcaattgcggtcattgaagattttatgccaattatttcgagggtgaaatctgtagtgtcctcgaatggaggtttgaaaggagaaatcggttatgcaaaagaacatgaagctgtttggtttaaaggaaagagattcataccaaatgtatgggctaacacacctggtgagcagcaaataaaacaactgaagcctgcaattgattcaaaaggcagaaaggttggggaggaatggtttacaacaagcaaagttgagaatgctttagccaggtaccatgaagcttgtgataatgcaagaaataaagttcttgagctgttgagaggcctttctagtgaattgcaggacaaaattaacatacttgtcttttgctcaacactgctcatcattgcaaaagcactttttggtcatgttagtgaggctcgaagaagaggttggatgcttcctactatatctcccttatcaaaggactgtgttgtggaggaaagttcaagtgcaatggatttagtaggactatttccttactggcttgatgttaatcaaggaaatgcaatattgaatgatgtccacatgcactctttatttgttcttactggcccaaatggtggtggtaaatctagcatgttgcgatcagtctgtgcagctgtgcttcttggaatatgtggcctgatggtaccttcaacttcagctgtaatcccacattttgattccattatgctgcatatgaaagcctatgatagcccagcagatgggaaaagttcatttcagattgaaatgtcggagatacgtgctttagtcagccgagctactgctaggagtcttgttctgattgatgaaatatgtagaggcacagaaactgcaaaaggaacatgtatagctggtagcatcattgaaagacttgataatgttggctgcctaggcatcatatcaactcacctgcatgggattttcgacctgcctctctcacttagcaacactgatttcaaagctatgggaactgaagtggtcgatggatgcattcatccaacatggaaactgattgatggcatatgtagagaaagccttgcttttcaaacagcaaggagggaaggcatgcctgacttgataatcaccagggctgaggagctatatttgagtatgagtacaaataacaagcagggagcatcagtggcgcacaatgagcctcctaatggcagccccagtgtaaatggcttggttgaggagcctgaatctctgaagaacagactagaaatgctgcctggtacctttgagccgctgcggaaggaagttgagagtgctgttactacgatgtgtaagaaaatactgtcggacctttacaacaaaagtagcatcccagaactggtcgaggtggtctgcgttgctgtaggtgctagagagcaaccaccgccttccactgttggcagatctagcatctacgtgattatcagaagcgacaacaggctctatgttggacagacggacgatcttctggggcgcttgaacgcccacagatcgaaggaaggcatgcgggacgctacggtattatacgtcttggtccctggcaagagcgttgcctgccagctggaaacccttctcataaaccagctcccttcgaggggcttcaagctcatcaacaaggcagacgggaagcacaggaacttcggtatatctcgaatctctggcgaggcagttgctactggacggaactagtcagctgaaggtctttttgctattggatattcaataggaggcgggagctaactgacaccatgccgccctagttttgttgaactgatagtggtgctagccttgtgcatagtaggggccaggggagtaataatatttcccttgtctaaggaagtaattaaggatgtaggagcgcagagcaaatgattagcaaaacgatcacgttcgcagtgcggcaggcattgtgcagctgattcgtttgttcaatcagtgctctcgctcagtgacctgacagcgtgatcactaaacctagtagctgggcgcgcctttctaggccagaacagaacattggcgtgaattagattccagtgcggcagggtgttccctaagtacatgttttcagttcagcggcacttggaatatttttatgagaaaaagctgcgtcttttagcttggat

SEQ ID NO: 40985 - DNA, 1265 bp, Zea Mays
aacagatggaggccggcctgcgcgcgctaggccaccgctacttcggcggcggcggcggtggcctcggtgggttcgcggccgcgcgtgccacccggctccggcgccagcgccagcgccgcatggccgccttctgctccctcgctgttaatggagatgggaatggcgccgcgggtggccccgtggggagcggcgtcgaggtggcgcgcgccaggaggatgctccatgtcgtgctcgtctcgccgctgataccaggaaatacagggtccattgcaaggacatgtgcagcatctgcagttggcctgcatcttgtcggggtaagccattaggctataaggtagacgacacgaagttgaagcgcgcgggattggattattggccatacgttgttgtcaagattcatgactcttgggaccacttctgtgattatttcatgaaacaggaaggagataaaaggctgttggcgttcaccaaaagaggcacacacatccattcagtaagtagccgctgcttcttcaagtaggactgtagtatatcctcgccgtcgccacaatgaaaactgtcgctgatttctcctacaggccaggggactggctagtcttcggttccgaaacaaaagggttgcctcagcaagccctcgaggattgctgcagagaaggcctaggcggcgggaccctccggattcccatggtggagacctacgtccggtgcctgaacctctccgtcagcgtcggagtcgcgctgtacgaagccgctagacagctgaactatgaacagcttcagtaccagcctgatgagctcccagaggaggcgcaggagcttttcccggcagaggacatttatgcgtgaaaacctctgcccgagaacaattacacgttacacgcattgatcacctcatttttgtgtgtgtgtgtgtgtactgtttgccgtgacacatgattgagctggagggaccacgcactgcacgattctgttgcgaattcaattccaggccgagtccttgtccagacggtgttgacatgctcattcaaaatggtgtacctgatctgcttggaagaatcgttttagtgccatgtataatttcgcagtcagaactcagaaggtgattagagtatgctgcgatggggtctcgttctgacttcttttttgtgtgtgtactggttactgaaccataagctttgttaactgcaactggacgctgcgtcctgttgcttctctgtcagtgtgtgtggtgaggaaggaaggttggtgcgggagctttactgcca

SEQ ID NO: 40986 - DNA, 2003 bp, Zea Mays
gataaatctactacccgctgatgcaaagcttcgagatttaagaacatgcagcctgtagatcgttttgttgtggaagaatgcattttggatgtgctacttttcttcaatggatgtcggaaagaatgtgcattttatctggtcagcttgcctgtgtcttatcgctatgaatacctgatggcggaaaccatattttcacagctactattgttgccgaatccaccattcaagccaatttactatacactggttatcattgatctttgcaaggcattaccaggtgcattcccttcagttgtggtaggagcagtgcatgctctttttgacagaattagtaacatggatatggagtgccgcaccagacttatactatggttttcacaccacttgtcaaactttcaattcatttggccttggcaggagtggtcttatgtcaaggacctcccaaaatgggctccacaacgggtttttgtccaggaagtactggaaagggaagttcgcttgtcgtactttgaaaaaatcaagcagagtatcgaggatgctgctgagttagaagaactgctacccccaaaagctgggcctaatttcaaattccatagcgatgaaagcaacgaaagcactgatggcctgaagttatccaaggaacttattggcttgattagaggaaagaagtctacatatgatattattttatgggttgaggaacaaataattccaaaaaatggtactgaatttgcacttgatgttgttagccagacgcttcttgacatgggttcaaaaagtttcacccatcttgtcactattttggagagatataataagataatctctaagctatgtccaaatgaggaaatgcagctactgttaatgaatggagtcagtgcttattggaagaacagtacccagatgactgctatagctattgacagaatgatgggttatcgcctgatatccaatttggctatagtcaaatgggttttttctcctgccaatgttgagcaatttcatgtttctgatcgaccatgggagattcttagaaatgctgttagtaaaacatacaatcggatcagtgacctccgcaaagaaattcaatcactcaagaagggtcttcaagttgctaaagaggctagtgcaaaaaacagaaaggagctggaggaggccaaatcagtgcttgagattgtagaggggcaacctgcaccagctgaaagaccaggtaggataaggcgactagaatcacatgtcaaaaatgcagaggatgaggaaagaactcttgaagaatctttagaagcgaagggagttctccttgctcgggctcatgaggaaagcaaggacttgcttaagctactctttaagagctttgttgacgtgctcactgaacgtttgccgcctgtctctgttgatggggaaattcctaatctgcgcagtggagatcaaaatgtaaattttgcagctcaaaattctgaagcagcaacaatggagattgacaatgaaaatggagcagataataatagtgaaccgaatgagcgaaacacaaaaaatgcatataatgttggagagcttgagcagtggtgtctctgtacactgggttatctcaagtcattttcccgccaatatgcaagtgagatttggtcaaacatagcaatgttggatgaggtcttcgttggggatgttcacccacttatccgaaaagctgctttctctggtttgcgcagatttaccaatgaagggtctcatccttgaatttgacaccatacccatattctttatagaactgagtgtattgtacctgtatgatagaggacaacttttctccttgtttaactaatcaaataggcataaacatttttccttggtttcgtatgcctttttttctgttcccttgcttctcggccactaaatgaaaatttttaccaggtaactaagttaatgttcttttctgaagtaacatcagaatatgcatggttcagtgttaatttaacctattgactgagcctgaggggttgata

SEQ ID NO: 40987 - DNA, 2277 bp, Zea Mays
gagctgtccctgcctgtgttcttgcctcttgcctcttgcgccttgctagcttgcttgcctccctgctccctcctcctccctcttcctcgtcgcttctctgattcttcctggcctttgccggagcaaggctaggcgcgaggagagggtgctgtgctcagccagaggtcatcggcgctacgcgagcgcactgcctgtggacacaggagcctcatacattttgcaagaccactgaaacactggaacattcacaccctcaagaggttacacttgataaaacggtggcggggtcaacgctaataagtcatcaaaatgtgtgctgcactgccggagtatcaggggaaaacgctgaaatcatggaaatcaccttattgcatgatgaatctgatgcaggaagcaccagtttgctaccgccattgttgtcatatggtccaagatcaatggttccaatacaagtaccatcgtcatcagaccttgagagtatcctgtcaccagatccagtctgcagtgatcttcagttgaaagagataaactacaatgctgcagcaatggatgaaagcactgagctccttcacttgattcttggtggcaatgatgaaggatacaataccacaactgaattacaagtttgggatgttctggacttctatgtctcagaaaacttctcggctctccaatttgatagtttgatgggttttacaaatgaagttagtacttcctacaatgattgtatgaatttagttgacatggtagagtggcccgtggctcgtctgtctctagatgatacaccaaaactcagtaacagtgatgatgcggttctggcagacaatgtcacaacggaccctgatgaaacatccttataccttcgtacaaaaccaacagattcagaaactgaaagtagctctgacgcaggagatgttgaaactgaatatctagatcaaaagctactttctagatgtctgcctgatttaatggatgttgactcgcccaaccacttactgaaaacaccagtgagaacaaaacatgtgactcttgtgcttgatttggacggtaagcagtactaacttcacatggaatattacttttgaatgtttcttttaaattcctggtacttttcagtatatgttcactagctactggcatgttattattatgttttagttaatattttatgttatttgcatgtcatgatcaggaatgtgaaattcagttgtaatataaacatttttactccagtattctttgtatgatagtctaacggtttctcatatgcagagactcttgtacattcaacattggatcagtgcgacagtgctgattttaccctagaagttttcttcaatatgaaaaatcacacagtgtatgtgaagaaaaggccttacctgaaagtgtttcttgagaaggttgctcagatgtttgagcttgtcattttcacagctagtcagagaatctatgctgagcaacttatagataaacttgatcctgatggaaaatatatctcacggcgtatttatcgtgaatcttgtatattctctgacggttgctatacaaaggatctgacaatcttggggatcgacttggcgaaagttgcaatagttgacaatactccacaggttttccagttgcaagtggataacggcataccaattaagagctggtttgatgaccccgcagaccaggaattaatcgagttactcccgttcctggagagcctcgtggactcagatgacgtgaggccaataatttcgaaggccttccatgacaaacctgagtagaaatagtcctggagagctggagaggttcactggaattaatccagtgaacctctcgctgaagttagcttcgctccacacggtgcaggccattcttgggaagttaggtataggatcaagattcaccatttatgttatgttagctgttacaaatagcaagcataaactgcggtcgtcgatgaaaatggcttgtgtgtgtatgtcccttcggtgttccgtgtcacagatcattgtacagagacgaacaatagtgctgaataaagtgatctgagtgcaattttgctcatgaggacggctcgagcaggaagccgtgcttctgttcataataacgtgaattatgttaggacgtatgcactaaccagtttaatttaatagaaaaagttagccaatccatttatacactccaacattagtcaatccatttgtacacttcaacattagtcaattcatttatacactccaacattagtcaatccatttatagaaagacgtaaacatggaaataaaa

SEQ ID NO: 40988 - DNA, 1253 bp, Zea Mays
ttgacataacgacactcgaaaattctattaactagctgataggaatactaagctcatttccttcgtcatcagcttgcccgaatattacctaaatttatctatcttccgcatcactaactccagcgtattttatatatatatttaaccctaccgcgacgtgactgcttcaaaatcatgaaaataagcgcatcacattcatcgaacaacttcaataattaagctaatagaaattttgactcggcttaccattctaaatctgacgcgctatccgcgaacacggcaaggattctgatgcagctcctgaatcaaatacttggggaatattacgctgttagctttatcttcatccgatccttgggattccttgatgacgcacggaacgacgacgagatcgtttttggagcgagctggtgaggtggggtcgagcaaggaatgatgggttcgacgacttgacggcaaacgcgagcacgcgcgaaacccaatgaatgaagagcgaacgcacgaatgggtcgaactggggcaaaaggacgatgaacgccatggcgggttggagaccggatttagcagcggtgttgtaccatggcgaataggaaattggcgaccggccaagatgtgaccggccaagatgtgatcggcgagttggacgcaaactagcagagtcgagccagggagcttcgacgaacgcgaagggactcgacgatagatagcggccatgtatgacgtgccgcgcggacgggcgagcaatacacgaactggaccgaaccgagcgcgcaggctccacggcgaaccgagaaaccggctacgcgcaggggcagaggaccgcgcgcataaggcgagcagcaaggcgacggcgcgcaggaatgggaagcctcgacagggcgctgtacggaggagttcggctgggactcggcagggaggagacctcggctgggggcttggcgcgcggcgaagcagacagcagagggagctcgcggccatggaggaataggggcgcgacggcaaggagctggggtcaagcagccgccatggggaagcagagcagccggcgaccatggggaacagggccggccgagctgggaccggcgcgacggcgatctgcaggagaaacggaaaaatccgagcggggctagggagatgggcgccatagcgagctgaagccggagtgccgagatagggcgaggtggagcgcagcttgctgggagatggagagacgtcgaccacggcgagcagaggagcgcgcacgtccgaagctg

SEQ ID NO: 40989 - DNA, 110 bp, Zea Mays
tctgtttgcgatttgtaatagcaatgtagccgtgtcttgcttcagatccgactaaagcgccttcggaccctcagccgaagggggacgacgaaattaaaaagatggccgaa

SEQ ID NO: 40990 - DNA, 2826 bp, Zea Mays
agactactcacaggtcactgtctcactcacttgaagctctaacagcaagccatggcaggacgagaagcggacaaagacccagagctgaaggtgctcggcgtgtggtcgagcccgttcgttatcagggcccgcgtcgcgctaaacctcaagggcctcgcctaccgatacgtggaggacaacctggacagcaagagcgagctcctcctcgcctccaaccacgtgcacgggaaggtgccggtgctcctccacgacggcaggcccgtctgcgagtcccgggtcatcgtggagtatatcgacgaggccttcccggccagcggcccctgcctcctccccgccgacccgtaccgccgcgcggtcgaccgcttctgggcctcctacgtcgacgacaagctctttcccacctggatacccgtctacaacggcaggacgagcgaggacagggtcgcggcggcgaggcaggtagtggccgtgctggagaagtttgagcgggcgttcgatgagtgctccggaggcaaggcgttcttcggcggggacgctgctggcctcgtggacgtcgtgctaggcggcttcctcgggtggctgcgcgcgtctgaggtgatgtgtggcgtgagggtcatcgaccccgccaagacgccgctgctggcggcgtgggcggaccggttcgccgcgctcgacggcgtcagggaggtgatacctgacgtgcagaggctgctggagtataacaagattaggcgagctcgtcgtgggctgccgtaggtgctgggccttgggccatctatctgccagcatgtggtcagtcaactctaagcaggagactttgacaaggttaaagtttagttcatgaaggtgggcaatctaattaggatgctcatgctttagctaggagtgccattagttttcctgttgaaaggcatgtttggttcctctttcctactgaaagagtttgtaatatctttactactattaagaaggtaaggggtatgctgccattactagttctgtcattcccattcctaccgttctcattcctattcccattcccggttctgtctccacccccgatgcccctcccccgcgtaacccccgtggctcaccgcaccacacgaaacctctgatcccatgacctcgacggcggccatggccggcaagcaggtgcaataccgtgccccaactcgccccgcacgtcgcccatcctgtcacccccacgcgatggccgcaactccgcgagacaaccgctgtccgccccccaccaccctcccccgcgacgccccctcccacgacgctttgtgcgcgtgagtctgcgactgccgacagccgtcgccgtactggagcccgatctgctggctccccctcaacctcaccaccatgcccccatcggacctcgtcacgccgtgcgtggcggtgccggtgatggacgcggcgttgctagccgtcatcgtcccgcctcgacgttcgatccatgctcgccacggttggtgctcgcacgcgatgtggcgtggcgaggttaccgcgggcgccgcggaggtggagggggaaggggaggatgagggcacgggcaagagagtgcatcgcggtggacggtctcgtgagatccagacaaccgcccttgtgagcctgccttcctgcctactacctgcgtacatacaggagggaccttgggtgatccgggtgcttggtttcttggttctgcggctttcgctgctgttggatttgccgagccggagccgccggagatgaccgtcgacgagctgaagctgcaggcaagggccagcggcggccacgacctaaggaccagttccccgtcggcatgcgcgtgctcgccgtcgacgatgacccgacctgcctcaaggtccttgagaacctcttgttccgctgccagtaccatgtgacaacaatgggacaggcaaccacgaccttgagctgctgagggagaaaaaggaccagtttgaccttgtgatcagcaacgtccacatgctggacatggacggcttcaagctcctcaagcttgtgggtctcgagatggaccttccggggattaacagctgaaaacctcgcccgatttgtaaagaagttttcttgttcaatgcggcattgaatttgggaggaatggcaagtctcatgaaaacttctatatgccctacacgtgaccactaaaagaaagagttagacaggacaaaaggctgcaggtgaagcggcagaagaagagcttttacaataaaccctaaacccttacaatgctgattttgatggagatgaaatgaatttgcatgtccctcagacggaggaagctcgcactgaagcgcttaattctcataggggttcaaaataatttatgtactcctaagaatgtgatggggggtacttcaatgcaataatgagcttcccacaaaattacccaaacagcccgccatcagtcagatttacctctgaaatgtggcatccaaatgtctatcctgatgggtgggtttgtatctctattcttcatccacccagtgaagatccaaacggttatgagctcgcaagtgagcgatggacacctgtgcacacacttgtaggtactgatcacagcacattcaactccacacagattgtccatgtttcttttagtcaccattgatttatcactaggtcattgtgtttgtggccaacgagtattgtttctaacagttatgttcccatagctagctggattcattgttgtgttttgttcagggtactttcaccacttctggtatggttctgtctgtaatgtgccagggattattatattgtttttggtttggatttggaatggtttggggtccacaacgatgatgcgtcagagct

SEQ ID NO: 40991 - DNA, 655 bp, Zea Mays
cattggtatgctcctcctctgctccctcctcgtcgtctgtcgtctcctcgcgctcgtcctccgctgcccgactccggcgtcgtccccacagtccgcaccagccgacccaaccaccgctcaagccttaacccaacatttatctgtatcccgtggcaaggagcatctgcgcgtcacatccgcgatcgcgcgctctacgtcgcctcccgccgccgccgcacggccgcgacggatgctcggccaccgcttccctaccgccctccgcctcccacatggtctgctgcagaggaggagcatcatggcccgccgcggcctgaccatcatggccggtggcgaggcggagggtccgctcgcgggtttcttcgactacatggagcggctgcgcaactacgagcgctcgggcgtgccgcgcggcgccggcaccgactccgacgacgggtttgacctcggacgcatgcgccggctcctccgccggctcggcgacccccacacccacttcccggctgtgcatatcgccggcaccaaggggaaaggttctactgctgcattcctgtccaatatcatgagggcccaaggctacaatgtaggctgttattctagataataaagtcaatctcagagttgctgcagctgcgttcaagaagtacgacgctaatgt

SEQ ID NO: 40992 - DNA, 2032 bp, Zea Mays
ctttttcataaaacccatatccaatgttgcacaacattctttttaaaagaaacaacttttagtttctaagcagggctaagcctcattagttctctatcaaggaatagtaatcgaattccaaggaatggcaatacatcaattgtttcatcactcaactcctatcacctaatgcagcatataagtgataaaagttttaaaacaacaaggaggtggcaaatgcaccggagcttgcctgggataaacactacgttagtgttgttaattgacgaccacttggtgagcatcttccattctggtgctggcttgatgcatccacaagattaatccaccaataccggtttgctctgatccatgtccttcagctcgcataatcagctagcgtacctattggaaatgcataatgcatatgaataagaatagacataaatgacacaggataggtaaactacactgaagagggcaaaacacttctggcagagcgctacaattcctatgagcaaacactagttaactttgactctacaacaatcacacacttggagttacttattctcagctcaaccatcaagcacaataactcaacacaaatattcagctaagacgtaacctcaatagattgcaatacttatggcaagacaaatgtaaacatttaaaagcaagcatatactaggtatctataaattactaagtataagaatcacacttttcttaaatagccggagcaaacatcacaatttaaaatctacaaacttaaagtactaacgtgcaattctcactatgaaattttcataacttttgctgaagtggaacaacgatgatatttgcctccaactgactaaaataacgatgaccatttattcaaggcgattagcttaaacgctcaattttgatttatgacatttaatcaataaacaaacatagaatatgaccattactaacacaagccatcacttcagcaattaaaaatcaactaaacttacttagccaaacaagagtaaagtttaagcattcaacattttcagaatttctggacagccgtactgtagtcaattgttttgctcataactcacaaaatattcatccaaaaatagtgaactaagactttctagaaagcttatgaaatcccctataacttttgtattatcagcataacatgatttggcattttgaaaggtcaatcagtgctaaacgtaaattctgtccagatttggacaaaattcgactactcacttcaaaaatccataactggagatttagacatccaaaacatgtgatcctagactttttagaaagctaataaaattgtctacaactcatttataatcatctctagttaattcaatgcgtagaaaggtcagttaacacaaacagtctcttctgtccagatttggacagattcagacttcatatttcaaacagccataacttgacttctagaccaccaaaaagggtgatccaaaatttgttggaaagcttaagaaaagtactacaattcttctataattactaagagctgattctcagtttaacttggacaaacaaggtcattttcgaaatcagtacagaatctggacagattctgaaactggacttggaaaaatcataactcctaaactactgaacctatggtcatggaatttttacacaatcaaggtaaaaagattatctacaagttttatatataacacttttacagaaaacacggtttactttacttaactagccacgtaataaaattggacatgcagtccaaacagcaagaactctaacttagatcttatttaacttctacacttatcatgcttttaacatttagaacactcaacactttatctttagtagaactaaaaccacataatacaacaaggcattcatgtcaccatacattaattagaaattcactcaaccactaataaatcttatcggcaaagcgctataagtactaaacgttgtttttacattattaacttgatcactcaattcatatacaataaccaaatcatttatacttgagaaatatctttaccaaaat

SEQ ID NO: 40993 - DNA, 870 bp, Zea Mays
cggagctctctctcggtctcccatggtcgagcttctccaccagacagcgctcgtcctcgccaccaaccatgctcgcccggatccgtaactccctagtacaagtcagcttattcgtgcgctggggagccgttctcagttactcaccgtggtcggctcctgctccctaatcgcctcagctgcgacctcgccgtcattctttggctcgctgtgtgccctgctccattgtgtcgatccgcccatctccttgagtccgtgcgcgcgcagcttcctcaagtcgtcgtgtgcccagctcgctccagctcgccggtcgagcttctcccttacgctcagatccggccgttaacgcccagtcatgtgttctttttcccagctcggatctcatcatctgccattctctaacccatgtgtcggtcggcatcatggagttttggtttgatcggctcgtctttgacctcgccggtgtcgtcgaaccgttgaaccccgaatcccggatgttatgcagaaataagcgaggtccctgtacatctcttatcaagtgctcggtcgaagacttcaattgaaggtcgtcatcgttcgtgcatcccaaagaaatcccaagaattaggtgaagacgaagctagccgggtgatattcaccaagtgctcgacaaaagctcgaacaagtcgtcgatcgtcatcctcgtctacaccaagctctcaaaaaattaggcgcagaagaaaataaatcagtacgcggccggagaattcttgatatggacaaagaagaagcgcgattcgacgaagcactcaccctatttttggtgaaatgctgagctgaaaggcatcgtcaatttcgtggtttcaagtcagatgccataagggtaagttgatt

SEQ ID NO: 40994 - DNA, 1522 bp, Zea Mays
cgcacgtagtacatacaggtcacccgtttcgatctcaattcgtgtactagtataatagtagtagctaggattaagttagcaagacaggagctgtgaggggacctgccggtatactactatctaaccttggctgcagctgcaaccctcctcctaccttggtttctctatcccctctcctctgatcggctggtccccgttgcattggccttggcccttgccatgccaacctcatcaacgcctctcaactctagctagccagccacacctcctctgctctggtcctccccgccattagccggtagctgcctaagctgctaaccttgctatcttagctacttctactagtctagtgcgtattttgtgtcctgtacatgcttagttcgtcccccgccccgacctaacgtgcgagtgccggactgctgcggaaggaaggaagggagggaggaggccgggcatcagggacaaggaagactagctcgacattaatttcgttccggtaaggggaatccggaatcgttcggcatggataatcagcgagccacctcaacctcaaagggaatcggctgctagctaggagctagcgaggaggagggttatcggctcctccggcaatcctgaggccggctagctgagggcgaggcagcgtcacgcccgtccgtatgcatggagagccagagggtggtggtggtggtggaggacgcgggcgccgcgcggtcggcgctgcagtgggccgtcggcaacttcatccgcggcagcgactccatcacgctgctccacgtctgcccgccggcgcggtcgcgcaggaagcgccgccgcctccgcctcggcggcttccagctcgcgctcgccttcaaggacctctgcaacggcatcgccgaggccaaggtggagatcgtggtgacggagggggagctcggggagacggtggtggcgacggtgaaccagctcggcgcctccacgctcgtcgtcggcctccacgacaagagcttcctctacagcataccaccgccaaagatcccgttcccgatgttcacgctcccccttggcgtgatatggagaagatcgaagcggagaaagtgatactcaaactgcggggaagacggaggaacagcagaacaggaacagcacggcaggcatagctgagcctgtcctgatggctagtagatatatacacgtacacgcacgcgtgcacatcaacggaggcgcagcaaatctgcggattgacgtaactgtaatgacgacagcggcaggcacagaatgttagagaggaagggtatactccagctccgggaaagacggccccgtacttgtattattagatgattaatcgacaggttggtttactggaaactagaggagccattctgttttctgaagaaaaagaagaatggagcaaggttagaggactgccggttctgatgttaagtctgtaacctctcacgacctgatgctctgttatccttaaaattgatctaagttagaaaacttcaaaactaaagaggttttggtttctaaagactaa

SEQ ID NO: 40995 - DNA, 286 bp, Zea Mays
ttgatgacatgtcacatcatttaagaaggaagagtttcatggagtttcatggggatgaaatcatgttaactcgttttcaagatattggaaactgtgtgaaacctccactgagagtgttttgtttcatcttcatataattgagtaaatcctattggttatttatatacaatatttaagaagtatgttgacatatgaaatagtgagatgaaactctctattgagagagagtatttcattcatccataaatctgatgtggcatttttggaaacagagacatgaaatccc

SEQ ID NO: 40996 - DNA, 2254 bp, Zea Mays
cagggtacacgatggagggagctggaagagatgccaaccctttgggcggttaccgaattggcaaaaccctaggaatcgggtcgttcggtaaagtgaagatcgcggaacatatattgactggccataaggtggcaatcaagatcctcaatcgccgtaagatcagaagcatggaaatggaagagaaagtgaagagagaaatcaagatactgagattatttatgcatcctcatatcatacgcctttatgaggtgatagatacacctgctgatatttatgttgttatggagtatgttaaatctggagagttgtttgattacattgttgagaagggaagactacatgaagaagaagcccggcgcttttttcagcagatcatatctggtgttgaatattgccataggaacatggttgctcaccgtgatttaaagccagagaatcttcttttggattcgaaatgcaacattaagattgctgattttggcttaagtaatgttatgcgtgatggtcactttcttaagacgagttgtggtagcccgaattatgcagcacctgaggtcatatctggtaaactatatgctggtcctgaagttgatgtctggagctgcggcgttattctttatgctcttctttgtggcactcttccatttgacgatgagaatattccaaacctttttaagaaaataaagggtggaatatatacccttcctagtcatttgtcaccttcagcgagggacttgattcctagaatgctggttgttgatccgatgaaaaggattacaatacgtgaaatccgtgaacatatgtggttcaaaattcaacttccgcgctatttggctgtaccgcctccagacactgcccaacaagttaagaagctggacgaggaaacccttaatgatgttattaagatgggttttgacaagaatcagctaattgaatctctgcacaacagattgcagaatgaggcaacagttgcctattatttactcatggacaataggcttcgtacaaccagtggttatcttggatctgagtttcaagaatctatggacccatctttctctcaagtacatgctgaaacaccaacttcagcaactgaacatcggcagcatgtgtttacagaatctccggggtctggtttgaggcagcattttgcatctgaaaggaaatgggcccttggtcttcagtctcgagcacatccacgagaaataataagtgaagtgcttaaagcactgcaagaactgaatgtttactggaaaaagattggacactacaacatgaaatgcagatggagtcctggctgccttgagagtatgatgcataactgtgatggctttagtgcagagtctgctataattgaaactgatgatctcatagcgaaatcaacccgtatagtgaagtttgagattcagctttacaaaacgagggatgagaagtaccttcttgacctgcaaagggtcagtggaccacaactcctctttctggacttgtgttccgcctttctaacgcagctgagagttctttgagcctgatgacatgattggcttcccaagcacaatccttgatgcaccccatggactttcaaattacattcgtgctgtacataatggccatatataatcctccggtagattatattttctggagcatgtggaccgtacagctggacgtcagcgaactgaggcctgagaagcacggcaataataatcctgtgcgacggagcgagccgctagctggacgtcagctatggtgtcaccgcgcggaaggggggcatgcaaggggcggggttgacctcggcgtcaggttgttgctgaatgtttctgggggttcctatcattgcttcttctagactagatgagcatggacttgtggtgtggtggcatgggcatgcaacatgcatgcaggatcaggccaggctaccagggtttttttttgatctatctgcacgagctgatatattagtgtacccagtttcttcttctagattgttcaacttgtgcttaccctgccgcgtccgcgtgtctaccaacctgcgacttgtaccggtaatcgatctagaagggcggcgagtgtcatggcgtcgtatgaacccctctggggaatggttcaactcgtgacgcaaagactggctgttctcacttctcagttctcacactaaatatacacatgcatgtgatggaccgactgatgggcagtaactgtaataatctgatgtcatgggagaagctgcaaatggttactagaacgaaagaaaagg

SEQ ID NO: 40997 - DNA, 1935 bp, Zea Mays
caatctcgcagtcctttcttcctccgacctccgcagcgaatcggaccaggggatagggttccgccgcgcctctccaaccaggcgccactcgccagggtctaggctgatcatggaaggaaacgtcgcagccgggaagaggtcccggacggagacggcgaacggggctgccggcggcgggaagcgctccaaagacatggagtcatttcaaactggtctatcaagcaaatcgaagccttgcaacaagtttttcagtacgattgggtgcccgtttggtgagggatgtcgttttctgcactttgtccctggcggttacccggcagttgcaaaaatgctcaatctaggtagccctgctgtatctgcgccatcaagaactcatgtggatcacgccgctcttactggcacctctcattcagcttcgtcaggcaagacacgcatgtgcaccaagtacaatactacagaaggctgcagatttggtgataagtgccactttgctcatagcgaaagagaacttgggaaaccagcgtacatgccttatggagaacctcctatgggcggtcgatttggaggccgacctgaacctgtgcagccagctgccatgggccctccagcaggaaactttggtgcctcggcgactgccaagatcagtgtggatgcgtctcttgccggtggcataattggtaagggcggggtcaacactaagcagataagcagagtcacaggcgtcaagctctgtatccgcgaccacgagtctagccccaacctgaagaacattgagctggaaggcaattttgaccagatcaagcaagccggcgaaatggtgagggacctcatcgcgaccatcagcacgagcatgccggcgaaaaactcatctgctgccgtggctccagcaggaggccgaggcggtggtctgggtagcaagagcaactacaagacgaagctatgcgagaacttcgcgaagggtgcctgtactttcggcgagcggtgccactttgcccatggcgagaacgagcagcggagtggtgctgtttgagagttgagtttaaagatgctgggggtttcgaggccttagtcagcgggaagaccactgagatgcagaggatcgatgtcaatgagcgaattgttggacttgagcgcttgaatccgacaccacgccccacaacatcgccgtttctggagggtcgatggaattttgaatggtttggtgatagcagtcctggagcatttgcggcccgccttttgtttgagaggtcgcctacatcggttgcacactttatgggacttgatgtgttgatcaaggatggatactccaagctctcatctaacctcaagtttctaaacacgatacaaagcaaattcctactgactactcaattgtccgttgagggccccatcaggatgaaagaggaatacgttgagggccttatagcgattcccagaatcaatgaagaatcattgcctgaacagttgaagggcttgcttggccaaactgcaggagctctacaacaacttcctagccctataagggaagctgtttcggaggggcttaaattgccactcgattgtcagggacgctgctggagcaccagatgtcttaaccagactagaggggccacaaccgagtccaggtgatggcacagcagatgcagtgatatcagaatatgaaagctaatggctgattactaactgtaactccacacctagttcctgtttacggctcctttctcctttggtcgtttttctcaggcctgcgcatgtataaaggctgtagtgttgtcaacgataacgaccacttgagtgatttttacttgcatccctttcggcggctattctgattttttctgaatgcgagcaataatatcagatgaccatcatcattctttatatgaatcaatgtaaaaaaaaggctctgcttgttcaaagctaactgatacttcc

SEQ ID NO: 40998 - DNA, 891 bp, Zea Mays
gttgctatggatcagatctgcatcaactctacgtcaaaccggcaggtcatcggtctagccgaactgtcctacgcgacaggcttcgatttttcctctacgtaatggaacggtatgtttactgttcttaatctgttgttgtgcactagttgtgatccatgcgcgatgaactgtcattgtcgtcgtggtgctgtgcccgtgctcgtgcccacaccgaaaggcgcgcccacgcccgcacagggccacacctacgttagaagatgcactcgcgcagggaccgccaggcgcgccagcagccgcgcctaccgagacggaggtccatccatcacactggtgtgattcccttccgaagaggcaaatatcgtcgacgaggcgtttcctcagtcgaacgtcggcccggcctggcacgccacctgcagtcgctgctcctgcgtgttctcgcgatggagatctacgctacgccgcacgccaactcgtgctggacgccgcgtcgccgccgggtagctcctgtttgcagcagccacgggcaggccagggacggtgtcatcgcagacagatttgccagcctggatctcgcgatcccctgtttcccacagcattcgtgctgcagagtttcatggatccgtacccacgcaccagcgcaggccgccacacgccacccgctgcccttcgagatccataggaaggtgagcgactgaatggaccaaccacctttcgcttattcctcggtctggccaccgtgctcgcgcaactgcctgcgcaagacccgcgcatgcatcacgagatgcactggcaacggagcacgcacgcatgacgtttccaccttgcacatgtacgtatgaaaccaagtcgtgcatgttgtgctactggcaagcagggaaaagaaaattccga

SEQ ID NO: 40999 - DNA, 400 bp, Zea Mays
atcacttgctcacatcaggatcacttagcacgcatagactattacaaccaatgctagtgctgtgaggagcagagagtgcggcctgtccgcctatggatagcaacccctagaggcctggacggtggaggcttggtgcccttgcccgcgctgaacagaaatgaagtgaaatgaaaaatatgaataccctgagattgtcacacgcccgtgctggtgcagccgtgcagcgaggagccgtggcccgtggatagcagcccctgcacggcggaggctgggagcctggagaggtcagagggagagggacggtggaggcccggaccgccggaggctgggagagggatgtgctgggcgtttggagagaaggcggcggcgtgtggagagtaggagaggtttttgttttctg

SEQ ID NO: 41000 - DNA, 1714 bp, Zea Mays
ccataatacgatcatcactgtaaaatcttccccaccgcccatatctccctcttatcctctcacgttactctttcctgtttccagaatccactcgacacggttcctgggatccctgtgggtgctccatccgtttcctttcgcctacaacaacatcgtcgtgccgcgttgtcgactgtgttcagccccgagccatcgaccaccgaccccaacagcgccgcgcttccctgaccctgaccccaaacatcacaaagacctgcgcacgtgctcctcatcgaagtgctcgacaaaccttgcctcgccaacgtctcgccaagttgtcagacccgtcctcgagtttggtggagtcccaagcttgcacgccgtcgactccctgctcgcctcgcttcgttgtcatcgttcactatcttcgtcctcgtcgtctacctcgccggttctcgcgcccaactggccatcgtgctcgacgtgttttcctccgtgcagattcgcatgtacctttcactccatccgctagtcgcgtggtagagaagatcacgttatcggtggatcaatcgccttgtggagtaatttcttggaggctggtcgtcaccctgaagatttgtggcaaattattttcttagtcattggctcttcactgcaacaaaggcaagaccgagtgcatctaccacattccttgttgtttacaaaacttttatcacttgatatgatgcattaggtgatagaagttgcgtgatcaaacaattgatgcattaccatcctcttgagaatttgaataatcattccttgatacctattttatgaaaaactagtgccgcttagccctgcttaaagtgataagattttgaaatttattttgattactcgttattgttatgtgtgaatgaacttgagttagataattaatatgagaccgagcgggtggcttgcatcgtgaaatgagtcggtgtagtgctccgccagtgtcgattaaggaccgttcgatgtaggcctgatgaggtgagactttgcaactagccacatgctccggtaagcctgaacccagcaattccatacgtaaaaagacaaccgcgcactgggcatgggagatggcgggagtagattgtaccctcctttctagaggctggacggaggagtattgtgctcccgggtagcgcggaccggttcacgttgtggaggatctgtgggaatggttgacatatgcaagggttaagtgctacatatgtcgtgtgcttatgaatccccagctgggtataatcggttcgaatcatcgttgttcctcggttatggagactcaactcactgaccactcatcgtagttaataagtgaaatatgaattggataaaataaagctagatcaggacaagtaaatgatctagattaggcaaatttagaattaggtaagaacttaacttgataattaaaagatggcttaaggatccactattagtaagtgtttctgcaaaatgagtccttgattatatattgcttagccttaccttaattcctaatcagctagcatatccttgagagtctttttccttagtcgggtaagacttgcaaaagtacactccgtacttagaattttcgaacccatgtttttgcaggtactagagttgtgctgttgtggatggtgttaagtgccagtaggcacgaccttcttataagtctaagtaactcttctatacttcttattgaggatggtcacttaagctagcg

SEQ ID NO: 41001 - DNA, 753 bp, Zea Mays
ctccttagtcaaacgggtcacttagacccctcacaaggaccaccacaacttggtgtctcttgctttgattacaagtgtcttgagaacaagaatggggaaggaaaaagcgatccaagaacaagagctcaaagaacactagcaaaaactctctctctagtcactaggtgtttggagtgtatttgagacttggagaagctttgattcttttgaattgtgtcttgtattgattgcactagctcttgtattgaatgtgaagtctgaaaaacttggatgcttgaagtggtggtggttggggggtatttatagccccatcctccaaaccaaccgttgggaaggctgtctgttgatgggcgcaccggactgtccggtgcgccagccacgtcacccaaccgttagggttctgacggttttgaccattggagctctgatagcttggggcaccggacagtccggtgccgcaccggacagtccggtgtcgcaccggacatgcactgttcattgtccggtgcgccttctggcgctactctgactctgcgcgaactgtccgcgcattgtagcacttttgcaggtgtccgttggagtccaccgttgcgctggagccattgctctgactctccagaaactcggaggtgaagagttcagcctgtacgatccctcgtgcaccagacactatccggtgcgccagaccaaagttctctttggtttcttttgctcctttcttttgaaccctaacttagatcttttattggtttg

SEQ ID NO: 41002 - DNA, 1651 bp, Zea Mays
gcgcgtacgacgtaatgcaggagcaggacgtggacgatggcggcggcaggacgacccagcagcaggagaagtcgatcgacgactggctccctatcaactcctccaggaaggccaagtggtggtactccgccttccacaatgtcaccgccatggtcggcgccggcgtgctcggcctcccctacgccatgtccgagcttggctggggccctggcatcgcggtgatgatcctgtcgtggataatcaccctatacacgctatggcagatggtggagatgcacgagatggtgcctgggaagcggttcgaccggtaccacgagctcgggcagcacgtcttcggcgacaggctgggcctctggatcgtggtggcgcagcagctggcagtagaggtgagcctgaacatcatctacatggtcaccggcggccagtccctcaagaagttccacgacgtcatctgcgacggcggcaggtgcggcggcgacttgaagctctcctacttcatcatgatcttcgcctccgtccacctggtcctctcccagctccccaacttcaactccatctccgccgtgtcgctcgccgccgccgtcatgtcgctcagttactccaccattgcgtggggcgcgtcgctgcacagagggaggagagaggacgtggactaccacctgcgcgccacgaccaccccagggaaggtgttcggcttcctgggaggcctaggggacgtggcgttcgcctactcggggcacaacgtggtgctggagatccaggccaccatcccgtccacgccggacaagccgtccaagaaggccatgtggaagggcgcctttgtcgcctacgtcgtcgtcgccatctgctacttccccgtcacgttcgtcgggtactgggccttcggcagcggcgtcgacgagaacatcctcatcacgctctccaagcccaagtggctcattgccctcgccaacatgatggtcgtcgtccatgtcattggcagttaccaggtttatgccatgccggtgtttgacatgatagagacggtgctggtcaagaaaatgaggttcgctccgagcctcacgctccgtcttattgcccggagcgtctatgttgcgttcacaatgtttctaggcatcactttccccttcttcggtggattgctcagtttcttcggcggattagccttcgcaccgacaacttattttcttccctgcatcatgtggctcaaggtttacaagcccaaacggttcggcctttcatggttcatcaactggatctgcatcgttattggagtgctgctgttgattctgggtccgataggagggctccggcagatcattttgtcagccaccacatacaaattctaccagtaaaatcgatcaactggagtcgtatggcgtggctgttttgttagcattacatttcttagggtggattggcttttaatgtacacgagcgagtgagattgatgctagtagctcctaggagtatatatatttctatcatccacagagcttaatgtatcttgtagttgggacattaaaagagcaagtaggctttactcggtgatctttcgtttcacaacgttgtttagcactctttattgttttgtgtggctcgcgcgggaccaacactattagggtcgttcgttacttcaggaacggaggca

SEQ ID NO: 41003 - DNA, 585 bp, Zea Mays
cgaggggcaaaggccaaagcgaactgaaccgatccgcggttgtgcccgtgccgcgcgccagcgccacgcttcctacaatcctactgtagtttaatccgcttgcacggaggagcaacgccgagcaatggcgctcgcagccccttcttccctccgcctcctcccgaccacgccatcgcaggcgccatctccgccctgtgcctcccgaccacgccatctgcgggagctccgtctctgccagagactcgccaccgccgccgccgccgccgccgccgccgcggccgcggccacggctccactcgcttcctcgcccaccacctccgcggacacggagcggaggaagcacgaactgctgcgcgcggttcaggaaacgcggcgcggattcgcagcggggcccgaccaacgcgctgccatcgaggaggccgtcgtggccgtggaggagcgtggtgcggggaagggaacgccgatagatctcgcggcgctcgatggcacctggaggctgtgttacacatcggcatcagacgtgcttgtgctgttcgaggcggccgagaggcttccactcctgcagcccaaccaactttaggacag

SEQ ID NO: 41004 - DNA, 1743 bp, Zea Mays
tctcgcgtgtaggactttagttgccacgttggtgttccgttctgttctgttggcagcaagtgcaatgagcatcaatgcatcaaccatcgtgctggtacttccaaaagagcgaaaggattgccaattctgaaggagaaagcaaaccatatctgaaatacaaagcgcggacggaccatttgagcatccaattcgtgagctttggcgtctgtgtatttttaatcgggagctgtaggctgtagctagctagagaggtttagagcagcaccaaatggcgagcaaggtggtggacctccggtcagacacggtcaccaagccctccgaggccatgcgggccgccatggccgccgccgacgtcgacgacgacgtcctgggcgcggacccgaccgcgcatcgcttcgaggcggagatggccgcggtcatgggcaaggaagccgcgctgttcgtgccgtcgggcaccatgggcaacctcatctccgtcctcgtgcactgcgacgtcaggggcagcgaggccatcctcggcgacaactcgcacatccacgtctacgagaacggcggcatctccaccatcggcggcgtgcaccccaggaccgtgaagaacaaccccgacggcaccatggatatcgacaagatcgttgccgccatcaggcatcctgatctccattacccgacgaccagattgatctgcttggagaacacacatgggaatactggtggaaagtgtttatctgtagaatacactgacaaggttggtgaaattgccaagagccatggcttgaagcttcatatcgatggagctcgcatcttcaatgcgtctgtggtatgcctatcgaaagggttaggcgcacccgtcggatcagtgattgttggttcgaaggccttcattgacaaggccagaattctccggaagaccctaggcggtggaatgagacaggtgggagttctttgtgctgctgctcatgttgccgttcgtgacactgtgggaaagcttgcggatgaccacaggaaggctaaagctttggcagagggactgaagaaaatcgagcagattacagtggattcagcttcggtcgagaccaatatggtattctttgaggtcatggatccaagaatatcacctgacaaactgtgtcaagtcttggaacaggacaacgtgcttgcactgccagccaattcaaaaagtattaggttcgtcatccattaccagatttcagacgctgatgttgggtacgcattggcatgtgtcgagaaagcaatcaaagagctactggaaggcagtactgagttggggcattcgataaacggagctaccaaaagctcgtatgggcactagatcactcggattctgccaacctgatgcatcgacacatggtacccagctgcttgttagctgctctgcttgtctgtgaccaacgcctagctgttgtagtctcgcctttcccgaataattgttgctgttcagtctctgtttggatctgcttgttctcgtgtctctgcttcatctgctttcgcttcatggtactgagtactgacgctgtgaagtggaacaagtactctctcccccaaaaaggccggtagacccaaacatcttttcttgcgggctggtaaagccaaaaatttttaaatgtactcgaacgaaaatatcatagcatagtcttgcatacaaaggaagaaatacgataagaagtgaatgtaaagcaaagcactacagatgcaaagagaaacgcaggtctcgtatgatggtgc

SEQ ID NO: 41005 - DNA, 1161 bp, Zea Mays
atctacccatatgcgataaaataaaatctttcaattacctgcttccggcagcggtacgatggccgctgcgagaatggcgctcgtctcttgcgcccgccgcctcccgtccttaccctctccgctcaccctctcgaggccccgcgccggcgccgtctcatttctggctgcccagccgtcgccggcgacggcaccgagatccggcaggaatcttgctctcttctgttctttatcaccgacgtcgccatcgctaactgaggccgccgtagcactgccgccaccgaaggctgcggtggaagagacgaagccccctgtgccgagcggggacgagaagggggaaccgactgtggaggagctagcgggcctgctggacgtccgggtgggccgagtggtgaaggcgtggaggcacccggaggcggacaccctctacgttgaggaggtggacgtaggtgaggcggagccccggaccatctgcagcggcctcgtcaacttcctccccatcgaagaactccaggacagaaacgtcattgttcttgctaacctcaaaccaaggaacatgcgtggcatcaagtcaaatggcatgctcatggctgcctctgatgcttcccatgagaatgtggagctgctcatcccttcagaaggttcctttcctggtgaaagagtatggttcggttccgaagaagaaaagaaccgtcaatctgaccctgcatcaccaaatcaggatcgtaaaatataaagatagacaatctgtggggaatcttttcattctccttgaggtccatacacacaggtccaaaagaagaagatctgggaagctgttcagcctcatcttagaacaacagataactgcattgcggttcttggtgataaacaaatgcgtacctctgcaggcctagttttctgcaaatcgcttcagggtgcaagagtgtcataaatctttatggccaacatctttcttgtatcatggaatcgtgtgtcatgtatcttccctgcaaataataactaactatatgaggagagcagcagggaaagaattttctttccaactactgagataatcactgtactggaaccattcacatttagttctcacttttcagtgttaaaacaacgtgcttcctgggctgacgcaataatcttgatgccttggggcgagttattaca

SEQ ID NO: 41006 - DNA, 1737 bp, Zea Mays
acgggccaaccccatccactcctttcctcccacccgccagccgtcacccgcacgtgcagccagcttccctgctacccccgcgcgccgccagccgagcggacgccggccctgccccgcacgccggcacgcggcacgcgcagccagctgccccacacgacgccggccgccctcgcactccccaccgcgctacccggcagccccgcgctacccgctcctcgctcggcgtccttgattcccaccgcacggcggcccttcttctgccaccgcacaccgcgcaggagcactgcccttcgccccttgtttagctgcagcaggagcgccgcccagccggccaccaccaccgcagcttgagagttgagacctgcagttgacgaccagaggccagagggcgttgctgcgctgcgttccgctctcccttttctgctgcgacgacggctggtcgagcgccgccacactttgcagcttccttggctcttcgcaggtgacgagcgcccaccagacatgggacaaggtggacaagagaagtcgttcaatttccttcaagttttgctagggtttgtgcatgttcaccatatctttgttgcaaactttgctcattccattcaatagagtttggcttggcaccttttcctctcctgaatcctgagggcagcatagctggaggaactgctggtgttgtggtggaaacagcactttacccgattgatactataaaaaccaggcttcaggccgctcgaggtggaagccggattgaatggaaaggcttgtattctggattagctggaaatctcactggcgtccttccggcctctgcgatatttgtcggggtgtatgagccaactaaaagaaaattactggaaacccttcctgaaaatctgagtgcagttgcccattttactgcaggggccattggaggtattgctgcttccctcgtccgtgtccctacagaggtggtcaaacaaaggatgcaaactggtcaattcaagtctgcacctgatgctgttcgtctcattgttgctaaagaaggatttaaaggactgtacgctggttatggttcctttctacttcgagatctaccatttgatgccatccagttctgcatttatgagcaacttcgaattggctacaaacttgtggcgaaaagggagttgaatgatccagagaatgcacttatcggtgcttttgctggcgccatcactggagctataacaactccccttgatgtcatgaagacaagattgatggttcagggacaagggaaccaatacactggaattgtaagctgtgctcagacaatcctcagagaggaaggccctaaggcattcttgaagggcattgagccgcgagtgctgtggattggcatcggtgggtccatcttctttggcatgctggagaaaaccaagtcgatgctagccgagaggaggaaccgcgagcttcgggccgtcaaggacgaatgagtggagatcagctcttttttggcgttgagtccttaccctgaaacaaaatacacatttttacttgccggggacaacctcgccggcccgtacttgtactccacggcgttcacgttatcacgtacgtagaaattatgagcatgactgacggtttctacagattgaaaaccaaaacttattacatgcgctggaaacctgccactcactgtttacgttgggagttaataacactatgcaacatttaaatgctatggtaagcctctaaaaccgcaaaatatttttt

SEQ ID NO: 41007 - DNA, 990 bp, Zea Mays
tggttacagagtatcatgtttcctgtttctcaatgaaataggggagatcccttttcgtcaaaaaaagatgaacggattgcacgctaatccttggatcatgttgatgaagggtgtaaattgttggtttgttcgtggtacatgtccgacgccgaaacacgaccggttgcgctaatggaaagcccaacgctaatccattcgaaggccagcagacgtctgaacggtcaatcgcaaatgagtgtgtacacaaaaacgtcgtgtctgttttgtggtcaacacacacacacacatacgtacgtccatgctacgtacgaaaaagacgcctttgttctgagcatccttttccaccgtccgtcccccgttttttttttaagaatgtggtttcgtgcagtttgatctgatccctaccgttcagaagcttccgtagaccgcagctttgtatttgcatacgaatagacgatggctgtgagctgtggctggtcttggttgcgctgcaaaaaaaagacagaagctctacatgaaccatcaacgtcggggccgggcgcgtcgtccctagttgcaaacgcctgcagcggcacgcaggttgacggacggagacaggcgagcgcgggcggccggcgactgcgagccagccgagcgccgccgcgagttgctgtcgtgcccagcaatctccagcgcgtgcacgcaggcggcaggcccggtcgcgccgcaccgcctctcggtcgtcggatacacgggccccgcgcgtggcgtctctgtgcctgcggtgcaccgcgcccggtccaacgacggcgagggtccgggtccacgccacgcgcgcgagcgagcaaagggattgcccggtcgcgtcgcagcccgcaactgctaccgtgctacgcgacgcccgcaggccgcattgccgcaacaccgctgggtggggatgccaaatccgatctgttgcctgccattcctaccgctgggaggggagaagtaaaaaaaaaaggaaaaataaaa

SEQ ID NO: 41008 - DNA, 5292 bp, Zea Mays
gaaacacagcgtgccgtggactcatctctcgctggccgctgctgcagctgcggagctgccactgcctccgcgggctccaccggggcaaatcgcccctgctggagaggctggagcgtctcttcgccttctctctctactttctctgtcctcgccactcacaagtcctcgccagcggcagcaagcacactgcgcttcctcttccgctccctccactgtgtgactcgcccatcatccatcaccctcgccgtgcgcgcgcgggcgctaggctttggagatctctcgcttggcttccgagatccgcgccgatccgcccgccgccgcattctcctcgggcgtggcggttgcgtgcgccgccgccgcacgatccgtttccttccggcgctgaatcgggggacgctgccagcgagcggggcgttccggtttctctgctcgcttccgcgctcgtggagcagagcaatggttcggagtgaccggcggcagcgacgatgaggtgcgtcgcgtggtgggcggtccttctcgcggccgcctcgttggttggcgcttgggggaaccacactgtatcggcgctcacgttggtatcggagacgtggtacgatgaccgcttggcgctggttcctgttgagtttggcggcggtgacggcgaggatgccgcggggcttcgcagtgagctcccgtgccagacatactccgcgaactcgaggtcctgcgaggaattgaacggctccgggtcgttcaacaccacctgcgtcataagttccagctcttcgctggacggtgatctgtgcgtatatggcgacgggagtgtggagattcggccccatgtcaagatcatctgccccttcagggggtgctacatcaccgtcaatgtctcagggagcgtcaggattggtgagcatgttgaggtgattgcagggtcggtaagcctgtacgcggccaatgtgtcgttggatcaccactccaccatcaacaccactgcactcgccggtgagcctcctcctcagacgagtgggacgccgcacagcctggaaggggcaggtggtggacatggtgggaggggtgcatcatgtaaagtgtcaaatgacaccaactggggaggtgatgtgtacgcgtggtcgacattggattggccttggagctatggcagcatgggtggcagcatgtccgccggtcagtttggagggtacggtggaggccgtgtcatgcttaggacatccggctttctgaatgttgatggacaggtgcttgctgaaggtggtgttggcagtctcaagggtggcggcggctctgggggaagcattataatacatgctttcaagctatctggaaatggcacaataagtgctgctggtggtaatggatggggtggcggtggcggtggaaggatatctctggactgttacagcattcaacaagatttggaaataacagttcatggtggccagagttttgggtgtgctcagaatgctggtgcagcaggtacaatatatgatagttcactgcagaccctaaaggtcagcaatgggaatttcaccacacgcacagaaactccattgcttggtttcccaatgactagactttggtccaatgtgcttgtggagcgctatgcaaaagtgctggttcccttgttgtggtccagagtacaggtgacaggtcaaattagattactaaccaagggtagtatctgctttgggttatcagaaaatccaatatcagaatttgagctggttgctgaagaacttttaatgagtgactctgttataaaggtctatggagctttcagaatgtatgttaaagtgctcttgatgtgggattcaaatattcagattgatggcggtgctaaggatgttgttcttgcatctatgcttgaggcaagaaaccttgtagtcctcaggcatgggtcagtgatatcttccaacactgatttaatggtatatggacaaggacttcttaacttgagtggccctggtgatggaatcaaagctaagcgactgtttctgtctctattttacaacattgaggttggccctggttcccttgttcaggctccactcgacgaggctgttccaagcaacttggatgcactttcacgctgtgaaagtaaaacatgtcctagtgagcttattaccccacctgatgattgccatgtaaaccgctccttgtcatttacactacaaatttgtcgtgttgaagacataactgtcagtggcatagttaggggaagtataattcatattcatagagcaaggactgtgactattgcaaaggatggcacaattagtgcctcagagttgcaaggaaggcatcggaaaaggaaagtttctcaagtatggagctggtggtggtgctgggcatggaggccgaggtggcacagggatttacaatggaatgagaagtgaaggaggcctagaatatggcaatgctgatcttccatgtgagctaggaagtggtagtggcggttctgctttgtcagcagataacactgccggtgggggattaattgttattggatccatgaaatggccactttcaaggttgctagtttatggctcgctgaactctgacggggaaagccatagaggcacatcgggaaattcaaatgggacttttaaaggtggagttggtggtggttctggaggatcaattcttttatttcttcaatggtttctgctagagaaaaactcatcattatcggcatctggtggcaatggaggtgtatacggtggtggtggaggtggtggtggtagaatacatttccattggtcatatattgctactggagatgaatatgttcacattgcttctgtcaatggcacaatagtatcaagtggtggatctggtaagaatgatggacattgtggagaagatggaacagtaacaggaaagaaatgccccaagggcctatatggaacattttgcactgaatgcccagttggtacatataaaaacgttgttgggtccaattcatctctgtgcatcccgtgttctgtggatagtcttccaaaccgtgctgaattcatatatataagaggtggtgttaccgagctgccatgcccgtataggtgcatatctgataagtacaagatgccaaactgttacacaccacttgaggaacttatgtatacttttggtggtccttggtctttttcaatcatcctttctttaacagttattcttttggcacttgtcttaagtgctctaagaattaagattggtgagagtgatatcacctaccgggcaactaatgcaatccacaatgatggttgttctttcccctttttgctttctttggccgaggtaccaggggcaagcagggcagaagaaactcagagccatgtccacagaatgtacttcatgggacctaatactttccgagagccctggcatctcccctactcacctcctgatgcgataattggaattgtttatgaagatgctttcaaccgttttattgatgagatcaatttggtggctgcatatgagtggtgggaaggatctatacatagtatactttctgttcttgcgtatccttgtgcctggtcttggaagcaatggcgcagaaggaaaaaaaaccatcgtcttcaagagtatgttaaatctgaatatgatcattcatgtctccgctcctgcaggtcacgggctctctataaaggcttgaaggttggttcaactccagacttgatggttgcgtacatagatttctttctcgggggtgatgagaaacgacttgatgtagcatccaccattcagaagaggtttcccatgtgtctaatttttggtggtgatggaagctatatgtccccatactatctacatagtgatacattgctatcaaatcttcttggccagtatgtatctactgcgatctggaatagattagtcgctggtttgaatgctcaattaaggacagtaagacaaggaagtgtccgttctactttgggccctgttgtttcttggatcaacagtcatgggaatccccaacttgagagacatggtgttcgagtggagttagggtggttccagtccactgcttctgcatattaccagcttggtattatcgtagctgtgaatgagaacttctacaagaatctccgccaccatgagcatgccacagaattttgtgaacgctcaaggaagaacgttgcagttccacttcaggatttcaatcaggcaaatctggatcagccttgcacaagctatgctgtttctagaaagcgattgacaggtggagtcaatggtgggatcataaatgagggaacgctcaagtcactgcactataaaagagactatctctttccattctcattgttattgcgtaattccaggcctctaggctatgcggaaacattgcaattgctcatttgtattgtacttctgggtgatttctccatcaccctgcttatgcttgtacagtactattggatatctgtcggagcttttcttgccatactgctcatcccccctcttgctttgctttcaccttttcttgctggtctcaatgcactttttagccgaggactaaaacgatcttcagtgacccgcatttttgcactttggaacattacttctgttgtaaacattattgtagcaatcatatacggctctttgtatttttggctctcttctttggcggtgtcctcagttcatcaagtatacaacacaaaaagcttcaagagtagagaagacaatgaatggtggatactgcctactatcctttttctcatcaaatcactgcaagctggactagttaactggcacgttgccaatttggaaatccaggactactcgttatttagcccggacccagatagattctgggcaatgtagtcgcctgcagcaagctaagaattgcagaaagcatggtttagtgatcgcaagaatggcaagtattaattattggatgctgaatatttgcgttttgtcccttgcaacgtcatcagcccaatacaatctctgaatctgaaggggtctaacacgctggctggaacttccttctatttatgggaagcgctcctgcgtagtgcactagtgcagatatgttcattttctttttctcagtttttttcccgtcttggtcgtgtgcctagaataggtctgtcgctcggtggggattagatttgtgcattttctttggttcaaattaaaccgttgattcgagtgtacagcaagaaactattgtgattgtcgctctagatgtacatcactgtaagtataatagtagaaccatttcaactgtatacaatcctcaaaggaaagtatgtttctttctattttctttttcctattgtcatcgtt

SEQ ID NO: 41009 - DNA, 1177 bp, Zea Mays
ctgagtaaagacttaaaaacaagataataaccaactaggtccccagtaccttttatttaactagagaaaggacgagttttatttttcttgttattttttaattctttttcttttacttacgcttaaccgtacacagatgacttcccacggatcctcagaggatggaaatgcactgtcccacactgacgggcttgcacgagagggctttccccgcattttgtgggaggtacttcagggggccggatacacgacaccccctcagtacgcggtgcagcagttcgagaagcaccaagtgccccgctgtagggtgaggatgaccttggagcctcatcccctgcagccaggctggcattctttggactccgagtcttttggataccgagctgaggatacaatcgaggcgatcgctctgcatggattgaccactttctgcggattccatcctttggagctggctacccaccccattggcttgttccccgctgaaaaggaggacgacccaatgtggaaggatcgggtggagcatgccaaggatatctgggctatctacccaggacaaactgcgcacttgaccgtacgatgcatgaatgctctgtaccgcctgcaagtgatgcgcggtgaggcgatgtcccatctgatggcactattggaggcaacaaagattaccttggacaacagggaggagcttgtggttgatttgtccactgaaatggtggagaaggacttgcaggtggagcagctatccactgatatccaagagttggaggatctagtgggcaccagggagaacaccatcgaggttctcgaggtcagctcattaacacccagcagcagcttgccgaggctaacgagcacctggatatgcatcaccaagagatccaggacatggaggccaacaaggacgtcgacatcgagggaggagatgagcctgcctctagtgtggacactgctggctcagggagaccaccttcccccgagtcgagtgttgcctcgttcgctcactaggtgttcagggtagggttagaagttggatggtaggactcctcgcagctagcttagcttttgcacccttggggtactaggctagatagagttgagtctttttggggacgaatgatgtaatcgtgataaactcttttggaagcatgtttgatggatgctgttatcagtttttaaa

SEQ ID NO: 41010 - DNA, 3202 bp, Zea Mays
atggtcgtcccacttggtgtagtccagagagtggctgaagctattttagtgccatcattatatgagaaaaacgggtttagtagggtcattcttaaagcattgaagggccttgctctcttccaccaaagggttatagcgttacctcttccacatcggccactctttcctggattttacatgccgatctatgtaaaggaccaaaagctgttgcaagccctaatagaaaatcgcaaaagatcagctccgtatgctggtgcctttctcgtgaaagatgaagaaggtactgaccctaacattgtgactggttcagattcagagaaaagcattggtgatctcaaagggaaagacttgctgaagcgtcttcatgaagttgggacgcttgctcagattacaagcattcaaggggatcaggtagttctacttggtcacagacgtttacagataactgagatggtcgaagaggatccactcacagttaaagttgatcatctaaaggaaaagccctacaacaaggatgatgatgttataaaagctacctcattcgaagttatatcaactttaagggaagttctaaggacaagttccctttggaaggatcatgtgcaaacctacacacagcacattggtgacttcaactaccaacggctagcagattttggtgctgctatctctggtgccaacaagttgctttgccaggaggtgcttgaggaattagatgtatacaagcgtctgaagttcactcttgagttagtaaaaaaggagatggagattagtaagctacagcaaaagcaattgaagaaaagattagtggagatcagcgacgttatttgttgaatgaacaacttaaggcaatcaagaaggagctcggtttggagactgatgataaaacagcattatctgcaaaatttagggaacgtatagaatcaaagaaggacagatgtccttctcatgttttacaagtcattgaagaagagcttaccaagcttcagcttttagaagccagctctagtgagttcagtgtaactcgtaattatttggactggctgacagtattgccatggggaaattatagtgatgaaaactttgatgtccaccgtgctcagaaaattctcgatgaagaccattatggtttgagtgacgtgaaagagaggatactggaattcatagcagttgggaagttaagagggacttcacaaggcaagatcatatgtctttctgggccaccaggagttgggaaaactagtattggtcgttcaattgcacgtgcactgaaccgccagttctacaggttttctgttggaggtttggctgatgtggctgaaatcaagggccatcggcgcacgtatgttggtgcgatgccagggaagatggtgcagtgtcttaaatcagttggaacagcaaatcctctagtattgatagatgagattgacaagcttgggaagggtcattctggggatccagctagtgcattgttggaactccttgatcctgagcagaatgttaatttcttagatcactaccttgatgttcctattgacctatccaaggttctattcgtttgcacagcaaatgtaatagagacgataccaaatccgttattggataggatggagatcattgctatagctgggtatataactgatgagaagatgcatattgctcgggactatttagagaagaatacaagacaagcctgtggcattaagcctgaacaggttgaagttacagatgctgcccttcttgctcttattgaaaattattgtcgagaagctggagtgaggaaccttcaaaagcatattgagaaaatttaccgtaagattgctctccagcttgttcgccaaggagtatcgaatgagccagaccaggagtctctcggtgtcactgtaaatgaggaatctaatagtggtgatagcatcacagcaaaagatgagattgtgaaggatcctgctgtagaagatgcttcagtcgccaacaatgttacaaatcctgcctctgaggaagctaatgaagtaaatttgacaactgaagcaccaaaagaagacagcacatctaagggcaacaagaaaacagatggagtagcagaagatgcagcagacaaggcaactgagaaggttgtggtagattcatcaaaccttggtgattttgttgggaaacctgtgttccaggctgagcgtatatatgagcagactcctgttggagtggtcatgggtttagcttggactgctatgggtggttctactttgtacatcgaaacaacaaaagtggaggaaagggaagggaaaggtgaccttgtgctgacaggacagcttggagatgtaatgaaagagagtgctcagattgcgcacacagttggcagaactgtattactggagaaagagccagataatcatttttttgcaaactcgaaggtgcacttgcatgttccagcagggtccaccccaaaggatggccctagtgctggatgcaccatgataacgtctatgctgtcgttagctatgggaaagcctgtcaagaaggacctcgcaatgacgggtgaagtaacattaactggaagaatcctcccaattggcggggtgaaagagaagacgattgcggcaaggagaagtgcgataaagacgctcatatttccggcagcgaataaaagggactttgacgagcttgcttctaatgtgaaggaaggactggaagttcattttgttgacacatacagtgaaatatatgatttggctttccagagtgacgccgggactgagatgatttagctttacattacaggattgagattttttccccttctctagatctggttacaggctaaataccaaagaagtttgtcagcagaggcagaccattgtaaccaagatgagtggagttaattgatatttacgagaaagaaaaataatatttctttttttggccccaatataacatcattgaatctaagagatttatttggctaggctgtacgtaactagtgtgctaggtggtggtattggccttttatattgttgggacttgggagtgtgggaaaaacagtactggtgcaccatctgttatttattttaagtgttttccaaaggcagcaaggtcatatacctcatatcataatttagccacaaatggcctgaatattttgtattttggtcatttttttttcgaaaaaatcacatttagacccctaaaccacttaattctgtttttg

SEQ ID NO: 41011 - DNA, 1229 bp, Zea Mays
ctctgtgtgtttccttggccctggtcatgtagtcgttagtcatggttggcagtatcaaccatcaattccaacaatacaatattttctagaggatgcgctgatatgcatcactaagctggatcggaagaaactatgcttagtcggtgcaggcaggactgatacaggtggcacattttactacacccttcagttacagttgcctcagtagtattcattctgcaatgaatggactccttcctcctgagattcgagtcagggaaattagtgcagcacgtcctgaattccatgctcgctcatccacaaagagcaaagtctatcgctacaagatctataatgaagcaatcatggatccctttcataatcactatgcttatcatagtgcttataaacttaatccccatgccatgcaggaggctgcaaattattttgttggaatccatgacttcacgtcttttgctaatgctgcacataatgacggtgagcgcaggcccacaaagaagataacacgttttgatgttactgaaatgggtgctgtcttacagctcgaggttgaaggcaccggttttctgtacagacaagtgaggaacatggttgctttgctgcttcaagtcggaaaggaagcacttcctcctgatatcgttccagcgatcattgcggccagggaccgcaaagaactggcgaaggtggccttgtcagcaccaccacatggattgtatctcatgtcggttaactatgacgaggaaatcctgaagcctcctgaaggttcccctccaatttcgtttggcagaactcatcatcttagtaagtgcaaacttacgttgtattaatttgttacagatgaattgtcttccagaaatgtatcatcttttagtttccgttgcctcctaggattttcttggttcagaactgtcaaccgtgggctctcatggcctgctagtttctgctaacggaccaaagtactcttttgtactgtctgaggtaattgtttattcggctggacaggctccgttttactgaactagttgccctctcatgcgttgttgtcgtcacagaagctgaaaatgatgaacgcaataagtgctccatgcaagaacatacgacttgtctggttcgatgtaatgtaacggtataggattccttcgggtatcaaataacgttacatgtgtttgttatgggttctattgaaattacatacattgaaatcgaataccgccgtatagaaaactcaa

SEQ ID NO: 41012 - DNA, 1314 bp, Zea Mays
attttcacataaaccgatatacttaaccctttctcacacactccttcgcctcccatcccaccccgaagggcgtcgccgagctagccattgccgcctcccggctcgcgactcgcgagtcacaggcgcagccgagcgttccttggggacgaggctacatcgcgatgtggtggagggcggtgaggcgccggtgggtcgcgacggcgcggcccgcgtcctccgcggcggcgggggcggagaagagctgccgcgccgtggtggtgccgcgtttcggtgggccggaggtgctcgaggtcaggcagggcatgcctgtgcccgatctgaagccgcaggagatgcgatgtggctatgggcgctccatattcgaaccactcctacctctgatcattggtcgggacattagcggtgaagttgcggccaccggaactttggcatcgtctttttctattggccaagaagtgtttggttcgttgcatccaactgctctcagagggacatatgctgattatgctatcctgtcactggacgagcttactctcaaaccatctacactcagtcatgtggaggctagtgcaatcccgtttgctgctttgactgcatggcgcgctttacatggtacggctcgtatttctgaaggacaaagagttcttgtgattggtggaggaggagcggttggattagctgctgttcaacttgcggtggctgctgggtgtgtggtttctgctacctgtggaacacaaagtattgagcgagttatgggagttggtgctgaacaagctattgactacactgctgaggatactgaagcagcaattaaaggaaagtttgatgctgttttagacaccataggagtacctgagacagaaagaattggcatcaatgttcttaggagaggtggacactatatgacccttcagggagaagcagctgccctagcagataggtatggattggctgtagggcttcctgctgctactgctgttttactaaagaaacagatgcagtatcgttattctcatggaatagagtattggtggacatacatgagagctgacgccgaaggccttcacgagatccaaaggctatctggagctgggaaactacagatacctgtggagaagacctttcccatcagccatgtaagagaagctcatgcggccaaggagaaaaagttggctcctggcaagtgtatccatacttgcatcgagatactcgatgtttcgcggtgcatcttcaccacgcccatgctgttccacagtatcaaagcgccacagtgccacgttcaccttcgcaggcaattttagtgctccgtttatt

SEQ ID NO: 41013 - DNA, 1501 bp, Zea Mays
tttaaaaaaaactaacggcagagacgcgtacacggcgttcgatgaatggatggacgcccgccgcccagcaagcattgccattctagcttctctaccctggtaaatatctataactttggtcctacttgtcagctgtcagcgagtcagcgtatcccatgttgtaggctcattccattagctttttatccactcccacagtccaatccacacgaccgccaccaactcacgcagcgtgcttcccttcagaaactcgatggcctgccacctcgccatcgccggcgccaccgccgccgccgcccgcgctcctcgtatctccgtgctcgccgccgcctctgcttcctccgcaggggaacccgcgcgccgcatcatccgccgccgcgcgccgccgggtcagcagggctctgccacagcggcccccgcgcctcccgcccagccgtccgtggcggaggtgcgccgcgccatcggcgtctccgacgacgctgcgtcggccgccgcatccatggagaagaagaacaccgcgttcatggacctcatctctaccacgcccatcggccagccggagagcgagcccgagcgccgcctccgcgaggccgccgagtgggtagtcgacaccactgagacgcgcgcttgcgaaggacagaagtctttcttagtgctatgcatgatgacatttcctgcttggttcttgctcctgtttcttgcccttggactctttaagttaccatttgatattccggttctggataatctcctaatctgagcttggtcactagtagcagggagagtgtttcgatatatagattttgattcgccgaacaatacaaattaatgaagtgctcgatgaagcaaggttggttatctatttacttctattatgaactggtgcaaaaacattattatatgttttagaaactggttgagcaagaacgccaagagaacaatttcccttcttcgtaccatatgctatagttcttcttggtcttctagtttaatttgaactattggtaccctattacattatttttggcttctgaatgagttaatgaaatgtttatgacaatacgtatgccccggtgtgcatttgaagcagaaatagggagtaaaatatagtagcggtcatcaaatatggtatgctgtgtcacttaagtctttaaacttaaaaaccagggaaaataggtgctggacttgacggcccatctaaaaccactttgtgtcattgggtctctaaactttcaattagtatactctaacgtggcatgccacgtcggtattcagtttgagtaaacccagttgggatggttttgcacggaccaactatgttacgagacatgttttcctagttttctgagtttgaagattcaattgacacatcgtgttaagtatgaccactactatattttactcagaaataggtgtattttgaaataaattctgatgtgctgtattttatgatgaaaacaatacctatgacacattttatacaattggaaatgcatgaagg

SEQ ID NO: 41014 - DNA, 389 bp, Zea Mays
cggtaatgttgtttaaggcaatcttaacgcttcatctggctggtcggctggtcgaagcactaacccatgcttcgcccggacactagaagccctgcaaccaaacaacagaaagcatcaaagcgactcgatctcaccccctactacacagtacacacgcgccgcaccaaaacctcccagggggagcgggggttaaacaaagaagcggagttggaacggttcaccgccttgcattgggggtgctcctgtcccgatccatgacatcaaacaaaggcagggataaagattgaggaacaaggagggcggggacgacaaggagagaggcagcagcaaataaaaagaaaaaggcccccaccaccggcttccatggcaagggttagatgacaaacgcc

SEQ ID NO: 41015 - DNA, 3467 bp, Zea Mays
gtcatttctaagcctacatgatgaaattcccaacaaaggcctgcatcacaccatccggactctcacccgaaatctgccatcaccaagccttgcctcgcccctcggtcccgtcgttgtcgggagttctaggaacgtctctgccaggagcccagaccgtctctggcctcccggctccctcggccctctgcttgcggctttcctagtggttcctcgccggagtccggccggcggctcgtagtattgggcagcggcctaggacggttggcgggcggcagccggcaaatctaagcggcgcgccggcactggccgttgtgcgggtgtcgcgtgcgcctgtgcgtccaccggctgcctgtacggagctggactccagtcaccattaccctccctggttccctgcttgtgaccggtgagcatctctggaggctcgagtcttgactgagttctatcttaacggtgctgctagttatgcttgggtgttagtgctatggctactcattaccaagctgctaccttgattgcctctccgtcttacccaaatgccattgcttggtcaagtgacaatctcgtggctgtcgcatctggtcatattgtaactattctgaacccagctgcgcttgatggaccccgtggattggttggacttcgtcacagtgacccttttcctataggagtggttaagagagaagatctcttggagccatgtttattgcccacttccttagcgcgtgaaactgaaccatgtgcccgatcgatttcatggtctcaacaaggatttgcacctaactatgggtgtttgctggctgtttgcactgtgaatgatcatgtgaagctttaccgatcaccaatttgggagttatgtgatgaatgggtagagatatatcacagttgctgtttaactattataaaattataaacttcggagaggataatggttctcatttgacttcttcgaagaatacaaattctggggaggcagaagttttaggatctacttgtcgatcggaagaatctctttatttcaggggtcctggacagagaaaaataaagccagcaagagttggtggttttatttatgacggcaatgaagttgatttagatgcttcaaaggatgcagacttctcgatggaaccatgctcaaaatcaaagaagaaatctttgaaaaagactgtaaaacccagggatgaagtggttgctgtaaatggacgaaacagcacagggaatgttaaagcatcattgtcctccaatgaacaaaacaaatctcttcctcttatcacggcaaaacagtatgcctgtcgtgctgcacatttgtcttcccttgtagtttcatggtctccagttgtgtcattaagtgatagaacttcttgtttattgaggcattggtgcattcttgctgttggctctaaatctggaaatatttctttttggaaactatataagccagaatattacacaatagatgctggtgtggttaccagtgatccgatgctcatcggggttttgcatgctcatgaatcatgggtcaatgccataacttggcaagttctttctgcgggctcttcaaaatcctcgttgcttttagctactggatgctcagatggaagtgttaagatatggttagggaatattgaagggttaaatcaatgtgcaattggagaagaagtgccatttgtgttagttgctgaggttgccgctaatttatcagctccagtgtcgtcaatctcattgggcatacctgcccggtctcaacatgaggttagtttggcaattggaagagtatccgggttactagaaatatggatatggaatgcatctaccaacaaaattgagagttccagtgcatggcatgcacatgatcaagtggtgacaggtttacgatgggctatcgatggcaattgtttattcagctgcagtcaggacaattctacacgttgttggatatctcacgaaaaccaccttgaagaattttttttgcattcagaattttcagagctaagggagtcagaagatctatcaaaagtttctgatcgatgctatggtcttacgctatcacctggagaagagataattgctgtggtccgcagtttggatctgaaccttttgaaccagatgtatcaagtcaggacacaaaaggcggtggtcgagttcatttggatcggtggccaatttgttggtattccactggacgggagtatcgatatttgcagtccgcagtctgcggacttatcctcaagtaaccttatgtggtggggatccaacatcttgtggtcgctgaagaaatacgaaaatgtcgaaaagaggcttgtgttgtgggacgttgtagctgcgctgcaagagctgaagaaaaccgcgcccgcctttctggagactctagtgcacagttgggcctcagctttatttgcgggcgactcacagtgtgtttctatcactgcccagtcatcacgctcgatgcatgacatgatgccccatgtcagctcgcggaagctgcacttactgaacataatctgcagaaaagtgatgctcggcaatcatgcgcggcatggtcctggtgctggaaacaacagtaatgatggaacaactgatttctggagcactcttttggtagcgagtgaaacggagctgcgagagaggctggtgggtttcacctttgccgcggtcgtgaaacggacagcgtgtctgttcaacggcacctccaccgcaaattgctggttccctgtcggcgtcgcccagatggattcttgggtatccatgaactacgaaaaggtgcacggtcagctgcagtcgatcagatcgaagatcaaagagctaggaagcaggatcgacggatactccgacgtagaaagctgcccctactgctcttcgccggtccgtttcgagtcgcctgacgtggccatctgcggagaaaggcacacgctgtcgcggtgcaggacatccatgaccctgtgctccgtcgcgcagccagtgtggcactgctcgtgctgcgggggcacggtcgacaagctgctgccggagtcgttcttcaccatgcctttggacgccgtccgtgacgacaaaggatcgctcgatctgtcggcagcctccgccccgctttgccccttctgcggcgtcctgctgcagaggtcgatgccggcgttcctgctctccacctcgccggtatagtcttcggatgcccccaggtgttacatgcagtagcaatgcaatgggaatatcgtagtggagccaactaccaagtttgttgtagctgatgctgtatggctgcagagtggcagtgccgtcattggggctcgaaatgtttgtgataggttttgtgacttctttctgcttagcccctctaatatatctcgagatacctattttttatttaccgtaccctgcctctggaccaaagcctatgtggcggtggccgccaggctgagtgcggggcgaggggcttgggccagctcctgcactcagcctgatgaccatgtccg

SEQ ID NO: 41016 - DNA, 1732 bp, Zea Mays
gcaaattctcttcaacacgcgcacatgtgacatgccccatggtcgtcgccgctccaggcatcctcccgtggcctcacctccctctcccttcctcctcccacccgtctgacgcctctgacgccgccgcagcagcaacagacgccaacacctccgcgtatgacatccagatcttcgagcccacctccatcgaggagcgtcgtcgcctcctgatccagcggcgtcgcctccgactcgccgcctcccatgcctcgcggctcaccgttgcctcgcgcgtctcctccaaactcatcagcaccactgcctcctgctccagcggcgtcgcatccgatctgccgcctcccctcctcatggctcgtcgttgcctcccgcctcttccccaacctcgcccttgccgcccttggaggatcccaaatccgacgacgagctcagtaggcccacgcagacgcggatgtgctatgaacttcagacaacatattcctaccgagaagtatgaaaagtacacttcagagcatgtcaaggtcctcacgaaagcttcctatcaagtggttgtttgcaagattgacgagttgtaggcaccaaatatatcgagtccttgctatcaacatatgagcatattattgtcaaagtaggcaacatctcatttaacagacaactctccgctctatcattctctcaaggctgatgtgcatttctgatatattgagctcaagcgtcagattctgtatcgatggcaatgggttccagaacagtacacaaggcaatttcaagacggttattcaattgctcaaatagttcagtaagtgagaacaaagaaacttcctaaatgtattaatatggtatgatgaatagtgtctcacacattgtgttgttgagctctggtctccatttccgtgctgctagaatgtgatgtgaagtattcaccttttgacatggataaacatcttctctctgttacatttgcaggcgaaagaaggctcatgtgctgcttcgaaaatcagttctaagaaggcaaccagggacaacaaacctgataagggaagaaacatgttctggataaatattggcctttgtttcaagactccaagcccgccaccatccagggatcaatcctcaccacgaggaccaggggtgatgccaacaaggtgacttggatgatagatccgtgttacgataccagcatcaaagccgcctagaagcaatactgaactttcacttgagatgtgagtagttgttgttgggggccttcgtcctccgaaggtcctcaaaaacatgatttgacaatgttttccaagtggattatgtgaacaggtaccttcggactcagaattacgaacatgaagtgcggtcaggacgaagcctgaaccagacgaaggacgggctgattaccaagctccacgaaggatggtgcacagccgaagctgtgcgcagggaagcttcgtcgtgatagcagagaggggaaccgacctaaagataaaaagactacgtgggccttgtcagatttccataagtcattgacaaatgtaatggacataaatgtaattttacgtgggctgcgtcccgcgtctataaatagatgaacagtactctcgtactgttcacgcggacttggcatttgcttttgcgtcacgcttgtactttttatcttctctcaggaccgaaggtacatttgtaatttgaaatcatttctatttttccatgttaataaaatagaaatgattctatgatgatgctt

SEQ ID NO: 41017 - DNA, 2132 bp, Zea Mays
aatatgacatcctctcaattcagaccctccaccgtgagaaaaggctagaaaggcagggtttgctacgtcgcccagaccatctccacccaggaccgccgccctcatccgtctcccccgtcttcctcgccctcgtctacctcgcgctcgtcggaaaaaacagctcaggtcgcgatctggaggtgtgtctatcaaggggattcccaggatcgcgtaggatctgcagctctggagcgcgcgggcgtcggggaagtagcggtaggatctgcagccggacgggacggggcctgaaggtccagcgccgctctggacctcgcgtggttgaagtcgaagcaccagtggcctctccttggtttcactctcctcctcgtcgttgtccaatctggcgccagcaatgcccgagaagcgagcgctgctaccaggaacgcccgtgaagcgagcgctgctgccagcgatgtcagagaagcgatgtcgttgtttacaatgaattagcagaactgttttaccttaaaaaataaatttggtccgtctgccatcgttacaagttacaacgttagatacttagatgaatgcttcgtataagtaaatcgattattttgttgtatctaccaacaatgatcctattttcttcccccactgaattattagtgactgctaaagcaaaacttctactacatgataaaaaatatgttaaatcaatttaccttttgcaaagcagagacgtgctcggcttgaagtatacaaagaacagctcttgctagaaaccaagcaaaaaacgggacaggactgaagaatatgatgacttgatttgcatcgtaccgaagacattgctggccggaaattgatgagtccatggatgagtccatgatggacttggagaatgaggcagtgctacggaacgactgcgagaaggaagccgtgctgcggaatgaattctgccaaattaggaataaggaagcaaaaggatatagacataaggttgtgaagttttgggatctactcagcctagtgtacaataaagaccaagcaaatggagagggtgctaaaacaacagctgaaagttcaaaggaaatggcaaaagagaataataccagaggcaaggatgctccatattctgtatcttcctcgagtagtttaaaaagacaaagatcagatgattcatttaactctatatggtgtgataagttcgacatgcttacatctgcattgaaagatgacggtccaaagctaccctcttccgtcgaagttctcaccgcattacaagaggttgagggatttgatgaagacacagaacttgagctttatgacatcctcacctctaatgcacgcaagtttgagtcgatgatggcactcccaatggaaaggaggaagaggtggcttatgatgcagctaaggaagtgaaacaacttatatgtgaacttagatctctttgttgaattgattgtgtgaacttgtctttgtgaaacttttgtgtgtgaatttgatggctatgtgaaactgttgtgtgcgaacttgatggctttatgaaactactatgtgaagatttgatgtctttgtagaacttttatgtgcgaatttgatgactttgtaaaactgttatgtgtgacttgcctttgtggaattgttatttgtgaacttaatagtttctgatagttgtaaattgttcatgcttatttttaagcagatgcaaagtcaagagatccttgtttgtattcaaattcaaattccgtgtgcaaagtatccaaacaacatctagaatttaattctaggaattcaattgcttgtacaaccaaacaaaaataatggaattgaatcactttctagtcgattgaattctatataattcatttcttggaatttatttcttggaaaaggtttcatttctaggcatccaaacggggtctaagggtttgggagactaaaattccattcttattcaaagataaataagaaggagattttagtcctccaacggatttgtggcttctaaactagcccttaggtcattgtagtcttgggagtagtagcagaatttgtgaagaagatgaggccgaagagacccagttattggtttccttcggcacattcgagctgtcgtggagtccacctcgggcacacattttccaccaacaatt

SEQ ID NO: 41018 - DNA, 1320 bp, Zea Mays
atcggcatctcggcaagacgacaacacatgccacagccacacgcgacacacctgtctcggctgtggcgagcgcgatggccgcaaacgtggcgctggtgctgctatcctcctgctcgccctccacttccgccgccgccgcctcgctcctccctcgccgccgcttcctgccctcccgccgaagaagagcaagctcccgagccaccaccatcatgtcggcgttgggcgatgacccgatcagggaatggattcttacagaagggaaggccacgcagataaaagggatcaggtccattggtggtggctgcattaactccgctcagcgctatgataccgacgcgggccccttctttgtgaagaccaacagccgcattggtccagaaatgtttgaaggggaggctcttggtttgaaggcaatgtatgacacaaagtcgatccgtgttccgttgccatacaaggttggttctttacctacaggtggttcttttatcatcatggagtttattgaatttggtcgttcaaggggagaccagatttgggaaggaagcttgctgaaatgcataaggctgctaaatctgataaaggatatggtttcccggttgacaatactattggaagcactccacaaattaacacttggactgatgactggattgagttttactccaagcatagattgggttaccagttggagttggcatcgagacgatatggagattcggccatactcgaaaaaggtcagcggttgatcaagaatatccgcccactttttgatggagcggttattgagccatgcttgcttcatggtgatctgtggagcggaaacataagctctgatagcaatggggatcctgtaatattggatcctgcttgctactatggacacaacgaggcagagtttgggatgtcctggtgtgctggatttggtggggacttctacaacgcctattttcaggtgatgccgaaacagccagggtttgagaagaggagggacctctatctcctctaccactacctgaatcactacaatctctttggctctggctaccgttcatcagctatgtccataatcgaagactacctatatgtgctggcgatttagtctcttctgtctattcccacatggccacatggaaacgaaaaagatcttcatttgtgtaaataaatatctcactgcccatccatttggacacggttcggtggctcaaagaagaataatgtaatagtatagtggactctgattgaatttggcccgtcctactaaactaacaccaggaggcgcccgggggggctatattgttaacaacgttagtgaaaagccca

SEQ ID NO: 41019 - DNA, 3907 bp, Zea Mays
ccgagatgcgtgtcattgttaaagagatatcttatccggtacattccaagggtgcaaactctgcgacaaattgatctgttttgtgcgaatacgattgcaaaatgtgaaccgatggcaaataatagagcagcatcttttgccaagaataatgtatcagcagcagctgcaataaattcttcatcccttgccccaccaatatccaactttgcttcagcatctcttgtgaagtctttaaactatgttcgctcattggttgcaaggcatactccaaagttgtcattccaatcaatagtcgcggcaaagcagtcacttccttcactttcatcatttctgaataggtccttactttctcaactaactccagaagttattagcaacagagaacatcttgaatcgaaggaatgccatagctcacctgattttatatcatcagcaagtgaaaaagttgatgtgggtgaacctgtagatgatagcaaatatatatccttcgacattttaagctggcgatggcatgtgtatggcgaacggcagtcgtccttatctgccaaagaaagcagtgattttgtgggtcttcaagattttcatatacatggttttcttgaagtcggtgctgcagctcttctagttggggatatggatgcgaaaattaatgatcaacagtggaaatattctgttatccaggaatttccagatattgatttgttacaaccttcatcttctgccgcaagtacttttgcgtcatcacaaagtcatttaaaagcaataactgcttcaaaacgcatgagatcagctccaaatcaagtctggatgaacataccaataaacacattccagcctcgagcacggcctctttttcagtacagatactacagtgagcagcaacccttaagattgaatcctgctgaaatttctgaagtcatagctgaagtttgttcagaagcaacttcaaatgcaaatcagttgattgttccatcaagattgagcacccagagtcggcaaccttcagcagatgtggcattcagtgtccttatcaaacttgtcattgacatgtatatgatggactccgagactgctgctcctctgacactttatatgcttgagtcatcagccagaacgaaggctcttgatttgatcctaaatctgggggtacatgcacacctgctgcaacctatggttattggagatgcgccgcttatagataaaagtgaatctgtgaaccgttcttatctgagcaatgaatacggatcaagtataaatgaaccgagggaagcagaacctgaagtagaacagaagatcagtcctgctattgatcaatttgaatcatggcttcttaaaatgctttttgaggttctccttctcctagtacagatagaggagcgacaagagatcgtgtgggcctcagctttgagttgtctattttactttgtttgtgatggaggaaaaattatcaggagtagactgggaggtctggacataagggtggttaagactcttcttgagattagtgtggagcactcttgggcaaaagtagtgcacagcaagctcatttgcatgttatcaaatatgatgtaccaagtatcagatttaactcagaatggtgtttctgacacacattttgttcctgagcggattgatcttcttggtgggattgactacatttgtcttgagtattcacgagccaactcaagggaagagaagcgggatttgttctttgtcatttttgactacgtagtgcatcaaataaatgaggcatgcttggctggtggtatttcaacctatacttatgatgatgcccagccccttgcttcccttcttgcctttgctgatgctcctgaggctttctacatatctgtgaagcacggcgttgaaggcgtcggagacatgctaagaaaagctatatcagcagcattatctcagtctgctcaatatgaccaattgaatgtgcttctggataaggttatgaggaaacttgatggaactgccagcacattttccaggattgacaatgagttttcttatatgatccaagtaacgaaatcatgcaagtgttttggcagcattaaagatggatgtgatgatgctgatgtagcgcttagagccaggctttgctgggcaactttgcactcacttcttcactcacatatttcatcatataggcaccatggatatatttggttagttgaattgctcctttcagaaatcagtgaagaaacagatggttctgtatggtctaaaatccaaaagcttcaagaggaaattgaagttgctggtagccaagacctatcatgttcagaagtctctctgcctgtttgtatgctttgtgggcttctaaagtcaaaacacaatttcattaggtggggattcctatatgtgctggacaaatttcttatgcgttgcaaattattattggatgacaatgacatgcaagaccacacaactgctgatcataataaaaattgtcttgataaagcttttgcggttatagatattatgaatagtgctttgttacttgttgttcaaaacaatgagacggaccatatcaacatattaaagatgtgtgacatgctgttctctcaattatgcctgagaattccatccacaaatgcgatgcaagttaggggtcttcagtcccttggtcaactttttggttatacatctaagaacatcgatagtcatttggaaacccttgcatctcaccaaagtattggaaataagaatatttgccggagtgagacattgcaagatattggcatagatcaatctggtcaatccacttctttctgtgaagcatcaatggcagcactgcttctgagagggctcgcgatagccccaatgcagcttgtagcccgtgtaccaacctctttgtttttctggccattgatacagcttgaaggggcagccagtgatgacattgcattgggtattgctgttggtagcacaggaagaggcaaccttcctggtgctacatcagatatccgagcagcactccttttacttttgatcggtaaatgcacagctgatcaggaggcactgaaagaggtagaaggcaatgagttcttcaggggtcttctggatgacacagattcaagggtagcatactattctgccgcttttcttttgaagagaatgatgacagaggaaccagagatataccaacggatgcttcaaagcctcatctcaaaagctcaacagtgtaacaatgagaaacttctggagaacccataccttcagatgcgtgggatattgcagttatcaaatgacctaggagttcaatgataagatcgtgatgacatttcaatggataaagctctaagttagaatcactacttctggctgtgtttattgcagagaacctgaagatgttccgaactaagttttgcagatgctatgtgaatcatgtaaattattgctttggccagatgcatgtacagatccatgaatttctttattctttgttagactagtcacagtccaagggagtcacagattaacaagataatctgatgatcatcctgtgttatggacacagtgcattgtggtttaccaacctggacgacttgacaaaggtttaagccaaggtggcgtagatgtgactccctacaattttgtattgcagaaaccgttgagatctgaggcaaggcattatatatattttttgggcgagacatgctcggttcaataaatatttgtgtgttcgctttgcatatatggtaactgatcagaggagtgtagatttgtattgcggagtaacaatgtaaatgttaggtttgaatatactgatttcgagatgatgtaatccttctatactagcttagcttccatgttggttgtttaatttcgataagaggttgtttacttttatatgctgtttggtttacatatttgtgacgtgatgaataaccgataa

SEQ ID NO: 41020 - DNA, 1646 bp, Zea Mays
gtaacattagcccaattgctcagcgcgttaggctgtctccaacaaggttcggtaaaccgacctgtacgctagaaatagcgtcccgagacgtccttgaggcctccaacaagatccgctataccctctagtaaaatttaggggtgcgtttgtcgtccgctatctgtagcgtgctagttttgctcgctatccgctgttcactcccgcgctgccttcgttcgttgtctcccgcgccggctcggaaccctctcgtcgtcgcgctcactgtgtagcacatcctctccggtgtacggctccaacgacaagctcatgctgtcagggctcaagatgatgtgtgcggagtcggatggagtggcttcgcatgctggacgttggcggcgttgtgcttgaagttgaagacgttgtggtcaaccacgtcgtcgcttccagaccgaatctggttttgggcacgcagaatgacttcatacaatttgtcttatcaaccatgttatgtatgaactataggcactgatggttctgacttcaatatgtgcatacatgatggttgaaagggaattaggcttacacctttttcctaattgattttggtggttgaattgtccaacacaaataattggactaactagtttgctctagtctataagttttacagatgccaaaggttcacaacaagccaataaaaagaccaaagatgggttcaaataaagagagctaaagacatcccaaagacaccctggtctggcgcaccggactgtccggtgcaccagggcactcgacgctgaacttgctaccttcgggaaaatgggaggtcgctccgctataattcaccggactgtccggtgaagcaccggacagtgtccggtgtgccagcggagcaacaactacttcgtacgcaacggtcgactgcaacgcatttaatgcgcgcctgcgcgcgcagaggacagagcacgcacagaaggcgcaccagacagtctacaggacctgtccggtgcaccaccggacagcccagaggccccaccagtcagagctccaacggtcagaacccaacggccggctgacgtggctggcgcaccggacagtgtccggtggcgcaccgaactgtccggtgcgccatgcgacaacaaccttctaacgaccactttttggtggttggggctataaataccccaaccaccccacattcaatggcatccaagttttccaccttcaacacattacaagagctatagcattcaattctagacacaacaaaggagatcaaatcctctcccaagtccggaatcactccaaatcaaatagtgactcgagagagtgacatttgtgttcatttgagctcttgcgcttggattgcttcttttctttctcattcttcttgtgatcaactcaattgtaaccgaggcaagagacaccaattgtgtggtggtccttgcggggactttgtgtcccatttgattgagaagagaagctcactcggtctaagtgaccgtttgagagagggaaagggttgaaagagacccggtcttggtgaccacctcaacgaagtgaccgtttgagagcgggaaagggttgaaagagactcggtcttggtgaccacctcaacggggagtaggtttgcaagaaccgaaccttggaaaaacaaatccttgtgt

SEQ ID NO: 41021 - DNA, 1849 bp, Zea Mays
taagcggcagtcagccagacagccagtcggccgtggacagtggcgacggcgaggcgaagccgtatttggaacttggaagcaaccgccccgcaggcgcgagcgccgtcgtccgtctcgcctcgcctcgcctcgcctggcactgcacgcgcaaaatcgcatcgcatcacgagctctactctccccggctccactgcccgctcgctctccgactccatacaggcaaaccgcgccgccgcgcttctaacccccacccaactctgcctccgatcccaccctcccagcccagcgcgtcaagtaccccgcctcggttcgctccccgtgtgatctggttcccacccgcggccatcgcatcgccgccgccgccgccgccgccgcagaacctcgcgctcccggcgcgggatctcgcgggccccggccccacggtccggcgatcgggatgacagcggcgcgccggcgatgaccggctcggcggcctcgctgggcctgcggtccgggagctacggctccctcgcggccgccgccgtcgtcggcagcggcgggaggaaggccggcgccaccgcctgccgcacgctgcgcgtggagaaggagcgcctgcaccgcgcgctgcggctggtcggacgccgcaggaccggcgtcctgctgctgctcgccgtcgcgtccgccgctctcttctgctccctcttcgccgtcgtcaaagatgacgccaattcaactagtattgtaaataattacgaagtcccaaatgccatacagaagtcagtgtatcccagcagaacacgacctctaatgatgtctggaaaccaagagtccaccagtgttgtcaacaaaattgattttccaaatcggcttcatctttcatttgcaaacttcacacatccttgtgaaggtttctcagttcctcctcccctggttgataagaaacgcactggaccccggccatgccctgtttgctatgtttccgtggaccaggcatttgccttgatgcccctacaagcttcaccatcacctgtcctaaaggacttaaactatgtatcagaagatggtgttactgcaaatttatcaaatcagggatctggatttggagggcatccatccctggatcagagaaacgattctttcaacattaatgagtcaatgactgtccactgcggctttgtcagaggaaagaagcctggccaaggtactggattcgatatcaaggatgacgatctgctagagatggagcaatgccacgatctagtcgtagcttctgctatttttggaaattatgatatgattcagcatccgaggaacatcagtgatttttcaaaggcaaatgcatgcttttatatgtttgtagatgaagaaacagaggcttatgtcaagaattctagttctctgtacaacaataataaagttggactgtggaggctggtggttgtccgaaacctcccttatgaagacccaaggcgtacgggaaaggttcctttggaggaagaataccacttttgcaatctctcggcattacaaacgctttgatgtgtttgaagaagcagaagcgaacaaagctgctggaaagtacgacaacgcgtcaatcgattaccaaatagagttctacagaaacgagggcctaacgcattattcttctgctaagcttcccatcacaagcgatgtccccgaaggctgtgtgatcatcagagagcacatccccatcacgaacctgttcacgtgcgtatggttcaatgaggttgatcgcttcacctccagggaccagatcagtttcagcacggtccgggacaaaatcagggctagagttggctggatgcctgagatgttcatggactgcgaaaggcgcaactttgtcgttcag

SEQ ID NO: 41022 - DNA, 1066 bp, Zea Mays
attaaaggcaatttggataattctccaaataaacctggccacagggcagtgaaaaagcaaatgatctatggactccaaaagtccacaaaagatacagtccggattcccatgccagtgtcttttaaccaaattatcttttgtcagaatcttcttatcattctgtatctagttttacctttatggcatttctttttattatcaaatgaatggcaattttatacctgtgaagaattggataaatgcaattaactttggtatgtgatattcgtgaccgataaaggcactgcaattcagaagaaataacatcttttttctgttacaggatgccctgaaagaactttggaagttggcttaccctaacagacaacttcctcctctgaagtcagatctctggaaggagatgggctggcagaactccgatccatccacagattttagagcagctgggttcatgtccttggagaatctaatatattttgccagaaattacccagattcctttcacaggctactgcataaagcagatggtaagagagctgaatgggagtatccttttgcagtaggcggcgtaaacatatcctatatgttagttcaaatgctggatttacagtcaggaaaaatgagaacaaaagctggtgttcactttgttcaactactcgatgatgacggtgtggctttcgataaccttttctgtgtagcatttcaggtgcttgattctcaatggcttgcaaggcgagcgagttatatggaattcaatgaggttctgaagtctacacggggtcagttagagcaagagcttactatcggaggtatttctcgcattcaagacatgccatcattcagaatgctgagaaggtagcgctgtttgtacttcacaggaaaagagatacattttagattccaatatattgtttaaatttgttgtccgttctttcactggattttgaagacgtgacattgtgtatgttattgagtatattgtttgtaatgtcgcagcttaaagctacagatcataatatatgatatgatatcttgaaaagaaaaactacgacttccagacattttt

SEQ ID NO: 41023 - DNA, 1191 bp, Zea Mays
ttcgtgccaactgctgtaggaagatccagcagtctgcaaggtggccaaagaaaacaacacggcaggagtgaagatctctgataggatgacttcagtgtccgaattaacacttgtgctggcttcaggtgcatcaatgttaccgcatccttcgaaggtacggacaggtggtgaagatgcatattttatagcttgtgatggctggtttggtgtagcagatggagttggtcagtggtcatttgaagggatcaatgccggactttatgccagagaactaatggatggctgcaaaaagatcgtggaagagacccaaggagctccagggatgagaaccgaggaagttcttgccaaggctgcagatgaagcacggtcccctggttcttccactgttttagttgctcactttgatggaaagattgagaagggtgacgaccctctaaaacttgtacagaaatacgccatctgtctacaagaaggcgacgtcgttgtaacagcgtcagacggtcttttcgacaacgtctacgaggaagaagtggcaggcatcgtctcgaaatcattagaagctgatctgaagcccacggaaatcgccgatttactggttgcccgagcgaaggaggtggggcggtgtgggtttggaaggagcccgttctcggactccgctctcgcggctgggtacctgggctactccggcggcaagctggatgatgtaacggttgttgtatcgattgttcggaaatctgaagtttaataaactagaaacgaactagcaaagttgagcgcacttcttttttttcttttcttttcttttttctcttcttgcaacagctgcactcgctggcaaaatgcccgtgaggcgtgagcatttcgcacatccctggcctacgcgctcaggcgcattgcgaaacgtgtattgtgtacacttgatacatactataaggttgtataagtaagctgcgagcccttcgaatgaacatcgtgatgtacttactcagcggcagcggggtaagctattcgtggccggccggtagcattatttatgcgaggcagtgaaatccatgaacagccgcagtgctactaaacgaaacggaaacgctcacaagatacatctctcggtacatgatttgtggtcagactggggtaaggtacgggcggagcgcatgaactcgggtgagtgagcccagctcacaagacccg

SEQ ID NO: 41024 - DNA, 732 bp, Zea Mays
agcgctaaaacaccccctcccgtcccgcaccgacgtcgacggagacgtgtcactggcggcgttgagaagacagaagacttcagaccttctagattttttcccggccgcaatggatctctgggagagggcccgggccttcgccggcgaggcggcgaattggtcgcaggagctctccgcggaggcgaccaagcgctcgtctgcgctggtctcggagacggcgaagaagtcgaaggagatcttttccgagaccgcctccaagtcgctggagatcgccgccgaggcaaccaagcaggccgacctcctggccggccagatcaagcacctcgcctccgacatccccgtaccctcgatcccacccatccccgcgatcccacctatcgccgccactgcctcgtcggagcccgacgcggccgagcttgagcgctacggcatcaccgacgacctccgcgagttcgtcaaggacatgaccataagcaccttccgcgacttcccactgcaagatgagcctgaaatgtctgatgtgccaacggtgtcgaatgtgcgtcaggatctgagcgaatggcaggccaggcacgccacacttgtcctctcggcagtcaaggaaatatcgaagttcagatatgagctatgcccaagatacatgaaagagcgcaaattctggcgggtatattttttgctagtaaacagctatatagcccctcctgttcgtgatgcacaaacttttactagaat

SEQ ID NO: 41025 - DNA, 3060 bp, Zea Mays
cggaaaagttgtagtagtgtctggtttctggtgaacacattaagatgcattattgtgaaaaaaataaacatctagatgaaaagaagtataattaggaagtgtggcttttctggatctaaatgggaaaaaaggaatatggttctttagaatttagttttcggtgaaactatcaattccatttggcatgcttgatctgatgtttacttaaatttcctatattcttattctcctgttttctaatattgccttttcatgatctggatcacaagatgctgcactgtcctcatggaagcctctcagccctcaaatgtttgtctttgcagatttatttgtttaggcaactctcatttagctgcccccttttcctgttaaggaaaaaagaagctttaagttcagtttctcctagaatctctcctcaaactgtgataccagctgatttactattatatctgtttattctcttctttggaatgctatggcaacaagtcaccaaagagaataaaggaacagaatgcagtgccgccaccacttcatcgtgtaggggtgctgtctagtgcagacatgtcaactcagttatgaaaagtctgtaggctctggattgaggcgttaaaaaaaatctttatagttttccataagtggtggagccaagtacagttctgtgcatccttctgttgcggtcaattgccatcatgcaggtttggcaccacgcaaaatagtggtacaagtggagtcaagtacgtcttggtgacaattttttgctcctggccaatgccatggtatttgattgaacctagctagggtagtggaacctcgtagttgttccaaccaatggtaagctcatataattgcaccattggtaggtaaatgtcaacatgtctctctctctctgcaaccttgactattagcaatatcaggtcagggctctctcttttttttctctctaataaacacacacacacacacacacacacactacccagaggactaaacacatcagcaccttttacaagttactataaaatggcctcaacctagactgaactccattgatttcactatcgtttttatctgctgatctcttgattttcatgtgacttttcagcgaagtagtgcaatattattcaggaaagatggttgccagctgccctagtttgaccggagagatcaaatatgaagtggctagcagttatttggttggtatggtgattagtgtatatgccaagcttttacagataggcaagaattgacagtagcaaattcttgactagctccgccacctacaggaaaatctagaagaataaaagaaagtcagagatggcgatgtttcttggttgctgtcattagctgccgcttgacacctcggcgacgaaaaaggagccgtccactcactgagccttttgtccccctggacatgcaggtgagtggcatgtaaccaacctgaatgacaggaggatcattgtggtggcaacgccaggaggcagttggatattcaagatcatgacatgaaagactttgggaaggggagagggcaatctccatggatcaaggtgtctgcacatgatccaagcgcacaactgctcaaagcacacaagagatcgtgttgtgtgttgtgtttttgggccgtaccaggaccagagcgggcccctatagctatagctatagcagcaatgagctgggtcgtactctctccacgacaacactgaaccgtccgtgtgcgttcctgttgccgtactgaaatccacagagaggatagctgggctctgatccgggatttatgtcaggcccattggggaggtcatgtgactcagcaggcgatcctccggccaccgccgccaaagctctgtggctccccaggtggccctcctctgacatctcccaggatcaagctcagggacggaaggtaccttgcgtacaaagaggatggagtacagagagacaaggccaggtacaagatcatcacagtgcacgcatttgatagcaccaaggacttcccctcgcctgtttctaaggagctcgtggaaggactgggaatttacctccttgcttatgacagagctggatatggggaaagtgaccccaatcccaaccggcatgtcaagagcgaggcgctagatatcgaggagcttgccgaccagctgggccttggccacaagttctatgtgctaggggcctcaatgggaggatactcggtttggggatgcctccagtatatacctcacaggcttgcaggagctgcgctggttgtgccaattatcaactactggtggccttcgttcccagctgaattatccaagcaggccttcaacagactgattgtgccagagcagagaactctttggattgcacacaacataccttccttgctttacctgtggatgacccagaggtggttcccttcttctgcagcagccatgcaccaccctgaaatatttagcaagcatgacatggaggttcttcagaagatgatggcaatgccaagaaccattgagaacaaatcaaggcagcaaggcatttatgaatcgatccaccgtgatttacttgtcgcttttggaacttgggagttcgatccaatgaatgtcaccaatccatttcctcaaaatgagggctctgtgcacatctggcaaggacgcgaagataggttggtgcttgttgagctgcagaggtacattgccaagaagcttccgtggatcaagtatcatgaagtcccagaaggtggacacatgttcgtgatggtagatggatggacagaccgaattctcaaggcactcttgttaggagaagagcccctagatgtgtgacagtagttccattttcaaaatgtcaaaaactgcagctgccagctgttattttacttaattttattcccaatttgtacacttgtattcctacaacaccaagactagtctaattcataatccgatagactttccatcatgtcaactcattacaacagcagtgataccattgtactcatcccatacgcatatgcctttggtccaaaattgatgtcaacccagaaagcacgtagtcaaaacattcaaattggagagaggggtgttt

SEQ ID NO: 41026 - DNA, 571 bp, Zea Mays
cgcaatctctgatcttttttcgatgccttatcctcctaggatttttttagcttccaccgttcaccccatttcttaattcctgctctgactcttcagccggccggccggccatcgttttctggacgcgcgctctccatgctcgtgtgcctctcctcaagcgattcctctggttcgacaaccgtaccttgtgcctcggtctcaggtcgccggactccggcgccctacgctctcgctcacctccctgccctggttgtgctcgctgggacgttgtgctctagccgactgccgctgcgagctcgccgtacctcctctccatgcccgcatctccggatctccctcgccgagcgcctctctgcttcagtcctggcctgtgaatttgtgatataaaatttctttctaaatatctactaaattcaggtgttattcttgcttctctctagttcctttctctctttttaagtagatttagcttaattagtgagagatttattagttatttttgtcaaaacaatatgagttatgaaatattgcatcatgctgagctcaaatattatttgaattgttgcacatg

SEQ ID NO: 41027 - DNA, 1421 bp, Zea Mays
atactgcaacaagctctagcgttacttttaatatgcttcagccatttgatgctcccctgcctccacacgtgcgctagcacagttccaatgctacatcaaagtaacgcttcttgattactgataatgccaaatcctagctttttagcgtttcttttctcccctaaaaatgagttcagggtgtagtattttcctaaaggatgggagatccattctccgatacaaaaaagtgagtctaaggatgcaatattttcctaaaaaaggaagagttcttgctaacatttcttatcttggtcttacgaaggaggtattcctttttcataaagtcacataataattatgtaatttcatcttattgtattggcttctataagtattttatccatgttccagataatatgagcaagcaacttttataagtctttaatatgtgatttccatggtcatatctcatttaaaaggaaaacttcatgtattcatattacaaatgataatttaagagccctggcaaaagggataatgattaaaacttgaatgatcataattgccatggttacattgctatgtcaatcgtgcgttttttgcttactatttcccctctataattgtatgcatctatgtggctatattttttatgctctttttgatgcttccactttgcttctgtagttgtttgtgttttggaatcaaggtgcacatttgcatgaattggatcttttagcgaccagaccatataggtacaaacttagttccatggcttccgatgacactgctgaaatgtgaatgttctgtttcgacgacgttgccaagaaaattgttgggaaatcatacaactctcctatcatcagttacagggacttcaactatcctactagatttaacattgatcgtatctcttaaattcacatttgtagttgtgtacaaccaaatatcatttgtggatttagagaaagaactcttcatgaagtcattcatagcatcatatggaagaaatgtcattgccatcacccagatgaaacattccactatctgtcaactccaacaaaactattgtctagaccaaaacaatcattctccaaatgatagtcctggagatgaaggccaggacctaccgtcgtttgagtcaccataaaaaagaagcaacattcgattggttggttggctaacggacccagcgcattgtccaaagctcaaccgcagcatggcgggaggcagctcatgcacatcagccagtcaccgatcgagcatcggcttgcggtaccggatagagcaagtgatacatttggcggatagatagccagcttttgtctaatactatagtttacaatgttgtatctaaacactatttatcaaaaccatggtatgtttggagctaccaaaactacggtattatcatagcaattgcaaagtataatattataaaa

SEQ ID NO: 41028 - DNA, 1436 bp, Zea Mays
gacctcgctttgcttctcgtgtcgctgcgtgccctgctccactgtgtcgatccgtccatctccctgagtccgtgcgcgcgcagcttcctcaagtcgttgtgtgcccagctcgctccagctcgccggtcaagcttctccctcacgctcggatccgaccgttaacgcccagtcatgtgttctttttcccagctcggatctcgtcagccaccattctctaacccgtgtgtcggtcggcgtcgtggagttttggtttgatcggctcgtcgttgacctcgtcggtgtcgtcgaaccgtgttcttccctacttgatctcgtcgaaccctgaatcccggacgttatgcagaaataagcgaggtccctgtgcatcgcttatcaagtgctcggtcgaagacttcaatcgaaggtcgtcgtcgttccgcgcgtcatcaagaaatcccaagaatcgggtgaagacgaagctagcagcgtggtgttcaccaagtgctcgacaaaagctcgaacaagccgttgatcgtcatcctcgtctacgccaagctctgagaagattaggcgcagatgaaaataaatcagtacgcgaccgaaaaattctagatgcggacaaagaagaagcgtgattcgacgcagcactcaccctatttccggtgaaatgctgagccgaaaggcgtcgtcgatttcgtggtttcaagtcggatatcataagggtaagttgattcgtattccagtcaactaagtctataaatagattaaatataattattggtctcaataaatattattaatttagcatgcgtatattgtgatgatcgatttagatgaataggtaaatcaagtaattaagatacacagtttaaatagttaataaaaagctaggaataaaaatagatgttttagtgtcattatgtcaatttggttaatggatgtagtcgatgccctgctgtgatatccatgatgcttaatgtttggttttaagtgtttcatcctttttagtgtaggttatctatattatactcgttatacatggactcatacatgtgcatcgtgcatctcatgaggtacaataaataatcgcgtgatgcggaaaacgacccaagtcgaccccaagcgcaggctactccgtatgatgatgctggtagacgaacctgcccgatcaagtgctaggacaaggatgatcgtcaagtggacgtcacctaacaacactaacctagtgttattcaggcaagccccggtgcatttgccacctccttgtgttttaaaatctttatcaccttgtttgatgcattaggtgatatgagttgtgtgctaaaccgttgatgcatttccttccttgaaaattgattaccttccttgatacccgttttgaaaagaattttatgatgcttagccttgctttagcaaacaaaaatgttttgtttttaaacaaaagtgatgcttcagtg

SEQ ID NO: 41029 - DNA, 1352 bp, Zea Mays
ctagcttccaaccgccactttgatgggagatggggactatgcgctgcaccctgagcccggcgccgacgacgtgggcgtctgctggcccggcgagctcgacgagcagctcgtaacggagctcctcagcgacgacagcctcctcctcggcgccctgcagcaggaccccgccgccgtcgactcggagcactactgctcgcgtgacacaggcgcgtcgtcatctgctcccgcggcgtgcaccggcggcggcggcaccgtggccgagcaccaggagcttcttccgcagccggaggcggtgagcagggctctgtgctcggtgtacaccggcccaacgatccgggacatcgagaaagcgctgtcgacgtccaggccgccgtacccctggagcagccgccgctacagtccaatgcatcttggcaggttcggagcggcgggtcgggcaccggagaggcacacgacgaaggtgaggagctgtggcggcaagacgccgagcgacgggtacaggtggaggaagtacgggcagaagtccatcaagaacaacccccatcccaggagctattacaagtgcacgagctcccggtgcggcgcgaagaagcacgtggagaaatctatggacgactcagagatgctgatcgtcacgtacgagggttcgcacctgcacggcccacagccgctcttcccgcgtcgacagtggctgtcggttgacctgtccggcgcgggggtagcggcctcgaagacgaagcagcagcagaccaggtcctcctccccggccgcgtcagccacgctcgcaagcgacgacgggggcggcggctggccaccgagcctgcaaataatgacgcgcaacgccgagacgcgaggaggagggctcacggctgatgcaggcgagagcgagacgacgccggggcttcagagcggacgcacgggtgtgaccgcggactcgtgcgacgatggctccaccgcctccgtgccgccgccgccgcagactgctccctcgtttcactgtgactcgccgcctacgacctggtcctggtcgtgccttgactacaccctcgcctggtcccctgaagctcctctgcttcagtagaagccggtaaactagcttgtttaggaacaggatatgcatacatagatctcaaagagatcgaaagataagagaccccagctgtttattatattccatgcaaaaaaaaaactcaagtgactaaagccagaacgctgacgtgaagctacctaagttggtgcagcgacagtgataaaaaggctaagcacttttctagttaaccagctatactattattgtacagtgatatatatagatgccaatgtgtgcccttagcactagtaattattcatgt

SEQ ID NO: 41030 - DNA, 704 bp, Zea Mays
tgcatgctaagacattttatcttacgacaaatataactacgacacgtaagctcacaataggataatcatcgcgacaactatatttatccaatccaactattccttatactcacgggaaataaatggatctgcttaccatgtccgaatcgactcggagctatgatttcgacaaggctatccggtttgagccattcatcgaacaccatgcgtgcgtcgatctccccaaaatcaaacaatcaatatttggcaagaacatcggtgccgatcttcccaacacgcgatgagcactggtccacacattttgtcgaatagggagctgcaggggcgcacgaccagcgggcacgaggaaacgacgatagtggggagcgagcaatttcgcgcgcacgacaacgcgatggaggcgaactgaatagagagcttcgcggcagcacgcgtaggaacaacggaacgctactcgcgcgacgcaaaagcgagcaggaatttgggcgccgagcaggaagacaggggcgagctcgaggagatgtcgagctgatgacgagcgcgctagaacctgggcaccagagcagcgcaaccgccaggcccggacagggatcgaggcaggggcttggctgggacgtgacatgggagggctccggccatagatgaaagctgggcaagcaggacgccgtggggatggagagggactcggcaggacgcgtcggctg

SEQ ID NO: 41031 - DNA, 2083 bp, Zea Mays
ggccaattgacttcgttcgcaacagcgggacaaagggaagcaacagcgagggaaaaccccattcctcgtctctgctcctctcaatcaccatcgcccccctctctctccgatcactgcatctcttctccgcctggtcggcggtcggacggcgcaatggacattaaggtgtgtggggtatgtggcagtggtagcaactctgctcttattgtgaagtgtgttcggtgcaatgattatgaacaccgttattgtatgaaggtggtggcacgggtatctccacaggaatggtattgtgccaaatgccaagagcataccaacagaggcccgaaacctagtcaaggtgggcaaacggagctccaaaagccatgtcatggtcgtgatatgacgagcgagagggaaacttcgaagttgcacctcagtcaaagcagcgtagtgcatcaaataataagtcccaaatctctgaacagatttgaaaatgctaaagtgaagttcatctcttctgaagaagtggcattattgagtagagagaggccaccatctgttacatcaagatttactttgtcgcagccaagcaaggcatcatctcctccaactacaaaacacttgtccaatatgaattgtgtatccccaagcaggagtgataaaaatgtgcaagccctgaaacgatgtgctgatgcaagtcatagtcaagcagaacttgaggataggtcatattctgctatgcagcaaaggcgggttcatcctgcatctccttcaagcatgaagcagccatccaatatgaaatcaacatcccctggtaggagagacatgcaagtgcaaaaccagaaacgatatgctcctatgcgggaaagtcaacctcatgtgaaacagttgtcaaataggactgccacgcaagtgcatgccaccaaacgatctgctacttcaagtcatgatcaggcaaatattgatgacataaacatggattgtgaagcaagatctggtggttccgtgcctatgatgcatgaatgtagaacaagtgaatcagtaaaagtaaaaatggactctctgattgaacacaaagctagagaaaagaagatagtgaatgcagacaaaggagaaattaaatctcagactgagcttgaacctagggaaaaggggaccttatgcacttcagatgaagatattggatgcaaatcagaaattgggagtctgaaccagaacaaagatgtgattgtcaccatggtttcaactgtgcagtattcaagacgcccagcacctacaaattgttggaggggatgctttcatgtcttcaatgctggagaaaagctaaatcttggtgaatttaaagcctactttccatcaaaagtgtcatccagagttattgatattgtcaagatgatgccaactgttttacagctggagttattacatcgaatggatgactggccaaaatcttttgagactatgcatccagttcatgaagacattggcttgttcttttttcctaataaacctgatgggtgtgaaaagaaacactctaatgtattagaagcttacaacaactttgttctaagggcatatatccatgacataaagttgttgatatattcctcggaagtgcttccccctgattctcagtggatagatggtgagaattacttatgggggctttttgtgagttcagacggaaagagtggtccttcgtgatctaattcaactactacatgatctattttccatggacatgatagtaaaggtaatcaaatacagtacagagatggtcaagtggatgctccgttacattttctgtacccatctgatactgacggaagcgaggaaacctgagttctatggtttagagcagtttgggaaccccatttttacaagggaaattagttcatttttctttgagaaaatagaaatcccttggaaaaatggagttcccaaactagccaagaattccaccttgctggtctataacagttcagattccaccttgctggtctataacagttcatgctttagttcggatgctgaaactagctcctgtaaaatcagtctaacgaactcttgcagcctgcagcttgcccatgagaagttgagatat

SEQ ID NO: 41032 - DNA, 5195 bp, Zea Mays
cagttgaaacatggacaccacagagcaggtagaaaaatcggaaaataggatcaaagccctaagttctgttaaggctttacccttgcacaacatttcaggctctttgtgaattgcacaccatacatccattgttaaactgatatttctgtctttggcttttcatgattgtcgagccacattcctttctaagttggttacatgcaattctctgttctctatgttttatatgcctttttgtgcgaaagggctctatctgaattagttaggtggtctgagtagcactcctcaggtcctgggttcgactccccgtggaagcaaatttcaggctgtgtttaaaaaaaatcccctcgtctgtcccacgccaaagcacaggtctaaggcttggcctcggttgcagtcattctcacatggacttcgatgccgctgtgtatgggtggggcagaggttttctcgacctgtatgagaaggagatgatgatgaagatgatttggaaaatggacaagttagcaagaggagacgtactgctactaatttgagcatgagaaaatcttcaaacaaactttctgcttctgtttattctgctgtgcagaaactatgcttgatattgggctttcttaaggaactgctcacaacagtgcgcttgtcagatggttgtattctgcagttagcgaaaacatgctttactacattcttggtggataatatgcagctattacaattaaaagcaatcggggttatttgcacggtgttttcgtcatacacacagcacaggagttacttggttgatgaaatacttcaccttcttcgcaagttgcagttttccaaaaatgccgtcagaacctaccatctagcagatgaagaccaaaagcaaatccagatgataacagcactgttagttcacctggttcagtttagtgcaattgttcccaatagcttaaaaggaacagttgattggaccactattgttgatgcctccggagatgctgattattatccaattaaatgccatgaagcggcaacagaggcttgttgccgtttttggactgatgtccttcaacgttttactgctgctaaatctcaagatatgtcggaaaccaaaggaataatagataatcttgttcaggatttcctaatgatactaaacttgccggagtatccagctgctgcttctatccttgaggttctctgtgtgttgctccttcagaatgctggattgaaatctaaggacactaatgttcggtgctttgctattgatcttcttggtggtattgcatcaagattgaagcatgattcggtcatctgtagtgaagagaagctttggatattgcaagatctcactgatgcaggtagcgatggctcaaaaatcttgaaaaacaagtgctgtgtttgtcttggtggaagaggtataaatatagcctgtaatgaatgtggaagatgtttccattcagattgtatgggggctgctagccaggataacttagagcgtgatagtgtttgccccttgtgtttttgcaaacaacagctcaatgtgctacagacgtactgtcagtcacaaattaaagaaaatggcaaaaaaactgctgcgtctactagtaagaaatctgctaaaccagctgaggtgccagcagtggatattattcaacaaatactactgagttatctccaagaatctggtccacaagatgatgggaacctgtttactcgatggttctatctgtgcatctggaacaaagaaaaccaacattctcaggaggagatcatctactatctcgctagattaaaatcaaaagagattctgcgagattctggcaatggtctggcaatttccagagattcagcaaagaaaatttgcttggcacttggtcagaagaactcattttgcaggggttttgataaaattcttgctcttcttttggtatgtggttgcttccagatactaaagtttaatctatatgttctagagttaattcccaatgcttttcaggctagcttgagagaaaattctcctgtaataagagcaaaagccttgcgtgcggtcagcagtatagttgaagctgaccctgaggtcttgggtgacaaacgtgtccaatctgctgtcgaagggaggttttgtgattcggctatttctgttcgtgaagctgcccttgaacttgttgggaggcatattgcttcacatcctgatgtgggcctgaagtatatagaaaaagttgctgagcgaataaaggacactggagtcagcgttcgcaagcgtgcaatcaaaattataagggatctatgtgcttctaatccaaacacagacacaacacatgcctttgtggagataatttctcgtgttaatgatgaggaatccagtgtacaggatcttgtatgtaaaacattttatgaactatggtttgaagaaccaactgggagccataagcacttggttgctgatggaagttcagttccaatggagatagctaaaaagactgagcaaattgttgacatgttgaggaagatgaccaatcaccaacctctgattaccatcataaaacgtaacttgactcttgatttcctccctcagtcaaccaaggctgcagggattaactcatacatggtggcatcaattcagaagcgttgcgaattaatatgcaaacgcttattagaaagaatattgcaggttgaggagggagctgctaaggagatggaaatccacatgcttccttatattgttgctttgcaagcattttgtattgttgatcccacgctctgcattccagtaactgatccttctaagtttgttgtgacactacaaccataccttaatattcaggttgacagtaaatcagctgcccagttgcttgaaagtattatttttgtgattgatgctgttcttccactcataaggaagccaacacaaaatgttgttgaagaacttgagaaagatctgaaacatatgatagttcgccattcgtatttgacagttgtacatgcctgtatcaagtgcctttgtgctctgagcgagtcagcaggtagaggtccaggattagtggaaaaccttgtcaatattttctacaagcatctgtctggagctaattcagatagtcagttattgggtcgatcactgttttgtcttggactcctccttcggtatggttatcaattgatgcaaacatctgaaaatcagcttgattttcccaagattatcaacttgctccagagaaaatatcttctcagggatgattttagcttgaaggttcgagctttgcagactttgggatacatacttattgcgaagcctgaatttatgctacaaaaggatatgttgaaactcatagagacagcactatcttctgaggttgattatagattaaagattcaaggacttcaaaacctctatgagtatctcagagatgctgaaagccaacttactgccgagagcactgtgaaacctcctgtccggtgtgaaataaatggcagaagtaaagtgcctgttgctgctggtgctggagacaccaacatatgtggtggtattattcaattgtattggagttctattcttgaaaggtgcttggatacaaatgatcaagttcgccagagtgcacttaagattgttgaagttgtactccgccagggtttagttcaccctattacctgtgttcctcaccttatagcacttgaaatggacccactggaggggaactcaaagttggctcatcatctgctgatgaatatgaatgaaaagtaccctttattttttgaaagccgtttgggtgatggactacaaatgtcatttaaattctttgaatccatagtcagcaaccataagatggcagcaaacataaaatcaaatccaattgcatttgtcaaacctggcatatctagaatataccgtcttatccgttcaaatcgaaattccagaaacaaatttgtccactcgatagttcggaaattcgagtctgatagccggagtcgcagcacagttagctttcttgtatactgtgccgaagttcttgcctccctgcctttcacatgctccgatgaaccactttacttgatctatgatataaatcgaattattcaccttaaagctggaggagttgagagcaatttgaaaaggtggacttctatgtctcagtctcaaaatacagtggatatgccaacgttgccaggagagaggcatgttgtcatgcaagagcctggcggatattatgataacgtgggctatgcccatgaaagggtgaatgccaatccttgcagtacttcagacgtggacatggccaaagtgcaggttgacgtggatatggccaaagtgcagggagattgccttgatgcaatagcccttcagctactgctgaaattgaagagacatttgaaagttgtctatagtttagatgatgcccgctgtcagtcattttctctaaaggagcctccgaaatctggagaaacattctccaggcagaatattccttttaatgttagcagcactaacatcagtctgccgagctgcctgcaggacgtagcttctgtttaccaggatttcaagacagtgctccacgaagattccatggactttgctgtgttcatcccttcagtccagattaggaagcgcccaaccccgagaaatacgacaaacccaaccccaagaagtacgacgagggtcaggagaacggctgcctcgagtgttacaaaagcccgtggtggcgcacgtggcgatgactccgacgactccgatgatgacgactggaccgggggcccaagagtgcttgacttcagtgggggtggccgtgtgacaaggcagagggtccaagtatgatgactggtcttggtgcttttgtacattctagggaaacctatagcgggtagcagctgacacgaggagagttagggttgagttttaggtttaaagtcgtttagggtacatagaagcagaaaaggaaaggaagatagcctttttacttagatgccattgatttggagcactccttttcttgctctgcccctgtcctgtttgtaattccggtcgggctttggcaaaactgacaaacagggttgtgctccggcttctgatctgattcaatgggaatgaaattattccttttgctttgcctgtataataacagttaagcctatgtttcgtgtaattgtctgccttgctaatgttatatatctgtacgtgtgctgagccttttttgttgaagttcatagaaattgcc

SEQ ID NO: 41033 - DNA, 2756 bp, Zea Mays
cacaagcctttcctcctcttcgtcacccaccgccgacggctagccatgtccgccgagcccacctctccgcctctatcgacggcgcaggtccgcgggagcctcatcccgccgcttccagacgacttggctgtccactgcatcgctctcttgccgcgcgccgcgcacccatccctggccctcgtctcccgcgctttccacgccctcctgtgccgccacccggagccgctcctcgccgcgcgccgcaccctccgctgctccgaaccccacgtcctcctctccctccgcccaccctcctccgcgtcccctatcttcttcctcctgctcccgcaccccgggtggcccccgctcccgcttccctcccctcccgtccccgtctcgtcctccgcgtcggccgccaccgacggcgcccggctcttcctcgtcggcggatccgtatccgcggtcccctctgcgtccgtgcagatcctggacccccgggccagatcctggtccgccggcccgcgcctgtcctctacgcgggagttcgccgcggccgtcgcgcactccggggcgctgttcgtcgccggcggctgcatcccctcgtcccctttctgggccgaggctctcgacctctccactccgaacgccaagtggagagccgtcgccagcccggcccacctccgcgagaagtggatgcacggctgcgcgtcgctcgacgggaaggtcgttgtggtggcggaccgtggcggcttgtcctacgatccttcggcgccacctgcggaggcgtgggcaccggtgtcgccggtgcttgacatgggatggaagggccgagctgcagtggttgagggaatcctctactcttacgattacctgggacaggtcaaggggtatgatccgtacactgattcttggagcacagtggaggggttggagggggagctacctaagttcttgtgcggcgccacacttgccgatgttggaggattgctctacttggtttgggaaggaaagtggaaagggaaattaaaaggtaagatggaaatgaggagcatggtagtgattgaatgggccagcattcagattacaagggtccaagagggacggctaagaggaaaggttgtctctagggacactgttctgttcccggatatgccaagaggttcaacgatcacacattgcattgcattggagttgtgatgcagcagatgcagatgtaaagcaggttccaacgatgattcaggcggtttgttccacttatattggctttcaaggcttgctggctaacggaacaatattcccgaagtatcgcaatgccttcatcgcaactccttgagtgatcccatcattctaaagatatatgtaagaattggaagttcaaaattggtccgcctagaatttctgtgcatcttagagcatctccaagaggggtcttattaaacaaggttgtatattgaaatatagggcttgggacctaagagcaactccagtagttctctaaaagacttcctaaatcaataatttaggtagttaacatgaaaactattctccaacagttctctaaatgaactttctaaatttaacaacttgtcatctaacctcattttctctctacatttggcaaccatttaacaactccctaaacaaaaatgttgactgcattatatagtttttgtgacttattttttatgtggataaatacaaaacaaaattacaacctatatttagagaactattggagaactcatatttttttactctaaaagtcatttagcaacttcttaaatctgtaatttagagagctaaaatttacataactattggagttgctctaagcggtgaccctatttcatcaaaatttatcaaatgattatagggtttggcatctgaggttctaaatatagtatcacatatattgaagtcctatccttattttctcttaatctacaactatttattttcttagatagcattatttgaggccaaactgttggagtaaatttcttttgaggcactaaacactttaataatggttctatttcaattctaaggcgctattttagagttctttgttagagatgctccatgtaaaacttactccctttggtgtcctattagttgttgttttggataaggtttgagtcaaacttataaaattttgactataaataattttttgttgtttatttttgaaatctaatatttatatgcatcgatttatattaaaaagtattttttttataaaagtataaatgaattaagagtttatttgtatatttttttaaatatttgtcaaagttatattttggagaccgtctaaacgacaactaatagaacaccgaagtgagtaatctttagccaagcgtgttgctttttttacttgcagggagcagacaatgctaagcctcgtggtcacggtgtgtttcgattcgactggctacaggtgttcggacggctacaaatgcaatacataaagataaaatactaaaatagttatagccgcagtcggattaagccacagtcaggattaaaaccgtagtaaacagccatggttgagcgcttgggaaggacatcatccgcttggaatcttcaggtctttgaagtagcgaagtttgacggcaaagaaactacctggactagccactgtaaggtgtagatggatattacttgttttgtttctatattttctctccggattcggatataaatataaatattatcgagttttggcggttcgagtgactattgatattttatatatttactagtcagttgctcgt

SEQ ID NO: 41034 - DNA, 2541 bp, Zea Mays
tcccctctcttgcctgcctccctccctccctccctccttctccatctccgctttccctcctcgcctaggcctagccgcccccgcacgccacgccacgccacgccacattcgcatctctggatccccctcccctcgccctctcccattacccgccgccgccgccgcctcgcgcccgcgacccacccggcctcccacttcgatcccgccccgattccctgcccccgccccgattccgattcgtcactgtatcgcgcgcgcgggtgggaagacagcgatggctcgtggcgggggcctctcgccccgccgcgggtgatctctcctctagcggggagccttcccgcgttcccaagcggaggatcccgtcgcagctggtgcctcacctatccctctccttcgcatctccgccgtgctctctcgcgcaccccctcgaccctaggtttgctccttccctcccttcctcgccacccgattcgatctcgctccctccggcctccggctaggctgctccgtctctcctccgccatgttctcgcacggcgctgattccgcccacgacgccggggccgtcggcgtcagcagcggcggggctaccgtccccacccgcttcgtctggccctatggtgggaagagggtcttcgtctcaggctccttcaccaggtggtcggaacatttgccgatgtctcctatcgaaggctgccccactgtatttcaggctatttgcagtctgtctcctgggattcacgagtacaaattctttgtggacggggaatggcggcatgatgagcgtcaacctaccatatctggggagtttggcatagttaacacactttacttgacaagggaatataaccaaataaataccttatcaagtccaagcacacctggaagcaggatgaacatggatgtggataatgaaaattttcaacgtacggttacgttgtcagatggtaccgtttcagaaggtactctgagagtttcagaggctgcaatacaaatatctaggtgtcgtgtttctgaatatctgagtttgcatacatgctatgatttactcccagattctggcaaggttattgccctagacattaatttacctgtgaagcaatcattccatattctccatgaacaggggattcctgtagctcctctctgggactcattcagaggtcaatttgttggtctccttagcccattggatttcatactcatattgcgggagaagagcagcttgaaacacacactatatctgcatggaaagaggctaagcggcaaactaatggaagaaatgatggtcagtggcgaccgcaacagcatctagtgcatgccaccccttatgagtccttgagggacattgcagtaaagcttttgcaaaatggcatttctacagtgccagttatttattcatcatcatcagatggatcattcccgcagttattgcatcttgcatcactttctggaattttgaaatgtatttgtagatacttcaaaaactcaactggtaatttgcctattctgaaccaaccagtgtgctccattccgctgggttcctgggttccgaaaattggtgatctgaacagtcgtccattggctatgttgcgacctaatgcatcacttagctctgcccttaacatgttggttcaagctggagtaagctcaataccaattgtggatgacaacgactccctgcttgacacttactctagaagtgacatcacagccctagcaaaagacaaggtctacacacatgttcggctggatgagatgaccattcaccaggctttgcagcttggacaagatgccaatacaccttttggattctttaacggccagagatgccagatgtgcctccggtctgatcctttgctgaaggtgatggagcgactggctaatcctggggtgcggcgggtgttcattgtggaagctgggagcaaacgtgtggagggcatcatatcactaagtgacattttcaagttcttgctgagcttgtgaggagaggagggcatggcggagtttttttaacagtagcaaccctctgggcctttgggtccttgcggataattggctatcgtcagggttcatggtctgtaaagttccttttttttttgtttcgttttttaccatttggcccctcccgcttgtataacctcaattaatataatggcaaccttcatttaatatgaggttacttgagggttacttgaaaaattacaagagatgttctttgcgaatagtctctttatacagagccttatacttgtaatatgcggttttttagctgtcccttgtatttagaaaattaatccgatgtctttggattgtatatgctcttagaacaattttaataatagcccacaacggattttataatgttgccatgtcacatatagttaaataaaagtctactcacataattttatgactaaacaacattttttttttgtcttcggtccgccatttacgttttggtctccatagtacggtaaggcatttttggtcatccgtgagtttttctgatcgattaggcattttaagtcttcggtctgcc

SEQ ID NO: 41035 - DNA, 4226 bp, Zea Mays
atttgtttcccgaggttcggttccaaagaactcactccccattgaggaggccacataggccgaatctatttcaaccatttccctctctcaatcggtcacttagaccggtcgagtgctttttctcaatctcacgggtcactaatatcctgcaagtatcaccacacaattaggtgtctcttgtaaactttacaaaacacttggagagtttagagagagatgaagaaagcacgattaagaaaaccaagcaacaagggcaacaaatgaaacacgaatcacactctctcaagtcactaatcactaatgatcacttgtctcaattgtggaacttggagagattggaagctttgaatgtgtcttggaatggattgctagctcttgtattgaatgtgtatgagtggagtgcttggatctcgtgaacggaggtgattgaggttgtatttatagcctccaaccacttcctagtcgttgctccttttctgcccactgcggacggtccgcccctgcactgagtggagtgcttggatctcgtgaacggaggtgattggggttgtatttatagcctccaaccacttcctagtcattgctccttttctgcccaccgcggacggtccgcccctgcacatcaacggctgaaatcgcaacggtcagcagtaacggctatatcaacggctatagtgcatttaatgcgtcgtcagatgtcagataaagtagtcgcgaacggtccggccgtgcaccacggacagtccgcgaggacgctaaaaatgcattttaccgaacccgtcaccttcgggtttttcttgtttttcaacgaccggacagtccgtgcctgaggccggatggtccgcgcgtggtctcggacgttgctcgcttctcctttggacggtccgtagtgttaacttgtgtttttgcagtgtccctgtccgaggctcaccctggtgccgcggacggtccgccacaagtgcccggacggtccgcacatagatgtttttccaaaaagcttctcctgtccggaataatctacggtattccggacagtcgacttagaatagttgtggatgaacttatgcacctgagaaatgatcaactaggaaaactagttagtccacgtggtttgtgttggacgtcaaacaccaaaatcgattataggaaatgattaagcccatttccctttcaatctccccctttttggtgattgatgccaatacaaaccaaagcaaatataaagtgtaagaatgtaactagtttgcaattttgacagatgtgcataagttactttgaatttaaaccgattgaaagtacttttgagtataaatgattgctttcttctagtttaacattttggaccacatttgcaccacttagctggttttttcaaatcttttggaaaagtcttttcaaattcttttgcaaatagccaatggtataagaatatgatttcagaaagcattttcaagattttaaaaattctccccctgttttaaatgattttcttttggctaaataaaagctccccctgaagaagttctcccattagctgtcaagagggtttttgtaatttgaataatttctctccctttttgaaaaagtttttagaaaacaggttgatggtgcagtccttttgctttgggcctattaatttctccccctttggcatgaagcgctaaaacgaagaaacttgagaggcctaatcttttctccccctttgtaaaaagatatgagtgaaagttgatgagtaggacaaaggataaatgacatagatagagttgtagtggaagccttgcctttgccgaatactccatttccctttcaatctaagactaatcattgagatactcatggaagcacattagtcttagccttggcacaagaagaataagaaatttgcatttgtaccaaatgaaagagacatgatcaaaggtatataaatgaccaatgtgtgcaatgtttcaatcaaagttccgagaatcccagatgtttagctcattcctaagcttgctaaaagtcttttcatctaggggcttggtaaagatatcggctaattggttgtgggtgctaacataagcaatttcgatatctcccttttgttggtgatctctcaaaaagtgataccggatgtctatatgcttagtgcgactatgttcaacgggattatccgcgatgcggattgcactctcgttatcacataggagagggacttttctcaacttgtagccatagtccctaagggtttgtgtggcagccctcccaagttatcgggcccacttgcaccaatccttgccttgatggcctcagatggctatgcacgtgtaccaggtaacttaacaaggctatcacgagttcaacaacttgaactcaccatcccaaggatctcccaccatacatgcatattacagtaatcacattcgatacacacacttcggagataaagagcggaagactttacaaacattctttaccttttcaaaactcaagttttacatgtttcgaaagaataatatttattacaagtactgatatactcaaagtgcataacttattacaaaagcaggaaggtagaaaccctccaaagcttatacataaacctagctagtcctcctccagaactagaaacgctctccagcctcaggaacatctagagtactcctcatcacctacaacaacatgggttcgaaaactctgagtatggagtgtactttcgcaagtcttacccgactaaggaaaaatgactctcaaggatatgctggttaagtaggagtcaaggaaaaggctttagcaagaatcaacttagatacttttgcagaaatagcttactaaagtgagtccttactttcaatattttaacgccagattaaatattaatagactctggttgcatctagtctaatttcaccatctcatcaatacaacatcatttttattcataatgtttacatcctgacttaggttgcagggcaacgatcaagtctccactctccagggatataacggcgatccgaatcgatttactcagctgaggatctctaaccacacgacatatgtttctcgtaactctcgcatatgtctaccattcccacggatcctccactgcatgaacaggtccgcgccacccgagagcacaccaccctttttaggcggtcctttgccaggagggtacgtgccactctcgccatctctccactcccagtgcgcgattgtcttttcatgtatggaatagccgggttcaagcttaccctgtcccatatccagggcatgtgactagttaagatagtccttgatcatacaggcctacatacgcatccaatccttaattaacctgggtagaacatcacctgttcctaacccaagtcccgatttaagtacttccatccttagcattgtttgtgttccttaggatgaaaagagcacattataggataacccctgagctaggcattattgcaaaagacaacttctatccacaagatctaagcagggctaagcatttttttaaacaatatttgatacttccaaagaagtatctattacaggaatggatatcaaggtagtcaatgcatcaaatagttttcaagcaactcctataaacttaatgcacatttcactagacttaaagtgtataaaagtctttaaaaatacaaagaaaggggcaaatgcaccggggcttgcctttgttgcagagaagaggctctagatccttctacccaatctttagttagatagctccatccacttgatgagcaggcactggagtagactccttcaaacaccacttcttctaggtgttctacaagtgaattacaaatacatgtatgcttatgttatgatatgaaatgcaaactctcacaaggagaggtggggaaatataaatactcctaaataagtacatgacaagtatacacatacttctacacaaccttgtacttaataaaagtgaccaatttgaattcacttaggtaaaccagagaattaatccaacttatatctcctccaaaagcttaaaactttttaagcaacttcatctcttccctagataaacttatctcctttccaaagcactaacccacactgaactgctatttcagctaactgaataaaattcagtcacagtcactctgacagtccagttttggacagctgttattttctactttatgtggattcaagcctaacttgtttaaagggatttgttccttataacatggtctttcactttgctatagcattcctac

SEQ ID NO: 41036 - DNA, 2255 bp, Zea Mays
actcactcgtcggctttgggacccccctgtctcgaaacgccgacaactgtgataaaatgtcatgtgtgactgcatcatgggaaaaatgggctgtgatggaattttctgcaggtacactaacctcgaaaacgtatgtgtagctgacgactagcaaaataccgtgagagttgtaagtatgccaccgatatagaacgttattgccacattatattggcaaaaatcagtgaggacgcataggatgagcatgcatccttattgttgcatcatgtttgtcacctatacacccaaaatgcttctctcatctttattccagtaaccattgattgtagataatatggtgtaatgttgaattatgagcttatgatgaaataggtgtcctccattcattaagagacctcttagggtgctttatgtgcttgctcttgtgtttgatgtgccgatagaaagttggtaattgattgcctaaacccaaaactaggccatgttcttatttagtgaaccatgacccaaagttgatttttccgttatcactccatgaccagacatataaaaataaatgcctagataatttctttgttggacctaaagtgtacccagacttaaaaaaaatctcaagtcatgtctccttctagagccattcccttattcagttgatgcaggttgaggtctctattgtgtttggtctctccttgcggattatcttatcccttgtcaacctgacctagaaaagacctgtccgagtattctcttgaatttgatgcctttggtttcaccatatctatcaaaggcataccaacttaatttgatgattgttttcccttcgtatctaatcagatactaatccttgaccttgtaatctctatgatgggcatagaaatatgcctggggctgaattaacagtctcccatcatactcccttcatcaaccaatttaggttatggccgtgttttgttcatttcatcgggtcataatctatttggctctctacttgtaaccattcttacaggtggagtttctccttgtatattgtcacccttacccaattcatttgtgtcgtgtgagatttcctattggttatgtttggtaatggcgttatgactaaaaccgatggtgccgtgacgaaaccgagggcctcctgtgaatgtacacacatggttgcgctacttggcacgcgctggtatcacggttagtagttgtaatccattatgagactatgtcgatacgttatcttggcacaatctgtttttgctacgtgagattcattattggtgccagtttggtaatggtgtcacgattaacgacttatggtgccgcagcgaaactgagagctccttgtgaatgtacacgcaaggttatgctgcttggcgcatgctggtatcgatgtctctagtcatgatccattgtggaactacactgatgtgtgatcttccgtggagtcctcccttgaaacaatttctatgttgtttgtcaagtgatcaagcaacatctatcatctctgttggatcaaaagggcataccactttcatgtgtgatctcttatcttttgactttgatggtgacttcacacatacaagttccctttacatcctttgtgtaaaggtgaagccttggagctttttagtgttgcaagacaaccaattagttcccaaaatggagatttgtttcccctgctgctgaaatgcaggagtttgttcattcgctctcttatttaattcatgtattccctaaccaagtcggttcatcttgtatagaagaaacggatgaataacctgaccaaatgaattcctacccaagtgcatgaccttttactagcaaacataagctcgaccgttggcttaccgatggtactgagaggacttgctcaatgtcaaaagtagttcaacaagttggttttactgacttgtaactgctcaatgaacgaaggttgagtttagagatcgttttatcgatttgcctgaactcactttggttcaacccactcaagaaagtacttgcaagaatcaagattaaaccgactaataaccacctaatcatcgctctagtcatgcctcgatcgcctcacgtgtgctttttcagcatgtgtgatcaagtcgagccatggttagtgcttgctataatagattggttgcaaagacaacatctacagatccctccactggtgattctctcgaatctatatcacctttcagggacttggattttctggctagtcacgggtcaactgtgatgttattcgacattcacccccttcccct

SEQ ID NO: 41037 - DNA, 1488 bp, Zea Mays
aaaattcgtcacaggtctcctggtccaggccgccgccggttcaatctctcctctgacttctccggctgtcctcgactgcgaacccgatctcgattcgatccccaagccatcccatggcggctgccctctcctcgcggcgtgccctgcacagcctccaccgccgcctcctcttccacccctccccctcacccgccgccgcacgccgcgcgctacccacttccactcgcagccccatccccgcacactcccccaccttctccttctccttctactcctcctcccgcttcttcaccaccgcgcgccccgatgcgaggctgcggcacgggatgctgccgcagcggctgataggcggggtcaggtcggtggcgaacggtgggtcgaaactgggaccgctgggtcagggggtcaaggggctggggcggcccatggaggcggcgaggagcgcggccgcgcggtaccgcgcggccgtcggcctgcaggtcgaggccttctggcggcgcaactccatgatcctcgtcggtgcggggggagtcatcgtctgtttcttgctctggaggatcatgttcggcatcgccagcaccttcgtcggcctctccgagggtatggccaaggtatgtatgcccgggcaaggttaaccataaaccctgacaaggtttaccggctggctatgacaaaactcaatacatctgctgccatccttgaagttatgggtgcgcccctaactggtactgatgtcagagcatatgttatgtctggaggaggcccgaaactgaaggacttcaaatttaagcttggcagtaaacggtgcttcctcattttccccatcaaaggatcagaaagaaggggcctcgtaagtgttgaggccaagaagaaaaatggacagtatgacatgaagctactagctgttgacataccaatggcatcaggtcctgaccagcggctgttcctcgtgggtgatgaacaagagtacaaggtcggcgggggcttgatatctgagctacgagacccgatcgtaaaagctatggccgcggagaaggagtttgactatcttgacgagagagaggatgaggaggacgagcggagggagcgtgaggaggcggagcaagaggaggcggaagcattgaggcgcgaggaggaaaggctgcgccaggcgggtgaagagcgtaggcggcgggaggaggctgagagcctggagaaagctacgtgacatgacttactgtactgactttccaccttgcctcgtgcattgtctcctacctctgtccctcccggagtgtagcgatcagcggtttccacagcaggagattgcttccgagttcatttggagttcctggtggtcaattcggcgtcaccagtctcaaagttgttgagaaggaaggaataattttgaccgttacgcgacaggtcacttcggcgaagcaatgtaatttatagtggttgatcagttgttaacctttttttttgctgcacgtctgagcgcatggagtt

SEQ ID NO: 41038 - DNA, 709 bp, Zea Mays
ccacgtcatccgtccttcaagtaggaagacccggagccccgtgcgcatcccgctccccattcgtgcagttgctcagccatctccctgctctcgcacaccccggagcgcccttgtcaagccgacgacgtccgtccatcgccgtcgttgtgctcccatcgtccctcttgcgccgaaacactcgccagagggataggctcaggagttgacctgaattcaaggaccgtgggaatacatgaatacatgatgctgcctgtcccagccagaaagccaagaccaaaatgcatgcttccatttccgtgcagttggttctcgtggagaaatggaacttggcaaattaaatatctctacatcgctcctagatctcactcattcctgcccggtggctgcaattgccgaatgctctcatctagccttcatggcaaaaaaaatatgccagccttggtttgacacccacccacactggaacgccaagcctagtcggcgtgaagtagtttttaattaagtcaatattagaagcccaatttagaacaatcccttgggtctttcgatccttatgagcgcttttctagttaagtattacagatctgtagcattaaaacattgttcctcttattctttgtatctcttgtaggtattagacttgtcgcaaacattgttcatcctattcttcttgggtccggtgtacatggcactttggtgcatatattaa

SEQ ID NO: 41039 - DNA, 4808 bp, Zea Mays
aaataacgaaattaatatggagtataaacctatttaacctaccactacaactggttatgtagaaaaatggttctttcttagtgtgacacggacacacttgctcgtccacatcccttcctccagccaccgacctcccaaggatgcgctcttgccgccggcctcccaaggatgcgctcttgccgcccctcttctcgcgccgccgctgccatcgccatgtcgaagcgcgctacgtctcatacattttctgggatccagaaatttcggacattgtgatcttctcggccccccaggacttcaggtgctatttctagcctccctagggattggaggattggagggaactaattccaccttaatcccctccaattccgaagaggatttgagtttcgttaatatctttagatccaaagtctgatcgacatgattttagttgggttagttgcgtaattttatctagtttaatctgttaaaatctcaagtcaattgaagttactgattttgatcagtattgttttttttttctagcaaaacagagttctgtctaaatttatcaaactgaattaaatcggttttacagttggaaggaggtgatataattatttttaagcttccgtgatattcacctctctgattgtttatccttgtacttagcaactttgatatcctaggtatcgtattgaccttttgttcccattttgagaagacaaagaaagtgtcaaagttacatgaaatggatcaattccaacttgtacacactgacaaaacactatatgacagtagagtttgaaatattcacaccggtggacagcaacaggccaaccggccgtcaaccaggatagtcgggtcctcctggcagatttatttggagattcgtacctggactagtatgcttcctttttcccactggtggacagcaaccagtaggccggcctgctttgaaatattctaagaaacaacttacctacctaccttctacaaagccatccttgccaggggcggacctaggataaaattagagtgagggcattcttacaagatcaaggattaaaatgtaagagcaggggcatctcagttaaatcaaggaggggactccatggtaaaaatctatactatatcataatatcatagaaatgagcaggggcctaggccctcactcaccataacgtaggtccgcccctgatccttgctaccttcccatgcattcatatgtgtgccaaggaaaataaacaattaagcagcacctgactctgtcccaatggccgctgcaagctcactagtcgctctagtgctactgccggccattttcttggtctcagcactatctcctgcttgtgctgctgcttcttccactctaattcctaacggcagagacaccgacctcgccgtgctgctggctttcaaagcccagctctctgatcctcttggcgtcctcgccagcagctggaaaaccaacgtatcattctgccactaggttggtgttttgtgcagccgtcgtcgacagcgcgtcactgctctagttctatcggacacacctctccaaggggagctcaccccacacatcggtaacctctctttcctctctgggctggaccttatgaacgcaagccttaccagctccatccccgccgaaattggcactctgcgacggcttaaatatctctttcttgctgagaatcgcctagctaattccattcctgactctataggaaaccttacaagcctcaagtctctctacttgagctccaacatgctctcgggcagattccaccacagatgctacagaatctgcgcaaccttgaaaacatttcgctggccaacaatgagctgagtggccatataccgccttatctgttcaataccacgccttctctgattcatatccactttggaagtaaccacctgtcaggtccaataccgcacactttgggatccctgcccagacttgactacttagtcatcaatgataatgagctccttggcacaatacccgccaccatgttcaacatgtctagggtgcaggtattctcactggaacttaacaatcttactggagaagtcccttacaatcaaagtttcaacctgccaatgctttggtggttttctatcagtgggaacaacattcaaggccgaattccactgggatttgcagcatgccagcgcctgcaagttctttacttaggcggacttcctcaccttactggacctatcccagctattcttggcaacctcacccgtattactgatatagacgtctctttctgcgacctgactgggcacattccaccagaaataggcctgttgcaagacctaaagaatctacgtctaggaaacaaccggctaacaggtccagttccagcttctctaggaaatttgtctgcattgtctttgctgagtgtggaatcaaatctattgtctggttctgtacctagaacaattggaaacatcccaggtctgacccagtttagattctcatggaacaatttcaacggaggtctcgactttctgtcctccctttccaactgcaggcaactcgagctccttgacatatataataattccttcaccgggccactcccagaccaggtggggaacctgtcaacatatctaattgaatttagagcaaatgcaaacaagctatccggtgagcttccgtcgtcattgtcaaacttaagcagccttgttagtatctattttcacgacaacctactcacaggagccataccagaatccatcacacgtttacaaaatctcatcctgtttgatgtcgccagcaaccaaatgtcaggtcgtctcccaacacaaattggcaagctcaagagcctacaacaattctacaccaatggaaacaaattctatggccccatacctgacagcatcggcaaccttacgtcgatagaatacatctacttgtctgataatcagttaaattcaacagtaccatctagcttgttccagcttcccaaacttatctatctggatctttctcataattccctcactggttcactaccggtcgacgttagtgggctaaaacaagtggattttgttgacttatcttccaattatttgtttggaagcatcccagagtcatttggaacacttaagatgctcacttacctagatctatcattcaactcattggagggctcaatcccaggtttgtttcaggagctagaaagcttggcatcattgaacctctcctccaactctctctctggtacaattcctcagttccttgccaatttcacctacttgacagacttgaatctgtctttcaatcgactagaaggaaaggtaccagagggaggtgttttctcccgcatcacctcgcaatctttacttgggaatcctgcgctgtgtggtgctccccgtctaggtttcttgccatgtcccgacaagtctcattcacataccaatagacacttaattacaattttaatccctgtcgtcaccatagcattttcttcttttgttctttgtgtgtactacctacttaccacaaggaaacatagtgacatttctgatccatgcgatgtcgtggcccataacttagtctcctaccatgagcttgttcgcgccacacaaagatttagcgataacaacctgctggggactgggagctttggcaaagtattcaagggtcaactagacaacggtttggtggtcgcaataaaagtgctagacatgcatcacgaaaaagccattggaagctttgacgccgagtgtcgtgtgcttcgcatggctcgccaccggaacctgataaggatactgaacacctgctccagccttgattttcgagccctggtgcttgagtacatgtccaatggaagcttggagatgctcttgcactctgaagacagaagtcacatggggttccaattccatacaaggatggacaccatgctagacgtgtctatggcaatggaatatctgcaccatgagcatcacgaggtggttctgcactgtgacttgaagccaagcaatgtgctgttcgatgatgatatgacagcacacgtagcagactttggcatcgcaaagttgctactgggtgatgacaactccatggtcgtttccaccatgcctggaacacttggatacatggcaccagagtatggatctcttggaaaggcatcgcgcaagagtgatgtgttcagctttggaatcatgctttttgaagtcttcactgggaagaggcccacagatacgatgtttgagggagaactgagcattaggcagtgggttcaacaagcatttccatctcagcttgacactgtcgtggacagccagctgctgcaggatgccatttcttcttcagccaacctgaacgaggttttgcccctaatatttgagctcggtttgctctgcacgactgattcacctaaccaaaggatgtcaatgagtgatgtagtagtgaccctgaagaagatcaaaatgaactacaccaaatttggcatcagcaaggacacaatgtccttccctgcaattgatcacgcttaattctacatgtctagtttcttcggttctgcagtggaacaactgcatcagctaccttttactgtatttttttttttacaaaagttgtttcttggataactcttagtaatatatgggcatattactattgtcaggtgtgaaataagtttctgtaatttaaattaaaagaaaaggttgcgtgacattcatgtgcctgaacagagatgtcataattttatagtttgatcttttgtggtccattacgacccttaaacgttaagggattgttttgttcttacatgttcctattttgtaaaattatttgtggcacactg

SEQ ID NO: 41040 - DNA, 590 bp, Zea Mays
atgctggctaggacctaggagcgtgcggggccaccaaccgatgcgtccgtcccgtccacaccagtacaccaccatcccccaccggccaccacttctgctccgcgtccgcttttcagctctccaccgctatctcgcacgtcgctccccaaatcatcccatcctacgcccgcggccgtggcaccgaatcccagaagcgtctagaagggggaggtggtcgcccatgaccgtctgaccggccgtcgccatgggatgcgctggatccactccaaagactgacggaggaaagccatggattgattaagaggatttactttgtgttagatgattatctttgctgcacctacattatccataagataatggtaagaatttgaagaaaccaaagccttggaagcacacccaagcaataacgccggcacaactcagacagatgcgtgatgaattttgggacactgctcctcactatggtggacagaaagagatttgggacgcacttagagccgctgcagactctgacctagcgcttgcgcaaaccatagtggatagtgctggcatcatcgtatcgaatctgacagacgaatctctagaat

SEQ ID NO: 41041 - DNA, 766 bp, Zea Mays
cgtgctgatttttcgcgccgtgggatttttctctcctccttccgtcgttatctctctctcttgctgatttttttttcagccgccgtctctcttccttatcccttacgcgcggccttcttcttcagccaaccgcgcagcttcctcacgctcctcccagccgcgctgagatcctcatggcgcgcccctccctgctctcagctcggcttctgcttctcctcccctccttgcacggctatctccctcatccattggcggcgctgctctctctctctctctctctggtgctcagctctccaccgcgccctgccctctgctcgctcctctctgccggcgcccaagccccatgctcgaccgcgctctcccctgcctatccgagttcgctgctccccatggccaccgcggcggctccctgctcggccactcattttcctgtgctcaatctccagctcggctactcggcgcccatctccctggccgcgccctgctcgggttgctgctcgccggagttccagccatggccgccgagcttggtccctgctcctccctgcgcgcaccccggccctgctcggatcctcgccgtcgattccgtacgtgaattaaccacgtgatgcggagaaccagagatgagtcgaccacaagaggatggaaagtgtgggcttctccacaagatggtgttgataaacgaacctgaagatggataatctaaacgagtgccaagacaaaggatggtcgtcaagtgatcgacatctaacaaacactaacgtag

SEQ ID NO: 41042 - DNA, 1523 bp, Zea Mays
caacaacttaaatatcaagagtacttatgtacactagccattatgaaattctcggatttttcttaagatcgacttcaagcatcgacgaaatatatccaaaacaatttagtcaatatctatctgtcggacctaagaaacactagtcctataacttgtattattaattcgatcacatgatttagatgtctacccttatccctcatatgaatcacatctaaaatcttgatttcaacacacatatgctaaatcaagaaaatcatcgcatttaataatttaactagcaggaataatagatcagcttaccctaatcgaatcgacccgataaccgcaagggcgacaacggtttcccgattagacattcggtcaagctcctggcaaatgttgcacggacttctcttatattttcatttaactcaaggatcacttcccggaaaacaaagccgacaatgatccccatggagtgaacgacgtcgttgcggcacccaccacgtaaagacaaacgacgacaattccataacggcttcacagacatggcgaggacgcaggacacgacagctatgccaacacgattggaactcacgagattggtgacgaagcttagctagagcatttcttcgaacaactgaggagtgttacatgtagcttcatccacttcttcatctacaataccacaacgacgcgctagctgtgaaggctaagcagagaacccaagttcgacggcgagcggggagacatggcaaaacctaggacgcgacggcggccagcaccagggctcacagcgaggtccacgtggctaggcaaaaaattttgcggaggatacgacaagcgtagctaaggcacgtggagctcgcaggaccggatcttggcgaggacacaaatccagtgaaggcgagggcaacatagcgtggccgaggtgtggagagacgcaggaatgaactccatggcgaggtcacggccgacgagcagggacaccatagggagcagtaaaaacggccgagcagaggaggacgggattcgacaccgctgggataagagtggcgtacgcagccaccagagcacacgcagcaagcagaggagcctcgcgtgcggccatgggaggaagacgcgcagggaaactccgagctgcggctagcgcgcagaaagcaaagcgcgcgtgcacggagccggagggtgcgccaccaacgaagggcttcggcacgacgcgagcgagcagagagcacggccgagcaggagcttgggggaaagccacgacgcgcagactggagaactgagcagggagctctgaccatgggtggagctcggcgcacgacgcaagagaagtagagaccgagccagggggcacactcacgcgtcaccaaggaactcagccaccatgggagcaggggagcagggaggaaggagccgagcacggagaggctagggctggacgtgcgcaacagggagaaggggagggagaagggagggagtgtaccatggggataagaaagctgcgtgcactggaaataatcagaggactgcggtcg

SEQ ID NO: 41043 - DNA, 4127 bp, Zea Mays
ttccttcctctcggcccttgacggaaaattcgggtggaaaaagggaaaaaagtcaggcgtcgggtcctcagtcgtagcggcggcgatggcgcgcggcggcggggggcggtcgaagaaggaggatgaggaggagctgcggggggcgaagcgcggttacaaggaggcgtcggcggagggtaatcgggaggaggaggcgcgctgggctaacgtcatcggcgacatctacaagcgccgctgcgagtacgtcgaggccctccggtggcttcgggcggactacgaggtctccgtaaagcacctcccgcagcggcacctcctcccctcctgtcagtcgctcggcgaggtctacctccgcctcggccgcttctcggaggcgctcacctaccagaagaagcatctacagctcgcaaaggagtctgatgaccttgttgagcagcagcgagctaccacacagcttgggagaacataccatgaaatccttctaagatctgaaaatgaccatagtgccataaggaatgcaaaaaagtactttaaatcttcgatgaagctggcaaggattctaaaggagagatccccttcccaaaagtcggactttctaaaagaacttattgatgcgtacaataatatgggcatgcttgagctggaacttgataattttgaagaagctgagaaactacttatccagggcctgaagatatgcgacgacgaagaggtagattcgtatgatgatgctcgcactaggctccatcataatctcggaaatgtttatactgaactacagaattggaaaaaagccagggggcacattgagaaggacatagagatatgtagaaaaatacgccatcttcaagctcttgaagtagcaagatccttggaagatgaggatgctctaattgaacaaattcaccagaatattgaaactgttacgaaagcagttgaagtatttgagcagttgaaggaggatgaactgaagctaaaaaaacttatccgggacacttctaatgctcgtggaacatctaaagagagaaaactcctacttgatcagcatgcatggctggatagtcttattgagaaggccaggatgatatgtgcatggcaaaaaggacaagcattagcgaaagtgaacattggcaatgttcttgattcttgtggcgactgggctggtgcattgcaagcttacgaagaaggctaccggattgctgtggaagcagacctacctaatgtgcaactttctgccctcgagaacatgcattacagtcatatggtcagatttgataatatcgaagaagccaagaaaatgcaggaaaaaatagacaatctgaagcaaacactgaatcaatgtgaagcaagggatactgttagtgactactgctcagaaactgacactgaaggtggttgcacatctgataacacgcttgatgctcagaatgaccatggacaggctgcaaataactacgaggaacctgatgatgatgttacgcttgcttcactcgttcagaggagtgggagctcatccaagattaaggtacccaagatacggaattcttctaagaagtttgatgaactatgtgatgtgactgaagacatacataattcttctaagaaggttgatgaactaggtgatatggctgaaggcactagggcagttttaagtagatcacgttctgatcactctgttggcagaaaacgtgtccgtgtgatcttatcagatgatgaatccgacgagaatcatgaaaacgttcagtttaaaaagacatcaactagtcctgcagatagtatgtcagtctcagaccatggagcaagcagcagcagaaaccaggatactttacaagttaatcaaacaagggatgcaccctatccagctgaggagagcatttgttcattcaaatcaagtagtcctattgatcatgcttttgaaggcataggattaggtgcttccagtgcaggaaagggaccaacctccaaatcagcagcaagtttttccaagctcagtacacctggctcaaacagtctgaatgaaagccaaaatgctgttggttctcaatccaaagatgctgataatcacttctgggccttcagaatcggcggccatctggtttacttggatggacgtgcttgtgtacatgaaggtgcttttagcattgactctctcaaagttgaagtagcatgtgtatattatcttcagatttctgatgaaaaaagggccaaaggtctattgcctatcattggggagctaaagtttcgtgggaaggtattggaagatgcggtatccatatattatgatgatcagctcgcttctgaacagaagtgtgttgatgttgttattgatgattgggtgccaaagcagctgatgaagttgtatgttgatttctgcatgaagtcattagaagcacccaataagaagctgctgacgaaactatataatcttgaggtctccgaagatgaaatcattgtttctgattgcggactgcaggatatgtcaattgtcccctttcttgatgccctaagatctcacaaaacaatagcagttttggatctttctcataatttactaggaaatcaaacagttgaaagacttcagcatatatttgcttcatcaagtcacacatatggtggcttgactctggatttacattgtaatcgattgggtccaactgctttatttcagatatgtgagtgcgctgttttgactgatcgattggaagtacttaatctatctgggaatcgcctcactgatgcatgcagttcttacctattcacaatcctgaaaaagtgcaaagcttgaatgtcgagcagtgttctatcacgtcaagaactgttcagaagatgacagatgcactccatgaagagtctgtcctttcacatctctcattaggaaagaacaacccaatttctagcaatacaatgcttaaccttctatccaaacttgcatctctcacaaggttttcagaactaagcctgactggtataaaactgaataagttaatggttgataagttgtgcctccttgcacaatcctcgtgcctatcaggacttctgctaggtggaacttccattggaccggtggagacaactaggcttactgaggcattgtcttgtacatctcaagatttcctaaggttggagttgtctaattgtgggctcacaacacctgatttcacacaaatctgtacaaatctctcccggatcaatattcttgagttaaaccttggaggaaatccaattaacctggagggatgtgatgctgtacagcgaatgcttgtaaatccccaatgcagtattagatctctcagccttgacaaatgcaatcttggacttgctggaattgtccgtgtcattcaatcattaccagaaaacagccaattagaggagctgcgcgtgtctaagaacaccaacttggcgttggagacaacaacaaagtatgacgaagacatgcaggaagtatcaacagcttctgagcaaaagcaatgtaatgaccctgaaacaacgaatgatatagctccagggaacatagattttgcgaacatgcaggttccagacagtgaagatgaagcagataatgatgcccaccgtgccagatctggttcacgcaggagctgtgcaagttcatcgcagaaaaactcttactcttcttgtcagatgattgaagaactggcgaaggcccttatttcagcaaagcagttgatggtgcttgatcttagctgcaatggtttgtcggaggaggcagtccagtcactgtattctgcttgggcgtctgttccgagaggcgatggaatggctcggaaacatgtaaataaggaggtggtccacttttcagtggatggtatgaggtgctgcggcctaaaaccctgctgcagaagagacctgcaaatgtgaaccctggacgaccttccgatgctaaattatggttgcactctgtaaataaatcatgagtgaatcaactaggcgttgaagcattgtcaatgcaacttcacactagtcacgatagtttggtgagtaattatgctgattcgcgggaatgtatacactacaatactagatgcttgagatttgggtatgcagttgtttcctgaggtgcagttactccttcgaaatcgtgccgtgtgacaagtttttcaattaaaaggaag

SEQ ID NO: 41044 - DNA, 268 bp, Zea Mays
gggtgacgagacgacgacggccgactggaacaagcgggggacgatcgatcatggcggatcaatcactccagcggagaagcatgaccacgcagcggcggatgatgtagagcttggccctcttctccctcagagacttgttcatctgcttcatctggcttccaaccttcattgtggaaatatatgagtaacaatgcaggttccttcagatcaggttttgtcaggaaaaaggttggaggcgcgcaggagttggtggccctatagctaagtg

SEQ ID NO: 41045 - DNA, 1188 bp, Zea Mays
ctttttaatttttgttgatctaactcaaagaaaaatttgcagcccacgataggccggagcctaagagcagcgtgcttttaggattagttgagatttgagaacatgcaatatgctgtgacggtggatgttctgcaaactgtgttttctgtttttggcgctgttaaaaaaatcaccatgtttgagaagaatagtggaatgcagactctaatataatattcagcttgagaaggacctcaaggaacaacaagttgtgcaaggtgcagtggaaaacactttaggggctggttctatcaatttgctattagagaatccaataccaaagcaaattctccttccaacacaccaaatccatatgaacaaggcatctcgattattgggcgaacactatcgaaattcgatgaagataatctgattccatgtttcggatttggagatgcatcaacgcatgatcaagacgtctttgtttctctcctgacgagaaaccttgtaatggatctgaagaaacttttggacaatgcagggaacttgtaccacattttcgtttagctcggaagttgttatgccttgttcatccatttaattgcattgttcatatgtgtttacactaattcttaacaggatcaacaccctttgcaccaatgtgaagcaaagtggtggacaataccaagtcctgttgataattgcagatgggaagttgcaggacgccatggcagccttgccccgctcccccaacagcgcccgcctgcccctttccttgcgcgacgcgagatggatcggtgaatccatggcagcttggcagggtggtctatctcaaagatttttgaaagttgtttcttattatggtctcacgactctgccatataaactggtctgtaagcttgttggtgccaatctcagaaggatgctctggaaccttacatgagaaagagaacagttgaacttcactagggtctcgaatcatcactttttctgggaatcgatgcaaccagaaggtggtggcttacctgagggaggtgtgctatagcagattgaaaaggattttggcttgtttactaattttagggaagagtttattcgttcagccttacaactattggggtctggttgggtttggcttgctttgaagagaaataagagaaagctttcagtagttcatacacgaaacattatctacccacttgcttttgg

SEQ ID NO: 41046 - DNA, 1680 bp, Zea Mays
atggatggatgcgattgtattgagccactttggcaggccgatgatctcttaatgaagtaccagtacatatctgacttctttatcgcacttgcatacttctcgatccctttggagctgatatactttgttcagaagtcagctttcttcccctaccgatgggtactcatacagtttggtgcgttcatcgttctgtgtggggcaacccaccttataaacatgtggactttcactacgcataccaagaccatagctgtggtgctgacagtggcaaaagtggcgacagccgttgtgtcatgcataacagctctgatgcttgttcatataatccctgatctgctgagcgtgaaattgagggagaggttcctgaaagcgaaggccgaggagcttgatagggagatggggataataaggacacaagaggagacgggaagacatgtgcacatgctcacgcacgagataagaagcacacttgacaggcatactattctgagaactacacttgttgaaatgagaagaactcttggtttagcagagtgtgctgtgtggatgccatcacgctctggaacaacccttcagctctcacatgcactccataccaatgctccgcttggatcagttgttcctatcaatcttccgattgtagctaccatttttaatagtaatcgtgctgagagaataccacatacttccccattagcttcagtaaaggctcagaaaagcaagtacgtcccaccagaggttgttgctgtccgtgttccgctgctgcagcttacaaattttcaaataaatggttggcccgagctatctgcaaaagcctttgcagtgttggttttgatgcttcctccagacagtgcacgaaaatggcgaccccatgaactggagcttgttgaagttgttgctgaccaggtggcagttgcactgtcccatgctgccattttggaagagtccatgcaagcccgtgatctgctattggagcagaatattgctctggacgcagcacgccgagaggcagaaatggctatatgtgctcggaatgattttcttgctgtcatgaatcatgaaatgcggactcctatgcgggcaatcatttctttatcatccctcctgttagaaacaaaacttactgcagaacagcgggtgatgattgagactatactgaagagtagcgatcttctagaaactctttcaaatgatgttttggatatatccaagcttggagacggcagccttgagctggaaattgcaccttttaatctacatgccacctttacagatgtggttgatttaattaaaccagtagctgcattaaaaaggctatcggtaatggttcatttggctccagaattgcccacctgcgcaattggtgatcggaagaggttgatgcagataatactaaatgttgctgggaactccgttaagtttacaaaggagggtcatatttcagtttcagcatctatcgctaggccggattctctgagggacccatacgctcttgacttgcatccagttctctccgatgggtctttttacttggctgtgcaggtaaaagacaccggctgtggaatcagcccacaagatatgcctcacaccttcacaagatttgcacaccagcaaaatgctacaaacaaattgcgtagtggcaacggattgggtctggccctttccagaagatttgtggac

SEQ ID NO: 41047 - DNA, 1935 bp, Zea Mays
gcggggccacttgtgcgccactgccgttgccttctatccggcgccatctccaccgtccactgccccatccgcagttccacaccacactacgccgccgcagccaggcagacagaggcagccccctcatggctgcccacgccgtcaccccgctcaccatctgctgcctccgccgcggcgttcccctcaaccacagccgccgcctcctcgccgtagccgccgcagcgccagaatcgcccgcgcctacccccgcgccatcccagttgccgcttcccccggttcctcctcgcaagggctacttcccgaagcgtggcgagacagtcgtcctgctctgcgatggtgcgctccctggcgagcgcctcatcgcccgcgtccgccgcctccgccgtggcgcctttgccgaggccgccaagctcaggaccctcgagccacaccacgacgccatcgaggcgccctgccccctcgccgctgactgcggcggctgcaagacccagtctctcgcgtacgccgcgcagatccgccacaagcatcaccaggttcgcgacttgctcgtgaactttggcaagtttgatcccaagcgcctggagagctcggagccggatgatatcctcaaacccaccgtgcagtgtgacgagatattccggtacaggaacaaaatggagttctcgtttgggacgaagagatgggtgcaaaaagagttgaaggacaagggtgaggaggtggaggtgaagcaggaaacgaatgaaactgatggatatgcgcttggactgcacgcaccagggttcttcgacaaggtgctacatgtgcagaaatgttttctgcagagtgagccagcagataaggttcttgcagttgttcaagaaacctggatggatcctgccataggcctcacaccttatgatgtccataagcatgttgggtttctcaagcatctgatgataagaactggaaggttagtgtcataaataatgtgaactcgtctgttggtaattcatctgtgggtgaacaagaatatactttgtacgggaagccaaacattacagaaatgttgagaggacttgcgttccagatatctgccaactccttttttcagactaatacaaaacaggctgatgttctttacaagcttattgaagattctgctgggcttaaaggagatggctctgaaattgttcttgatctgttttgtggaactggaaccattggtttgacctttgcccgaagggcaaagcacatttatggatatgaagttgtccctgaagccattgaagatgcgcgaaagaatgccaagttgaacggtatcaacaatgcaacatttgttcaaggggacctcaataaaatcaatgaatcattcgggaaggaatttccaaagcctgacataatcatctcagatcctaatcgccctgggatgcacatgaagttaatcaagtggctgttagaagttaaagctcctcgaatagtgtatgtctcatgtaatccagctacttgtgctcgggatttggactacctatgtcatggcgtggaggagaaagatttgagaggattctatgaactgaagagtgtaattcctgtggatatgtttcctcatactcctcatattgagtgtgtatgcttattggagctgcgttgattttcagttttggtcaggtaaacccactggagccttgtttgggtgacgagtattcacctcaatccatataaggcattgttcggcactctagtatttaatacatattgggatccaatacatggtgggattgagtgaatccatcccatgtcacttaaaccatgtgtgtttcaattacagctgagatttaatacatggctaattttccattgtttagttacaccacatggatacattaatttgttgcatgtatttaaaaacatcagtgtccatcatattaggtctctgaagcggatgaaatttgaagcatc

SEQ ID NO: 41048 - DNA, 1332 bp, Zea Mays
ttacaaactcaaataactccgccgtgcgcccgcctatctacaatcttttaccgtgctgccgcagaggtatcgtcctcaccatccccgtaggaagccgaagtacagccagaagcgtcgtcacaactcacaagcactgatcatggccgactacgatcaggagcaagagatggaggtggaggcgctgcaggccatcctcatggacgacatcaaggagatcgacccaagtgagagtgggatcgctaccaccgcccggtgcttccagatcctactctctcctcaggatgatgattttgacgagtcagcttatgtcccagttcaactggccctgatttttgcgcacactgagaagtaccctgatgaacctccggtactgaatgtcaaaagtgtacgagggattaaaccacatgatcttgcatccctaaaggaaaagcttcagcgagaggcaacagagaatcttggcatggctatggtctacactcttgtttcatcagccaaagagtggctaagtgagaaatatggtcagaatggtggtgatgaggaacctgaagaatctgaagcggaaaaagaggaggttattataccgcatggtgaagctgttactgtggagagctttctggcttggagagaacgctttgaagctgagttggccttacagcgtgctaagtaaaatttgtattttgtttacatattaagtttttttatgatcagatggaatctcttgtttacttgtgatatcttccatctaatggtgtttgattcccatattatataagtacccaaatctgtgtttagatgatcttttgcattttctgggcacacagacttatgccagattcagctcttacagccacaaaggaaaagaaactcacgggacggcagtattttgaaagtggaagaaaggagcaagcacagttgctgatgaagatgaagaagaggaggaagacattgatttcgatgatgattttgaagacgacgaagaggacatgcttgagcattatttagctgaacaatcagggaagtcaacagcttaaccttcttggccaaagaaactctatcaagggggctgtggttctcattaatatatatatgctgaaggagttagaagaccaagctgtaatttactgtattttttatcggctactacatgtgtgttttgcctttgccatgtggagcatgttgcatggctgggacaaaacaacgacgataataacaaagtccaaaaattctggggtgtgttaaagttgaaactcactagaactataagtcaaggtctatgtctatggatagctgtttttatgtagttcttatgctaaacctttgagtatatttcat

SEQ ID NO: 41049 - DNA, 2525 bp, Zea Mays
agcgcgcatcagcgatgcgggcgggggcgtacacggtgcaccagtcgctcaccgcggaggcggccgcggcgctgcagctctcgctgggcctggcgcgccgccgcggccacgcgcaggtcacgccgctgcacgtcgcctacacgctgctcggcggctccgagccgcccccgtcgtcgtcgtcgcctcggctcttcaccaccatcgccgcgtccgcgccggcgtacggtctcctcgtgcgcgcctgcgccaggtcccgccgccagacgcacccggcgcagcagtgccgggcgctggagctctgcttcaacgtcgccctcaaccgcctgcccacgggcacggccaacgcggggggcttgggctcctcgccctcgcccgccacctccttcgcggcgtcgctcctccagcagcagcccgccagcccgacgctgtccaacgcgctcgtggccgcgctcaagcgcgcgcaggccaatcagcgccgcggctgcgtcgagctccagagccagccgtcgccgccgccgccaccgccaggccagcagccgcactccaccacctccccgagccaccagcagcagcagcctgtgctcacgatcaaggtcgagctggaccagctcatcgtctccatcctcgacgaccccagcgtgagccgggtcatgcgggaggccggcttctccagcgccgccgtcaaggccagcctcgaggaggagagcgccgccatgctggctgccctcggcaaccaccaggtccaccaccacggcgcctcctcgacgccgccgccgccgccgccgtcctcccatcatcctcccaccgcggccggattagtactaccgcctcgtcacttcttcctgctggacccttacggaggaggaggcttccctgcgcacgccggtgcctgcagcggcgcgccgtgggcagcgcccttcccgagcgtccacagccgccacccgcccgagcccgacgacgtgaactccgagcccccatgcgaggcggaggcggaagacgtgagagcgatcgtggaggtgatgacgcggcgccgggggagactccgacgagccaaccccgtcgtggtcgccgactccgcgcccgccgccgaggcgtgcgtcgccgagctcgtgcggcgggtggagcgaggaggagacgtccccgacgagctgcgcggcgcgcgcgtcctccgcctccacctctcccgcgcccgcgtccgcctcatgacccgcgccgacgcggacgcgtgggcggccggcctgcgccgaagcgtcgccggcagtaacagcaccggcgcaggcggcggcctcgtcatctacgtcggcgacatgcgctgggccgtcgacgacggcaccgacgacgacgaccacgcccgcggcctgcaggggccgtcgtcgtccggctcctacagccccgctgcgcacctggccgcggagctcgcccgcctcctcgccgacctccgcctccgcgccgcgtcgcgcgcctggctgctggcggccgccagctatgccaccttcatgcgctgccagcggtcgtccctggacgtgacgtggggcctgcaacccgtgtccgtccccgctggcgctggcggcggcggcggcctcggcctggagctcggccctcgcgctgccactgcaaggatgatctgatgaagctcaagtggaaatggagccgactctgccagcagcggaaccaaccggcccgtcgtccgtgcaatgcaaccacctctagcaacagcagcagcaacccaggcctgtgcttgagctttgaggaggctcccaccaccttccaatgcaggagcaacaagatcgagcaccagggcgtcaggaccaccctgagcctcctcccggacgccgacaagtcatccgacgaggtccaccgccacgggagcgagcccaggccggcggcgccgcagcaggaaccagacgtggcgggggcagctgaagctgaacccagtggcacgaagaaggtcggggtcccatggttgccgtccggcgatctcaagaggaaggcggaggagagtgtcgtccggaggccgagcgagtccaacaagcgccgctggaagggcagcggcggcggcggtggccttgacctgaacctacgcgctgacgacgacgaggaggagagtggtggcggtggcagcagtgacgacgacgagctcgttccggcgagcgacttgacgaacgacggtgaagaagcagcagcagccagcggtgatgcgactgacagctccggtagccgtcgccaggctgctgtgagtgtgaccgaccttcgacctcgatcgctaagtggttgcggtattgatggtgccaacgagtgatggagtcatggagatgcttggatggagcaacaggcggtcgttgctgcttgccgacttcagaattggcgggaacgtgtggagaggggaagcagagacgttcctgcgtatatgtatgtatatatgggctctggggggcttcctgctcgaataggcgacatgcatgtgggctcggctcgtttggctcccaatttttgtccagctataatgcacgattattatggctcga

SEQ ID NO: 41050 - DNA, 6182 bp, Zea Mays
cgcaactgccatcgtcctctgctcgtcgcgtcgttctcctctcgaccgcatcgcgcccgtggcggggaacgagccatcgacgccgcgtcgcgtgcctttcttcttcgtcccccccctgcctgcctagctgtctcaggctgccgcccgcccagccccaaaacattcggcagccgagtcaaccgagaacacgagccatccacccaccctgtcccttccccggctttcccccgtcctcggctccaccaattgctctcgcgtcagtggaaggaaaaaccaagggcgagggagggaggagcgcatctccgccccgcccgcgttcccgtaccccgatccgccacatgatctgacaccgcattgccgccgaggtgacccctcccgcccccagaatggaggcgctcaacgagctctgcgacctggtggccgcgcacccggatctcctcctcgccgacaagcttgcatggctctcctcccgctgcgccgccgccccgggtgccgccgccccgcagcgtgcgtcgagggcgcaccttcattcgctcctcgcgttggcgcgcctcctcccggcgggtggcgccggtgccggtgccgaaggcgatgcggcgcccccggccccactcctattcttcctcgcgtcccacgccttcctctcgccggccttctggccccagtctttcgccccggcgccgtttctcgctaggctcctcccgctcctcgccgcggccccatcctcccccgccctttcttccgcgctctccgccgccctcctcgcggcgctcgacgtcgccgacccgacctccgcgccgctcgcccgcgcgtttctctccgccgccgctgccgcggcgcccctgccgctcctccccgcggatgccgcgcccatcgctgcccggctgctcctcgagtttcttggctccgaggaggagccgatcagggccaaggggaagggagaggacaccttgggcgaggaaaacggtggggcaaaggaggtagtgcggaggttcgaggaggaggaggtcgatgagctggagcggaaggaagtcgcattcagactgaccgtgcatatgcttgggggcgagggtgggctagagaccgagcagattgggaaggtcaggaatgctgctgcgcgacaggtccgatcactcacggattttctcaagattagaaagcgggactggagggagcagggtacacagctcagggcaaggataaacaccaaattgatgtgttgtcaagctgcagtgggggtgctggtgcgaagcgtttccaccatggatactgatatcaaatcttcgaaggatatgctccagcagactctagcttggttcatcgaggccaccaagtcgtgcatcctgtcatcctggcggaaactgaagatatgcgaggagctattttgcacactgctcaatgggatcagccagataactgtctcacgtgggggccaacttctgccggtgcttttgattcccttaaaaccgcttgttgtgagcacatgttcgcaggctgacatggcaggcagtagtcctggggctctatttgaagcagttgtgaagttgagctgtgagatcatagagtttggctggacaaaggatagggcccttgttgacacatttgttatgcgtctagctgcttatgttcgtgagcggaatgattacgaggaggaggatggcaaaggaaaagaggcagttccagttattcgacttaatgtcatacgccttttggctgagttatgtgtttgcttgaaaaaatgggaagttgtggacatgattttaccccttttcattgaacatctagaagagggtgatgcttcatctccaagttcattgcgtttacgattattagatgcaatatctcgtgttgcgtgcttgggttttgaaaaatcatatcgtgagagtattgtcttgatgacaagaagctatcttgacaaagttaaagctctaggggcttcagaaaacaatacagttccatcagaagcaacaactgagcgaacagaaactcttcctgcaggctttctgcttgttgcttccaaccttacaagcacaaaactcaggtctgattatcgtcataggttactgtctctgtgctcagatgtggggctagttgctgaatctaaaagtgggaggagtggtgctgatttgatgggtccgttacttcctgcagttgctgatatatgttctgattttgatccagtgtccactgttgagccatcattattgaaactattccgaaacctttggttctacgttgtattgtttgggctagctccacccatacagaataatgaggcacctacaaaaccggtttccacttcattaggtacagcagaaagcagcagtgctatagcccttcaagctgtagctggaccatacatgtggaacagccaatggtctgtagcagtgcaacgtattgcgcaaggaacacctcctctggttgttagttctgtaaaatggcttgaagatgagctagagttaaacactctacacaacccaggtagtcgtggtggtaatggtaatgaaaattctgctgttgggcagagagctgcactttctgctgctttgggaggtcgagttgaggtagcagcaatgaacactatttcaggggtaaaagctacgtacctacttgcagttgctttcctggagatactacgttttagttgcaatggtggcatactctcggctacatctacattgaatagatcaaacagtgctttcagttgtgtatttgaatacctgctcactccaaatttgacaccagcagtaactcagtgtttgacggcagttgcacatagagcttttgaaacagtgctgtcgtggctggatgatcgcatatctgacataggtgaaggagctgatgttagagaatcggttctttctgttcatgcttgctttctgataaaaagcatgtcccagagagacgagcatgttcgtgatgtgagtgttaagcttttaacgcagctgaaggaaaagttcccacaggtcctctggaactcttcatgcttggatttacttcttatttctgttcacaatgagttgacttctggtccagtcagtgatcctgcttgggttgcaactgtacgctcactgtatcaaaagatcgctagggaatggttaacaagtgctctttcatatgctccatgtaccacacaaggccttatacaggaaaatttttgcaagccaagtggagtacaaagaacacaacatacagcagatgttgtttcacttttatctgagatacgtatttgtagtggaaagaatgattggaacggtattaggacggccaatgttcctgcagttatggactcagcagcagcagcatcgggagccaaaaaagaagcacctgacttcactttggaagtactctctactgcagtagtgagtgcaactgtgaagtgcaatcatgctgctgagaaacaaccaatagataattcacaatttcgtgaaacatgttctcaagctacagcattacttcttgatcatatggtgtctgattctagagcaaacctggaagggttttctcagcttatacggcttctatgttggtgtcctgcttatatttctacccctgatgcaatggaaactggaatctacatctggacatggctagtatcggctgcgccttctttaggtcctcttgtgcttgcggaacttgttgatgcatggctgtggaccatagatacaaagcgtggattgtttgcatcagatatgaattactgtggcccagatgcaaaattgaggccgcatcttatcgctggtgagcctgaggcaccaccagaaaaggacccagtagaagcaataatagcccatagactctggcttggcttcttcattgatcggtttgaggtggttcggcatgacagcattgaacaacttctacttctagaagtgtaatatggggcttcagttgttagaggacagggtataccgtgctgctttgggatggttttcttatgcgcctgagtggtatgaatctccaaacaaaacttatgctcagagagaagctcaatctgtgtcagtatttgttcattttctacaaaatgagcgcaccagtggtcctgtcgattcggtttcaaagttacagggacgtgaaggtgaacctagcatggcagatcacattcatcctgtttggggctgtgttgacaactacacaaatgcaagggaaaagcgtaaacagttacttctgacactttctcagaatgaggcagacagacttgaagtctgggcacaaccaatacatacaaaagatacaacgacttttcgcggtaaaatcagctcggataaatggattgatcatgtcagaactgcttttgctgttgatcctcgaattgctctttctatgcctttgaggtttccaacgaatgctacaatgcaatctgagattactcagttggtacagacacgattactggagcttcgtacaattcctgaagcattaccctttttcattactccaaaagcagtagatgaaaattcagtgctgttacagcaactaccacactgggctccatgttctgttacacaggcattggagtttcttactcctccttataaaggacatccacgtgttatggcctatgtccttcgtgtcttggagacttacccccctgagactgttaccttttttatgccacaattggtacaatctctcagatatgatgaagggaaactggttgaagggtacttgcttggagctactcgaagaagtaatatatttgctcatatcttgatatggcatctgcagggagaatatgttgatgaatctgagaaagatgcagctgctctgaagggcagtgcattccagtccttgctcccagctgttaaggacaaaattatagagagttttactccagaggctcgtgacatgtttgaaagagaatttgatttctttgacaaagtcacatctatttctggtgttcttttccctctccccaaggacgagcggagagcgggtataagaagggaactggagaagatttctattccaggtgatgacctctacctacctactgcaacaaacaagctagtacggggtatacagttggacagcggtattcctctccagtctgctgcaaaagttccaataatgattacttttaacgttgttgaccgtgacggggacccaaatgatgtaaaaccacaggcttgtatttttaaggttggtgatgactgtagacaagatgtgctggcgctgcaagtgattgctctattaagggatgtatttcaagctgtcggattaaacctgtatctttttccatatggtgttttgcctactggaccaggccgaggcataattgaggtggtcccagatactcgaagtagaaatcaaatgggtgaaacaactgatggtggtttattagagatatttcagcaagattatggtcctgtaggttcaccttcttttgaaactgctcgagaaatgtttatgatcagtagtgctggatatgctgttgctagcttactccttcaaccgaaggatcggcataatggcaatcttctctttgatagccatgggagattagttcacattgattttggttttattttggagatttcacctggaggtaacatggggtttgagagtgcacatttcaagctaagccacgagatgactcaattgctggatccatctggaactatgaagagtgatacatggaaccaatttctcaggttgtgtgtcaaaggatacctagcagcaaggaggcatatgaatgggattttaagtacagtcaacctaatggtggacagtggccttccttgctttagcaggggagatcctatcaataatcttcggaagcggtttcatccagagatgaatgaacgtgaggccgctaacttcatggtacgaacatgtgctgatgcttacaacaagtggactaccgcagggtatgacttgattcagtacttgcagcagggtattgagaaatagtttgtttctcgttttttaagtggcgttcgtgtacatcaattgtatgtagccactatctttttatgtagaatttattttttgagttgtatcatcgggcaaggatggaattcatgtgattaacgtaggatgcttggtgcaaagaggcaattctttttttttcttgcactgtaaaactgccaagaaagtagctagtaagttgatcaagattctgtattgctgtcgcagaatgcattttcgtttactagacatgtatgattcgcatttttatc

SEQ ID NO: 41051 - DNA, 262 bp, Zea Mays
aaagccttcgtccatgtcgcaatctaaatttataattttaaaacaaattaatattgcgaggggctactgttgggggccttcggcttacgaaggtcctcaaaaacaggatttaacaatatttctggagtataatgtgtgagcaggtatcttcggactcaagtcggtatcacagcaggagaagaccagaataatacgaaggttgatacagcgccaaagatgtgaacaggaaagcttcggcatggtagcagaaaatgaaaccgac

SEQ ID NO: 41052 - DNA, 1779 bp, Zea Mays
tgcttacccaagcgtgtctctctccctggcctcaatctccagccgccactcactaggagatcttctccttcacgccacctaacgtgccatcgtcttcacccggccgtcgtccaccctgccttctccagcttgcgccaaacgtgcgctctttgtgccgccttcgtgacctcccctagctcggccatggatgtcgcgccgcccttctcctatctctctgctcgaccgtgcctcttcttccttgagccacgcccggtgctcctccaccaagcctcgtcggcatgctctcctggcagcggtcggatctggcctcctgcttcccctctagtacgctctcgcttccagctcgttgtgcctctgtactggagttcgccggacagtgcccttgctcggcttctccaatgcgccctaccgccagcacccctctcttggtcatcccttcccctgcgcatgcgctgggcgtgtctcccagccgccagctcggctcctcgcttcaaccgtagacctggtactcctcccgtcgtgcctgtcctctgtgcgcacgcgccatcgccttctctagccattgtgctcggccgatgactcacttcgtgccactcaggggtggatctacgaccggggctgcctgggctgcagccccggtcgcggccagtaaagcgaataggctcatcacgcgtgacagcccagctctgcatccagccgcctagctctagccgtgtccagtccgtgctgtgattctgtgagcatttttcctaccctaaaccagctgccgccgccgcccgccagccgtggaggagccacccagacacccaccgcctacggcccgccgccgcagcacgcagcgctgctagcttggaggccgcagccagcccaccgccgcagcacgcagcgctgctcgcttggaggccggagccagaccgccggacggccggagcctcggagcaccgccgccggcccgccgccgcagcacgcagcgctgctcgcttggaggccggagccagaccgtcggacgcccggaggcccagaggccggagctagaccgccggacggccggagcccggaggcccagagcactgccgcagcaatggctgaactaccaaagtgtacactgctagtatttgctaatgatcggattcggagctgcacgtttcagaagggaatatagtagctcaagttgataggccatatatggctgaggacaatctggaagcatcgacatgacgccacctcatcgctcgcggaacgcgtgattaatcctgtatccgccactggtgccactgcttcggtgattgcactcagtcctgcgatgtcgacccatctcagttgtcctccagccctaccgtacgcctcgtgttgtcgatggcagcccatgacttcaacatcgacatataccaagagtcggcaattgcatgtgtgtgtggtggtttggtgaagatggagctatggacggagtagagagtgaatcccagttcgacgctcgtgacgaaaaaccaaatccaagaattattggcattcttgcgaattttgagccaggttatttgtgcggagtcccgatgtgtcgctcgccaagggcttgataaaacgactgaaccagaaatccattgccattcttgtgatatcgtgtcgacttggtcttggtaagaaaaattattgtttgtgttagttcggctgatgaatggagtaactagatatcttagttgtgagcattgatatggtcgcaatcgtgattggcaaatcagcatttttgtcgtgtaagctaagtttatgtttgaagatttaggt

SEQ ID NO: 41053 - DNA, 1912 bp, Zea Mays
cggcacgtcaccatgtgggagaatttattcgcttgtccatttctcccacatacccctcccctctccaccgcccatctcttcctcctccagtcccgaaggaaggtctcaggtctggctggcctaccaccaagaacacacgctgcggcctgcggctgcggtcacgctactcaagtgtgaacaaaaaggagcttggcggcggccgtgaccggcgctggagagtggagatcttggacgcgtgcgacatcctggtctccgctctgtgcctctggtcttcgaaggcgccgccaccctatttttttttttaaaaaaaatcctaagatagtttcttcagtccgacaccgcttctagcttcccctcggcgatctgtgaagctatgaagccacctctcgagaggaacccgactaagaagcgccactcgtggtggtgggacagtcacattagccctaagaactcgaaatggctcgccgaaaatctcgaagaaatggacaagcaagtgaaggaaatgctccagctgatcgaggaggacggcgactccttcgctaagaaagcgcaaatgtattaccagaggcgtccgatgctcgtcacccacgtcgagaacttctaccgtatgtatcgtgctctagccgagcgctatgacaatgtaaccggcgagctgcgcaagaacatccctacaaggctgcagacaaccggatttttaaccagttcagagtacggttctgagctgcagaggtcgccctcaccgtctcctgagccgttacagaggtcgtggacaagggagcagagccctagggccgctggcttcgacttcttcctgagcaataggagcaatgactcgccacctgtctacaggaaggaacccgaggacgcggcatcgcagtcggagtctgacgcgaagtctgcagacggtgaggatgatggcatcgcctacacgctgcaccagagagttcttgagctagaggacgagctcaatgcgacaaaccagaaactacaagatgcaaacgagaagcttgaggttctggaggaaaagagcttgaggtgccattgcgattataaagagaatggaaacggtgctcagcgaactacagaagtttcaggcaaagagggggagctggaagccgaaatcgtcaatctccaggagcaagcggactcggcaagaaggcgattcgaagaggcattgtctgaacgagatggagaaatcagcaagctaaagcaagagcttgctggtgcttctgagaagctgcagcgagagaagtacgccaatggcgtgcaggtatctgagctgcagcgatcggttgaacacatcaggtccgaactagagagagtttctgaagagaaactactgtccgagaacaagattaaggagctggaggcagcaaacgctgaagccgataagtacggccacgagctcacgcgagctgccgagaagatttccgaggagaagttcgcgctcgaagctgagatcctcacgatgcggcagaacattgaagatctgaaatccaggatcgagagcctcgctcgagagaagtccctgctcaaatcatggtttgaggacttggagcaagtcgtggggcgaggaaggggcatcttcgccgattaaccgagtttttctatccagaacatcatcggtagctagaatttagcaagctagtaacattttgttttgttttctggtacccataccatcttgcgaaattgagatacgtcagtgtacttcctttttgtttgctgaatcttaaacttagacgtgatggatggtggtgatgtactggtaatatatgaaatattatactgaaccgcgctcgacgtcaataataagattcctatagtgcatctaaaagttctgtctcaatgtaagtccagttcggatactgatactgttcatattgtttgaaaatcatgttcttgcataatt

SEQ ID NO: 41054 - DNA, 2271 bp, Zea Mays
ctgcgccaattcggaactttgcttgtgtcaccatgccagacacacaacgcaaccccaacaaggtcaaccagacaaatcagcagaagctacgaaactgcacggcagcctccttgctcgtgcgccttgtcattactgcacatgacaagaaaagtggtgctaaagagagcaagcgggactgaaggggagagagagactgagagagagggagctagcaacaatggcggcacctactgtgctcgccttccttccgcttccgcttctgcttctcgcagccttctcatcagcatcagcctcagcgcaccccaactctttccggccaatcgttcccctgcgtctccaggctcttctgcagcagcagcagcggcggcgagcgagctcggacgccaagctcgtctccgcggccgccgacggcaccaacagcacggcgcagccgttcacgacgcactactttccccaggagctggaccacttcacctttacgcccaacgcgtcgatgctcttccgccagaagtacctcgtcaacgacaccttctggcggaggccccgccgcggcggcggcggcggcgccgggccgctgttcgtgtacacgggcaacgagggcgacatcgagtggttcgccaccaacaccgggttcatgttcgacatcgcgcccaagttcggtgcccttctcgtctttatcgagcatcggttctacggcgagtcactgccgtttggggacgactcctacagctcagcggagacggagggttacttgacgtcgacgcaggcgctcgccgacttcgccatcctcatcaccggtcttaagcgaaacctctcggcggagaccgcgcctgtagtcgtcttcggcggctcctatggcggcatgctggcttcttggttcaggctcaagtacccccatgtcgccataggggccctggcatcctctgcgccaatcctacagttcgaccacataacgccatggaacagcttcagtgatgccgtctcacaggactacaagtccgagagcttgaactgcttcagtgtgatcaaggcagcctgggacgtgctcgatgagaggggatccactgacacagggctcctggagctcagtaaactgttcagagcctgcaagagcgtcaagcacgctgattcgattgcaggctggctacagacggcattcacctacactgccatggtggactatccaacaccggccaacttcctgatggatttgcctgcctaccccgtcaaggagatgtgcaagatcatcgacgggttcccggcaggcgccgacatcctggaaaaggtgttcgcggcggcgaacctgtactacaactacacaggagaccaggcctgcaaccagatcgagtctgattctgacgacagctccagttctcttgggctcagtggctgggggtggcaggcttgcacagagatgatcatgccgatgtcgacctcaaacgccagcatgttcccgccatccagcttcagctacgaggacacgtccaatgcctgcttccagtcgaccggggtccggcccaggccgcactggatcaccactgaatacggcggatatagaatcgacaaggtgctcaagaggttcgggagcaacatcatcttctccaacggaatgcgagacccgtggagccgaggcggggtcctcaagaacatctcgtccagcatcgtcgcccttgtcacggagaaaggggcgcatcatctggacctcagattcgcgaccgatgaggatccggactgggttacagaacagaggaggcaagaagttgagatcatagagggatggatagaccagtatcatcgagacatggcgcaagtatcctaaaggagtaaaggtgctgtgttgcagatttacagttacagtcaagacaagttcacgtctggtctatgaaaaagaaaacataaaaaggaaaagttcctttatagcgcacaggacaatcacagggacattaagatgataaaaggtgaaaagccagtccaattgtttcacttatcaacataagctgtaaaacttgaacactcttggacgaatcatgaatgaattgttacacgatgctcagtgtttttccccccttcctagcccccaatttgttatttgttttttctattttcttccttagtatatatgtagcatatatgaaaaagggggaacaaggatcaggtgtttctaaagccttgagcacccaaattcatttcacaccttagttatagtaatccatactggttacggctgagttatgtacactagagttgtgttaattctttctgagtaattcc

SEQ ID NO: 41055 - DNA, 781 bp, Zea Mays
ggaaaatctgctgcgagcaagatgaaggcggcgcctgctatctgccttcgctgtaagataccaccttgatgaggatccaaaaaccttgagagttatgccaattccacttcatgactctaaaggttctgtttgccagtatgatcacatgacagtctctcctgatggtaaaattctggctgtaacaagtggatcaacgttgcaatggttacttgtggaaactggtgcagttttggatacagctgacaaagcacatgaaggtgatataactggcattgcttgggctccacggacaattcccaatggtggcgtgcatgtttttattttggcgactgctggtgtggacaaaaaggtgaaactttggacagctccagatgttggttcaacatgagtggtcgaggattgaatctgcataagacagctttgccaagggcacagaattgaagttttgttgcgtagagtttgagaggaggaagggaagggaggcctggctgttactgatgagaccccaatgcatcacgcaggcggcagccttggggctgtagtttcgctaccttttatacaataaactgaatgttgtctgcatttgtatttttttttctttccttcctttttactgttggaatgatctggctgtgtgatcaacataatttaagctgctgctgcttggaatagacgtcattttatttgtcaagcaaatgtgctgctttgcgcattgtttgacattatattgtttgataaagtgtgctaagtatgaaaatgccaaagcaagtgttctttcttt

SEQ ID NO: 41056 - DNA, 440 bp, Zea Mays
ccacgcacgatttggctcgtcgacagtcagcatccaacccgatggggcgatggttgctgcaggttgagaatcattgctcgagccaatcaaatatgctggtcaggttgaatctgttaacagcttataatcaggtacggtgtaataaaaatacaagaaagcttagttcacagaatttgctttggaccacccattatctctaagtttactccttatatatataccatcaaaaaataagtttgcttgcctatatgattagcagtttcttcttagtcttatactaacaagttgttcgtgttttgctatagttgttatatatcatataaatatgtattaagatattttttcaaatataattattgtttattttaaagattaatgtatatgtggtctgttggttagccccaaatttctagagtagagagacgtgggtttgagtgctt

SEQ ID NO: 41057 - DNA, 704 bp, Zea Mays
gccagcgtatctgaaaccctgcgagggcgaggcatcgagatatggcccgtgattccattcccctcaccacttggtccgctttgttttgttgtcacgatcctctttggacagctagagatgctctcgccgccccgggtatgcagatgtgaataaacgacgctaaaaaaaaggcagaaagaagtgagtgatacaaggatctatactaagtctgtggcagtaaattgcgtcacgggggttaggtggagcttcgacgggattagcgagaacgccaaggaaccctaattatctgccaattctactgtaccactagcttgctttgagatgtgagaatatctacccggtccgctcgccagccaaacgaacaggtgacacccacgcttggggtgtggtccaccctgtttctgtccgcttgagaacaagttggtcaattattttcgttcccggatcgcccagataatgtgacgtccagtcagctcggttgtctcgttcgggaaaaaataacaatagctgatttttaagagcgggcatcatgagttggcctggcccgagctatgttccttgactattattgactattgtattcgtactaaacacgagtagcacgctgcatgtattctagtggagagaaaatacagcctcatgccaagtacgagccaattaaacaaaatgtcagatctctctataaggctacttctcgaagtata

SEQ ID NO: 41058 - DNA, 5022 bp, Zea Mays
gtccagcgtcctcgcttctttccaccgaactaccagcccccacccccctcccctgtcaaactagcgaagtcgcacgctcggctcgacggctcgagtaaataatacttcgtaaaaaataaactactaaaacgcgcacaaaaaccattccgagaggagaactaaaaaaatataaaaaatccccaaagctacctttcctcctgctctccctcccacgcctcttctcctcgccgccgccgccgccgccaccgctgagagaactaggactacgggcgggcgaagcacactggcttcctgcggacccgccgccgctccacgggcacaggcgttagccgtcgcgcggttgccctgtcagccctgatcggtgctgggcgggggtccgcggcgggctggtcgacgggcggtggcgggcgatggcgccggcgaagaggaagcgcgcagcagctgccgccgcggccgcggccgcggccaagtggaaggtgggcgacctcgtgctcgccaagatgaagggcttcccggcctggccggctatgattagtgaaccagagcagtggaagatgccttctactaaaaagaaaccgctggtttatttctatggtactaaacagattgctttctgcaattatgctgatctcgaggcattcaccgaagagaaaaaaagatccctacttgctaaaagacatggtaaaggggctgatttcctgagagcagttgatgagataattgaagtttatgattctctaaaggatataggtagcaacaaggttgacttgcctgccgaagaagtaaagccaggtgtagaaaagtttgctgaaaataatagccgcatggatactgaagatctggccttcagttgacgagcgatgtgttgtaaattctgctcctgatgagcctattgaaaatgtatccatccttgatgaaatgagggatatttctttgcgtactaattcattttcaaataagcaaagggatgcacagccacaaaattgctacacacgtactagggttccatctctgcggaagtcaagaagttcattaagtctggaatcaagaaaggctcaaggttctgataatgtctggttgcattctggtgaaggcacttccaaccaacctgtaactttgggggctagtaacggcaacagaatgttgaatactcctgctgaagtggatagtactagtaaccgtgaagcatctgaaaatggaactacagagacagaactgaaatcaaatggcacatcagatcttcccatgaacacagcagtaaatttcaagagaaaaagaaaatcagatagaaaacctggacctcattatagagattgtacaacaccaaataaagatgaccaattatgtgctgagtacagtgaaatccttccagattctccgaattcaaagaatgaagtaagcaagtcagatggagatgagcacttgccattggtcaaaagggcaagggtccgaatgggaaggtctcagttggaggattcaccagttgatgaaattgatgtttctaataagaagccagagcttgcaacagccttggaccaatgtgataggaatggtaaacctgcaagtcccgccaatgattactcagctgatcaggtgtctgcagtcgtaagttctgctcctaatctgtcctgcaaattggacacaactatcttgtcaaaggaaggtcatcttccttggaagaataaagaataccatccaaaaattttagcattagatgtggaagctgctttgcctccttcaaaacgcctgcatcgcgccttagaagcgatgtctgctaatgttgctgagaataccaagaatatacctgaagtgacaggaccaaatgaaatgactctaaatggctctttgttgacagcaagcagcctttctaataaatctgcagatgcagtggtcacagtatctaatagacctgtaatagttcaaagccctgaaccttctttagacacacagtttgtgcataacccatcaggcaaatgtacctcagaatcaattctacaaaataacagcattcctgattctgcttcagttccttcaaaagaaaatgatcatatcgtgttaaaaggtgatatttgtgaagaaaccctcatggatactaaaactgctaatggttcttgggattgtagtgaactaaataatgattcctgtgggaaaacttcagccctttgcatgaaattgaatcggcctgcacttaatgttacacaagccacatctgtacctgaccgattatcttcgtctttggagaaagccagtgaaaatgtggccgcaagtggtgtcaaagagacaaaaacatttggctcagctgtttgtgatgttgacagaagtgcagaaccaattgaccgttcaaacaacaatgtgacgagcaacacaatgcgacatagtgagactattgtagcggattcagtgaacaatgtgggggatacagcaagcaactcttcactggctactaaatcatccagtatacaatctgatgcagacacccggacgtctgaattgcatacattctcatctttggcattgaaagaactgaaccatagaaaaattaaagacaggagcacttctccagattcaatgccaatgaaagaacttatagctgttgcacaagctagaaggttttctcgatcaacttcctttccagataacttcctaaatgccaagagtccgtttgataatattcagcagaagaaattagcagcacatggagccaatgcagcgcgaaggtctttcaaagatttcctcagtacattgacaagaaccaaagaaagtatatcgcgcgcgacacgtcttgctatggaatgtgctaaatttggcattgctggtgaggcaattgacattatcgttgaacatctggaaaaggaatcaaatttgtataagagggtggatctcttctttcttgtagattcaataacacaatgctcccgcaatcagaaaggcggagctggagatgtatatccctctctcattcaggcagttctacctcgaatactctatgctgctgcacctcctggaaactcagcttgggagaatcgaaagcaatgtctcaaggttttgaaactttggcttgaaaggaaaacactttcagaatatatcatccgtcaccatattagagaaattgagactatcaacgaggcatcatttggaagttctcgccgtccttcaagaacagagagagctctaaatgaccctttgcgtgacaatgaaggaatgcttgttgatgagtatgggagtaatgctggttttcagctacccaacttaatttgcacaaaagtacttgaagaagaggaagaaaactcttctgaaggcaggagcttgagctttgaagctgttacacctgaacaggatgccccatataatgatgacaatgaagaatctcaaatgcctgttgagaagcatcaccatattctggaagaggttgatggtgagcttgagatggaggatgtagctccaccatctgatattggggcaaccaccaagtgccaaccagagcaaagtgacaccaatcgtgcaccatctgaccaacgcccttcagatgctggccctccacttcctgtggaccggcctccatctcctccgccattgccatcatctcctccacctgtccccgttcctcagagtgcacagatgcagcctaaattacaaatggcatctgatcccatggcgccacatcctcaaagagctacatatagtgttcaaagtcaacaacagcattctattgcagagcacccagttcaggatatggagggcaacaaaatcagataccacctcccccaccaatggcaccactcaatcctcctggtccccatggcagtttccctgctcccccagcaccttaccatgggaacaactatcatcggcctccaaccacatccatgcctaacgagggatatcatcagcaaccaccaccccctccaccgcctccaaatcaattcccttctgtgccaccagaacaccaacataggccacatcactggggtaataactgtccaccgtatcccgagagatatcggtacaatggacatgatcgaggtaatcacagacatgatagaaggcatcatggacatgacagacaacaccattatgatgatagaggataccactacgatgatagaggatatcactatgatgatagaggccattactttgatgatagaagacatcattttgacgatagaggacatcactttgatgagagagctattagggggccaatgcacaatgatgccgctgaccagggaagatattcttttcctccaggtcctcctcggattcctgaccattttgaagctccaccagccccaatgcactatgggcgaccatcagatcctccgccaaggccttgtgcaggctggtctaggccgcctaggatatctgataactattctccctcgagacattctgtggagcctccagtttcacatacagctggaggtcatggtggatggagacctagataacctttttcggtatcgaagcggtgctctgatgctttccttggtctgtgggggcttaacctgtgggagagtctgtctggtgtctctgcttcaggttgaaggcacccacggaggtggagcactccaggaaagtgggagctggtacctgcctccttgtacagatgtatctcatggattctacggcggtcgggctgcctgaactgctgtttgtaccctagtaggggtttagactgcgcgaccacacgcagagctgagttgtaggggtgtagggtgtcttctatcaaccgatcgtagtcttacattgtactgtttgttagtgcaacagtcctcgattccattgctgaattcctcctggcctcatcagacgacagccagctgctctgatgtcttgccgaaactgtttgagcacagcgtacatatatgcctaaaaaagagaaatataaatcattttgcccgttgcacctgcttatatataagagcatggtcgaactaaggggtgtttggtttctaggttcgctcaattttattttatttaatatggaaattttagttaacctagaaattagtctctaga

SEQ ID NO: 41059 - DNA, 2820 bp, Zea Mays
gacgacgaacacgagaagcagcaggccaaaccaatcccgttcccgtcggcctctagcaggtcctccccaaatcccccgcgatccccgaaaccctaccctccagcgccgcaagcccgcaacacgacccttccgccacctccgtcgcgctcccgcaatccagggtcgcccggcattggttttggagcgggaggtttgagctcttctaagaatcggttttgcgaggctttcgatgggttcggaccgtgaaggccgcggctcggaggccgtggcggcgagtaagccgcggaagaggcaactggtgatggagtccagcgattccgaggccgacgagttctgcatctccacgcggcagaatgctagtggtgccgcgtcgttgggcaatgctggtgtcagcagccaaggcagtggcgatcggtcggaggagaaacctgtgacttctagtcctgagaagcttccaggggttaagtccagtgatgtagatggttcagacaagaaaacgggagttcagctggagagcagtagttcgcagcctgctgtcaagaggatcagagttgagactgtccatggtgatggcaatggatgcagtggaggcgcatctaagtgtgggactggtggaaaaatgctgcctcgggggctcccagcatggcggtttgagaggccagaagtaaggggagggcgtgttctggatgacaaaggtggggtgagtatgaaagcaagcagtgcttcaaagatgaaggagcaggtatcaagtttgggtgacaagagacaggcagagctgcagaaacatgaaagaaggacaccattgaagactgatcagggcaaagcaatcgattctggccaacaggaggttttaaggttgcaagggaaaaggggtgttttaaggatattgccaaagaatgataaggtgaccagggatactggtgatggtaagattctgtcaaggcaaactgaggtggatgaggagactggtaatggcaggattccaacaaagcgaggtgttttaaagctcctgccgaagaacaatggtgctgtgatggagagtaatgaatgcaagcttctgtccaagaaggttaaggtggatgaggaaactggggatgacaagatgccaatgaagaaaactaaggtggttgataaggagaccagtgatggcaagattcttgcaattacaactaacttggatgcagagtttggtggccataagttgccaatgaagaactgtactgtggacatggaaactgttgctgggaagtttcagcaaaagaacagtaaggcagatggagaaaccaaagggagatataaaggatatgaagagaaaagtggcgcccctgcagaatttcagaagcatgatgcaaatggtgagaagagagttctgggaaagctactctctcccgttgcgctgaggaaaagtgatccaagcgtagtgggagtttctttgggccagagaatgaaacaacaaaattcaaagcaacaactgaagaactattctctgagcttgaaagatgatagcactaaatcaagtgaacagaagaatctgaaaaaaagattgcttgagcataaagggtcatcagagagtttgtcaaagaaggcacaactgaaagctgttgatcagcaagccacatctggccctgtgctcaacaagcttgaaaagaagccaagaggaggacccctcaacaaacataagcaggatctcaggaacaagataaaacatgtgcttttagataatgggtggaaaattgacctaaggcagaggaaaaacaaagattatgaagactcagtctatgtttctcctaccgggactggctattggtcaatcactaaggcttatgcagttttccaagaacagtttcaaaatatgggtcgctcatctaaacttaataatactaaaccaggtgcttcagatgctatatcgaaggatgatctagcattgctaaaaaagaatatagtaaagagaaggactaataaggaaatttgtggtgctgaaaagaaacctggggttagcagaaacagaagctctaaagatatccttgctaatagagattttagaaacaagcatcagaacaaggaggatagggtaaaaattaaagatcggagatgtgggcttcttgtccgtgggagtacccatgatactgaagataacatggatggctatattccatatgaatggaagcgtacattatgttcatggatgatagatctgggggttatttctgaagacatgcatgtcaaatacatgaacagcaatagaaccagggaaatgttggcaggtaaaattaccagggagggtattttctgtgggtgctgttccaagattctcacaatagcgaagtttgaacttcatgctggttcaaaagagaagaagccctatgcaaacatctttctggaaggtggtaaggtatctttgttgcaatgcttacttgatgcatgggagaagcacacacaaagtgaaaataagggattttacaagatagataaaggcgacgatgaacatgatgatacttgtgctatttgtggggatggtggcgatttggtgtgctgtgatcactgtgcttccacttttcatttggactgtttgggaattaagcttccctctggcgattggtattgtcgcagctgtttatgtaggttctgtggttttccccaagaaaagccatcatcttctcctgagttattactttcttgtttgcaatgttcaaggaaatatcaccaaacttgttcatctggaaccgggacagactctggttgtaccatgcctggtacctctattgattgcttttgcagtccaggatgtagaaaggggttctattaaaaggcattaccgat

SEQ ID NO: 41060 - DNA, 2591 bp, Zea Mays
gccagatctcgcatatcttcgtgagtcgtgacctccgctcgcgaagtcgctggctcaggcgctgctaccgttcgagacaagtctcgccgcccacaccgccactaggaaaccttcttctctcctcgccgcccgcggccggccccttctccagaaccttctagaacccatcggggctccgggatggagcccagaagacgagagcgcagggtcatcgccatcgccggtgcggcagcgctcgttgccgtgggcctcaatatcgccttctccgccgtcgtcgcccaccgtcggaggaagcgacgagagcttccagggtttactgctcaagtcaacctatcagcagctgcgattaaaagaacgaccgaccgtatcatctctaagtcaagggaaacttatgattcagtggctgcagtgcccctagataaagtcagttttgctaatgtcattgcaccattggcagaattagatgcgctgcaattccctctggttcaagcttgtgttcttcctaggatggtatcaccatctgaggatgttcgcaaggcaagtgctgaagcagagaagctattggattcccactttgtgctttgcaggcagcgtgaagatgtttatcgtgtcataaaagcatttacagtgaaaggcgagagaataggtcctgaagcaacaagatttcttcagtttttggtgcagaattctttcgctacatataaatttgatcgtgaaagagtttgagcgcaatggagtaaaactatctcaaagcaagagaaaagaaatggagaaattgaaatctcatatagatgcattaaacttgaagtatctccaaaatttgaatgatttcaccaaattccttcttttaggtgaagatgaactagctggaatgccctttgagttccttaaggatctggaaaaggctgatgggaagtttaaggttccgttgactagttaccatgttactccagttcttgagcactgcaaggttggctctaccaggaagcagattgctgttgcttatggacaaaaaggtgggaaggataatgtagccatcctagaaaatttggtccagctaagacacaagtttgctaaattgctggggtacaccaactatgctgattttgctattgagcccagaatgccaaagacttcgaggaagatcttagagtttttggaagagatgtctgaacaattaagtgatgtggctaatagagagctcaacatactcaaagacctcaagatcaaggaggaaggaaatgctcagtttggaatggaagatttgttgtactacatcaaaagagctgaagaattcaaggttgatcttgacgttggtgaaattaaacaatacttccctgttggcctggtcatatctggaatgctgaagatatttcaggatctatttgcactacgattcgacgaaattaaggatgttgatgtttggcatgatacagttcgtgtgttttctgtttgggatgcaagttcaagtgatcttttgggttacttttttcttgatatcttttccagggaaggaaagtatgcccacacttgtgttgtgacccttcagaatggatgcttatgttctaatggtacacgtaaggttccggctgctgtgatattatctcagtgtccaaaagagtttgatggtaattcagcattgctgcggttccctgaagttgtgaggctattccatgaatttagccatgtggtccatcacgtatccaacagagccaccttttcaagattttcaggccttcgactggagggtgactttgctgaaattccaagcctgctactcgagaattggtgctatgagagtatttctctgaaaatgatgtccggcttccatcaggacattacgaaatccataagtagtgaagcttgccaatctctgaaaagaaggcgtgatttgtttgctggcctgaaaatgaaacaagagatacttttgtgccttgttgatcagataatacattcaagtgagaatgtggacattgatgacttaatcaaggatcttcaccccaaggtaatgttgggtatacctttattggaagggaccagtccagcttcaagttttcctcgtattgcctttggctatgatgctgtgtgctacagttacatatggagtgaggtgtttgctgctgatctttttgtatcaaaatttaaagatgacttgctcaatcagcatgctggattgcggttcagaaataaggtgttggctccaggaggctcaaaagatcccctggagataataacggactacctaggaagagaaccatcactccaaccttttattcagagcagaacaaggaacagtctgtgagggatcatttatgatgtaaccgttgagttttttctttcttttttcctttttgaatttagctatagaaggcctgctgactgtctcgagttatttttttcgtaacggactgacaagtctgatctttgtgccattctgttttccgacgtcatttgtttgaccatttagttaagctggaatacaaaagatgtcgctagattctgctgtgttttcctaaccttagcatgctttcaagctcccatcaaaacgtctgagcacgtgaatcaagattgcacagaaagttagaaataag

SEQ ID NO: 41061 - DNA, 2221 bp, Zea Mays
attgacttcgcaggaagacactaaactgttcaacgcttggttgcagaactcgaggtttctacagctgtgtaggctgctgagcgatttagcatggtacatttttttctgcacaattgtacatggaagcattagtcataggatatcggttgttgaagtacgtcgtcaagtgtacatggaagcattagtgcattgaacggccgaagaatcaccgcaggtacatggctgatgtgttcatcttctagaggatatcttgcaccagagtacaccattcaagggcagctgaacaaaaagagcgacgtctacagctttggtgtgctgctgttggagattgtcagtggcagatgccacactgatcctagattacccgttgacgagcagttcctcctagaaaaggtctggacactctatgagttcgatgatctcgagagcatcattgataggacactaaagcgcgattttgacaccgaggaagcactctggttgcttaaggtaagtcttgtgtgcatcccggatagccctaagatcaagtcctccatgtcaatggttgccaagatgctgcaaggtgagtgtgttgtgggtgataggatcatgaggctggcctgatcacagacgtcatggacctgaaagtcaggatggtagagccggttcagttcagcttgacatcatgctcgagcactatcgcgttgtggcctggggcgcgatgcgcccactccttgttggggatttcccattcagctactacgagtcatgccgtgtaggtacgcggtaggtacgcgatctgtcccctctgttctggataagacgttctgatgtgatagtgatagaaatagaatagaacgatgtggtggtgccacacagcccacaatgtagacgacacttggctatcacgttcgttcgtctcactacagaagggtgtgtcgcggttttcttttttttcactaagcaaatgtgatgcttgttagatttggataagaaaccttttgttttacaatataattcactaattgtatcggccgatattcgattgtttttggttcaatattagatgttcaacaacatggttttttttgcttaaccaaataataatgttgcaaaagtactaaggttagcttgtttattgttgttgatgtgcccacacaaatacacatgtatgaggaatattgttagtattttccatgttcttttaggttgttgattcaatcgtgagggtcctcaattaaggtcgaatggatgcaatcaaaactagaagggtgtgcgccatcgaggatcactgcagctaaggcaatcgtgaaggctggaatcgttgttatggcaccgcaagctattagtgtgctaggtggatttaggcctcaagggaaaacgattgacaatgttgtaaaggttgtggagacaacacttgccatgcaggaggctggatgcttctctgttgtgtattagttgttggcagatgatttataagatattgagatcaaaatcaggatgtttccaaactgtctataatcaggatggctattgtagcttttacagtaggtcttcttcccatgggcggtgccctggagcgcctgattgtctcacgtatttgaccagcaacaagggacgaagattggagctgtgtggattgtgtggaggcgacacgggtcaggagcatttcatctgatttacagagaagtaaagagaagttgtttacatttagtcatcctctgtatctgaaacaagactatgtttctaccttgtctttctcatggttcttagcctatggccgaagcttccatgcttgattcttcaaacatccaatgcagatcccttttctctgatggatatgctgatattcaaggctgtggaagagcaggtcaagaagagagtagagaataaggcaatgatcttcgagcagaatgccactgatagtcaacggcaagataaaccaattgcgttgtatgagttttagatcataactcaagttttttgtagatcttggtgctatttcatatgatgtgtcatgtttcagtgattgctttatagtgaacccgtaagatgtaaaatgacctttatgacagaaccatatgtaataacagagtattctgaggaacctttgttgaagtaaatgtaatcgagtttcctagcaatcttgttcctgcagacgagcattggaaaataacagagtattctgaggaaccttagtcgtattaagtttgtgtagaaagaaactgatcataatataatg

SEQ ID NO: 41062 - DNA, 2552 bp, Zea Mays
cgcacagccaagtccgagcagagctccatcccatccagacctgccaagcaagtcagctgaaatattggttccgagggctctgtagttgcttatccacgctcgcctatgcctttgcgctgatcttgacaactcaaagcttggatatggctacttattactcgagccctggcagtgaaagagattcacaaacaatgtactcagcagagtcaggcaatgtatcatatcccgtgccatcagccctagggaactttctttatacgaacaatgcatcttctggaccttatacagaatttagtggaattgtccagcctcagcagaatttcatggaacttactggccatccttcagcaatgtcacatgattcgtcatccaatgaagctaccaacatgggcagttcactcactgaacagcgctcttttggtcctttgaaagatatgagaaatgagatgttgatgcatttgatggatggagcacacagcagtggcagtgatctcatccacaatgatgctcatagcactgtacagctcgaatttggcatgttaaacaaccacaactcaacaagtgttccattagcaccaggccaagggctgtctctgagcctcaatacacatatcttggcgccttcctatccacactggtctgcaaagcaagacttactaacaccaaattcttaccagggtgatgacaacagaatgaagaatatgcagtctgaggcctcacaggcaatccggaactctaagtatctgaaggcagcacaggagttacttgatgagattgtcagtgtttggaagtgtgttaaacagaaaacagataaaggccctgctgaagcaggaaaggctgatggaaaagagactgatggggggattaaaagtgagggggtatcttccaatccgcaagagtctggtgccaatgcagcagctgagctttcaactgctgagaaacaagagctccagaataagatggcaaaacttatgactatgttggacgaggtggataggaagtacaaacactattatcatcagatgcaacttgtaatgtcatcgtttaatatggttgctggtgctggagctgccaagccttatactgcagttgccctccagacaatctcacggcatttccgatgtctaaaggatgctatcaatgatcaaattagtgttatccggaagaaacttggagaggatgacaatacatccggcaaagagggcaaactaacccgccttcgttatattgatcagcaaataaggcaacagcgagctttccaacagtatggtatgctacagcaaaacgcttggaggccacagagaggactacctgaaaattcagtctcgattctccgggcttggctttttgaacatttccttcacccgtaagtttttccgcttaacttagagatatgttcactcacccccccttttttatttgttctcatgccatgctgacaatcttaggtatccaaaagattctgaaaagctaatgttatcgagacaaactgggttgacaagaagtcagatttcaaactggttcatcaatgcccgtgtccggctgtggaagccaatgatcgaagacatgtacaaagaagagattggtgaagcggagctagactccaactcttcctccgacaacgggcagcgaaacaaggacaaagcaccatctcccgaagaaaatgaggacctgcagaccccaacaagccaggcttgccaaaccagccagctcggccagtccaaagccatcgttggtggagtgatgggctttagtggagtgctagccggcggcttccacaccgaggccaaccccgacgacagcttcatgagcctgatgctaaaggcccagagacctggtgaaaccgaaggcaccggtctcctccacgatgccgtcgctcaccactcggacgacggcgcccggttcatggcctaccacctggcagagttcgggaggtacgggaacagcagcaacgtctcactgacgctgggcttgcagcacgccgagaacagcctcgcagtcccaccaaacactcagccaggcttccccggcgtcagagaccaagacatgtacaacgccacggctcctcctctcaacgtcgcctccacatcttcagagtatgattcggcgagccaaattgatcagcaacagcaacggcagcggttcgagccgtcacctctgatgcatgatttcgtggcctgaatttcagctcgcccactggaaaacgtgggggaaaactactgccaatttgtagtgtgtgccaggacgaataacttgcctggactgaattttcaggcgtgggactgttagctgtagttaacgattggggatttggggggtacagtacaggaggtatatagcgtaaatgtgatgtaaatttagtgggggtgatagcggtaaagaaatcctgtaaagatggaatgcatttatacgtgtatttaagggccatgctgtaaaaatagatttacctgtaatgagtacttatgatccagtatatatactgtgcacgttgttgaaaccaaaaaaaaaaaaagaagaggggggtgggggtaaactgaaatggattgcaggag

SEQ ID NO: 41063 - DNA, 2804 bp, Zea Mays
tccggtaaggcgacgaaatgtacggcgacacaatgaagggtcaccaacccaaaggggacaagggcaatagggacgactacaccttcaattcagaaggctcgcggatgtctggccgacatactttcccgaggaggccgaggtcgggctgtcagaatccgaccagaaggtccgcctcaccaccgccctggctgatttcttctccacgcccgagatggcggaagtccttcgctcacgggttgaagatgatggcaacgacatcttgtgtcttccaattgatttccagcagcttcaggagttacgcatgtttattgaagataaactcaatgagtccccaaaagaagccttgctttgcatgggagttgcagctcatctggctctgtgctcggacaaggacaacaaaaggaacaagataaatatcaggctttacaacacgggagcagctattgcattaaagaaactaaaagcagcctttattaagaaacttgtcacagtgcgtggtactgtgctcaaagtcagcactgtaaaacctcttgttttgtggttgaaattccgatgcatgaagtgccgtaaagaaataccccgtgtgttttgtgatggaaaattttctcctccaatgtcctgtaccatccagggatgcaagagcagaagctttatcccagatagatctagtgcacagctgatggattttcaaaaaataagaatacaggagcttgcaagcgctgacaaccatgaagaaggccgagtgccacgcacagtggagtgtgagcttacagaagatctcgttgattgttgcatccctggagaaattgtaacggtaactgcaattgtgaaagtgctcaacaaccatatggatgttggtggagggaagtccagaatcagcagtcaaggtttatactacctgtatctggaggcagtttcagtgagaaagttgaagtcccatgctgtttctgacaaagaaattcaagctagtggaatttgtcattctcagtcttctactgtaaatgatgattttgctgtcaaatataaagaaaaatatggcaccgatgtttttcgcagaatacttcaatccttttgtccctctatctatgggcatgaacttgtaaaagctggtatcacacttgctctttttggcggtgtgcagaagaactcaatggatcaaaacatggtccctgttcgaggagatattcatgttattgtagttggtgatccagggctaggcaaaagccaactcctccaagctgcagcagctgtttccccacgaggaatatatgtatgtgggaatacgacaacaaaggctggcctaactgttgctgtggttaaagattctatgacaaatgattatgcatttgaggctggtgccatggtccttgctgatcgtggaatatgctgtattgatgagtttgataaaatgtttacagagcatcaggctttacttgaagccatggagcagcaatgtgtttctattgcaaaggctggtcttgtagcaagtttgtcagctcgaacttcagtgttggcagctgcaaatcctattggtggccattatgaccagatgagtcactagataaaagagtgtcagaccatataatagctctccataccaatgatgttgataatttcagacccaacaagaggaccagaacagggtcacattttgatggtgatccggggcttggagttggtggaaattcagtagcttcaaggctgaggctacacccagagaaagacaaggacttcactccattatctgggcaacttcttcgcaaatatatatcttattcaagagaacatgtcttccccagaatgtcaaaggcagcagctgcaattttgaaagaattttatttgaagctgagaaaccgcagtgcttctgctgatggtacacccatcacagccaggcagttagaaagcctagtcagattagccgaagctcgtgctcgcgtggatctaagagatgaagtgactgaagaagatgctcaggatgttgtcgatatcatgaaagaatctctgtatgacaaatatgttgatgaacatggttttgttgattttactcggagcggtggaatgagccaaccgaagcaggcaaagaagtttctgaatgcattaaacaaggaatctgagttgcagcaaaaggactgcttctcgagaactgaactttacaccatagctgataagatcagcttgcaagttccagacttggacactcttgtagaaaagatgaacattgccggttaccttattcaaaaaagatcagggatgtatcagctggtgactgcgccatattaacaatgcagccaacgaggtcaagatggagagttttcttgaatgaaactagaatttgcacctgctttgtctgtactagtgcctgctctagatctccagacactctggaaggccttaatccatttcaacataattgacatgtacctttcagctcatttccccccgtcccgtgagagatgtatggtttggaagctatgcgtatcgtcatggctgcgcacatacgtgctgcagtgtacaggcgactgaagtgcacgcgtcgcaggatgagcactaactttggtagcttggtgtatgccatggttgcgatatgatatattattgtgaaacaggaacctctagcggttattagtttatagatattcaagtttgccaatgaaacatccagaatagcatatgatgcattttacaccccttacacccgatcactcggaaaacatctagcacgctgtaaattactccctcagcaatagtaattattgctgttactgcgctgcactgcttgggaacactccttttcaaagccacat

SEQ ID NO: 41064 - DNA, 1678 bp, Zea Mays
ctatcacctaaaatctaggatatattattccccccaaaacaaaccctaaccggccggcccaattctcacgcgctcgccgcctaggagcattcacgttggcggcgggcggcggctcggttcctctcctccaccgcacctccaagaatccacctccacgactgagctgacggctcggtagcgccatggcagttcaccggctccaaccttccccatccggcctacagtgctccaccgcccggtcgccagtgctcctccatgggccacggctgacgggtgcacgcaccgggcgacgagcacccaccaccggttatgtgcaccctctctccttcggtccttcctccctttcttccgtgctaagccaccgagcacccaagcggtttggcctgatgccacatctctggtaggagaggtggatttggtggacctagattcgatgtgcagagagcgacttggaggtggctgacatcttcaagcactgcatcatgcagttacaactactgttggccatacagggaaatgctgggcctattataccaattgttcaaagcatggaccttgtataattacatgtttttatcatagatagattaatttctgaaatgcccatagattggtatatttgtggaaatttgtggtataagatttttctgttgatgtttgcaggttatttttccagcacttgacattcgagtgaaaaatgtcgcagggacatattctcttgaacataaaggagaaaatgatctcttcgcacatcagacaaggcttctactctttcagaagaaagtcatttttaggagaatcgtgaacaaaatgaccagatgtttaggcctggttggaaggacatttttcgaatgaatcagagtgagctcgaggctgagatttgaaaaggtctctcgagattctactcttgatccaaggaggaaggcctatctgatccaaaatctcatgaccagccgttggatagttgctcagcaataatcaccacaaccaagcgtcgaaggacataatggatgtacacgatgacctggatgtgttccttcgtaccgagacccagggaaacaaatatttgggctgtgagcattacaaaagaaactgcaagcttgttgctgcatgctgcaataagctattcacttgcagattctgtcacgataaagttagtgaccatacaatggacaagtaactcaagaggtccacttattgactcttatgaccatgtaattggtgttaatacaactacattaacatgtaaaggttggtagatctggaaggtcttgatggtctaatacctatctatgagtacggaagaaaaggcgggagaagtcggtctctgcagcatcgcgcgtgaaaaaaaatcagccaattccacgagcattgatgttgtcatgacttcaaaagaggagagaccatgctaagaataatgcattatgacatttgtcaggcttacatatcgactgtttgatatggatagatgtataggtttatgaccaatccagttcaaagcaattggagtatagaagaaataaggagaaacaggaaagctctgtacatcttgcattttgctgttgtttgtcgaagtttcaatgtctgtcgcgtgacaaaatatagttgtaatttatattttggcatgcacgaaacaggtgtatttattcatttttgaacgaaattttatgtcaaatcc

SEQ ID NO: 41065 - DNA, 2923 bp, Zea Mays
cttctttccagagctagcagtgtcagcaaaagcagacacgggtttgaaaacttcttgtatgctcacgcgttcggcgctgattgttgaaagtagctttgggactctgaggacctaaattctaatcaattgtgaaatctgaaaggtgtagctatttgtacttctggaggtgtgggaagaaatggaatgcaacaaagatgaggcccaaagggcgaagggtattgcaaagaagaagtttgaagcaggggacttgcagggtgccaggaaattcgccctcaaggctcagactctctttcctgcgcttgagggcgttgatcaaatgatcgccacctttgatatctatcttgcttcagaagggaaggttgctggggagaaggactggtactctatcctttccgttcccatgaacgcaaacgatgaaaagatcaagaaacagtacaggaagttggttcttcagttccaccctgataaaaacaagtcagtgggcgctgagggtgctttccagatggttcaagaggcatacacggtgctatccgatagaaccaagcgagctgtatatgaccaaaagaggaatgtgaggacattccaacagaggacagcacaatcaggtaaagcaagcacggtccctggtgcatccaatggcttctataatttcgcagctaatgctgctactgcctccaagcggacagtaaacaagcaaacagtgggatcagcaacacatgccccatctgcaccttcaactgctactcgtgcacctgtggcaaagcctgatacattttggacctcatgcaacaaatgcaagatgaactatgagtacctcagggtgtatttgaataaccatcttcgctgccctagttgccgtcagccattcctagcaaaagaagtacaaaagccaccagcagggaacgtggtacaagattcaaacatcagtggtgctaatcaaaacacaaccactaatagaaatttgcggtggggtccattttcaagggctgctggtgcagctagtgccactgcatcgtctgctgctgctgctcaagctgctaatgtagttcatcagacatatgaaaaagttaggagggagagggaggaggcacaagcagcggcaacaagggaagaggctcttcgccggaagtacaatcctctaaagaggcatgcaagcatgtcagggaatgctaatcttggaccaggtgatgcaacatctggaaagaagacaaggactatgactaaagatgctgaagttggttcttcatccaccatatccagtccaggagcaaatttttttagagtgcctggtgtgaatatatccttttccaacaacattggggcctatgagtttcaaggcgttgatggtggccccaattggaaacccaggcctctgatccgcttaagtttagtcaagaccttctctcagatggatcttaggggtcttttgctggaaaaaacgaaaactgagcttaaaaacaagctaacagtaataaaaagtaaaacatcccaagttgctagtgaaaaagcgagcaagaaaattgcggtcaaggaaaatggtggggataatgaagctcttggaccagaagatcctacagctaataaagattctcatgattcagaacagattggttctaatactagcacagatgctgaaaatgaagatgatgaccccttatcttataatgttcctgatccagatttccatgattttgacaagaatcgcactgaggaatgtttccaaagtgatcaaatttgggctacatatgatgatgaagatggaatgcctcgttattatgcatttattcagaaagttctttccttgaaaccattcaagctcagaataagctatctcacatcaagggcaaatagcgaatttgggccttcgaattgggtttcttctggcttcataaagacttgtggtgatttcaggattggtaaatatgaaagctgtgatatagtcaacatgttctctcaccagatgaaatgggataaagggccgcgtgggcttatcaaaatttatccacagaaaggtgatatctgggctgtttatcggaattggtcctctgactgggatgaagatactccagataatgtgctccatgcctacaatgtggttgaggtactggatgcctatgatgaagtccatggcatctccataattcccttagtcaaggttactggatttcgaacagtatttcagcgccatcaggatccaaatgctaccatgaagattcctaaagaagagatgtttcggttttcacacctagtgcctttttacaggatgtcaggcgaagaagctgcaaatgtccccaaagatagttatgagcttgatccagctgctatttctaaagaactgcttcaggggatcacggaagcagtggagccaaatggaacctaaggcagttgatgatgcctgccttggttaacctgccattttgaagtaatcgagcaaaaagatattaacacttgctagttttatagatttccttctgcttttgactatcacctttgcatagaagagatacaatggggccagtcattcaggagtcagctgcttagcagcttctggtgtaattagcaggctctgatatgaattttgctgtgatatgttacttagggcttgtttagatgcatgtggattggaggggattgaagtgacatataatcccttactagtccatgcccctcaatcccatgcatccaaaccagcccttagcaactctagatgtgggtgtactaacgcgaagctcaagcagtttttatggtcagtgttgacacctgttatctgtcttatcttgagagtggatctgttgctttttttgcgaattcaaatgctaattgaactcgtggccgtttgttggttctgttattttgaaacacccatacgttgtatgtgaaaaactactagcattgcttcactcagtaatttcataaattccag

SEQ ID NO: 41066 - DNA, 397 bp, Zea Mays
aaactctttattgcaaaatgattacaagtttatcaagattttattatacctcatcggagtgattacaaaagaaagtgtttcaaaagaattacactttaaaatgttatagaatatttgtaaatttgaaatacatgctagcttaagtgacaatcctcattaaagaaactataggagggatatacttatataagaaggccgagcccaccggcacttagcaccatccacaacataacaaaattacaacctgaaaaacaacagggaataaaaccctgagtacgcaattactcagcaagacttacctgactaaagaaaagactctcaagggtatgctggtttgtcgggaatcaaggtaaagcttatcaaatttcaaagactcatttttgcagaaaagcttact

SEQ ID NO: 41067 - DNA, 4366 bp, Zea Mays
agattcgtcactgcggctatactgaaactgggtcaagcaatcttggatatcatcttgagctggaaagcaagaagaaacatgtctcttgttgttaagctacgatacatcttgaagttactatcagctgcttcttgggttgtgattttgcctgtaacttatgcatacacttggaagaatccaactggtcttgcaagagcaattaaaagttggcttggtgatggtcagaatcagccatcattatacattttggcagttgtgatttatttggcaccaaacttgctgtccgctacactatttcttttccctgtaattaggagagctcttgagagatcaaatcttaaagtcgtaacattcataatgtggtggtcgcagcctcgcttatttgttggaagaggaatgcatgagggcgcattctcccttttcaagtatacaatgttctgggtcttgcttttggccactaaattggttgtgagcttctatgtggagatcaaaccacttgtgcagccaacaaaagatataatgaaggagccaatacgaacatttaagtggcatgagtttttcccccatgcaaataacaacattggtgttgtcattgcgctttgggctcctattattcttgtctatttcatggatactcaaatttggtatgcaattttctcaacgctaattggtggtgtctatggggcttgtcgccgtcttggtgagacatctgaggataccagagaacaagaaaaaatagccgcaagatttgctcagatttggaatttaattatcacaagcttccgtgaggaagatttgatagacgacagagagaaggacttgttacttgttccatactgcaaagatcgtgatatggatataatccaatggccaccattcctgcttgccagcaagattccaatagcattggatatggccgcagatagtggtggaaaagatcgtgatctaaagaagaggatgaaatcggatccatattttacttatgctatcaaggaatgctatgcttctttcaaaaacatcatatatgaactagtgatcgattcacgagagagaggttacatacaaaagatcttcgatgcggtggatgagcacatagcagaagagactttgataaaggagctgaacatgagtaaccttcctaccctaagcaagaagttcattgagctgcttgacttactggaaagtaacaacaaagaagatcatgatcagatcatcatattgttccaagacatgcttgaagtggttacaagggacataatggttgaccagctcagcgaactactggaattgatacatggtgcaaataataaaagatctgaaggaatgacatcacttgaccaacaagatcagttgttcacgaaagctattgattttcctgtaaagaaaacccaagcatggaatgaaaagataaaaaggcttcgacttttactcacggtgaaggaatcggctatggatgtccctacaaacctggatgctaggaggaggatatctttctttgctaattctctttttatgtcgatgccagatgctccaaaagtgcggcaaatgttgcccttctctgtcttgactccttattataaagaagatgttcttttctcttcacaagcactagcagaacagaatgaggacggagtttccatccttttttatttgcaaaaaatctacccagatgaatggaaaaattttcttgaaagggtgcattgtgagagtgaagatcaactccacgagactgagcattctgaagagcagcttcgcctttgggcatcataccggggacaaactttgacaagaactgtaagagggatgatgtactacagacaagctttagtccttcaggcttcccttgatatggccagagatgatgaccttatggagggttttagagcagctgacctgttatctgaatctgatgaatcaccactattgactcaatgcaaagctatagctgatatgaaattcacatatgttgtatcatgccagcaatacggtattcagaaacgttctggtgatccacatgcacaggatattctgagattgatgaccacttatccttcacttagggttgcgtacatcgatgaagtcgaagagcctagcaaagacaaaaataagaaaatagagaaggtttactactccgcattggtgaaggcagcagtaacgaagcctgatgatcctggccagaaacttgatcagggatatatataggataaagcttccaggaaatgcaatgctaggtgaaggaaaaccagagaaccagaaccatgccataattttcacacgaggtgaaggtctccaaaccatcgacatgaatcaggaacattatatggaggagactttgaaaatgaggaatttgttgcaagagtttctgaagaaacatgatggtgtgagatatccatcaatacttggtgtaagagaacacatcttcaccggaagcgtgtcttctcttgcatggttcatgtcaaaccaagaaacaagttttgtgaccattggacaacgtgtacttgccaatcctttgagagttcgatttcattatgggcatcctgatatctttgatcgacttttccacctcacacgtggaggtgtaagcaaagcttctaagattatcaatcttagtgaagacatatttgctggatttaattcaacactgcgtgaaggaaatgttacacatcatgaatacatgcaagttggcaagggcagagatgttggtctcaaccagatctcactatttgaagcaaaaatagcaaatggtaatggtgaacagacgctgagccgtgacgtgtaccgtcttggacatcgttttgactttttcagaatgttgtcctgctactatactactattggtttttacttcagcacaatgataacagtttggaccgtttatgtattcctctacgggcgcctgtatcttgtcctaagtggccttgatgaagcattagccactggaaagaggtttatacacaacgagcctctccaggttgctctagcttcacagtcttttgtgcagcttgggttcttgatggcgctgcctatgatgatggaaattggtctagagagaggattcagaactgcattgagtgactttgtacttatgcagctccagttagcatctgtgttcttcacattctctcttgggaccaaaactcactactacggaaccacactgctacatggaggagctgaatatagagctacagggcgtggatttgtggtgttccatgccaagtttgctgagaattatcgattgtattcgcgaagccattttgtgaagggcattgaactgatgattttgcttattgtgtatgaaatatttgggcagtcataccgaggagctattgcgtacattttcatcacattttccatgtggtttatggttgtcacctggctctttgccccattcctgtttaatccttctgggttcgagtggcagaaaattgtggatgactggactgactggaataagtggatcagtaaccgtggaggtattggggtgccgccagagaaaagttgggagtcatggtgggaaaaagagcaggagcctcttaggcattctggaaagcgtggcactgttcttgaaatagtgctttcgttgcgcttctttatttaccagtatggtcttgtttatcatttgaacatcaccactcacacgaagagcgttctggtttattgcatctcgtgggtcataatctttgtcattttgctcgtgatgaagactgtatcagttggcaggaggaaattcagtgcagagttccagcttgtgttccggctgatcaaggggctgatattcataacgtttatctctattatcataatcttgatagcaatcccacacatgacagttcaggacatctttgtttgcatccttgcgttcatgccaactggatggggtttgcttctgatagcacaaactatgaggtcagctatttcacatatggggctatggggatcggtcaaggcgcttgcccgaggctatgagatcatcatgggcttgctgttgttcaccccgatcgcattcctcgcttggttcccgtttgtttcggagttccagacaaggatgctgttcaaccaggccttcagtagaggtctgcagatttctcgtatcctaggcggacacaagaaagaccgggctgcacggaacaaggagtgagtagccgagcagcgtgagcctggtagtgctgacctacatacaattcaaccatgccccacgtggcattatacttgtactggttattatgccaggttgtatattgcaaggaaaggaattcatctctgctaacgtgccagattgtatgtgtggcagcaggtactcgatcggtgagcactcctatagcttttttattattatttatgggtaaagtcaaagaaactaagg

SEQ ID NO: 41068 - DNA, 3590 bp, Zea Mays
aagcctataccagctagggcgaaaatgtcttccgcggtgctgaactgtattcgttttttttaaaagaaaaaaaaatcaatatgagtttggttagtcttcattcatactacataatataagtgcctcatggtcatggaagtactaatgtcaccaaagaaagcatcagcctaaagctgcagggttgatgtcccaatataatcttgagaaggccagcacagtttacactgaagccaatgaggcaagtcgcggcaaattccagcttactagtataatatactgataggcaagaaatatttggcctttttgaagaagtttcaaatttcaggcctttttgagcaagaaactcacagagctcgtgacgtatttcactatgctcccggtcccggacgattccgacccgtcctgcgcagccttggcaacgacagcgcggctccttattagcttgcctgcaccacgcgcgcagcacggtgtggccaaggcaagtttacctgaaagcctgggaggtggcagccgcggggggcggccgccggagagggtcctcttgccggatggcggcgcgagagatgctgctggctgggcgacggcgagggcacacgccatcatcatggctgctgctgctgcaggccaccggcgagagccgctgcagaacgagacggaattgagaggcacgcacgaggcggcgcgcggtgggtgatgcgtgtgggggtgggtggaaccacgcgacgaagactagagctgcttgcttggcctcctccggcgcgtcttgctgcggcgggcgcagcagataggaagctctacactagggattcggtcggtgatggagatggagagccagccagtaaacaaacagcagattccttaatcaggatggacacgaaaccaaacaaaacaaaacgctagacacaagaatccaaccggcaccatctgagcaagtaccagcgcgcccgtgacgagccctgcccctgcgcacggcgccgcgccgtccgagcctctcggtcggtcctcgacctcgagctcgaggagggaaggaaaccccgtcgtcttcgcgccatcgcgtgtgcggacccgccgccccgcgccaaagggaggtcacgcgaccgcctgcgcgccttgtctccttgcccccggtttatttgtccccgaacgctcacaacttcgcgctcgtctgcgtttgccatttctgtgcaaggtagcttgcacccatcgtgaagccgagggagcggcgacacattggtacctgctgtgctgcagtgctctcgtcctggtcggagatggacgctgaggccggcgaggcgggggtgcagcagccggccggggcggcgtccacgagcaccgcggcggtgccgttcgacaggtcgtcgtcgcggctaggcgcgccgggtgccgagagcttcgacggcgcgctcagggagctcaaggatctgcggtctcagctgcacgaagcggcggactgctgcgccaaggcgttcctcagcaccgacaagaagaagatctctactctcatgcatgcgaaggattctggagggtacaaagggttacatatgcgatgcggtggtagctgtgatcgatcacctggggacagtttcgtccaagcttgagcacaagctgcaggagaggactgaagtcgcacagacggaacgaaagatcaacttcttgaaacaggtgatcttcggaccagagcttcattcttctctgtcactgcgattttatcaggagatcagcatagacatctgcatgcggcaaggaggcttttgacatgcgagcagtacgccgtttctctgaagcttttgtctgtacgaggggaccctgacgccattcgatatcatcgccgttacatctcacaatctactcaaatgtccaaactgggaaacggaatcggctcgagtgaaaatggtccacgacttccgcaaattactggctcaacagtatctggagctaccctcactctcaagccatatgatgttcaaccagccatcggaaaagaacataccgtggtatcagaaaacgttgaggacaacccaaggaccataagaaggtcattctcttttagagcagaggatgttcacgttgttctaggcgatcacaaaaagaagggcaaccatgggagtaacatcttgtcatttctcaagaaaaccaggcgataagcataagaactttgctaaagaaataaacataagaatcaatgcaccaacgggatagagtggaactgtagaggagtaccttttcccccctttggatagtcttttctttcgtggtactattggtcctaccggtcatgcagcgctttcactgtttcgcaataagtactgatatactgaaagcatttcttcaatgatatgtctaggttatcttcaacaacttatcaattctcatactcatatttaaactctactctatcaatattgcaacctacaatataaaacaatgttttgggtgactatattagtgaaccgctggacacggtcgatctaagtcctagggtcccttatgtcctagagtgctataaagaatagctattcaggacagttgagcaacattttaaggtattaggaccataccattttatttgtcaatcgataaggagaaagaggacacatgatacatacacactgcaatctggacctctctaactatgcgcacgctggctcccactcgtgtccaggtttagcatgaccatcaacttgtgtcatgctccctcttaactctctttctagtactctatgtatcctgatgttgttacactacaataacattcatcaatgtaaaagaagttttgatcttttattggtgtgccacacaatttaagaccatagttccaaggaagacatctcatacaatcatacagaacgtgattgttgaaaccacatatgtcacatatcattctatggtagtctcttgtatgatttctcaaaccacaaataagaatcaagtaaaaagtcttacttgcttgaataaatgacttgaccaaataagaatctggagctactgttaatgatatatatcaggggtaccaagatcaacctttatgaagaaggacatgtacggatgagcctatgggcttggccgagagcccaaagactcgatgatcaagactagaaggaggcctgaagtgacaaggatttcagaagcgtatatatggaaaagatcttatcaaaatagaagatatgccaaatgttctaacacttgtaacgatatagttcgattcacatacaaatttgggaccaactcggtcacatgttcaactaggtaccgagtctgtgtctatcctataactgatgtcgctccttagactataaaggagggtcaatgagtgattacgggcctgtttggttcactacctcagttgccacactttgcctaacttttctgtctaaggttagttattcaattcgaacgactaaccttaggcaaagtgtggcatatttagccacaaaccaaacaggcccatatatattctttgtaatctcacatgtctgtatatatgtgaggtcgaagtcttttagctctaatttttctctgtttatcgatggctttgatacaatagtcaaagccttggaatcgtacatgagaagaggaagtctacaaaattt

SEQ ID NO: 41069 - DNA, 1027 bp, Zea Mays
cctgccacactcggcgccgcgcctataagtagcgcgcatgcgccggcgcagcactgcacccacggctcgagctcgcagcgacaggcacaggcagcaaggctggtttccttcctcgtcgaacgtctgccgctgctcgcgatggccggacgcggaggaggtagcaagagtagcctgtacgcggcgctgggcgtggccagcgactgctccgacgccgagctgcgcagcgcctaccgcaagctcgccatgaaatggcacccggacaagtgcgccggcgcagggagctccggcggcggcgcggacgccgccaaggccaggttccagaagatccagggagcgtacgccgtcctgtcggaccccaacaagcggatcctgtatgacgtcggggcctacgacggcgaaggcgacgatgacggcgccggggagatcctcggagacattctcgaggccatgagccaggcaggccctgccgccgacaacggcaagggggagagcctggaggacctgcagcggcagttcgaggagctgttcctgaggccgtcgccgtcgtccttctcgccgcagaacgacgcagctgggaagtcggcttccaagagtaggcctgctgggaggaaatagacaggacactgcggcgaataggtcggtccagctactcctgttccagataagctacgacctacgaggtaccgatacctggccaggagcccaggacagcgacctgcgacggcgacgaggctgccagtgctgcacgctcaagtacatgctccgagttgtagctactactgtagatcggcacggcagtcgccagaatggtaccataaggcggccgtacgcacacacgcatgaacgctgtttttaccatctcaggttcgctgcaaaatttccagcgtgttctctgtaaaatccctgcatgattgctataaagaaattcttcgtgggtactaataaatggagtgctcagtaatggccatcgtatgagaggcatatgctaaacagcaaaaaaaaagttttttttttggcaaatatcctc

SEQ ID NO: 41070 - DNA, 3567 bp, Zea Mays
cttgacctcttcctcctctctcgcctgctccacccccgccaccacaccgctttgccgctccgatctccgcacgctccggcgagaggggcccactggacagccagctcagtaccctcctacggcgacgctgtcgcacgcgccaccattaggtgtcacccgtccttgcgccgccgcacgcatcccaacgcagccggaccccacggcagccgccgccgctgcggcgaaggcccagcccaggccacgcgcgtcatcctcgcgccgaacgacgcaaggtggagcggcggtccactccccgcgcgcgcttcgcctccgctgcactgaaaccgtgccctgctggtgcgagtgtccggatgctaccaaatcctagggccgggcatcgactgactgactgagtgagtaagggagggagggagggaggagccagggcctcgccgcccgctgaacgagggagtgatgcggcgcggaagctcggccgcatgaggtgcctcgtcggcggcggcgtccaggacagcccgcgtgcagcggccaagagggtgtcgccggcgtcgtggcggctggacaccgccgcggcggaggcggagacgggcgcggggggagcggcggctaaggggccgagggtctgcttcaggccgccggatgtgatggagacggtgcacgaggtggccatttacatccaccgcttccacaacctcgatctgttccagcaaggatggtatcagatgaagattagtgcactgtgggaggaaggtggcaacagaacaccggcttcgcctgccagggtcgtgcaatatgaaggtggattgtgcagcttctgatgttggtggagacgatgcattaggcatttggaaaatagatgatattgataatagcttccacacacagccgttccggatcaagtatgccagacaagatatctatctgtcggttatggtgtctttcaacatattcaacagtgaagaggagggtccagcagcttcagatgtgatgatgaagtttgagctgatatatgccccaacactagacaatgggtctgagcttcatgcttctagtgccacatcttcagcagctgtgcacgaatttaggatcccacacagagcacttctgggtctacactcatactgtcctgttcactttgatgcgttccactctgtgcttgttgatctgacattgcacatagtgtacctgaaagctggtgcagctaaatcatcactgaaggtacacaggtaccagagcaaggtttacgtcctacatcatatcacattgttaaggcattattaacttctagaaaaatgttgcttgaagaactgaacaaaatcagtggtgctattggtaagacagtagaggatttagatgttgctgacttgaatcttggtaaatatgagtcatttaatccatcaaaatcttggctaccgaattctagtaaagtgttccccgaaactggcaaaggtgtgggacagttggctggaattttacatgacttcttggagagacccaacgatatggttaatggtacagatgattctttattgtatactcttccccatgaagagctgtttgaactgtttctaactctgagtggacagctttcacttctatggaatgcattcttgaaatttcataggctaaataaaacaaagatattggactacttgcacgatgcttgggctattggcaggaaggcagaatggtcaatatggactattcactcgaaaattgagatccctcatcgctatctgcagagtatgagtgatgactcaccccaccgttattctcttagagtttctggctcaaggaagttccatgatgaccatgtacagagctctgcttcacgggcggaactacacaggaaaagcatagcacaaatgaagattaatccacattatgttcaagatatgcatatatatggtgatccttcacgtgttcctgttgttcttatagaacaacatgtcatggttgttccacagcatagttccagcaaggatatggcttcaaatgtttctgaacaaaaggatactattgtggtaccgaaactacaaggagagcctctggtacccaaaagtagtgctggtaaaaaaagtggacgcatattgagagctgtcatttttgtgcatggatttcagggtcaccatctggatttacgtcttgttagaaaccaatggcttctattggatcctggagctgactgcctgatgtctgaggctaatgaagataaaacatctggagattttaaagaaatgggtagcaggttggctggggaggtagttgccttcctgaagaagaaaatggataagctttcgagatatggaggctgcaaagagctgaaaacctgcattgcaaccatacttgaagaacctttacacttacatgtcaatatcagggcctcacttgggttactggtacagttcaaattctttgttcaattctggactctggctgctgaaaaagctcaagggtgcgcaatgcatccatcaactcactttcagtgatgatcaagacccccagaatacatacttttataagctttgcaagttgaaaacgttggagaacttccaaaatatcatattgctgtcatcaccacaggatggctacgtaccatatcattcagcgagaatcgagctctgcccagctgcatcatcggacacgtcaaagaagggccaagtcttcacagaaatgctgaacaactgcttggaccagatccgcacgccctcgtccgacacccggacattcatgcgctgcgacgtgaatttcgaccagtccaaccaagggcgaagcctgaacaccatgattggcagagcggcccacatcgagttcctggaaaccgacctctacgccaagttcatcatgtggtcctttcccgacctgttccgatgacgacgacgacaccgctcgtctttgtaatactggcacataccaaaccaataacgcacactacccagtactgaccaggcaaggaatactaaagctcgctccaccagaacccaacaccgagacaggcaggaagcactgtgaaggtcctagaagcaatggtttttccagcttgctagatcctattctgtataagtagttgattctttttcatttcattcatagtgctgtagattgcacccttgctgtgaaaatttataatccttgtcgtctgttgtaccttacacttcagtttaggatgtgctgacaatcagtgagcttattatgtccaaataagctctctttttttaacgtttgatttttagtcaccttcgttcttgtggtgctgtaaatcctgcaacatgctttgtacatgcagacgatcaccctgtctgatactagatccggatggtcctgccgtccaggtccagggtgttgtttcagtgtttctgtttgacgaaactgctgtaggaatatataaataatatttttttggttctggcatcctgccgttggtggacctgcatcagcatctgcttctagaactgttccctcatgccgtccttgtctgtttgttatgctcgtgcgagtgctgccgtatgtgtgtgacagacatgctggcttttccggtggcagctgagaccaccatgacctggcgtgtct

SEQ ID NO: 41071 - DNA, 4647 bp, Zea Mays
cctgccgcacttcagttctctatcccattatatttttaggaatgaaatgatgaagtcctgattctcttacgccacctcgggataacacgttcattcaaagccagaggtctagggagctgagtttctacctacaacattttcctcagctttatttcttgtgctacctatgtaacaaaatacatactaaaacataaaaataccatgttttgcagtagttgaaagttcattcaaataaaaaaatttggacggctgaatatcgaccatcaacaaagcaacaaaggaaatggatggcaacgacgaaccagatccccctacttctcatgtgacttctcgtgtaactgatacttgggcatttactcctcaaagaaagatttcatccatgactacccacaaaaacgttgcactagcatgaccgattagtcccccaaggtaccaatgaatacaaataattcactatattaattagttacaatgactaacaacattaatacttagtctgttgcctctaacattacagtgacctaggtctgcatctgtactttccacgacatgttcaatctccttctacggccatgtctagactttccacatcggactcatcaagtttcacactgccgacagccttagccggtatggagcttggcctcgagtgtaggcccccaggaatgtcaggctaacaccaagccaagctgggttcgtcttctacatagtctcgtttgccaatatgcgatggaccccgcgctggcgagggaggtcctggccgccatcaaggctgacgccgcgggcgctctcagtggatttgcggtggcagtgatgctgttcgtggccagggtgccgaggttcaacgagggtgccgtgagtgtgctccgggatgcggtcgtggtgtcccgccgggattaccgaatgtcaaggtgacggattgctcgttactctacctattgtgattgctagtgtttgctttagaaatttgttctgatcagatggcggatgtctctcaggcggtgcaagtggttgccggattgtatggaaggggaatatgcacgggccactcaatgtgtcgagaagggaatactaaaatctgtcgacgagagcattgttggcagggagcatgttgtgccaagcattgttcaggtggcttttcgcctgttagaagtctcagaaggtgatcaaggtgaggaagctggcttaggtgaaggagtaatgagcaccgaagaaataggcattaatatgctcaaatcattgtttgaggtccatgaaatggcacggactgagataattgaacagtgcaagttccggattctctcggcaaagcctcagcaaagtgtgccagttctcaggttgattggatgcttgattttgagtcatccatttccaatgctggaattcattgcacatttaaaggagttgttggattatttttcttttatgaatgacaagatatcaactgctttgatcagttgcatcttgccactcacaaagttcagccgtgatctgaaggtcttcagccttaacaatattttgtgcttatgtggctgtaaaaaactcgtttgattgttttagagtgtattttacaggattacgtaatactggttgtaagaaaggcgatgttcaagagggaggacatggttcgaattgctgctacaaatgctataattgagctgattattgcagaaaacaagaaaaatgaagccaatccttttgaagattcaacaagtcagccaagctctagccaacagcctgaaacacatctagagtttggtaggtgtctctttcaggaactaagtgggttgcttcggagatgtctctcacatcagctgtttctgacaatatccttgattttctctggcctcacttccaaaactattactcagaggatgcagaatgtcctcttaaaattggttcatgcttcaaagtagagcatgccaaactatgcattgtggaacctttagattgtctgctgtcatgtatctcaagaattctgcaaattaagcaacatagtaaatgtgaacgaccacgtgatgcatattggaagtgctttggttttgctgcttcacaagataatgaggttggacgagcatcatcaagtgatttattcgtgaaagctttatcaagcatccaaaagtatttgaggatatccctcacaggtttgtgatatatcatagataaagcaagccaatcagagcaaaataatgctattcaagactcaagaggtttgtgcttataatttctgcatgttgacagagcagagaggacaaagccaagaagctggatctctttcttcaccatcagagatggctcattgtcataactttgctatgcttggaatcattgaggtttttattgatttttctgcttcaaaactggagaaagcctctggcaaatcgaaggaaatgatagaaaaagaaatcgtggagcttgttgatgcgcacagtggctttgagaaaaaaattagcagtggtagggaaaggatagcacggagaagagcaaatgctggtgatgctacagataagcacaccaacgaacccagggagaattctaatgcttcattgcagaaacatcatggaaacaggggtaaatttgctgattcgagtttgtatgaactttcggtaatgtgtgtcaagcagtgccatgctgataactacaacaatgttagtcaacattctagccaaactaaattgaaccagagctccaatttgacatcctttgtactgaaagcctttcttgaattgttgaaatcacttgcatcaaagcacagtagggacttcacaataaagctgcatggagattttaaaaagttaagccagccaataatgcagctagtatggtgttttctgttagacccaattcaagaaaatggtggaagcaagaagaacatgacccaaggaaagaaaaacactgagtgcaaaaaggatcagttatatttggctctgacatgcctaaaaaaattccttgagccaagtgtttcaggagaacactctagtgatatcattgattttctaatatctttggctccacctaatatagaggatacaatgggtactggggatcttgacaataatgataccactatggttgaagatagaagcacaagaaatgtccatgtgattttgaacatactgaagacgttatatgccagacttcttacccaatcagttttacgtgaatctgaggctgtaattgaattgattctgggtatttcaagaaaactgcaacttgaacgaaggcatcttgttggaaaatgggctacagatctatgtagaaagaaaaccatgcaaagtcctagaatggcacgagagatgttaaaactagctatacatcttacaccagctccagatgacatgattcttgtttatgaggtgtctactgagttgatgaatttaatgacctctggagatgatggagattcttctgatacatttcatatcattaactgtaaaacaaagagctcactcgctgctctctctcttcaaatggttgagtcatctcttactgaattggattggggctttggaaagcttaaagcaatgcttacattaggttatgattgtgctaacattgatgaagatcaaccagcagatgaaataatgctaaggttggctttggagaaagcactctactcgagatcaacattagtagttcaagtgctctcttcctttgcacatatgagccctatggatactcaagcagaacattttctgaaattgactgtcaagttctacaagcttttaactcgcatgtcaaagtcccagattgtacctaaaggctacagacaatccattccaagcctcaagtttcagaaactggcagaagtaacttgcaaaatgctcaccgctcccctttatgattttgtgtttcaacagaatcagcaaatacccataaagggaaacctcgccaaaattagaagagaaaccaaatgtatccctgatcttatttttcagattgaggattatgagaagtatttaatacagctaagcaaactaactaaggtaaaccttttgaggcatgccaaacgcagtgtagcaagagacttccagataaaagataaatctgggggacaacaggaagatgatcacattccagacaatgctgcagcatctgataacgaggctgataaggacgcaatgggtccaaacgcaccagttgaatcatgtgctgacgatgctcaaaaatcatatgctgacgaaaatgcatcatgtgaaagtgggcatgatgaggatgcaggaggtccaaacactccagcagaagcagatgctgatgaaatcattaggtctagcattccatatggtagtccagtccaggagtctgaatctgatagagaagaggaagaattattagcacggacgaagagagctaagacaaaacaagttgtgcaggattctgatgaggatgcagatgagtaggtttttaaacattatcaatagttcaattttcgaagcgtctattgtgggcaacatcatgccaaggtgtatatacataagtttttatgggttatcttgctgattatagacgatgaacacaagagatgtaaaatatatggttttgcaaaaattcttgtgggccatcatgttgattatagaccatgcacagaacatatgtaaaatactttattgtaaattataagttattctaattttctttaagtgaaaa

SEQ ID NO: 41072 - DNA, 297 bp, Zea Mays
ttcgccgcgctgtgccagcaatatttctatcctactactagataatgaatgatatggacgcattacataatgaaattgttgttttcctatcctactggtcttttggatgctagcggaggagtcgcgcatctcatgtgtggacactggaatccatcatacggtatatatatttttggtgcggtttggggtaggtgtgcttataaaaggatatgacgagattgttctaagaagaagatctccgctttctgcaccttcgattggcgatgacagtaaatcagtaaatgaacaatagataaa

SEQ ID NO: 41073 - DNA, 2390 bp, Zea Mays
ggctccacgaccacgagcccaaccgggtagcttcttcttcgtccgctgttacccacaccgcgggaagcctccatgcgatcccctgggcggcgcctaccagcgccggcgcggctcgtcgcggctgccctcctcctcgcagctctcaccgggggagccgtcggcgccgatgggtacgggcgggcgaggagggtgtacatgaagaacaaggtcctggagatcatgatgaattgaagcctcttactaaaagtttcacggactcgcttagtgagcttggcaatttaaatgtattaaagtattgacaactataaggattttggtctgtattatataaatttaaggtaccacaacttaatgttacccatgattccctttttctagcttgaacacttgccacaggattatagtggatccgcgttgacactggttgagtcattatcaaggtaacctcacagagtttgagagaggagttctctggctttcagaaaatctgacatttgatgttgatgctcggattaatctttttgagtgtaacataagacttcttggggggcttatttctgctcatattcttgcaaaagactacagcagccagtttaagcatgggctgtatcaagatcaattactacgtcttgctgaaagtttaggcaatcgttttctaccggcatttgagacacctactggattgccgtattcatggattaatcttaagtatggggtgatggaaaatgaaacaactgaaacaagcacatcagggtgtggctcccttatacttgaaatgggtgtgttgtcacgtttgactggtgattctagatatgaagctgcagctcttcgtgctctccgcaagttatggagcatgagaagttcactgaatctagtaggcaccacacttgatgtttttactggcaagtggattcagtattcatccggaattggtgctggtgttgattcattttatgagtatctgattaaagcatatattcttttcggaagtgatgagtactgggatatgtttcattcagcttatcttgcggtgcagaagtacttccgacatggtccatggtatcatgaggctgatatgaggactggagaagcaacgcactggcagctaactagccttcaggctttctggccaggtcttcagacacttcttggagacgtaactgctgcaaatctatcacaccgtgagttttacaatatatggcaaagatttggtgtgctacctgaaagatatcttttggactatggaatgttgcatcctacagagaagtactatcccttgcgtcctgagtttgctgagtcaacattttatctttatcaagctactaaaggtgcacccaatacacaccagaaggatatattcgttttatcttcatccagctctcatgttttcatctagggttgatgtcctattgagctcatcatatatgacttacttgttctttgtagtcatgccagttttcttattatagaaacacttaagtcacccactcacaagttttactaacttctctttttttcccctctccatcccttgatttctgaaacacttctcttatagatccttggtacctagaagtgggtgaaaccattgtgaggtcacttaattactatactaaagtggatggaggttttgctagcatcagagatgtttcaacaatgaaacttgaagatcaccagcacagcttctttctttcagaaacgtgcaaatatctttttcttctgtatgatgattcattcttgaggaatcaaaattacatatttacaacagagggtcatccccttccaataagaagcacgtggcatgagaaatttcctgcagcatatgttcccagcaattggacatctgttaaggatgagatccaaccaattcgcgcgagcgcattatcgtctcaagtttgtcccgagacgattttcggaagaagtgttggtaccccatgggagagtgcgtgccatgttccagatgcgcacgctagccacagatgcaggactgacgatgactgtggaatagaagcaataacatgcaagaagaggacctgcagtatggctggctactgcggcttatttttttataatggaaacaagagttccggctttagcatgataatgcgtacagccaatacaagtcgattattacaattaagaactgctgcatgaatagtgatactaactcaaaggaactaaattacaatactatgactaacactagtcatactcaattcttgaatttgagcgccatccatggtttgcgaagacttccatcgccaccacttccaaaacttgcgaagcaatgaggatttgttgttgcgattcctccttttgtagcagtctccagaatcttaaccagtgagtacatctgaaaataacctgcacaattgatggaattggtttat

SEQ ID NO: 41074 - DNA, 1654 bp, Zea Mays
tttgcaccctatccacagtatagggaccggagtggcatttgaccagctgaagtcaacaggcatgccgaacggtggcggcaagaggtggctgctgctgctgccgctgtcgcggtacgtggaggtggacgagcagcaaggtgtgcagctcttctactacttcgtgcgctcggagcgcgacccctacgaggacccgctgctgctgtggctgtccggcggcccaggctgctccggcatctccggccttgcctacgagataggacccttaaaatttgatgcccgagggcaaggtgaatttcccactcttctctaccgaccggagacatggaccaaggtgagcaacatcatatttgtggactcgccggtggggactgggttctcgtacgccaagtccgaggaagggctcgagaccggcgacaccaagcaagtgaagcagctagtcattttcctcaggaagtggctccaagaccatccccggttcgtgatgaatcctctttatattgctggagattcatacagtggtctcatcattcctactcttgcattagaaattgacagaagcatagaactcggtgaaaagatattttccggtctcaaggggtacattgctggcaacccgttgactggcggacagtttgatacagacagccaaattccatactttcatgccatgggacttgtatccgatgaactttacaagaatgctagggagaactgtggtggaaagtatagtgctccactgaatgctgtatgtgcagaggctgtccaagctatcaacaattgcacacgggatatcaataagcaatacatcttggatcctgcttgcccggatgatgatctgttgagccccaagactgtagcagagacagatggaacgagcaggttgatgctagagtctgcagattttctacttggttccaaatgtgcagaagctttatacattctatcctacgcttgggggaatgatgatacagttcaggagagcctcggtatccgcaaggggacaattggagcatggaaacgatacagccatgcattgccttacaattatgatatccagagtgtagtggattaccattcaaggctagccacaaaaggatacagggcgctgatatacagcggcgaccacgatgctgttgtaccccatgttggcacacaagcatggattagatacctcaacttgacaatcgttgatgattggcgaccatggtacgttggaggccaagttgctggattcacaaggagttatgcgagcggcctaacatttgccaccgtgaagggtgctggacatgttgcgccgttgtataagaccttggaatgccaaaaaatgtttataacatggatttcagggaatcctctttgatgcaagtctgatagaatgacccatcggttatctgagtgggcgtcagccgtcaggaatcctctttgaagggtgaacgtgcatatgttgttgctatatgcatacatggggacatggggtgtaggggtgcttgtgcgttcgtacaaaaaataaagtgccaatttggattacttgtttggtccccatgcaggtgtatgtgcagttgcgtgtaaaaattctttgcataaaacaattataacttgcttcctaaatcttcatctaatcttgctgttcggtactgacacgctgttaggtggg

SEQ ID NO: 41075 - DNA, 2236 bp, Zea Mays
attgaactcacgaagcaagcaagactactgctatagaaagcagtagcaaggtctagtcggctgtgtctaggcgcctagctatatgcctatatagtaaacggtatccagcatggacgagtacatctaccagtcgctcttcctctccgtccttgctgtggcactgctgcagctggtgaagatggccctcaagccgaggccacggctgccgccagggccttggaagctgcccgtcatcggcagcatgcaccacctcgtgaacgtgctgccgcaccgggcgctgcgggacctggcggacgtccacggcccgctcatgatgctgcagctcggccagacgccgctcgtcgtcgcctcttccaaggagacggcgcgcgccgtgctcaggacgcacgacaccaacttcgccacacgccccaagctcctcgccggcgagatcgtcggctatgagtgggtcgacatcctcttcgccccctccggcgactactggcgcaagctccgccagctctgcgccgccgagatcctgagccccaagcgcgtgctctcgtttcgtcacatccgggaggaggaggtgagcacaggaacagctagcgcgcacggtgcgtgcagaaacaattaatatgacgcacagacatgcttatgcatcgcagcaaaacatggcaacaaactgacaaaaacaattccggccgtggacaaactgtagtcacacgagacgctatgagatgagatcatgagagtacactctgaagtctgaacaaaaacaacgcatgcaaaaatctaaaaataaagcagggagagactggtcaaaagaggagaatatgcatgtgagatacgctggtgtgttgtgttctccggccggcgatactaatggtcgttggttcatacatgcatgcatgcatgtaggtgatgctgcgggtggaggagatccgcgcggcgggcccggcgacgccagtgaacctgagcgtgatgttccacagcatcacaaacagcgtcgtgtcccgggccgcgttcgggaagaagcggaagaacgcggcggagttccttgcggcgaccaaggccgtcgtcggcctgtccagcggcttcaacgtcccggacttgttcccgacgtggaccaccgtcctggccaagctcaccggcatgacgcgcagcctcaaggagatccacaagacggtggacaccatcctcgaggaaattatcgtggagcgcaagcgcatccgcgacgaaaagatcaagggcggcgacgccgccgaggacgtcgacgagaacctcgtcgacgtactcatcggcctgcaggagaaaggcggcttcggcttccaacttaccaacagcatcatcaaggccatcatactggacatgttcgcgggcgggacggggacgtcggggtcggccatggagtgggggatgtcggagctgatgcggaacccgccagtgatgaagaagatgcaggcgctgatcagggaggcgttccgtgggaagacggctgtgacggagggcgacctgtaggcgagcaacctccagtacccgaagctggtgatcaaagaggccctccggctgcatccgccggcaccgctgctggtgccccgggagagcatcgaggagtgcgagctggacgggtacacgatcccagcaaagtcacgggtcatcatcaacgcgtgggccatcggccggaaccccaagtactgggacgacgccggcgagttcaagccggagcgattcgaggacggctcccgagacttcacgggcagcagctacgagttcttgcccttcggctccggccggaggatgtgccccggcttcaactacggcctcgcgagcatggagctcgccttcgtcggcctgctgtaccacttcgactggtcgctgcccgagggcgtcaaggatgtcgacatgggggaggcgcctggactcggtgtacgccgtcgcacgccgctaatgctttgcgccaccccgttcgtcctggtccccgcctaactataggcacgtacatcgatcgtcatgctagctctagccgcgagagctgaggggcctatacttgtatctctgtctcaataatttctctccacgatggatgtgcttgctggctaaatacgtagtattattactgcgaagcgtgtattattatgtacctaaagtttgtacttctatcctaaattaaagtgcgtcccgcagtagacgcaagggtaataaataagtgcatgccgttattttttcttgctgtgttttaaatattgcaatatctagg

SEQ ID NO: 41076 - DNA, 923 bp, Zea Mays
attttaaaagggtctcgtgcatcattcaatcaactctctctacctctctctccacctagctagctttgttcatcttgctctcccaagtcttccttctagtagctagctaggtcttcggtctcggacatgagcgggagcaactttggagacagcatggggtggagcagtagtgggagatcgtctggtccgagaaggggcaagagaggcggcggcggcggcggcggcacggacaagcccaagcaaccgcagcgagggctcggcgtggcgcagcttgagaagattaggttacagagcgaaatggcggagtatttccatcctctcggcggccaggcccccagcttgatccacagaacgggcagcctcagcttgcaggaggatgcgcgggcgtcgacgtcctcgctgtcgtcgtcgccatcttcctccttccatgctgccgccgccatctcgtcggcgttcccaatccatccaaatttcgcgatgccatacggagagacagacgtacgatacagtgaattccaagctcatcccatcataagatcaccggtgagcagcagtgctgtctatggcaccccacattacgggcagcatcctaacatcacattgcctctctttgaatcgcaggtatcttcccggttgaagggacgacatcatgatcgaagtcagtcagcggactcaacaagcttgaactccgacgatccacaagacgtggaccttgagctcaagctatgattctaaaatgtccctagctccctttctcccctctcctcccttcgttgtgacgcgatagatttgttagtctgcttcatgggcattttcacttgtggtgcaataagtttctgaattggtgccactagcgctagtcgtcagaaccagtgcaatgcaagaggattatatttgccgccttttctgtaacgatatcgatg

SEQ ID NO: 41077 - DNA, 2436 bp, Zea Mays
attttaaataaaaataaagctcgacgtcgtcgtcacctctctcgccgtccacgagtcacggcgagcggcgtcgacggcgggcgggggtcctggccgttcactgccatgcctgaccccaccaccaaacccccttcgccacgcccccgccgtcgccgcaggctctgcggcctctgcctcggcaccgcgctcctcgcgctcctcgtcgccgcgctcgtccatgtcgtcgccccgcttccgcgcgccgcttccgcctccgcgcgcttctccgtcatcatagacggaggcagcacgggcacccgggcccacgtcttcgtcacggggcacgacggcagcccggatctggcgctatccaccgtgatgcgcgtctccccgggcctctcgtccttcgccgccgacccggcgcgggccggggagtctttgaagccgctgatagattttgcgagggataagattgacggcgcgggcagcgccgctggggaggcggaggtgcgactcatggccaccgcagggctgcgcctgctcgaggagcgcacccaggaggcaatcttagcgtcctgcagggacgttctacgagcctctgggttccggttcgaggacgcgtgggccaaggtgatcccaggtactgcctgccccttgccattttctctttctgccacctggggcaagtgactgtactttagctctaaaatgctcggtcgctgattgcaagtggatagaggattggatgtttaaatgaaatggtcaataaacttagctctaaaatgctcggtcgctgattgcattgtggataggggattggatgtttaaatgaaacgaccaatagtgccatgaattggaaatgctaactgattgcaggtgtgtatgtaaagagagtgccaatcgctgctggtttgtagcaaatctgcaatagatgtgagttggtgggtttggaaatgactagcagaattgcagaaatatgtcgtggagatgcagctttgggggattactagatgacatttctgttggttgagtaacagataaaaaacttaaaactggaatcaaaacgatgtgatgcagcaattttaaacgatctaaacagtgcaaattagtaactagtaagcataaaaaattcgttttttagggagtgcggggaggaggtttgtgtgtaaaagtgcctttttgtgtcattagctattacacttgctggtacctcttctacaggctcggatgaaggtatctatgcttgggttgcagcaaattatgctcttggaagacttggaggggatcctaacagaaccgttggaataattgaacttgggggcgcttcagctcagcttgccttcgtttctgatgaagtacttccacccaaactgtcatataattatacttttattgaaacaacatacactctctataccaacagctttttaaactttggtcaaaatgcagctcaagactcgttccatgaaatgctgaggtcaagaggctcttctgaaaatgctacacttgctgatccttgtgctcccagaggatattcacgcaatgaagaaatgatgctgaggatgagtggtgcttcaaggtcaacattagagaaccagtatgttgataatgggactggaaactttacagaatgcatatcttcttcactgcttttactgcaaaaaggaaaggagaagtgccagtatcaacaatgtcacctgggatctactttcgtacctgagctgcgtggatacttcttggcaactgaaaatttctattttacatcaaagttctttggacttaagaagtcttcatcactctctgatttcatgtttgctggagaacaattttgcaatcaggatttgtccacccttagaaaaaaacatcctaataggtcagatgaagatttttcacggtattgcttctcgatggcatatattgtggctctactgcatgacagtcttggtgtatcactggatgataagaggattgagtattcaaaccaggttggagacattcaggttgaatgggctctaggagctttcatcacactgattcaaaatgcaagtttaaagccattacacaccgctgtggaatcaacccatagcaatagaccattgtttgctgtgctgggaatgtttcttttatgtggagtactttttgtatcaagatggaggaagcacaagacgaaagtcatatacgacttagagaaaggccggtacatcataacacacatcagctgatgctgaaccttgtgcagaagaactatatttatacgacaggaatagatgttgtgttgtacaacaatgtaccagttcaattatttgttttattttaggtagcagagctgggtgggtagagcatgaaatatagcacaaatgcgtatagaagaatgtgtagaacaagttgccatgtgttaattgaattattttggtgaataattatacctgttttgtttatcttatgagctccacattt

SEQ ID NO: 41078 - DNA, 334 bp, Zea Mays
ggcctcctcttttgcaaaatcaactaaatagagtttgtcgtctaatactcccttaaaagctaatgaaccatcacttcttctaaagacagacacatctacatttgtgaatagacaattatatcccatattacataattgacttacggatagcaaattatatccaagcgactcaactaagaatacattagaaatagagtgctcatttgagattgcaatcttgcctaaacctttaaccttgccttggttcccatcaccgaatatgattgaatcttggggatccttgttcttgacgtaggaagagaacatcctcttttcccccgtcatgtggtttgtg

SEQ ID NO: 41079 - DNA, 436 bp, Zea Mays
cgaaaccgcaggggaattgcgccttaaatatattaagaagaagagaaaaaggtctatagaagaccagaggttacaacattgaactccttacggaggccagtaacgcacataagtgaaagagtccaaggaaaccggactcaaaaaactactaaagaagaaacagggggggggttcagtcatcaggcaaagaagctgccaagaaggagatacccttggctccagctaattctcaaagtcttctctcatcgtcagcctgctgaaggatagaggggagactgggagtctggccatcaaacacacatctattgcggtgattccagatcatccaggcccccaaagagatcagagaactcagacctttcttgaccattccttgaactgtttcagaagctgtctcccaccggtccaggaaggatgtcaggcccggctggggagc

SEQ ID NO: 41080 - DNA, 1369 bp, Zea Mays
cccgcctccccggtctgtgtttgccccctgcccggttggcccctggctctcctcccgcccgcccggccgcccccaccccacccaatcctaccccgcggggggaattctcagttctcgcggcgacgactgggagaccgccgccgccgccatcctactccaggtgccctgagaactcgatcgggctcttcgctggcgacgaacacccaccagctacggtagacgccccgttcgctagctgaggacctcctggttcctgtgagcaggcggcgtggttagctgctgccttcaagaatgcagagacccaatgcgccgtcggcttgcgccaccatcaccttcgcggaggctctaaggagggagatggagtaccgcaagtgggtggagaggacccacccacatctgctcgtcggaatctgcggagcccctgaaatgcagagagatttcagtgcaggaccagtacctgatgcgatcaagagaaaactagctgccgagaccagtgtgcctccacaacaatcaagtttcagctgtgtaactggacagaagcagccccaaaactggtaccccacaaagaaaaaggtgaaagttccacatcttccatcgcagattctgcagtgtcccagaccaaacgtggtgccatccttctggtgcaaaatctgcaaggtcgactgtgtcaccgagttcaatttcagcgctcacgttggaggcaaaaagcacaaggccaaaaagctagagattctaggtaagaggaacgctgggggacctgctagccgatgcgcaggcaacaggagcgctggacagaatggactagcagtttctgggagcagaagcagcgaacagaatgtggctggcagcgttgctgctggaccgaactgtgacatgtcgtctgagagcagaactaatggaacagaaggaagtgggtgcactgtccggctatgagcagcttgggtttcactcgagtctggtatttcaataaaagttcgccttgcacattttcttctcaagggcacagttaacatatttatgtgtcagatggctaggccgctagggagatttcatctgatgggttggactgaacaacactagtcagataataagttgaaacgtatgcactatgcagtgtcctattcccatgtgagagcagtacattgtttggacatatatctgacagcagatgcatcctgtgtcctttcgcttccttctcgaaaatgtacagtagctaaccttgttcgggtaggaggtggaagttgaggacgctgttctgagtatgtactgggtagttataatgtatgacatcatggcttgtttgttgtttccatttcttactggtgattgaatcattgaagacggtgagggtaactgtagtgtgtgccaa

SEQ ID NO: 41081 - DNA, 1868 bp, Zea Mays
gagctctgctatccttgcacagggctccgaacacgcgtttccatggctctcctccgactccaagagcagtgctcgctcctccgaatctccagctcccaccacccaaaccccatcgatatcccaagaaatcctcgcaagaaccaacttttagtgcccaatgcggccaagattgccaacgcctccgaaattccggttcctcgcatccccactagcacttccaaggccgcaatcctggcccggaaggccgcgctttggcgggacgcccttgtccccgttgccgccgccttcgcgtcctgtccgctcccttccctcgcggcggagggcgacgggaaagtgagcctcgagtccatcgtggtggcaatcgacgacttcaacaatcgcaaccctttcttcgtggctggggtcgtgttcgtgtggctagtggtgatcccgctcctgcaggagtacgtcttcaagaagtacaagcccgtgagcgccatcgacgcgttccgcaagcttcgcgacgtgccggaggtgcagctgctggacatcaggcggggcaagagcgtgcggttcatggcgccaccgaagctgaagcttatcgacaagagcaccgtgcaggtcgagttcgacgaggaggacgagaaggggtttgtcaaggaggtgctagcgaggttcccagacccggcgaacaccgtcgtctgcgtccttgacaagtagctttgatggtaattcttcgaaagttgctgagctactagttgagaatggttttaaggaagcctatgcaattaaagggggcttgagaggtccggaagggtggcaggcggttcaagaaaactatcttcccccatctgtccatgttttcccgaagaaaaaaaggggcgcgaaattagctcacacagatgcaagcaatgatggaacatacgttcagcaggagggaagcgaggaatcatcggctcctccaagcagtgaactacattgagaaattatgttatctccagctatcacacttatagctatgccagacctactaagcaatggttgactcatatccatctaaaatgataaataatttgggaagaactcagcagtcagcactgcccttgtatttgtaccctgacttgaagcctccatcatccccaacaccatcaaaaccgacgaattaagagcaatgcaggacaataacatgtgtggaactcaaaaggtcagaagtagttgtctcctgcacaaacatttttgtatacttccaaccgtggatgtccaggagattgactgggatggcatggaagaggaccagcagtggtgtttggagctcttgctgctgttgaggccatggtgaattcttagttgtgtaatttgcgaagcttgtacccgtatgttgtactattaagtgggggcgaaatgacattttgtacctgacttgatacagtttggggtgccttagcgttctcaatttgacaattgtgcttaactcagttttattatcactggctcagacaccgtatataggtggcatcactataattgtaacagaggttcagttcattcacgctacgtacatgctggaagtggtttacattggggataccagtttgagcaacagcattacatcaaacaaagttcaaaatcttaatcaaaacgaatcaagtttgagcgacaacaattcatccaacaaagttcaaaatcttttacaaaaagaataaaaaaaatggcccatgcaggtctcgatccacgctacgtacatgctggaagtggtttacattggggataccagtttgagcaacagcattacatcaaacaaagttcaaaatcttaatcaaaacgaatcaagtttgagcgacaacgaatcatccaacaaagttcaaaatcttttacaaaaagaataaaaa

SEQ ID NO: 41082 - DNA, 3272 bp, Zea Mays
tgctagttactaaaattttaacttgtatgtttccagaaaattacacttgctgcagtccgggtaaggtaaagatcctgttgggaatctgaccatacagtcctccagaagctattgctctgcatgttaggattttataacgtgatatggtttcactaaatgagaaaatatagtacattgagcattgtagtgcatgtcttaaacaactcacactgaagctagtgttttcagtgtcagcatccaggttggtatggcagacggatcaaatgaattgttgcttaaatcactggatgtgaaaagaaaattcattagtacttgcaccatgtttatatgttatgacagtgtagaatagaagacaagggcgatatcttacaccacattaagttttgtcagggtactgagatctggcattgttccacgcagctggttgcctgcaaaattcctgcagaagatagttattcaaatgaaatacactggaaattcttgacttacacaaatatgttagtcatttgaccgtgaggtcaaaaatcatacatcacttacagtacattgaggtcaactaggttactgatattggtcggaactgctcctgtgaatttattattgtctaatcggctgatcaagatgcaaagaagtcaacataatgctgagaatatggttggaagaaataaaaatgccaagatactcacagaatctggagggtggtgatgctaccaagttcagcagggataggaccagtcaattggttgttgtcaaataatctcatgaagataaacaaagtgatcagtacagtactttaatgtgtaagaattgctagcataaaaaattagtactgccttacatatgttcgagtctcatgctagggctgaagaggccattgagattaccggttaattggtttccactgaaatgactgttaattaatcggaacagagtatcagcatggtaggaacacgagtaaaagcatgcatactgatcatctgttcttgacttataggagattagaaatgttggaggatcttacaaatgtttggtgtgtgtaagtaggtcaagtcctggagaagtggctgatgaaatcggaacaggaccagaaagttgattttctgacaagtctagccagaagaggttgttgagtaggccaattgaagcaggaattctgcctgtaaatctgtttgaattcattgccctgcagagtatatttcattgctagttcattgcatcagtataggcaaagcagcagcagaggtaacaagaacagagttgggattatgattttctatcaatttaatagttcttacaagaatgagagctgcaccaagtttcctaattcttcggggatgcctcctgtgaagctgcacccagccaagattctgaagattacaacgcattaggtaataggtctttggtgccttggtggctcggtgcaagtcacaaactcacaatgctgtcaacacattcctttaaacttttgaacgtggacgtattcgtgacaactggtgtctgttttgttatttaaatttgtgtagcctgctcatccttacaggttgtaacttcatgtcgctgggatacagtttttttttgtcatttttaatacttttgcatttgcatgtcatgtagttgatattgttttttcattgatccagtgtatgctgaggtggactgaaataacgatgtcaatgctttggaagctctgctaatgacatagttactttcattgtttctgcaggtcaacaggcactctggataattctaccctaaacagatggcagcatgcatcctatatcctcgtcaaatgcaatatatcaaggcttaccatcttgggggttcgtctgaccgaaacttggccggaggtataccaagagcaagaacaggagtagcaactgctgcatcgccgccatgccgagctaggcctccaaacaagttgcagcagaccactgctaacttcgatgggacgatggttatccttggagaagtctatgcaatgaggtagctaatggacgagtcagctgctaccaaatggcgccgctcttcttcctgaggttggaaccaggcaaagcaaatagcgtttcaagcaaaacaaccttgcatcaccagattcagaagaatctctcgtcaattattgcctggtctgcttaccgggtccaagcaatggatatgctcataggaacgcacgtatgcaagggtatgggaggccttaaacaaggctacagagagctcagttgaactgatcaaaacacggaaatggttgaagaaaaaatgtttctgtattcctcgttgatagtggggcagttgcttcttgtcatcttgtggctggggcctcatcggagtatcccttctaagctttgacccggtcatggctattaattaattagattagtacggccacaggtcggacttttgtgccataggcccacagttcagaaacgtgttatgctgcgctactgctgctagcagttatgatgtggatttggcatcatgacaaggatattacgtaaatatacttcggtccccttgaacgcaccacccatcgtgttaccatgaatcggtttgttcttaggagacctgatggttcatgttcagtaaatttgatttgatgatgaggcagggtttctctcacctgcacagacacaaagcttcaaatcgcaagtcagaaagcatgtgcagacgattatactgctctccttgatccttggaagttcgcagatggttcggaaaggcctggccgttctttttttttcccccttttcgcagatgctattcgttcaccaacacgaatgggtccggaaggccaggttttggatgcacctgctcaactggttcctttgtcgggaagcttgccgtgcagataaattttttatgcatgatgttccagaaaatgcagataaaggacggcttccacacagaaggttcgttctgcacggagacaaagtgtggccggcaggctgatgtttgcattggccgatgaaatgaactgttcgcttcaacttaaagtcagttgttgtatctacaatctatagagacaaaacactataagaatagtagaagccggtacgaattaaagcagactgaaagatttctatatagtaattgtccgtcttttctctcccgctctttcagtgcgtggttgcaattttctattatttcttgactgccactgatcccgtcgtatatgttgcctaagtaaatgttggtgaacatagtttggcagtaccttcctttttttcttgtgtggatgatgaaatgcgggtcttggcctcttgtgtggtgcagtcaaa

SEQ ID NO: 41083 - DNA, 1257 bp, Zea Mays
atccatttctacagactacagaccacaagttagccgaccccgactgtcattcgcgagcaccgccgccgctcgccagaatgacacttcgggtgatcctctcccgcctgcgcctcacccctctcatccacgacggccaccacctgcgacgctctctatccgccgccgctgccaaactacctgacgagttgcctcctggcgcgccggcgccaacctccgactccaggctcttcgtcgcagggctgtcgtggtccgtggacgagcgctccctcacggacgccttctcctccttcggcaccgtcaccgaagatggtgcacagtgtaggtcttcggctaaatgccgtggaggccgtgagccactccatcgcccccaggcctgcagcctgttcgacgaaattcctgttagggacgtggtcacctgctcagctgcaatttaccgacatgcgaggagcgggctgttccatgagtcagctgagctgtttgttggcatgatgagggcagttagaataatgtatgacaaaaactctggaaggtcaagaggctttggatttgttcatttctcaaatgataatgaagctaagtgtgccaaggatgctatggatgggaaggtaatgctagggcggccattgcgaataagttttgcccttggaagagttcgtggcgcatcagttattgttcctcgactttctacggtgaaatgagcagaagcattggtcgtggcatactggcatggaccgatggacatatcaggagggttgcgaagtacccatataggctagtgtttttaatcttgcaaggtagggatcttagtcgaaggcgcctggcaatggcgtgaagggcagcgtggcaaagaagatgatggctatgtttgtcgccccaatttgctcgatgttgaagcatttcacgaggtgcattgtagctttgcagccacctcgtgtgaggccgccttttcgaatgtctcgtttgatgtgtgtgagtgagagagagagactcttcttgaattgattcatgtcaaatgtatccagtaggggcttttcgccccctcctgtttcataaaaaaaaatcatgtaaactgtaaatttgtggtggcaaccgtcactacgcactagtacaacgcagttaaactgtcttcgattcttcatgtcgaagtgaagcatagctacatccgatttttaggatgcagggataacctcctttctctttctggcggcacagcaaggggcggctgcctgcctttgttgcgtagtcgtgtcgtctagg

SEQ ID NO: 41084 - DNA, 2031 bp, Zea Mays
cccgacggccacagaccttccaagggcagagcggacccatccataccaggaggcggcggaggagagagcggctgcctcagcctgtctttcttgtgtgcactgcacccaccctgcctcagcttgggcttggctgcctcttcgtttcgccaggaacgcgtaggcgcagcgcagcagcccaggaagcaacacccagccgcctaatcccgcaacaactcgccctcttctacccccatcggctcctctgcatccgcataccggtggcctacaggtttgctggagtgcagtgcacgggcggtggagcagcaaatctgcaactgattcaggatggatcaggaggcgaaggactctaggccctcaaggtctcccagcgagccaaacctcttcctgcaatggggtagccgtaagaggctgcgatgtgtcaagacgcgtgatgacggctcaccatcgccgtcgccgtctcaaggtcttaggcgtgccataccccgttctactcggcccctccttggagcagacattgcagcatttcgttcaccgcggcgccctagcacccttaaccgcaggaaatccgatttgctggtgaatgagtacaagcacacgatggcgctatcgccagagaaggacaagtattacacaacgaggggttcaccatttccctttgaaggaaatgggtttgactttggtaccataacagaggataagggaaccacatcgttgccgagattcttcattgcattgtcaaacaaggagaaggaggaggacttcatggcgatgaagggctccaagctgccacagaggccaaagaagaggcccaagctgatgcagaagtgcttgcttatggtgagcccaggagcttggttatcagatctatctcatgagagatatgaagttagagagaagaagagttctaaaaagaaaagagaaatcgaaactccaggataaggaaacgagcctcaagaaagctgctgcaaaaggaagcaaagctgagcagaaggcgaagaaaaagcaggtagaggaagagatcacacgcctctcatctgagttagaggcgaaccatgctgcagagcttgcttcctttgggtacaaaccctctggtagctcagagaagggaaacctcgacaacttagtgaaggccatagccggtgtttcagtttccagcaattcggattcagcaaagctcagcaagggagcacgccggcgagagaagaaggcgaaggaggaagctgcccgagagcagcggatccaagaggaacaaagcaatctcgtgagcgaccgcatgctagaaaacgagaagctcgaaaggaagctcgagcccttggggctgaccgtccaagagataaagccggacgggcactgcctgtaccgagcagttgaaaaccagctgtcgctccactccaatggcgctgcacggtacagttaccaggacctacggcagatgacggccaagtacatgagggagcacgccgccaatttccttcccttctacttagcggaaggcaaggccgatgttggaccagatcccatggcgagcttcgagaggtactgcgaggagatggagtccaccgcagcttggggcgggcagctcgaactcggcgcgctgacccactgcctgaagaaacatatcgtcgtctactcaggctccttcccggacgtggagatgggtaaggagtacaaatctggacctggaggtagtggcgccggcggtgcgagcatcaggctgtcgttccacaggcacgcctatggtctcggcgagcactacaactcggtggttccagccggatcatcctagcaagagaaaggtggatgctctgatggcctctaatacttcttgatttgattgtttacgggtggcacttgtctgagtctgaaacacaataggccacttttctttttcccagttgctgtaatccctgtcatgagtagatgaaggttgagtgtaccaatcaaagctgtaccggggagtttgtttcccaaacaattttgctctcatcagttttatgtctgtggtttgatttgaagttgtgtgctgctact

SEQ ID NO: 41085 - DNA, 1687 bp, Zea Mays
  misc_feature (1687)..(1687): n is a, c, g, or t
gtgattcggcccattgtagccccgagacagcgtccgcctacggcctatccgcgtcagcccgccggcgagtcgcgcacgagacctgcgaggcgcgatggcaggccgcggcggcgccggccggcggcctcgcgccgtcttcatggccttcggcactcagggcgacgtcttccccatagcagcgcttgctgcagcttttgcgtgtgaccaacaggagtatgctgtggtgttcatcactcattcagcgcaccggagtttgtcagcacatctagcagccagcagtgttagatacatgcctgtgtcaagcccgcctgtcctcgctgccgaacagttagagaatatctcaagtgattctattcaatcaaaccatgagcgtgagtccttttcaatgcggaaaaaagccattcaagcggagcacaggaaagaatgcttgtcttttgtggaagaagtttttggaaacgacccaagcatcagtggggattttattgtgatcaatttcttcgctttggaaggttggcaccttgcagaactattccaagtaaagtgcgtcattgctgctccctattttgttccatatagtgctcctacatcattcaaacgccaatttaaacaaacttttcctctactttacaagtactttcaagaagctcctgcaaatacggtctgctggactgacattatccattggatgtgggcactcttcatggaaagttggggatcatggagaaatgattgtctgaatcttagccccattcctttcacagatccagtaaccaatcttcctttgtggcatgtgcgagaggagtcacctttattactgtatggtttcagcaaagaaattgtggagtgcccaggatattggccgttcaatgctcatgcttgtggcttttggtttctacctatggattggcaattttcttgtgacaaatgcatggagttgtctggaaatatcaattcttcatttggtggtatgttgtgtgcaaaccattcttccctggaacacttcctcacaaggaatgcttattcatcaagacctatatttgtaggattaagttccattggtagggtgagtactagattgatgttatatgtttgcgttgtcctgtcatgtggaattggtggtgagaatgttaaaattttcagatcaataccgtacagttggctttttcctaggtgtgcagccgctattcaccatgctggcagtggatcaacagctgcagcactacttgctggtatccctcaggtaacatgccctttcatgatggaccaattttactggtcagagaggctacagtggttgggagtggcgcctgaacccctacaaagacaaaatctagtcccagataatgatgacgccttgagcatccacaatgctgcagatgtgctagttggagctatcaggtcagctttatcgccggaaaccaaagctcaggcggccagaattgctgataggctttcttctgaggatggaattggagaagccctcaggatattgaaggcgagagtgttgactcagaacaaaatcatcagctcattcatcgcaagtaaataattagtactgatatgatatgaggcattgatttaaaccactaaatttaagaaatggacttctaatgcaccgccccatgtaagatagagtaatttctcaaaccaatcaactttacggggcgtttggatccctttattttan

SEQ ID NO: 41086 - DNA, 1704 bp, Zea Mays
ccctcatctctcctcccgtgacgtcgcgccacatcgtcctcttcctccgcgtgccgctgctaccgtggcccccttgcctgctcgcctccacggccacacgaaggccccctgtgttgctctcggatatgcgctgccatcgccggcgtagccggagctggccgtccacgcaaccctgccacgggagggcgacgcgttgatgctggagctcacaaggtgtcgctgctggagcagcgtacgacgacgaaggcgctgtggcagcacctggtgctagcgctacactactactgaattttgtgatgttgcaatttcatcttttattttgttttttggggtgatgcaaaaaaacaaaactcaaaagtctactaaaggccataaattgagcaatgttgctgcttcaagaaacaaattatcaacttattcccatctaacctttgatgggatttggtttagcattaaggaattctcaaaatcaaaatagcagtttcaagtgccagatgatgcaaggctttcagctagaagtgtagctgttctctgaaatctttgccaaaaggttaatttcattctaccttgcatgctacctgtttagcatgatcgttagtttattcgctaacaaaaaactttgccgaatggatgacttccttctgagaagactgaactgaataattatgtcaaagttgtttcagtagtttggcctaatcagtattgatctatggtgtatagtctacaggttgtactatatggttgattgttctgatttcgagcttggttagtctaatgttcttaattatggatgatgatcctttgaagttcatgcacgaagacttgccgttctgaaggcccttacttcctgttccactagtagttctgagatgatggaaaagctaaacgaaatcgtgtttgacatcttggaaaagtctattatacgtggtaatttgcaatatgcttctttaagtgcactcagaaggcatccacttgatctcggtaatcaagcattcctccaccgagctgtggaaggattaaatacaggaacatgacccctgaagcagctttggatcatgtacgatccattaggcctcgagtgcttttggcaccctcgcagtggtatgtatgcaaccttttgtgattgcattataagttattagtacaatactactgcgttaagacactttatgacaccatgtgctgcatcaggttagtaagctgtcatggttctgttttaatacacgcaggtcactcaagtagatctaaagttattctttgagtccatatgtggtgagctaaaagtttgcagaaatggcaccatcaagatcgatctggagaccaacaagatcatggacttcatcaagtttgacgtcggcaatgtggtcatggtgaccggcgggaggaacaccgggcgtgtaggagtgatcaagaacagggagaagcacaagggcagcttcgagaccatccacgtgctgcttggagctttttgctatgtctagttttctcctatttgttgtacaggaaaacatagaatggaattcaaatttggtggccacaaaagtgtggagacttgaattcatataaagttagccttaacattagtgcaaacagttgtatcttagtttagatttagagtacacttatgtatgcgttgtttgacaatgcttatttatgatatattgaatggtacttatttatattatattaattataatgttgttc

SEQ ID NO: 41087 - DNA, 679 bp, Zea Mays
acagaagcagaagagaaacagagaagaacccagcttagatcagactgaataactagatgcggtggacgccttcaagacctgccataccagctccaaacgtggcctgagtgaacccgcaagagaagcacttgtgagatgccagcatccagtgtgcagcttgtgtccaaggtgttgtcccagagcagctcacaccaattcctgaagagtgttggcatcaaaacaccggcatcctccaagtcatcatcatcaaatcaaagtgagcttcgggaacaacttgcagctgaagcgacggctgctgttcaaggtgaactcaaccagctcaagaagaaatatgaagaagctgaggaacagcaggcgaggacacaaagggagttggaggagtacaagaagataacagagaagaacagcaaggagatggaggagaccaatgtgctcatcaagaagctcttgtccttgcatggtaacacttcttcttcgacatgagggccgctggtcagagctactgtgtttggcctgttctttgacaagggtacccaaaaactcaagttgctcgtgggtggcaactttttattatatgattttgtttgtgcaaacacaactgaaatgttaagtcaagtggtggtgctgtgaactgaaatgttaagtcaagtggtgatgttgtgaattgaattgtgtgccc

SEQ ID NO: 41088 - DNA, 2066 bp, Zea Mays
gaccccggtcccgttcccacgcggagccgcggacacaccttcctcctcctcccgtcgccatggacgtctgctcctccacgatctagcctgtggctattggttagcacgccggcgccggcgccggcgaccctaaagggagcgttgacgttgtatcccgagattttatgctctaagctttcgagccgcgtcatgggaaggaagcctgacgcggtagccaaatcgtatcattccggtggcggcggcgctgccgcctcctcgccgagggcagcgaggaaggcgtcgccttctccggtgttcctgggaaccgcgctgttcgttctagggtttgtgtccctctttacgggacacgtggtcaccgacgctgactgggcgcggatccgcagtcgatggcgacctaaacagctgctgtgccagagaacagttccactggttacttgttgattgctactagtgggggcctgaatcagcagcgcatagggcttgcagataacagatgctgttgtagttgcctggattttgaatgccacacttgttgtacctgagttagaccaccactcgttctggaaagacgacagtgacttctctgacatttttgacgtggagtggttcatttcccacctatcgaaggatgtaactattgtcaaaaggatcccttatgaagtaatgttgtcaatggataaactaccatggactatgcgcgcacctaggaaatcggtgcctgagttttatattgatgaagttctgccaatactcatgcgaaggcgagctttgcaattaacaaagtttgattataggctcactagcgatcttgatgaagatttgcaaaagttacgttgccgagtaaattttcatgctttaaaatttacgagttctatacacgccatgggtcagaaacttgttcaaaagctgagactaatgaacacacgatatgtcgccattcatttgaggtttgaacctgacatgcttgcattttctggctgttactacggtggcggtgaaaaagaaagaaaggaattgggtgaaattaggaaacgatgggatacattacctgagttgagtgctgaagatgaacgcagcagaggaaaatgtccactgactcctcatgaagtcgggttaatgctccgagctcttggttttggcaacgatacacttctgtatgttgcttctggagaaatatatggtggagatagtactctccaacctcttaggggactcttcccaaatttctatactaaggagaagcttgctggggatgatttaaatcccttccttcctttttcttcacggctggctgcaattgacttcattgtttgtgatgagagtgatgtctttgttacgaataataatgggaacatggccaaagttttagctggacggaggcgatacatgggccacaagagaactattcgcccaaatgcaaagaaactcaatgtactatttcaaacacggaatcaattgagctgggataccttttcacggaaggtacagagagttcagaggggtcttatgggggagccggacgatatcagaccaaaacaggatgacttccatgaatttccatcatcttgcatctgctcaagaaaacctgggaacatatcggccacaacatgaaaaccaaccggacagggcaaatgcagcgaggatgctgctagttgggcacttactttgacagtagggaaacatatgcttacgttgaaagaaacacggtagaattaacaaggcaaggagggatgcatagtgcatatatgtcatggctcggtaagatgccacgtcaaggagagttgccaactggtgatgtcatgcctgtaaattattgttcgtacatgattaattctttaaacatgttgtccgctcgctgttcctcatccgctttcagactacgtcttggctatgcaccatcattgggcttaggtgggtctttgtagatcaagtagcttgaatcggctcgttagtgatagtgaattagtgatgggaggatagggtttagaggtttctcggtcggaaccgttgtcatgaccttttattaatgaaataaatattgcagggtggtctttggccgagttttt

SEQ ID NO: 41089 - DNA, 3405 bp, Zea Mays
gagtaaccaaaccaagcaccacgcgcggccatggccttccccgccgacgcgctggttctagagatcaccgacacatcatcctccgccaccgccgccgccgcccgtgctccatcctcaccttctcccccgccgctgtccatctccgacctcgcgctaatcgagagctcctcctacttccgcgcgctcctcggcggcagcttcagtgaatccggcagagagcatgtgcgtgtgggctgcaatttggaggctgctgtgcaagtgctgcgctacctttttgagccttccgagagctttaacatcacgcacaacaatttcctccccctgttggagggagctttgtttcttgctgttgagagccttctagtggagtgtcaaagatggttcggcaccatagcctctcaaacttctgccatgtcagttccattagatttcataattgaagtctggtactttgctgaagagcatggtgttacttttgttcaagacatttgccaaaaatttctagctcagaattttgtagaaaatatgaaagcctgtgaacaatcaaaccccaactcagtagatggccacctcttcattcttagcaaggtgaagatatgccttttaccattaggatttgcggcagggacaatgaggcattggtttgactttggaaacaagatcatatgcactattcttgatcttctcaaagacagtttgaaaactttattggatgctgttgatgatggtaacttggatcgatattgcattcgaataacagaatattcaaagaacatagtgctttcaggatgtccccaagtaactacagcattcttgtacatatctgttctccctaatgatctgagtgtttcattgaagagaaggatagtgagttcatacacccaggttgatcatcaaaccttcgttctttatgaggaattagagaaggctactaaaaccttatcatttaagaatgtacacatggtggatatttcaaaatgtccaaacgttcattttggcgcagcaattgactggttgaagttgggttttccagaattaagggtattcagggtttcacattgtttatcatttcaatttgatgatttactatatctgttaatgagatgtccatggattgatgaaattgatatgactattgatacaagcactgtaacacccagacattcagtaatctcgtctagttctgaagtcctaagcaaggcaaaaccaaatcagaaaagatatggcatacattgttcagcatatgacaggcaaccaaattcggttttcttaaatatatcaagattgacattggaaggcagaaatgatattgatgatatggacttgttggagatatctgtcctgaaaaattctctgtgctatataaacattagaaactgcttcctgttgacggatgatggtatttctaaccttctgatgaagtgtacaaagatccattcgatggttctttcttatacttcttttggaaatcgatcaattcaaatgctatgcgctgccaatccttctggccacaacagtggacatgctcatgttatggcatcttatatgcaagaattacatctggatggctgcaaaggtattgactctgttgctttgtcgcagctagtgagcattataagtatcacaaagtttttgagcttaagggaaacatcacttacagatggtgcactctgcaagtttgttggctctagtctggagtatcttgacgtttcagagactgtggtgcgatactgattatgtaatttagttttgtgcttctaataatcaagcactacaattgaccaattgatgaaacattcatactggaacattcactgagctaggagactattgatgagtaatacatagtgtgctgggggctattatttctattatctggttgatatgttatactcctatactgtaggcagggtatagacgtatattgtgttcatgaacttttctgctactttattttagtatgacagctatcacttttttatcttcgctacctccagagggcaaaccccaaaagtttatgattatgtttttatttttgcataccatattagagtgcttaattctttttttctgtccattgacttgcagatttctatggtatcattagcaccagttattcaaagaaactgtaaattgaactgtctgaaaacagctggatgctgtagtcttctgttgcaatgtgctaatgtagaacatatcaatggtaacaagtatggagattttctacaggagttaggaactacctactgtctggaggatgttgaaatgggctggggattttgccctattcgaatcgaagaccttgttccttcttttagtaaagtaaggaagatgaaaattggtctcggcacatcattagcggagaatgttctgtgtgctcttcctatgatttgcccattcctcgagtctttgattctaaggtttcaggtgatatctgacagagttgttagacgtctattggaatcagcaacaaatcttcaggtgctttgcctgcactattgtcttggaagtttaacttcatttagtttccaaacaaaggcacctgcattaagagtattgcggcttcattgggtaacttcatggcttacaaatgatgacttgacaatccttacagagaattgcaatttggctgaactttcactttctggttgcaaacttcttgactccagctctcaagacattatctcatctgggtggccaaacttggcacttttacaccttgaggaatgtggtaaagtaactgttgaaggggtttcttcttttttcaactgtaaggctttggaagacgtcctactacggcacacgggtaggggcatcggaaggagcatcatagacgatgctatcagagagttaccactactgcggaagctggctttggatctttgcgatgcctgtgaagacggttacgatagcccaaacgatgcggaagggaagatgattagaagtgtaaggatgagtcgatgcaagaagatggcggggtcgtgtttggaggtccccagacaagggtcttcaacttcaaggccggtgcacaaggacactgtagtgctggaatggagcagcagaatgttcacaaccaccatagtgaaagaaagagtgtgatgagcctcttctgtagttttgtccctgatgaagaacacaagagcaggccacaatatatatgacttgtatgaatggtctccccgcttctgattttgaatgctttgtatgtggacatatcctcgtgtgtgaatgtatttgtatggtatcaaacgaagatcatcttttgcagtcgtactgtacccatgcactcttatgttgatccacgaacaaagtttggaatttttaggtgaccgtgttcatgtttgaaaattattgttgtactagtccttggtaaaataaaggaggcaaggcaggagccaaaaaaaa

SEQ ID NO: 41090 - DNA, 1275 bp, Zea Mays
cccggccgcgaattcaggtcgtggcgggccctgccgacccaactactggtccagaggcctccacgcgagccgtgggccgtggtctaggagccgggtccgcctatctacttgacggtcacggaaacccggacccggtaggaaggagctataaagacaagccaaacgagggcatcccttcttcagccgcacgcttcttgttgccaaagaattccctcccctagccgccgccgccgccgctcgtctccctgagaggtgccgggaccgaggaactggccgagtactaggtagagaatcggtttttcttgtctcagcccggggtctgctgcgtctggtggtggtgaaggggagaaattcgtgagatctgttccggatcaggcgtgcgagctcgggaatcaggggtttcacacatagcttcgtcgatttgaatttgatgtactaatggagtctaagggtggcaaaaagtctagcagtagtcgttctatgatgtatgaagctccccttggctacagcattgaggacgttcgacctgccggaggcgtgaagaagttccagtctgctgcttactccaactgcgcgaagaagccatcctgatatcccttttggcttcctcattctagtagtttaggatttcttttctgacactttgattctgaccaatctctctggcctgctgcttcctgataatcgaccagttccccagtcttgctcctcctcctatgaagaaggactacaagctggctaatcttctctgctgggaggaggaagcggatgccatggaggagaaggcgggagtgcttgatgagtaagacgggcttctggggtcgatttgcttctgagttgtttattttatatcgtcgcaatttcgtggttgtcgtttggttattctgtgaagcagccaagccaggctattgttatgaaaatttgtcgtctgtaagcatgtgaacttccgatgttgccacatgctggatcagtctgaataagtaagtatgcagctctaggtggtcagctgcgtctaccacaatgagcatgaacgtatggagaaatatctgtgaacccattttgtttatgaataagatttgtttttttcgagttaaagaaaacacacatagaacatgaaaatttcctacaatccaaattagtttatttccacaggaaaacacacatagaacatgaaaatttcctacaatccaaagagggatcccatcgtatattaattttactttttgtttgtcctttatttcagtgcaaggtgaatgttaaagagatattttggta

SEQ ID NO: 41091 - DNA, 2851 bp, Zea Mays
aaaccctaacaccgtccactcccgtcggccaccagccacctccatttcaaatacagtttccaccttcctcctccgcctcccacccctcgctgtctccggcgagacccggaaatggatctcgtcgcctccccctccaggtcaaaatccaagcccagatcctcgccagcgaagcccgtcgccgcccccgctgagtccaggatggacctctgcaccccgtccaagcccacgcccaggcggaagtccaaaacgacggcctcgccggcgccgatgtctccggcgacgccatccaccgtccgacgctcgcgtcgccttcttgaaacccccaccaaagcctccccggaggtgcaagtgaaggctacgcccatctccagggctaagcgcaccgcgccgtcaccgaaaacccctgttcagcgcgagaccaagaggcagaggcgacacccgaggaagagggcatactaccggaaggtggtgtatgatggcggggagttcgaggtcggcgatgacgtgtacgtgaagaggcgggagacggcggagtctgacgcggaggaccccgaggaggaggagtgccgcgtatgcttccgcactggcggcggggttatggtggagtgcgacgcgtgcctcggcggattccacctgcgatgcgtgcgaccgccgcttcggagggtgcctgaaggtgattgggcgtgcccttactgcgaggccgagcgcgccggtaaggtggtcgagcggcccaggccgcctgaggggaagcgcgtcgtgaggaccgccaaggaaaaactcctttccagcgacctgtgggctgcacgcatcgagagtttatggagggagcctgatgggacgttctgggcaaaggtcaggtggtacattatccctgaagagactgcagcaggaaggcagctgcataacttgagaagagagctgtatcgtaccaatgatcttgcagacattgagatggaaacaatccttagacattgttctataatgtgccccaaagactttagggatgctaacaacggaggggatgatgtattttattgtgaatatgagtatgatatacattggcataattttaagcgtttggcagatattgatgatgagccagagacaaaggaagatctcagtgacgagccctacaatgctggtgatgattataacagtgacactgatgaagattcagactatgacgaggaggaagaatccacatcatctttctctgtcagaaggaatcaatcacatgaatctgcggcgaattcaaggaaaggtagaatatatggcctgcaaaaaattgggatacaaaaaattcctgagcatgctcggtgccaccaaaagactgagctggagaaggctaaagcaaccctgttattggcaactcttcctaagtcattgccttgcagagataaagaaatggatgagatatcaatatttgtaaaggatgcaatctgcaacaaccaatgcctaggacgctgcctttatatacatggtgtacctggcactggcaagactatgagtgtacttgctgttatgaggaggctgagatctgaatttgattctggaactctgaggccatattgttttatcgaaattaatggtcttaaattagcatctccagagaatatctacaaggttgtatatgaacagttgagtgggcatagggttgggtggaaaaaggctcttcactatttaacagaacatttttcaggtggtactaaaattggaaagcaagcaaaccagccaattgttttgctgatcgatgaacttgatcttcttatgacaagaaaccaatcggtgttgtataacattcttgactggcctaccaaaccaaattcaaatctagttgttataggtatagcaaacacaatggatcttccagaaaagttattgcctcgtatatcaagtcggatgggtatccaacgactgtgttttggtccatacaattatagacaactgcaggaaattataacaagccgtttaaagggtattgatgcctttgaggaacaggctattgaatttgcttctagaaaggtagctgctatgtcaggtgatgctaggcgagctttagagatttgtagacgggcagcagagtttgcagactaccgtgtcaaacagtctcgacagtctgcacagactactgtttctgcaaagaaaggtgatgctgttgtttccatgggtgacatagaagctgctattcaggaagtcttccaggcacctcatattcaagtgatgaagaattgcccaaagtttggaaaagttatactggttgccatggttcatgagctgtacaaaagtggactaggtgaaataatgtttgataagttagcaacaacagttttctcctggtgccatgccaacagagaactattgcctggatacgacactctcttgaaaatttgttgcaagcttggtgaaagcaagatcatcctctgtgaagagggtagtaagcacaagttgcagaaggttcagcttaactatccaagtgacgatgtgacatttgccctcaaggaatccccagatcttccttggctatccaagtacttgtgaggaccttgcatacacacgtcccatggtcgatctgcaaaggaaccatcgaaggatgtcggcatggcgctgcacccaagggatcacgcatatttaatcgcacaacaggaacataaaacgttaagaaatatgtacgtctgcaatttcgtctccttcaaactatggtgttgtttgtgttgtattgaactgccgcgtgtgagctgatccaattgttttctattgccatctttcagtaactatatacgaattgttcgttaaacattgacagttttgaataagaaacattgagatatcaaatttgtactttgccggcccc

SEQ ID NO: 41092 - DNA, 5760 bp, Zea Mays
aacgtcgtcgccgcacaggcacagaagctcccctcgcctgcggtcactgcatggtcgaatttgccccttgtgctttcctctccttcctgcaaggagtcgagacgagacatcatcccttctctctccacatctctcgaccccgacctcgctcgccgtctcttccctgcccctgcccctgccccctcagctgcgatctccctccctcccccgaatcgctgaatttttctcactcctcctccttcccatctcggatcgactccaagacgccgagcccactttggtgacccagccccgaaatccccaatcgagctcgaccggaacccgtcgattccgccggattcgacctcccgccggtgaggcggttcgcctgaatcggccgattggacccgaattcgggtgttccggatgcgctcagagcggaggcttgcggatctagggttccggagggcctagggttgctgccggcgatctggtgatggtggtgcggcgcggtgccggagctcggcgaggagggttcggcagcgacgttggagaagatgcagcgagccggatatgcatgggtggcgcggcgctgaggggtgcgacgtcaggaggcggcgtctcgttcggctcatgtggccagcggcacgcgtagaggcagaagctccaccaccaccggcacaaggaccagctacttctccttctggttcatctgctacccatcctcggactacttatcggccggaatcgagtgcgcagaagcaggagtgcatcgatcttccctgcccagtgtcatctgattcctttgtaaaggacgggcgtgagattagagttggcgattgtgctctttttcgggctgtcgatgtccctccattcattggattgatacgttggattgagaagaaggaagaaggctatcccaaattacgtgttagttggctttatagacctaacgacgtgaagcttaacaagggtatacaactcaacgctgcaccaaacgagatcttctactctttccaccaggacgaagcatctgctgtttctctgctgcatccttgcaaagttgcctttttacggaaaggtgttgagctaccagctggaattgcttcatttgtatgttggcgcgtgtacgatattgacaacaagtgcttatggtggcttactgaccgggactatattaatgaagaagtaaatcgccttctatacagaacaaggctagaaatgcgtgccgcattacaatcaggtggacgctctccaaagcgcttaaatagtccttcagcttcccagcaactgaagactgcttcagatggtacacagaatggtggtttgtctagaggaaagaagagagagagaagtgaacagggagttgatccagccaagcgggatcgtgatcgtctacttaaggttgatgacggtgagcctggaagctttaacttggatgatattaagtccgaaatagcaaagataacagaaaaaggtggacttccaaatgcagaagcagttgcaaaacttgtacatcttatgcaacttgatcgaactgagcagaagatagaccatagtggtcgggttatacttgctgatgttattgctgctacagatagtcccgattgcctcggcagatttgtccaatcaaggggccttcccgtgttggacagttggcttcaagaggcccacaaagggaagtctggtgatgggagtagtcctaaagaagcagataagcctattgatgaacttctcttggccctgcttcgtgcactagctaaattgcctattaatctcagtgcattacaaagttgtagcattgggaaatctgtcaatcatctgcgcagccataaaaatctggagattcaaaagaaagctaagtgtcttgttgagaactggaagaagcgtgttgatgctgagatgaagtcaaatgatgtgaagcctttagtttcaggtcaatctgtttcctggtcaggaaaagcaggttttcaagaaatttcaaatgttggaaccaaacgaggtggctcaagtgagaacagtccaaaaaattcagtgcccactctttcatcatcaaaagttttgactgataaacctgggggcacagatgctgcagcgaagttgaatcctggggtatctgcattgtcaaatttacaacatgtgcaatcaacacatgttactaccaacttgaaggagcagccctgcaaatcaactggtgggactggctgtcctgagctgcctactgtaaaagaggagaaaagcagcagttcaagccaatcgccgaacaacagccagtcaatatctagtgagccatcgaaggatgcaagaagttcaactgctgcttctggtggtgctagtaaaacttctggaagctcttcacggagccatcgaagggcaaacaatggtcttgtttcagggaacctgaaggaaccttctgtaggaagatctgtctcccttgatcgatcattgctgcaggataagtcatcccaaactggtacagcttctgaaaaaggaattgatatgccatctgatcatggaaataatcatagattgattgttcgctttccaaatcctggtcgtagtcctgctagaagtgcaagtgctggatcttttgatgacccatctgttactgggggtagagcttcatctcctgtggttgcagataggcatgatcagactgagcgcagggtgaaagtgaagactgaaaattctcggcctcatttagcatctgatgctaatgcagagtcctggcacagcaacgacattaaaggagctactggttcggaggaaggtgataaatcaccatgtgctatattagatgatgacaacagcaggacacctgatcattctgttaaggatgcacatgcatcgcgagctgcgtgctcgtcatatatgaatgaaaaaggtgtcagtgaaactaaggtgggaacctcattcagcccaatgaatgctcttattgaaatcaagtactctgaagctagtcattcactgcaagctggagatgacacagctatgaatcttcttgctagtgtggcaggagaaatatctaaatctgaattggcttcttcaccaagtacttctgtaaagaaattggtctgtgagggtgtcaatactggaaaggttaaagtagaaagtgacatgggcccatcacatccagggcaagcagatgctaagaaagttgccatggggaatgaagtgaaaaatgatgcttgtttggttccgaaggaggaacaacatcaaactgcgccatctcctgagctagcagattcaaaagcagttaaatcttcagcaaagattgaaatccatgaagggcatgcaaacaaatgcaactcccagcatgcttcaattgattccaaaggcgaaaatcgggatggctgtactgcccatgggaaagttgaagatggcagtacaaacaaggatggtgccatggaatctgcattcggcagccagcgtagcttggttgtttccagtaaaaattcaagattggttcttgctggggaatcttcattgtctgctgctgataaacaaacacagggtctgttaaaatcaactaatcataagcatcttctgagtgtatcggacaacccaggagcctttgatagacatgacagtatggctggaaaattagatttgatggctgcagaggtgaaaaaagctgatgtcgtgggcaatagtagtgtattgcagaatgacactgaaaagaaggaacatgtttctccctcttcggctgatgttccaaaactagtaccagcagcgtccccagttggtgtggcaaatgggaataatgagatgaaagaatcaaacggcagttcaagtgaatccaatagccatgtaaaatctgaaggtgtcaattctcagcaaagcgagcaaagtgcaaagcagagttcaaagaaatccagtgatggtgtgtgcggaaaagaagaccatgtcttatcagacgaagaaggttcttctctagccgctcacaccaagtcaaatgctacagccaagcttgattttgacttgaatgaaggaatacctggggatgatgggcatcagtctgagacaactgcctcacctgttgtatgttcctcagcaatccatttaactgggcttttgccattcacttcgcctactacaagtgggttgccgccagctccaataacagtagctgctccagctaaaggaccctttgttcctcctgaaaacctactaagagcaaagccagagatcgggtggaaaggttcagcagctacgagtgcatttcgccctgctgaaccaaggaagattttggagatgcctgctgccacacgtgacattccagtatctcatgctgctgggaagcagtctcgtcccacgcttggtttcgatttgaatgttgcagatgaccaagctctcgaggaagattttccacagagttctgcacagactacctgttcagaatctggaaatacgagaagtcgagatggctcgtcacgaagtgctggtattgaacttgatctgaacagagctgatgaagttgcagacaatggccaatttgtaccaaatgcttcacacagagttgaagtcccattgttttcgacgagatcgttacctagagttttatctaatgctggcgcaaatagctcaagggactttgatcttaatagtggacccgacctttatgatgttggcactgaacctgcaccaaggagcctaccttctaaaaatacaagcagtattcaattcctaccacaagttcctgttaggatgaatagtgatgccatgagtaataatatatcaccatggcttgtctctaccagtccttgtggtccagtagctatacagtcttttttaccatctagagaacagccttacccattggaggcagcacctggagcccagcggattattgcgcctacagctgatggtggccaatttggaggagttccatattttccaactctttcctcctctcttgttgggccagccggagcgttgccttcccaacattcaaggcagtatgccataaatcttgctgagggtagcagcagtagtgtacgtgacggtaatcggaaatgggaaagtcagggccttgatcttaactcaggccctggaagtatagatttagaaggaaaggatgaacggatgcctttaccagtcagacaaaatttgatcccacccctacatggctttgtggaggatcaaggaagaatttaccaaatgccagttgtaggaacaaagagaaaggaacctgatggcagttgggactcagaaaggtctacatacaagcagttaccatggcaatgagggctctgaaggagatcattttgcaccgactggtctgcgaatgagcatatcacctgcatgtagagcttggccggtgtgttcttcagtcactggactacactcaggggattcagccccatgacgatggcgtgggattgaggaaagcgaaaacttcctgtaattgttgtagattttttcttagctgttaggcttttggttctaatttactcaggagggtatggctgcggtggaggaatctttgtgatcctgagctctgtggccgctgtaattagaccgtccgctctgtttgttggtgataaactgttgagcacatgctggagctttacataagaatttagatgtggccttgttccttgttggggaagcgttacgtcagctgaccatatatatacactggtgcaacgtacagctctagttgctacaccatgtatcttgggttgcagtgcagctgtatgtataagaattctagtagatgagcagctataactttttttctctctttgacaccgaatccatctgcatctggtttactcc

SEQ ID NO: 41093 - DNA, 676 bp, Zea Mays
caacaaaatcaccaacatgacatacacattcctgtatttatttatttgttatttgaccaatataattccatcaattgaatatgcacaaattaaaaaaatcaaataatctccaaagaattttctataaatgcatgtacttatttattttattatttttatcttatacaaattttagggctttacaaattctacccccctaacagaaatctcgtcctcgagatttgtaagataagggatatagagagattggttgtaatatagcttttagtttctagttggtaccaaaatcaagagattttttttatacaaatgagtaggtgattatgaaggcatgggtatatatgtacaaccaccaaatgtgtaaaacaatgtctttaaagcatggataggttgggtaggacatagtagggtaaggaaggacttcataatgcatagtggatcttgattcctttggaagtatggcttgattcttattattcctcaacgagtttgatctccttcttctcgagtcttgatgtcttcatccgggtttgggacaagaggttaagatagatctgtaggcaacagatgggtagagggtttagtaggtagctatatgatagatgggattagttatgtaacctgttttgtaggtcaagttattaggtgtggccaaattgatctaagtcactaatta

SEQ ID NO: 41094 - DNA, 1222 bp, Zea Mays
gttttacaagaccatttgcgggatatactttcttcaagaaatcttccccacttgttccctcgcgtccatggccttgctccagcctactcttctcactcctcccccgctctgctgctgctcgcatggcctcctctacccagggttcctgaaactgcctcccaaattctcaaatggggcctgctgttccacggcgagggcgtcggaccggagcgagctggcgggtaaaagcgggggcttggcttggagagcggcggggagaaaggggcggctgcttggcgtcaccggagctgggcgaggccccttctttggcggcggcgggaggcgtatggacaagggcactagccgggtcgtggggaacctcgccttcgccgccgtcgtgacgtacctcgccgtgaccggccagctccgctcctcacaatactgctgcctgtactggctctcggtgcatttttcttctttgcaggacaagatatactgcagggcgattgtccgaactgtggaaaaagcttccagatactgaagtcagctttgaaggatggcccacaactctgtccctattgcactcaacctttctccgttcaaggcaacaaatttgttagagaatctgctagattttcatctgggagggctgctactgctacaaatggtccagtgttcaatgagttcttcaaccgcaacatgagaggaggaaacgcggcgccttctgagacgatcgtggatgtggaggctgaagtcaaggacgtggagtgatgtttcttctcagcagaagaagagcacgatttgcttctgaatctgtgagaaatggggagaaaactgaaactgtgagagactaggcaaacgtgcatatagatagatgggtatcggggatgggtagttgtgtagtgcccgcgcgcatgagaaactggacaaggcccctgtttgtttcagcttctggcagcttctggccaccaaaagctgctgcggactgtcaaacgctcagcttttcagccagcttctataaaattcgttggggcaaaaaccatccaaaatcaacataaacacataatcggttgagtcgttgtaatagtaggaatctatcactttctagatcctgagccctatgaacaactttatcttcctccatacgtaatcgtaatgatacttagattctccccacagctagattttcagaaaagctggtcagaaaaaagctgaagcattgctttgtggtctacgctccatt

SEQ ID NO: 41095 - DNA, 3597 bp, Zea Mays
aacaaattatagaatcacccgtgttcaattccaaatctcagacagtccagagggggagagattttccatcaactgctgattgggacaccagtgctgatcgccttgatcttgagcatgatattcaaaaaagttgtattgagaaggagaaaattcgtgatgcctgcccacgtcagcatagaagaggttataaaaggaatgagaagaatgacgagtatgaaaatgaagatttggatgtggagcaatgcggtcacaaatcacaaagaaagatggagggtactggtgatgatacaccaggggatgctacattgtcctcattcaattgttcacacgcacaagagtttcaattttgtgagaaactaaaggcacatctagagcctgaagcttaccaagagttcttgaaatgccttcacatatacaaccaagatattattacaagaaatgaactaaaaagattggtaaaggatatacttcaacattacccagatcttgtgaatggattcaatgacttcttgggtcactgtgaaaatatagatggttttttggaaggaaccttcaataaaaggcaaacatcgcggatggttagacctgtggaaaaagagagatacaaggagaacgagggggatagcgatcctgagaaagagagatacaaggaaagcaaaaattctgaaagagtattgaccttcaattctaaggaaggagcagctcatgaagctagtacattccctagcaaagagaagtataacttatgcaaaccaatatcagagcttgatctatcaaattgtcagcggtgcactccaagttaccgacttttgcctaaaaattatccagtaccttctgcaagcaacaggactgacactgaagcttccgtgctgaatgatcgctgggtatcggtgacctcaggaagtgaagattattcatttaagcatatgcgcaaaaatcagtatgaagaaagcttgtttagatgtgaagatgacatgtttgagctggacatgctgttggaatctgttactgttgcaattgagcgtgttgagaagttggtggaaaggatggaaggcaattcactgaaaccagacagctctatctccctcgatgaacatttgactagtttgaatatgaggtgcattgagcggctatatggtgaccatggacttgatgttattgatgttcttcgaaaaaatgttggtgtgacattaccagttattttaaccaggcttaaacaaaagcaggaggagtggtcaaggtgccagtcagattttaataaagtttgggctgaggtatattcaaaaaattatcacaagtctcttgaccatcgcagtttttatttcaaacaacaagacacaaagaatttgaacacaaaagctctattatctcagattaaagaaatcagtgagaagaataggaagggggatgatgtgttacttgctattgctgctgggaataggtggccactagttgccaacatgtcatttgtgtatttggatatggacattcatgaagatctttatcagatcatcaaatactcttgcggagaactatgcaattcttcagatcaagttaacaaagtgatgaggatctggacaacatttttagagcctctgttagggattcatcatagggctcatggcgctgaagatgcagatatggtaaaatcaaagaggcgaactagagaagttggtttggcatgtggcgggaaaacaaataatgctgcagcaaagggtggtaatggctctaaaagtgctggagctgagtctgtggctgaatttatgggtaggaatgaaacaattccgtctatgaagagcataaaacatgacaggataacatctttgtatggagtgggtgtacatccatttagtgcatattcggtgtcccacaacaatttaaggcctgaaacagaagagggtgaattatctcctaatggtgatttcaaagaggaacacttctgtgttttcgaagatgaagctgtagatggaacttctaaacaaaatgaaggttctaccagcagatctccccagggtagacctaagaattatctcaagttttcaggcaaggatcattcaggtgcagaaaatgaaggtaacaagagagcccagaggtctgcagaggatagtgaaaatgcatctgaggctgatgaagatatctctggcagtgaatctgctggtgatgaggagtcttctcatgaagatcaggaggaagaagaggatgatatggatcttgatacaaaggcaaaaaatgactgcagagcagaggtaaatagggaggcacagggtttggatggaggaacatcattgtcattttcagaatgtttgcaaagtacagttaaaccaatttccaagtatgtttccactgcattaccaaaccatgaaaagaaactttctcacatattttatggaaatgactcattttatgttctgttcaggctacatcagatcttttatgagagaatattgtcagctaagacaaactgttccacatcagacaataactggaaagcttcaaggcacataaattctccagatcaatattcaaggtattatcaacactctggtttcataaaagacttgttgtatatgacttacatattttagtgcaggtttatcagtgcactatacaacttgcttgatggttcttctgaccacaccaaatttgaagatgactgccgctccatcattgggactcagtcatatgttctctttactatagataaactgatatacaaaattgtgaagcagcttcaagcattagcatctgatgaaatggacaaccagcttctccagctttatttatatgaaaagtcgaggtctcctgggagcttctttgatctggtttatcacgaaaatgcacgagcccttctacatgatgacaacatataccgttttgaatgtaattaactattcagctcatggagtatgggaatgaaaaacctgagttgactgctgtctcatttgatccaaccttttcaccgtatctttataatggttatctgtcaagtattgatgataccaaattggttgatgacgtcttccttaggaggaataagcggaagcaagggaggaatgatgactcccctacttccttgaagatcatggacaatgtcatgtttgctaatggtcttgaatgcaagatatcttgcgaatcttcaaaagtctcttatgtcctcgatactgaggatgtcttatttcgtacgagaaagaggagaagctctatctagtggaaccatgcctgcgctgcaaagacaaattttgtgaaaattaacaccgtaaaatcgatagtttcatttatctcttcagaccgtatagggtcttgtggtagagttatgttaattacaatggcatgcactggtgggatcctcgtgttgttgatctgtcacttcactggaatatattggtgattctttgtgttttactcgctaccaattatatatgagcgtgtagcatgggcgagtcacggaggcagtgttccgtatgtgtttttgcagttcaacgcgctgggttcactgtgttgcgttatgacaggtggaccctaaaacttaaggagtagctaatgcaagagtggggcgaacaaggaactatgagtgtgtttggtttgagtaatgaagtg

SEQ ID NO: 41096 - DNA, 805 bp, Zea Mays
taaagtacccctagaccagctgtagcagtcttgcttaatatctttagacttatatggtatctgattgtatccttctagactataggactgtacctgtgtttctatatactcatatctgttcaaacttcaaacagaattttgttggtctcactaatttaatgcagagatgtcatatttcaagatccttggtggttggtgctagtcctaaccccaactccgccgtttcataactgatacaatgaacaacaacaaaaaacacttcaaattggttgtgccacttgtgcccctctttccaggctaccttagaccatatgttgaactatcctccagtgttcactggcatcaacgcctgctcgctttgcccagggcatgcatattgccatgtctccctacatagacacagatcaagcgtgtctcgtgtaagcccagggtcccaccaagtatcttcgaggttaatgttgatgttgtcgaggatctggacatggctcatattctggttctgaagacctcatgccatgcccaaagctgtctgccgtcaagtcaaggttattagtagtagtattcacattagtccagaatctgaacacgacagacacttcggttacgaagataccaccaccaccttaaaaaccgaagatattattccatgtgcccaacctccatgtttcctgcgccgcaagtagggccgcgccatgtgcccaaagtgttgagttgttgatccaaattatgcatatcagggttctcggttctcactgcatcatcattattattcttgtaaggccgctaaaaccggcgttatgtaaac

SEQ ID NO: 41097 - DNA, 1955 bp, Zea Mays
cgcaggcagtcgctctcgcgcggcggctctccccgcctcgttcgcccctaccgcgccatcaacgtgcctccccgccgcccctgtcctccccatgcccgccgctcccacccgagatggttagcgcccctcctccttccggtcccttcccctgcctcggccggccagccatggattcaccaagcgggctctggtggcggccggcgccgtcgtcgtgtcctccattcccgtcaaccccctcgatgtcgccaagatatgtttaccagacgaattgatatctaggctatttatgtggttactaattttgactcctctaagacatatttacacagggttggtcgttatgggagatatgggcaccttggtttggcagtgaacttgaccacttacaaagattgtttcaacttatatagtattgataaaaaaaacttggaacggaaattaagacaatacccccacaaattgacctgtttgtatactgccaatgatgatagcgacagcttcatgagcgtcagtggaggaggaggagaggcccatgtcggtggagctggaacccatcgccagcgagcagcagcttaactaggtccttggagaggcgtagcagctccagctcctcatcgtcctgctctggctgttgttgaaaaagctgtatattatgctcttgtatggatcaataggctgttggctgtcggtcatgacatcgccatcaagacagataggaaagttatattttttcctaactatatatgctcttacctattcctgttctccatagtacaaaagatgatattgattttgtggctggtttcatttgttggaatgctcttcaactttcttacgctcatttacattgtgatgggaatcgtatatccataaatagatctggagactggagcagtttttgttgggataaactttgtactggaccggagcatcttatctctggatgtgagtgccatgaaagtgatacccaacaaacaactaactctggaacacctttggtatgtcgggtaggcgcaaagccagcaagacaacaactgcttgagcagctttggccagttttgcttgccaccatgaatagccatatgttggccatcacatggtaccttgttcgtcccaaactagaccagagcattacaagcaatgactgccatatctaaaattgaaaacatgtgcggcttataagtatcctaaatttgctccacttctaagtatccaagatctactggttttgatgcgttccattgcttgcagcttttctctgcggtaaattgctggcttaaatgcatgctgcttgaaccctataatcagatagaccatcccgaatgcaagtcaaggcctgatagtggtctttctgcaattacagagctggaccctggttatataacaggtcctctctcttcagtatggaaagaatgggtcaaatggtgtgtagagtttggcattgaagctaatgcaattatcgctgttccgtatgattggagactgcccccatcaatgcttgaggagagagatctgtactttcacaaattaaagtttgtaacacttgcctcaacttgttatgaagcaaccaaatgctatacatctgttagcaggatcagtaagagttaatggcccagtgacggattcaaggtatcctgctcaccaacagatcccacaagcatacggttaccgccaaatgcctgcaaggttggacagtaccaacccatcacaggccatgggaggttacacgctgcagtcacagaaggaaacattatttgaagagttgccattttgaagagttactcgaatccaatattttgctcttttgaattccttggtgtacactggcaaatattagcatatttgaagagttgccatttcgatcatcatcttcatttgtactttttgggtcagatctaataaagcatcagcattaaatttacaatgatcacctaaatccatggtttttattgcct

SEQ ID NO: 41098 - DNA, 3168 bp, Zea Mays
gcaaaagagcaaactgccaagtgcaaagcgaaaccatcaaaccggtgccgatgctctgccggcgcccgtgccccggcgtgttcctccgcctcttcgccacttcctgccgccgcagctccctccacccctcgcagccgcacctccggacagctacagctctcccgacgctgcctgtggcgaagaaggtccccttcaatgtgtcggcgcacgggaggtcgtggagtgacccgtaccactggatgcgcgacacctccgacccggacctcgcggtcctcctcgccgctgagaacgcgtacgccgacgcgttcgtaggatcggcaggtggcggcggcctccgcgcgcacctcgccgcggagatgcgcgcccggctgcccgcttctactgccacaccgcctcagctctggggaccttggttgtattatcagtatgttccagagggaaaggagtaccctgttttatctaggaagctgaggccctctagtggtctggtaggaactctgcttgattacctttctggttctgagaaggagcaagtgttgcttgattggaacgaggttgcagaaaaaaatggttatgtccacattgggagttgtcgaatctctccagatcataggtttcttgcatatacagttgatacatctgggggtgaactattttcccttgaagtgaaagatctgctgtctgagcatgtcatctttagttcaccagacaagggagtagttagtttagcatggtctggcaacaatgaaagtttattttacactgtctgtgatgagactctacgtcctaaccaggttttctgtaaaaagttgcaatcggatgaagcagggtttctagttttcacggagaaagatgtaaactgttgtgtggatattacaagcacaaaagattttaagtatatgactgtcaattctaacactaggacatcatctgaggtttttgtaattgaatctgataatctaagagaaggattatggcctatacggaaacgtgttgacaaagttcagtactttttggagcaccacaacgggttcttttacattcttaccaatgctcctgtaaatgataccgaaacgacaactgaaggctactatctggccaggtgtagggctgaaaagtcactggtggatagatggcagattgtgacggtacctgactcggactgcaccattcaggatatggacatttttcatgataatttagttctctttcttcgaaagaatggtactcctcttttttgctccatcagtatgccaattgatgttgatgttcaggagccaaaggaacttgatgatctcaacccatggttttttcccataccgtcagagttatgcagcattgttgctggatccaacaatgatttcatgtcatctacttatcagctagttatttcatcacctgtgataccggacttaactgtggactatgatttgagaaaaaagactttcaccatccttcatcaagaggaagtaactaccatctctgcaaatctaggcggcctgggctttcaatccaatgtttcaagcatccaacaaaacatgcagcttgttaaaacctcacaaaattggagtgatctttccaagctattctcatgtgaaagggttgaagttatatcacatgatggtgtttcaatacctttagtgatcctgtattcatggggagcacattgtcatggagaatcacctgggatcttatacggttatggagcttatggagaggatttggacaaaagctggtgttctgagaggttaagcctcctctctcgaggttgggttcttgcatttgcagatgttaggggtggaggggatttatcatggcatatggcaggaaccaaagctaataaaatgcattcaattcaagattttgctgcatgcggcaggcatctcataaagcaaggctttgttcaccaaaatcgcctttgtgctataggctgtagtgctggtggtctgttggtgggtgccgtcattaatatgcttccagacttattttctgctgcagttctcaaggtcccctttcttgatatctgcaacacaatgttggatcctactttacctctcactgtcttggactatgaagaatttggtgaccctaatagcccagatgagtttgaggcgatcagcagttattctccttatgataacttagcacctgatgtgtgctatcctccagtcctggtgactgcctcgtttaatgatacaaggagtttgggaagctgctaagtgggttgcaaaagtaagagatgtcgcgtgcccatcctgttcccagtcagttattctcaaaactaatatgcaaagtggccattttggtgagggtgggcgtttcacgcactgtgatgaaacagcctttgagtatgcatttctcatgaaggccttgggtttggatgacgtagctatgatgtagcgtactcatgcctgaggattttcacggaacagatttttttgtggctctggaagcaaaaactgagataattaccttttgtgatatgctcagggataagattgtatcctcataattattgattaaaagagctcgcaatggaaggtgatgcacccttgaggtgtgttctgtttggcattggcttttaatagtcaagctgtggatttctacatgcatattatcaacttatgctttcaaaaatagcacacttggatgctgctcatcaacagtgcaaaggtggcagatgagatccttattatggtgttcgatatggggcttttgaccaaaggataaatggttgatcatggatgttgattttgacttctacttcatacggcaggttggtgcatgttgctttcttctctttgggtcatctggcagatgatgtactctttttacgccatccttaaattaagctcaggttccatgtcacatccttgtgctcatttttttagcgtaatcgtaatcgtcctcggccggtcggccccttgctatgcccacacatactcctatgttcagtgcaacactacaaattaaatgatggcttgctagaacttattgagcacatttctccgagcttatcctaggcaccctttccttccttttttttcgaggatcctagtcaccgtctgtatgtatacttgtgcccactttgcttagtgcagcaatgcaaagtaaatgatgactgtttgaaacgtaccgagcacatttctctctgggctatcctatttt

SEQ ID NO: 41099 - DNA, 1726 bp, Zea Mays
gccgtgttctctcctttatcttctccacgtagccagcgaccaggccatctccccagcgctggacactgccactgcccgtccttcacttgacaccacccatcttggagctcgccttccctgctccccctagcctccctccacgcgcacgccaccgttgctcacctcccagtagctccgctgcatctgcctgctcgaccccgtcaagccgacgaacgcctctgtaagctccctgttcgccgcttcagtgaaccatcaccgcctcgccgtggagctcgccggccaccgcggcatcctcagctcatgcacgccgccagcagctaggcctctacctgttccatggagctcgcccaggtcggcgttcgtcctctccctcaagctcatctccatggccgcgtcaagctcttccccacagcagctggcccgtcgtcgttcttctgttccttaccatgctcagctgttcgtcctcgttggtgaataagtagaacggttaaatatattagttgcgataatttccttgtcgtggttaggatgcattgtgactatattagatatttgctgatgtgtcacatatgcaatgtatatttgaattggtgacgtgaaggatatgtctggtattttatttattggctagccatcatatttttcaggattatgctagttttatttattgagaggtagtcgatgttcggctctaatagtcattattttcgatgttcggctctaatagtcattattttctatgttcggtgaccgattaaatgtcttagggtgatgagagagtaaattagacaaggaatgcttaggtagacgtgtaggtatggtacacttgaattaattataggtttacgacatgaagtataaatgaagtataacgatgatgcgtggaataggtttagtgttttcaatggcaagctgatgtgttcttctcgagtagccgattctattggtttgaggaaagactccaactagaacccactattgatgccgtagtttcgagtgaatttagtattagtgcgatatttaaagtgtgctcgatgaaaaccccgaattagtattcgttaatcgatgtagtgtatttgagctgaatttattattggcgcatatttttgttagccgaattgttagatagattgaataaatatgagtgatgcaaaataaaattaagatagttctttgtgagcgatgtggtataatttataaagcgaggggtaagtttagcatttaattaattagccgataagttgtgtttaggctaattatgttaaatgtgtatagtttgttgttttatgatgtttgcgttagattcagttaatctagagaagcgtgattattgcgcttagtcgtatgtcgataactagtgtttccgtatgaaatggtacaacgcctcgccgctaggtgtttaattcgctatcgtgtagcattatttaagtttgtgatattcctgcttatatccattcatatgcaccatgcatctcattaggtacgctagctgagaatcgtacggagaaaaggacaatgaccaaagctgagtcgaccacaagatgtcactacgcgtaagcttccccacaagacgatgtcgtcagtcagaccaacctgaagatggataatctgaacgagtgctaagacaaaggatggtcgccaagtggatatcatataactaacactaacctagtgtttattctaggcaagccccggtgcatgcaaccccttccttatgtttttaaat

SEQ ID NO: 41100 - DNA, 1508 bp, Zea Mays
atcaaggtatagtattcaaattccaaggaatagtaatgcatcaattgttcatcatacaactcatatcacctaatgcatcatttaagatgataaagcatttaaaacacaaggaagggacaaatgcaccgaggcttgccatattacaggaggagatctgagatcttctattacgagataagcagttagatggagtccaccattggatcaacaacattggagcaggctccttctttacaaatcgcttcttcttagtattctacatgaaaccccatgattatgaatgcatgtgcatatgctacttgcaaggaaggtattacaaagcattacaagattacaatttcaagctatcaccacaagtcataactaccagggagctacttatcgttagaactcatctaaccatctaaaacttgctaagcaactccatttttcactaagtcattaggtgctttaatcacccagggtaaaactcttttcttttttgagaaataattaatttgctaagcaaattttgtctaaacagaatttcaccgggttcacatgctcaacataagcttacacaatttttctctcataatttttagtgctctatttttattactaaaatttcagataaacattttaaggcaccttttattcctctaataatatctatttgctaaaaaaactccaaatctatttttacctaaaactctactaatttacccacctaactaaacttgtttcattattttagtaccttttcacaatttctggcgcaaataaacaaacatgagataaaagaaaattctaaacatatgaacagtcgcgaaccagaactgactcaaccggtccaactctaagcaaaactagcccagtgcgtgtgtaaatggtcagaatagaactattttagcacaatgcgatatccatagggaacgaacccgcaacctatacacatgcggcacaaattaccataaatattactacgacgacgcccaatgatgaagcgacgacgacttggcaataaggtgagtgagacgtcgcagcacatgaagtatgctcagggcgactttgagagcacctgctattgttccatggcgaggatgaggatggtgaattggtgataccaaaatagcaagacaacgatgattcccaaggaaactacaagcacgtagggtccgtggctagacggctagagcgagacggccgaaggacactcttgcacaacgaccagagaaggggctttggcacctggggcgacagcgacaagacgcgcgttgaggcttggagctgggcgtgcgagtggcaaggcaagcactgaggagaccaagcgcatagcaagagaagggtggcaattgacgtccagacatcaccgggtgtttgacagctgttgctccagcgttggggaggagagggagatgacgaggaggagctggggtcgagcggctgctgctacaccaagcgatgggatgagggagggagatggcatggaggaagaagtgttgagagccaagcgttttggacttcca

SEQ ID NO: 41101 - DNA, 2682 bp, Zea Mays
cctggcccctgtgctccccttgccaccgaacgagagccaaaagcctcccgccccacgacgcgcccgccccggcggcgacgccccggaggacgtttcccgcagcgaccggcgaccaagccttgattgcctccgccccatggctacccgggcgcgggcgtagccgccgcctcggccgcagcaggctcggtccgcccccctcggcgatttctgttccagtcgcatcgcgcgacagctcgtcgtccgattcggatccccgccaccgcggcggaacgaggcgtctccggtccccgagggtattcggggaatttgagactgataagtcgggatcctgtcgataatgcggggctacgtgtacgagaccaataccgcagaagggaagggagcctgcgctagttgctaatgacggagagcgagggttaccaccaggaagtggaagatgagtacggagatgagtactatgatcaagatgagtatgaggaggaaggttcgggtgctggggatgggtatgctgaggaggaagagcctacagagggacaaaaggagatccttgaattgagagaaagattaaaagagcagattaggcgaaaggcaaaggctgctgctgcctgcacagctggtcgatcatcttcttcacaaatacctcaagccagggacaaatttggctctttttttgggccatccaagccggtgatttctcgtcgagtgatagaagaaagaaaatcattgaaagaactgcatagcacggttgcaagggagccaaggccttctggagtacataaggatattccatcgtcctctaaagtgcaaagtagagtaaatggacatcagcataaacaaaagattgttaatcaggtaaagaagaaggctgaggcacttaaggataaccgggattattcatttctactctcggatgatgctgacctgtcatcctctccaaaggagaaacctgctgctagatcttccttgactcaaagggctgatcgtgaggtgacacaatcaacagtaaagaggaaggcaccaacaagtcaacctgcacgcttgtcaaatggatatggacctaagaacacaatgtcaactcaaaggcatgctgaaggtaaggtaaattccatgagaagggaggatttctcgaatacagaaagggttgtttcacgtgacaatgagaggatgtatgaaagggttgtttcacgtgacaatgagaggatgcatagtattgcaagaaatggatccaaccaggcaagtactagcaaaaccacaatccaaaagcatccaagcaggggtcccattgctaataagcaaccgtccaaggattcgaatgatgcaactctgaggaagagcagtgtagcctcaaagcaccatcccttagagattgacagaccaaaatcctcgcaaagtcagaggatgcagtcagctggtcagagaccacagcattcttcccatggtcagacgccacatcaatccatgcagcataggacgcagcagtcattgcagagtcggaggccacaacaaatgacacagggtcagaagccacaacagtctttgcagagtcaaaggactcaacagtccttgcagaatcgaaggccacagcagtcctcacatattcagaaatcgcaatcctcacaagcacacagaccacagtcattaagtaacaggtctcaggctttacaaggacaaaggcctctttcttcacagggtcaatatccggagcaaagaagagtacatgcaagtgacagagtcaaacaagctgaaaggcagattcggcctccttccaagtccatgccatcacggccagtctcttccaatggaattcgtgatgatcatgcaaaaaggaagcaagtggcaaaaagaagatttgatgaagatgatgaagaccccttagcaatgatcagaaatatgtttgggtatgatcctagtagatatgcaggcagagatgaagatgtcagtgacatggaagccgattttgctactatagaaatggaagagaaaaggagcgcgaggattgctaggcaggaggatgaagaacaacttcgcttgattgaggaagaagagagacgcgagcaggagagaaagaggcgaaagatggcacgaggccgatagtcgaatacactcctatttggatgttataatatactaccttcgttctcgaatatttgtcgtccgctggttcatttttgaactaaaccgtgacaaataaaaaagaacgcaggagtatctggcaggcctgattgcctgaatacgaagccccatggcggatcagacaggcacttctcttgcagtcctgtttacccttaccacgatgattatctggaggcaaatcaagggaaaacgacaggtgaccaacactgggcacgtgtaacagcagactgtagttgtagtggtttagttctcgaagctgacatggactatatttaagttctcgtcagattgtttggatagcagaaggtttccattgttgcagcgcctcaccagattgtttcttcatatgatatactgattctttcagtcaagcctatataaggatgcgtaatacaagtgcccctcttgtatatctttttcgggtgtaatagtgttgtaataaacgatgttcgaattttcggatatgattttgagctttgtcaggcgatcactgcaccacggtccacagagatgcgcttctggccgggagccaatcgaaggaagcgggaa

SEQ ID NO: 41102 - DNA, 1903 bp, Zea Mays
ctcttccccaatctctctgtcggaaaccgagtcctcttccaccgcacgccaccggccaccgcgtcccctccaacggccaccccgccccctcgctccggcccctccaccggccaccgggcggcccgccccctcgccccggcccctccaccggccgccgcgcgcccgcgcagctccggcggcgcgcgcccccctcggcccggcagcgctaccaccgcgcctcggccccgccgcctccaccgcgcctcggccccgccaccgccctcggactgtagtttgagataagctagcaatttttttaggccagtacgcatcacttctctgttttttttttctgctgaagtaatttgagataaatttgtgttttacctgaagcttctgagctctagactggtgcttccatttttagcacaagctagttatgttagcttctgtttctctaatgaaggtgctagcttccatttgatctgaacacgcctaactgagtggcaagtcttccttgtcaattatgttacccagtcagtaggtttcccttgtggcatgtttaactttttaataaaaaaacaatctgacatgttattgctcagttacaggcttggcaactctgaatcggctataatgaacatgttcagttttagttccttctgccttgtgatgcagcaacttccacaggacctcaagccgccatctcgccacatgacctgattgcagccttgcaggcacagcacagaagcagggttgcgccacctctctgagtgtcataggttggtgcataggcacacacacacaggtagccatggcatcgcgtaagcttctcgtgggcctcacagccaggaggcagctacaatcccgcactcagcaactattctgggccaccagtctccctgaagctaccacttctcggtccctaatggtggctgctgcaatggcgcggttatcggacaggtcttcagctccttttatcttatcttcaagggccatctcgtcgacgcagcctgtgatgcagtctacaggagatgtgtctggctctagcccatctgcagtggatcacaagttagcaatgcaagaggatgagtttcacaaattagcagatgagacgattcatgatttgcttgaaaaacttgaggagtatggtgactccattcagatggatggtttcgacatagagtacgggaatcaggttttgacattaaggcttggggatttggggacatatgttataaacaagcaaactccaaacaaacaaatttggctatcttctcctgtgagtgggccttctaggtttgattgggatgcaacagctaatggttggatatacaagaggactggagtgaaccttgtgcggcttctggagaaggagattggtcgccttctttcatcatctccaggagctcatcatcctggagctggccaagcccgagcctggccgcgctctgcttcaagctccagatggtgatctttcctgccctgggctccatgagcagctggaaccccttgcagagctcctggatcaggccctccacgcccagcttcctcgccatcagtggcaggaagtcctgaaactgcacggaggagcccttgtcggattccatgctggagttatcccgcccgcgaagtcgtgatgaggattgaagatcagggcaatggttggcaaaagttatgcgtgcgtgggtaacgaaggaggctggtgtttatttatagcagcaggggaggaggaagttcttggaatcgggagcagttcgtttctgcgaagtagctggctggttgcttggacatgtctatctggcttcttccctttcttttttaccacataaagactcgttcggttagctctcaatccatatagattaagtgagattgagtatgtttaaattccaaacaagtcaaacttcttcttaattttttt

SEQ ID NO: 41103 - DNA, 338 bp, Zea Mays
tttgtatgtgattggaggagaaaaaggtcctagaaattggttggagaagaaggttgtagcgcatcgctcgccaagtgttcgatcaaagacttcaatcaaaggctatcgttgtttaggcaaatatcaaatcgaattgagatgtggtgagccgattcgctatttttactattggttttatgatcgtgaaataagatgcttcgtatgcgtatgaagtttaagttagaaatacatgtgatgcgaggtgtgcttcgatgagtttagttgtcgagtatgttcaaactagttctattttgcagagtgtggtatttcggtgacgcgtaggttaagtttagtatttt

SEQ ID NO: 41104 - DNA, 358 bp, Zea Mays
cggcaagcgatttaagcccgcgtccatctctagagagaaatacaagcacaactacgaaatgggacccacatgtcattggtggaggcaccgtagagatgagatcatccgtgacctcagcgtgatgtcaccgcccacgatacattaaagaactccggcggccgaaaaagaatctatacgccgcgggatgggcctggtgggccggtcttccggaattgaggccatgcgtgagcccttctcttttttttcatttatttttattttcttttgctttcttctctctttctctaaaattcaaatttgaatttaaaccctgttgtgaacttatactcatttttggatgtatactttaatcaggcct

SEQ ID NO: 41105 - DNA, 2662 bp, Zea Mays
ccccctcaaacctgcgttcagggaaaaacatctttctttctctcagtcagtctattctcctcccacttgcaatccaaacgaaagcaagaagccgccgccgcttacagctagaggagaggagagagaggggagggaagggagggcccgagagggaggctccaggggccctgcattgcgtcgggctcgggactgtcgattgggccgccgggatggatcacggcggcgaggaccgcgtcgtggcggcgagcctcgcggcggcgcggcgcacgctgcgcgccggcttggacaagtcgcgcgcgctgggccacgcgctagcccgcgcggggccccgcctgaaggagatccaagcggcgctgccggtgctggaggccgcagtgcgcccgatccgcgcgccgcgggccgagctcgccgccgccgggccccacatcgaccgcgccgtgggccccgccgccgccgtgctcaaggtgttcgatgccgtgcacggtctcgagccgccgctcctggcgcccggcgccgcgggctctggcgcggctggggacttgccggggtacctcgccgtcctggcgcagctcgaggaggcgcacaggttcctcgccgacaactgcgggctcgccgcgcagtggctcgccgacattgtcgagtacctcggcgaccgtttcctcgtcgacccgcgcttcctcgccgacatcgaggtcacgctcgacgagctcaaggcaccccctaccggcgacctcgacggagggctcctggccgccgccctcggtatcctcgaggccgagttccgccgcctcctcgccgaccattccgcgccgctcgcgatgccgcagcccggcgccgccgctggctcaaccgcgccatcccgcgtgcctgccgctgccgtccacaaactcaccctcattctcgatcgcctcgtggccaacggcaggcaagaccgctgcgtggccgtttatatcgacgcgcgcgggggtgtggtcagtgccagtcttcgcgctcttggcctagactacctgcgtgagccgtctcaggatgcacaggcattgggacctgctcttgagctgtgggggcggcatctagagtttgtggtccgccgtctcctcgagtcggagcggcagctctgtgccaaggtgtttggcctgcataaggatgtcgcgtccgcatgctttgcagaggtggcggcacaagctggggttcttgaattcttgaggttgttcggtggcaaagcatgtgcggagattcagagccagacaagggaccttgtcaagttgttgatagacggtgctgtcgagatctttgaggagttgatcgtgcaggtggagctacagcggcacatgcctcccccagtcgatgggggcgtgccacgcttagttacctttgttgtcgagtactgcaaccgtctgcttggtgagcaatacaggcccatgcttgggcaggtgctaactatccatcgcagctggcgcaaagaggtgttcaatgacaggatgcttgttgatgtggtgctaaacattgtcaaggcccttgaagctaattttgatgtttggtccaaggcatatgacaatgctacgctctcgtatctcttcatgatgaatactcattggcatttctttaggcatttgaaggctactaagttaggagagatcttgggtgatgtgtggctgcgagagcatgaacaatacaaggactactatttgtcaatgttcatcagggagagctggggagcactttcgccactactgaaccgggagggattaatactgttctccaagggccaggctacggcaagggacctggtgaagcagcgcctcaaaacattcaattcaagcttcgatgagatgcattgcaggcaatcatcatgggttataccagacaaggatttgcgggagaggacatgtaatcttgtggtgcagactattgttcctgcctatcggagctacttgcagaactatgggccacttgttgagcaagatggaaacaccagcaagtatgtaaggtacactgttgatggtttggagaagatgctcagtgccctttacatgccccggcccaggagggctgggagcttccagatcaaacactcgagtggatggatggaaggaactaaggaacttgaaatcatggacactgccacactgcactattgggcattcgcattcagggcaatagaagcatctgaaatccgtttggagaattttgtttgtttattccccattgcactaagataccttggagcaatctgacagtcttaatgggccacagaaagtttgggcaggaaacaaacacttagtggcagatgaaatagcttttgatctggactcgcatccaatagccgagacacccttcttccatgcctgcatggggtcatttagacgccggggaactgcagctgcctaccaaactcttgatcgagctcagcaccagccaccagattgaaattgttggcaggacatggacgttggatgagcatggggattttcagaaggaatggttcgtgcagaacatgccaattgtcatagagccatggaggtcctctagcggatcaatcaaggccacaaacatgcaaacacaagagtcaaaacaagcacaggtacctttcacaaaagaggggggggggggggggagagagagagagagacgtaggccaggaaaggcaaaaaaaagttttgtt

SEQ ID NO: 41106 - DNA, 331 bp, Zea Mays
ctggttagccaaaaatagaaaataaaaacgactctctagagtgcaaataaaatataaaagttattgaagagtgaaaaaacatagaaaacaaattttataaatgactctctaatggtgtgtttggtttgtggagtcactctatgttttatgaggtgatgcatcataagttcattccatcaattttggtggaatcaactcactcatcatgtatatactaattattagcttatgaggaatggggtggtgatggatcaacccattctattccacaaaccaactaaaaaggtgaggagtgagaagaagatgaattacttcattcctcaaatcaaac

SEQ ID NO: 41107 - DNA, 1621 bp, Zea Mays
gaatcctcctctcagtcacagacacactcgttcgctcgctctcactctctgctgttcgtccatccatccggatccgtcttcctcggtctcccacgagcagcgaggaggctacagctgggaccggccaatggggaacaaaccgccggagctgtactacgacatcctccacgttgccagggacgcctccccgcagcgggtcagggcggcgtacaggagcctggtccgccaatggcaccccgacaagcaccctccggagtccaggccagcggcggaggcccggttcaaggccatcaccgaggcttacgaggcgctgctgggccagcaggggaacatgtcggcggcgcccgcagtcgcagcgcgcgacggcgaaaggagtagccccgccgacaaggaccgcgccgactccgcggcggtgtcagccaggcccagggcggcgcggagcggaaaggccggcggcgcgccctgcacgccggagcgggaggagccggccttcaagacggtggtgtacagcgccagcagcagcgtcggcggtggccggggccggcgcgcgctcgccgagttctccagctacgtggtgcgcaaggcgccgccgctggagcggagggtggagtgcaccctcgaggagctctgcagcgggtgccacaaggaggtcaggtacacccgcgacgtcgtcaccaagaacgggtggtgtgtaatgcttgctgcctctgcttgcatgtgaggacgccggtcgccggccaatcgagcaggggacagtgaccctgcacttcccttgtgcagttcttctgccttgtgctgctgattggactgaccacttaccgcgccgtcacattttcacgctatagctacctgctaccggtggatcaacctcgagcgtttcatgtcctgatgatggcagactggtcaccaaggaggaggcgacgcggacggtccgggtgaagcccgggatgaggaaaggcgcgacggtgacgctggagggcgccggcgacgagcggccgggctgcctgacgggcgacgccacgttcgtcgtatccgagaggaggcaccggcggttcaagcggctcggcgacgacctggtgctcagggcccgggtgccgctggtcggcgcgctcacggggtggcagctctcgttcaggctgctcggcggcgacaggttccggtgcgcgttccgggacgaggtcatctgccccgggtacgtcaaggtcgtcaggggcggcggcatgcccgtcgccggcggggccaagggcgcgcgcggggacctcgtggtcaagttcgacgtcgtgttccccgaggacctcacggacgagcagcggaaggggctcgccgagattctgaggggctgcggatgaagcttgcaggtcaactcaaactgcggcctcgtcctgtgacggcttcgtgccgtgtaaaaatttttgttaggcgcttctgttgatagacagctcgggacaggaggactctacagcgcacgctgacagcgtgtacatagattacagaggttctgtttttgaaccgataatatacgtggttgtaacctgcaagaactgtatacggcgattttttgtagtttctcttttatttattacgtggatctaaatatttatcggttaccacaccagctagc

SEQ ID NO: 41108 - DNA, 354 bp, Zea Mays
gtgcaactccaggtacttctccaagttgagcttcaggttcccgtaacctcgcttctattcgcagcaaaacatataaataggcaaccaataaataaaaataacattacaccaatcatgaataacagctgggtgaagatcgctcgcatggcgccctacagacagggctacatgccccactgcagttgccgatgcccgtcctgaccgccgcccgcccgcgatgacgcgctcccatctgttgtggcggctgcccgatctcctattgctgtcccgtcacgtccgtttccttcctgctggctgtgatcttgtcatcgatctccttcctgtggctgactctctctctttttttagctagcg

SEQ ID NO: 41109 - DNA, 3085 bp, Zea Mays
cacgtacacttctcacatgtggcaacctaggatatttctccatgcccctacccagccattcccctaaaaatctccagccgtctgtcttgctgctcgttcctgcagctcagacgtcgcctcccttctaccccttgctcctcagccaggcttgttagccgagcccctccaactagcgtgctagacctttgacgccgtttccccgtcgtccaagctccaccatgcccacacgtccgtcctgctcctccatgcacacgcccatgcatccttatctccctggaaacttcactcgtgtacggctccctggtgataatattcagcgatgcttcgccagggcaccgttcccctgcgcgctcgctggacgccgtcgcacatgctccctgctcggcctccccggcgtgctgctccctcgccttggtgcccctgcgagctccttctctctggcccggtttccagctcgggcctcgctagatgccgatgccgcttttctgacctcgtctcgatactcaatcgctgcagcacgccatgccgtgtgtgctgcactgtcatcattcgctatcctcatttttgctaatttttctcgtcgtttctcgtctacaaccttgtcagctcctgcgtgtcgtgcgcgtcttgtgttcgggtcgagccccaggattttgaggaaaaggaagctccagtgcattggccggtgaaatgaataaaatggattttgaagaaaaggaagctccaatgcatcagccggtgaaatgaataaaatggtggtaattatggtccttgtgaaatctgagatcaacttagtcgcgggtctcgctgccgcagaacgttgtcgcagaccgcttcaccgtcgaccctttgaactgcgtcatccccggttaatctcgcgcgcgtaccgacagcttcgaagaacacctagatgaggtggtacttgaagaagtctactccagtgcctgctcatcaagtggatggagctatctaactaaaggttaggtataaggatctagaatctcttctctgcaacaaaggcaagccccggtgcatttaccccttccttgtatttttaaaaagacttttatatactttaagtctagtgaaatgtgcattaagtttataggaattgattggaaactattggatgcattgactaccttgatatccattcctgttatatatacttctttcgaagtatcaaatattgtttacaaaaatgcttagccctgcttagatctggtggatagaggttgtcttttgcaataatgcctagctcaggggttatcctgaggacggatggcttctaccagcaagaatattttcattgggagcatggtgggatcttactacaaagttccctataatgctcttttcatcctaaggaacacaaaacaatcctaaggatggaagtacttaaatcgagacttgggctaggaacaggtgatgctcctcccaggttaattaaggattggatgcgtatgtaggcctgtatgatcaaggactatcttaactggccacatgccctggatatgggacagggtaagcttgaacccctctattccatacatgaaaagacaatcgcgcactgggagtggagagatggcgagagtgacacatacgctcctggcaaaggaccgcctaaaaggggtggtgtgctctcgggtggcgcgcacctgttcatgcagtggaggatccgtgggaattgtagacatatgcaagagttacgagaaacatatgtcgtgtggttagagatcctcagctgagtaaatcgattcggatcgtcgttatatccccggaaagtggagacttgatctctgtccttcaacctaagtcaggatgtaaacattatgaataaaaatgatgttgtattgatgagatgctgaaataagactagatgtaaccagagtctattaatatttaatctggcgttaaaatattgaaagtaaggactcactttagtaagctatttctgcaaacgtatctaagttgattcttgctaaagccttttccttgattcctatttaaccagcatatccttaagagtcatttttccttagtcgggtaagacttgcgaaagtgcacgccgtacttagggttttcgaacccatgttgttgtaggtgatgaggagtactctaagtgttcctgtggctggagggcgtttccagttctggaggaagactagttaggctagtgtataagctttggagggttcctaccgtcctgcttttgtaataagttatgcattttgagtatatcaggacttgtaataaatgtaactcttactatgtgtcaaacgatttttgtttgatttcaaactttaccagagtatgttcaaggtaatttggcaccactttcatatttgggttttgtagatttgagttttggaaaacagagaacacggctgaacttcataaagggtttacagtataaaaaggtatttggagaaagagaaagaacaccatagatgtaaggtaagaggatatatccataatttaaagtatttttagaggtaactgctatggttttatggtgcttgtaaagcttttagaaagttgcagccgacgaggaagaccacggcacatgtgcgctcgtttgggagcggcaggcaataggcggtggcgcaacaccggcactagggggagggcatagacgggcaacgcgttgcgtatgagacgattgggtgatagtgcaccgcgctgaggtgcggtgcggcgggacgggacgccaccagacagaaacagcacggcagccgctagatggcgggcttggcggcgctagggtgagggcgagaacaggcggcgctgggaggaagaggaattgatgtgagtggtgtcagcaaatactccagccgcaggacacggcatctcagcccatgagccgaaacgcaccgatcgggctcgtagtccaagcatagaaacctcctacccagaatgggctagattcaccctagaagaccggctcatctccagcaggccgtttatagttatagggtcatgtaaagtactattttgtactatagattacattgtttctagaataaaatttaaaatagagagtaaaatagggagtctgttggagatagtctaaagctttacgagc

SEQ ID NO: 41110 - DNA, 1667 bp, Zea Mays
gcgtgcccccctccctccctcagtccctctctctcgctctcggcgacgactgggcgaccgccgccgccgctgcgccgcccttgtccaggtgcccaggtcttcgcaggcgccttcgccaggtcttcgacggtaacgagcaccaaccggattcagggaatataagtaaaatgaggccagttttttgtgggaaccttgactatgatgttcgcatctcagaggttgagcgcctttttgggaagtatggaagggtggaacgagtggatctaaagacagggatatcatggagcatatgtgctcttcctggttgatggactggctctacctttactgcctctgcctgtgccccatctcatgccttgtccatctccaggagttcacaagtccaccgtggcatctgttcacatggaaacgaccacctcgtgactgatgtcttacttttacgatcaacattgcatcctcctcccccgcctcatcaccatttcctcgccaatccaaccatgccaatctcatggccggctggagagtggagagaagtggagggtttgcatttgtctacatggaagatgaacgcgatgctgaagatgctatcagtagacttgatggaattgattttggcagaaaaggaaggaggatcagggttgagtggacaaaggaggatcgcactgttggccgaaaaagcagctcaaggaggtctccaaccaatacaaaaccgaccaaaaccttgtttgtgatcaactttgacccgatcaacacaagaatccgagatctggagaggcacttcgataaatatggcagggtcgcaaatgtaagaatcaaaaagaactttgcctttatccagtttgagatacaggaggatgctacaagagcattggagggtactaatggaagccatttcatggacagggtgatctctgttgagtatgcacttcgtgatgacgatgaaaaaggtgaaagagggaacgggtacagcccagacaggagaggtcgtgaaagatccccaggtagaaggcgttctcctagtccctacggtagaggacgggagagaggtagcccagattacgggagaagcaaggagagggggagcccagactatggcaggggaggacgcagccctgataatggcaggggagtaagcccagctggtggtggcagaggcgatcatgccaggggtggagggcgcagtcctgactatgatcgccagcgccgggaagctagtcctccaggttatgacaggtcccccagccgctcacctgggagggaggcgagagagtagaagcagcgttccattccatgcctgtgttcaagcatcagatgaatgtgcaagttggtaatgttagccagcaggaaacttgtctactatgcgcgttagctcgtgtttgactttccacccatttcagtatgaagcgacctcagaatgtaactcatgtagtagtattttttcaatggtagctttcagcactggtttgaacctgttgttggctttattttctgagtaaaatgcaccactcgaactttacgcattgtgtcacttgggtactgaactcagaaaaccagttaaacggatcatgaaactttgttggcccatgtaaaaccattcaaagtcagttctataaaccggtagccacttttgtcatttgggttctcgaactttcattaggatgttctaa

SEQ ID NO: 41111 - DNA, 2885 bp, Zea Mays
ccagagcctccgccggcgcatccggcgactgatttgcagggcgtatgtgttggaaatgctcagctgctagtttttcctggtagatcatcaagtcttgagagcagttaaaacaaaccaatttttcctgcaagagctctacgtgctatggagacagcaaatacattttcctttggttcacttcaattttgacggagtgcttgaagatggctttgttgccgtcaagaagttatactcgtatattgcaattgaagacgaaccatttcatcgtgaggttgattgtctaatgaatattaggcaccacaacatagtcttgtttgttggttactgtgctgaaacacaggaagtggttgtgcgtcaagaagggaaacatatttttgcggaaaaacgagaaagattactttgcttcgagtatttgcataatggaagccttcacaagcatctgacagccgaaccatgtgggcttccatggcacatttgttaccaaataataaaagggatttgcctgggcttgcactacctacatgacaagaacataattcatctagatctgaaaccggacaatatattgcttgatgatgacatggtgcccaaaatcacggacttcggtttgtcaagactcttgggtaatggaaaaagccacaccattacacaaacaagaataggaacatggggttacatggcacccgagtacttggatgatggagtgatcacaatgaagacagacatctatagcttgggtgtgataatcagacacatggtgaagggacgtaactcggcagacaccactgatgaagaagtactggcaaactggttgattaggctggaaaaggatccatcacagatgatgaggcagcagacgacccgattattatttgaaacagagtacaaagagcaaataaaagcgtgcatggatatatcatggaggtgcacgctgcgtaaaccaatggacaggccaacgacgcagcacatcctacttacactggaggaaacagaagcaaagatcaaatcggtcgttgggcctactccaccaaatgccgggcagcttcagattgccaaatttgggccgtggggtggagatggagggaagacgcgagacataagaatgacgccttgccatttgcatagcgtaacaattagcagtggaactattatcgattctatcgggttttcattcactgatcactatggtcagcaccacacaacagggccttggggcggtaaggagggtacgaataagattgaactaggcccttcggagtttcttacaggagtatctggaacaagcggcccattcaaaaatctaacaaatgttgtaacgtcacttacgtttgtcaccaatactcgtagttacggaccctttggaaaagggcgaggaacaccgttccacatccaaacgcagaacaacggcaggatcgttggcttctttggccgttctggccagtatctctatgcgattggggacctcagtgggcagcagcgcagcagaggtggaggtccatcgggagaatgtggagacagcgacgacgagcccaacggtgatttcgccaaattcggcccgtggggcggcgacggaggacagccgcaggacatcggaacactaccctgccgtctagacaggatcaagatcagcagtgggcttatcatcgactcgatcgagttctcgtacgctggccctgacagccagtaccgcaccgcaggcccttggggtggtcatggaggagacaacagctcttttcagctagctggttcagagttccttacaggtgtgtctgggtcaatcggcacattcaacggccatgcaaacgtcataacgtctctgacgttcgtcaccaacgctcgtagctacgggccgtttggaagagggcgaggcacatccttccacatcccagtgcagggcaatggctgcatcgtcggtttctttgggcgctccggacggtacctcaacgcgatcggtgtctacacggcgccgaaacccgaaccaaaagcaggtggtgatgaggccgtcgtcgccaggattgggccttggggcggggttggaaatgctctccatgacatcgcagagaggccgcatcgcctgcacagagtgacgatcttcagcgggacgatcgtaaactcgctggagtatctgtacagcgatggcgacgggcagcagcacaccaccggtccgtggggcggctgcggaggaactggtcgaaagattcatcttgcccctgaagagttcatagtggaagttactgggacattccatccatgcgcgtgggacagaacaatacccagtgtcgtgtcctctctgacgctcgtgaccagcacgggcaaaacacacgggcctttcggaacgcagctgggagccgcgttccaggttccggtgcagagcgacagcaggatcgttggcttcttcgcccacggagacaattacatcgaagcaattggcgcctacgtgaagaaattgacagaatccagcaaccgttaactcttggaacaacttgcagctgttcacactgtttcttgggccattgctccttaaatttagtccagatggccaaggagcaaccaaacagaaatcgctatggcagggaagatggactaaactggactgtggcacctccagcatagcctgctcttagattagtgaccagacatcatcgagatatttcgatattataataaatgaggaacccatctcagatgtttatgttagctcctcagtttttgcttctgaatgattaatttagatcttccttatttttgcaataaatgaggattcttttctgtctcttctgaatggatacgaatcatgcatcacgtatcagtgcacctattgcagtgaggagatgaggacaaggtgctgacgaacttattgtcctgagctcccacttgagtttctg

SEQ ID NO: 41112 - DNA, 448 bp, Zea Mays
tgcgtcgccctctttccggcccaaccacgaaccactcctcctacagaaatcacctgccggcctggcctttccgtagctacaaccgaagccaccaccagcagtccagcacgactagcggaataatatccaccggcgacgggaacgggaggcggcgcggccggagattcgaagcgatggcgttcacgatgcgggcagtgaaggtgcctccgaactcggcctcgctggaggaggcccggcaccgcgtcttcgatttcttcaagcaggcatgccgctctatccccaccgtcatggagatctacaacctcgacgacgttgtcacgccctctcagctccgctcgaccatcgctaaggagatccgtaaaaaccagaacgtcaccaaccccaaggtataagagaatttgagggtttaagtctcataaggccacatggtttggagataaaatatcgg

SEQ ID NO: 41113 - DNA, 415 bp, Zea Mays
acaaatgactcaggatcattcaaatataagctcagttaatcatctgaataaaggaaagctgacgcggcccaaacacaacggcccaacaggacaaactacggtgcaccattgacagaagccaggcccagacttcagccattgccacttaaattcttttttcccggcgtgcttggaagttttgcagtgttggctccacgagatgcttgctagcccgggcgagccattttggctagcagcgtccggtgtttgaagagttcttgagtggattttcatgtgcatgttttgtgatctctgcagctgtttgccctttccattcaagtcatgaatgttcttgaggggatgtcccgtttcgatctttttcttcttcgccaatttccttttgcacatcgaacaggagcagcacaggcactcgggc

SEQ ID NO: 41114 - DNA, 2508 bp, Zea Mays
gaactcccagtgttggtacaatcactgggtcttttcaaggtctttgggggtcccaagaattaaagcatgtacagtccatccaagtggccgcatatagagatagggaataaaatggaggacatatggtctgtctcagattgaatcaggggggtcttgaggattttcaggaactgagtttgaatgcctgatgcataatattgcataaggccaagggaagttctacacatttttcatgcgcaaggctgcctagttacaaacatatgggagctgataagttactatgtttctaggtgtcagcatttcgggaaagtaagtcagatgacaggagattttacatattttcccccactaagacgcttcacttgaagacaaactcaaaagttgaccgtgttgcctggattgaggctttgatcctggcaaggagtgtttattctcttgggtcacttagcgggagagcaacttttgtgcagagtgatgtttcaatttcaactgcaaggcttagagatcgaatgcatcaggagggtttgaatgagagtcttatacaggactgtgaacaaattgtgctttccgagttctcaagctaccggaagcaactgaagtgtcgttacgaggattacttaagcttgtttgggtcctgcagacataattttgaggaaggtaaagatggaagtataacacaggggacattgacacgaaatgacttctctagttctaggcatggaaattttagcgaatatagcacaacagaatctgatgagcatgagtttgagaaacacgatggaggcgaattgatttgtgaagatgaatctgcattctttgattctatagattacttcacagagtcagacaacaggtcttcaaccatgttaagtggcaaggaagtagtggattcccaaacacatgattccagtaataatatacaagcacaaatcagacgacggagtaggctgcctgaccctattgagaaagagaaagggatcagtctctggtccattattaaagatagcgttggaaaggatttgacacgagtttgtcttccagtttacttcaatgaaccactctcatcccttcagaagtgctttgaggatttggagtattcatacctcttggatcaggcatatcaacatggaaaagtgggggacagcctcatgagaatcctcaaagtagctgcttttgcggcctctggctatgcttcatctgttgcaaggccttgcaaaccattcaatccattgctaggagagacctatgaagctgattaccctgacagaggaattcgtttttttgcagaaaaggttagtcatcatccaatgctgattgcctgccactgtgaaggcaagggctggaaattctggggcgacagcaatctcaaatccaagttttggggacagtcaattcaagttgaaccagttggcattttgactctagaatttgaggatggtgaaatcttccaatggaataaggttacaacaaccattcacaatctcattcttgggaagttgtactgcagccaccatggaacaatgcatataaaagggaatcgccaatattcatgtaaactgaagttcaaagagccatcacttcttgaccggaatccccatctagtacaaggctttgtagaggacaacaatgggaacaaagcttcgtttttgatagggatgtgggacgaaagcatatattgtagtaactctgatacttccaaggtgaagagcgccgatcaactgaaaggtgcctcgctgctgtgggaaaagaacaaacctgctcctaacccaactcgatacaatttatcttcattcgcgatcacactgaatgagttgaccccagggctgcaggagaaacttccacctactgattcacggctgagaccagaccagcgccacctagagaatggtgaatacgagaaagcgaatgcagagaagctgaggttggaacgacggcaaagaatgtctactaaacttcaagacaatggctggaaatcccggtggttcgagcaagacaccgaggacgggacgtattgctacaaaggtggatactgggaaacaagagagaggggcttctgggatgggtgcctcgacatttttggggagttcgtggagacataagtgccctgttcctgcagtagcagaggttcaagcagccaacacgccacccagaaacaatggagtactgccatctccaatggagcatcctcttgcctctagaagagaagggggaggagccctgtgcgaggagtagagcattcgagatgtgaaggcattgtgccttgaatggtagcatagcatatgattggccacgaataggcattgccaccttgttagtatagtatagttcgatccaatgcaaataagaatgctgacattcattctttggttccttcttgcgttgaacatggatctgttgtcgtggaagaaatttgcttgctcggctaggcaaaagtctgcctacactgtatttgtttgccgatcgaaaaccaaagcaagtcaccatctataactcttcacttccatgaga

SEQ ID NO: 41115 - DNA, 550 bp, Zea Mays
ccacaaagcaaacctaggtcctaggcgtctataaaagcagccccaaaccgatagggattagttttttagcagcggcaatggtgaaccccctgccccctgaggcgcaagcggctgcaacagtcctagagacatgcgcgattgtggtcccccctgaggcatgagcgatgacgatggtggcgaggagtgtacggtggcgaatgcgtgtgacatcctcctatcgtcatggctcctgcatcctccgtcgacgacctcctccgatccagcatgttcggacgtcctttggcgatgacctcctctaaaatggtggcctcaaggacgtcctccagcgacgacctcctatgatttatgtttaggccttccatgattgtgttttatgcctactactatactatttatgtattccattgagtattttatgatgatgaatacgatgtctctcacgtggcttgttttttatgctaaccacctgaattcgcgcacgtttgctacagggatgtcatatgtgacgtcacactgaccattgtaacaacattggagatttttatgccta

SEQ ID NO: 41116 - DNA, 1540 bp, Zea Mays
cttgtcgtctttgctgagaacaccatggctatcacaaatagtccaagccctaccctcccgactcttctttatatgtaacttcattcttgcaacatcacaagcacacaggctttcacacccatcttgcattggctctccggctgctgttcttgcttcctcgctgcacacaaccaagcaaagtcacttttccaaggtaaagaagcatgcatccgagctgctctccactggcagtgcctccgggcttccggttccacccgacagacgaggagctcctctactactacctgaggaagaaggttgcctatgagcccatagatcttgatgtcataagggaggtggacctcaacaagcttgaaccatgggacctcaaagatcggtgcaggattgggacggcggagcctcaggacgagtggtatttcttcagccacaaggacaggaagtaccctacggggacgcgaaccaaccgggcgacgacggctgggttctggaaggcgaccggacgggacaaggccatcttcctcggcaacgctgggaggaggatcggcctgaggaagacgctggtgttttacactggcagggcaccccatggcaagaagacggactggatcatgcacgagtaccgcctcaacgatgacaacgtcgaggtgccgccgattacggaggatggatgggtggtgtgtagggttttcaagaaaaagagcatccagaggggattcgaccagctgggcacagcgtcggctggcgacgacgacgaactccaatccttccactccccgggcggcgtgatgaccactctggcggagcagaagcacggcctcctccaccagctcacgcacggcggagtcgtcgttcccgccttcgacccctgcatgaaccttccacacctcacgagtgcggaagggcagcttgccgccacggcagcatttacatccggcacatcggctgtggccatgaacctgctcgacatgggtcgttgttctcgccacaaccacaaccacaacatgctgaagatgacaacaacaccatgtggctctgccagtgacatgccgctgaacagcggtgagcgcttcggtgccgccgccgattggtcgatcctcgacaagctgctggcgtcacaccagaatcttgaccaactcttccattgcaagttcgggggaacaaccttcgcggtgcctcaccattatcagcaggagatgcagcagcagcacatggaaatcagcgcgtcttcactgcataggctgcctctacattagcttattggacgtcaaaatgatgatatcataagatctccctcaagttttccatgtagctttgattgaacgatatggaggtttaatcgtatctgtccttgtagatctcctcaagttcgtggagttccttctattttacaaggaccagataccgctatattgttagaattattgggacatagtatattttatttcaatataattcgtagaaaatcttaaagttctattcattgagtgtgttggggacttgttctaaaatgttatgagttaagaacaaggcaacacgaaaa

SEQ ID NO: 41117 - DNA, 4921 bp, Zea Mays
cttctttccctttcttcttcgttcttccgttcaccgttctccgccaccgcggcccaaccgcgccgccgcacagccgcgccgccgccgagccgcgcgttctgcactcttcgcgccatcgctctcctcgcgccgtcgcccggccgcgccgtcgccctcctcggcctgccctgctcgcgtggagcgtccgcgtgagcgagacagggagacggagcaagacggcgtctcggtgggacgagcgcattcggccgatttgagagagcgagctcgtccattcctgcagtgcgcgttcgcatagttaaacccttgacagttcccctgcccccgcctctatccggcgcgccggccttgcagccgccaacatcgccatgaaaccctcgccgcacttcccggagatcggaaagaagcctaaagatttgattgctaaggaccacacatttaacatcgcggcttacatctcgtctggagcggatgttattgctgccgcgctccgtaaacatgttgaggaggaagcccgagatctcagcggtgaagcttttttaaggtttatggatcagctctatgagcagatatctagtttactgcagagcaacgatgttaatgaaaatttactggctctccgtgctatcgatgcattaattgatatgccctttggagaaggcgcttccaaagtttctaagtttgccagcttcttgagaaacgtatttgaagtgaagcgcgaccctgaaatcctagttcccgcaagtgaagtgctgggtcatttagcaaaagcgggaggagcaatgactgcagatgaagtggagcggcagattaaaacggctttggggtggcttactggtgaacgagtggaatatcgccgatttgcagctgtactcattctcaaagagatggcagaaaatgcgtcaacagttttcaatgttcatgttcctgagtttgttgatgctatatgggtagcactgagagaccctaaacaagctgttcgtgaaaaagcagttgaagccttgcgcgcttgtctccatgttattgaaaaacgggagacacgttggcgtgtacaatggtattaccggatgtgtgaagccgcacaagttgggcttggcagaaatgcttctgttcatagtattcatggatcattattggccgttggagaattgctgaggaatacaggggagtttatgatgtctcggtacagagaagtggctgatattgtcctcgattatttaaagcatcgagatcagcttgttcgacgtagtataacatcacttcttcctcgaattgcccacttcctgcgtgacagatttgtgactaattacctgaagatttgtatggatcatatcttgtttgttctacgtacaccagacgagcgcgctagtggttttgttgcccttggagagatggctggggctctgggtgttgaacttgtgccttatttaccagcaattacctcacatttgcaagatgcgattgctcctcgcagaggaaggccatctcttgaggcaatttcttgtgtaggaagctttgcaaaagctatgggtcctgcaatggaacctcatattcgtagcggacttctagatgctatgttttttgctggtctttctgataaacttatagatgcactcgagtctataagcacaagcatcccgtctttactacccacaatacaggagcgtttattggattgtatatctcaagcactaccaaagtcatcaataaggccaggtgcttctgttggtcgagcaagcaggtcaaacaatttgcaacagtttgtggactctaatagtcctgttcttgtgcaacttgcactgtggactctagcaaacttcaactttaagggccatgaacttctggaattcgctagagagagtgtcatactttatttggaagatgaagatagcagtaccagaaaagctgcctctttgtgctgttgcaaattagttgcacactccctttctgcttcttcagcttcacagttcggttcaaataggacaaatcgtattggaggagctaagcgccgccggcttgtagaggagatagtggagaaacttcttatggctgcagttgctgatgctgatgttggtgttagaagttcagtcttcaaggctttgtatcgaaatccagcttttgatgatttcttggcccaagctgacatcttgacttcaatttttgttgccttaaatgatgaggaatatgatgtcagagaattggcaatttctgttgctggtcgattgtctgaaaagaatcctgcatatgtactgcctgcccttcgtcgctatcttatacaattgctcacatatcttgaccagagtatggatagcaagtgtagagaggaaagtgctagattattgggttgtttaattaggagctgcgcgcggctcattcttccttacattgctccagttcacaaggcgctagtgactagattgtgtgaaggaacgggaccaaatgctaataatgctcttgctgcgggagtgcttgccactgttggagaactggccaaagtgggtggctttgctatgaggcaatatcttcctgagctgatgcctgtagttgtggattctcttttagatggaggtgctgttagtaaaagggaagtggcagtgtcaactctgggacagattatccagagcacaggctatgttattgccccctataatgagtacccgccattgcttggcttactcttgaagttgcttaatggtgaattggaatggtcaactagactagaagtgctgaaggttttagggattatgggtgcattggaccctcacgcacacaagcgaaatcagcacaatctacctggtcagcatagagaggtcctacggccaacaatcgagaccgcacaacatattgtttccatggaagagttaccgactgactactggccttctttttcagcatccgaggactactattcaacagttgcaattagctccctcatgcgaattcttcgagatccttctctttcaagttatcaccaaatggtggttggctcccttatctttatttttaagtcaatgggcctcggctgtgttccatacttaccaaaggttcttcctgatttattccgtgctgttcgcatgtgcgaggatggtgctttaaaagagttcataacctggaaacttggaacattgatatctattgtccggcagcacatccgaaaatatttacaagacatactttccctcatctctgagctgtggacttcctcattcagcttggctgcaccaaatcggaccatacagggcccacagggttcaccggttcttcaccttgtcgagcagctatgcttagctttaaatgatgagttcagaatgtatttacttcacattctaccgagttgtatccaagtcttaggtgacgctgaacgttgcaatgattattactatgttcctgacatattacacacacttgaagtttttggcggaaatttggatgagcacatgcacttggttgctccggtgcttgttcgtttatttaaagtggagctggttgatatcaggcggcgtgcaattgttactttgactaatcttatacctaaggttcaggttggtactcatgtttcggctttagtgcatcatctgaagcttgtcttggatggcaacaatgatgatctgcggaaagatgctgcagaagcgctctgctgcctcgcacatgcccttggagaagactttactatcttcataccatcaatacgcaaaattcttgtgaagcaccacttgcggtacagaaaatgggatgagattgaaaatcggctactgaggcgagagctactcatcactgaaaacttgtctgtgcaaaagtacacacaatgtccacctgatgtcattagagacccccttgatgattgtgatggtacaccttctgagatagctgatgatacacagcgacaagcaagaagtcatcaagtcaatgatgtccggttgcggagtgccggtgaggcttctcaaaggagtactagggaagactgggctgaatggatgagacatttcagtattgcgcttctcaaagagtcaccatctccagctttacgcacctgtgcaaggctagctcagcttcaggttttgcaagttgctgggcccaaatgagtgaatcctcccaggaacagctagtgagaagtctcaagacagccttctcatctcagacattcctcctgaaattcttgccacgctgctgaacttagcagaatttatggaacatgatgagaagccacttcctattgatacaagactgcttggtgcacttgctgagaagtgtcgagcatttgcaaaggcactccattataaagaaatggaatttgaagctgtgtgcaccaagaagatgggtgcaaatcctgttacagtggttgaatcccttattcatattaacaatcaactacagcagcatgaggcagctattggcatattgacttactcacagcaaaattcggaagttcaattgaaagaatcatggtatgaaaagttgcaccgttgggatgaggctcttaaagcatacaccgtgaaatcatctcaaacatctggtccctttacaaaacttggatgctacattaggtcgaatgaggtgtctagcagctttggctcggtgggaagatttaagtgcattgtgtagagagcaatggacgggtgcagaaccatctgctcgactggaaatggctccaatggctgcaaatgctgcttggcatatgggtgagtgggaccatatggcagactatgtttctcgcctggatgatgcagatgaaaataagctccgtatgttgggtaacgcaacagctagtggtgacggaagcagtaatggtgctttcttccgggcagttcttttagttcgttacaaaaagtatgatgacgctcggatgtatgttgagcgagctcggcggtgtttagctacagaacttgcagcactgagaggctgcttcgaatccaggacctttggc

SEQ ID NO: 41118 - DNA, 1527 bp, Zea Mays
cgcgtccgcaccggccagcggccaccacctcccgcgcccgcacccaaaataacctcgcggatttttgcttttgccaaatccagcctccgcacgcggagaaaattccgaagcggaagaagttgaaccgacaggtgagagagaaagagataggagagacgaggccacgactccacgggggaggcagggagagaaggtgagagaagatgcgttgcgccgccgccgcgcttgcggtcgccctcatcgctgtcgttgccggcgcaaccgcgccggggtcgccggccgcgggcacgtgcgcgcggaggggtgcgctaccgttcctcgacgccgtcggatcccgctgccccttcgtccggatcgagccgtccccgcctctcgaggtgagaggagaggctgtggatactgagttgaaccttcgaaggaggggtgcttcatactccattctcttctatgctgcatggtgtcctttttcgagcaaatttcgaccgatatttgaaactgtcagcactatgtaccctcagtttgttttcaagatatggagttcgtggtttcccagccattcttcttgtaaatgagactacaatggttcgatatcggggttcaaaagatcttaactctctcgtcgatttctataaagaaactacaggtctggatccagttgcatacattgatgttgttgtccagcaagagagcacagcaagcttgagctcagttgcaccatgggatcgttctccgcttgagatggccaaagacgagccgccgtatctgttggtcgcagttctcttcatcatcctgaaggccgcagcgcgcttggtacctgctgccatgtctcatctgagggccttcttggccgtccgtgtccagaacctgaacctagggatccgcaggggatcaagccaggtcttggaacgagccttgaacgcccttgacgtgaggaggctgtgcagcaagctggggctgagcaacagggcaacagatctgaggaagggtgcaagcaatgctcgagcctgggcttcctcgtttgcttccgtctcactgggtgaaccttcatcttcgagacaagcttagccatttttttttgttttttttttggagatgtcgcttgttagggtagctagctgctcacatgatgcaaagaccatataaggtttgcttcccatcctgtttgtttctgtgcagtcaggaggagaggggaaatcttacatgcctgtaaattttgacgacatcatgtgctgttgtatattaggaatacctttgcatttcctgtttcggttttagaagtgcggtctcaaatgagctgaagcagaacgaagagtgtttctgaagcagcacaacaatggttggaggtttggcccaggggcggaaggcagtcaagatggcgctctcaatcattagcgctagactgctaggggaagtgcaccgtcgctgatcataatataaacaaatccatcattagcgcgcctgacactttttatccccgacgtactgataggcagccttttttgttttgttgctgtaaagccggccctt

SEQ ID NO: 41119 - DNA, 2497 bp, Zea Mays
attcgcttcagcctcacgcctacccacgacgctgggagacccgaacgagcgaggacgagcgcccgcaacaccgatgcgccgccgccccctggccctagcgcctcgcgccgtcgctccatggccggtggccctagcgccccgcgccgccgctctgtggccgatggccctagccctaggcgccgccgctccgtgggccgtggccctatcgatcatgccggagcaccgcccaccggctagctggcagcccgcagccgccacggcaccacgcgtccgactcccacgtggccatgcctcgtcctccgtgctcgcctagccgctagcagcctagcgcgacagtcggcagtcatgaaaaccttttgatttcgccaggagacaaacatggtacatcccttcgtgaggatgtgaatattgaggaggaacccacaatcaaagaagatcatatattgaatgtgtcacatatagacggtcataaaaaccttttgatttcgccaggagacaaatatgctacattccctcatgaggatgtgaatattgtggaggaacccacaagtaaataagatcgtatattgaatgtgtcacacacaaaggggtacatttatcagctattccaaattttaaataataaaataaatcaatttctacttttattacctgaaattaatttctatttgtttaagttagtgatatgtgtttaatttgcatttgcagtcataaaacctttttacagtttatggctgaaaatgatatgtctactggtgttatcttatatgatgacgtaaaggattgtatgataacagttattgtaagagaaatgagtgtagactttctaaattacatttttaataaattcgagagaggaaagtgttggagtgatggctgagaattaagtgatatggaaatggaagttgaagcaagaagaaagtttgtcattaccaaggaggctgacgcagatcttactgttgaagatgacacacaaaatatatttgttcatcttggttttctggtaccgtattataaaaaaggaaactcaatccagcattttttgattccttcggaaaagatatattatacttttctgatcttaagaatttttcaataaaatggaaaaggtttgtcaaactcattagatcagcgttagctttgaaagcgcctttggtcagattaaccttaatctgtgagatgtctacaattatcgtattgcagctttaattatctaattctgcatattattaagtattataaaaaaatgtcaagattgacgtgcttcagtaaaatgggttatgccacacagacaggtctaccactacaggaacaatatctctttaaggtatttttatgataagtggtgttgtaacttatgacacgtaatgtggtatttaagaaacttcgttaagcatgtcctgacctacgtaaaagagtagaggaaatgctgaaggaagtttcttcaataccacattacgtgccataagttacaacaccacttatcataggaatacattaaagagatattgttcctgtagtggtagacctgtccgtgtggcataacccattttattgaagcacgccaatattgacattttttgataacacttgatgatatgcagaattagataatttaagctgcaatgcgataactgtggacatctcacagattaaggtcgatctgatcaaagacgcttttaaagctaacactgatctaatgagtttgacaaacattttccattttattagaaatttcttaaaatcatgaaagtataagatattttttctcaaggaataaaaaaatgctagaattgagttttctttcttataatacggtaccaggagaccaagataaacaaataaattttgtgtgccctcttcaacagtaagatctgcgtcagcctacttggtaatgacaaactttcttcctgcctcaatttctatttccatatcacttaattcccagccatcactccagcactttctttccttaaatttattaaaaatgtaatttagaaagtttagacccatttctcttccagtaactgttgtcatacaatcctctacgccatcatataagataacaccagtagacataccattttcagtcataaactgcaaaaagtttttatgactgcaaatgcaaagtaaacacatatcactaacttaaacaaatagaaattaacatgcttattaaaacgacgttaaaacgacgtttaaacgtcgtttaaactataaaacgctgacagaaagtgaaacgacaacgttttacgattcgtcgtaaaacgtcgtttaaacgtcgcgttttgacgtttaaacgcgttatagagtgaaacaccgcgtttcgggcgtttaatgcgtctgctgctagaaattggcccaacctaattagaaactcccgcccagcccgcccaggccgccgctacaggccgcactatcaccagcccaattaggaactcgcgttctcaccagccgccgcactccagggcgcgctccagcctccaggccgccgctg

SEQ ID NO: 41120 - DNA, 3065 bp, Zea Mays
ttgtcttctccggcgaagagcgcccaccaggaaggattggtaattggatgaaattgagtttgcgccccagttttgggagattatgttgacctaggatcagataaccatgtgctgatgcaatggacacccttcatagcgacccttattccaggagcagcttgcaactgcaaattagggatggctccatgtcctttgagaacaacagtgcagttttggataaacatgaggttgtcagccctcgagttggcatgacctttgagacggttgatctggcatatcaattctacttagagtatggctatcgtgcaggctttggggtctcaaagagaacttcccacagtgttgatggggttaaataccgtgctacatttgtttgttacaaaggtggcatagctaggattaagcctggcctcaaagctcgaaggaggcttgttgcaaagactggttgcaaagcaatgatggtagtgaagtttaatgccagtgagaaccattgggaagtggtttttgtcgagttggaacataaccacccatgcaatcctgagatggtcagattcatgatgtgctttaaagaccttcctgactggcaaagggagcaccgcccattcaatgccaaaactcgattgaacccgaagattcactctggtagaggcaggccacccaaccaaaacaaagatttcatggtgagatccttctcccagtcaaattattccatcgatggggcagggaagactggaaagttaaggtttgcagagggtgacgttgaagcactcttagttttttttgataagatgcaagctcaaaactccaacttcttctataactgggacatggacgatgaaggtcgtctcaagaacgtttgctgggttgatgctagatccagagttgcatatcaacacttctgtgatgttatttgctttgatactgtctatttgacatatcagtttgtcattccattggtcgcatttttgggaatcaaccatcatgggcagtttgtgttgttaggatgtggtctacttggagacgagtctccagagacctttgcgtggttattcaaaaaatggctaaaatgtatgaatgataaatcacctgaagcaattgttacgactcattcaaggccagtagtcaaagcagtcagtgaagtatttccaaatactcggcacagatacaacctttggcatataatgaaagaacttcctgaaatgtctggaagagttgaggataaagaagcagtcagtctgagaatgaaaaaagtagtctatgatacaattacatcagctgattttgagagggagtgggctgaaatgatcaaccaatataatctccatgataaccagtggcttacaaccttgtttgaagagagggcaaaatgggtaccagcatatgtaaaggatactttttgggctggtatctccactgttcgccgtagtgaacgattggaggccttttttgatggatatattacaccagaaaccacaataaagacgttcattgaacaattcgatactgctatgaagctcaggtctgatcgagaagcctatgatgatttccgttcatttcaacaaaggccacaagtcctgtctggtcttctgtttgaggagcaatttgcaaatgtttatacaataaatatgttccagaaattccaggatcagttgaagcagctgatgaatgtgaattgcactgaagtcagtaggaatggttcaatagtgacatacacggtgacagtaattggaaaggagaggaagtttgactacagagtgatgtataacagtgctgagaaagaagtgtggtgcatctgcaggtcattccagtttaaaggtattttatgtagccatgctcttgctgtcttgaagcaagagcttgtgatgctaatacctcccaaatatattcttgatcgatggcgaaaggactacaaatgccctgaggaacctaaggaaacccccatttcacagaaagctgctaaagatacagggaagggctcaaaaccagaaaacattcgggaagatcaagtggacaatctctacaagcatggacaccagtactttgctgacattgtggaaatgggagctactgaccctgatgcgatggaatacgtcctttctgtgatgaaagaagctaaagagaaagtgcgcaagtttgaggagtctcgaaaagagaagaggcctggagagggtccagtttctgctggtaaaaaaggggcgaagttttcgaagccatccacacaagaagttggcaatacaacatcagtttcgactccgactgaagcagtggcttcggtcacagtggtgtcatctcctccaatggcggcagccccaacaatgatggctatggcgccaccttcagcagctgtggccggaggaatgtttttagtaccaatgcacccgcatcccttggtgttcccacccttcccccctgcagtcccaccagcggtagctcctgtagcaccacctgctgcaccagcaaccaatgttgtctccaacacctcaaagaagcgaaagaaaagaaaggggaataattgatcttctgatgctgatgaaatgatgaatgttttccagatctaaaacaagatcagatcggcgaagtagaaaatgagtttgatctcacactacgcatcaggcctcgacatgagagtgagctatcgatttatctcttctgcgcgggttggtctttcgagaaaaatctcttctgcgcgggttggtctttcgagaaaaatctcttctgctggctgtgctactgctacctatgagactacctactgcagtctgcatattcctggggtgttggcttcactgcttcagctagatgctctgctgtggctgacgcagttcagtctaaggagagatgcattttgggctcagcacactgatcttgattactgtagattactagattagattgcctgtagtgtacattatcgtcctcagtgccggaagtaatctaacatgtagtccagcttatgaatgtaaagatctgtttctgattatggattgcatttatggggaaggatctggatcttattaagaaattctgatttacaagcatttgccgtcatttgagtttattggact

SEQ ID NO: 41121 - DNA, 332 bp, Zea Mays
ctggaacagatccagtagctgtcgctcagatgcagctgctgcagcaaatggtgaacaccatgactgaaatgcaagcttagatgcggcaagaatatcaggagatgcgccaggagcgtcaggaaatgcaacaggagatgagacaagaacgactagaacggcagcaacaaccaccactacctccaccgccgccaccagctccaccccgggacaagcaccgagaattcatgagtcataagccgcccacattctccagctctctagatcctctacatgttgatgattggctgaagttagtcgaaaagatgctcaatattgctcaatgtacagatcgg

SEQ ID NO: 41122 - DNA, 4523 bp, Zea Mays
gtgcacggttctgccatcgtctcctctccgcgacgcacgcctccctctcctccgccccaccctcctccccacgccatcggcaccgccatcatcagatccggcccaagacgcctctgccccacgcgcccgagtcgtcgaggcacactcctgcccgcctccggcgtccacgcacatctccgcctcacctcggcgcccgagtcgtcgcacgcgttcgaggtggcgtccatcccggcaccggcctcacgcaccatctacagctcccaactctgctcctctcagttctccctctgcattccaccttctctcccttcctctccaagcaccgtcctcctcgcctagatccgtacaagctgcaaataacctctccggtggcaagacagatggagtcgatctccggcgaggatgctccgaagcacaacctgatcctgtccgcgctcgtctccaacctacagtgcatgctcgccgcccgccgcccgttcacggcagaggtcagcaccgccgccacagctagcgaggctgaggccttggctcaggaagcagaggcgtccgatgcccccacgggagatgggacgctggcgaggcccatcgtgctgctgacctgtgccggaggggaaccggtcggcgggtctcgcggcgctcgtcgacgccctcgttgccgccggccgctgcgatgtccacgtgtgtgcccccgaatcgtacatgctgtgacttagaaaaccaaaccacagcgggaccggtgctcggatagggtccaacggcgatgcaagcaaggagtggcatgcggccggaggggcgcagatcggctcctgcacgtgcagcgcagccgcgtgacagtgaagcagggaggccgcgataggcggcacagggagggtgcgacggaggcaaagtgcaagcacctggggacttcaggtaagtagaaaaccaacactgaatttgtcggttctctgttttgtgattgaccgattggtttgttgatctcagaaacaaaaaattgtttcaccgtcaagcaccaatttttaggtaggtcagtgttttgggatgattctccgatgcatcaatagcaaccttgtgcttggcaaagttatttgccctgataatgttgtaggtttagtgaaaagaaatatactgacatatccatcgatccatcgatgcccaatggagattgacctctatcaagatttagttacgtgtctcaatagggcaatatttctgtgagttgtatactgtggattcctcatctgcatcatgaattgatcgcactatttatgccctatttttcaaaccatggtttctgtaattctttgcaccatggtatttttctcaaatgattttatctttcacaacccggactgaagtcactgaagcagaaagaaagagtacaagtctactactgcagaaagcaaggaggatgccaacagaagcagatttcatgtttggatcgggtattgacctttttgtgttctcctcaactcattatttagctacatatcttattaaatcttaatatttggtcattagctaccaacttgcactattattgtgaaaatccattaactttagccaatgaaatggttagactatcaccacgtaggtgatattagtggcattaagttattaatctgtggcaaattctattatcaactattttcttggctaatcattacaatatataatgaagaatactatggcttgaagggatatttatacagttggctatgtatacggtctgcccaagcgcccaacaatgaatgatgtggtgaaggaacttgagatcatcagatagaatgaaggggcacaattgctaaactcaacgtctttatcagttgaacaatttggaaaaaaagagaagagatccttatgcatttgcctatggatgatggaagcaacaacaacacttttgactacaacagtgggagttcaattaagttgttcacccaagtagatagttgtctccactctttcaacaagttattggagtgattatatatgtctgctccatatgaatgccttttcgttttagtatcacatctgaaattaccaaccttttagatcgggtattgacatctttgtgttctcctcaactcattatttagctacatatcttattaaatcttaatctttggtcattagctaccagcttgcactattattgtgaaaatccattaactttagtaagtgaaatggttagactatcaccacgtaggtgatattagtggcgttaagtgattaatcagtggcaaatcctattatcaactattttcttggctaatcattacaatatataatgaagaataccatggcttgcagtgatatttatacagttggctatgtatacagtctgcctaggcgcccaacaatgaatgaagtggtgaaggaacttgagatcatcagatagaatgaaggggcacaattgttaaactcagcgtctttattagttgaacaatttggaaacaaaaagagaagagatccttatgcatttgcctatggatgatggaagcaacaacaacacttttgactacaacagtgggagttcaattaagttgttcacccaagtagataattgtctccactctttcaacaagttattggagtgattatatatgtctgctccatatgaatgccttttcattttagtatcacatctgaaattaccaaccttttagatcggataaaatcttaagcaaaatgggagaaggtttgggttttctgcaatctgtcgtctcctcttctgctgggtatctccgttattattctaatgaagagggctatgagttggattttcgtaggtacatttgagcgtgttttggaatgctgggaccgtgaaacacatgaatatgttgccataaaagttgttcgcagtatccacaagtactctgatgctacaatgattgagatagatgtgctcaatcgccttgtagaaaatgaaaaatatagatctctctgtgctcaaatttagagatggcttgactatcgtaatcatatatgcatggatgcgttactttatgtttgcttgtatttaatatagaaggctcccttgccttcgttcgatcatgtggtatttgaaagtgatgtctctataaatgaagtaaggtagggcaatgcttatgttactgttgtcagttattagctttttaaaccatgcatctgtcaatgtgtcctgtttcaatagggtcttattataggacgtgatggcactgaattaggatgtttgttcttttgctacctttgttaaacaacatcagatcattcgtattgtatccttcctcggattgcttcttttgttctactacaaatatgcccaacatggcagggagaggtatgctcctaaatttcttattttgtgcattgtgaaatgattgttctaacaacatcaagtttgtgttcttcatataatctatctcagattgctctgtgttttgcaggtctcgaggtcaagcctggacccactgtcaagtgtgtgcttggacatgactttatcctgcactttccactgctgcacttggggaatcaaagaaaagtgaaagtaccatgtcaaagttgatgaccagaagcttgctattggaaccctctctattgaaaaatacccctagatagaaattgatttggttttcaataaagagtgtgagttgtcacacacatagaaaactacctgtgtatttttctttggttacaaggttgagcaaccaatcgaggaagatgaatatcctttttaacattgatttttttagttttatttcatgtaagactgatctaaacaatttctttgtggagtattttgtttccttgatctcatttttgcttcttgcctcttacataatggatcttgattctgaagatgaagagaaggagctaaacattccagtaatcaaggaaaatggcaaaggtgatgggaaggcagttgctgcagcttcaaaatcaagtcttgggcttgaaaaaaagcaaggatgagtatgagtctgatgattctgatgagggagaaggtgaaaccggagaatgaggagatgtggttgttcatggacgacagcatcaagaaacctgcaacatgcaacctgattttaagaaatctgccacctgcaacatgactgggcagtggtatctctgagatataatgtggacaacggcaaagaatactatgcatacacaacaaaagagtcctacaacctgattttaagtccatttgtagcaaaccatcttggaagccattaactcgttgaatttgaagctgatgtgcagttttatttttatgtcagttttactgatgcagttagttcctaagaagatccatggcaacttgtttcacgctgatgcttgagaagttgagagggatggaaatgacactcacaataaaaatttgattttctttcttgtgatcgtcgatcacaataaacacagtggcacaatataccgtgtaattgtcctttcctggtagaacatgaaatgttgaacttcctcttgtgatatataaagcctatgtatcctacataatatttaacatcttacggaaatttatttgtgctgtccca

SEQ ID NO: 41123 - DNA, 602 bp, Zea Mays
tgcgaaaaatcgaagtcttcctcaaaaaagactatccgtgcaaaagtcgcctaagggtgtagccggactagcacaacaagtgcgaaaaatcgaagtcttcctcaaaaaagactatccgtgcaaaagtcgcctaagggtgcagccggactagcacaacagtgcggaaaatcgaagtcttccgtgaagagtatccgtgcaaaagtcgcctaagggtgcacccggaccaagcacaacaagtgcgaaaaaaactacaccaaactgtccgcgcaaagaccggctacatgtgcgccagaccgacataacaaatacaccagaccaagtgcgcaacgccttcgtgagcatagccgaatgtgcgaaggcacacaacctcatcatacaagccattacatatgtacagcgaggacatcacactttacatcggctcaaccttcggaataattcccatctccctatagttaaaaagcattatcctcatcttctcacccgcaaaaagacttcgcagctccccctcacctacactcgcaacggccggcaaggacaacaattcctgccggccagccctgcccacacgaagccgaccgccgtccgcctcactcactcta

SEQ ID NO: 41124 - DNA, 447 bp, Zea Mays
gtacaagaatatacctagatttattgttaaactaaaacaagtttcatggtaaaccaaatccaaattgattatggccatataattatagcagagcaaatcacgagaacaaggtatatgagcgagcaaattccagttagaatacatagtgttctcaaaatctgcacccctgctgcaaattaggtttttgcgtgattgcgacatcaaacgatcaccaatcaatctatttttttcaaaaatatcaggcatgccaaaaaaacatcattatagtgttgtgcataaaacaatgagacaattgaacccaatggtaatgacagggcgtaatcttccaatatactttaaggaagaacaagagttattcagattagacaccatacctatagctattctttttaactaacaaaaaagtatgtggccaaatacaagcaataaaaaacaaattgacacaac

SEQ ID NO: 41125 - DNA, 1700 bp, Zea Mays
caattagactgtggtcaatcttccccgctagtccttgttcaccttctccggcggcagcctccaaaccaccctcgcgctctaccactccggtcgtgtagctccccagcaggcaaccaccatcgcgcacccaccggccaccgcgtctacatttgccaatctctgcttgaagcgttctgcccactctttcaaccgagaagttcactattatcctgcgcatgttccctttccccctttcgtcgtggcacgcacgttaggagttcgaccgattgccggaacgtcttccgccgtcttctgcgccatcgaaagagcgatgaggtttgtggtgacgaaagtttgcagcggcggagggaaggcgcgggcgggtgcgctccatatagccggcgccggcattggcattgagacgccggcgctgctgctgtccactcgtaaggggctgccggcattcttgtcctgtgacctccttgcctccttgccactcccggactccctccttctccatgtctgtcctacccattttatagaaggccctccagtgaagacaatatcagctattaggggtttgcacggtatgctgggtttacctgatcacattcttgtagcggcggcaagcgattctattgagagtctgccatcatgtgaagccaccaacaaatttggtgcctcctttgaaactccttcgggtcgtagactggtaaaaccatcagactatatggagttgatttcctgtatgaagcctaatatatgggccagtttggcggatgaggtaccagcttgggtgactgagaaacgaaacaaagtctctgttgacaggacattgcggtggcttgatgcatgcttctgggactaatagttttggtgtaattgtgggaggatctagcttagaacagcgaaagctatgtgccactgaagtgtcgaagcggaatgtttcaggcttttggattgcaggatttggctttggagagagtattgaagaacgttgcactttgctcaatgccacaacagattgcttgccacgggaaaaacctcggctcgtatctaggcttggtcttccagaggaggtcttggagggtgtggctgctggtatcgacctttttgactccacatacatttaccaacttactatgggtggtttcgcactgatcttccctgttgacatggttgaaagagaaatgcagaatggtgtactcaacactactgatggcgattcaacaaagattaacctgcgtgctacaacatatcggaaggatacgtcacggctagttgatagctgtaattgcttcacatgccaaaatcacacccgtgcgtacctcaatcatttgctcaatgtccatgagatgttggctcaaattcttctggagatacacaatacccatcattatcttcgtttcttccattccatacgggaggcgatcaaggttggagagtttgatcttttccgacaggagttcgttaagaagagacgcacccatttcgctgctgttgtggtctagacgtgaccaagagttcatctggctgtcctcacaagattaacttatcaattaatcagacttgtgtacacctgaatccttactagtcaactttcacgtctatgattgacaagtctgaaaagattcatacattaagtgatagaagttgtgtgctaaacaactgatgcattttcttcattggaaaattaattaccattccttgttacctgattt

SEQ ID NO: 41126 - DNA, 437 bp, Zea Mays
ctttccgttgcgataaacacagacgcaacaaaacgttctttctccctcctcctgttatcttgttccttctcccagtgaaaaatctttatgtcctcaagctcaagcataccgccaccaccagtctcagcccaacgctctacctcaacaactcacctcgttgtttacatttttgttctttggtcgtcgtccatagaaaagaatccccatcgtcaggtcgtttatctactccaagctggcgtctgtgatagggtgaggcagccaggcaggcacgataattaatcacgtgatgcggaagacgacccaagtcgaccccaggataatgcagagattggacatctccgcaagacgatgttgtcagtcggataaatctgaagatggataatctaaacaagtgtgagaccaaaagctgattgccaagtggacgccacctaacaaac

SEQ ID NO: 41127 - DNA, 2663 bp, Zea Mays
gttgaacccgccgccgccccgcccgcttgtttccccattcccttcctccttccgcagcaagctccagcctcccaaagcccccactcccccaatagaccatgccggccgctgcgctctagccgaccgccgcccctcccttccccctcctcgccgccatgtccatcgccgccgtgtccgcggatgggctcctcgcgttggccgacgaggctgagcgccggtatgacttttccgccgcggccgcttgcctcgagtccgcgctgcgtccgccctacgccgcagctctcctcccactcaccgaagcccgcgcgcggctccgcctcgcttcgctcctcctcgcgccccgcgggtcctcccgcgtcccgcgcgccggcgctcccgccgccgccaagacgcacctcgagcgcgcgctgctcatcctctcccctctcccctccgcgccaccgcggctcaagctgttggcccactcccacctcgcgggcgcctatgctgtcctgggggcgatcgcgtcgcagaagcacgtgctccaccgcggcctcggcctcctggattcggcttccgcctcggggctcctccagcgcgagccagcgcttctatggacttgcaacttccaggcgcagctcgggtccgttttcaccaatgacggggacgccgcgtcagcgctgtccgcactgtccgtgggagcatccgccgccgccgagctcgggagcccccagctcgagctcttcttcgccgcctccgagctccacgtccacctcctctgctgggaggacagcgctgccgttgagaacgctgtcactcgtgcctcgctgctctgggacgcactcacagccgagcagatggagcactgggttggactcttcttctacacgcagctgctgcagactttctacctgctcaggatctgcgactacaaggctgcctcacagcacgtagagaggttggatacagctgtgaagagtgagatgcagagaggacgccaaattacggcgcttgctaatgatctcagcacactggagaggacactagggcagtctgggctgaaggagcgggagatgctggcattatcgcacaagcaaaggcagctcaagggtcagctgcgagcattgtgtggctatgactcattgaatgatgtgttggattatggggataagctgcttttggcaccaccgctgatgcatggggagtggctcccacggacggcggtgtttgtgctcgtagatctcatggttgttatggtaggtcgcccgaaagggatatttaaggagtgcgggaagagaataaattcaggactccggctcatccatgatgaacttgtgaagcttggcattgtggatggtgtgatggaggcagatttggaacactcaacaatatggacagcagggctgtacttgatccttttacttcagtttctggaaaacaaagttgctgtggaacttacaaggtcagaatttgttgaagcccaagagggactggtggagaagagcaagtgatcaggtgcatgacattgcaagacaaggctttagctcagatgaaaaactggtttactcgcttccccacaattcttcaaggttgcgaaagtatcattgaaaatttaaggggacaatatgcacattctgttggctgcttcgatgaagcagctttccactttcttgaagcaaaaaagctgacagagagtaaatcaatgcaatcgatgtgtgaaacctatgcagctgtgtcatatatttgtaagggtgatgcagagtcgtcttcacaggcactagaactggttggtcctgcctatagaacaatggactcatttgttggtgtgcgagagaaaacctgtatcatttttgtttatggactattacttatgagacagcataatccgcaggaagcacggaaccgccttgcaagtggtttgaaaatagcgcaccaacagttgggtaacatccagttagtttctcagtatttgacaatactgggcacattggcgcttcagctacatgacgcagcacaggctaaagagatcctgaagtcttcgttgaccttagctaagacgctatttgatattccaacccaaatctggatcttgtcagtatttacagagttatatcgtgaactggaagagaaggaaaatgaaatggagaactctgagtacgaaggaaagaaggaagacgatctgcagagaagactttctgaagcttattctcattcttttcaccatgagctggtggaaaaatcaagaatccagccgctgcacatgtcaagtaagcagccagagatggctgttccatcagctaatggtgatcttgacatcccagaatcagtggggctttccgctccccagccattcctcaaaagacttgttgaggccgagccgatgaggcgcagtaccaggaggcggcggtagtaatgaaactagtactgtaattaatagcgtagtgaatttgttggttaagtgttgttatgacttgtaacttttagcagtttaggtttttattttcttttgtttgttgtgttgattatgtgtatcttggtttagaatttatagatttggagaactgttggattgacaacattctgagtggtaaaataccaattattccactgtgttgggacggcgtgttacacctgcatctccaccatcagcacctgagggtcttcgttcggctcgcgtgcaaggg

SEQ ID NO: 41128 - DNA, 3346 bp, Zea Mays
atggcgaatcccggcggcaccaaccccttcgcttcccccgccgacgccgcctcatcgccgtgggacgacctccccgacgacttcttcctctccacttccatcacctccccgtccccgtccccaccccctatcccgccccccatcccatccacctcgccccgtcacgccacgccccaccgatccacctccctcccgcccgcctccactccctccgctgctacctccgcctccgtctccgtctccgcttccttctccgacccgcgcccccgcgccgctccggcatcgcatcagcatcagcatcagccccagctcctccatcccagccactcactccccgccttccccgccgcggcctcccgctccccggccgccgcagcacaagtatggccaccgcccccggggccccaccactcgggctcaatcccggagttcgccgccgctccggcctccagcgcacacctcccgcccgcgcgcaccgcggtgcgcgccgaccgcccgcccccgctcgatctgcgcccgcgcccgcccagggagtcccaggccggtgcggcgcttcgcgttctcgcctgctgctgcgatgcttcccggtccgaggccggcgccgccgcccgtctctgggcagcgggcgaggccggcgtcagggcatgggacctcgcagacgccttccggtcgccgtctcagcagcgttggggcgacgagtcgtctgcgccctttagggagtcgcgcaggacgcccccggcgctctgcctcgcggcggaccccgctcgcagcgtggtgtggagcggccatgcggacggccggatcatgggatggaccgcggatcctggaccggaggcgggggagtgcctctcgtgggaggcacaccgtgggccagtgttcgcgttggccgtctcttcctatgggattctcgcactaaaggccttctaaaagtggtaaacattgatggccaagttgatacccgtttcgacatcttatctgctcaggattcatatagctatgagacaaagcaaactctgttctctccgaggaaagagaaagctcgcagtcctgttggtttcttgcagagatcacggaatgctttgttgggagcagctgatgcagtccggagagttgctgttaaagcaggttttggtgatgacactcgtagaattgaagcatttacaatgtcaacggatgggatgatctggacaggatcggcaaatggctctcttgcccaatgggatggcagtggtaatcgtttgcaagagttcctgcatcattcgtcatctgtccaatgcatttacaattttggaacaagaatatgggtgggttacatggatggcaacatccagctgttggaccttgaaggcaacttgttaggaggatggattgcacatagtagtccaattctgagtatggctgttggaggttcatatatctttacactggctggtcatggaggaatccgtggatggaacttggcatcaccagggcctcttgacaacattttgcgctcagagttgatggagaaagattcatcatacaaaagttttgaatacatgaaagtattagtgggttcttggaatgttgggcaagaaaaggcatcctacgagtctttaagagcttggctaaaactcccatcgccagaagttgggttggttgtacttggattgcaggaggtggacatgggtgctggttttcttgcaatgtctgcagccaaagaaacggactagagggaagtacaaatggagagtggtggttggatgtaattggccagattttaaaggttcattcctttgtgcgtgttggttcaagacagatggctggattactcattgctgtatgggtgagaataaatcttaagcagttcattggagacattgagaatgcggcagtgccatgtggattagggcgagcaatcggcaataagggtgcagtaggcttgagaatgagaatacatggtagaaacatttgctttgtaaattgtcatttttctgcacatatggaagctgtgagcagacggaatgaagactttgaccatgtctttagatcaatgacattttcttctccttcaaatggattattgacaacatcagtttctggttctgctgctcagcttcttcgaggaacaaatggatcaagactgcctgagttgtcagatactgacttgatcgtgtttcttggtgacttcaattaccggctttataacatttctttcgatgaggcaatgggcttggtttcccggcgatgctttgactggttgagagagaatgatcagctgcgagcagaaatgaaatctgggagagtcttccagggattacgtgaaggagaatttaagttcccccctacttataaatttgagaagcacatagcaggcttatctggttatgataatagtgagaaaaggcgcattccagcctggtgtgacagagttctatatcgagacagccgaactagttcacagattgagtgttctttggaatgtcctgtagtctgttcgatatcactgtacgactcttgtatggaagcaacagacagtgatcataaacctgtcaaatgtgtgttcaatttagatattgctcatgtggacaaacaaacaatgaggcagaagtatggagaaataatgggttcaaataaggaagtgcttgactcacttcagggcttggaggctttgcctgaagtagatatcagcacgaatgacatcattctgcaagatcaaaacccttttgttgtgaaactgcacaacagaagtacaaaagagttggcttgttttgagatcattggtcagacaccaaagtcatctggcacacctttctcaggtttcccttcttggctgaaggtttctccggcagtcggtataatttctcccagacaatctgttgaagtgacgttgcaacatggacaaatacgaagtcaagattatcttactgggacttcaggggacagttctggagctgcgcaagagaaggttgcaacgctattggttacagtaaccagagtggactcgacagctgggagacggcacaaaatacaagtacagcaccggtgccgcagggagacgtattcgtcaagaggttataacttggcggatcgattctttgcttgaaccagagaattcagaagtgctgggccaacgatgttgatgtcccagtgtgcatagagatttgcatgttgtagaacaaaaatcctgtgatgagagtggcataaaaacgcggatttggagagttcaaatttattaatagtgtcggaaagagcactggacgagtacagagtacagacgtaccgcgataaagactgcaaagctgatattttctgaagagctcactcgaataagcattcaatcctgcagcgcaccagcacatactgg

SEQ ID NO: 41129 - DNA, 1775 bp, Zea Mays
cgcaacgcagcggcaaaagcgacactgccagcagcgagcgggtggaaccagaccagaccagacatgtcgacgacggagccgctcctctcggccggcgccgagaagaagaagggcggcaagggtccgcgcgtgggcatcgacgaggcgctgcacaccatggtgatcatcttcgcggaccgggagccggcgaccgtgccggtgccctgcgccgccgccgggcgggagtgggccggtggcggcggttcaggcgccgctgcgtcgaccgtcgtcgagtggggcctcgtctgcggccagcgctacaaggtcggcctcgcccaggccgtcttcttcgccggctgcatgatcggcgcgggcgtgttcggccacctgtcggactcgttcctgggccggaagggggcgctgcaggtggtgtgcgtgctcaacgccgccttcggcctcctcaccgcgctgtccccgaactactgggcctacgcggcgctgcgcctcctcacgggcttcagcgcggggagcgtgggcgtgctggccttcgtcctggccaccgagcccgtcggccccgcccgccgcggcgccgcgggcatgtccaccttctacttcttctccggcggcatcgcggcgctcgcggccgtcgcggcgctcttccagggctcctggcgcgcgctctacgccgtcacctcgctcccctcgctcgtcttcgccgtcgccgtcgtgccgttcttcgtctccgagtcgccgcggtggtacctcgtgcgccgccgccccgacgacgccctgcgggtcatccgcgccatcgccgccaccaacggcagggccgtccctgaggatctcaggcttaagctcgacgacgaggagccagggaacaaggacgttggtgggagtacggcgcatgcggcgtcctcgggctccatcgtcgacgtgttccggtcgccgaccacgcgggtgcggcttgtgctctccgtgcttatcaacctcctcagctcggtggtgtactacggcctcagcctcaacgtggtcaacctcaagaccaacctctacgtcaccgtcgtcgtcaactcgctcgccgagatgcccgcctacctgctcacggcgctcctcctcgatcatttcgggcggaagcctctcgccatcggcaccatgctgctcagcggcgtcttctgcaccgccgggagtctcgtacccggcgcagggatcatgagggtggcgtgcggcgtggtgggcatcttcggcatggcggcaacgtacaacctgctgttcatctacacggcggagctgttccctacggtggtgcggaacgcggcgctggggtgcacggcgcaggcggcgcagatgggggccatcgtggcgccgctggtggtgatgctcggggagaggctgccgttcgcggtgttcggcgcctcgggcatcgtcggcggcctgcttgtcttgtacctgccggagacgatgaacaagcccctgtacgacaccatggcgggtctggaggaaggggagaagaacgttgtcaagtgacacatgttgggatctcagatcagatgaaacggtcttttgtagtctcgtgttcactacgatcgaatgtgcaatagtgcaagatgtcgcgaggtgatgaattccacaaagacgaggagagttagtgctggcttactgccaaggagtggggatctagcggtgctgtttttcaggttacgctagtgtacatctaagcgtccagcttgtgcccgactacacatctccaagtttaacgaagaattgtttttcctcgttttccggaggatggaaaatcc

SEQ ID NO: 41130 - DNA, 2156 bp, Zea Mays
gaacgcccagggctagctctatctccctcccgagatctcctcccttcccccccttcttctctcccttgccgacgattacgccaggtgcccaggtcttcttcgggccgaggtcgctgccgccatacacttggtgcccaggtcttctccgggcccttcgccagcgtcgagcagcaccaggctgagctccacagtggttcttggagaggtctgtgatagactactaggctgaatacctcatggaatcttggagagaaaaggggatcttggagaggtttgtgacacactactgtggtgaatagacctatgcagaagagaaaaagggaaagagagaatgttctcaatgaattgaagtccctatgtcaaaaacaagagcaaggagctgttgtacaagtggcttgtggaaggagcatatcatatatttgtaggagataactttacacttgattcatgggcgactggattataggggcgttgataaacatcgtggggagtgttggcataaactttggtaccaaccttctgaagttgggccatgatcagtcactacttgcagctcttggatcaatccagtttgtgtccaacattgcttttgcctactttgttttgaacaagactatttcagtgaaagtcatggtagccacaacatttatagtctttggcaacatcttcttagtatcctttggcaaccatcaatcacctgtttacacgccggagcagctgatagcaaaatacagcaatttggtgtttgttctttattgcatgtcattggtctttgttgttgcatttaaccactatctctacaggagtggagaaactattatttcaaatagttcaaaaaatgctggcacatattggcgaacaatgttgccattttcttatgctgttgtatctggtgctattgggtcttgctcagtcttgtttgcaaagtcattgtaggttatattttattttgtaaacatccatgcatctaggatgctgattctttcagatttatttggtgctgactgccatgtgttatccccactccttcctgttccctgtctaggtctaacatgatgaggctgactatgaacagcagatacgagtttcatagctggttcacatactcaattgttcttctgtttctgtgtaccgctggattttgggtatggctaacctaatgcgttgttcatgaggctactctgctgctcttatttgtctaattcaactccatatgccctatgtgacagatgggaagattgaatgaagggttgtcattatttgatgcaatactgattgttccaatgtttcaaattgcttggaccttcttctctatctgtacaggatttgtttactttcaagaatatcaagtatttgatacgctcaggataattatggttgtattgggcatgacatttgtctttgttgggatctccttgctagcacccgatgacactaaaggtttgtaaaaggttgattttcatgtgctttcacacagaagattttgactcttggacaattgtcaccagctgatacgaaagatggttcgagcactgccgaggaatctataattgatatggacagaaatggaaagatgcagatggaggagacagacacagatgatagcaactcgtttgtcacttctgtaaaagcaaaagcaaaacgtgtactgttgaaggcaaagtctgcatgctccatgtcccttggccttggggaggacacaataagcgcttcgtccgtgcttgccatgcctatggtctcatcaagaacaaccggcttcagaggaattgaagatgaccgttcaaagtacgttcctttaagaaccacagattggagtaatctttagcggacggtgatatatagatacacagcaaaggtctttacttttgatgttgcatagcgggtggcagtaaagtattttgttgctccagaggctattgtttgttgtaatcatagttagctgtaacacgagtgtatagttcaacgtttctcccttcaaaacactgtccatagccagctgcatagtacatttgtaagttttagaatacagatcaaatgattcaattcgcttcttatttgctcaaccactcctacggttgcatgtgctgtgatcatcttatgcagaattgcaatagcttctgcggactgcggtctggccgcaccagggtgccttttag

SEQ ID NO: 41131 - DNA, 2686 bp, Zea Mays
gtgatgagttcgtgagaggtctagcccgtcgtctcctagtcaactttggttgcgagatcgttgtcttcgtatgatgtagataggatgggcgaaagtgatcctgttttggaggatgaagtcaaatatcgctattacaccattatccagctatatagaagagccactttacaagataatgctcaaagagtttcgcctgtgagctttgagcttgaagctgccttgaagctggcaagatacttgtgcaggcaagaacttgccaaggaggtctcagatttgttaatgggagcagcagatggtgccaaggctcttattgatgccagtgaccggctcatactatatattgaaattgcaagactttttggtacacttggttataagcgcaaggcggcctttttttcaagacaagttgcacagctgtaccttcagcaagacaatgcatatgctgctatgagtgctatgcaggttctaactatgactacaaacgcataccatgtccaaagccgaaaggctgtgaaaatgaaccatgatttgtccaagtctatagtgtcattgtttgagtcacagtggagtacccttcaaatggtggttctaagagacatactgatgtcatcaattcgggccacggatccactctcatcctggagtgctgcagctcgtcttcttcgatcattttacccactcatcacaccagctggtcagagtggcctagcaagttcacttgctaactctgccggcaagcttccaacaggcacacgctgtgctgatccatgtcttcctggcttttatcaggttgcattctttcccgcttcacccttctcaaagggatatagtaaagcggaatccacataaaaaggagtggtggactggtgcaggtccttcaggacctttcatttacactcctttcagcaaaacaggagcttctgggacttccaagcaagaggttagttggattgttggggagccggttcaagtcatggttgagttagcaaacccttgcagcttcgacctaattgtggagagcatctatctctgtccattcttggaattttgatgcctttccagttagtgttagtcttccacctaacacttcaagattagttttattatctggtattccaacaaaagtcggacaaatatcaattcctgggtgcatcgttcattgctttggtgttattacagaacacctattcaaggaggtcgattgtttgctccttagagctgcacaaggacttgtcctttctgatcctttcagatgctgtggctctagcaagtttaagtgtgtcaactttcctagcatttctgttgttcctcctctgccattgttagttgccaatgttgtgggtggagatggttctattcttctttatgaaggggaaattcgtgatgttctgataacactgacaaatgccagaaccgtaccagttgaagaagcacatgttgcattgtcagggaagaatcaggattctgttatttcgattgcccatagcacatggaaatctgcgcttcctattaaaccgggtggagaagtgacatttgcagtaactctaagagcctggcatctcagctcagcagatttggaaacagatggcagtagatctcctgcaaatccaaggagaatagcaagagaaggaatcaatccattcttggatattcactatgctggtcctgctgcgaatcttgagaatggagatatttctcttccacctggaagacgcctggttgttcccttgaatatctgtgttgtgcagggcatgcgtcttgtaagagcacgcctgttgtccatggaaatacctgctcaatttactgaaacacacataaagcctgtcagtggcaaagacgttaacttattgaaggtcgatccctataaaggaagctgggggttccgccttctggaactcgagcttttcaatcctactgatgtcgttttttatgttgatgttgctgtacatttggatgacgtggatgtgggtgaagaagtaatttcagagggcgatgctgcttgtcacaaaactagaattgatcgcgactactctgccagagtactcgtccctcttgagaacttcaaattacctgtttttgatgcttccttctttgtaaaggaaagtagtagtgatgagcctcttggatccagggccgctaccatagcagaaaggaatgccaaggcagagctaaatgtgtctatcgacaacttgatttcaaaaataaaagtgaaatggcactccgggagaaatagctcaggcgagctgaatattaaagatgctatcctggcagcaatacaggcatctataattgacatattgttgccagatcccctgacgtttagctttaagcttgctaagaatggaactgttaacaatgttgattcttcaaaggattctgacgatgtcctgaggtgcaaagatcctatatctgctcatgaaatgatccatatggaagttcaagtttgcaacaacacaaaggaaattattcggatgaaccttaacatttcatgtaaaggaaagagagggcgcaaaacaaatcgcaagcaaatgaagagtgtgacacgcggatttgttttaccgaggttcggttctcgcaaacctactccccgttgaggaggccacaaaggtcgggtctctttcaacccttaccctctctcaaacggtccctcggaccgagtgagcttctcttctcaaatcaaaaccgg

SEQ ID NO: 41132 - DNA, 794 bp, Zea Mays
ctaattcatttatccaatttaaatgggctctagactcagcgcactaaaatagggatttgcaggggcctcggcgcaattaaaccgtagactcagaacactatacattggactgcgggttcatataacaaaagggcaggggctcttatgtaactattctcggccgaaggggtatggggtgatatcggccgtttgatccacaatctgtgcgccagattagacttcatgctagttattcatccgcgctcaaccatggccgtcggatccaggattcgcggttctggtttaatgaatcgaaggggtacgcccagattcgatctaggccattccctgcacgatcaacggtcgagggccaactccccctagatctaatcttagccctacagcgattgatcaatggtcttggggcttcttcctccccatgaccccggacgactgcgtcacgaactggggaaacgtctagctcgcgtgtaggttgactaaccacccacgggtatggatcggagcgcggatagaacctatgcagtgaggatggaatgttgaattacagggacgtcttcttaccaagttcgaagcgcaagtacagttgcccacggaggcttgcggcatgatgtcgattcctcaacaccgcccgtgaagctcccgatttccgaattggcgaatacatgaatgagtcttcgcgcagtacggggtgatatcgcagcttgacaccccacgcaagttgttggagaacccggctcccaccgcgcggcagagacgacgctcacaccctcacgacggcggtgaaacacggtggc

SEQ ID NO: 41133 - DNA, 3712 bp, Zea Mays
agtttcaggcgttcaatcactagcgcggttatgctctgagctaaacccttgtagcagagcgaacgaggaaaagttctccgtttccactttcctcctttctccacgccccgaacctgcagaaatcaccctttccaccccaccccccgccgctcggatccccaggccagcacggcctcccctcctccccggcccggtccagcgggttgcatggtccgcggccgccgcttgtgagcccgatcgatggccacgacggaggcgcgccgcctcgcggtcgtgccgcagctagatatcgagcagatactgaaggaagctcaacaccgatggttacgccctgctgaaatatgtgaaatactgaaaaactacaggaatttccgtattgctccagaaccaccaaacagaccaccaagtggctcactttttttatttgatcggaaagtattgagatacttcaggaaggatggtcataattggaggaagaaaaatgatcagaagactgtcaaggaagcccatgaaaggttgaagtctggaagtattgatgtgcttcactgttactatgctcatggggaagagaatataaacttccaaaggaggacttactggatgttggaagaggactatatgcacattgtacttgtgcattatcttgagacaaagggtggcaagtcatctcgtgctagaggaaataacattattcaagaagctgctgtgggtagtccttcacagattatggaggtagaaagctcacttagtggacaggcctcagaatacgaagaggcagaatcagatatttattcaggaggagctggatacgactctttcacttggatgcaacagcatgaaaatggaactggacccgtgatagattcttctctcttcagctcttacacacctgcttcgtccataggtaattaccaggggcagcatgccacacaaaataaaagcttctatcctgttaaccaacataatggtcctctcattcttaatggatcaagtgacatgcttggaacaaatggccgtgcaaatcaaactgatcttccatcatggaattctgtgatagaactggacgagcctggtcaaatgccccatctccagtttcctgtcccttctgatcaaggtgctaccacggaaggcctgggagttgattacttaacatttgatgaagtatattctgatggcctcagtctcaacgatattggtgcagcaggaactcatgggaagtcatatctgcagttctctagtgctactggtgatttgtctgcaacagagaacagcctccctcaacaaaatgatggttctctggaggaggcagccattggctatccatttttgaagactcagtcatctaatctatctgatatcctaaaagacagctttaagaaaactgacagttttacaagatggatgagcaaagagcttcctgaagtggaagattctcaaattcattctagttctggggggttctggagcactggagaagcaaatgatatcatcgaagcatcaagccatgagccgctggatcagtttactgtttccccgatgctctcgcaggagcagctctttagtatagtagattttgctccaaactggacatatgtgggttcaaagactaagattttagttgctggtaacatcctgaatgacagtcaaatcaccgagagatgcaagtggtcatgtatgtttggagaagttgaagttccagcaaagattttagcagatggtactctcatctgttattcgccccagcataaactcggtcgagttcctttttacattacctgctccaacaggttggcctgcagtgaagtgcgggagtttgaatttcgaccaactgtttcccaatacatggatgctcctagtccacatggtgaaacaaacaaagtttatttccagatacgccttgacaagttgttgtcccttgaaccagatgagtaccaggcaactgtatctaaccccagcctggagatgattgacttaagtaagaagataagttcactgatggcgagtaatgatgagtggtccaacttgctaaagttggctgttgataatgagccttctactgctgatcaccatgatcagtttgttgaaaaattgattaaggaaaaattgcatgtctggcttctaaataaagttggtatgggtggcaagggacccagtgtgttagatgatgaagggcagggcgtgcttcacttagcagctgcccttggatatgattgggctataaggccgacacttgctgctggcgtgaatattaatttcagagatgttcatgggtggactgcactccattgggctgcgatttgtggccgagagcggactgtagttgcgcttattgctctaggagcagctcctggagctttgacagacccgactcctgatttccctggaagtacaccagcagatatcgcatcagctaatggccaaaagggaatatctggtttcttggcagagtcttctctgaccagtcatcttcaggccctcaatctgaaggaagctaatatggctcaaatatctggtctacctggtattggagatgttactgagagagattcactgcatcctccaagcggagattcattaggtcctgttcgaaatgctgctcaagctgctgcgcggatatatcaagttttcagggtgcaatccttccagagaaagcaagcggctcaatctgaggatgataaaggtggaatgtctgatgagcgtgccctctcactcctttctgtcaagccacccaagtcagggcagcttgatcctctgcattctgctgcaactcgcatacagaataagttcagaggatggaaggggagaaaggagtttcttcttattaggcagcgaattgtgaagatccaggctcatgtgcgaggtcaacaagtgaggaagcattatcggaaaatagtttggtctgttggcatcgtggagaaagttatattgcgttggaggcgtagaggggctggcttacgtgggtttcggtctacagaaggttcagtggagagcagcaatggcggaacgagtagcagttcaatccaagataagccttctggggatgattatgattttctgcaagaaggacgaaaacagactgaagaacggctccagaaagctcttgcgagagtgaagtccatggctcaatacccagaagcaagagatcagtaccataggattttgactgttgtgtcaaaaatgcaggagtctcaggctatggaagaaaagatgctggaggagtcagcagggatggacttcatgagtgaattcaaggaattgtgggatgacgacacacctatacctggttatatttagttttcaaacctactttgttggatttctctgtagattgcctcctttgtcttgagtgctactgaattgatggcgcacatagctgataacccgaagtagcgttgctggagcagtggagcatgacctgacatgcttgaatttggacttagatgtagtatttcatttgccttatgtacagtagaatgttctctacatttgaggaagccttgtatttactgtgtgaaatcggtgtaaagagtttgacattagagatcttaccagatgacttaacggttgcatgtgtggcgtgcagtccagaagttaggaatttgacccgtcgtggctttctgaaccgatcaaaggctgtggccgtgctcatcatctactaccaccatcgcctcggccagaaccacgccgctcgcctagctagctggggtttgaa

SEQ ID NO: 41134 - DNA, 3798 bp, Zea Mays
ttctctcgcgtcgttctcccgtagtcccgtgccctcgcgtgcgctctatctgtttctggtggcgacgacttggcggtccccgctgccgccgtgcccaggcctctacttcgggaccttcaccggcgacgagcacccatcgggttgcttcgcaaaacttccaacatccaggatacaattaattacgattccttcaactttatctcgatttataggaggttgcacagagcccatccaacagggtgtctcagacatactgatggatggggtgcccaatatccttgagaaatcatcacatgaatgcatgtactcttggtacttcaccagggaagaactagagaaattttctccatcaaggaaagatggtattactgaaaacaaggaatcagaaattcggcatttatattgttcatttatccgggatgttggcatcaggctgaagctacctcagatgacactagcaacagcagtcatgctttgccatcgcttctatttacaccagtcccttgccaaaaatggatggcaggtgagagattatattgttgtgccagtgatggttgctgatgtctatgaaaagcgacaagagtgcagagtttcattgccaagcatttgttggaaatatgttctccaccatgtctaacttaacattacagaatatccttcaaaccatttgaagtattttatcttgtaataatattactgtattagttttctgattacatgctaattgctgattcatcttgatgctactctacctcaagagtcatgatcacttcgtgattggacatttcaaagggatcatttacctgctacaatgtgtcaagggcaccagggctcagagtagctggaccttgactactggacctcgactacatagttcgtagtcatggccgggaatggggtgaaggtttctcccctctgcaccctatgttgagggaggagattagcagtagaaagtttaatcattgcttaatcgtcaagtgttccaatacaagatgtaaataggcacgtagcctctaacgaacaatagatggaaaagctcctcaaattgaggcaccgtagtttcctaccaactaaactatgcaggcctgacactagctgcagtgatcatgcctacagcgcgtttgacacgcgctgcgtgttcttggcggcatctctggcatgggtctggtgcgtgtaccagggattaccttcccggtcggtaaccagcaaatttcggtagtttttctcgttttcgatgtctaccgagaaatgaaaaccggtgtgattttttatgtatttcgatttcaaatttgaaaatataatagtcaaattttggtcaacaaaacggtttttgaaatcacgaaacgagaatgtaatccctggcgtgtactggtggccccacatgacacatgttattggaaaacttctttttagaacttttaagtcctgattgacttctcctagtatactaaaaagttttgaggtagttaagagttattttcagtttacctaggaagtttgtgtttgtcagatatgatactattgtgattaagtacaatacttcgtcataactgggcaaatgcattcagaactttcctattgaagttacttaaccccgaccagccaactgggttgcaacttactgttacaacttaagcaagtttgacatactttgacggatcatcttgtaaattacatattcaccaacagttgcaacagtatgtgtatttctggcgtcgaaagttgaagatactccttgtcccctggaccatgtagttagagtggcctatgaaacaatgtataggcgggacactgctgcggctcaaaggatccgtcagaaggatgtttttgagaagcagaaagcgctcattttgatcggagagagattgcttcttacaactattcgatttgatttcaacattcagcatccttatagaccacttcttgatgccatgcaaaatcttggcatcaatcaaaaagaagtgaaacaagtagcatggaactttgtgaatgactgtataaaccccagtacatagctgctggttccctttatctggctgcaaagcttcacaatatcaagcttcccttgcatggagcgcatgtttggtggcaccaatttgatgttgcaccaaagcctctggaagccgtcattcatcaaatgatggagcttgcggctttgaaaaagttgatgcctgctcgacccaatccggttaagctgaaggaaactttatgtgaagctaaactgagcttatctaatagcccagactctgtgttgaatcaatcaaacttgttaataagcagctcaagtcctgatattggcgagcccagtgacaaagtgcaggtggattcctgccaatacttgataagcagtcacatgggtgattgtagggtctcaggtcctgacagcagttcgttgaatacttgtgctaatagaaatgtctcttgtaaagcacatgatgaagagagcttggatcaggccttaataatcaaacatgacagtgggatgatgccttctagtaatcagacatcattatatgctactgtaggcactgagggcagtgctgaactgaagcaggatgtaagccattgtaatgacttcaatatcagagtcaatgacgaaagcttgaaccaggtgttaagaaatcagcatggtgatgctatcccattacctgacgtggtatcgctggatgccaaggtggacaaggaaaggagttggtgtgtggaaccattaattgcaaactctgattgctgtactgacagtgttaatgtggatagcttgtgcactgatcagagattggctgatgctccttcaggccccacagctgatgcaccatccatgctggccgaggaggaatcttatccttttagtgcaaagcttgaaaatattgatgttgccaggatcaaaggtttattgatgaagaggaagagccggagagagatccaagaccgagccattgcttcagatggtctaagtgaagaagactggatcgagagggagcttgaatctgggattgttacaaaccaagaagccaattgtgctgccatctcagacgagctaagtgacgaagcctggattgagagagaactcgagtcagggattgtggtcggaccaagaaatgagcaagcgatcacttttgatggtttgagtgaagatgattggatcgagagagagctggagtctgggatcatcgttgagccagcacctgctaccaagaagcggaagctggagtcaagctgttagctctgcattcgaaggccagattccaagcaggtgaataataacagatggttgcgagtaggaccacatcgaagccaagagatacatgtcgcacagatgggaggatcaatattatcctttttttatttctttataaccaaacaccttggagtactttgacacaaggggtgtgttcacagtgggatctccccagtttcttgaatgcagaaccgtatccgttgtatttgttccttcttgtcgtgagtgtaaatctagcgtgtccgaagttcggttttagattgtaggtgtaactgtagcagggattatctggtgttaagcccaacgagaaaatgattcagtgtaactgttactgtaaggaaagaagttattcagtgtagatttatggttaacacaagaagaggcaattactggtgtatgatgtttataaattgatgatgaatgttactggcagctcaaaagaaaagacagttactggtaactaaagaaaagtacgtttaacggagctgatcacattcaatcccctattgagctgcccttggtcgtcaattgtataacaactttctgcgtgaccatcaaaaaat

SEQ ID NO: 41135 - DNA, 1038 bp, Zea Mays
gccacgaggcgagcagtctcgagtgatcccccctgtagtccccggccccgtctctccgccgccgcctgcaaccgcttcacgtgcccctcgcaggtcccctttccgaccccaaatggagccgaagaaatcctccgtccagcgccagccccacgccatggagcccaacaagtcctctccatgcggcgccaccgccaccgctcccgccgccaccaccgaagccgagtccccgttgtgcagcttgttctacccgccggcgccggcgccgaccgcggcaaatgggaaagattcggacttgtacagcattctttacaaagggcagagcgggagcgcacaagctggcgtcacagatggtaaaccgcaatgggctccttccagaagtcgtgccgcgaatgcgaaggacggtaaacattcaccgccttatgactcagttgatacgtcgtgttttggatcgtctgtggattatggtggtcgagattatttctacggcagctctacgcccaagaaagtgacagaatcctccactgactacaaagggaacaagaaagatcccgccgcagattctcatggcgattggtggcaaggctcattttattactaagagaacccggtggcctctccttggacaacaaggaacagaaggagattctattgacagttcttctggaacagaagaacagaaagagaaaatagtattgtcggtgtcatagtgaacccgctttcgttcagtggtggtgccattatctagaagcatcatctcagatgtgcaagcaatgaagctgtaggacagtacgaattaggtcgcataagggtccttgtccattgtacgccagtaatatgaagggtttggtgtctaattattagtcaaatgtctgtacagttggatcgtcactccaaagcaaaaaaaaagtgctggagaagcggcggtggcttcacattgtacattttttttatcggatgggatttgactgaagtttggagactgttcttgtcaattacattatacaggtatcgacttcaggggaaaaaacttctatttcc

SEQ ID NO: 41136 - DNA, 4962 bp, Zea Mays
ttttcttcttcctcgcatgctactcatgcatttgatcttgtacacttcgatttgtggacttcacctattaccagtatgtcaggctacaaatactatcttatggtgcttgatgatttttctcattatgtgtggacttttcctttgcgtgtcaagtttgagactttctcgccctccgccacttcttcgcttgggtgtccactcagtttggcctcaccattaaggccgttcagtgtgacaatggtcaggagtttgataactccacctcccgcgacttctttctctcccacgggatgcagttgcggatgtcttgcccgtatacctcctcccagaacggcaaggatgagcgcatgatccgcacgaccaacgacaccatccgcactcttcttctcgaggcgcacctaccggcacgtttctggactgaggccctccacacctctacctacctcctcaaccgtctcccttccactgcgtgcccggcccccactcctcaccaggcactcttcggtatccctcctcgctatgaccacctccgtgtcttcgggtgtgcttgctacccgaacaccgctgccactgctcctcacaaactagcaccctgttccaccctctgtgtgtttctcaggtactccccggaccacaaaggctaccgctgctttgacctctgctctcgccgggtcctcatctctcgccatgtgttgtttgatgagtccgtatttccctactccaccaccacaccaccctcctccgacccttaccttgacgtcttcactctctttccgactgacgcggtggtcgagccacctatccttcctctctctgcaggtactcgatcaccgcctgtcggtcctactctcggcccggtgccttgctcgggtccggcagtgtcgcctacggtggtgttgcctctccgtggagccccgtctccgaccgcccccaggccgagcgagggtggtgggactgcaccgcctacggggccgtcggtaccgacccctccggcccgcttcgcccagccggtgcaggtctaccagcgccggctgtcgccgtcggggtttgcatcaccaccgccgccgtcgccacctctgccgctgtccccatcagtgccctctcctccggcgacactgccggtggcccaatccccgccagggacacctacacctctgccgtggcccgtgtcgagacgccggtgtaccacccaccgctccttcaccacgacccacgacacgtccacccgatggtgacgcggcacgcggctggtaccctgctgcctcgagtcctggcggccacgaccggagacttgcaggtttctccggtaccctcctctgttcgcaccgccctgctaaacccccactggcgtcgggcgatggaggaggagtacgcggcgctcgtcgccaaccagacgtgggatctggtgccccgtccgcccggcaccaacgtcgtcaccggcaagtggatctggacgcacaagcggcagaccgatggtaccctggagcggtacaaggctcgctgggttcttcggggcttcactcagcgccctggagtcgattacgatgagaccttcagcccggttgtgaatccggccaccgtccgcacggtgctattgctatggctagcccttgctcgctcctggccagttcactagctcgacgtcaagaacgtcttcctgcacggcgccctcaccgagaccgtctactgctgtcagccagcgaggttcgtggactcctctcgtcctgacatggtctaccgactcagcaggtccctctatggcctcaagcagccccccccgggcgtggcactccagattggctacgttcctggtgacactgggcttcgtggaggccaagtcagacacgtctctgttcgtccaccatcatgaagcagagattgcctacttgctcctctacgtggatgacattgtcctcaccgcctccagtcagtcactccttcgccgcctcgtcgacgcgcttcagcgggagtttccggtcaaggatctgtgtgtgcttcaccatttcctgggggtcactgctgagcctcgcccctcaggactccttcaccagcggcagtacactcttgacattctggagcgggccaagatgattaactgcaagccctgctctaccccagtcgacaagcaggcgaagctctctgaggccatgggtgacccagtcgaggaccccatcgggtataggagtcttgccggtgcccttcagtacctcaccttcactaggccagacatctcctacgctgtgcagcaggtctgtctccatatgcacgacccccgagagccccacctcgcggctctcaagcgcctcctctgctacctccggggcaccgtcgactacgagctgcttcttcacaggtctacctcctccgagctggtcgtctacaccgacgctgactgggccgggtgcccggacactcggcgctccacctccggctacgccgtcttcttaggcggtaacctggtgtcctggtcgtcgaagcgccagctggtcgtctcccgctcgagcgtcgcggcggagtaccgtgccgtggtcaacgacgtggcggaggctgcgtggctccggtagctcctcgccgagctccacagtcccctctccaagagcacgttggtctactgcgacaacgtcagcgccgtctacctctccaccaacccggtgcagcaccaacggaccaagcatgtggagatcgatctacacttcgtccgagatctggtcgctgttggtgatgttcgtgtcctccacgtcccgaccacctcccagtttgccgacatcttcaccaagggtattccgtcctcgaccttcgccgagtttcgctccagcctcaacatcagtagtggctagttgagtctgtggggggatcctagtccagtctgtaaactccgctgcgacggaagttcagactgcggggggtgttagagtatagggttaggcccatgtggcccatgtacaaacactatatagctaccctctggggttagccctaataatatacaattattacctgtaacagtttttggttgtaaatgcttcattcttaacaagaaagtcaagagccctaataatatacaattattacctctaggggtagcctgaattcctcatggatttgtttctttatgcttgtttctggcctccgtaaggagcgtcttttgtattatgttttttccctcttcttaatataattaaaggcgcagttcccctgcgctttcgagaaaaaaagagctcgaagtttgctcctagaatggacgagggtttcttgcttggttatgcatcaaatgcgcatggatatcgcattttcaacaataccaccggtcttgttgaaactgcgatagacatgacatttgatgaatctaatggctcgcaagggcatgtttctaatgatattgcaggaaatgatatcccacctaatgaagccatcaagaagcttgcaataggtgaagtgaagccacaagaaaaggacgatgatgaagggagaatttgatacaattttgacatcatggaatagttggctgatttcttcaccaaggcgcagaccagagctcaacatcgcttctctctctccaaactcggtgtgatttacccaccttgagtttttttaggggggggggatgttaggtgtatatctatgtatatcccctttgtataaggggtttagtacatatttaccctttatgtaccggtgtatacatatcagcttagtgcctcatattgaataaagtcttactcttaacatatatatccatcttcattaatggagtgcattttctaattctatggttagtaaccactgaatgggtatattatgaaaatatatttcatggggtatctcatgatactaatttcgtgtcatagatactgttgttattttctataaatttagtcaaacttacaaatgtttgacttaagacaactctagaatttgatttatttctgtaactgtgttaaagattatcaactctttggttgtggctgacctgtccttgtacagctgtcttgggccgtttacctggcactactgtgtacaggaatacattgcagtaccctgaggcttatacgtataatgggatagtagtggttcgaattgatgcaccgatctactttgccaacattagctacatcaaagacaggttgcgtgagtatgagctcaatcttccaagttcaaacaagggacttgatgttggaagggtgtattttgtgatcctcgagatgtcccctgttacatatattgattcgagtgctgttcaagctcttaaagacttgcaccaagaatacaaagcacgccatattcagattgccatagctaacccgaaccggcaagtgtaccttctgttgtcaagatcgggcatcattgacttggtaggagctgggtggtgctttgtgcgagtgcatgacgccgtgcaagtgtgcctacagcacgtgcagaattcatcttcaaatgcgttgaagctacccgtgcaggcatcaggcgtgttgaccgattctgtttcgactcctaaaccagagcagcagcatcaaaagcagcacggcctcttcaaggacctatggaaggcacaggacagtaacgcggatgctggtggtgaggtgcagccactgctccggcaaaaccttgtgtaatactcctacaaaatacggagtacttcctgggatggactcacgccctcgctggcctatacatatacgtgtttatttatttgtctatgttgttgttaacatggtatcgtggtgaacaaaagaaactgaacatgccattgttactgtggtgtggcgttttttgtacacttttgatacctaaatggaactcctatgatttgggtctggaaagggtgtgtgaagatgttttgttccaggttttggagttccgctcccagattggcttgacaagcatgttaattccatgaactctcttccacaaaaacagtacagctgattatcagttttatgtttagaatgagaaaatagccctggc

SEQ ID NO: 41137 - DNA, 4283 bp, Zea Mays
gtcatcggcaggacatccacaccaacccgtgctcaaggaaaaaaaaccggggcggcgaaaaccctcgaaccctaatccttacgcccctcatggcggacgctgatgcggcgctgccaacgccgcctccggaggtagtagcccccgaggagcatcccgtgggcgccgaatccaccgtcgccgcgccggccgaagtcgataacaagcggaagctagaggaggtcagcgccgacgcggaggtgaaaggcaccagcgaggacgccaagcgcccgcgcgtggacggcgagcccgacgccgcaacaggggttgagcagcaaatcgatgggtcctccgtgaatgcggatcccgcagctccggaggataaggctgctcttaacgttggcgcagcaatggatggtgataatgacacgcctgctcccgctcccgctccagactcgcaggcggtttctgacgagaagccgcttgaagcagcagctgaagctccacagcaggaaggtgatgcagcaactgctgtacaggagatttctcgtaagatcgaagtgcccaacagcaaggttggtgtcgttattggaaaagctggtgagacaatcaggaacttgcaaatcagctcgggtgcaaagatccaaatcaccaaggacatcgaagcggactcaaatgccctgactcggccggttgaactagttggaacacctggcagcgttgataaagctgagcagcttattaagagtgtcatagctgaggctgaggctggtggttcccctgccttaatagctagaggatttggaagtggacagcctggatcagagcaatttgagatgacagttcctgataacaaggtcggtctcattatcggaaaaggtggtgagacaattaaaggcatgcagaccaaatctggtgctcgtattcagttaataccccaacatcctccagagggtgttacattgactgaaagaattgtacgtgttactgggaataagaagcagattgaagctgcaaaggatttgatcaagcaagctatgaatcaggtgatgtgatcttcctttgtgattttttggtagtcgatttgtgtttcaattgttaagtcatggtagatgctggtatgatactatatgcttttaattgttcatgctttatgtgattttactctgatggttgctgatgatgtcatcacatttcatgattcattgttcatgatatggttacttttgtgatcgtagataccgaattcaatgttgtcttcatggtattttttgaccaaggcaaattcaacctatcgagaacattgccttattacaatgctatgatggaccaattgattttttagctttgggtttcataatatgcctgtttttatcattgcatacattttgtacaattttcctgatcaagccaaacttgagaatccatgataagctttgtagcttgcatatatttgggttccataatatgcctgttttatcattgcacgcaattcatagtttcatactgtctttctgttcaaactaagcttgagaattccctgatgagctttgtagcttatataggtgtcccaagtgtactgatatttttgttatgaacaaaacatgatttgattttgtacttcattcatactgtgaatatattactatttctcttgtatcggacccttgaattttaagtgttgttttaaactaatcaatcttctctacacttggccttgtatgaagtatccatgatatatagcagagcctaattgggctggaaggtaagtttcttttaatgtttgagttctcatctttagatgaaagacaaatgggacaccgttgcgttttcaagattataaggatgtaaaacttttaaatccgatttactagctcaatgaatatttcactttctttcccttgtcaaaatctcttatcctgggtgttaagcactgcgaactttggcttattttgccttcttgtttttactggatcatacacgcttccattttgtacctgttcgttggagcatagttcttgatttatgcattaatgacatatgatatatgaattatggaagagtaaaaaatgagtgcatgatcatacgattcagaaatgaacttttgagctgtaatacatagcatatgatttgtctggaaatctgggtactgattgaattcttgatcccattagcttgactattcttcgtaggatatacactatgagtaggacttctcatcttcatctatcagccttaacagtaaacatgggcatgctttggatcaatgtccatgactatagctttggaagtgttgtataccagcggatcatccagttgctagatgagatatgattctgtttcctacataagcagtctgaactgacacatcaagttccctcgcttctagttttcgtcaattatttttgttgaaggtgccgatttggagttggtcaggtatcctaatgcagatacagctagctttcttcatggggggtcatcgctcttcatcgtttacttgcaccgaagagggacattgaccattatcccttagccttgcatggtgtatgtagttggtaactggtaaggctgcctattgccgaaaggaaacataaactgtttggcattggaagactgcaacaagtgtatcattgccatgacaaggcttctacatcaccagacattttcaaagcatacaaatcagtctggcggatatggtccacaaggttaccgacctcagggtcatggtgccgcttctcagttggggccacgctctcagaatcatggctatggatacccacctagaggtatgcctccacctcaaaactacaacgcaccctacggtggctacccaccgcagggaccgtcaagaggtggcatgggctgggaccagaggccgggcccaccaacccatccttcgtaccagggtggtggttctgactactacaagcagggatctcagccatatgatagccagccacccagctaccctcctgggccagggaattacaacagttatgggcaatcccagggccctaactatggccaacctcagtatccgcaacatgcacctcaacagaactacagccatggctatggtgatcctagatacaatgccccccctccgaaccagcagtactatggtcagccaccgatggccccgcagcaaggctatcctcaacagccagatccctatgctaggcctccatacagtggacctggtcaatggacccccaggggtgctcccgccgcagatggctcctaccaggcgccaccttcatcttatgggccaccgtctcagcaacctcctgcttatgggcaaacatatggtgcagcaacgggacctgatgggtatggtcaacagggttacccacagcagggtggccaggtaccagcttcatatggtcagagtgcaccagcagctccaggatatcctcagcaaggcacgcagcaaggtggctatgcacagtacccgcagacccaaccagcatatggtgatcaagcagctcaagccaatgcgaactatgggtaccagggagctccagcagatcccaactacggaagtgcgtacccacagcagccagggtatggtcctcctggtcaggcaactggtcaggctggttatgcatcctctgcgccagcggccagccagcctgtgtatggccaggctggatatacccagccacctacaaatcctccaagttatgatcagtctgcagcaccagcggcgactcagagcggttatgctgcgccccctgcaaatccacaacagcctgctgcagcaaaaggggtctcgccacagcctgctgctgctgctgctgctggatatggtgctagcgggcagtggacggcatgagcctcgtcttccgaacttcgatgacagcaaggtcaggttggatatccgcttttggcgcgtgtttgaatgtttgcatcttttggatgtctgtggacgcatcatgtagggcttgaccccgttatcgaaagagattgtaaccccttgagttgtgatactggacatcttctgtagtatctacgagtagttgcttaatgtgacttttaaacattctattcagtttggatgttccttgtcttgctacttcacagcttgccaagccagtaatctttggattcatgtttggttgctctttggtctttgctgtcgttcctgtaaataaatattggcgtttggccttctcttacgtcgttcatgggatgacggggtgccctttcgagttggcaatagatctgctgttcatccaaactcagttggttttgtttgtatttgttccgaatcatgttggtacagttagcatgtgaatggacaagcc

SEQ ID NO: 41138 - DNA, 1396 bp, Zea Mays
atcgcaccctcgcctcgcctgcctgacttcagtactggctggctcactggctccgccggatcttctactccagcctgcccgctcctcctcctcctcctcctcggtatccatccgctcccgccttctcattccaaagctcgccccgcgtcgccgcccctccgcggatcctccctccccttccctcgtgtgctccggcggcattctccttcccgctgggtcgaggatttcttgtagatgactcgagcttcgactatcgatttcggacggcggaagcagagcgagctcttcggctcagggccactgcgtccagcaaacatcatcagaaataaattccccacctacaagaatggttcgaatgggattgttatcaaattggccgatggcccagaaatgccatctctcaaggaggccgttgccaaggaggcaacagatctgcttgataggtgtcagcgcccttcagtccgagagctcaccatgaaattcgagaagggctttaacacagctaccttgctgtctaatgaggctaaatggagacatgcggctttattggagcgggacatccttctaaaggatcttaaaagtgtgttggaatcgctgagaggtcgagtagggggcaaaaataaagatgaaatcgtggagtctctatctatggtggatattttagccattgagctatccaaaagagaagatgagttgctccggcaaaaaacagaggtcacaaaaattgcagacacgctgaaactggcttctacagatgccaagagaattattgacgaagaaagagccaatgctcggttggagatagaaagtgctaaagcttctgtacaaaaaattcaatcagcacttaaagagcaggaacttttttctcaaagaactgggaagcaggatgtcgatgaactgaaggaagaagttcaagaagcacgaagagtgaaaatgctgcattgcccaagcaaggcaatggacattgagaacgagatccaagttctgcgtgatcaactggctgaaaaatcttcagattctcttcgccttttgaaagagttggagctgcatcgaagttacggggaaaatgacatgcccttgtatgaattaaagggtctagaaaccttaggctcaacgttgcacatactgtagttcgattgtcgcatctgatcactgagagtagctgagctcagtttagcgttgtacgtacgtagtgccaactgccaagtgttggctccgattcattttttttaagtttaggactcgttgcgtgtactcgccggttgtgtagtgtagtagttatgtatacttgtgttcctgatgaagagctgaactacgagtgcctagatgtcatgatgcatccatgatggcatatcgggtacctgtccggtatgtcgggtatagcagcttggtcagc

SEQ ID NO: 41139 - DNA, 2138 bp, Zea Mays
cggcaagacaaggcttcctcgcacactggcagttgacttgtctccgctcgtcccacctcatcctcctccctgatttttgccacgagctcgtcctagctaggtatgtatttcctctgaggatgatctcgtccacgcatcgtatgtctaggatatctcgcttggttattgtcccgcctccaaatcaaacgcatcctaagtgacacaggcatagagaagctttgctagcgaagtccagtagtgcaactcaccccttcctggtcctgctgctccgccctctccacctagctaccactcccttagagcgccactgccaagccatggcgggaggaggggcggcctaccagagctcgtcggcgtcgccggactggctgaacaagggcgacaatgcgtggcagatgacgtccgcgacgctggtgggcctgcagagcatgcccgggctggtgatcctgtacggcagcatcgtgaagaagaagtgggccatcaactcggcgttcatggcgctgtacgccttcgccgccgtctggctctgctgggtggtgtgggcctacaacatgtcgttcggcgaccggctgctgcccttctggggcaaggcgaggccggcgctcgggcagcgcttcctggtggcgcagtcccagctcacggccaccgccgtgcggtaccgcgacgggtcgctcgaggcggagatgctccaccccttctacccggccgccaccatggtgtacttccagtgcgtgttcgccagcatcaccgtcatcatcctcgccggctcgctgctgggccgcatggacatcaaggcctggatggccttcgtcccgctctggatcaccttctcctacaccgtctccgccttctcgctctggggcggcggcttcctcttccagtggggcgtcatcgactactccggcggctacgtcatccacctctcctcgggaatcgccggcctcaccgccgcttactgggtagggccaaggtcggcgtcggacagggagcggttccctcccaacaacatactgctggtgctggcgggggcaggcctgctgtggctcggatggactggcttcaacggcggcgacccgtactcggccaacatcgactcgtccatggcggtgctcaacacgcacatctgcgcctccaccagcctcctcatgtggaccctccttgacgtcttcttcttcgggaagccgtcggtgatcggtgctgtgcagggcatgatcaccggccttgtgtgcatcacgcctggcgcagtggaaagaaagcaaactaaggaaaacaaagtcagcaaagaagaatcaaagcgtctgcaacttctgcattcagggctcttaggttcatcctacagccgcctaaatagactttttaaggcctggtgcaagggtgggcagccattgtcatgggaattctctcaggtagcatcccctggtacactatgatggtactgcacaagaaatggtccttcatgcagaggatcgacgacaccctcggcgtattccacacccatgcggtcgctgggctcctcggcggcgccactactggactctttgctgagcctgtcctctgcaacctcttcctcgccatcccggactccagaggtgcattttatggtggtgatggtggatcacagtttgggaagcagatcgctggcgcactcttcgtcattggctggaacattgttatcacttccataatctgtgttcttattggcctagtcctgcccctccgaattcctgatgcacagctgcttatcggggatgatgctgtacatggtgaggaggcgtatgctatatgggcagaaggcgagctcaacgatgtaacccgccaagatgaaagcaggcatggcagcgtcgctgtaggagtcacacagaatgtttgagcatagttcttgtaaggttgaaagaaagaaaaatacaagtgcatttgtttgctaattgctattaactgatggcacaattgtatgcaacaaaacacctgttcatggaggaatgtagagtgtcaggatttgatttattttttttttggaatctggaatcttttctgctttcatgattgtctatgctgtatatttgaagctgtagaaacaagatattctttggcacaaattgttgcagtagttcatgtcataactcatggaagatcaaaac

SEQ ID NO: 41140 - DNA, 648 bp, Zea Mays
gctaagatccgatccagaccgcacgttcccaatccgacgcccaggctcttttaccctaacccgacagcgccccggcgacggagctcagctccccgcggtggccggttcgccggcgagcacgaaatatggttccaaaccgccccatctagaaattgatcactactacactgagaggggaagatggcgaaactgcagagaggggtctcaccggcgattgaagaggttgcgagcctgcccacggaggagagcggatccgcggctgcgcttgtactccggcgaggaattcaaccgcaaccggatatcactagcgtgattgcttccatccccagcttcgccaacctccagtgagcccccccccgaggtacggttcaggggcagagtcgcccctaatctcaatcctcgcagcggcggcggggacttatgtttttcttttcacgacgtctatggaggtcgggtctgggcgctggtctttgcacgctggagaaggtaagaaggaaaggaaagaatgcggcgcaacatataggatcgtggctgacgaggtcacgccatgcgctgcggggttcacggcgtacttccgccatggccggtattacgttgaggcgaagtcgcagctcgattgaggcgacagacaaatgggtccgaccagca

SEQ ID NO: 41141 - DNA, 212 bp, Zea Mays
ttatcgccgtgtccatggaagtggagcgacttaatattggtacgttaattaatcgcgtgatgcggaagacgagccaagtcgaccccaagcgcgggctaatccgcatggtgatgctgatggacgaacctgcctgaacaaatgtcaagacaaaaggatggtcatcaagtggtcgccacctaacaaacactaacgtagtgtttattccaggcaag

SEQ ID NO: 41142 - DNA, 2845 bp, Zea Mays
ccaccccacaccctctcccatctctctctccgtgccctcctcctcccccccagtccgccccacccttccggccctccccctcttttatatccagtaccatggtgatctccgagctcgggtgagctgatgagaatgcggccgatttgaggaaggctgtgggcgcgatggatgcggtttcgggcggattcgctaggaggctgtagaggttaggttccggtgtcccccggcccggccggtcgtgggagatgagctcctcgtccgcggccagcatcgggcagccgccgccgcccgcgccgccgccggaagaagagaagaagtgcctcaactcggagctgtggcacgcctgcgccggcccgctcgtctgcctccccaccgtcggtacgcgcgtcgtctacttcccgcagggccacagcgagcaggtggcagcgtcgacgaacaaggaggtggacgggcacatccccaactaccccaacctgccgccgcagctgatctgccagctccatgatgtcacaatgcatgcggatgtggagacagacgaagtgtacgcgcagatgacgctgcagccgctcaatccacaagagcagaacgacgcgtacctgcctgccgagatgggaatcatgagcaagcagccgacgaattacttctgcaagacgctgactgcgagcgacaccagcacgcacggcgggttctctgtgccccgtcgtgcggccgagcgcgtcttccccccgctggatttcacacagcagcctccagcacaggagcttattgcacgggatattcatgatgttgagtggaagttcaggcatatcttccgaggccagcccaaaagacacctgctgacgactggctggagtgtgtttgtcagtgctaagagacttgttgctggagattctgtgctattcatatggaatgagaaaaaccagcttttgcttggaatcagacacgctacccggccacagactgtgatgccctcttctgttctttcgagtgacagcatgcacatcggactccttgcagcagcagctcatgctgctgcaacaaacagccgcttcacaattttctataatcctagggcaagtccaacagaatttgttatacccctttcgaaatacatcaaggctgtttttcacacgcggatatcagttgggatgcgattcaggatgttatttgagactgaggaatcaagtgtccgcaggtacatggggacaataacagaagtgagtgatgctgacccagtgcgttggcctagttcctattggagatcagtgaaggttggttgggatgaatcaaccgcaggagaaaggccacctagagtttctctgtgggaaattgagccactgacaacctttcctatgtatccatccctgttcccactgcgagttaagcatccttggtattcaggacttgctgctcttcatgatgacagcaatgctttgatgtggctgagaggagtaaccggtgaagggggctttcattctttgaacttccagtcacctggtataggttcctggggacaacagagactccatccatccttacttagcaatgaccatgatcagtatcaagcagtggttgctgccgcagctgcctcccagtccggtggttatctgaagcagcaattcctacaccttcaacaacctatgcagtccccacaggagcagtgcaatctcaatccgctgttgcagcaacaaatactacagcaagcgagccaacagcagatggttagttctgatgctcaaaatattcagtccgtgctcaacccaggtgctattcagcagcagctccaccaactccagcagatgcagcatactcataatgaccagaagcaaaagattcaaccagatcaacagtaccaagttgctagcagtgcggttctcccgagtccaacatcattaccaagccatttgcgtgaaaaatttggcttctctgatcctaatgtgaactcttccagcttcatcagctctagcagcaacgaaaacatgctggaatcaaacttccttcaggtaagttcaaaatccgtggatttgtctagattcaaccaaccagtagttagcgagcagcagcagccgcaacaacaacaggcatggaagcaaaagtttatgggctcacagtcaatgtcttttgggggctcggtttcgcttaactcgcccactagcaaagatggttctgttgacaacaaagttggtcgtgatgtgcagaaccagtccctttttagccctcaagtcgactcttcctccctactgtacaatatggtacctaatcttacctcaaatgttgctgataataatatatcagcgtttccctctggatcaacatatctgcaaagtccaatgtatggttgtctggatgactcttctggtttattgcaaaatacaggagagaatgatccgacaactagaacttttgttaaggtaagtataatcgagtctactaaaaacaaatttaagcccttcctcatgtaatcattttttaaaattcaggtttacaagtcaggatcagtggggagatccttggacatcacccggttctctaattatgctgaacttcgagaggaactgggtcagatgttcggcattaagggtcagttggacgaccctgatagatcaggctggcagcttgtatttgtcgacagggagaacgatgtgcttctccttggagacgacccgtgggatgtatggtacatcaagatactttcacctgaggatgtgcataagatgggaaagccaggaaacgatccacgctacctatcttagctacctatcttaaatcgatacatggagctctttctgctactttgcttgatggttttagttgctgggttattatgtcagaaattttatgcaag

SEQ ID NO: 41143 - DNA, 840 bp, Zea Mays
tacgattcaaggacctaggtgtcgtagatggcttcaacacgacgcccgatgccggtagcagcccggacgaagcaccagtgtccaagcattcggttcctcactgtcgcgccgccacccccataggaggaggcgaggatgtcgcactacaagttcaagcactcgaggcacggttctctcagcttcctccctaggaagcgatcctcccaccaccgcgacaaggagacgcacaagcttagggttcgcaggtcttactccagcggtagcatgggaaagaagatttgcagcaccgatggcacctcaacgcctaccaggtccatgaatcaggtcatatcactccgtgaggagacctctgggaggacacacgtagaatatgccattttcaatataccatttctagctgttacatttgtattccttttttaacatcactagggaagggattctcgcctggataaggtgcaaggtcagagttcacgatctcacggaacaccttctcgtcgatctgcaggcttgttttgtacttttttaatgttttgtttctagtttcaggaatacggttcatctcatctatacatatgttggttagagcaggcacacccaacgaaagttacaagaacaggtctcggcctctcgggcgagctcgccgcctcctccctctgccgcgtgcggggcctggtcgcgctgagcctcgcgtccaacggcttcgagggccaggtgcccgtcggcctcgcggcgctcggcgtcatcctccaggtgctcgacctcggggagaacctgctctccggcgtgctccacccggcgctgttcggcaacctcaccagccttttgaactgttattaa

SEQ ID NO: 41144 - DNA, 1750 bp, Zea Mays
gctaaatctgtgcaaagcctacgcaccaggaggcgaagagaataacaaaacctggcctgcgccttccctgcggcgacctgggaggcgaatgcggccgcgatgtggagcatcgcacccgccgcgagcgggcagcacttgagtgatccctccacagccagtgccggcgcgtgctcgccgtcgagccgtccgtcccggaggcacctcacgaccgcctccgccatcctccccgccgccgccggccgccgcttagtgcctaaaccctagcccccacaagagcccgagacgggtcgccaaactcccggaaggcctggaggcaagagtaacgcggggcccagctgtcagagaaacacgggaccccttacccgtgtcggatataatcaagccgtcgtttgaccccgcctcgaaaccttttgccgtcttgcggcggccttctgctccgccgctcgttctcatatcttgcggcggcctggggaaaaagaggagagatcggagatgaaggcgtgtgcgaaggctgcgggggagaggctgtcgctggtctgtgctccgtcaactaggcagcctctagctcggaggtctccttgtcatctgggtcccaggccattggacgctcttcccctgctgttgctctgggacacctgggcctgctttgttaaggcaagaagattaccctctcaacatgagacgaagtcacaagtatcctgctcggttagggtgtcagaaaacacagctcacagaatagatgccacagcagaaaatattttcccagcagtgaaagatcatgtcttgaaagcaactgatgcaatcaacagaggagaagtgattgcggtgcctactgataccatatacgggtttgcatgtgatgcatgctctgcaggagcagttaatcgtatttatgagatcaaaggacgcatacaaacaaggcctctggcaatttgtgttggtgatgtctcagacatatcacggtttgctttagtggaccacttgccacatggcttgcttgatagtctacttcctgggcctgtcactattgttctaaaacgaggtgaaaacagcatattagagagatcacttaatcctggcttggatagcattggagttcgtgtgccggatctggatttcatacgatccattgctcgtggtactggaagtgcacttgcactcaccagcgccaacttaagcggacagcctagtagtgtctgtgtcaaagatttcgagggtttatggccacattgttcatatgtctttgatggtggagtacttccttctgggcgtgctggttcaacaatcgttgatctaataacaccaggagtttacaagatattgagggatggaagctcaaggaaggaaacagcagcagtgctcggcaagttcggctttgttgaagcgttgtaactactcggcactttaagaaagtaagcacgatcaaagagtggctgtcttatccacattatatcttgtttaattagtgatacattagagcttttgttgctgtttgtgcttttcttttacatcttcaaacttattgtattattgcgaatgtgatgttgagtagaataacagagttcacattatttaagctgtgtagagtgtgtgacatgggcttgttttgtagcaaatgaagcagctcagttgtggattttggatgtgttgtgaacgaaaatatgatattttcttatgcctgttcttcgcccatggttctgcttgttagcttctacgtgacatcaagtcgttggttacagggcgtactaaa

SEQ ID NO: 41145 - DNA, 2440 bp, Zea Mays
tgggccgcgccttcctgccggtcgctagccgcccttcgccaaagaaaactcgattgagcttcaccttccaggcatcaagctcggtgagcatgaagatgtgaccgaggaagctgtgttgactacattgaaaagggcaatcagccgtttctctactctccaggcacatgatggacactggcctggggattatggtggtcctatgttccttatgccaggcttgatcataacattgtatgtgactggagcactaaacactgtcttgtcattggaacaccagaaggagatccgccggtatctttataatcaccagaatgaagatggcggctggggcttgcacattgagggtccaagcaccatgttcggctcagcactgacctatgttattttgagattgcttggagagggaccagatagtggagatggagccatggagaaaggtcgaaactggatattagaccatggtggagcaacatatataacatcgtgggggaagttttggctttcggtactaggtgtatttgaatggtctggtaacaacccggtgccaccagaagtatggctactgccatatctcctcccatttcacccagggaggatgtggtgtcattgtcgaatggtgtatttgccaatgtgctacatttatgggaagaggtttgttggccgaatcacaccacttctgttggaattaaggaaggaacttttcaaagacccttacagcaagattgattgggacaaggcccgcaacctatgtgccaaggaagatctgtactacccacacccattcgttcaagatgtgttgtgggccactctccataaattcgttgaaccagttatgatgcattggcctggcagcaaattgagggagaaagctctggaaacagtcatgcaacatgttcattatgaagatgagaacactcgttatatttgcattggtcctgtaaacaaggtattgaatatgcttgcttgctggattgaagatccaaactcggaggccttcaaacttcatatcccacgagtctatgattacttgtggcttgctgaagatggcatgaagatgcagggttataatggcagccaactttgggatacagctttcacagttcaagccattgtggctaccaaccttattgaagagtttggtcctacccttaaactagcacacaactatatcaagaattcacaggttcttgatgactgccctggtgatctgaatgactggtaccgccacacatctaaaggtgcatggccattctcaactgctgatcatggttggcctatatctgattgcactgctgaaggactaaaggcttcattattgttatcaaggatctctcccaaaattgttggtgaaccgatggaagctaatagattttatgatgctgtcagttgtctgatgtcttatatgaatgataatggcggtttcgcgacatatgaactcacaagatcttatccctggttggagctgatcaatcccgctgagacctttggggatattgtgattgattacccgtatgttgaatgtacatcagcagcaattcaggccctgacatcattcaaaaaactataccctgggcaccgcaggaaagaggtggataactgtatcagcaaagcttccaatttcatcgagagtattcagaaaagcgatggttcatggtatggctcttgggccgtctgtttcacatacggcacttggtttggtgtgaagggactaattgctgctggtagaacatttgagaacagtcctgcaattagaaaggcatgcgactttctgttgtcaaaagaacttccttccggtggttggggagaaagctatttgtcatctcaagaccaggtttacaccaatctcaaaggcaaccggcctcatgcggtgaacactagttgggccatgctggcgctgattgatgcgggccaggccgagagagatccaacgcctctacaccgagcagcaaaggttttgatcaacttacaatcagaggacggagaatttcctcagcaagagatcataggagtgttcaacaagaactgcatgataagctactcccagtacaggaacatcttcccgatttgggctctgggtgagtaccggtgtcgagtcttgggggctggcaagccttggcggtgaacgggaggtgtgtgtgtgtgtgtgtcatggatcagcttttgtgagtagccatgtggaagttggaataatgtagctacgttacgttcagggggttgcgttactagtggtcctagtaataatagtgatggtgatagtaatgtactcctcattattacaatctcaaagcggttcatgccattgccatgcacatctcagatccgagtcacgcacttgagagagttcaaggattgcaagtatagttgggagaatcaaatccaatcggcttattgtctgctcatctcaggtgtcaggtcttttcagccacacacacatacacat

SEQ ID NO: 41146 - DNA, 2947 bp, Zea Mays
gcttgttccctggaacacggggcccagatgggccagatgtcagtgtgctggtccttctaaagagctgcatcggctctcttcatcctcttggagcgtaggtagaggcgtagagcgccgcacactcatttgccacttcggttcggcgacggtggaggctgccaacatcctcggcgtcctccttccggaggccacgccagaaaaagaaaaagaaacggaagcaacggcataattgttttttcagaaaaaaagttccggaggagaattcagggtcccttcttcttttagagtagtattttgttttctaccagagctgttcgatgacgagaggaacggaagttgttgtgagagcgctgctcgttgcggcggcggtagctgggctgttgctgtcggcggcggcggaggacggcgttgttatccagcggaggtcgcttcaccagccgtttttccccgtcgatcccacgccgccgccggggttcgacgactcgatcgtgccgccgccgccgccgccggcggcggcggctggggccgcggcggcgtcggccgcgtcgaagggcggcgggcggtccgtcaccaacgccgtcgcgatcgcgctcgccacgggcctcgtcgtgctcgcggtggcgttctactcgtgcttcctcctgtggcgccgacgctccgacggaggaggcgggggcgtgggcggcgacggcctccgcgccgtcaagtcgtcgcggccaggcgccgtcgccgtgagggtcgccagcgacgtggggagcagcgcgcggcaccagcggtcgccgccgccgagctcgacggcgtccgacgcgatatacctcgacccgctcacgacgatggtggaggtgagccggcaccggccgcagagcccggacctccgcccgctcgcgctcgtcaagcagccgagccccgacctccgcccgctgccgccgctgaagcggccggcgccacagccgccccctccgccggcgtccacgccgccgatgaccaccaccacgggggactcctccgacgaggaggaccaggccacgtactacaccgcgcccaagaccgccaagtcctcgttcagccgcagcacgagccagcgcagcaccgtggagccgacagtggctcaaccacccgcgcctgctcccgcgtccacgcccacgccgctgccgccgcaagctaacgccccccgacctggtcgtccgccgccgcccccgccgccgccgaggcaaaggctgctgcggccgatgcccgaggagtccccacccccggccgtcctcgccagtttggcgctaaccaatccccctgaaccctctggtcaggacaggggaggtgagaacccggatggccacggcgggagagcgcggccgccgaagccaccgagcctgaaaccgctgcactgggacaagctccgcgccatctccggccgcaccaccgtctgggaccagcgtcgacgaggcggcaattgagagcttgttcctgaacaactccggcggcgtgggtaattcggatcaggcggcgaggaggggaggcgccgggaagcaggagagccggctgctcgacccgaagcggctgcagaatgtcgcgatcatgctcaaggtgctgaatgtgacatcgagtgacgtgattggagcactcatgcacggaaatggagatctggggtctgagttctacgaaacactagctaagatggcaccaaccaaagaagaagaactgaaattaaaaggttataatggcgatatatcaaaacttgatccagcagaacgctttctgaaagatgtacttgatgttccttttgccttcaaaagagtagacgcaatgttgtacagagcaaactttggcgctgaagtgaattatttaaagaaatcttttggaacgctagaggcagcttgtacagatttaaggagcagcaagctattcctgaagttgctagacgcagtgctcaagactgggaaccgcatgaacgacggaactaaccgaggcgaggcgagggccttcaaactcgacacccttctaaagcttgcagacatcaagtcgacggatggaaaaacgacagtgctccatttcgtggttcaagagatcatccgatccgaaggcttgggttccgatcaagcagcagcagcagcagcgaatcctggaagcaccagcaaggaacagttcaagaaggacggccttcaagtgcttgcagggctcagcagcgagctctccaacgtgaagagcgcggccgccttggagatggacacgctggtcggcagcgtctcgaggctcgaaaccgacctcgagaaggtgacgctcgtctcccggctcaggcagacgtgtcccggtgacgatcaggtctcaagcgagaagttcttcgaggcgaacgacgcgttcctcggacgtgctcacgcggagatcgaggcagtgaaggcggccggggagcgcgcgctgcagcgcgtcaaggagaccacggagtacttccacggggacgccgtcaaggaggagcctcacccgctgaggatcttcatggtggtgcgcgacttcctcgcgacgctggaccgcgtgtgccgggccgtcggcaggacgccggagagggtgatgatggggtccggcaagtcgttccgcgtctcggcgggcacaacctccctgccgcagcgccggaacgaccagcggagggagctgagctcctctgacgaggacagctcctcgtcatagggtaacactactaggaaaccttttttttttctttctttttctttctctggcgcgtagagtagttcgggatcgaggcctgtgattcttgcagatttgttgagcatgtgtagccaacgtcagaactcaataggtgaaagttactgtgtagtttctacaaagtacaaaggttaaaagatatgtatagctgtacaaagacgggggcttcttattatggtatgttttctctgttacatttgtaattgtgattagtttaaagtttgtagatggcgca

SEQ ID NO: 41147 - DNA, 1021 bp, Zea Mays
cattgacctagtacacgtacacgcagatccatcgctcctactccccttccctatcgtatcgcgtcgtcctcgtcgccgccctacgccccaactaccttggtggctagggttcccaaccaacgcgcctccatcctgcacctacctagatcacctcctccacttgaagcattcgtgccggcgtgtggaaggacgccacgaaggcgactcgggggatagcggcctatgcggctcggtacagtcttcccatccccaacaaccagcttagaggttcggttcgagcagagatcgccgaagcgaagacctagagtcgaagcggcccaaatcgccgcttggcagattcatcttggtggaggatggactcaggattcgtcagggccagaggaggatgccagcaccagatccagcaagacctaactcagaggaagcagcgatcaagcgtagccgtcagatagacaatgacaaggacgagtccatgtcttcgcctactcccccgctggacgtaggtgctggcgcgctgtgggtggaggtgctacaggagtgcctgaggtccgctgtcgacctgagcttcgcccaggtcgtcgctaccactgataatcggcctccagcccactgctttagctttagtctttacttttggcgatgagttgacgactaggcaactgccaccgcccaaggtcaggtgctcgagtatccgttgaccccttcgctagtccattccccgttgacagcaagcattagaacaatgcacccccagtacctagtccactcttgagcagtatacgacagatacgtccagtacccccagtatggacctcggtggttttctccacattaggaaagctggaagagccttttgaactcagtttttttgctaacagtggtgttatggtgaaacagagttttgtgtgtatgtaccaacaactaaaatgtaaacacgacattatcatagttgagtacaggaataattaccttagatcacttcttgttgtatcttacaccaatttacgaaatttcttgatgc

SEQ ID NO: 41148 - DNA, 961 bp, Zea Mays
ataccatgtctaatatttaccatcgtatcgtctccatggtgctgcaccaattcaacgctcctccttattataggtcagcttagtagttggtggtgactcgatcggcgagatgggcatggtcgcttccatgtgcacggagcccatcaagcggcaccgggtggagagagacctcgacggcaaggtggcggacgcgctccgggagcggacgaggtcccggcagaggaccttcaggtcggtgaacagcatcaccatgcgcctgcccaggttcaaggaagggctcagggacgtcaagaacatcttcgaccagtacgacgaggattcagatggcacgatcgacagcgaagagctgcagagcttcggaagcagagtccgggtgcacatgtccgaggaggagatgagcaacctgcaccggtactgcgacatcgacagcaggaagggcgtccagttccaggagttcgtcgtgctcctctgcctcgcgtacctgctcttcgggccagacgtcacacgacgcgtacgtttcggagttcgagtccggcaagctcaattacgtcttcgacgagctcatcgacgcgtacatcttcttcgacaaggacggggacggcatgctgcggaggagagacgtcacccacaggatgaacgaggcgtcgcaccaggagaggacacccagccacataacagcacagctattcaaggagatggatctgaacaggaacgggaaggtgaacctcaaggagttcctctactccatgatcagatgggctggtctcgggaccgaagacgatggcagcgatgaggcctcaccatgatgtaacttttttttttcttttcttttggtctgcattttaacagttgaataagtaaaatgtatgttgacaattgaaagtaaaaataaaaaatatcatgaagaaaatcgaaggtccaaatctgattcgataaacctcgttattatgtaataatcgat

SEQ ID NO: 41149 - DNA, 2122 bp, Zea Mays
cacagggacgtccctcccggcctccccccacccgccaccgcccaaatggagcagtgatccatccatcctatcccccgtgccaaaccctagccagctatggagcatcccgccgccgcctcctcgcctcatccgacgccatagcacctcttcctgttcgcacccccttctccctccatctccccggccaagcgctcaacctggtcgcagcttctccacgctcgctcggggctactttgtccccgtcttcctgtctgcaacccgtgtgcacaaccgcggcctacttggtcatgggcttctccttcccattctggcgcgccctcgcggatggctgacaaagcaaccggcgctggaggctgaccgtcccgtccaccgccggtgcgtccaattttccttgtcgctctctcgctccctcaggacgatgctcctctcgaagctcccaccccaagcgcagcggctccatggcggcggcggcgaatgctgtcacattccgcgtcatgtacatcatcgactgtgtcgtgctaggcgtcacactctcctgcttctttgtatactacggttttcacctctgagcatggtctgcgagcacttggtgtggcttaccaggaagtgccagatggtacaaaagagagtcacgaaggaccatgatagttcattagcctcctgccactttgtgcccccacgccatgatagtgcagggccacttaatcttgatgtcaatgacaagatgattacaggtttgccatatttattcctatgtaccttgagtgatcaacttggtattgggaaggaaacaacacgtcgtttgggaatgagtactaaatgtacccttcctcttccttactctgaacagaataaggatgagtcacttgcttccttgccaattgatgaattgaccgagaaggctgatggcttatctggagtctttctaggtatgagatcgtgaaatgcttgcaagaaagaaaacatatatgtggcatgacttgggtggtgtaaatgatgcccaaaatttgaagaaggctgatattgagttgtgttgacgagtcgagcaattttccaaaagatgaagaattacaaaatctatgttgtatcaattaccatctgtattgtggtatgtatggacttctgcttactttttagaaaataacgctcgcttgactgaatagataaataatacccacttcatttttatatatttgtcgcgttttagttcaaaaatgaactggtcggacgataagtattcgagaacggagataatatatcttacccatacatactttgttgtaacagcttggttttatgcttcttgcactgatatggaagtctgacttcccaccatttatggtccagatcattgccatcctcaatgaaggtaagcctcctttttattagttatagttcatgacgagggtaaaatatctagttgatccttaatttgttcagttcataatgcaagccgcatattaggtaacctaagagcaactccaagagaagtcgtataccaaccccagtagagtttttcgcgtcaaaacttcacttttctcgcctccaatggtctgctaatcatttccccatttttcagcttcctgtaaagacgatgatgcatcccacatatatgcgtgagccaaactctccccaattcttcccgagcgcgtgcaatccagtagcttccgacgtcttttttccagccgcgcacgcagttttgttcgaggaaaggagggcaagagcgggagagacaccatcgtcgttggaggagccagccgaggcgttggagtgtgagatgatacattcgggatatgaaccagtcgggcacgacgatctgaacctatcgagccaagcacgtcgggataacaatgtcggcttgcagtgtccttcggcgaggaccattcatcctttgacctcccggcaaatgtcgtaactgaagtgtctgtgcaagcatgatgaattttatttgggtgtgttttggttggagtgtgagatgatacattcgggatatgaaccagtcaggtgcgacgatctgaacctatcgagccaagcacgtcgggataacaacgttggcttgcagcgtccttcggtaaggaccattcatcctttcacctcccgacaaatggtacagatcttgcac

SEQ ID NO: 41150 - DNA, 1734 bp, Zea Mays
tgcgggcagctagccgtccgtcccgatttccagtccctcccttctgctgactctttgtgcatcacggacgacttgtacataccgcgcacgccccggccggatcagagagatgggcaccgtcggcggcggcgagcttcccgtcgccgccccggccgccgccgacgcagaccgggcgcggctgcagcagctggggtacaagcaggagctcaagcgcggcctctccgttgtttccaacttcgccttctccttcgccatcatctccgtgctgacgggcgtgacgacgacctacaacaccgggctgcgctacggcgggccggcgtccatgacgctgggctggctcgtcgtggcgaccttcaacggctgcgtggcgctgtccatggcggagatctgctccgcctacccgacctccggcggcctctactactggagcgccaagctcgccggcaacgaatgggctccacttgcctcctgggtcaccggatggttcaacatcgtggggcagtgggcgtgcaccacgagcgtggacttctcgctggcgcagctgatccaggtgatcatcctgctgagcaccggtggggccaacggcggcggctacctcgcctccaatggctctcctggttcggacagctcggagccttgtggaacgtcgcgggcgtgttcgtcctcgtcatcctggtcccgtcggttgccaaggagagggcgagcgccgagttcgtcttcacccacctcaacaccgacaacggcatgggcatccacagcaaggcctacatcctcgccgtcgggctgctcatgagccagtactccagcattggctacgacacgtcggctcacatgacggaggagacgaagaaggcggactggagcgggccgatggggatcgtgtactcggtcgctctttccagcgtgttcgggtgggtttacctgctggctctcacgtcggtggtcactgacatcccgtacctgctggacaccggcaacgacgccggcgggtacgccattgctcaggccctgtacgacacattccgccggagatacggcaccggcgccggcggcatcgcctgcttagtcatcatcgccgtcgccgtcttcctctgcggcaccgcctgcgtcaccagcaactccaggatgggctacgccttctccagggacggggcgatgccgttctcgcacctttggtaccgggtgaacaagcaggaggtgcccttcaacgtcgtctggctctctgtgtccgtggcgttcgtcatggcactcacgtcgctggggagccaggtggcgttccaggccatggtgtccatcgcgacgctgggtctctacatcgcctacgcgctgcccatcttcttccgcgtgacgacggcgaggaagtcgttcgtcccagggccatttcacctcgggagatgcggcatcgctgtcggctcggtggccgtgctatgggtggccctcgtcaccgtgctcttctgcctgccggtggcgtaccccgtcgccaaggacaccttcaactacacgccggtggccgtcggcggcgtgctggtgctcagcctcgtcgcgtgggtgctccacgcccggttctggtttcgtgggcctatcacaaacgtctgacgttgtttgcaggcttcggtagttactttcgatgcattttatgtagtgtcaatctgttttaatgtcattgaacataaacatgaatatgaatatactcctatacacaggtattgtggttggaactggaaaagcttagtt

SEQ ID NO: 41151 - DNA, 2697 bp, Zea Mays
ccgcccccgtcttccaccattgcccctcgcctcgacttcccccaatttctttccacgcctcttcctctctttgccctcgagccccctgcccctgcgcggccttcaaatcatcccgctgtttccccgccctctccttggcgcgcagctccggagcgccgggcgccggcttgtcccggtgcgccggctgcgtgaaggttggattgggtctgtcggcgacagaattggatctggcgagcttcccgaagcccggagcggcgtgtctgtcgggactgatagccgccggcgccgcggcgatttcctatccgggcggcgatggcgaaccacgagctagtccttggacacgggcaggatgcggagctggcgctggggccgaaccaccacgacttcggccaagaccacgggctgggtctcggacacagccacgacctcggcctcggcggccacgcacacgaccacgagctcgtgctgggccagtcgcacgagcacgaccaccagctcgtcctcgggcaccaccacgatgacgatcaccagctggttctcgggcacgacgaccaccaccaccaccatgttcaccacgccggtgagctagttctgaggcagggccacgatggggactctgagactctggaagtgcagggccaccaccatgacgagcttgacttgtcggagagccacgagctgacgcttgccgagacacaccacctgggcgttgatcagaatttcgatcagctctcgctggagcaggctcatgagctcgcgctgcagccgcatgatctctcccaggctcctcttgcagtcgctcctgttgtccagtcacggaccatggttgtgagccctgagtttcagctcgcagtgggacagcagtttcccgatgttgtcagctgccgcagggccatccgcaacactgccatcgcctgccactttgagatacagacggtgaagtctgacaagtcccgcttcaccgctaagtgtgctgccgagagctgcccgtggcgcatacatgcagcaaagctccccggtgtgcccaccttctccattagaaccatacatgacaaccacagctgtgtcgggatcaaccatcttggccatcagcaggcatctgttcagtgggttgcgaacactgtcgaagagaggctacgtgagaacccagaatacaagcctaaggaaattttggaagaaatccacaaggcccatggcatcaccctatcctacaagcaagcttggagaggtaaggagcggatcatggctgcggttcgagggtcttttgaggaaggataccgtctcctgcctgagtactgtaggcaggtggaaagaacaaatccaggaagtatagctcgagtgtatggaaacccagatgacaattgctttcggcgactcttcatatcattcagtgcatcaatatttggctttgtcaatgcatgccgtccacttattgggcttgataggacccttctgaaaaacaagtatcttggcaccttgtttcttgccactggttttgatggggatggtgctctctttcctctggcatttggcgtggttgatgaggaaactgacgagaactgggtatggttcttgtctgagctgcatgagttgctggagaagaacacagagaacatgccaaggctgaccatcttgtccgatagacggaagggcattactgatggagttgaattcaacttcccaactgcattccacgggtactgcatgcgccatgttagtgaagccttcaaaaaggagttcaacaatcctgtgcttgccaaccttctctgggaagctgctcatgcgctgactgtgattgagtttgaaactaagctgctagagatagaggacgcttcaccagaagctgttgtttggataaggcacctaccttcacgtctttgggccacggcttactttgaggggacaaggtacggtcatctaacagcaaacatcgcggagtcgctgaattcctggatactggatgcctctggccttcctatagttcagatgatggaatgcatccgtcgccagctgatgacttggttcaacgagcgacgcgaagcaagcatgcagtggaacacaatcctcgtgcctgcagccgagcgtcgtgttcaggaggccattgagcgtgcacggggttaccaggtggcccgggccaacgaggcggaattcgaggtcatctcagctcacgagggaacaaacgttgtggacatccgcaacaggtgctgtctgtgccgggggtggcagctctatggcgtgccgtctgcttcaccgtggcaacataccgcaagacttattcgcagaccatacacccaatccctgacaggaccctctgggatgaaacagcagatcaaggccaggtcaaggtggagatgatcatcaatccaccgaagtcactgaggcccgcagcacagccaaggaagaagagggttagagcggaggaccgtgggcgagtcaagcgggttgttcattgcagccgctgcaaccagactggacacttcagaaccacatgtgctgctccaatatgaacaacggccaaccgaactgggcacttcagtccagaacttgttggttattaattagagctgcagcattcctgtgacaagttagcgtctacttgtgcaagcttcttgcttgcagatgggtcttttccttccgttttcggaaattcagtgttaaatggaaatggttaccggaaatacggaaacgaaatcagta

SEQ ID NO: 41152 - DNA, 4054 bp, Zea Mays
ctcccagcctggcatcttccctctccacgccacacgcacggctccatccttctgtccacgctcgcgccgccagggcgctcgagctcgccgtcgtcatctcgtcgggccgccgcctcgcagcttcgcccgcggctctggtccgcgccccgccaaggcccagccccaagctgccagcggcctccggcgttgctcgccgctcactgcgcgccgtctcgcgctctcgcgccctcgcccagtcctgctctcccttcgtcgctccgcggctccgccggcgtctgggcatccggccttcgggctttggtggcgccccccaccggccaccggcccaccccagcgggcagcggccactgcaactctgcggctctgccaggaacaaggaggaacagtggcgattctgccagggacagggaggagcagtggcagacaacgtccttccttttgtttggcccggggcttcggaattatctggagccgctactgcccccagcgttcggactcccgggtcgcaggcagccacgtctcgtcctggctctgggctcgccgcgctatcgtctcggccattcgctccgacgtccgtattcaatagatttgccctactcgtgaccacgagaatccggcgaggagggagaccgctcgtgcggagtctataatggctgacgggcagcatattcaggcagcatcagaggaagtggattcaatccacttcagcttctatagtgatgatgaaattaagaggatcagcattaaaaagatcaccaagtcggagcgccttgatgccaaaaaccttcctgtgccaggtggattactggaccctgcaatgggacctatcaatgatattgatatctgcaagagttgtggtcagcattctgttcgttgccctggtcacttcggtcatattgagttggcaaaaccattgttcaatcctttgctgtttatgagtctgaaaaaccttctccatgtcacgtgtttccattgtcacaagttccgcctgaacaaggaacaggttgacagatatgtgaatgaacttgaacttttagtaaagggtgatattgtctgtgctaaaaatttggaagactcagtagaagaagcatatctttccaaggaagatgaaaacatgaacaagaccacttcaggtgataactcatcttctgtgaaagacaagaaaacctggacatctatccaattgaaagaggttttgtctattttttccaagataatgaaaaagagacagaagaagtgtgcaaaatgtgacatgaagagcccaacaatctcaagtcctatatttggttggctggtcaaggacacaaaggcttctgctgtaagaacaaatgcaattgctgattttaaactcaagggagatggtgatattcacaactcaggggaaacaggggtttctggtcttgaggaagagtcatcttcacctggaatggtgtctaaagactcaatcaatgaagttagaggtctttctgatgatacaattaaagaattggtagcatcatcaggaaaaaaacatctattgcctacagaggttgaatctattctcaaggacttgtggaaaaatgaagctaggttctgcatgttactttgtgatttccagaagaatatgtcaagtgaaccagaaaagagaaggggctatgaaatgttcttcttgagtagtctccttgtggcaccaaatagattccgcccatcaactagctctagtcttggaattatggaacatcctcaaagtgttctgctaagtaaagtgcaagaatccaatcttgcgctacaacataacaatgcatcttctaaccatatggatgttcttcaaagatggatggatctacaacggagtgtaaatgtgctatatgatagtagcaaaggccttgcaagaagcgagaagaatgctcatggtatacgccagctattggaaaagaaagaaggaattcttcgacaaaagatgatggggaagagggttaattatgcatgccgatctgttatatctccagatccgtacttggctgttaatgaaattggcattcctcctgtttttgcgacacgattgacatatcctgagaaagtaacaccctggaataccaaaaggctccaagaagctataaggaatggtgccgatatacatccaggtgcaacacattacagggacaacaatagcatgtataagttacaggcagtccctgccaaacgccgttccattgctaagatgctacctgcatctagaggatcaatttgtcagccagggagagatcctaattgtgagtttgaaagcaaggttgtatatcggcatcttcaagatggtgacattgtacttgtcaataggcagcctactcttcacaagcccagcatgatggctcattttgttcgggtgttacctggagaaaagacgttacgaatgcactacgccaattgcagcacctacaatgctgattttgacggagatgagatgaatgttcatgttccgcaagatgaaatatctcgtgctgaggccatgaatattgttgacgcaaacaagcaatacattggtcctaggagtggggatgctgtcagaggtctcatacaggaccacattgttggtgctgtactattgacaaaaccagacacattgctaagccgtgaagaatatagtcagcttgtctttgggtcttgtgtgccgtcctcaaattgtggctctcatcaccctgctaaggtgtctgctattgaggattacgatacacttgaacttgtccatcctgctatttggaagccaaggcccttatggacaggaaaacaggttataacaaccatcttgaatcatttaacaaaaggttgtcctccatttactgtggagcagaagggaaaaataccaaaagaatatctgaaagaagatccttccgctcaaaaggaaaaagaagatccttccgctcgaaaagaagctcattctgctaaaaaaggaaaacgagaagatccttccgctcaaaaagaaaaagattcttcagttaataaagaaaaacaagagaagatacaaaaacaaaaacaaaaagatcgttctgaactggtcttatatattcacaataatgagctcataaagggcataatagacaaggcccagtttgggaagtatgggatagttcatacagttcatgaactctatggtgcatatacagctgggatactgctctcgacattcagccgcttatttacactgttcttgcaggataaactgagaagtaaaattcttagtggaagcgaagtgcgtagtaatgaagtccactggaaatttactggagctgacgaagatcataaaggtgatctggtaaaattgcatatggaggttgagaaggctgtaagaagtaacggtgaatcggacacggctaccttggacaatgatatgaaaaatgctctaaatgggataacaaccgacgtcaataaaatattatttcctgatggtctacaaaagccctttcctggaaattgtctctctcttatgactacaactggagctaaaggtggtccggttaacatgaatcaaatatcatcattactaggccagcaagagctagaaggaaagcgtgttccacggatggtttctgggaagactttaccgtgctttccgccatgggatatttcttcaagagctggtggctttatcagtgatcgatttttaactggtctgcgtcctcaagagtattactttcactgtatggcaggcagagaggggtaactgttacaggcatttcaagttttgcattacatgggtatccaatatccatgcatcttcacaccctaaactatatgtatatggattggttggctacatctttctgaagaataaatgattgtcatatattcttaaattggttggttgacacagcagtcaaaacatcccgtagtggataccttcagcgttgtcttatcaaatgtctggaatcgttgaaagtctcctatgatcacacggttcgggatgctgatggatcaattgtacagttctgctatggagaagatggagttgatgtgctgaaaactagctttctgaacgagttcaaagaacttgctgatgcttcctaatggtgtgttatat

SEQ ID NO: 41153 - DNA, 4351 bp, Zea Mays
cacgtttcctcggctcctcgcccgcctctctcgtttattagcgctcgtaaaccccactcacttcttccttctcttcggccccttcctcggccgaaacctcagttgctcctccgcccgctcgaaaaccccaagtccccaatcacacatcgggccaccgccgcggcatccatggccgccgaagacaaagggaccggagaccgcgagaatgcagaccccaacctctgctccatcgccgacgcgtcgctgtctcacgagaacaccgaagacaaatcggatttggataccaagagcgcgccatctattcagttgcttcagccaaaaccgggggaaaacaaggagcctggttcacatgatatccactttaattctgcaaacacgacaggaaacagtgaagaagggaacaatactggaaagaaaagagatgttttcaggccttctgtgtttgatagaatatctggccaccgtgaccaatggtgcaatgaagacaccagactgaattcagattcccatcgaaatcaatggagggaaatggaaaaagaacatagtgatatgaacaaagtggaacagcactgtgatgaccccaagcaatatcttggtagccagcggagtcgaaaagagcgctgggttagtaacgaaagaaactatgaccaacaccatgagaataattggaattctcgctggggtgcaagtagtaaagattctcaaaattggcgtgaaaagtcaacagattcagatataaaagatgattactcctgtgaaaaagttttttcttacagtacatgccatgggaaagaaaaggatggtaccaatcatgagaaggttaatgaaagggacagtaatatttctcgatcgtggaactccagctattttgcaaaccgtggtgcaggcggtacatctgatcatctttttacggatccacagaagttatctgcttcatttggatacagtagctataggcaggaaagtgatagcccaaactctacaagttctcgcagaaggtttacatctgttacaagcagagtcaatagtcggtcttcacgaccattccatcttggtgtactttctgagaggcctgttggtccatctagtaactctgtgagatatagcaggataaagttgtttgaaatatatagaacaactgatgttagaaacttcacaatgccgataaatgatattggtaacaatgagatatcttcgttgtggcaagaagatcctatggatcctttagctctcattgcacctaatgctgaagaagcggtgattttgaaaggaattgaaaaaggagatatcacaaacagtttggcacaagcttgcaaagatggttctgatgacaaaaatattccaggcgtggcagcattagaacaaatgaaattaagtggaagagaagatcaaacaggaaacaatgaagaattcaatggtaaaatgaccattgatatcagaggaattcttggggctgctgatttgagggaacacttgaagtctgataaatctcctccaaaagaatctgagtctggtggtggtggtatccatgggccatgtgctgaatttggacatcagcgcaatgccttggaccaaggaactaaagttggtgatggtgaaaatgttaacccagaaaacctctctctgtactacaaggatccaaaagggtgcatccaaggtccttttcctggatatgacatcattggttggtttgaagctggatattttggtattgatttgctagttcgtgttgccagtgctccctgtgattctcctttcttattacttggggatgtcatgccacacttacgggcaaaggtaagggtgcctccaggcttcagcaataccaaaccaagaagtatgacagatgcctcacatctaggatcagtgtatcttggaacatctgattatggatccataaacaagaatggctgtgtaactgaagcagaaaattactttttggaggctccagtgtctagtaaaatccagaatcctagagcagcaactaatgttgttactggaggtatgaatgaatggaggtttgtttccggtgagaaagtgaatagtataaaccatcttgaagtacagaaggtgcagttagagacagaaaatacctttcaaatagaaggtgatgtcatatcagttggagagtcacaaaagaaagaatcagtacagtcaacttcacactcaacattcttcccgcaaatggttgacccatcgagtgaagccctccaacctcagaatattaacctgctctcaatgctgcttcctgcagaaaaaggacaagcaccgactgctacttctggattgtcacttcggtcaaataatgctgactctggaaatctgcatgctgaatcaaccaactttagcttgtttgaactctcaaatcacacagccagaaaagtttctcggtggaatatatcatgatcctcagttaaacatcaaccaacaacagtatctgctatcagagctacacttgcaacccctgattcctggagtccctgaacctcaatcctctctattgaacaacatgctacagctcaggcagcaggagcaacagcaacaatacatttctcagtccatacctcatgatcgttccatgcagcagctttatgattcttcccatgggacaatacatacttcattgtcatctggtgaccgtatgaagctttgtcttcaaagaacagaagagattcttgatcttgctctgaagttacctggtcatggtaagcataatctacaactacatgcaagtgtgaaattgagagacacaggaaatattggtttgtcggaaagttgcgctactgccctaccactgccccatgaaatgatgggtcatgcagcttggaaagaatgttctgctagtctcacacagggctctgcagttgttgatgctctttcacaaaaagaaagtattgtagactcaccatctaagaaaactccaagttatggttctaacgattatagcaagatgactgtttttgaagttacaggttttcctcaaccatttcaaggtcttcagaaaccgaaaagtgtagcatctcatatctcaaatgaagttcatgaaatggatatttcctctgtccatcctcattcatggaaacctactccaggtgttagggctaaatcagtgttggaaattcaagcagaggaacgattggaaactcagagggaaatagccctggaaaatacaaaggtaactacaacaacagcttccgggctatctattcattgggttgatttggttgaaacttctgggcaacagtttggagatcaggctagacctatgtgtgataaaaaaaatgacaatatatcacagagtaacagaagtcatttacatgatttatcggcaagagaggaactgataaagtcaaatgctaaagctggtgttatcataaacagtgctgatgatacatcttttcctcctctggcaccttctattactcagtctgatgctcatattcatgatggtgctgatttcattgagttcaagggcacaagaaagataagtaacagggggaagaaacccaaaggttctgcagttaaaaccccagcatcacatgcaaatgttatacctggaccagctactgatcctgcacaggtacgcgaaccatgttctctgagaaatattcaggtggaagaagaacaggaatcagctaatcttcagcaactagtaccagcatcatcccatgcaaaagggcctatggaccagcatattcatgggaacaattcatcctggcaaggttctgaatcacctccatcgaggggtaacgaattcctcaaaatgacttctcatgtttccagtcactccactcctaattcagaagagtatctgttttgggagcctcgtgagcatgcaaagcaagataagccgagactccaatcacctccgagttccgtggtcaatacaaggtctactgcattggacattcataagaaggggaagaaaggtacaaagctgagcacgtcagctttggggttcaaggttcagagcacccgtatcatgatgggtgagatcgcgcatgttgacgagtagatgtccagactggcgagcttcctgaagaatgaagatgatgacagtttggcggctgaagtgacgagaattcaaattgagcaactggcaaaggttttggttttcagcaggcttggttgtaacttgaaaatcgtataatgtttgttgctgggcggattttgtgcgaagcattgagcctggaaggttcaagattcaggtctaatttgcagtatggaatattcgagtgcttgcttgtgaccgtttcctgaaacagtcatctggtgtatagtttcctggaatctgatgggatcgtttgtcattaaaataatttacgtgcatatcaacattaacatttgccca

SEQ ID NO: 41154 - DNA, 2627 bp, Zea Mays
tgcagcgttgcgtccggtcttcctttcccaactcggtcgacgcgttcgccacggctgcgcagtcctcctcctcgcctccgatcccctcccttcgacgatgcgagcacacccgctcatcctcttcgtacctgcaccgccacctcatcctcttcctcgccgcgccgacacccaccgcgctctctccctcccgcggcgacgcccttcgccaacgagaaccgcacgccgtcgtctcccacgggcactgtcgcacgctgggccacgctgcagtcggtggcgccgccacaccttcttcctccatgtgccgtcgccgccctattcttcttcgagatgcagccgctagcgctgccctcctcccagctccccttcatggccgcgtgcagggactatgtgccagtgttagtttttggtaccagtctacaggtctttcatttctacattcaaagagtagtgtactctgtactcttccagaaaactttacatggtaccggaaccgggaccagcggcgacggtgtagtggtgaggaggcagaggagtgccttcggcctcgacggaagaaggccgccgatggagaagaagaccagctgggagcgtggcgcggcgtcgcggtcgtgcacgaggaggaggagcctgcacttgccggagggagaagaagcatgtagcacggtgcggtgctgcagtcgtgcgtgagtaggttcttattattgttttctatcctgctggatatgtagtcatgacagttaaattatgtacaactatgattacaaacgggaatacaagctaggagttgagaccacaatccttatgaaaagttacactgtaagtatgtcgtcctgcttgcatttcttccatgttccttttctcactgtaagcttagtttttgtgatcagcttccagatagaagagttattaaagtagacactaaacgattccaacctcctgaatctctttttactcctgtaacacttccatttatatttatacataatggtattgtcaacagtacacatagtttccatcagtttgttaatagtgcacctttagattgaatgagcttcttgcagagcaccaaggattaggcattgaaatgtgtggataaaaatattagaggaccacacatcattattatgcaacattgtctatgcacatgaacataattgtatcggtagtaagccgccagcatgtttgaaagttaaaaatgtgaattaagaacgaattatcgtatcctgctatacttatgcaacctaccaagaattagggcattgtagaaaccatataaagtattgagatcaatttgaatttgtctgcctcatgattttttgatacctgacctttatgaaggtagaggacaacattaaggatgatcatagactaccaacattcttcttcagattaaatgttaaattcagtaatttaatttgtttcagtaatacaagattagaccatccctgcacatctgcctatctgcctggcaaaatattatcgtcgcttccaagattgagaatatggctgcgtttggaaagccttagattctagcattgggtaacatgtctattatcccacattatctaagtttaactagatactcatattttatgaaaaaaactgcactgaaaaatcacgaggtgctagatgttgcgctagcagcagcatcatagcacatcttgtctattccagttacaaatgtgcatattgtagaatatttttgtaacatactgctgctcccttccattcgttttggttttggcaattttctatgcacgtgtcgctcatccatggtacctcttttgtactaagatcattgtgacatttaacatgtttacatcatctcttactcgacacatactcactggactaatgttcttgtccctccttttgctttccttagcagatggcggaggttctaataagtaaccttatgattggaaattgcagtgatcggttgtgtgtacgtgtctcccgtctgtgaaaaatttatgatcccgaggatgagtataagcttttccatgctcatatggtcctcatcgacgaggaggctggcagtgctcatgctcaaatataccctccactcactgacgttttcaaacctctgataaaggagggcaatgtctacaatgtctcctacattcagatcaagaaagctaataggatgtacaagcatgttgacaacgatatcatgatcggtttcacaaaatggatcctatgctgcctcaacaaacccgcggtttgaacacgtgacagatgacggcttagcttctgtggatggacatcttggtcgcttttgtagatggaatgtttggttggcttttgtagacagaattaggctgcacttgtgattgtgtaacgcttatgagcatggttgtgtggactgtgtcggccaaagtatacctcccaatgccttgtatatatcacatgcttagctgtctatccccaactaggtcgcctgataatagacttcgatcatgtcatgctattctataacaattttcgctgtaacttgcctaatcgtcatactatggtacacgcttaaatttggtgctgcaactttattgtggattataaaagagagaaaaatacagcataaagttataatgtcaaattgccacagctcactgttaagacttatttga

SEQ ID NO: 41155 - DNA, 1773 bp, Zea Mays
tcaccgggccgtcccactgccccagcccagacagacgttacggcagccgaacgcggtccgcgaggcccagttccgtactgtttgtatctcaggagtgtatggcccacataactcacggcccatagctcttcgcctctttccccttcccctgcctctactaaagaaacgcccgacggcagcctccgcttcctcctacagcttcacacttccccagcagagcaggcaaaccgctcccagtcccagtctctcacctgaggtgactggcgtctcttgtcgcaagccgccagaagcttcggcccctgacgcgtgggggccccgtccgcccccgcccccgtccccacgttgccggccatggcggggcagccaccgccgtccggggcctccgaggacgacttcctcgagcacttcttcgccttcccctccgcggcctccgccggcgctgccgggggccacgcgggcgccggtgttggcggggaccaccccttccccctcgccctcagcctcgacgccgccgccgaggccaagccgatgttccaggcgcagccgaagccgggcgagggaggcatggcgccgcagccgccagccccgcggcccaaggtgcgcgcgcggcgggggcaggccaccgatccccacagtattgcggagaggctaaggagagagagaattgcagaaaggatgagggcattgcaggaattagtccccaacacaaacaagacagatagggcagccatgctagatgagatccttgattatgtgaagtttcttaggcttcaagtaaaggttctgagtatgagcagactgggcggtgctggcgcggttgcgcagctggttgctgatattccactctcagttaagggcgaggcaggcgacggcgggggggcgccgcagcagcagcagcagcagcacgtgtgggagaagtggtcgacggacggcacggagaagcaggtggcgaagctgatggaggaggacatcggggcggcaatgcagttcctccagtccaaggcgctgtgcatgatgccggtctcgctcgcgatggcgatctacgacacccagcaccccctggacggccacggccactcgctgaagcccgagcccaacgcgtcatcctagtacagtaacgtcgtccttagcgtgccttccaattccaacacccaccccccttctccctaaaaagtactgttaggcgccgatattatccggaagaaaaaaagaagtgtatgatataccgagcgtgcgtttccagtgtgctgacccgtgggataggaaaggaccgaaaattgttggtatatgatgattatgtagcctcctgtttgcctgttctgtttcaaatcaaagcaatgctcatgcatccaggtttcaatgtgcctatgagtgcaagtgatgggcagcagagagtctggcactgctctcatgctgcctgtttccctttgggcggtgtagtgcactggccatagacttgggtgggtggtggtagggccgcccgccggtcgccccttttggtagtgggtgtttggaccaatggaaagaggctgctgatgtatgtgctggtaattctgagcgagcaaacggttgacgaaatctgaaagaatgtggtggtggtggtggtgggtggtgatagcttgtctttttattttattttaaaaaaaatagagtgggagcggaggtctgggtcaatggaggcccgagcgtgcgatgatcggctgggcgctagtggggagcgtgctcctccgggtcttggcttttctgcctacaagtcgccgtcttgataagaac

SEQ ID NO: 41156 - DNA, 2066 bp, Zea Mays
tggaataaacactacgttagtgtttgtaagacgactttcgcttgacgaccagtttatgttccgacacttgctccgtctatctatctttaggttcttccgattgacgacatcgtcttgcggagatgtccaatctctgcattatcctggggttgacttgggtcgtcttccgcatcacgtgattaattaacgtacctgaatgatatgcataatgcacatgtatgcacataaggaggaatatcaagactaaaggtctacataacactaagtatcatatctatattattttaacttagatggattcaattctaacagaaacaaacttatcgatattattcgctttcactcatttggtaatgctagatatttatctaggcacttaattgatcgttaacaaagaatatcatgactatgaaaacatagcactgacttcgctgcacaactaaaattcttcacatgaaatgccgatagcacctaccgtcaaagcactaaaattactaagcaaataaattcagcataatcaataaggacaaggcttatcggataatcgtgtgaaatactaaatctatttttctcacattattaacttgaccatttttcacaaacgacgaaccaatttatgcaacttaacttattcgttctctgaaacattcttcgtaaatcctgcattttagaccaaaggtgtaccatattacacatttatttcacacgattacgttaccggaggtgctgaggtattttagcaaacatctaacacaaacacgacgcgcctgctaaacacgagaattattacgactaataagtctagttaatctaattcgattaaccaaaataataaattggcttaccaagaccgaattgattcgataaccgcaagggcgatgacggttttctaatttagacatttggttgagcccctagcagatgttggacaaacttgtctcaccttttcatccaaatccaggatcagtctccggaagataaagtcgacgacgagttctatggagtgaacgacaacgttgttgtacccacggcgcgtttaagcatatcggctagcaatccgaataaacaacgatgatccttgttcaagtctttcgccaagcatttggtgggcatcaatttggagcttgcttctccacattctcttggggattcttttgccagcgcgaacacaagtcggaggcatcacgtaaggactggcatcgaagcgaggcgacggaacaacgacaacggggtgggcagtgttgaaggagctcggcgccatggcaaataggagatcgatcgaggcagaaccgattgccgaactgaaactgcgcagatcgacaacgcgaggcccgatctgcgagcacgacgcaaaggagggcgtcgcagccgctgctccgacatgaagtacttgctgccgagcacgacagaggtcggggagctgctgacggttggcccgacagcgagcaggggtactagggcgtgcgtgcaggaacaaccttgacaggacgcggctgggcgagaccacgacactgggaaacagcgggcaaccaagcaaaaatccgagatgggcgccatggacgcgacagcagggaggacgcagggaccaagttcgctggcgttgctgccgagccgggagggactcacggcggggatgaccggctcaggggtagtggcgagcgcaggggcgagccagggagctccggtcgggcgctgcggagaaggccgagccggggccgcgcggagggagatggagcacgcgcagggaactcgacggcggccgggcagagggagctggggccgggcgcgcaaggagcagggcgcgtgcgcggacgatgagcaggggctggggcaaggaagagcgcggacgggcggggccgagctgcacggccgacgagcgccatggtggggaggagctcggggcacaccatgggaaggcagctggaggaagaggaaggagacggggaggagctcggctggagaggggcgagcaccagggagctcagcgcgcaggaggccgacgcgcgtagcagggagaaggggagggagggagagaagtgagcgtgggagggagaagctagaaggca

SEQ ID NO: 41157 - DNA, 1219 bp, Zea Mays
tccacatccatgtatgcagatcgtgctggtcctgcatctataccagccatgcggcgacggggaggccacagcaccaaccgggggttacttcttcgaggccctttgccgtgccatatagtacaacaacgtcaaaggccctgtgttctagtatagcataaaagcagcaagcacctgactggggggaggaaagggaaacgagagcagttcagcgaaagcacatgcgcgccggcaccgctcgatcggacggaggcaccacaacgacacaacactcaccctggacggcgtgcgcacgccggcccgcccaccaggttcgcaccgcatatcacacagtagctcgctccaagcacgaggagccgggcgaagacaggtcgcgctccaaggagttgcttctttatttcttttagggagacccaacgaattgctactagatgctcagacgttgacgttggcatcgttccatcggcggcttcaatcaggtatgtcaatatagtagaaataccagtatatccttaggtcatatccaagaaactaactcaacggatcgttaagctaaattttaactactcaacagcaaaataactctacagcagactagctatatagctcgttaagctatccaactctacaaattggctccctcacacaccaaacttggctagccgctccgactagtcaaactagatagatagtcagttggagtgaggtgttatacatagagtgtaatatttacagaaagataaatgaagagtccaatagagagacagaaataaagagtcctgttgggggccttcggcttccgaaggtcctaaaaacatgatttaacaatgtttctggagtataatacatgagcaggtactttcggacttgaactcttcggacttgagtcaaaatcacagtatgaagaagcacaagggaaacgaatgatggaacagagccgaagctgtgcgcaagggagcttcggcatgatgataggaaaaagaaaaccgacttaaaagggaaaagactatctagacctcgatgaattactatagaattattagcaaatgcaaagagcctggatgtaattttacatgggctgcgacccgtgcctataaatagatgaacagtgctcccgcactggacacgggcttgacattttgcttttgcgtcacacttgtactctttatcttccttcaagccgaaggtacacttgtaataaattatcatttctattcattca

SEQ ID NO: 41158 - DNA, 1339 bp, Zea Mays
ataatatcgtgacatcgtctgtccgccaccgggtatctctttctccgggtagtgcaccagcggaacggcgaggtgcagtcgtgcagacgggaacggggatgggaagcacaggggcgctgctttggcacccgtcgccgcaggtgcactccggtggcgtcctcttccgccagagccggcgcatcgtacgccagcgcaacttgcctctattatcgctagctgacgcggcgcttgagcccgagcgccgccgcgggcagcgcctccgctgcgctgccggcgacggggacggcgggccccgggaggctcagaaggagtctccgagcggcatcggcgcagcactcgaggatccgtctccaggacctcctgtggaaaacggttccttcagaagcccctcacaggaagaacagagtgctctgtataattttctctatccaagcaaagacttacttccagatgataaggagatgagtatatttgatcatctggaggagcttcgcgagaggattttcatctcagttttggctgttggggctgcgatactaggctgttttgctttttcaaaagatctggttctttttctagaggcaccagtgactgttcagggtgttcggtttttgcagctctcgcctggggaatttttctttacaacattaaagcaatgtacaatgcacttgaacaagccctttcttacttcatggttctagcgatgtgtaatcaatccggaggtttcaggttattgtggccttttacttggaagtcctatcattttatatgagatcattgcatttgttatcccagatggggcagtggaatcgttgtggtcaatagaccagtacttcgaattcatacttgtgctgatgtttagcacagggttgtcctttcaggtccctgttatccagcttctgctaggacaacttggattggtttctagtgaccaaatgctttcgatctggagatatgttgttgttggcgctgtcgtcgctgctgctgtgcttacaccttcgacggatccgttgacacaaatgttgttggctggtcctttgcttggtttgtacttgggtggcgcatggatggtcaagctaactgggcgataagtgagtggttcatgcaaggcaatgatgctccgggaagcaagagcgccactgtaacctagtcttgtaaaaatgaattcactctgttcatcagatgatattgttaccatttctctttctgaagttcatgagcagtagaaaatagaggaaacggttagttagtttcatctacagatcttgaagtaacaaatgaatgcgttgtggtacagcccgaattaatcattgttgaatagactataagatgcaagttc

SEQ ID NO: 41159 - DNA, 973 bp, Zea Mays
ccaacgcgagttagatttttgtccctgctctcttctatgccattgttgtagccctctttatctcaagcgccgacgtgtatctacgatcgagagagcaggtctccgaaatcagttgccttcgagattctgcaccaaaaggaggcaaattaaataaggtttttggaagcgccttcacacgactgctcgctttcttctcgatgaccctgttgtttcgatgttgtcgaccttattgcttccacctacatcgacaaccagaaatttcctgatttaactatggctggttttgccgacgcgctgaagccagaaaaactctctgatatgcacttcaagaggtggcaatccaaggtcacgctctgccttgctgctatgaatgtgttccatattagtaaatgcaaacctgaggacgtactgactcatgaagaggagaaaaaatacgacgataccaatactatatatatgggagcagttcttagggtccttgttaactgtttgcttgattcaaaattgtgaatatgcattatacaaacgagaaggagttgtgggatgtacttactactaagtatagtgcatcggatgctggtagtgaaatgtatatcatgaagagctttcatgattataagatggtcgataatcactctattgtggagtaaactcatgaaatacaatgtattgccaaggagctcgaccacattaagtttgtccttcctgactgatttgtggctagatgcattattgtaaagttgccttattcatggagaaacttcgtcgcttatcttacacataagagacaagagatatcagttgaaaatctgatagcgaatatgaatgttgaggaaaaagctcaggctaaggaaacgagttctaaaggaggcgatggtcactccagtgccaacatggtttagaaaaacaacaacaatggcaaaggaaagacaaaaatctaacaagtccaacaaaactaccaactttaaagaag

SEQ ID NO: 41160 - DNA, 2189 bp, Zea Mays
acaaaaaggcacgccccacccagtccagtccccaccaagcaggcgccacccgttcggtccgtacaggaggggtccaccatgccgtgctcctcttcgtcgtccaaccccttccactccctcgcctccgccttccccttcctctcctccacatccccacccccatccccacccgcctcgcccgcgcccgccgctccccacctcgccgtcccgctcctcctccccgtctcctcggcttccgagtcccgccgcggggcgcagccgctgccgggcacgcggatggtcggcgcgggcgcgaccggcgggggtaacatggccagcggtggtggggggcccgcgttcgtgggccaggtgttcaccatgctcgacccatccgggaacgggctcatggccgttaccacacgcttcgagctcccgcgcttcctcaccaacaggactcctatgtggttcaaaaggatgctatcaccgtcgaagaagactgaaaatagtccagtatttaggttttttatggatctgaatgatgcagtatcctatgtaaagcgactaaatgtgccaagcggcatggtgggggcttgtcgccttgatgtagcatatgaacatttcaaggaaaagcctcacatgttccagtttgttccaaatgaaaagcaggtccaggctgccaataagctattgaagtcacttccacaaaggggcagaaggaaaaaacttgatggggttcctgtttttagtgcgcaaaacttgaatattgcagtggcaacaaatgatggaattagatggtacacaccatacttttttgataaaaacttgttggacaatatccttgaagcttctatggatcaacatttccattcgataatgcaaaatcgccatacacgtcgtagaagggatattgtcgatgatagtttaacatcagaaataattgaagaaagtgctgaaagcttgcttgagcccccagaggttcaagaattaatgaatgagattggcccagctggtataccattaaatgttgtaacgaaagctgcagagattcagtttcttgatgttgttgataaagtccttctaggaaataagtggttaaggaaagcttctggcatacaaccaaagttcccttatgttgttgattcatttgaagaaaggactgctgtttcaattgccaatattgctactaccagcagtttaactgcttcaaacgacgacagcagttgccagaataatcaagaaactcaatcttccgagccaagtggtgataacagcagctacagaaatcacaataatgaagatcataatcactttccgtttagcaatctgcttccaaatatatggccagggcatgacagaaagttcaaatcacaagagagtgacaataagtttagcagatatgatgccgacgtgaagaatgagcaaagccaacttaaagaagacaatggaagacttgacaaaagagttggagcaaacgagtgaagaaaatatgttcggtgatgaaaaagacccactttttgttgccaacgttggtgactactcaaggataacaaagattagctctgcatgaggctcgttgaccaacaggcgacagcaagggtgttgtactgaactgctaacgaagtctacagtccatgatactgatcttagagggctctactgatataatgatgcaaatcggaggtcatcagatcatatggacattcgactgtcgaccgttctgactttagaggctatccaacgtcaacagttacaagccaatctaaattttcggatatgatttgccaaaaggatgattgtaaatagaaaagtttgcagaatgtccaccatgcagttaggcgtgaagatctgaagcaacatgttgttggatttctaagatcttagctcgtaacagctgtagagtatggtggtatatagcttcaggattgagatgggggtcacaggagtctgtcaggtgagcagagtcgaataaattgatgtgggtagcatttttcttcactagctgcgtatcggatctgagtgtgtatggcgagagttacggtaaatgttggttcgcatataggtccttggattatttattgtacgcgatatggtgaaaggaggttgtagctaacatgttgtgtctccgatcatcatactgacattattgtctctcatgatcttatacttgcttataaatagaacttaaaactttattttgagttgacagcatg

SEQ ID NO: 41161 - DNA, 767 bp, Zea Mays
cttgtgtatccggtacccgacgggtatacccgacccgtttcacccctaacacctgccggtagaagttccctcatacattgtcagtcatcatgtatgcaccaccatacacgtttgcttaaacaaaaaaagcaagtgtatgtgtttgtgaagagaattaaaggcaggccggcacaaaagctaccccgacgatggcgagtggtcattgttgtcggtcctcctctgcgtcacctctggcgccaagatgacaccatagtccttgatatagtagtcgtcgaacgcgcacgacatggcgagtaacgatgactcttggttgggctgccaaacgaagtgcaccccgatctcatcagcgaggtagtacacctagccgttgcaccacctgatgtgctactcctctacatacatcttgttcgaggacactcacacaacgttagcaacggtcgttgtcccagcgcagacgaattcatggccggtcagtagtgacttacgtggcaggttgagcttcaggtcatgatgagctggacggtgtgacggcgccgttgtcggatgcggtgcccagaacaacccaagagtcgtcggcgttggtgacgaccatgaggtccccctgtttgagatggacagcgcggtgcagccgctctggaccgcatccaagcggcagctgcggtggagcttgccgaacacagcgacacatgcggccatgtagtactgcttccagaggtcgaactagtagtcgccaagcttcttctcgccgtcgatgagcgacgccaacg

SEQ ID NO: 41162 - DNA, 971 bp, Zea Mays
ccatgaccgaatcgacccgatatttgtaagaacgacgatgaacattggattcaagtgctttgccaagcaccaagagagtgtcgctggagaagagactgagcaagtatagcacgacggcacagcgatcccgcgatagcgtagcccgacagcaagctcacacatagactcgacagcactgtagacacggctgcaggtgcgatgaaggcacgacaaggtgctgtggagctcgacacgcagtttacatcatgaaacaagaaggaagaagcaaaagccaattctcccaggcgtcgactagcacagacaaccaccagggcgtcacagtgaggtcggagatggtggccgcgcgcggaactgagcacgacgcagaccatgaatgcaggcgaactcgttgatgtccaaagaagggcgagctggaggttgagatggggctgggcgacgacgatcgacggctatagggctagggcgagcccacgacgaccggccagggaggaagcggcttggcacgtccatggctgagggcgagctcgacagggaacgacaggggcgagcgacgccagggagccaaggcgaggtcccacctaaccgagctgggacagctggcgaagggagcagtagaggcgacggttaggccgagcaggggaggaatgagttcgatgactcgacgacggccgcgaccgaagcaagcaggaagacagcgagcagggtcccaagctcgacgtggcctggcatggggacaggggcagtcagagttgagggaggagcatagggagacgtcgatgctcatggctggagctcggggtcagcgagcaacctcggccgcatgctgcaacttcggggcagtggcgggccctggctctgccgtttggccgtgaaccactccgaggcagaccgctcgcacgcgcccaggccaccggacgcacgtgggacagggagcaggggcgcgccaagggagagcggcagcagggagatgg

SEQ ID NO: 41163 - DNA, 1962 bp, Zea Mays
ccccatcctatccagagcagagaaagagcaacaattaccgactgcagagatcgactgatcgagaaagcgtttacagtcacaattaccaactgccaggacaaatgcagtacgactacaggaggagatgtaaaaaaaagatgttcttgtaatctccaaccaaggatgcagacatgtcatggaagtaaacggagggcctagccataaaacggctttgcttttattccaaagtccaatacaagtctttgggtaattgggcacagaagaggagacagagagacggagaggggagacccggtcactgccaatgccaagaacaagaaaccagagaggacagtcgtcaatccaatccgagtctcctccaaaaacccatcaatctgcaggaacgagagcagcaggagagcatcctaggaaaaaagttaggaccaactgaccgagcaaaaaaggtagcatctctgtatcaccaaggcaccgccgatcacagaccaaatccctcccccctcctctggtccatcccacacgtagagcagccgtttcgacaagagtggtgtgagtgttgaagagctcctcaacatgatggatccggccttgcttgacgacgtcatacgccggctgctggaggtgaagaatctcaagcctgggaagaacgcgcagttgtcggagtcggagatcaagcagctctgcgctgccgccaaggagatcttcctgcaccagcccaacctgctggagctcgaggcgcccatcaaaatctgcggtgatgtccatggccagtactctgatctcctgaggctattcgattatggtggctatccgcctcaggccaactaccttttcttgggtgattatgtggatcgtggaaagcaaagcttggaaacaatatgtcttcttttggcctacaaggtcaagtacccagagaacttctttcttctaaggggaaaccatgaatgcgcatcagtaaatcgcatctatggtttttatgacgagtgcaaacgcagattcagtgtaaagctgtggaaaacattcactgactgttttaactgcttgccagtgtcagcattgatagacgaaaagatcctctgtatgcatggtggtctatctccagagttgaacaagctcgaacaaatacttaatctgagtcgccccacagacgtgcctgatactggattgctctgtgaccttctttggtctgatccttctaatgaagcaacaggatgggccataaatgatcgaggtgtttcatatacatttggtcctgataaagtttctgaattccttgagaagcatgatttggacctcatctgccgagcccatcaggttgtcgaagatggatatgagtttttcgctagccgccaactcgtaacaatgttttcagcccctaactactgtggagaatttgataacgctggtgccatgatgagtgtagatgagacattgatgtgctccttccaaatactgaaacctgcgaggaaggtgttgggtggttcaactaataacaaatcaggcttcaagtcatcgagaggatggtgacaatggcaagcctgatatcaggttggttggtgagcagcacgccagtggtcgacggggggttgttccatcataatcatattacagcggctgcaactgacaggcccaatgcatcttctcttccatgttggatcaacactcttgtaatgtattatttactgtgcggatctgagaggatgtgaatgatttcatttgcgtcctcaagttcaaaagattcaggaaggcatgcttgaaataaaaatagccagaaacatgcaaggtgctccacgacgcagcacggcatttccagtgttttctttttgctgtctagttctgaatatattttaccgccagaccagcacgtaagcttgcctggcaatggtttttatttgttgctatgccatctcaaaagtcaaaaccatggatttatatcaaaagtcaaaagactttgagaagtattta

SEQ ID NO: 41164 - DNA, 3448 bp, Zea Mays
cccggctgtcccgtctcgaccaccagcaccagttcagcccatccaccgccaccacctcagacgctcctagtcaccactcgctgtcctcggcttctcctaaaagctcgacgcgatggcgacgctggtgcggccgcccgcgctgcacgtccgcgccgtgagcggcggcgggaacaaggacagggtggcgccgcagcggccttggtggggcgggaacaagcccatctcaccgcgccagtcgggcgggagcggggcgcgaggaggcgcgggcggcggcggcgtcgcgctggaccaggtgctaggtgtgctccgccgcgacggcgaattcgtccaggccgccgtcggcgccccgctccgcgacgtcttctggctccgcttccttgagaagaagcagcggaagcagcagcagccgagacctaagcacaagcctttccggcagcagcaggaagaggaggaggtggtagtggtggacgagtcgcccccggccttcccgcccccctcgtacccgtcagggttgtcgtgcgtggagctaatggcggccgacttccaggccctcaaggtgtacgccggtagcgcgcggcactctctcgcgcgccgattcctcggtagcaatagcaagggaaagtctgaacagcaacctaaacccaaaccccaggagcagcagaaagagcagcaacatatacttcaggccccagccttccctccgccctcctacccaccaggattatcctgtatggagttgatgatggctgaccttgaagccctgaaactgtacatcaactactattcggccatcctgactacgccgctcccccagcattatgatcctgacctccttgcccagtacttcgcctcacgtccgcatatccttgcctctcgcgtcattcagatactcttcacatttctctcagctgtggtgaagatgcggatttcaaaaagagctcagttaaccacagatgctacctatagtagtggtaacagcggcaacgggtttgatgatactcaatatatggtcggccaacttctcaaggagacatttcttaaccttgggcctacttttattaaagttggacaatcactttctacaagacctgatatcataggttcagagatttgtgaggcccttgctgagttgcatgaaagggttcctactttcccaagagaggatgcaatgaagatcattgagggagaatttgggtgccctgtgtcgcatatgttcagttatgtttcagatgagcctgtagcatctgcttcctttggacaggtctaccaggggcgcacagttgatggttctcttgttgcaataaaggttcagcggccagaccttctaccttctgtactgagagacatctatattctacgccttgggcttgctttcatacggaagatagccaagcgaagaagtaacatttctctttatggtgatgagttgggtagaggtttcgtcggcgagttggactacaatattgaagctgctaatgctaccaaatttatggaggttcattccagatatcctttcatgctagttcctaaggttcttaaacaacttactcgaaagagggttttaacaatggagtgggtggctggtgagaaccccaaggatttgctttctttgtctaaaggagtttctgaaaaatttactcaagcttcagataatcagaagttggaagcaaaatctcgccttcttgacctggtcaataaaggtgtagaggcatcgctagtgcagcttcttgagacaggcttgttgcatgctgatcctcatcctggtaacttgcgttatactcctgaaggccgtgttgggtttctagattttggtttgctgtgcatgatggagaggaaacatcagcgtgctatgcttgcaagcatagtgcacatagtaaatggtgattgggcttccgtcgtttatgatttgactgaaatggatgtagttccaccaaaaaccaatctacgtcgtgtgacaatggtgcttggaaaaatttggtctgtggcatttaaatatcacttccgtatgccaccttactacacacttgttctccggtcacttgcctctttggaaggactagccgtggcagcagatgggactttcaaaacatttcaagcagcatacccatatgttgttcggaagcttctgtccgaaaattcacttgaaacaagaagactcttgaatcaggcaatttttaacaaaaggaaagagttccaatggcagaagattgacgcgtttctaaaattggcttcagcaaggaccaacttcaagtataacagtgaagttttgccagagcctgacatgaagtccatgaatgtggctagccttgtggagatcagtgatgcatattcacttgaccgtgctatagctacaccagagagagcattgcatactgcaaacctgtgtgtgaggcttttattatctaaggagagcattgtgattaggagacttattatgacagcgaatgcaaaatctcttgcccgtgatctgatctccagagatgctttgatgttccgggtgctccttagtaaggttattgcggatgttgtctaccaatggatgttgagtgccacaggcttgaaacgagttatggagaccaagatccagacgcccatgaccacaggaaagaacgagggacatctggtgctggctgaagaaccatcgaccctgatggtactccaggcggcagtaaaagaccgaaggattcagctcatgttcaccaagtttgtgagggagttgagagaggagcccgtcttgatgattagggtgagctggaacgtgttcctcatctcggtctcatctgccgctgtaggcctgcaccgtttcttggtgttcttcttgaaggaggatggtgccaggttcttggatgacaaggtcaagaaaatgaagatttggctgatggagttctcgaagcggacggctaatctggagattcaaggaattctgtgaatgttggtggcttttggttgaaggatttaatagctgcttcgcactctggtttttggagttactttctgcatcgagtgaatccagttcctgtttacgctggctgtctgagcttgcttggctgctggtgttcccagagatttataaaaacagggttttcctccgtcattccgccgcagctagtatataatagatggttcttggttgttcatgtactgtgtagctgtatataatagaaacattgcaggatcagtgagtaattctgtggccgagtaaagtgcagtggtggaaggcatgtgttacctactggatataaatatgatgatgtgaatgttcagttgaaaaacttgggtgacatgaactgatgaactatagctgatgcctccactttagaaatttagctgttttagtttgtctaaaatcaaacctttctttgacaagtaacttgcataaactcgggcgaaatcgtttgggtagatcatagatgtttgtaaatttgtccgattattaacatgaacagtg

SEQ ID NO: 41165 - DNA, 1330 bp, Zea Mays
actccgccccaccactggtcaacgaatctttcctgcactgtcctgtccgccgccgctcaacctcatcggaactccactcctcctcacccccacagcaactcccacctcatggagaaagctgcgcacgttgccgccggcgcgacgcaagagcaggaatcgtctccgaacagacttgcggtggtcacaggaggaaacaaaggagttggcctagaagtatgccgccagcttgctctcaagggtgtgacagttatccttacagcaagggatgagaaacgaggaaaagatgctgccgagacccttcgccgtgaatgccaactcccaaatatcatattccatcagctcgatgtcagagatgatgatagtgccaccacattggcccggtatgtagaaagaagatatgggaagctcgacatcttggtgaacaatgcagctatttcaggaattgtagcagatgaggaaggcctgaaagctcttaacattgatgcagagacatggacatctggcagggcagctaatcttctgaaagaagtattccagaataccaatgatgaggcattcaactgtctgaataccaattactatggatgcaaacgggtaacagaagctcttcttccacttctgaagctatctacatcaggaggagcaaggattgtcaatgcctcctcacttgcgtcggagctgaaggtgtggagctcctgcattcctgcacgaacagagaagatatctatgttactcaccctgattatattgttgccagagaatgccaaatgagaagctgcgaaacgatttgagcaacattgacatctgggacgaggaccggatagaagcagtgctcgacacattcttggaggacctgaggagcgggcggctggaagaggctgggtggcccgtgatgctaccagcctacagcgtatcgaaaatggtcatcaatctgtacaccaggatcatggcaaggaggtatccggagatgcgcatcaactgtgtgcgacctggctttgtcaagacggacatcaactggaatctgggggtcctgacgcctgaacaaggtgcgagagggccagtcatgctagctctcctccccgatgatggaccaactgggtgctattttgatcagacagaaatggtgaacgtctggtgattgaatatttgtcgtctgctagtttattttagaactaaaccgctagaaataaaaaagagcggatggagtgttataactttcctgaattcatgatgacataaacacatacacatggtaaaacgttcttatgatcagttggtgtagtttccatatgtcactttgaatgatttgttgttctttgttggtgttgag

SEQ ID NO: 41166 - DNA, 254 bp, Zea Mays
gtcggcagatgctggcccggtggatggcggccggtggcccttctctggtttcggcgagcaattggttccacgtcgagggtccctctcgccagtcgatgccacgaatagattccacgagctagggtgaatcacctaggctattctccgaggccggggtgtcatctcgagcgaagctcgacggcggtggcatctctgcgcttcttctctccctgcttcgtccttttcgtttcacgacgattgtgccctcggtgccg

SEQ ID NO: 41167 - DNA, 411 bp, Zea Mays
cgtacattggcaaacaaacaattaacgcgtcgacgatgttaatatatgatcgtccttatccggtctccaaggctcgggggcgccccattggctgggccggcgagggaggttggtgacaacagggggcttggttggatcatggatgcacgtgaaaggccggccagtcgtacgctccgctggtcaggtccaaacctagtcgtatactgtaagcaattgtttatcactgattagtaccttaacctggtgtggtgggttaaagcgaggaggtctagatttgcgctagtttgcctccgatctactacgtacgtttctttcttgcgttgctgtgccgctgctgccgtgtcgtcgtcctatagcaggaaggaaagaagacaaaggccggttaagctcacgatgataatataattatta

SEQ ID NO: 41168 - DNA, 805 bp, Zea Mays
atggccgacctctcctttgagcctgggcgtcctggggaatcaacaattgagcttggtcgagttattgaccgtggcctcagggagagtcgagctgttgacatggagttcttgtgtgttgttgctgggaagcatgtctggtctgtgcgtgtggaccttcacatcttggataacggaggctttatctactttctggaggcctgaatgcacggttggtggggacgatggtcagcaagttacagtgcatgatcctgaggttagggatctacttcctcttacgatacaccatatgcccatagttgtaacatttgcatattttggtgaaggtaacatcgtggttcttgatcccacatacaaggaagaagcagtaatgggagggaggatgactgctatagttaactcaaatggggatgtttgtgccattcagaaagctggtggagagggtcccgtgtcaagtgttaccatgcagtgtttaagaattgcttcggtaaaggctgctgttataacaagcaaaataaagaaagcgaaatttaagtttgccttccttatttttgacattctttttagtggaaataacattaaaataatgaatcttggaggagatggtcaaggtgcaagtggtgtaattacagatgttctacgaaacactgatgatgatgctgttgatccccatctagagcgcattaagaatcaggctggggatgaagaaagcgatgaagaggatgaagattttgttgcggataaggatgatagtggatctcctactgatgactcaggtgatgaggaatgcactgatgttttgagctaa

SEQ ID NO: 41169 - DNA, 1571 bp, Zea Mays
ggaaaatacagccgttactaccgcactccccgctggggctctgaggctctctggcctgcgcgccgcgcggctactccccccctcgcgttttcacgccaccctctctgggctggagagccccggaaacggacgccgacgcgcggcagcccccctcgccgccttccggagccttccgcgtcttccgttaccagtccgggccatcataagggggcgagggcgagagggggggcgccccgtcgaaccctaaatccctcacccccattcctcaccgcgggcggcggcgcgcgcttgcggggcaaggctgctgctatgctcggcgaggatccactgaagtgaggttggactcagagagtccgaccttccggggatggaggtgcccaaggcggtggcgctcgtggccgccctggcgctcgtagcgctgggagcgctggccaccaggtggctgcagcgcatggaagcgcggaacgaggaggtacgccgcctcgcgttgctcgcggcggcggaagaggagaccatcgcgagggaggaggcctactactacgggcagtacggcgggtttgtgcgctcgtccgacttgccggaggcaccctcgctgtgggcggcgcaggaggtgcctcctgcgccgaaggaggtgatggctgaggcggcggcggcggcggcggcgacggtggcctcccctacggcggggaagggcgtctgtgcgatgtgctccaagccaacgacgctccggtgcaagcgatgcaagagtgtcaagtactgcaccttaaaatgtcagatagatcactggagaaatggccacaaagatcaatgccatcctctaggtcatggtgccacacaagatgatacacctgaaaatgttatggctggagtagggcttaaggatatgccctctggggcatccactacctaccaaatttgtgatgacaataaagacatgctgtattctcagtttactgggaaggcagaatctgttgattattcgaagctttcaacttcaagtaaaatttgcaaagtttgtgatggcactgttcatgaaaattcttgtcctgctcatgaccagcatgttgggttggaacctgaaccggagcaatccaacaagcaagctcttggcacagaaaaccatgaaagcttaagaaaattgccatgcatgccagctgttgacaaagttccttccgctcaaagtggtacatattgtttggcaagtaaccaacttaaaagagaagatgatcctcctggtccctgtgctaggccagagagctcaggtttgatgccacataattcatcaacagagaagaattatgccagacaacaaacaactacaatagctgcgaggaattatccaacagaatcgacggtttttgcatacaaaaaatttgttgagctctacagcttcaacaagttggaattgcacccatttggtctttgcaacctcgggaataggtaagtgattaatgcttcagttataattgcatatatgaaccatattatttgaggtgtataacctaactgatgtgtgccacaatttctttctatctttctacacatatgctatatgtaaatgaacataattt

SEQ ID NO: 41170 - DNA, 1941 bp, Zea Mays
gaggaatatgcacaattatattaggtcgaagaagccgccactgccggatctggcgcagcgctagggcacaacgtgcgttggcgaggcaggcgagcgtgccgtgggtctgcgtgcccttggagctcctccaggtgacgtagggccatcacgccaattcacagttcgagatccgacgctggagccgccgctccaccagctcatcggcggtagctccgtgcggacagcgacgtcgacgcgtcgtcatctggtggcatggcagcggtggtcctcaccgatggctcagccatccgcaagagcgcaagcatggggacctctccctcgtcttcgcggggtccaccagcgacagcgcgtccccaactgttgggcccgacctcgccgacagcggtgtggggccatgacttcgaacgacatcgtcctccgcgagccatgagcgtaaaaaggttaggtactgccctatctctgcccctcctctctaatcgatcaatggtaatagcacactacgagtactcttgccattgtattccattagcgacaaatctgctagaaaactatgttatggctagaaactgttagaagtttcaggaatggtgttttatgttacctcgtcatatttttcaagatacatgtcttgtggtcgaaatttcttaagatttcttagttgtcttatagttttgattaagttgacaacttgaagtctggatagagaaattaatgatgaaccagtgtgcaatataagacatatatcatatttaatggtttagtgacatccttattagcacccgttttgaggacatggacttccacatacgtggctgattctcttgaaccatgacggtacaatctctgatttcaactgaagaaaatctctgctttcctgtcctttcccatgaaaatcgtccgagagatgactaggatgaaggatgagaggaataggctgaggatgatcatggcacagtacttggtgtggcttcattcttcatgcaagatctgagcaaccttgagtagcaaatcgaggggaagggtacgagcagcttcggcaagcgccggaacaagacgcacacgctctgcatccgctgcagcagccgtagcttccacctccagaagagcacctgctcctcctgcgattacactgccgcccgcatccgcaagtaaggacaagcctccacgtcgatagaagcaaatcaatccatttcgtttgacaagtagaagattatctgtgttcaaccaaatggacataattagtgctgttttgcaaaagcattttggattttccagtctcaaagcattccaaaaggaagtcttggatgcttggtttgctcatgaggattgtgttctcctaacagccataggatcaggaggtaccaaaggaaatgagcaaaacatagcatacagtctcagatgctgcaggatcacatgaaaattattgaagacgacggtccaggtgcagccttctatgccagtgctaaggccatgactaatggaaatcacactttctatgtgagcaaactgatacagaggttggctagattaagtaaatatgatacaatgtatcacatgcacagggacctctcaagcaacaacctcaatggataaggcatattaaatacattacttcttcagcatcatgggagaaaatcttactgtcagggttcagaggatgttgtacggaatgaagttggttgatttgacgaagaagaaaacatttttagtcttgtggctgtgcgtctagctgttgatgcagctgatgagaagtcggctatagccgagagaatttcagtcatcctgcagaaatatgtcttcccatatgacttctttcgttgttggatttatcatcgagtggagagtggcaatacttagtctggccactacttgtgcttgccaactttgcttaggtaatttcttggcctacttttaagcggtgtcatctgtagacaaaatgag

SEQ ID NO: 41171 - DNA, 1825 bp, Zea Mays
ctcttatctccttcccccagccgccctccgcctccgcgccatcgacacgctcgagagcgtcgctgcctgctgctcgcgcggctacacgcaagtaataaacattatatggcgctagtacagttcaacggtgccttggttcctcaactcggtgaaaagcctcggctgctatccttgtcagctgcaatcgcaaaggctgcctattctgatgcaagattcctgacaccaaaaactggacctcttctgaacaactaaaccatgtaccatcgtcaagatttcgccagaaaaggggttcacgttttatcgtcagagctgaagctgatttctatagtgtacttggtgtctcaagaaatgctagtaaatctgaaatcaagagcgcctatcggaagcttgctaggagctatcatccagatgtaaacaaagatcctggtgctgaacaaaagttcaaggatatcagtaatgcttatgaggttctgtctgatgatgagaagcgatcgatctatgataaatatggagaagcaggtctgaagggtgctggcatgggcacaggagattactcaaacccgtttgatctctttgagtccctgtttgaagggtttggtggaatgggtggaatggggggtggccgtgctgctcggaacagaccaatgcaaggtgatgatgagagctacaatctggtactcaatttcaaggaagctgtgtttggtgtggagaaggagattgagataaccagattggaaggctgtaacacctgcgacggaagtggtgccaagccaggtacaaaggcaaccacatgtaaaacttgtggaggtcagggccaggtagtctcctccacaagaacaccgcttggaatattccagcaagtctccacctgcaatacttgtggtggcaccggtgaattctccactccttgcaacacctgtgggggtgatggccgggtgcgaaggacaaagaggatcagcctaaaggttcctgctggagtggattctggaagcaggctgagggtccggtctgagggtaatgctgggcggcgaggaggccctcctggggacctttatgtcttcattgatgttctctctgatcctgttcttaagcgagatgggacaaacattctctacacatgcaaggtttcttacattgatgcaatccttgggacaaccgtcaaagtccccactgttgacggaacggttgaccttaagataccctcagggactcagccaggcacaactctggtgatgtccaagaaaggtgtcccgcttctcgggaagtcaaatgcccgtggagaccagctggtgcgtgtccaggttgagattccgaagcgtctgagcagcgacgagaagaagctaattgaggagcttgcaaacctgaacaaggctcaaacagccaatagcaggagatgattatcgcacatggcttcgtaggacagcgtgcttgtgtgataggcaattttgatgcaaactgcagtgatgattggatgaaaagagttggtagtgataaactcttctacgaactacatacagcaaggggtctggagcaaaaaaatgtgccgttccacatctgtaacctcgtttttaagctattgaaagttgagtcagtgaactggacgtttttgcaatagcttagcatatgcactaggcgactttattagccatttttttttgttgttatacggcttttgtattcttggaagccttaggcaagatatctgatggtggaatcaggtttagacttgacatttcttgcacaaatgctgcaccatgcattcatggaatctgtaagctgtaccatggaaatgttaactgtagttttatggtttgtgatgcattgg

SEQ ID NO: 41172 - DNA, 2267 bp, Zea Mays
agtattttaagctagaacactatacaagtactgattgccttgtacgtttgacataagactctcatttgttcctctcatactttcccatctaatggaggaactacttgagatagttctagttgtttcgaccatacttcttggcttagctctagtttacttatatgaaatcctatggctgaggcttgagaagataaggaagaagttaaggaggcaaggcataaacggtcctaaacctacgtttctctacggcaacacccaggagatgaagagaatccgacaagaactcaagtttgtgcagaggcaagacaaagacatgaatggctacatatccaccatcttccctcatttccttttctggaggaagacatatgggcccgtgttcctttactcaacaggagtgttggagatattgcatgttgctcagccagaaatggtgaaagacatgggccactggactccatcagagctcgggaagccacaacatataatgaaatcacggaaacctctcttcggattaggtatactagcagcaaatggcgacctttgggcctatgagaagaagatcctggcaccacagttctttgtagaaaaaattaagggtatgatagggctaattgtggatgcaaccgttccactgttacaatcatgggagaatatgctcgatggcacaggaggtagtaaggagatctatgttgatggatacctgaggaacttttcagcggatgtgattgctagagcatgttttgggagcaatttcgtagaaggaaaagacatattttgcaagctcaggcagctccaaaagttgatttctgaacaggatacacttgttgggctgtctgcagtgtggaaatacttgcctaccaagagaaaccgggagatacaaaagctagatcaagaagtccggttactaatcctggatctctcaagggaagacaggagcagaagccgcagcaataatgccggcacgcacgtgtccacatacgacaaccttctgcatgccattgtcgatggtgcaaaccagagccccagctactgcagtgcccctgaagatttcatcgtcgacaactgcaagaacatctactttgctgggtatgaaactacagcggtcactgccacctggtgcctgatgctccttgctgcacacccagactggcaggaccgtgctcgggctgagattcgagaagtgtgctgtggacagacagcgatggacatcgacgtccttcgtcagctgaaaatacttacaatggtgatacaagagactctccggctgtaccctccagcgtcactgatcatgcgtgaggccctgacaggcatcaggctcggtggagtcgacgtccctcgcggcaccatcatccaagtagccatttcattgctgcaccttgacatggaagcctggggtccagacgctaacgagtttcgtccagaccggttcgcgaacggagctgccgcggcgtgcaagccagcccacatgtatatgccgttcgggtacgggccgaggctgtgcaccgggcagaacctggcaatggcggagctgaaggttgttcttgcgcgcctgctgagcaagttctcgttctcggtgtcgcctgggtaccagcactccccggtgtttcggttgaccattgagccggagtccggcatgccccttgtggtgacaaggctagcatgatcttctgtttgtttccaaacgagctgcaacgccccaccatcaccaccaagcatcggattcggtatgtgtggctgtgcctggtgctaccacttccatttaggctgtgcgcaacgcatccccctccccttccccctccccttgcatggggctgtagggggcactccacggccgcagcggcgccccctacagcgccccctacgtgctggcccccttctctccccccccagatctagcgtgtcactgttcatcaccctaaacactgtaccgtgggtccacgagtaattgttagtagataaaaaattgatagttgatatagaaaattatattttatagttgtagtggggtataggggagtatttaggggaaaccgctgcgggagatgaaaaaataggggaaaaaatagggggggaaagtgatatagggaaaaaaaattaggggtaacggttgcggatagccttagactctctccagcagcgtcccctaaatttcatcccctaaaggaatattctctgtcatttacagaacactctaaaagattctgtcctctatatattctcagtctccaacagcgtcccctaaattcggtcccctatagctacag

SEQ ID NO: 41173 - DNA, 1514 bp, Zea Mays
gatgcgcggagcggttcttctttttgttggtttgacgacttctaccccagcctcaaccgctccaagtgctgcgccaagggaatttgcacggagtgcttcctccagatgaagtcgcccacctcgtgcaaaccgacgcagtatcctgactaaactcacttcatttcgaatccagagcctggtgctcttgtcgagcgtgtgtttcgtatttttcgagcgtctctggtgttactaaaccgtgccggttactgccctgttgcaactgcaagtccccttaacttacctcgtaataaggtgtccgtattgcaagacgctgaattacgcagtggagtaccggggcgtgaagaccaaggaggagaagggcatagagcagcttttgcaaacagtccacgaggcaacgatgttctctcgtccgaagtgcagcattctgagttgatatcgaggaattctgaagccttcaaacagatgcggggcaataattttgaggtggatcttgaagaagtaatgcttatggaggcaatttggctctctatacaagatcaagaagctttgggaaatccaggatgtgttagcactacaccgtcatcaattccttcaaggccttttgatgatggtgatatgacaacgaccgctgaagcagcttcttctggtggatttgcttgtgcagtcgcagctttagctgaacagcagcatatgcatggagagtcttctagcgcatcaccttgccaaacaataaggtttggcacccttagcagaccagacagatccactacacaggatctgagtgtagctgggagcagttcttcggactccagagttgaggaaccaccaaccagcaatacacaccgaacaatagaggctgcagagtattctaattctaatgtccagtggtccgaggtggccgaggctgggaccagtattgctgaatctgatggtacagtggaggctggtgttgacaattcatccacttcggctgggtccaacattgattctgttagtgttcctgatagcttcgaggagcagatgatgctggccatggctctctcgttggtcgatgcccgtgctagagcaggttctccggggttagcttggcggtagcatttccttgtaggcccttccactccttatactattcttttcggttgtgctgcgttttgttcctaagtgttccaattgccacgtaaaacatgggggattagatggggagcaggctcaaatttgacgaactgacagtgatacttgtgaatagtgggataaatctgtacatttgaagccagtggtttggctaattttatctcctcttctttcgattcttgaggaagaaattggattctcaggcagatttctgcctacagaagttgtgcctgatgatgttgaaacattgtgtaaatacggaaacgcactcacatttttttcatgtcccggtggtttttcctgcttgctatgtcgaacactgcatatgcatatagcggaatgacatcttataaataaagtttctaaattttccttttgtatcg

SEQ ID NO: 41174 - DNA, 344 bp, Zea Mays
cttcacacacatcctgatctgctctcgactcgagtgcttctcccctgccgctcgtcctgctcgctgattgatcgctgcgcgcctgcgcctgctgctatgtttccttgctcctttgtagcacaagtcataagatagttgggctgcaccatgggctattgggtcggcagtccctaacagacaccagttccagttcgttcgtgtcctgtttcagcgctcgaggtcgaggccagggtcgccggcagcgtagactgtagagtggagagaggtgttgcgcagttgcgctttgctgtggttcgtacgtggtggcacgatcgcgcatggagatggaggaaggagggtttctg

SEQ ID NO: 41175 - DNA, 1669 bp, Zea Mays
cccttaaccacctgctttatcttcccccgttcaccccgtgctcgcgcgcgcgcgcgctctctctctctctctctctcccctccctgtctccctccccctctcggagtctcggtcgtggcgacgacgactgggcaggccgacgagcacccaccaggaaaagtattgctcctagcctcctacagctagttctttttatgattaagctccaatgaaggattctcaggatattcagagcacaacagagttgcagtcatcagcacagggtactaatgaagtgcaaagtcagcaaccaaacccgatgaccactgatgctcctgcaggaaattcgggttccttgtctatagctagtaatgacagtaagaaggtgtctcgcgaagacattgaacttgttcagaatttaatagagcgttgtcttcagctatacatgaacaaaggagaagttgttagaactctttctactcgtgctagaatagaacctggcttcactactttagtatggcagaaactcgaagaagagaactccgagttctttagggcttactatatccggttgaaattgaaacggcaaatcatcttgttcaatcatttattgcaacaccagtacaatttgatgaaatatccagcacctccaaatgttccattggctccaatacaaaatggaattcatcatatgccagtgcagttagcaatttaccaatggggtatccagtacttccgcagcctatcatgccggctcccggccagcctcacatggacccaatggcctgtggtctgtccaatggtcatgtggtcaatggaatacctgcaccaggtggttatcatccgatgcgcatgaactctggaaatgacatggttgtggacaacggagcgcccgaagcaccacatgctggtgctaccggcagcgtcatgtcatccgagatggccgtgagcccctcatcagcggcttcaagcaaccatgctccatttatgccgccggagatcccaggcatggccatggacgtgccaggcctagactcgacattcggatctgacgtagggaatggacctctgcaattaggaccagatggctcgtcgagagactccattagatccttggggcagctctggaacttcagcctctctgatctaacggcggatttgacgagtttgggagcagatttggacgtgctggagaactacaccggcacccctttcctgccttcggactcggacattctgctcgactccccggaccaagatgacatagtcgaatattttgctgacgccatcaacgggtctcagtcagacgaggagaggtcatagcgaagctagctcaaggtttttcaggcagggcgcagggatgtgtcttctcatggcctgctgcgagagatgctgcggctaatgtaatgtaactgtgccttgggcccgcgcccctgtgtgctgcggcaagtgtagctggtttaattagactttttttttaatttgtagctggttaattagaatcctaattctttggaataaaaaagtagtagctggagttatcggtaagaatcgctggatgtaatgcaaagctcgctctcacagtcacagctgggtgaccacaggaggacctcctttttgtttgttgtatatttgctgctacagaagtaaaacggtctcataggtctcaggcttactcggcgcagctcgc

SEQ ID NO: 41176 - DNA, 2089 bp, Zea Mays
aacgactcgactgtccccaatccagtatcgcgagaagcgctacgcggccggcgaggcgctccccccaatatggtgcgcgtcgtcgtctccaccctccccgccctccgtccgcttctccgccgtggctctctgctaaaccataaacccctgccccgctcacgccttcagccgtggccgttctgcacgctctcgtcctcgcccgccgccggcgcgcccagcgccgcggtgaagggggaggaggttgcgttggacaagcaccttacccggtgcgcggcggcaggcatagcaccgttgcgggtggcggtgctggtgagcggcggggtggatagcagcgtggcgcttcgcctcctccacgccgccggccatcgctgcaccgcgttctacctgaagatttggttccaggaatttctggtccgagtgcccatgggacgaggatttgaagtatgcacaagctgtttgtgacaagattgatgtgccattggaggtggtccacctatccgatgaatactggaaccatgtggtgagtaagcttcatttgagcctttcccccccatagatttgcacacaacactttttagagcctttgctttgagaagaaatactgtgaatttgatatctaggtatcacatatgatcaatgagtatcgctgtggtcgtacaccaaatcccgatgttctgtgcaacacgagaataaagttcgggtctttcttagaagccattgaaaatttaggatttgactacatagcttcaggacactatgcacacgtagtacatccttccgctgaaaataccgaagcgccatccgtactacaattatcaaaggacaagatcaaggatcaaacctatttcctctcacatctatctcaatctcagcttagaaggcttcttttcccactaggatgtattacaaaggatgaggttcgcagactggctactcaaatgggccttcctaaccaaggtaggaaagactcacaagggatatgctttcttggaaaggtcaagtttagtgagtttgttgaaagacatataggagaaaaggaaggaatcatactggaagctgagtccggagattacctagggatacaccgtgggttttggttttatacaattggtcagcggcaaggattacggcttcctggaggaccttggtacgttgtagagaaagatgttcaaaacaatgtggtttttgtatcaaggaattattattcattggataagcggaggcgcacatttcgtgttggatcactaaactggtttgataattgtggacctggaaacaatgagcaactcaaatgcaaggtgcgacatagccctgaatttcatgattgcactttggtaaaagagcgtagtgaagaaaatggggatgctttggtggtgcatctggctgaagatgaccagggcttggcagctggtcagtttgcagcgttctatagtgaaaatgtatgcctggggtcaggcataattttggattcatgggacaagatgagcttccctgtctgctcaagggcactcgaaatcgcaaagttggcggacaagtcgagcttagggaagccaataagaatcgtgaacctggaacatatcgtgaaacctgaacaacaggaggaaatcaaagttgcctgacagattggtgccgtaaccttctcctagctccgccagctgcccccttcaaatcaattcatcaatcaaccgtatcgcaggccctggaaatcgaaggatgaggggtcttctagaatctaccgatatatacccccagttggaaactccaggtccttcttggaaggatgatatagtggaatatggcatgacttggtgcgctcgtgttgcagaggaacgatgaagcttcgtgcgtggatagggttgatctgaattaactgttgacagtgattttacgatctcgcgggaaagcaacacaatagtttgggcacgtcctctcctgagtggaatgatctggattcagtagtagtcagtggcacttcattaaaactaatacagggaaatcgtgacgttgtatgatagtggtaagatattgtattgtgaattttgacgataatatcggtgcgtgattgtgccactggatttgttcatcagta

SEQ ID NO: 41177 - DNA, 2368 bp, Zea Mays
cggaaagcaaaggaaaaggagatgcatggtgtgggagaaaagaccaatctaggagtatatatcttcctccctgctagtgctaggccacctccctcccaacaacaagccaacaagctagcctcgcctcgcccccgctctctccgcctcagcccctcccttccctcaactcctgctagctctctctctctcacacacacactagctggagtagcaagctagctaggctcctcgcttccaagcgagaattgcggcggccctcctcgatttccatactcgttcccccaaccgaaccacaggcacacacctacgacgcggccacaccctcctccgccgatcccttctatatacgacgacgacgacgacgagaagatagacaccaagcagccggctttctcgtcatacagaccgagagaatggagctgttccctgcgcacccagacttgcagctgcagatcagccctcctcccccagccaccaagccaatggagctagggttttggaagagggctctagtcgacaccaccacctcgcctgcgactgcaacagccgtggcggcagccacgacggccaccacggccacctcccacgccttcgcctcctcggcgccgacatccgccgtgggataccaccacgcggcggtcggcgcgcaccaccatcaggtgccggtgccggtgccggcgggctcccactcccactcccacctgggcctcccgctcttgcaccacacccatcccatcctcccggcggcggagtctggcggcgtcctccgccggccggacctgggctccacgaggcccatccggggcatccccgtgtacagcacctcgcagcagccgctcccgttcctgcagagccacccgcattattgctgcgacgcgatcgccggcgcgggccacccgaggtcccccaaggccgcgctccgcctcgcgggggcgccggccaagcggggcgcgcgcgccccccggatgcggtggaccacgtcgctgcacgcgcgcttcgtccacgccgtcgagctgctcgggggccacgagagagctacacccaagtcggttcttgagctaatggacgtgaaggatctgacgttggcccatgtcaagtcgcacttgcagatgtatcggaccatcaagactactgaccacaggccagcctctgcttcatcctacggtacgtacgtacgtacgaggacgacgatgataaatcacactgctaccccctagctagctagctaggtgtcagaaacactcatacagtcatactagtatatttatatactagaccgtatacgtacaaggttttgtgacacgctagtcgagtcgacgatgtgtttgcagggcaagcgggtggtgcgaagacgatcatcgacatccccgacgacgacagcagcctgttcgacctcaccaataccaccaccaccaccagcgggtccgagtcgtccgcccagcactccaatccgcctgacggcagcgagcataatggcgccagcacgtgtgctctctggtgcaacgcctcgataagagccttgatgacgatgtctctgacctgaacttgtcggcgccgttccaagtagctgctgcgacgatgtttggcggaggcaacaaaccgaacctcgacttcaccctaggacggatataataatccgccgcgcgcgcgccatctacatatggatgagttgatcgatgaagctggaccatgcatgcggataagagatcgacaggctagatcgagctagctagctgcatatatagattgatttgcttgcattgtaacgaccagccatatttaattatgatctgatggtgcatatatatacgcatgcatgtatatatggtcgtagggacggagagggagttgagcaaatgaaaagagagaggctagaagtaaagaataataagagataagactagcgtcgatccaggaacaaagctagcgcaaaaggagacgggcgggagagacattggggcgtgcgtgcgtgtgctcgctgttgtgcagtgtagtagacacgatagatagctcgataggctttatcaaaggcagcaagcaagggcaagagggtagcttgcttgcttgcctctctgcctgcctctgctgcccatcaaagggcatatgcatgtatgcatatatgctcattgctggcttctggttctggatgtggtgtacacatgcgcgagagggagagaggtgcatgtgcagcatgtgtgtgtgtaccagcagacgcatcaggtactacctagtttgtagctaggggccggttggctggacaaggtttaacaaaaggttgcttcatttatctcttatattcagagctatttaatttgtcacctagaatgttggaccgaagtactatcacctgcaatggctggcttctgga

SEQ ID NO: 41178 - DNA, 3929 bp, Zea Mays
cccgccccgcgacctgaccggctgaccatgactgggttcctgacacgggcacccagtccacccaggccccagcactgccgctgccttgcctgccctcgcttcggcgctttctgctttctccagtgagccgcacccgcactaccgctgacgctaattaaccacaagcgaccgtcgccttcccccacctcctcccttcctcaaaaaaaggcggaggcgggagtggtggtggtgctcgtgggcacgcagcggagcaccctgtacagcagcagcgctgcggcagtagagagtgccattggtggagctgtgcccatcatggtgaggaagaagagaactggccctggtggctctggagaaacttctggagagtcttcaggagcctctggacaaggttcctcacagcagcctgagcgaactcaacaacctgggggaggacgtggctgggtgcctcaacagggtggccatggtggtgggcaacaccagggtcgtgatcgacattatcagggacgtggaggaccagggccacatcaccttggtagtggggcacctgagtatcacccgcgtgaataccagggacgtggtggtgaatatcagggacatggtggtgagtaccagggacggggtggtgactaccagggacgtggtggtggccgctccagaggtggaatgccacagccatactatggtgggcataggggaggtaatgttggacgcaatgttcctccaggtccgtccaggacagttcccgagctgcaccaagccccatatgtccagtatccagccccggtggtttcgccctccccatcgggacctggctcatcctcacagcctatggcagaggtgagctctggacaagtccagcaacagtttcagcaacttgccgatcgtggtcagagttccacgagccaagaaattcaagtggcaccagcatcaagcaaatcggttcgattcccgttacggcccggcaagggcacttatggggacaggtgcattgtgaaggcaaatcatttttttgctgagcttcctgacaaagaccttcaccaatatgatgtatctataacacctgaggttacttcacgtggcgtcaatcgtgctgtcatgggtgagcttgtaacaatatatagacaatcccatttgggtgggcgtctacctgcatacgatggaagaaagagcctgtatactgctggaccattgccatttacttctatggcatttgaaattaccttgcaagatgaggaagatagtcttggcggtcgccaaggtggacataggcgtgagagagtatttagggtggtgatcaaatttgcagcccgtgctgatctccaccatctggctatgtttctagctggaaggcaagcagatgcccctcaggaagctcttcaagtgcttgacattgtactacgtgaattgcctaccgcgaggtattctcctgtcggtaggtcattttactctcccaacttagggagacgtcaaaaacttggtgagggattggaaagttggcgtggtttttaccaaagcataaggccgacacagatgggcctttcactgaatattgatatgtcctctactgcatttatcgagcctctccctgtgatcgattttgttgctcagcttcttaacagagatatctcagttaggccattgtctgattctgatcgcgtgaagattaaaaaagccctaagaggtgtgaaggttgaggtgactcacaggggaaacatgcgcagaaaatatcgcatttctggcctcacctcacaagcaacaagagagctatcgtatgtgtctttcattgctggtatgagattccctgttgatgatcgtggtactgtgaagactgtggtgcaatacttcatggagacttatggttttagtatccagcacaccactttaccatgcttgcaagtgggtaatcaacaaagaccaaattatctgcctatggaggtttgcaagatagttgaaggacagcgttactcaaagcgactcaatgagaaacaaatcactgctctactgaaagtgacctgccagcgccctcaagagcgcgagctggacatcttacagactgtgcatcacaatgcatactatgaagacccctatgcactggaatttggtataagaattgatgaacgtcttgctgcagttgaagctcgtgttctgccaccaccaagacttaaataccatgatagtggccgagagaaggatgttttgcccagagttggccaatggaacatgatgaataagaaaatggttaatggtggcagagtgagcaactgggcatgtattaacttctctcggaatgtgcaagatagtgccgctaggggtttctctcatgagttggcagtcatgtgccaaatatcaggaatggattttgctcttgagcctgtgctgcctccagtgactgcaaggccagaacatgttgagagagcgttaaaggcacgttatcaagatgcaatgaacatactgaggccacagggaagggaacttgatctgctgatcgtaatactgcctgacaacaatggttctctttatggggatctcaaaaggatctgtgagactgaactcggattggtctcccagtgttgtctgactaaacatgtttttaagatgagcaagcagtaccttgcaaatgttgcactcaaaataaatgttaaggttgggggaaggaatactgtacttttagatgctttgtcaaggagaatcccccttgtcagtgacagaccgaccataatatttggtgctgatgttacccatccacatcctggagaagattccagtccttccattgcagccgttgttgcttcgcaagactggcccgaggtcacgaaatacgctggactagtgagtgcgcaagcccatcgccaggagctgatacaggatcttttcaaagtatggcaggacccgcagagaaggacggtaactggcggcatgataaaggaacttctcatttctttcaagagggcaactggacagaagccccagaggatcatattctacagggatggtgtcagtgagggacagttctatcaagtattgctgtacgaacttgatgccattagaaaggcctgtgcgtccctggagcccaactaccagcctccagttacttttgtcgtggtacagaagcgccatcacactaggctgtttgcgaacaaccacagtgatcagcgcacagtcgatagaagcggaaacatactgcctggcaccgtggtcgattcgaagatttgccatcctactgagtttgacttctacctgtgtagccatgctggcattcagggaacgagccgccctgctcactaccatgtcctgtgggacgagaacaagttcacagctgacgagctgcagaccctgacgaacaacctgtgctacacgtacgctaggtgcacccgctccgtgtccatcgtgcccccggcgtactacgctcatctggcagccttccgagctcgcttctacatggagccagacacctctgacagcgggtcactggccagcggtgcccgtggccccccacccggtgcggcacgcagcagcacgagaggggccgggagtgtcgaggtcaggcccctacctgctctcaaggagaacgtgaagcgtgtcatgttttactgctgagacgctggtgggctgccttcgccaaggaaaatgccctggagcattcccatgtacccgcactgtttcggtgatacagtactatctaacgccgattttgcgcgttaagacttccagtgatctgggaaatttcttgtacgactgttgtagtgttgtgtattcgtaatgtgatgacgcggcagttcttctaggagcttagtgccgtgtaaaatatctgttgtaagttgtaacctgtcaccctctagtgttatgtcatgatgaaccaaattatttgttgtcattccatgtacttcgccaagtatttgttgtcacgatgttctaggatgatttttttt

SEQ ID NO: 41179 - DNA, 1839 bp, Zea Mays
ctgggctcttcaaaaatgcagccgacgctcatcttctggccgagtgcccatctccctccgccgtgccctgggtagcgtgctccaccgcaccggtcgctgctttccccaacctccacggcgctcccttcctgcctcagctcggaccgcgcctagccgagcggctcctcccacatgcgctcctctgtctcccatggcgcacgcgtgccccctggtcggctgctgctccctgcgctcgccgtggctccctgctgtagctcgcccccagctcgccgcacggctcccatggcgtgctcctctctgccaagccgtcgaatcccgtcttcctctgctcgcgcgggccgcgcccctgcttcccctccctagctgagctcgccggttccctttccccaagctccacggctggccgtgcccagcgtcctcctctcagctccccacgcgcaccggcttgctccctgctcggttccgtgaccgcaccgtgtgcccatctcctgtgcgcgcgtgctccctccctgttcctccaaaccagttgagctcctccccatggccgtactgagctccttccctacgccagttggatctctctggtgctcgcccagtctggcgcggcaaacggggaaagaaacagccgagttcctctgcgcgcagccacgtcttctcgctcggcctgctccggatccgaagctggtcaccctgtgtgctcggctttgccttgtcgcaaaaccccgacgccgtcgagcctcgctgcccatcgcgaagttccctgctgtcagcctccgcacctgtcctaggccgtcgtagccagtttgcctccgtcccgtggtggtgttgtgctgccgttaagtcccgatatcgatccggtggtcgtcgaagtgaagctctgaacggattcggccacatccagcactacccatgtcgttgttgttcgccttcgtgctgtgagcgacaacatcgtcatttccttcatgtgctcatcctcgatctccgcctcaccatcacccttgatcacagcactgtgtcgacgacttgcgatcctcactctcgcgctcacgcttcgtcgaatgccactccagtactcgtcagaagaagagcttcaacagttgattactgaagaaaagaagaaccctgggtgacatctacttagtactcgacgaaaagtctgaagtagaatttatcgtcgtgtccatggaagtggagcgacctaatattggtaagcgaactcgttacttcggatagttggaatgttaatttgattggctagatttattaatcgtaataatcctcgtgttggcacatgcgcgttgtggtaatgttaaatatgtgtgaaatacgatggagttagtaatgcgaaaggtagattaaattatacgatattcaggcgagctgatgacctaaaagataggcttagtattcctatcagctagttgatagattttctagtgtcattatgttaatttggttaattgatatagtcgatgccctacttaattagttagtttattctaggtttggtatttagttcgatgtcatgagggatgtgcaaattacctcgtgcaattaacagtgaatggcatcgacctatctaattagcgtggaattcaagataattgagaaacacaatttagaaagttagttaatatgcccccttactctaagttgccggtattcgaaaatagtgaataaaaatgtgacgagtaatttgatattgggtgttttaacaaaagacttgtgcttagcttattattacttgatgtttgaagtagatgcgattacgctagaaaagtgtaataattgggcatagtcgtatatcggtaactagtgtttccgtataaaattgtacaa

SEQ ID NO: 41180 - DNA, 987 bp, Zea Mays
ctttccacaagttgcagatgaacctgctcccaagaaggttgcctctaagaagccagggagctccaataacagaggtaatttattgaataattgtcttgtcatcaagattgagtacaagttgataattaaaaccagaaacatgatctgcactatcgatgcatggcaaaagcgcgatgctcctctctacggccctaaggttagtactttcctcccctttattacctgcttccccatcctgcatttcaatctacaaaatcacaactgcttcttgctcatcgatcttctaaatcaccagtccatcttagatttgctgagtcacccagttatttcttatataaatacaccaggacaccatagcatccctcgtgttaacctgctacatcactgttgcatctagcgtatcaatctaattatgtcaacactgatgattgtttcagtttggtactccagtgtatatttggtggagcgccactcagcctaacttagctttatcaaaaacaggagcatcaatacttgaatgtgtcgtaatgtgggatccccatgaagttgaatatctacagtagttctaggaggtggtacattccttagaacctgttttggtgaagaatacccaatatattcaaattttggaacgtttgttggaacttgagagatgctttatctttcgagtgccatggattgatgacagaggtgaagcacatgtcaatatagttctctgttccagttcagtcatgtgtcagatccatgcaggggtggtcttcggtttcacccacccatgagctttagtgtggcaaagtgtctggcctttgaacatgtaatattgtacttgcccaaacttccctttcattctagaacacataagatatttgttttttccttgtttacaagacattgtcatagccactctacgtgaactatgaaggtgcatttgtgatgctgataaattgcagcctttgcttagccacgggtgtgattttcttaatggat

SEQ ID NO: 41181 - DNA, 2618 bp, Zea Mays
ctggtccacaccaagtgcgtcgtccacaccaacctcctccaatgttcgaagaagagggaaatcaagcgccagatggccacgaccaagctattcgcggaggaacagctcgccgaggatgtcgccctcaagagaggcatctccgtggggggctgattgttttgctgagaaaaaaataccgatcatggaggtgtgtccacacatttcttggccactgcctctattgtgtatcctttagttgatagatacatgttagacgtttcttaatatacctcgcgagattgattgagtttgcttgctgactacctatggttaattactagatacatggagccaaatgttatctgatataccagcttccatcacttgggttatttcttgttggctacctgtaatgaatcagtggttagcaccttctgttggtttatccaaggtttttagttaagtgctgaaactacacttatttttcgctcaaacaagcatttataagctaccagctcctgccttccgcttcaaccatgcacatatctctgtccgcagaatttgactactcggttggcccaacaatttaactccacttccccaagagccagcgaaactatttgattggtaactaggtgaatttcaaaacatcagtgcatacattgacgatacattagcatttagaatgagtcccctcccatgatgcccgccgaggtagcgccgtcgcggcgcatgccccctacccgcaaaaactgccactgtatggtaatgggaccccttgccatgcttgatgtgtatgtcccttttattgccttcatgatatccaatcataattggagttcaaagtagggacaagaacacaataacaatatatggagaaataattaattaattcatgcactactgagtacaaaaataactttatgtgtcgccgccagacgggattacagctttgtggagcctcacaataatccaggtagcatatagaacatttttacatgtgcttgtgaatgtcccaaatcagatgaccatgtttttcgcacttccggagactctataaggagggtgttcatacttcatatgctccagtacagtacaggaccacatagttacatacatcccacaacttttttattctgtatttgtgcttggagggacacgtgatagtactgctactcttaatgtgttgatctctcagccaccagacaccagacacgcagccggggttggccagcgccagccaccaggccgccgtggctccgacttccaacgtcgtgccccgcctggcaaccgaccgcatccaccgcctcctggctggctgggcagggtagacacaaaggtctcatccagtgctccactcctccgcatccttttctgctccgagacacctgctgaagctggaagtacatggtacaaggatgattactttaattgaattggtctgccactggctgctgccatccactgcgggctcgatcgccacgccgacgccatccccgtcctcgagcgcgccgtcacagtccggcacaagaatcgtatgctgacagcgagcctgaggccggtgcagccgacggcgacgactaccagcagctgcagcctgtcgagcccgactagaggggtgagtggtgctgctcctgatgagatcgctggaggcttaatggagattcctgtaatctatgaggcacttggcgatctcgatgaggcccaaaagcttcttcatagggcactcaggcgagggctcatcgagggagtggagcattgttgccggtgttgtggcacaaatgggcgttctgtactacatggtgggagatggggctagcttgtgtgtagctgttcaagatagacgaggttgcatagttgtttgaggaggcaagggcggttctggagcaggagtgtggcacttctcatcctaatactcttggtgtgtacaacaaccttgctgcaatctataatgccatgggaagatagatggagtacacagcgacatatttagccctggtgctgaaagggggagccacacacttctgattcaagtattatttacccgctatgaattcaaagtcggcactcacgatggccttggacacaatcctgagcaacaagatgttgaaatactatttggacctggctatactggtcttgcggatcttgggaatagttgatatatggcttcaataatgcaagtcatgtttttaacccaccattccatatcaagatactttgagaaacagagtttgaaagctgcatttgctactgcactagctgatccaacagtagacctaaacatgcaaatcaatcatcattctggctagcatgcacccaaggttgaccaaactgattcgacagttttgggatgagatcataacgttcgtccgacttttgcagagatcattacagaactccaagatattctacaccatatctaggcaccgaagggatctctgaatgtgatctagcatgtgttgcttttgggtatccattatggcatgttattttcttaatatagttttaatatccattgacagatgttgacttccatatctatactactctattaaaaacctaatgatatagctaagatcacaaatggattacaaattcttttgttataacaatataacacatatttgtacataaat

SEQ ID NO: 41182 - DNA, 2876 bp, Zea Mays
agctccggcgtgtctctctgaggagtgaggacgaagaggccccaccgtcacgtacgcctgcatgtgtccacgagtcaccgcaccggcacatagttgtcttgttgttgtacacgacgcacgcatccccgccccgccctcggccctggtgcatataaacaagtgttgcgtgatcggcggccaggccactgccccttccagtctcgccgtcgccggagataggccgccgccgccagccggaacgcaacaccgcagcggttacctgcagcggacggcaggaacctagtcctccactgctctgcctaccctacaatcgggatctcgcgggcttcattaggggggaaaatcgaccagcgagcgagtgcaagaagctcctgttcgatcgatctcgggagctccgatactgcgcgcaatcccaaatttgacacagagtcacagcaatgtcagtgagccatgccgacgagcacgagatatctctgtgcgaccccagctccgaggacgaccggcggcgccggaagatcgggtccctgccgctcaaggctatccacgcgctacggaagaagcgcgcccggcgtcgcgtcactgacttccggttccccgcggccatctccatcgaggacgtccgcgacgccgaagaggagcgcgccgtcgccgccttccgcgaccgtctcgccgcgcaccgcctcctccccgacaagcacgacgactaccacatgatgctgaggtttcttaaagcaaggaagttcgattccgacaaggcaatgcaaatgtggtcagagatgctgaggtggaggaaagagtttggtaccgacacaatcttggaggactttgagttcgacgagctcaacgatgtactccactactatcctcagggctaccatggcgtcgaccgtgaaggccggcccgtgtacattgagaggctcggcaaagttgatccgaacaagctcatgcagatcacctcggtggatcgctacatcaagtaccatgtgcaggagttcgagagggccttcagggagaggttccctgcctgcacactgtcagccaagaggcacattgactccactaccactatactggacgtccatggtgtggggttcaagaatttctcaaagaccgcaagggagcttgtccaacgtatgcagagaatagacagtgactactaccctgaggcagtgggtttaagttgatctggaacagtgttaagggattcctagacccaaaaacttcttccaagatccatgttcttggttccaactaccagagcagacttatcgaagttattgactcaagtgaattgccaaaatttcttggcggatcatgcacatgcagtgagaagggtggttgcctcaggtctaacaggggtccatggaatgaccctgtcatcatgaaggagagatatttgctttcagttcctcttcaggcatgaaagggtatgaaaatccttctatggactaacagaaattttcatttgtagctaatacacagtatggaaggtggtagtactagagaaataaagcaagtttctgacggggacgaaagaagtggctcttccctaagggcagaaaacctgaaggcaagggcatgcttagtgacatatcaaatgctgaatctgagtcggatgttgatgacgttggtttaacagttgtccaaaagagtacggaccacagtttactaaccccagttcatgaagaagtcaaggggtcagatacttcgatattttgtagttctagcagtaagcatctcctagatacaactcctggagctcctcaggccacccctcaaatggagatgcccattcagttgacttgccgtaaatattttcctacctttgggtggctaaataatttagggaatgcttacattagtttgcatggtacatccgctggaaggactctggaaaaccttgctaccggactgatcacactcttgatcaggatatcatctttcttccacctttccgtctaccggcaagaaagatttatagaaaccgtccaaccctgtgccgcggcacaggaaccagaacctcaaagggaagaggacatgagtgcttgtttacgacgcctcaagaagctcgagtcactgtgtgatcacctcatgagcaaacctccggatatgccgaaggagaaagaacttgtattgatgcagtccttcgatcggataaaatccctcgaggctgaactggaggcgacgaaaaacgcgctgcaggctgcggtggaaaagcagatggaactggtggagacggtagaagctctgcagcaccaatcgaccagcgttaggaggagattttgctgttcataggagtagggttgtcgtcgtcgcgccgaagctgtctgggttagcaaataatgaacctgacgctgcccttggcatcttgtttttgctcgacttctgaagcgtcatgacgccaaacctgtcgctggctcggcacactgtatgcgcggatgcgtgtgaaatcgatcattttttttgtagctacactctggcttctgtgatctccagagcttgcaaaatgtcaaagctttcgctgccctactgctgcgtattgttgagccgtgtcatttgcccttggcatttcgaaccatccatagcgctagctatttttgaccgctcccctcccatttgagttcttgatcgactcccgcccgcgtgcaccggcgccaacctctgcccacgcggccgcgcccctccgcctccgcgtgtcactcccgcacgtttctgctcgcctggtagtaacccgaacgcgcattgccgcgccgtcaagggtcgatccgatcggggaggaggcgtgacaagagatgggtccccacggaggcattgcgctccgcgcagccgtactcgccgccgtccgcttcgccgccgccgggttcatctcaagtcag

SEQ ID NO: 41183 - DNA, 2817 bp, Zea Mays
cgtcatcacaattcacaggctgcacagcacacaaaccccgcgtaggggtagagatcacctcacccctcccgactccggcgcatccattcggtcgctgccggatgcgtgcttgacccggccatggatgactctgtccctttcaatgacctcggtccctccaagcccccgtcggcctctttctacgacgatatgttcgagtcctacttcaatcgcgcggccgaggcccccgagcccgcgcctaaggcttcttcctcgccgtcgacgccgccgcccgtgttcgacaagccagtcttcgacgacgatccttacacggccgatccattcgacgcgatccccttgtttggaggcggtggtggaggggaagaggaagacttgcacggtggcgtccggagtgcggcaaagccggagaggacggagttggaggtggtgggttttgatgaagatttgttccctgggttggctgggagcaccaattttcccatggagaagccggccagggaggtggagcgggaccgtcaaccagtggggttcgacgacgagttgatccctggattcgatggaagcatgaagccagcgccgcaaatggagcctgagacagtggcgtttgatgatgatgtgatccctgactgcagtggaggcacgagctatccctcttcggcaagggaggaacctataacgagacaagaaagtgaatcaatttcctctagcaaaattagcatgagcatgccagaagatcctttcgttactttaggtggtacacacaaatcgggatattcatctttagggttgttttcaaatcttctgaataacattggcatgcctagaaaggaagcggacacaacgcctgataataccagtgggatatttcagggttctgatatctttactgagtttccaaaagccatgccacccttttcgtttacatctgaaaaccagagtgatagaactgaaaggagatatactgaaaacataatcagcacgagtcactccgatcggctgcctcaggagaagacagtccaacaagcatcaacagaagcacctgccaatacattgactgagatgaacttccctgaagcatctgttgtccatgaagtacctgttaccactagttttcagacattgaacccatttgttgaggaagacgatttgttagaggtgaatcaatcttcacaaacgactaatgatgtgtggctaactgttttagatattgctttagtgacactacctacaagtgcgccacctccttcaaggcctccacctccacttgctgctaagaaaccacctactgaatctgtaactagtgaagcatatgcccatcattgtaatcaacgctaccatcactccatatgttcttcaaacacctctaaaacatcccaaattgatgaattggaagattttttcttgacaaagcctgcaaattctgccattggtcatccacaagttctaaagcatgaaggaaatgggcattatccatctgcagctactgcaagtttcatggactggactgagatgggacactgtaaaagggggaaccaaggggcatttgattctatgttcactagcagtcaatatcgacagccagaaatagatgagaaagcagaggtatgtgctcatgaaacagaaagtacagatgaagaaaagagattagagaatgaacaaatacaaagagaacataaagaagagcaaataagagcagaaagggagatggaagaagagcttgagagggaaagagaaaatgtgagacaaagggaacaagaggagcagaggaggcgtgaaaaagaaagagtggccaggcaggctgtagataaggctatacgggaggcacgcgaaagatcagctgctgaagcacgcatgcaagctgagaaggaggctcgtcaaagagcagagcgagctgcagtatggaaagcagcaacagaagctcgtgagagagctgcagtggaggcaaaggaaagagctgcgaaggctgctgcagaagctaaggaaagagaagcagcagaggctagagaaagggctgcaacagaatcaagggaaagggatgccaaagttgccgcagatgcaagggaaagagctgctagggctgctgctgaagctagggaaaaggaaacagcagaatttcaggagaaagctactgcagaagctcgggcaaaggctgagcgagctgctgttgagaaagctgcagcagaagcacggtggagggctgaaagagcagctttcgagagggttgctactgaagttaagcaaagggcttttaatgatgctagagaaagggctgccgctgcagctgcagctgaagcactggcaagagaaaatcagcaaaggagagcaacaacagaacctgaccttgagtcattctttggcatgccttctcgatcaagtagtctaccgagatcatacaacaacacaacaacgaatcctttcgatgttcaacctggcaatgctggttctggtggtgtaaggaggacaccttctggttcaggttttccctttactcagccttcatcaagcaatcttatggatggcctatcttctatatttggagcacctttaccatctgctgtatttcaagaagtggatggagagagtgaagagagaaggaaggcaagattggaacgacaccaaagaacaatggagcgtgcggcaaaagctcttgctgagaagaatgagcgtgacttgcaagctcagcaggagcaagaagagcgacatagaattggtgaatcacttgattttgagataaagaggtgggctgctggcaaagaaggcaacctacgggccttgctaacaacgttgcaatatatttccaacaattgcgagtttgac

SEQ ID NO: 41184 - DNA, 3692 bp, Zea Mays
gcagaaataactcctgatagtgctccaacagtttggatatctgctctggtattgcactaccctccaatgcttctgttggtctgagctcaaacatgtgttccacagcctctttacttaacagacccctcaactgcttgtcagacaaaggaatacaggaatctagttttggttgaattccttgcagctgcactgtctgcccttgatgacagaattctaacttcttttctgcccagtacacagacatgggactataaccttccagccaatccattcccaaaataatatcatagccactcaggggtaagaatttgaaatctgtatgaaaagtaatacccccacacaaccaaggacactggggtgcccagcagtcacaccacagtttcctaccatcagccactttaactggtaaaggtttaggcaattgttgtacattcttgacatctcccatcaaatgcagactcataaaactagctgaacttccagaatccaccagcaccaacatctgtttgtggtgtattgaagcccacaacctgatagttttgttggtttcactgccactcgcagctgctattgatacagctaacaccacctcctcatcctctggtgccacctgactctcacttccatcgacttcaatttctcctaccgcctgagaggtaatcgcccacatttcttccacaacatgtaatggcacactactggaacatgtatgatttgggttccatctttctccgcacttgaaacacaacccctttgctcttcgataagccttgagagcagcaagtttactatcctcagctctgtaactactatttgctcttcgcctctcatcactttggggtaatcctctatggctcaccactggaactgaactaccagccactacggaattcttttggtaacctttggacattccctggttctcaattctcctaccctctcttctacctgtccacacatcctcatgtaataaagctagggaacaagctgtatcgagattgttaggtctctgcatggccaccacagccctcacctcatccttcaagccatccacaaagcgtgctgtgatcatagccgacgtaagttgtccttcatgagctagcagttgatgaagtaacacatcaaactgttcaacatattcacttacagacccagtctgataaatatgatagaactgcctaatcaacaatccatgttgatctcttccgaaacggttaatcaggttagagcaaaactcctcccaactcatatgcctcaggtgatgctccacagactgtaaccaaaatattgccgatccttcaaaatgcatcacggccattctgatccacatctccctggctaccagatagaactcaaaataggtctcacatcgagtcttccacagcttcggattactcccatcaaaaactggaaaatccatgttgggcaccaatgatcctgacccttgtgaccaccctccaggcgaatttctatctactggatcataacgaaaaggagtttgggaccaggcttggttcatacctccatagttggtaaaatttcgccctccttccatgcctggacgccgattcggatcggggcgtcgaagctggtttactccactcgcagaatccaccatcggaggttcagatgatagagcttccactttactgcctccaccagtctcgccaaaactggttggcactcccaccggcctcttctcaaacttctccacctggatttggattccccgcatggtgtctgcaatctccttcatcttcgactcgacctccggcctccacttctgcagatctccctgctccgacatcacgcccttcaccactgtctccatgttccccagagcgccctgcatcaactccatccgccgatgagtctccctgtttccctcttcaatcttcgccaacaactgcgccaatggatcctccgtcttcgccggcgccatctcactcgccctcgcctggaatctcgtccaatattcgtggtggtgctccagagtcggctccgaataccaaatgttagacaacagccggtattctcctgaaccctgtatgcttcgtgttatttcagagttcagaacagagttctctccaggttcgtcaccgtttccagccgcttacaggagtatatatatatctccactctctttccccttttacaagacaagcataatctctagttaactactccactcaggtccaccaatcctgacattaggcctaatcactctgtggctgcgtcttctgggtcccacctccaccggccctggttctcctttctcccgctcagtgcacggaccgccagtgatgctgacaccagccgtcttcacacgagcgccaaagtcttggtgagtccctggtgctccatgtgtctcgaatttaaactctaccatacggtggccgcgcgcgtgatcgggctcgccagcctaagctttcggtcgctgtcctagatagtgttgtcctcgggttcccacgggaaaattaagcgtgtgcctgaacttgccatagatttggggtcgcgatagcgtcgtcgcagtcgtctgtgacgagttgccatggccgatcgagcggaggctcgtcagagttgtacgcagcggggtcggggttaaggttttgcaaaagaaagatagtcgagggacctaagtgaaactgtcagcgagacaaataaatagtggatcgggtcgatacaggtttagtcagaacacggggtcctttttgcaaagacgccagtgtgggcgcgcgggccatcgaccacatgccggtttggtcgggttctgggccggttggattgcttttggcccagaactgttcaccgctttaccttttcttttatccgtgagtttgtaaatagtgccaaaaatagaagaaaattgataaatcaatgggacaaattttattggatgtgttaaatcaagatctctggtgaagttggttgtaggatttttagagatgtcagtaaatattaagtgaattaagggtgatcttcgaaggactattggaattttagaaataagagttgagcaccaaaaatcatgattttttttggagaagcttgttatcagaagttgaacccttggaaaaaattggactatttaaatatgatttgcttagcaagctaattattgccctaaaaagaaaaaggacttcacctatgaaatgaggacacctagtagtttagtgaagtgataaagttgcttaaagagttttaagcttttggataataactaagatggattagttctctaggtttacctaagcaagttcaatttggtcacttttatcaagtgttaagttaggtagaaatatgtgtattgttgtcatatgttttagtttgtgatatttatgttcctcgcctctccttgtgagagtttgcattccatatcattacataagcatacatgtatttgtaattgacttgtaaaacacctagaagaagtggtgtttgaaggaggagtctactccagtggctgctgatcaagtggaggagccatctaactgggtattggatagagggatctgaagcctcttctctgcaacaaaagtaatcaggagtgttctaggtgtctctgtggctggaagatgcttctagtcttgaaggaggattagttaggtttaggtgtgagctttggaagggttctaccttcctagttttgtatgtacacgaactaaaccctatgaaagtgcgactagtgatca

SEQ ID NO: 41185 - DNA, 3422 bp, Zea Mays
tgcaaatcctgtcattttcttgttgcaagttgcatgctgttgactccatctggtcgtcccctattttcttttttttttctcaaatctgattcaaagacttcgtacgcttgctacttattggatgagctgggacgacatgttcattgaattcatacatcttcttgccttcgaaggaggaagaagaagatgatgagcagctaagaagaattcggcaacatctccatgaactctccaaaaatggagctttctccatggcttgtgttctccttgggtttccttgcgcaggctctcgtcatcttggctgacacgaatgcacaagacgcttctgggctgaatgggattcaagattcctggaacaagaagccatcaaactggagggtgggcactgacccatgtggagataaatggaacgggataagctgcaccacaagccgggtcacggctataagactctcgagtttaggattgtcaggatccctttcaggcgacatccagtccctgtccgaattgcagaccttggatttctcctacaacaaggacttgggcggtcctcttcctgcgtccatcggaagcctgagtaacctcgaaaacctgattcttgtcggttgcagcttttctggagaaataccgaaagaactcggacagctcaccaagcttagatttttatctttgaactcaaacaagttcagcggttccattccggcatcactcggaaggctctcgaatctatactggtttgatctggctgacaataagctctccggaggactcccggtgttcgacggcacgaatcccgggctggataacctgacaaatacaaagcacttccacttcggggtcaatcagctctcaggaacaataccgagccagattttcaactcaaatatgacgctgatacatgtgcttcttgacaacaacaacttcaccggacgcattcctcctactctgggccttctcaatacactagaagtcatgcgttttgataacaactaccagctgactgggccggttcctagcaacatcaacaacctcacaaaacttgcagagctccatctggaaaacaaccagctgactggtccactgccagacctcacagggatgatcgcgctcagttttgtggacatgagcaacaacagcttcaatgcatctggtgttccttcctggttcaccactctgccatctttgacctcactgtaccttgaaaacctgcgtgtcacagggcagctgccccaagccctgttcagccttcctgcagttcagacactgaggctccggggaaaccgtttcaacggcacgctaactatcggatcagactacagcactcagctccagctaatcgatctgcgagacaaccaaatcagccagataactgtcggcggatcacagtacaacaagcagctcatactagtcgggaaccccatctgcagcccggggacggggagcagcgagaaatactgcgcgtcgccggggcagtccaaccaggcggcgccgccgccgtacagcaccccgatgaactgctcggggctgccgccgccgtgcctctcggaccagctcgtgagcccaggctgcgtctgcgccgtgccctacaggggcaccctgttcttcaggtcgccgtccttctctgacctcagcaacggctcgtactggggccagctggagaccggcatcagagccaagttccggagtctcagcgtccccgtcgactcggttgcgctccacgatccgtccgtcaactcggtcaacaacctgcagctcgcgctggaggtgttccccagcggcaagacccagtttagtgagcaggacatctctgacatcgggttcatactcagcaaccagacgtataagccaccctcagtattcggtccgtactattttcttggccagccgtacagctttgccaatgtggtgctaataccttccaaatcgaaggcgaacaaccgcttacctctgatcgtcggagcctcggtgggtggagcggttcttgttgcaatagttcttgctcttgttaccatcgtcgcaaggaggaagaagagaccaaagcagaacgaagagaggagccagtcttttgtttcttgggacatgaagagcacgagcggcagcagcgtcccccagctgcgcggcgcgcgcacgttcaacttcgacgagctgaggaagatcaccagcaacttctcggaggcgaacgacatcggcaacggcggctacgggaaggtgtacagagggaccctgcctagcgggcagctggtggccgtgaagaggtgccagcaggggtccctgcaggggagcctcgaattcaggacggagatcgagctgctctcccgggtgcaccacaagaacgtggtcagcctagtgggcttctgcctggaccaggcggagcagatcctcgtctacgagtacgtccccaacggcacgctcaaggagagcctcacgggcaagtccggcgtgcgtctggactggcggcggcgcctccgggtgctgctcggcgccgccaagggcatcgcctacctccacgagctagccgacccgcctatcgtgcaccgcgacatcaagtccagcaacgtcctccttgacgagcgcctcaacgccaaggtctccgacttcggcctctccaagcccctcggagaggacggcaggggacaagtcaccacgcaagtcaagggcacgatgggctaccttgatcctgagtactacatgacgcagcagcttacggacaagagcgacgtgtacagcttcggcgtgctgatgctggagatggccacggcgaggaagccgctggagcgcggccggtacattgtcagggagatgaaggtggcgctggaccgtaccaaggacctgtacggcctgcacgacctgctggacccggtgctgggctcgtcgccgtccgcgctggccgggctggagcagtacgtggatctggcgctgcgctgcgtcgaggaggccggcgccgaccggccatcgatgggcgaggtggtcggcgagatcgagcgggtgctcaagatggccggcggcccggggcccgagtccgcgtccaactccatgagctacgccagccggacgccgcgtcacccctacggcggcgacagccccttcgaccacagcaacagcgggttgccgtccgcgagggttgagcccaagtgaatctacagcgcgcgccgcgagtacatgcggaaaagcttcactcttcaacaaaagctagctctgaatgtacagggtattgtaattattagtgttataattttggttactatgataggtgtgcgattggattaagaactgatttcttgataacgattgtttacatgataattttggttgctatgtatttaagatagatatgcaattggattgttgacatgctaatatatttcatgtatgtcatcaaatacacaaatgattatttatgttcaaatattagacaatttcac

SEQ ID NO: 41186 - DNA, 2202 bp, Zea Mays
gaaaatttctttgcatgggtagtgtgtttggctaattctctcccaaaatgtggaagaaaataaagggaatactgtgcttgaattgcagcaaagatctatagaattcagttccattatacgaagacatcaatcgatgaaatcatctttgcttgaacggatgcctgtattggatgaagctaattatttggtgaagagagctgcttctatacaggctgcagttccatctgtaaattctgctccagcagtcacttctggaggcccatttaagcttcctaatggtgttggaaagcctgcagctcctttagctgatttgcttgatttgagttctgatgatgctccggtgactacctcggcccctacaacagcacctaatgattttctacaggatctgttgggcattggcttgactgattcgtctcctataggatcggagaacatccgccgcgactccatgctccaggagatcaagtctgcctaccagattcttgcccacaagtaccatcctgatatgaataagagtcccgaagcagaagaaaagttcaaggagatcagtgctgcatatgaggttggcggtgaagagcaaggggacagataagcccaaaggcagcaaggggaacgtcgacaaggaccccaacaagcctgactcccaacattttttgtccgccggtgctgtagcggaagcccaaaggcagcaaggggaacgtcgacaaggaccccaacaaggctgactcccaacattttttgtccgccggtgctgtagcggcggcgctggtgagctcccccatgctgggctctgggatgctcccaggcgccgggttcggcgagacggggactgatctggtgctgggctctgggatgctcccaggcgccgctgccttgcagttcctcggtcgattcaagggaatattatcagtggaagagactggtgaatcaaaggccgtcaacgctagatggaggcaaagtgcctgctgcattgggccaccatgtttttggtgcgggctgttcctcacggaaccaacatatctacatatatttttcatcttctcatcaagggagtatatgggtcgggagcaaggttctacatgacctactagggtatgtaaaaattatggaagtagggccacgagatggtctacagaatgagaaggacatcgtgccaacacctgtaaaggttgagcttatacgaagattggccacatccggattacctgttgtggaggcaacgagttttgtatctccaaaacgggtacctcaggcaggactgaggctgtttcatcctcctctgctgcggggtgggctaggtcgtcaccatggcgtcactcgtggcgtcttgtgcagtagggacgacagcagggagctgtcaagatgggttacctcaagatggacgaggagttcctcaagaggggcgagagcgggggcacgtgctgcgtcatagcccttctccgaaagggtagactagtcgtctccaatattggagactgtcatgtggtgctcagccgagcagggaaggcaaaggtgctcacctctgaccatcgggcctcccaggaggatgagaagcaaagaattgagaatttgggtggatttgtggtgaattaccatgggacatggagagtccagggctccctggcagtgtctaggggcaatggggatggacacctaaagcagtgggttgtggctgaccgagagactagaacgctcctcatcgaccaccagtgcgagttcttgatacttgcttctgatggcctatggggtaagattgataatcaggatgcagttgaccaaaactctaggcattagcactaacagagaccggtggaaggcaggactttgctgcctaaagtttccatgagtcagcgctatttttgggtgtttaacattcattctttgtcatagaaccatttgttatattattagatgtaattagatctatttgattcattcttcggaaatatttattgagataatgcggggtgatctctcgcttcatgatccattgactgtaaaaggcgatttgcctatgttaatacaatgatatattctattcagagaaaacttactgtgtttttgttttgtatcctttttaatcctaaactgagaacactaaccgcatgtgtactaaatacaatagacaaatctcttttgaacttctaactttaaatgaatagctcaccaaattacgttctagagtcagctccataattt

SEQ ID NO: 41187 - DNA, 2080 bp, Zea Mays
tgcaaaaatatctttcacttgtcgctgtctcgtccagcttacatttcttttgacccatagcagaaggcattggaagcgtggtttctttgtcatcacctgaagtgtgcgatgtgccggattcggctgcttctatcttgcagctcagaaacatgtggtcagtttccctccactccgtcggtttttttttttccttccattatctgcatgagcagataactccaaacgacgggctgagaggtgctgtgacactgcaggcgataaaggtatataagccaaacgcttttgcaaactgggagcctgggatcaccaaatggaccgtgttcttctgagctcccacttgccatctcacgctcatgcaaacacgaggttgcagcagggtcctggtggcctcaacagtataggatttgcagtcataaaaaagggatgcttgaagttaagatgttacgcgatcggcgatgaactcggtggtccagggcgctttatgacgcagagggtgatccagacaaacctaccgatgggttctcctcgatcgaccaggctataggtgctttgcgtgaagggaagatgatgagaacggcgacaacgaaggcgaccttgtgatggcggccactctagtggaccagaagtcagtcgcattcatgatcaggaatggctctgggattatctcggtaggcatggaggaggaggacctgactagactgatgattccgatgatgtcccctatcacagaaatcgaagatatcacggctgctgcttccacggtgacagtggatgccagggttggcatatctacgggtgtgtcggctgcagacagggcgaagaccatcctcactctagcctcctctgactccaagcccagtgatctgaggagaccaggccacatattccccctcaagtaccggaacgggggcgtgctgaagagagctggccacacagaagcgtcggtggatctggttgcgttggcaggtctccgtcctgtgtccgttctctccaccgtcatggaccccagggacggttcgatggcaggcgtaacggttctccagcagatggctatggagcatgacatacccatcgtttcgattgctgatctcatccggttagtatatcctaaggtataggagaaagcgggagaagctggtggagctgattgctgtgtctcgcttgccgacgaaatggggcctcttccgagcctactgctaccagtccaggctcgatggaaccgagcacatcgctgttgtgaagggcgatatcggcgacggcgaagaggtcctggtgagggtgcactcggagtgcctgacgggggacatcctcggctcagcccgctgcgactgcggcaaccagctggagctggcgatgcagctgatcgagaaggccggccgtggcgtgctcgtgtacctccgcggccacgagggccgcggcattggcctgggccagaagctccgcgcctacaacctccaggacgagggccacgacaccgtcgaggccaacgtcgagctcggcctcgccgtggacgcccgcgagtacggcatcggcgcccagatactccgtgacatcggcgtgcgcacgatgcggctgatgaccaacaaccccgccaagttcatcgggctcaagggctacgggctcgccgtggtggggagggtgccggtgatctctcccatcaccaaggagaaccagaagtacctcgagaccaagcgcaccaagatgggccacgtctacggctccgatctcccgggaagcctgccggagttcgccaacccacaagaggcccccacagaacaagacgacgacgataaccaaaactgataaaaaaactatacggtgtcgtttttttaggaaaagataccaatataaccacaaattcttgtattccactgagaacgagtattgcagagtatttatttatcaactgcaaaattattaagtataatagagatacaaacttttatcaacgcctcttttacggaggtaaagcatgtttctccctaatatttattagagcctcatgtaagagaagcggatcaagctctcggccaggtactttccgtctgattggatgaccgcgcccatgcgtacaatctcg

SEQ ID NO: 41188 - DNA, 1949 bp, Zea Mays
ctagaaatcctaatgattcagcagcacacctgtccgcctagccgcctacgcgtacacagaaaacaatttttttgtccacacacgcgcgcgctccgagccgcagatccgagctagcgcggcgcatccgacggccacgacagcgcagtgccgtcctccgccgccaccgcttggcgattgtccgcaccccaccagtccaccacctcccccacgagcgaaaaccacggtccacggaccacggctatgttccactccaggtggaggctgcagccccggtttcgcaagccgcgccgtggtttgcttgcccacaggcggccaaaccgcaccctccttcccgctcatctcgctttggatcgattggtttcgtaactggtgagggactgagggtctcggagtggattgatttgggattctgttcgaagatttgcggaggggggcaatggcgaccgcggggaaggtgatcaagtgcaaagctgcggtggcatgggaggccggcaagccactgtcgatcgaggaggtggaggtagcgcctccgcaggccatggaggtgcgcgtcaagatcctcttcacctcgctctgccacaccgacgtctacttctgggaggccaagactcccgtgttccctcggatctttggccacgaggctggaggtatcatagagagtgttggagagggtgtgactgacgtagctccgggcgaccatgtccttcctgtgttcactggggagtgcaaggagtgtgcccactgcaagtcggcagagagcaacatgtgtgatctgctcaggatcaacaccgaccgcggtgtgatgattgccgatggcaagtcgcggttttcaatcaatgggaagcctatctaccactttgttgggacttccaccttcagcgagtacaccgtcatgcatgtgggttgtgttgcaaagatcaaccctcaggctccccttgataaagtttgcgtccttagctgtggtatttctaccggtcttggtgcatcaattaatgttgcaaaacctccgaagggttcgacagtggctgttttcggtttaggagccgttggtcttgccgctgcagaaggtgcaaggattgctggagcgtcaaggatcattggtgtcgacctgaaccccagcagattcgaagaagaatttgtgaacccaaaagaccacaacaagccagtgcaggaggtacttgctgagatgaccaacggaggggtcgaccgcagtgtggaatgcactggcaacattaatgctatgatccaagctttcgaatgtgttcatgatggctggggtgttgctgtgctggtgggtgtgccacataaggacgctgagttcaagacccacccgatgaacttcctgaacgaaaggaccctgaaggggaccttctttggcaactataagccacgcactgatctgccaaatgtggtggagctgtacatgaaaaaggagctggaggtggagaagttcatcacgcacagcgtcccgttcgccgagatcaacaaggcgttcgacctgatggccaagggggagggcatccgctgcatcatccgcatggagaactagatttcgctgtctagtttgtgatctggcctgggcttggggttaataaaagaggcaatgctagcctgccctttcgatgaggaggtacatacacgctggcgatggaccgcgcttgtgtgtcgcgttcagtttggcttttgccaagcagtagggtagcttcccgtgtcggtaattatatggtatgaaccatcaccttttggctctacatggtatgaacgtaagatacaaattccaactacctctagctcgcttgtgtggtatctgtatcagtattcatgtgtttgtttgcttatgtgtttgtttgcttgtatttgctggtgcttgtatcgcgggatgcaatgagttgttgtttggttgttgtcaaccaggctctatgtgtgtgtgcgaggtgtgtgtttggtta

SEQ ID NO: 41189 - DNA, 555 bp, Zea Mays
cctgttttcgcttgcatttggggccgctcgtcagtcgttgctcacgtgggtgcgggattgaagtgtcactgcgcccatggccccaccagtcatcccgttcgtgcgcaaacagcccgcgcaacgcgcgcaccgtgcgtgagtccgtcgccgcggactccgtgggcgcgagctcaaccacctccgcggatctcgctgctcaccccggctcggactccgattcctccggccatgctcctcggggtataaaagtggagccgctcctccccaaacaacggcgcgcagaaacaaagggagagcaggggagaaaagaagaaggttgccgccgccgcgtcgtttcctcggaacgccgtcatcctggctcggagtagtcgcaattgaggttcgcgggagcacgcgggtcgtcttcaggcttgccgccaggtgtggcgttctccagaatccagctaattcgtcgccggagtgtttttcgcggcggaaattgtggtcggccgtggccggctgttttgggcgccagatcgaccgtgaggtcacgagaatctgaaaatcaccctggta

SEQ ID NO: 41190 - DNA, 788 bp, Zea Mays
gctagaaggtttttaacatggatgctagaaggtttgttagtgcaatatattcaagcaagcacgtgcaaccaatcacacaaatagtgatgaatttgcccaatgacgctgttgaatttttagctgaggatccagagcatgacttccatgagaggataaatttaacgttaggcgagaacatcgacactgttgaaatgcacagagtacggcttgttgcacccggaaaatggatgatatgtgcaacttttactcttccacagtcagtggcgtctgcacagccgaattacattacctgttgattttttgtactctctccgtcttaaaatattggcaacgactgttatgcaagcagtccttctgtgcaagcgtgcaagcaaaccatatgatccattagattacgatccaatcacagatacaaccatgtttgttagaggttttttataaagattattgagctgttggtggaagggtttaagtgttaaatgtgacatacggttggatcacgatctaatggatcaaatggtttgcttgcacgcttgcacagaaggactgcttgtatagcagtcgttgcctaaaatattagtcgttttagctcagctctggatttttatgtctatatccaaagacatgtaaaacatataaatcaaatgttatatgaatttattaattgtcgaaaatgaattttaatttgggatagagggagtactattcttactgcagcccctcgtatcttctgtactgtcgtcgaatacttcctatcagattatatagatgatgcccttgatcatctc

SEQ ID NO: 41191 - DNA, 2289 bp, Zea Mays
acttttttttaaagtgttgatcttttatctctactactctatatgtccttattgtaggcgtgcacacccgtgttctgcctctcgacgcctgtctgcccgcgccccccgcttgtgatgcccatctcgtctccccgctgtggcagccgccttcgcgtccgccgcgagatccctccgcgcacgggcgcgtcccccacaaaccgcgctccgtgaaatccgcactcccctcgccgcctccccagcccgcagcctctcctcaacctccctccccaaggagctggcggcggcgcgactgcgtcgggagaggacgcagaggacgccgcgcgggggctgcggcaggagctcgactccgagcaggcctccccggagatggcagccagatccggctattgagccccctaaccgagcggatccaagttgctctacacagcaagtctatgaggaaggagcaaaagaagttgctctttcagttgtcagcggaattaatttaactcaagcatacttgcctatggcaaacaagcagtggacttacacaatgatcgaaatgacagagtatactgttcgtgctatcggtttggaaagaacatgtggaaagctaatctcggatcttgcttccttcaggtacagacaacccttgtttttataggagttgtcagagaattgttttcgtgattaaacatgtgtgtttgtttagtggctggtattgttatcatatacccttgtttttagttctatacatattccttaagcatgagcaaattgggggcatttttagtgaagcaattactggtatgtacatgcaattactggtatgtacatggttaatcaaataatttgcatcatggatgttgttttagtgattaatcactcagaaccgatttcctgatgaactggatacactgtttagtgccagctattatttaagcacaagaagtagtcatatacccttgtttttatgtctgtacataccacctggaaatttacacatggggccattttttagtgaagcaattactaaacctgtatagttctggtggctgctataatttttcctgattaatcagagaattgttttagtgattaaccatgtgtgtttagtggctggtattgttgtcatataccttgtttttaggtctgtacatactacctgagcatgaccacatcagccttatgtttgaacaatttcacacatttacatttgtgaatgtgttgaccgtaagcatcatctttatttaaatcagaaacttggttttacaatgatgtctcattgaagttcttgcttttccttgtttgcaaatctgaaatacccttgtatgttctggcggaaagaagacccaaaggaccttgaacagcaaaatctaaggtttcaacattgcagacacacaagagtccagcatgcgccaacgctcctgcaggttagtccgagatggcccttcattttcctgtttcaatagataaaaaaactgaggtcgcattaaaaaactgaagtctattcaacaaatcaccaaccatgatttttctgaggcacatgggtacaatcagcacaaactccatttgccaagaaaaggttataatgcattcacaccaataaatgttcgtttcacaagacataagcaaagaacattgaggtcgcattatctaaccttttggtgattgcagttgatgcttcttccagtagtttgtgacagattgctcaaagaaaagcaagacagctcgccaatcctagaagtggaaaaaaacaacatagaataattagccagctacagggagtaaaccattaagagaagaaacatcgtaatgccatgtttccaaatgggcacaaagaaacttcaagcacctctagacggaagctgtctgcactgaagatcaggacacgaatatcgcgagctttatcaaggctcgccttgtgcggaaggtgtatttctgtgagatctccaagatgaagcattagggggtcaatcgccccagattttacatgtagctaacttagtagggcacccataatccataatttattctctgtagttgtagcagcgacctagaggtgttattctgtagcacattgtgtaacatgtaggagagagataaacacatatccccattctttctactgaaacaccagaaatagttgctcttgctccataattcattaatgtgaacttctgaagccatgccaaggtcttatattgatcctctgttgtcatattgataaaaatagggtatgtaaaaccttttctcataacagtttaacacatattttatatataagttatcgtaatattacatgtttcc

SEQ ID NO: 41192 - DNA, 907 bp, Zea Mays
ctgggcatgagagccacatgtggaggccatgtagtgctggtaccattgaaaatactctccactacatatgggctgaactcagagctgtctgcctttgatcagttgcactagggcttggttgtgtgaagtctctcccctgcccttgagctctaactcgtggccaccgtatgagtgaagtggtagtgttcagcctgagtaacctccctccccaaacctgatttgctcttgtgttgtgtgccatctactcggcttggtgttcatcacagccgattccccccccccccccccccccccccgccgcccgccgtcgtggctagaacgcttcaaagcgtgcttgtgacatcgcggcgcggcgctgtgaaccacctctctattgaccgtcaactggtgctttccccggctgtcttcgcgcgagcaccgaagtgttggtgagttcctattgctctcttgatgcttggttggagctctaccgtgcggtgttcgcgggatcggacttgtcgagctgtgtttgccaccgccatcgatagctcagttttaggatctccataggtcgatttagcccctagccgtggtcgccattgttcgaggattttgtaaaggtcctcgccatcagcgaagttgcaccatggcggccgttcagtcgccggctcaccggaattgggcacggtggagtcagggatctgggagtgggaatggaaagaaatcgaagggtttaaatgagtatgtcagtgaaacagcgcgtcagtgacttcgactcgagtcggattgttcaaagcgtgggggtcctttgcacaaaagcgccagcgcagacgtgggctcccggctgcagaccgactctgcccgatgctaggccgcagtgggccagtagcccataaagaaatggtttttccttatttatttagccgag

SEQ ID NO: 41193 - DNA, 683 bp, Zea Mays
tttagatcagaagaccttttgcaggctgcgtagtgagctaaatgtcttagattcgcggaacttggattgatgtgtagcatacatgtgtattatgctttgatcatgttcccttatgcattttgtttatttatggtgctcaagttgtacaaactctccccggacctcaaaagtacatgtgtgagtgatgcacatttttagggggagatgtgctacaacttgaccctttgagactaaccatttgtttgagcttgcttgatttagcctcaaaggaggattgaaagggaaaaggtgaacttggaccatgcaagacttccactgcactctgatgagagggtaactcactccaagttcatctccatattcttattgcctttgtactcttatttgaagattttggtgaggcaatgaggtttaggggccaagattgatcccgttttggtgcttgataccaaagggggagaaaataaggccaaagcaataaatggatcagctaccacttgagaatattgaaaatagtagaatagagcttttggtttgtcaaaacttttggtttgtcaaaactctcttgttgtctcttttgtcaaaagttggcttcttgtggggagaatagttgattatgggaaaaagggggagtttttgaaatctttgatcaatttctcttggaacaactctctttatgtctc

SEQ ID NO: 41194 - DNA, 1991 bp, Zea Mays
ctacctctcccgtcgcacctcgccctctcccttgccctgccccagatctcggccttcagtcctcgctgccgccgcgacttgctcgccccgtctccctccggccccgcctcatcgcggccgtggtggccaaggaacacgagctcattggaaaacactcttaaataaagcttccaatgaacaagacaggagctcgacttcgcctagctccgaacaagcggtcgacgaggcggaggtctcgcgtcctgcggatggcaaccgatagtgaagcctcgaaggcagctgaggttgtggttgactggcataaacaggacaaaaagaggatgctccatgcagtttaccgtgttggggatctggaccgcacaatcaagtactacacagaatgctttgggatgaaactgctgaggaaaagggatgttcctgatgagaagtacaccaacgccttccttggctttgggccagagaacaccaactttgcagttgaattgaccaactttgcggaggtctcgcgtcctacgtgcgtcgcgccgttgcctggctccgtcctcgccgttcctctgtagaagctggccgctgaccctcgccgtcgcgccgttttttattagatgaagaatgaatcaacccttgtagaagctaaagatagaagataacactactctgtttttgaatgtctgaagtgtaattttgcagccttgcaactataaaacaaacaatgtatggcttaattattgcagttgcacagtgtgaagatttaaaattgaagtgctatgaagagatggataagaggaagaaactttataatattgttcaagagacaaaaggaaattatcagggtttttttgtcgatgccgacccttaagcaaaaatgaggtgtcatcaagcctgaatgcaaatggtggaacaactaaaaagacatttaagtttgatagagtattcacgccgaaggatgatcaaggtgtgggcgtctccggcggcccgactatacgaagcgagggcgtatcggggctaaggacacgaaaggccaagcgcacagggcgtacggcagtaagcccgcctgcaccgcaccagaccgtcacccgcgacgtgcccatgtcatgacgccacggtggcggcacgctgacccatcgacgtcaccctcttcctcgcttccgctcgacagcctccagtttcctggtcagtcttcgtgccgcctctctgccacacaccgtctctcaggtatgtactgtattgagtaaatacatttgtactataataggttactcagaccttataattttagagaaggaagctggtgatgagctgatcaaatttctctagagaagcattaaaacaaatggttccagtgacagtggggagcttgaagtatttcatatgtctgctcttaaattgggaattacatcttttagggcagcactcactgatagaagagcccttaagaagataattcagaacgaccattttaagataaaagatgtcggtgaaattgtaccacttgttagaaactggggtttaagataaaattgcagctagatatgattgtagtgagtgctttgaggaaatcatggagggctaattacagttacttacaggtacatcctacctggagctttaaaaattgtgtttcatcgcccattgatcaatattatccatcgggttatcaacgtcatccgagcctgtccaatcagagatggaatcaccacccctcacagttgaagcgaccgcttttaccgagaaaaatgatggacatgactttggaggatataatcaagatgtgaaagaaaaagaatcctggaggcaagaaaccccctaggcggccggtaaactctaagtctgaaggtttagggttttcatgctctcgactctgatagctaactcagaactgatattcaatgtaaaatattcagtgtgatagaaaaagaaggtgaacgttggattactgccatcaaagcgacaaaagatgcataggctgggaacatactttcctgttgtaattg

SEQ ID NO: 41195 - DNA, 2238 bp, Zea Mays
acgtactctgtcaaacgatacgccgcgatgcttccagacgagcgccatccccttcctcgcctcacacgccgtcctgttggtcgtgcctctcttcaacctttttttcttgagcattagcgagagccccttacatggtgcagtgctagcatcgttgctggcgacctcggtgaggtcggatctgcaaaggttgcagctagcgcgcctacactacatcaacatggtgtggcatctcctttcgcagatccccaacatgctacgccgccggctgcctcattggaactcctgtgcaccgcttgcctttcttctcccattcaacccgcaggcgttccctggctcaatagcgcaactaggggatgtccgccgctacctccatataggaaacgacagatttagattttcaggtgatgcgtggtcgggatcccggatcaatcaaaataagtgtgaaataagtgtgaaatttgagaggctgttgaacttccagatcaggtaccaaccaaaaaaagtgacccttttgacggcgtattgcgtgggcaaggcatgccagtgcgacaatagagaaactaacggggagctctgttcgttctgctgattgcttatgattaggctcgcagtggtggtagctgggagagcttgggactggccagacgcgaccaactcacccatgtaataagacaacttttatacatagccgacagtacgcaacctcatgcgcaagatccttaatgaaaccaaagagctgcagcagataaccaacgacaagcagaaaaatcaggttgtacgcatccaacattttactttcatatttgctgaagatgtcaacaaacaaaatagacaagcagcccagacaatggagatgatgtatacgataattgcagatgagttcaagtcaatggacaataaggacatgcgccctgaagattacttgaacttcttttgtcttggaaaccgggaagaaccaccatctaatggcagcccagaatcagagaaatctacatataaaagtgcagagatagtctgtttttgcattttccttattcttaagggtatggcttagctcaacccttctgattacaccaaaactgaatatggttttggcgcacggaccttatgggaagctagagaagcatttgaagacgcagaaattactcatgttgacgatacagtagatcctgttagagacatggaaactattagtgaagagctcagactaaagttttcgttggattttgttgatttacaagatcagctgtacaacacttaaaccttttttcgacactattctgtttctattttctgcaggatatagagttcatgaaaaagaaacttgaggaccttgataagccaatgaagaggaggaatgataagctgctcaaaattgagcatgaattatattgatccagcacaatgccgaggagactggagactaaacttggaggtgctactgaaggatgtgactttgagtcaaagggtagcacatggagagcttgaattgaattcaagcttggatatgattggaaaatatttgtattagatcacctagaagggtgattgatgcttgttattggccaagcagccaaaatctatagtgggaactcctgcatacattgctcatgaggttcttctgaagaaggaatacaatggaaaggttgctgatgtgtggtcatgcggagtgatgccatacgtgatgctgacgatcaccatccctgagataagaaaccatccatggttcttgaaaaacctcctagctgaccaaatggatgacaatacgatgagtaagcagtacgaggagcctgaacaaccgatgcagagcatgaatgagttcatgcagatcctggttgaggcgaccattccagcagttggttcacgtggactcaatcagtttctgaatgatgacattgacctcgacgatgacatggaggacctagactcagatgccggtcttgacctggaaagcagtggggagatcgtgtatgctatttgacaacattgaatactttgttgtgtcgtaggttaccaagataattagagacaaggggcaggttgttgtgcttgcaagtatctgttgcagctgttgttcatgcctgatgttgatgcctcttttcatactgttgtgtttggatggtgtaccaccagtgttttacaacagtttggcccttggaattgctattgctaaaacttggttcctctgagaagaccttttgtttttgtattcccagtcgagggacggtgaagtactta

SEQ ID NO: 41196 - DNA, 755 bp, Zea Mays
ggcaaatcgacacaagcaaatgataaatgtgtcatctatccatcgaatggtcccattccattccaagcaagcggtccaggtgggagaggaggcgccacacccagacgagaggcttcccgagtccaccgccagcacgagtccaccgccggcactttgactcggagccggagattcttgcgaggaactggcagggatctgctgcccatccgcatatcggacggttaattaagcattccaatcctcagccatggccgtggacactactcaaccggagtactggctcaactggaggttcttgctgtgcgcgctctgggtctactcctgcatggccttggcattcttcctgattaagaagtacgagggggccagttcaccggacagcaatggcgatgacggtggagacagagaagaggcgttaccacgtgtcagacctggtgttgtttatcttgaagattgctggaagacatgccttgagggtatccaccctggctggctgctggcatttcgcgttgtggccttcttcgttttggcttcgctgctcgtggtcgacatcattactgatggatggagtatcttcctatactacactcagtggacgttcttgcttgtcaccttgtattttggggtatgtagtttgccaatggaactttggcttgcgttttgttttggttatttgtcacttttgttgttatacttaaccttgagtttcagtaactgacactgacatcacatctcactgcactcctgcaacatgg

SEQ ID NO: 41197 - DNA, 819 bp, Zea Mays
ttagatttatatttgctagtcgcataagacagccaaagcttgcatgacaaaaacgtgaatgccataaatccgactcatcagaaaaatgaacagaattcacgagtttattacacacatcatgcagtgataagcggaacaagcctccgcagtcatatcctttaccaacaaaaataccatgtttagacacaacacatttattagactcaagaacaactttgtagccatctcgacatagcatagaagcactaacgagattcttcttgatagagggcacatgctgcacactcttcaatggcaccgtctttcccgaagtaaacttcagaatgaccgtaccaacaccaagaacatgagcacgcgacccatttcccattaacaaggcgccagacctcccgacctggtaggaggagaacatagaggcatcaacacacacatgaatgtttgcaccactgtccatccaccactcaggtgaattacagactgaaagaacaaatggtaaagaattaccatacccagatgttccaccttcagttccagtggttacaacattagctgatttcttgtattgagtgaacttgcgatcagggcactctcttgcccaatgttgatcactgccacagacaaagcaacctccctttcccttgttattgttgttcttctttttaaactgtgctgtatgaacaggtttatttgcattctcttgtttgttctagtttttcttcttgttaaacttgcggaagtttctcttctgcaccacattagcagtagaggtctcaacaccttttccactgtcctttgttctagccctttcctcaacatcaa

SEQ ID NO: 41198 - DNA, 2154 bp, Zea Mays
cccaggcagcagttacatttcacctacaaaacacaatatgtttaccagacgaattgatatctaggctatttatgtggttactaattttgactcctctaagacatatttacacagggttggtcgttatgggagatatgggcaccttggtttggcagtgaacttgaccacttacaaagattgtttcaacttatatagtattgataaaaaaaacttggaacggaaattaagacaatacccccacaaattgacctgtttgtatactgccaatgatgatagcgacagcttcatgagcgtcaggcacattttatttattttgacctgtttgtatactaacttaacacaagcttttttgtcaataacgtgggattcggaattttctgagctttgtgtagtggaggaggaggagaggcccatgtcggtggagctggaacccatcgccagcgagcagcagcttaactaggtccttggagaggcgtagcagctccagctcctcatcgtcctgctctgagcatcaaggttcgacaaccaacatattctcgtgtgaggaaatggaaaagtgatgtcttgaggacattttttatcttttgatgttgataattgttcatattattatggttcaacaactcctagcaccaagtcattctgtatgatctgttaacttgatagaagttaacatcatttgattttaagaaatgtaatcatatttcctgattgctcagaattgacttgttcatcatttttcaatgtccctaattggtattagatttttgtgatcttgtgtcatattctgtgatcaacaatgtacaatttgttgaataggctgttgttgaaaaagctgtatattatgctcttgtatggatcaataggctgttggctgtcggtcatgacatcgccatcaagacagataggaaagttatattttttcctaactatatatgctcttacctattcctgttctccatagtacaaaagatgatattgattttgtggctggtttcatttgttggaatgctcttcaactttcttacgctcatttacattgtgatgggaatcgtatatccataaatagatctggagactggagcagtttttgttgggataaactttgtactggaccggagcatcttatctctggatgtgagtgccatgaaagtgatacccaacaaacaactaactctggaacacctttggtatgtcgggtaggcgcaaagccagcaagacaacaactgcttgagcagctttggccagttttgcttgccaccatgaatagccatatgttggccatcacatggtaccttgttcgtcccaaactagaccagagcattacaagcaatgactgccatatctaaaattgaaaacatgtgcggcttataagtatcctaaatttgctccacttctaagtatccaagatctactggttttgatgcgttccattgcttgcagcttttctctgcggtaaattgctggcttaaatgcatgctgcttgaaccctataatcagatagaccatcccgaatgcaagtcaaggcctgatagtggtctttctgcaattacagagctggaccctggttatataacaggtttcaggtcctctctcttcagtatggaaagaatgggtcaaatggtgtgtagagtttggcattgaagctaatgcaattatcgctgttccgtatgattggagactgcccccatcaatgcttgaggagagagatctgtactttcacaaattaaagtttgtaacacttgcctcaacttgttatgaagcaaccaaatgctatacatctgttagcaggatcagtaagagttaatggcccagtgacggattcaaggtatcctgctcaccaacagatcccacaagcatacggttaccgccaaatgcctgcaaggttggacagtaccaacccatcacaggccatgggaggttacacgctgcagtcacagaaggaaacattatttgaagagttgccattttgaagagttactcgaatccaatattttgctcttttgaattccttggtgtacactggcaaatattagcatatttgaagagttgccatttcgatcatcatcttcatttgtactttttgggtcagatctaataaagcatcagcattaaatttacaatgatcacctaaatccatggtttttattgcct

SEQ ID NO: 41199 - DNA, 331 bp, Zea Mays
ctgttggtcccggttttgagctcgtcgtctagtacctagccactgactagcgctcacgtcggccacacaaaacctcgacgtcgaacgtgctgttctacgcaagacaggcccgcgtcatcatcattcttatcgtggattgccgacgtcaatcgcctcgacaacaaccacatccacgactccgtcgttccaataattttgtcgcactgcccttcaaatctgagtccccgttcgtaggatcgtcattgacctcgcaactttagctcgagttaattatggtgagttgatctgttatccccgtcaactaaatagatggttggattaaatagatgca

SEQ ID NO: 41200 - DNA, 2435 bp, Zea Mays
ccgatacacaacccaactcccgcacgcatctacccccaccaccagacgacctcccccctcccccgcattctctcacgccgcctgcgctctccccctcgcgagatagacaaccctagctcccgtctccttgcttaccctcctctccaacccctctccgatctctataaaagacccgaatttcgaattccccctcgaacccgcgatccgcgctttccttcccgcccatttcggtctctgattcggcgcggattcgctgcgcgggagcccccgaggttgcgtgcgtgattcggatggcggagccggggctcgagggcagccagccggtggatctgtccaagcacccctctggcatcgtccccacgctccatggcatattcctgaaatgtgtgggcagctcggtcccgttgaaccgggggatgaagccattccttgcggccatctctgtgtcaccaggtgcgagcgcattcaaacggaggggcacatggggaagcttcgagctcaaggaaagcggaggaaatgagatggatggagaatatgcaaggcactggatgagcgcggacgtgaagagtagggtgagctccagcgtgggaaggagcgggtccgatgatctcttccggccatatgagatctctggttgggcaggttacgcatctctggtggcagcaattctgaaattgcacgagactgtgcgaatggattggccaaactcttgggcggctgtagttcccagctcttctgtgatgttgcgcgactgcggtacaatgttgaaaatcaggctttgctcacacgaagaaggcaacaaggataggtgtagagacaatggctggtggtgccatggtggcattaatacaccagctggtttcatcccaccaaatccttcaaactaaacaaaaattggaatggacatatccctccaaccaaacaagagctgggtcaattccgcccaaaaaatagggacatgaccattccatcctacttagtgtccaaaccaaaagcaacctaagggactggtttttgtgaaagattttttattatgatttaggtaaaaaatctacaggagatttcaacttcgtgtgggatttaagtgctatttgcttattagtgccacaacgagtcctgaaatgactttgatacaaaactttttatgatccaaccattataatgtaggttatcttgaatgatagtcttacatttattatgatttgtagttttgtacatgttggaaattggcaggaacaagaaattaatagcacgcatatcatatgaaaaggaatgatgaaaatcattttgtagtgtccctacaatgctaaaaacttacaataagaatcatatgttgcttttacaaaacaaaattcacatgtttactgaagttcttcaatcattgtctgcttgatgtgatgtcattttttcatgacaggaatatcgtatcaacagttaatttggattgtaaacttgacctcaaagcaatagctttgcaagcacgaaatgcggagtataacccaaagcgttttgctgcagtcatcatgagaataagagaacccaaaaccacagcactgatatttgcatcgggtaaaatggtatgtactggagcgaagagtgaacagcaatccaagcttgcagcaaggaagtatgcccgcattattcagaaacttggttttccagctaagtttaaggattttaagattcagaatattgttggctcttgtgatgtcaagtttccaattaggcttgagggccttgcatattctcatggtgccttctcaagttacgaaccagaactctttcctggccttatctatcggatgaaacaaccaaagattgttcttttaatttttgtttcaggcaagattgttttgactggagcaaaggtgagagaggagacctacactgccttcgaaaacatctatcctgtactgtcagagtttagaaaaattcagcaatgatgacatgtgatgtgaaggtcacgttcttcaaattacaagcttcctcgaggattctcgtgtgaccatgaattctaaatgtacataaaagtctggcggaacttatagcatcctgtaatctctgtgagccgcggtctgtcagtattgggtgggcttgctgtggtaactggtggacatgtcgagttcatccatttgggtaggccttggtgaacacggacgccccacatcatgtctcagtttgagtagtttgtgtgaactgaaggagtatcttccagtgtgctactgctgtgcgatgatgagaaggctggcactgtatgtaacgggggcaacgtgaccggttgtaagttatgtattgtagttgagatgctgtagcgcctagggcactgggattgaacttgtggaggaaccagtcagtcgaccgttctatttgtgtggccctctgctactgactaatgtggcctgttccaaatgtcgctgcgattttcgtttctttta

SEQ ID NO: 41201 - DNA, 2240 bp, Zea Mays
ctgagctaactttgccccgatgccttgtaaccctgctgttggtggccctgcgaagtctcaacttgtccatgaggtagatgcccttggtggtgaaattggaaaaattactgataggtgctacttgcaaaagcgtgtactgaacagctcaaaaggccctgctgtacgtgcactgcgtgctcagactgataagagagagtatgcaatagagatgaagaacagtgtggaaagcacagaaaaccttttcattagagaagcaatggctacagaggttttaattggaaaaaatgacagcattgagggtgttcgcactttcttcggcatggacttttatgcaccatctgttgtacttaccaccggaacattcatgagtgtttctgggttttgaaactgaccgcttgaaaaccggtacaccaccacgaattgatcgcagaacagttgatttttctggattggaaccccagcatggtgatgaagaggtaggttggtttagttttgatcctgaatttcacgtcgagagagaacagatgtgctgctatctaacacgaactacaaaagagacgcaccaaattgttatcgacaacttagatgaaacaccaacttatggtggttgggttgaagcgaagggaccaagatactgcccgtcaattgaagacaagattgtaaggttcaaagataaagagtctcatcagatctttcttgaacctgagggtagaaatgttcctgaactatatctacagggcttttctactgggcttcctgagagattgcaattgtcccttgtgcgaactataccagggctggagaactgtctaatgctaagacctgcatatgcagttgaatatgattacttacccgcatatcaatgctcaagatcacttatgacaaagaagattgagggtttattcttctctggccagataaatggaacaacgggatacgaagaagctgcagctcagggtataatttctggaatcaatgcagctaggcattctgatgggaaatcattaattattcttgagagggaaagcagttatataggaactcttattgatgatcttgttacaaaagatcttagagagccctatcgcatgctaacaagccgttcagaacaccggctattgcttcgatcagataatgctgatagtcgtttgacccctttgggacgagagattggtttaatagatgatagacgttgggagctttatcagtcaaagcaagcccgcattaagcaagagaaagaacggttgagatctacaaaagttccaggaggtgaatttgctgctgaagttactgcagtatccaaccaacctgtaaaggattcatctacacttgaagccatattaaagaagccacacgtacaatataaactccttgacgagcatggatgcggaaatgaaaatttatctcgaattgagaaggaatgtgtagagattgatatcaagtatgaaggtttcatcgcacgacaacaaagtcaattacatcagatcgtaaaccaagaacacaggaaacttcctgaagatttggattaccactcaatgacaaatctatcacttgaagctcgtgagaaactttccaaggtgcgtccacaaacaataggtcaagctagcagaatcggcggtgtgagcccagcagacatgacagttctcctcatttggatggagagcaaccgacgcatggctacccacaggagacagcgagagcagctgggatcagttgcagtcgagtcggatggttcttcagaggaggccgtccaagccagcacggcataaacgtggggagcttctggcagctgaacaaggaacaacaaaattcggtgaggcatccagggagcctgcgcgtctgtggtacaacgatgcagggaggcgccaagtgcatgcatgtcttttcttgacgacatgaggaaatagtcggccccctggttccttcatgttgtgcctcattgtctaccagtatgtgtgcatgttgtttaggaatgctggtggaatacaggttgatatttgcagtagtagaattgagagagcagactgtaaagaacgacaacaaataggggtttaaaacatacattcgcactcacttagctaaaaaaatacactttttgtgtgttttatactttatacttaagcaaaatatagatatttttacgaaattagatgaaaagggcgtgttggatctagcccaccatgtgatacctaaggcctaggtatgacacgatgattgagctgggggtagactgtactaga

SEQ ID NO: 41202 - DNA, 1323 bp, Zea Mays
ctcaataaaatatgtactcggaatcggaagaacctaccttacttttccatccgcggaacgacgcacgcggacgcctccttgttccgggtcctactcccgccgccttcgcctaaagaggcctcgccctcccccctccggcgaaaaccgattcccttccccgattccctccggcgtttcctgggtccctctccatcctcaccgctttcttcctctgcaggtcccttagtgcaagcaaggacaccgctcctctagcgagctctgttctgaagcggcaagatgattaatcttttcaaaataaagggtcaaaagaaagaagaggcagcaagtgctgctggaaaggcccctgttaagaaacagtctgctggggagctccgtcttcataaagatattagtgagctcaacctgccgaagaccacatcaatttcttttcccaatggcaaggatgatctgatgaattttgagaccaccatccgacctgatgaaggatattacatgggcggcactttcgttttcacctttcaagtgtccccatcttatcctcatgatcctccgaaggtcaaatgcaagaccaaggtgtaccatccaaatattgatctggaaggcaatgtctgtctgaacattctgcgcgaagattggaagcctgttctcaacatcaacactgttatttatggcctgaatcttctttttacgcaaccaaacgacgaggatcctctgaaccacgaagctgcagttgtccttcgcgacaatccaaagatgtttgaggcaaatgtgagaagagccatggctggaggctacgtcggccaacactatttccaaagatgtgcttgacttgatgtggtggtggcttgaaaacgatcaacagagcccctccccctgtatcagcaccagcgcgcccagctttgtgtgcggaaagtgcttctggaagcaaaatccaaaccgttcatggtgtgacatctgtttgcccgcctttgtgatgtgtggtatagtggtggtgcataatgacagggaaatgcttctctaactgtatcattcattccataaatcctaaacgaggaatgggaagtggattgttaagcagattccttctgcagatgttgatgtcgtattcggcgtgtattcattgtcgcatcttccaggtcgacgttgacatgcacgtctagcttcggatgccgttaccagatgcctcttgcaacttatctgcgccagaagcaatttatgatccaatttgatatctttgtcagcaaatataaggatttgtataataagtagaagcaaatctaaccattttagtgttcctttttttttctgcaggtgatttgcgtg

SEQ ID NO: 41203 - DNA, 1563 bp, Zea Mays
gttccggtgccgcgtgcggcgtgcctgcccgagccgtgaagccgtgtcgcgccgacaagttgggtcacggccagctcgccccctgaccttccgcctccctgccaggtgccagctcgcacagttgcacacccacaaaacgcgccggagacaacgcacgtaactgccgagaagccgaagtccgaacgccgcccaccggcatccgccaagtgcggccgtttatatacttgcacgcctcccctcccctccagcctccccttgcacgacgtctccaccactacaccacacctcaagtccacaacaccaccagcctcgtctcagccgcttcagcataccacaccgcacgcaaacccaccgcgcgctacgaccaccaccgtcaccatggccgccgcgcgctacgacgtggagaagggcgggaggaataacggggatgggaagccttcgccgccgccgccgggccacctgtacccgcagcgcgacggggagagggagtgggtgccgtggttggtgccgctcgtcgtggccgtcaacatcgtgctcttcgccgtggcgatgctgcagaagctgggagcgcttgtatgggacaaagttgtgcgggagcaccaggggtggaggctcgtcacctgcatctggctgcacgccggtgttgcccacctcctggccaacatgatcagcctcgtgctcatcgggctcagactggagcaacagtttggatacgtgagagttggcatcatctaccttgtctctggcgtcggaggcagcgtgctttcgtctctgttcatcaggaacaacatctctgtcggcgcttccggagctctgttcgggctccttggggccatgctgtcggagctcttcaccaactggaccatctatgcaaacaaggctgcagccctggtgaccctgctggtcgtcatcgccatcaacctcgccatcggcatcctcccgcacgtcgacaacttcgcgcacatcggagggttcctcaccggcttcctcctcgggttcgtcttactgatgcgcccgcactacggctggatgcagcgctacgccctgccctccgacgtcaagtacaccaccaagaagtacctggcctaccagtgggctctgctggccgtggcctcggtcctcgctgtcatcgggttcgccgtagggctggggatgcttttcagaggagtgaacgcgaatgatcactgcggctggtgccactacctcagctgtgttccgacctccagatggagctgtgggaactcgcagtcttactgtacataatgtcaccaggatgtggtttatatatgacattatttatgctatctgattgatcgatggttcattctatttattcagcgagtgaaaattgaaatgccttcaatctttcgcttgccagctatatttgaaaactagatgcagttgtgttgttatcaactcccccgttcttttttatttatcgtcatttagttaaaaaataaactagtgagccacaaagaaggtagacctgtcaaccacaatcggccttccatgattactgtggttatttcataatataagttatgtgatgctggttttcatctc

SEQ ID NO: 41204 - DNA, 2543 bp, Zea Mays
cgccgggcggccggtggcgaccggcacatcaacatcagagagagggtggaacagacagagaaagagggactgtggtgtgcacatggaggagctctccaacaaggctctggcaccaagcttgctttcgctgtgcctggatgcggtagctgatcgtctcatcagcgacaacgccgccgcaggcggcggcgtgggccgaacgggttcgtcaggagggtgcagcggcggcggcggtctcgccggattctcggaagatgatggaggggaggcagacgaggaccgcctgcatccacaggagttggcggaggggcttccctgggagcttctccatcggctggcgtcccggctcccgcctgtcgtacttgagtcactccatcacgctgcacatgcccgatactgttctgctgaaactacttctggacttggagtgcaagatggagaaagacgtggggtgaaacgttcaaggtgtgaagatttcaacagcacttggcagttgttgttcaaacttcgctggcccctgggtggtaatactggacataataatttggtcactgtggattggcagcaaaagtattgggaaaagcatttacaagagtgtttaaatgaagctgcagaacatgcttttcttccttttttttgtgggagtattggtgagctgagtatatcagctaaaatcatgaattccatctaccagagcatgggcacatctcaacaacattcaagattagcatatcaatgcagcaaatttggttgctatgtgaggagcttgagactgcaaggtgttctttgcactgcagaaacttatgtcttgttgcaacaatgcaagctggaaagattaatgttcataagaattatatcagacctagaggttaatggtgcatgtttgcttctgagctggcatgcagagacactgctttctcttgaattcatccattgtcagctttatcctaccgtcatggataaaatttgcatgagtgtgtacctgaagggatctcaaagccatggaatccaacaatttagtattaagtcgtcacaaatctgtgaaaccaagcctctgaccatctcttctggtctgttcaaaattttgtcatctgattgctggctggctttcggaattgaacaaatgttctacaaacttattagcgctgaaatcagatatttttatgaactccctgtctgttcttaacctgagggaaaataatttgcaaaaggatgatgttgtagatcttcacaaaattctaataaaaatgcctaacttaagagatttagatataagtggcaatccagtcatggatgaaggtatcagatcattgatccctttcatttcatggtctattcaaaaggaaaatccacttctgagattaacagttgagaactgtgagttgtccagtattggtgtgattatacttctggagtgcctcacaaatgcgaagcaactccttgatgtgctatctattgcagacaatcatctagggagttctgtggcagctgcattggccagattcttgggttcacatgtacgggctttaaatgctacagatatcggcttgggaacagtaggcttccaaatacttgaggaaacattgccaacagaagtagctctttcccacatcaacatcagtaagaatcgtggtgggatcagagcagcatattttgtttccagattaatatgtcgagcaccagaccttgtctcagtcaatgcagcagggaaccttttaccacctgaatcattggaagtcatctgtaactccttgaagcaagggacttgtaatttggagcgagtggacctgactggcaacatgcatttatcaagcaatatttttcctgcattccttgaattcaagaagcatggaaagccaattctggtagtaccaccaaacttgagcacttctgctccatatgatgatgacccatgactactatgtaccgtataagccctagtgctgctcaagtcacttcagttggaactaaataaatagtgatagtatttttttggatcattcccaagaatcctaaccactagatcaaaacacaacacaaattgtacatctgtttagattcgacacggctttcgtcggtgaagctttgcgctagggcagcgacggtcgggaaagcgagcttgatgtcgacggtggactttctgttgctgacagacttccctctagatcggttaaggtttgaggtggagatcgaaaatgattgtgaatcttgtacctttaggtgtcggcctccacctctttatttatagggctacgcaacagatgctcaacaaccttgatgctctcgatcagggcgtgaggtcaggggtctagttttcggttgggtcaagttgggtcaactagtggagatcaattctaacattttcccctttaatctcattttataccttcagctttatacctttaatttttttgatattccattatagataagtgcatagagcatgtttcatcgtcacgattaatcaccgatagacttagcaactacagtacatatctctatcctgaaatagattctttaactttgggccttttattgttcggaaa

SEQ ID NO: 41205 - DNA, 5967 bp, Zea Mays
cccaggtgtttatattccgcttgacaacgagcacagatttaagcatgtaatcagtgaataaaacagatgttaaattttaaacatcttcgtctgtcgcgatttcattatcgcatctgtttcgtctgtcacgagttcgacatcgtttttatctatccgggctcttccgaaattttcgtgatgttcggaacattgtcattccgaaaatcggtgcgttcggtggttatttaaaattcatcgctcgcgcaaatacgaatttggagcctcgatcgactcttgagatttttgtccccgacaaatgaatttgaactcgacgactaaaatatcgaatctaatctcgtccggtttgaacccgtctacagctcgctcccgtgacgatgctggcatcgtctccgggaactccgattgtgatgccgcattcggctctaacggtttaaaatttattcctttctaaagtatcgagtctagtgccagtttaaaaattaatcggtcaagacgagctaagattttcgtctaagtatttcgctcgatttaagtcatctctataaattcggtacatgcgctatttggggtaggcttttcaaataaatcgaaatcggaaccattgctggccaattatgtttcctgtttcaaaatccaagaaaaatctttctcacagtgttctctctccttatctcctcacgtacactacgcagatttttctagtcttcgttctcatccacgcacgggaggaaaatcttctctgcgcttctatccaccaccgctcaatcgtttgattttttttttcgcgcaagcttcttacctcctgcgcgcagattgcttcttcctgctgcacggcatgccggagaaagatatgtctctcagattttttcttctctaccgattgctttgctcctggcgtgattttttttctctgcgattgatctcatccctgcacggctctagtggaaaaatcccgccgcccctgggcgcttcaaaaatccagccgacgctcgcccctatcttcttcctcagcccagccgtcttcctgggcaaccgcgtctccttcttcctccccctgcgtccctgttcggttcctgcgcacgctgactccctgcgtcgcgagcttcagctcggattccccctcccatggctgccgagcagctcgccggaattccacgctcggtgcctggatctccctcctccctgcagctcgctctctctccctagctcgctcgctcctggccttcccctgccggcgcgcctgttccctggccgaagccacctggtcccaggtccggtcggccggctcagtttttcccagtgccgcgcgtcgtgcttccccttccagccgaccgaagctccagctccagccaggcgcgtccggctccctaggcgcttgaccatctgctcgcctgctttcctgccagtgctgcccagtgcctctctgctagccgcgcgcccctgtcttatttccctgcgcaccgtcgtgtcctcagctagccggctgcgacccctgctcggattttcccctatggccggaacctttttcctggccgcagctcagatctccggggccgcgagctcccctaagctcgccatggcgatttccacggctggcagctgaccttcctgtgtcgcgtcctgactttacccaatgcccggtcgagctctctgaccgccgcgccgtgaattttcctgcgcgcgtgtctccttgctcacgcgtcgccgtcgagttctctggtgtttgcgtgccatgaagttcctctagcgccgtggcttcccaattccatctagtcacgcgcgcgagttttcttcgcctcagccttagctcgtcggtcacgctcgtcagatgtgcgatcgaggacttcagctgaaggccgtcgtcagacaactaccaaatcgagttgtgatatggtgcgataattaatcacgtgatgcggaagatgactcaagtcgaccccaagcacgggctactccgcatggagatgctgatgaatgaacctgcctgatcaagtgttaggacaaggatgatcgtcaagtgatcgacgtctaacaaacactaacctagtgtttcttccaggcaagccccggtgcatttgccccttccttgtgttttaaatgctttttcaccttatctgatgcattaggtgataggagttgtgtgataaacaattgatgcattaccattccttggaaactccttaatcccggttttataaaaagaactgataatgcttagccctgcttagaaactgaaaaatcatttgttttcaaaaagaatgattgtggcacattggttatgggcctttcgtttcaaaaatcaaagcaaacttatggtgatgattccacttcggccggagtgggttcatcatttggaaaagagtacccctgccgggtaccaaaaatgggaaaatggttcgaatacatctagaccagacgttgagcggacatggtcgcccgtctgtgtcgattaaggaccgttcgatgtaggcctgatgaggtgagactttgcaactaaccacatgctccgataagcctgaacctggctattccatacgtgaaaagacaaccgcgcactgggcgtgggagatggtgggagtagcgtgtaccctcctggctagaggctggatggaggagtactgtgctcccgggtagcgcggaccggttcacgttgtggaggatctatgggaacggttgacatatgcaagggttaagtgctacatatgtcgtgtggttagggatccccagctgggtataatcggttcgaatcgtcgttgctcctcggttatggagactcgactcactgaccactcatcgtagttgacaagtgaaacatgattgtagttggttaaaagaaagctagataaggacaagtgaatgctctagattaggcaaatctagattcaggaaaagtactaaacttgtgaagtaaaattttggcataaggatttactattagtaagctcttctgcaaaacagagtctttgattcttgataagccataccttgactccctctagccagcatacccttgagagtcttttctttagtcgggtaagtcttgctgagtaattacgtactcagggttttattccctgttgtttttcaggtcatagttttgtgctgctgatggtggtgttaagtgccggtgggctcggccttcttataagtttaagtaacccttctatacttcttaatgaggatggtcccttgagctagcatatatatttcaaacttatacttttgcaatcactccgataaaataatgtaaaatttttgtaacttgtaaaatttggtaacaagatttccgctgcaaaaatattggtgtgtgtgatttgtgttacttaatcccacagttctggttgtaagtggtttatccggtgtccttggggcaatcggacggatcctgttaagttatctggtgcacatgcatagcagtctgaggtctttgagacaaggacaggtgcatgtggacccaataacttgggaggttctgccacagctggtatcggagcaggattaagtataatacggtcacatacgtattttaaaaacaaagttttggttttagaaaacctattttcaactaaacccattgtttggctttgaaaaactataatgctagcgacatcctctgttaagccctaaattaaggactattaggtggcttagtttaaaaccactaacccacaaccgggggtattgcatacatgtgtattgttatttttaaggccattcaattttgaatggatcgacgctcaaggtaaggtgagatgtgagagcatgaccgaacaaacgtcggtctagggaagtgcttaattgaagcgcttgaatatatacatgttctacatatgtatatatgaaggctgcgatgtggagtaattacttttccgggaatttagtaccccatggatgtgtatgggtatacagacatgggactactgagaagtgtaatgtacttgcaacgacgcacctacgctcaggtaagaaggtaagttaccataatgagttgccctatggttaaagtgtggcaacggcgcctatgcgtggctcggcgcttaatgatgagctggcctccatatagcaatatatggagtataaactgtgataaactgtcatgtgtgaattgcatcatgggcaaatgggttgtgatgaattttctgcaggtacactaacctcgaaaacgtaatgttggtgtgtgtgatttgtgttacttaatcccacggttctggttgtaagtggtttatccggtgtccttggggcaatcggacggatcctgttaagttatctggtgcacatgcatagcagtgtgaggtctttgagacaaggacaggtgcatgtggacccaataacttgggaggttctgccacaccctcagcatttaatgtgtcctgtccactctactggcaggcggcgcctaggccatcctgcagacggcgtgcctgtccagtctattgtcaaacagtatgcacgtgctacgaggtgcactgtgtccatcatcacttatacgttaccagggaagcttccccagcacgccgatactacgcagatctcggatgtcagggcgcaagaagatttctccagcaacaaacattagttgctccaagtattacatccgttatgttcctaggcccacatgtcggggcttggtacccatgtacgcgcccccttagctataaaaggggaggcatgcaacgttacaacacaggctaaaagacagactcagactgaggctcactcaggcacacttaaacgctcacaagttcatacaagcttaatacatcacacaatggagtagggtgttacgctccggcggcccgaaccactctaaatccttgtgtgttcttgtgttctccccatattccaactaacaagcaaaacgcttaggcccctcctcatcttaggatttagggcgggtgcattccgtcacccggccggagaatttcctctccgacagataagtttgaaaagaagaaaggggcagatgcgaagcgtattgctgatttagaatatgctctttctatgcaagtgggattgcacagatccgaggtgcaaggactggagaagaagcttgatgaaatcactaaaaagtttaatgtcgaacaagcaaaacgcgagatatctgatactaaacggttaagagttcagaaaaacgttgaggagcttcgtcaagcaaaagaggagtgctacaatgtcgccatggattgttgcaacaagctgaaaaacaattttgctaaagttggtgcattctgtactgagcagaaatttatctgtggtgatccttatggtggggttatcaggtggatcggtggcgaggctgaagcttttgatgaaatccttagtgacagaggagattttttttgccttcaacggcgctcgaggggctgtctcgcttcttgaaaaagctggttgcgagcatgcaaaggttgtaatttaagcataattcaccgtctcagcgaacgacatcaaggatccttcaaccgaagttattgctcttagcggaaaattttattctgaagtttggttgaaaggtggtcgagaaataatagatgaggctattaggaagaatgaggaagaatctcatactgctttagaagaagtaaggaaagctgaagaagccgcgccaatatttctcctcctccggagccgtacgaccctgaggctgatccagccttgaagggtgctcttgatgtaatcaaaatagttaatgaagctgttgatgaagctgtgaataggctcctgaacaaagctgctaatgaagtcttaaaagaagatgattagaccttgtttattaaaacattcgaagaacttttttatgttgttttcttatgtaagaaacaattgtcaactatatgtatatctgatgatgtaatctatttcttgttggagcgtgaaatctttgtacataccatttttgagcgagaggcggaaaacaccttcccttcttttcgcacttcctaaagaaaaaaatccctttttctgccgaag

SEQ ID NO: 41206 - DNA, 305 bp, Zea Mays
ggcaaatacagatcaacacggatcgagaccttagttgttaaggtagaagcaaaagcaccaccaccgtgggtctccgatgtgttaaagtatgctacttgcggaaaagcattcatcggatttttaatacagttcccctacgcgtaaaaattgcttcgcgtttcggcgtactatcgttttagcctatgaagtcttttgccttttcggcggaatcacacgggcctctccgttcgatgtctctagccacaatgcgttgttagtcatgcttgacagtgccatttagaagagtcttatatagaggccgctgc

SEQ ID NO: 41207 - DNA, 2420 bp, Zea Mays
ggttgtagcggcgccattactttcgttcacttgttctcactcagctcttcccgtttcccgccctcgctcctcctggactagggttcatggatcccgacaccgccgtggcctccgcagacggggggccattcctagagttcgtagactatgccatctccatgctctcctcgtccgctggcgacggcgatggctatgagtctccgggggacgggccggcgccggcgcggccgccctgggggtgggcggtggcgcagctgctcaagtcctgctgcgcctactccagcggcgtcaccgccgccatccttctctccgacctcttccaatcttggacagaacagcggaaatccctgaccctgaagaggaaggtcaagctgcccaaacttataaacacgaagaataagaggaggaggcttccaaatactgtcacgatcgattctatccacgagaagaacttcctttctcccaatagtgtccttgaagttgttgtcattgccgtgtttgtccttcctggtacaaacatatacatgcttaccttgggagacatgtggagcgcatccacaatcgacatatatctacaccgaagccatggagggatctggccatgctcgtattttgccaacagaatacatggtgatattactggatgaggaacaagatgaagatgccttgctacttgctgcacaattttgcaactattcattctcttctttgattctagaggaaagtagaaacaatgttccgtactcattttatgccaggattgaaaagattgagtccttggaaccatttagatgcgcagaaagaatgcagataattcttgaagacaatgacaatgcgaagatgaagttagttttatggggagagcagacttcacttgcaaatctgtgcagtgtagggagcatgcttgcactggacagacctttcatagcaaattttatagacaataatcatgaggattctcaggaactgtgccttgaatatggcagtgcaacacaggtttacatggtgccaatcgctcaacaagaggaacaggtgccttttacacctacccaagtaaagagccaaggacctcggctgtcatgtgttctgactgataatgtagcttcgcaagtaacattaccacgtgatttgtatggttcagttgatttcagcaaatacccgtttcgagcatatgtaagtgaccttcatgataaaatggtgggaatcagtctgtttggtaccgtaactagtgtttgcaaagtaagcacatcagggactacgttctatttggagttggaagacacaacaggagttgttctgatgaagcttatctttgttggaccctggtcattaggtagagtaggagttgggcatatggtgtacatctccggtttgacttgtgccttgagttcaacaaatatccttgaagtctcatggcgtgaaaaggagccagggtctctgtttgttaacttaagcttgctgccagcactcctaaactcatcgtgcctgcataatttatcacccttgtcagatcttccccgttcgacaaacagaacacatatatcccatgttcggttagatggcatcgattgtgacagtttaaaggtgtcgctgttccacaacatttgcggcagtgttgtgaatgaacattcaggtgtactccagtgttcattctgtaagtgtgcctgcgaaagtgtatgtgcgcgtggctttcagctgcacttgaccatcgcagacgacagtgcagatgtcttggcttggtgcgttgggcaaacggctgtcgagttccttcagatatctcctgacgaatacctagagctccccgaggatgaacgggcaatgtatctctacactctccagaacgaaagctttgtggtggctatcgcgaataccaggaagcgagtcgatggatgtgctgtgggtgatgaagccgtcccagcttgggagatcacgagagcccagaaatgcgaatgagttcgtatagcgctcgagaaagaaatgctgatgctgaaaagttactgtaacacgtgtttcaacctccgtttttcatcaaccaattcgtcgttcagcaatgcagccatatgcatgagttgtccattgactccaaatgatgcttaagcacgatggttaggatgggttcttcgttgacaaagtccgagagtaagacgtcgacgaaggcatagcgtttaactttaagatgggttcactactgaaaaatttcggttgttcttcattcatgttgacaataggttatttgcttggcaacgtagccagccgacttcagatttatctgaaactgtgccttttacatctagggacttgtacccagcaaacaaacgctgcccaccgcggttgagttacggagtgtttggttgtctgattaaaaggttattttgtgtcacattaaatatttaaattttaattatgagttttaaatataa

SEQ ID NO: 41208 - DNA, 1682 bp, Zea Mays
atattgtcatgagttctggtgattcctcaaatgttatacctccaaatgacattggagttacctttgatgatattggagccttggagaatgtaaaggacacgttaaaggagctggtgatgctccctttgcaaagacctgagttgttctgcaaagggcagttaacaaagccttgcaaggggatattgcttttcggacctcctggcactggaaaaactatgcttgccaaagcagtagcaactgaagcaggcgctaatttcatcaatatatcaatgtcgagcattacatcgaagtggtttggtgaaggggagaagtatgtaaaggctgttttctcactagcaagtaaaatagcacccagtgttatatttattgatgaggtcgatagtatgctaggaaggagagaaaatccaggggagcatgaagcgatgcgcaagatgaagaatgaatttatggtaaattgggatgggttgcgcactaaagataaggagcgtgtgcttgttcttggtgctacaaataggccttttgacctcgacgaggctgtgattaggaggttcccccgcaggttaatggtaaacttgcccgatgcatcaaatagggagaaaattctaaaagtaattttggcaaaagaagagctgggatctgatgttgatatggactcgcttgccaatatgactgatggttattcaggaagcgacctgaagaatctgtgtgtgaccgcggcgcattaccccatccgagaaattctggagaaggaaaagaaggagaagaatttggctaaaacagaaggtaggccggagcctgcattatatggaagcgaggacatccgccctcttagcatagatgacttcaaatctgcccatgagcaggtttgtgcgagcgtttcgtccgactcggcgaacatgaacgagctccttcaatggaacgacctgtacggcgaaggcgggtcaaggaagaagaaagcgctgagctacttcatgtgatggggtgagagcatagaatccagaaggatcacagccgtggcataagatcagaaggaacacagagcggccatagtaccacacccactatggccctaaatccagtcaagttttcgctccttccccctccctcagtagccgccgccgccccgccgccgcctggtgtaattagaactgtgtacggagtcgagttggtttgccagctgtttcaaggttacagagttgagatttggaattacaatggcgccattgccctcctccaacccccccccccccccccccccccccccgttttcttcctcccataagttgcggtcactgtccttcttggactctctggcctttgttcttgtaaatgcgaaatgaagggatgtgaaataagaacatcttcgtcctgttgttgacagtatggtacacatatttaatttttgtacttgaccggcgatgataaattggatcggtgccaacataagaattatggaaaggtgcctttcctgcccgccgaaatctgtgtgtatgtcgagtgggctgggtattgtgaggtgaaattttatgcgtctcctgtcgtcttgtggttgcgaaatgcgtgggagcaaacgtccggcataatgaactttcgtcatttcttatggctgcgaaatgcatgggttcggtatgtatgaattttctctgtcataatgaacttggattctgataacggtgcattgc

SEQ ID NO: 41209 - DNA, 1245 bp, Zea Mays
ctaagtttcatcacaggcagatggatgtataactttctagtgatctacacgacacctactctatgattattcaggctacggtgcttctacaggaaaaccatcagagtacaacacctacaatgacatagaggctgtttatgattgcttgagaacggagtatgggatagaagaagaggatctaatcctgtatgggcaatccgttggaagtggaccaacgttgcatctagcctcacgtctcgagaagttaagaggggttgtcctccacagcggcatactctctggcatacgggttctgtatccagtgaaagtgacgctttggttcgacatcttcaagaacatcgacaaaataaagcaggtggactgccctgtgttagtcatacatggcacagccgacgacatcgtggacttggctcacggcaagcggctgtgggagctagccaaggacaagtatgagccgctgtggatcaaaggcggtgggcactgcaacctggagacgtacccggagtacatcaggcacatgcgcaagttcataagcgccatggagaagctggccaaggacagcagcaaggcggcccaggcgccgccgccgtcgagcatggccgccgaagaaagacacaccaagtgcttgagattcgggaagagatgaggtaccgtatcggccttctttagctgtgtacgcccagtcaagtcacgaaaacgctgatgcactgcgttgccttgctgccgctgctttcgtgtgcaagtccaagaagcgatagcacaggtcgtcagtgagccggccaggcggatggatggatggaggtttcctgttgagtttcatggactctctctttctctctctgcagatgccggcgacctggacctgggaaggaaacgcggtgcagcagcaaccctagttcgtgtatcatccgtgtgagattgagttcagacttcagagtagagagtagacagagtggagtgacagacagacctgtggctgctgtagtatgctgtacgtgctggagttcaggactagagagatgtctttgttttcctaggggcgccacggattagcctgttcgcagctgaattttttcttgttttttttttctgttttcgctatctgtattgtagtcactgtgcaaaaaaaatcgttttgattgattggctgcaaaaagtgaagtgcgctattgcgctgtgactagggccacgaaatgtccgttgctcgcttggttcttggatagctcaattcggataagttctttt

SEQ ID NO: 41210 - DNA, 4001 bp, Zea Mays
ctctccccccttctccctctcgcattcttcctcccccgtttcggggagacgccacgagaaaagagggagcagggaaagaaatcgcctccacgtccacggtgacgccggatcgcgcgtcaaatttctttgccgcggatttggtgctgcaaattttctagaattttttcgttttgtagggggcattattggcacggtatcttagtcctgggcttatattatctgcattttcgtttcccccgattttttcgactcaatttcttaacggatttgggaatcgcggctagggggctctgcattgccggatttgctcgatttcgtgggcgcattgcagctttgcattgcataacgatctttgccttggtcgcccacgttcgcgattctgtctgagcttcctcacccgggctcgtgcatttctccgaacatctccaggtgtctgttgcacaagctctcgcttgttgctccaatttcacgcgttctgcatgcatgtattccccgaaggtggtgccattctggggctgttgcaaagttctctggtcaaaaccaatggattccgtcgagcaatcggttccacggtgctaagagattgttgtccattggccatccccatgaatttctgaagggggagaagaattgctgttgcatttcccgggcaggtgcattggcatggtcgcagtagtgtaggaagcagaaaagatgaggcactgttggagtgcatggctcctggccctgtgcctcgtctctgtccagctcctcgctccattggtatgcgagcgattgctcgttgcagcacagaacctgtcaccgccagccttgacaccgccccttgtcaaagaagtagacgatgtggtggaacatgtatggatctcatgtgggttagacaggggatctcttgaagacgttagaaaacatttcaattacaaccacgtatttgacattctccgtacgctctccggaaaagatactaaggatagctctcctgaaactgaagatgccagcaaagcactgtctccagaaattaaaaacactttgctgaactgcttaagcaagcacccacttgtagttgctgcacatgagagtgcaaaaaacttacctattgattatatcaaaatgctttttgccttgttaagaagagatgtggctcaaggatctacaggtgcagcgacaacttctgcaccaccagcagctgtgaaatcaaatccatcaccttctttaggggaaccttcctcaacaaaacctgacaaaaatccagatcctccattagaaacaacacccgaagaaaaaatggtgccccaaactgaaaaaacagtggccaaaaaggaagataacagtaacatgtcaatcactgctgtcattggtttgtctgtgtctgctattgcgttgttagcccttctctgcttatgcaactttgtttgccgtgcaaaacaggcctcttcatctgaagtaggggttgataaaccgcctctgaatcagaacctgagtaatttatctgtagcttctcttaagttttccaaaggaaactcaattgatgtcaacaagctgggagcactgccgctaaagtcagaggctggccaaaatggcaatgccaaactaagctcatctgaaatctctaaaactgaagttaccccagcagtctacaactgtttggctgaaccaatggctgcttctactggttatgtcccaggatcaagaccaacaaccccaccatctatgccacctccagcccctgcacatccgaaggctcctccctcatcaactcctcaagcacctgcatctctgaaggctcctccctcatcaactcctcaagcacctgcacctctgaaggctcctcactcatcaactcctgaaacacccgcaccaccttcaaagcctagttcagttcttcactcagaaccctcatcaccatctgctctaaaagctgcacctccaccaaaagatgcaccacagccaaaagctgcacctccaccgccaccaaaatctaccggcccaccaccaccagcaatgtctggttcatcgaatacacgtccaccaccgcttatgaagaaatcaggcaataagatggatgatggcgcaaattctcatgaagctaaaacaaagctaaagcccttcttttgggataaagtaacagcaaatgctaatcagtctatggtgtgggatcacctcaagtctggatctttccagtttaatgagggtaagatggaaagcctttttggttataactctgtggagaaaataggcggtgatggcaagaaagatttattatctaaggatatacctcaatttgtgaggatacttgaacctaagaaggcacagaaccttgcgatatcattaagggctctgagtgtttcaccagaggaagtatgtagtgcagttaaggaaggaaatgaacttccatcagacttgatagacacactactaaagtggatcccaagcaatgaggaggagcttaggcttcgactgtacactggggaactgtctcagcttggtcctgcagagcaattcctaaaatcgattatcgatattccatatattttccaacgtctggatgcattacttttcatgtccagtctaccagaggaaacttcaaatgtgaaacacgcttttgctactttagaggtaatgaagcttcaaatgtgaaacattttttgctactttagaggtggcttgccaagagcttaaaaacagccggcttttcttgaagttacttgaagcggtccttaaaacaggaaacaggatgaatgttggcacattccgtggaggagctcaggcttttaaacttgacacgctccttaagttatctgatgtcaaaggaactgatgggaagacaacacttctgcattttgtggttgaagaaattattcgttctgaaggtatccgtgctacaagggctgcaaaagatactgacggtaataatatgcgaactgaagatgattacaaacaacttgggctgaaagttgtgtccaatttaagtgatgagctacaaaatgtcaggaaggcagcgatcctggatgcagatcaattgacaatgtcagtagcaactcttggccacaagcttgtcaaaaccaaagaattccttaacacgggcatgagaagtctggatgaacacagtgggtttcaccgcaagctgaagcatttcgcagagcagtgccaaactgatgtttctttgttgcaagaggaagaaaagaaaattcggtccttggtcaggggcactgttgattatttccatgggagtacagggaaggacgagggcctgcggttatttgtggtagtacgagatttccttgcgatgctggacaaggtttgtaaagaggtgaaagaagcatcaaaagtggctccaaagaaaacaaagaccgctcagccatctcaagcatctttcaatgatcccaggcgcaaactattcccagcaattcaagacctaagggcagacagttcaagctctgatgaagacgattagctgtataccgaatcaaggagtccatgttttcaccttcgaatgcactgaatttgacccttcaaaacaatagtgcggtgatacataatacatggaaactgatgggaaatggtgaagtgacgctattttttgccatccactgatcaaaaaggcaacaatcaaattgggaaacctggcttggctttacactgacatgttggtaatgacaaatcatcagaccagatctggcattcttggccaatgggtttgtatggcactctcctatctagcaagaaggatgttcatatggtcgagacagcatctatataaaaggtgtggctggtggaaaatggataattcaaaggaaatggaagaaaactggctctagtttagaaccggtgtaaatgcaggaggaagtctgactaatactatttttctgttcattgtacacatgtaccattgtaccgaacgcagagaaatgcagcgcaaacttgtgaatccggtgccattacccttgcaaacaggaatacaaatgaagtgtttggtttgagaaataagctagtttatcatcttc

SEQ ID NO: 41211 - DNA, 1341 bp, Zea Mays
ggcccatgccaaaacgggccatagggaccatatagcctcacccacgtagccacgtcagagcagagcacccagcaggccagggccagccggccaaaacacagaaaagctaaacccgacctccgctcgccggcgcccggcaggatggcttcgtcggcggcgtaccctgatgcggacgagaacctggaggccatcatcacccgcatagagcagaagtcccgaaagatcgagacccttctcaagcagtcgaagccggtggaggccctaaagacggcgctcgaggggtcaccgctcaagacccgcgacgagcgatgcaagtcggcgaactggatcgtggtgcaccgcgcgttgatggcgattagggacgtagacggcatgttcaactccctggatcccgagtactacgacatcctcatgaattactattgacaaaatgacaatgagttgtatgactcaatacctcaacaagcaaattggtgaattggatgggtgtatctcttgtttaatattgttcatgacatgatcaaatgaacatgtatgtatgttgatcagcattcctacgcttgttcacttcatcacatcatccttatttcgatttcacattattgaaggttgctgtgccactgaccttagaactgtggtcaaattaagttagctgtacaccaatttactcacatgtatctctttatttctgccttctatgatttctttaccttctacgattttctgattccttttatgctaatatgaagatcatttgtctgtaaataccgatgtggtgcaggtacctttatagaggtttatctacaggggataggccaacatgtgaccagtgcctcaaaattcatgaaaaactgactgagaaggcaggcctaggctgtatattgcgatcccttgctgatactgtaaacactgtatgaactttgtctctgctgctgatggtggatattgcaaagttctctcctgctctttacaatcacatcaggcaaactacctgtagttgttaactagttttgcattgtgtctttctttgccattaggcaattttagttagcgtatcattgtaccttactagaatggccgaacaaaatgtgtattatgttgattttcaagtctttgtattaggggtgacaccggactctaaattgtactctataaaatttaaggatgggattatgggctctatttctattcatttttgagctaaaatttatttaggacccaaaaaattgcgaagaaatatttggatcacgattcattaccacccctatttgtactagattttttacttccatagttagaatccaaagtgatttctatacgattagatctgaatgaatgtca

SEQ ID NO: 41212 - DNA, 564 bp, Zea Mays
gcaaagctagggaaggtggatcccaacaaactcatgcagatcacctctgtggatcgctacatcaagtatcatgtccaggagtttgagagagccttcagggagaggttccctgcctgcacattggctgccaagaggcacattgactccaccactaccttcttggacgtccagggtgcggggtttaagaatttctccaagactgcaagagaacttgtgcaccggatgcagaagattgatagcgactattatcccgagtggatttaagtggatctggaacagcgtgaagggcttccttgacccaaaaacttcatccaagattcatgtgcttggttcgaactaccagagcatgcttcttgaagtaatagattcgagtgagctgccagaattccttggcggttcatgcacatgtagtgacaagggtggtccgctaggaagttgctgatgcggtggacggtgctgtcatcagatttgttggtgttcttcccagctgctttgtggtttgtgtgggcgtacattaaacttggagtcggtattagtggagaggagagacgggaggggtggatg

SEQ ID NO: 41213 - DNA, 4640 bp, Zea Mays
cgccgccgacgccgactatcgccggaaacaggtcaacaggagagcccgttcaagtccgggacccctcaattgtccttttctctctctccccgcccaacttcccctgctctgccgccgcctccccagtccggcgtgcatcagcagcgacatcagagtcggcgatgggaggcgtcaccgacgttctcgtccccttatgttgatgaagtggcgtgccgtggagattcctttttgaccgatttcttgccggttttaccttctcttcgtcgtgcaagatcaatccttcattttctccgtcgtgcaagggggtcagttgaatcagatgctccacgttacgtccacccttgagctcgatggcagaaggaagcagtagccataggaggagtgcattctcccctgggctggctgtgttattatctggcgatgaagctaagattagctcccagaagtcgcacctggtgtcctatcatgacgaaattgggcaccaggctgttgagaggacgatagagcacatctttgatctccctcacaagtcagtggtccggcctcctggaccagttgacacaggcttcgtgcactcagtggtgaggaatcaagctagaaaatttgatcttgactgggaaaactgcattcggggataccatcgcagcgtcttcattgtggacaaaggtgctgggcagaggaaggtggttcttgatgattcgagcatttgtggtagcttcaggaatgtccggggaccttcacttgttgagagttccgcccctttcagcagtgccagggctaatgcttgtgtgtggaaaggcaaatggatgtatgaggtgacccttgagacgtctggagttcagcagcttggatgggctactctctcttgtcctttcactgatcagaaaggtgttggtgatgctgatgattcatattcctttgatggccggagggtgactaagtggaacaatgacccaaagccatatggccagccatgggcagtaggtgatgtcatcggttgctgcatcaacttggatgcaggagaaatttccttttacaggaacgggacttctcttggtgttgcatttgatggaattcgcagcgtggaacctaagaagggatattatgctgcagtatccctctcggaaggagagcgttgtcatcttaatttcggctcacatccattcaggtatcctgttgatgggtttgatccattagaggcgccaccacgctcttggtcgtttgtcacataccttcttagatgcctgttccggttgctagaagttcacaacctggagaaatctgaatcagcatacttcgagaaactgaggagggtgaaaaaatttgcaccactacaagaactctttggacccatttcagaagggatctgtgcagaaattttcagtgctattgaagcaagccaggggtgccttgagtatattgcctggggctcgttgatcactctactcttagatgttttcagaactcgtgagccgcatgatttctcatgccttgatcaggttcttgaccttttcctccggttcccaggttgcacttcattatttcaggagctcattgtggccctttcttgcatgtgcaaagttgcaccacttgtgttgacagaatgcccatattctgggtcatatccatttttagcgctggtttgccaccttcttaggcataaggatgtaatgtgtttatggtggaaagcagaagatttcgttttctcgtttgaaggcttccttacaaggaagattccaaataagcaggatctacagtgccttgtgccatctgtttggtggcctggttcttctgaggatgaagttagcatgacactgacgatgacaacactctcagatgcaataaaaaagattgaggagatgcatcgtgaactttgcagcttggtaatatgctttattccaccaatgtctacgcctcagcctccaggctctgtatttaggtcctttgtacaaagtttggtgctcaaagctagaggtggagatcataggatggttgtcaatgggactttcaacaacactgtgcttgtttcattgtacacagtaatcctgcatttgttgtctgaaggattttctatggattctgctggatctgcatcatcctctaaagcgaactttgggaatggtgttggatttcttcacaaaggtggaaaacgcaagtttccgacacaattatttttcaggaatgatgcctatcacagtgtaattcctagaatcggtggaccaccaagtattttgatgcatcaccaatttgatgctgtggaaaatgaagtgcagtgggatgaaggctgcatgaatgatgaagagacacgtgttacacacactacagcacagaagccttgttgctgctcagtgacagatgttgctgttggcctaagatacaaagaaactgctaagtatgtgccatcaacttcaaaaggctcatgtaagcctatgcctgaaagatctcctcatgttgctgctgagtgcaatggtagaggtctgagtgatgagatcgaagacaaacctagcacaagtgctcaatcagaaattgaatatggataccaatcactgcatagtcttgaaaacatgccaatggcaactcaatcttcgtcggaaacacttaaagaagaagagctgcttgatgttatgttgttgttatatcatctcggcatctcaccaaattttaggcaggcattttatttcatgtctcagcagtcgcagtccatttctttactagaagaaactgacaggcagatacgagaaaaatcatgctcagagcaagtaaggcgtttgaaagaagcccggaatagctatcacgaggatttggtagattgtgtacggcattgtgtttggtaccgggccacccttttctcccagtggaagcaaaggggaatgtacgcaacttgcatgtgggtcgtggagcttcttttggtccttagtaactcaaatagcatgttccactatgttcctgagttctatgtggaatcactggtggattgtttccatgcactgcgaaggagcgatcctccttttgtttcccctgcattatttctcatgcaagggttggcctcgtttgtcactttggttgtcaagcacttcgatgatacaaggatatataaagaattcatgcttgttttcgagaacaatcgggaggctataaataaaatgcctagatcactgttatcagcttttgacaacagatcatggattcctgttacaaacatactttcccggttctgcaaaggctcaggatttgcttcctataagaatggtgaatccgcatcatctgcaacttttcagctggacaatgaccgagttctctatgtccatccgggagatgcaagataaaaaccaggttgctgatttgcagcagaggaagtgcagtgtaatttttgatatctcatgtagccttgcgagaatcttggaattctgtacccgagagattccttgtgcttttctcatgggaccagatatgaatttgcggaggttgactgaattggttgtctttattctcaaccacatcatatcagtagctgatgcagagttctttgacatgacactaagacggccagggcagcatcaagagaaaacaaatcgtactatgatcttggctcctcttgtgggcattatcctcagtcttatggaatgtagcagcacatcagaacgaagggagctaaatgatgtgattgcagtgttcgccagcatggattgccctgccacaatccattttgggctgcagtacctactgagctacaactggagcaatgttcttcgaggggattcatcccttgcaaagctagcgcagcttaaagagttctcccattacttccgacgcattacagcgtccgtggatggtgaagaagaagaccatagcctaaacgcgggcgatgaagacgacgaccacacttgttgcatttgctacaactgtgattccgatgcaacattccagccatgccatcaccggtcctgctttggctgcataagcaggcatctcctgaacaaccagaggtgtttcttctgcaatgcagtggtaacatcggttactagatagccgattcgcgagcgatgcgctgctctactcattgcctctttcggtatcgtgatccgaaggaagatggtgccactgatttgtcttatctattttgcttgacctgagggctggggcgctggcgtcccagagatctttccattgcttttccaggaagaacgcgttacctttgtgcacgagggtcagaagcggttcttcgttttccttgctgtatatgtaaaggccaggtaatagtagaaaggattcaataacattgccgcagaaggaggtttctgtacacggtgggaagccagtaccaccgaaaggaatttcatggaatcgcaatttttgtagggtgtagggggagattccacgactgtaaatatgatgagatatgaaacagaaaagggggtggcagatcaacatcgaccttctgtaattagccagaataaaagaactagatgctttatattgagcagagctctcgtctttttgatcctccccacggtgtagtatcaagaatgaataaatcttctgtttcttgtctggttgtagcatgccagcatctgtaagttgtaacaattcagtgaatttatttaccttcagcaaaaagggtaaaaaggttgcctcttcaa

SEQ ID NO: 41214 - DNA, 1540 bp, Zea Mays
gtgacgtcacctcttctaaggcccctgtggtgccaattcagatgggctccaggatgaggccaggcccatgggggcacgattcggccttttcttgtcttgctcgtcaaaagaataaaatcccaacccataggaaagcgtagcatagcaggggaggccgggaggggagaaaggcgaactcgaattgggggaagagagcgagagacgaatcgcatcgagccggagaggaagtcagagacagggaggagggcggcggaatcggcgccggcgggaggcaggcatggaggacctgagcgtggaggagctcgcctccaacctctccacctacaaagagcagctacgcgaggtcaagaagcttatcaaggagaagaaggatgatgctggaatttctgaatatattgatatggagaaggagcttcaagaggtcataacgttaaccgaagagattttggcaactgcaaagcaaactgagagtgcccagaatgttgcaggtctatcaccgccaagctattcagctggagtgcagtctgagtcttgtggcagggactggatgacctttcacattcccataagtttgccgttggtactagagttcaagctgtgtggagtgaagatggagaatggtataatgcaaccgttgaagctttgacaccaaatggatactatgtagcctacgatggctggggaaacagtgaagaggtggacccagataatgtgaggctgcttgaggaagaagcagctgatgccttgggacaagctgaaaaggaagctgaagctacaaaaatggcaataaagaggaaaattgaacaagcagcaacatctgattttcaggcgcgtagcttgccggccaaacttcgtatcgaaccaagtgaccctgaggatgttaaagctgcaaagcgtaagaaaatacatgctttcaaatcaaaatcccgctttgagcagcttgaatttgcccaaaacaaaaggcagaatgcatggcagcagtttcaaaccaaggggaaagccaaaaaggtggggttcttctccggtcgcaagaaggagagcatcttcaagtcaccggacgaccacagaggtaaggtgggtgtcactgggagtggcaagggcctgaccgacttccagaggagggagaagcatctgcaccttaaaggtgggtccggggatgcagcggatgatgacgaggagtaaactgaagaaccgagcctctgtttgtatcccgccgaacagacatttccatacctgttctttagcgccgacatggcctcgaggggactcttgacttaaaccagaaaatttcaatgtttgtcccattctcattgttgaatgtcgctgccgttttggagctgcattctggtggcgaggtcacgctgctagaggagggcgtcctgagcgtacagatcgacttgtcttgctagtctgtagtgaagtattaatccttaaacgtttactaaaattgtcaccggcctaagtacagatcctttgccccaaccaagtccattgaagaagatcaataaactcgctactgctgagtgtactctacaaaccg

SEQ ID NO: 41215 - DNA, 410 bp, Zea Mays
cgccggctcaggccgctcccgtttctgggtcgacgcgcacgccgcagagctcgcgatagccgtcattcccgccgcattccgattccgactccgccttcgcccccacggaggcaggtgaagattttgcctcagccgtcgaccatcgttcgacatggtacggatgcccggggggttcatggcctcggttttataggcgccaatggggaaagatcgagtttgatttggtgaatctttatccaaggcgaatgatctggatggatttagcctggagtttattgcagcatgcggtcagggggaggaagaagaccctgagatccccgacaacgaccatggcgagcacgagctgttgcgggatttcagcgcggagagggaccaggtgtccgggccccacctaccggcggagaacgtgc

SEQ ID NO: 41216 - DNA, 775 bp, Zea Mays
agcgacagggcaaggagccagggccgctccgctccgctccgctcgtgctctgctcctgctctctctctctctcggcgtcgattgggcgaccgccgccgcctcccccaggtcttcgctgggcccgtcgccggcgccgagcacccaccagggcaagttttacttgataatgtggacatcaagacgttgcaattaaagcgacttagagaccagatcggattggtgaatcaggaacctactctttttgcaactacaattcttgagaatattctttttggcaaacctgaggcgacaaaggcagaggttgggtctacgactacttccgcagtagattaaaggagccctagctttcggaggacaacccagatgccttcaaagttcaaaatgacggtgatgaaggcgctgaaccgcgctggtggcaaggctggaaacaagggtgctgaagctgctcttacttccattgagatggcctctctgttccggcatcacttaggctgacactttgcatattctggtttctatacacgagctcacaagacatgtttctaaacctggcacaatgaataattgtcaccatgaggtcatgaataagcacaactgtcacggcgtgtgctagggcagtggggctgtcgccaaggacatgcagcttgtgaagcagtgctggagccgtccccatcgccgagcagctcgtgagggtaattcaagcacgctaatgcagtctggtcctacaatagcgatccttggtcttcacctacatcttcacctaccgaacatcagg

SEQ ID NO: 41217 - DNA, 660 bp, Zea Mays
tccagttctctcaaccttccccagtttggaagggacacgagcggatcagaacgaccgcgccctccgtcgccaccaccatccgctctgtcgccgctctgctgccgctccatcgtcgtccacactaatgccatccgctctaccgccgctccatcgtcgtccttcctcgatgcaatcgcgagcgatacgtgaggcgacagtgccctccaccaccgccatcgtctcagatttgtcgtcctccaccgccatctctgccctcagtttgctgtcctccaccgtcgtcttccgtggcacgatgtacagtacaatgttgtctccaagacctagtacatggtcttctccaagatccagtacaaggtcgtctcctccaagatccgaaccccaatgctagtgagcacatgaaaccaacatggagaagaaaaatgaaatggcattccacatgaagcttgtgaaaaaagagttaaactcgtaatttattctagtgccgaagttcctaaccaagagacttgtattccatttttatattatattgtctatctatatgtgtgaatagaggcaaccttatatgatgtgatgatggatgaattagcttcgatggatattatatggtattcaaattaaactttacatgaatcatatgtggtgcattatttttggatttta

SEQ ID NO: 41218 - DNA, 715 bp, Zea Mays
gtaaaaatgaattgctgctatgttttacttggtcaggaaaagaacacagcgatgaggacaatagcaggattgcaaccactgcagtgtagcctgctctcgtgcatgtgagccttgccacaccgctcgctgggttcgccgccttgccgcgcctacgctagccagatctggatctatgatacgactcttgcctcttcctctttctttttcagcgagaagaaagagatttgcctgacgatgcgagacatgagtctcgatcaatgaagggtgggctcctggttgcacttgcaccacgacctttatatatggcagcaaggaccgagctgaatgagtcagccgacgccgaagaagcctcggacgccacacgccagcgcactgccctcgccttcacttgctggcactcgccgtgtacgcggccggagagctccgccagagacgccacttgcgaccgcccttgtgccccgctgccttctcgggcgccttcggggctaccagcgacttgattgacttgctcgaccacgacgatggagacggaggggtgtttggcgagcgcgtaggggggaacggagatacagatggccgtcaggatgggcacggataggttgctgccgagcagcggcgagcccagctccgtcgagtggtggcggtgcagggacggagagcatgcgcgcatgcgaggcagccgccctctcgctcgcgaggttgtggtggatcggag

SEQ ID NO: 41219 - DNA, 1847 bp, Zea Mays
atcgtttgcaattcgcataaaaaaaggcgcccactagcgcgcgcgcgcccgcccgcatatacagacacgccgcgcatggcgatggcgagagagagagagagagagagtaggggagggatcattgaaagccgcagcgcccatgtcccaggcccgtctgttcgccaccatttgtccattccccctccatcattcctccccgctttctccaccatcagggcgaaaattttatgcgagctttggaaagcgcgagctagtttatccggccgggcgtggtcaccgaggcagtagcggcgagagaggggaggatctgatcgatgtcgtcgggcgaggacgggtactgcagctcggattcgccgcgggcggaatcccccgaccagccgcaggcagctgcggcggcggacgcggacgcggacgcggagtcgcctcgcgccggagccgggccgaacaagcgcgacctccacgcctcgtcgccggcagctaagcgcagtgggtactaccgctgcagcagctccaaggggtgccccgcgaggaagcaggtggagcgcagccgcgccgaccctgccgtgctgctcgtcacctacaccttcgaccacaaccacgaggcgccgcggcccaagagcagctgctgccaccagcaaggcaggccgccggcgccgaagcctgatgagcccgtggccgagcaggaggatgagctgggtccggagcatgagccggaagacgagcaggagccggagcagaaggtcgtcccaggtctggccgggccggaaacggcgccggcaaccgcaacgttggcgccggtggcagaggaggacgaaagcttcgacttggggtggttcgaccagtacccgacgtggcaccgttcggcgctgtacgcgccgctgctgccgccggaggagtgggagcgggagctgcagggggaagacgccctgttcgcgggcctcggcgagctgcccgagtgcgccgtcgtgttcggccgccgccgcgagctcagcctggccgctaccgcgccgtgctcctgatggtccttaaagtcttttttacactagtagctctgatcgctgcacggggcatctgttcaaggccgtctgctgcctaagctttctgtccccgtgtccgtgttgattgggtacgcgcgttcgccgtccaaggttcgtttgtcccgtttgcgatgtggttccagccagaaagcagcgaaaggtttggcatttgtgatcagatcatggatggagacatggctcgcgccgccacgagctgagctacggcgtggtgagctccgcgcgccaagcagacaggcttcgtccgatgcggaaggggaatctgcccacctgacggcaagtcgtgggggcaacgcaccggcttgtccgtgtggtgtgccgccgcggtggttgggaacacgcacgcgatcgagggaggccacgtgcgccgcgggtgctacggatccaaccccatccccacctgcgggccgcgtgctgtcctgcccgatcgcagccggctagtggttttgtaacgaactgccagtcagtcatcagggtggaggcagaggcatggagcagagccgcgacacgcgacggccatgctgggagtgggaggaccgggaaactagctggccacgcgtcgcaagggtacgctggccgctttctttgggtgattggatatgagcgatggcgggacgtaccagctgagctgacaagctcggccctttattattactagaaaaagacagcgccctatcgggcactgtatgaggtatatatacataagtatcaggcaagaagaaaatacgaacaataggacctaaaaaaacagcaggaaaaaatacgaacaatggaacccaaaaaaaaacagca

SEQ ID NO: 41220 - DNA, 2157 bp, Zea Mays
gccaaatcaagccctccagtcacattccattcgacggccggagcggcgcctcctacctccgacctccttctacaagtcagatccgtccacatatacaacactctcaggaattccctcctctaccaccgcaccgtccacgcgaactcaaatcctgcaaactcctcgcgaccacctcacgcggatcggcgacggcgatggtggcggcctcctctaccgtcgtcgaggtagcggtggcagcagctgcggcggcggcgtcagctttgccgcaggagcagcaggcgcagccgcggccgcggccgatgcacgcgggtggcgccaatggccgccaccacgcgtacagccgcaaggacaagtcgctcggcctcctctgctccaatttcgtggttctctacaaccgcgaggacgtggagtccgtcggcctggacgaagcggccaaacggctcggcgtggagaggcgccggatctacgacattgtcaatgtgcttgagagtgtcgggaagattctttcgaggaaagccaagaatcgctacacatggataggtttcggcggaatcccaatggcgttgctagaactcaaggaaagggcgttaagggacaagtctggtttggcttctcagcaaaccgagcagcaatctgctgccacaatttctgatgacgaggatgatgatacattgggcaaagaagttgctaatatcgagaatgagaaactgagtcagactgttaacaatccttctgacaaacctggtgcaccccgttgtcgccttagatctgatcataggaaagaaaagtcacttgggttgctcacacagaatttcgtgaagctctttctcaccatggagcaggttgacacgatctcacttgatgaagctgcaaagctgctccttggggaaggccacgaggagaccaatatgagaactaaagttcggaggttatatgacattgccaatgtcctgtcttcactgaatctaattgagaagatacagcaaggggactcaagaaagcctgcgtttcgttggttgggtagggccacaacgccggacacagaaaatggtgtcacagttgttgtacccccaccagggaagactaaatcgaacaaaagagcatttggaactgaactcactaacatcgacatgcatagaagtaatctagattcaaaagttcagaagaaagcaaaactggcaaagagtggtggcgatgtcttgataaattgcaaattggatagtggtggcgatgtcttgataaattgcaaattggatgtacggaatcggcttggacagggtaaacaaagtggcattgtttatggtcctttccaccctgctggcgcaaggaaacatgaacttgctggtggcaataaccccgggcaaagggagatggccgaggactggaagagcctttctgctccatttcgaccacagtacaagaaccaagcactcagtgatctttttgcccattatgttgatgcgtggaagacatggtattctgaatttgctcaaggcagcaacatcatgcaacaacactttggccattttgatgctacaaaatagggaaagcctcgaggcctggcctgtagatgtctgtactcagattatgcaaagccagctgatcccatcgtcttgctttaatttaaccgtaaagacaattatggtcgcgtaacgacaccaggactccaggagtacataggagtggtggtctcagcatggtctacagtacaagcaagagtttcaggctgcaaaattgtgatcccaatattttggttgtatgggttgttgtcagtgtttggggaataccatatctccaaaggacatcaagacgtattcaaatatccctgtaactgtcatgcgctagatgccttgacccaccgagcgctatgcaaagcttgagaaggatggttcgtcgaaacatgtcccaagtgattgactcctcgccattgcttgggttgttctgaataaatatgtttagttggctacttgccttttggtttgtctagctaacacaatttaaatcaaatatttccccaacgtcatcgacaggaacactgtatctactgaccattcgtgattttttttcttggactatggagagcatctgagctacaaagctgttctcttggctacaacttgatatatcaaattgattttgtttgtcccttagtaaatt

SEQ ID NO: 41221 - DNA, 546 bp, Zea Mays
gaaaaattcccagaaactgctaatactgctgctgttcatccccctgaaaaatctatttttttggacagccacatacccggattcaaacggtgataactttcaatttataactccaaattgagcgcataaatactcgttggaaaggtaaggtaaagttctacatgatccccaaactgatttcccttaattcctcacgaaaaaaacacataaactgctagactactgctgttcacccaccacctaaaattctggacagcccccctctaccccaatcgcaaacgcaacctctaatcaattaaattgcagcgcaaatgaacaagggatgaacacaaaaatcaccttggattctccccctttccttcctcccttcttccctccaccaaaacgattgaagactcgcaccacgatgacgatgatccgagcggcaaggattggcaccttgggaggatgggattgagagggggggctagggtttggtggctgcaagaattgagagaggaggagatgggcaggggggcggcggccaaggggaaagagaagtggggg

SEQ ID NO: 41222 - DNA, 510 bp, Zea Mays
ctttcatgctgaacaaaccttccgagtcttctttttctcccttgcttcgtacgcctccgaagccgaagctacttcatccgacacatgtcttcggaatcccagcatgcagacgaaacttcatagcttctccttttgattcgttggctgcttttgacaaaggttagcttcgttggttctttgcattgtacctgaaacacaccttcacaatttcgtaataagggggttcgaggatatttggcaatataagtccccaatagtagccccttgcataattagttcgttttctcattatgagcttaggccgcaaaaatgtgattgtgaggccttgcgtcgaagatcctataaacaccttcccgaagctcgttatgaaaggtacttcaaggaattctggttagtggggtcaactatttagtgactaaatggtttactttgattttttttgtattgaagggcgacactcacgatgatggtcatggcatccactactttttctcgctctgtttgctaaat

SEQ ID NO: 41223 - DNA, 2288 bp, Zea Mays
ggaaacggactaccagcgctgagccgttccgtttcttttcaatcttggcgttttgtctccattcaatagggaaagggatgtttcgcttgaggctttcctttgtgcctgtgtcttctctgtagctttcaagagaataaaaatttggagcttctctcgcaccagcgtcctttccttcttccttggtttcatgctgacaactagggctgatcttcaggacggcctgttcttggttcggttcctgagagcgattgatagcgccagacggagtttcttctttaggagtcgtgcactatgggtaattgctggtttaaggggaatccatactttaacagggtttcttccaatgcaaccaaagcaggtacgactatttattactttggtttgatctctgtgatgatgtaactgcaactgtagtatgcagaagtttcatatatttgtttgatgccctcaatttagacattaacgaaactgctgctatgtgtgtgttctctcgtcttgatagaatcagggaccatgtccctgctcttgtttagtccaattacggctatttcagtactgaatattttcttcacaaaaaatcagtcctaatgttcaatcttatccaacccaatgattcttttttccctaaccttgacagttgattttatgattattccatgtaatgatcagatacttttgttctgccgtatgaaattcttgttcatcttttggtaacttatttacaaagtttctgaataatctgcaccctgtatttcagtccccgtacttgacttgtctatttgttttctgcagaatctcccaaaattcagagcccctcggagagaactgaaaaggaggattgccagctaccatccaacccgaaagaggtggaggcgctgagaaaggatacagctcgcaatcctttgatagcgttcacatttgaggagctcaagagaatgacaaaaaatttcaggcaagattcgttactaggcggtggtggatttggcagagtctacaaaggttttatcaccaaggatctccgcgaagggttagagatagaagagcccacaagagttgccgttaaggtccatgatggtgacaatagcttccagggccatagggagtggctggctgaggttatatttcttggacagctctctcacccgaatttagtgaagttgatcggctattgttgtgaagatgaccacagggtccttgtttacgagttcatgcctctaggaagtgtggagtctcatttgttttcaagggttatggtgccacttacgtggtcgatcagaatgaaaattgcgctcggtgctgcgaaaggacttgcttttctgcatgaagctgagaagcccgtcatctatcgggacttcaagacatcaaatatattactagatgaggaatataatgcaaaactatctgactttgggcttgcaaaagatggaccagttggcgataagtcccatgtttcaactcgtattatgggtacctacggttatgctgcaccagagtacattatgacagctatggtgttgtactactggagctcctcacgggccggaagtcactggacaagtcccggccagtcagggagcagatgctggcagactgggcactcccattgttggcacagaagaagaaggtgcttggcatagtagacccaaggcttgccgaggactacccagtgaaggcagtgcagaagacggcgatgctggcgtaccattgcctcagccgcaacccaaaggctaggccgctgatgcgcgacatcgtcgcgactttggagcctcttcaacagctggaggagacccctggagacagcgtggcagtgacacttgaagggacttgaagcagtgttccattcacagctcacatcacagtcacacacagctctggaaaactcgggtgccacgtacttaactatgcatgataatagtagctagctagtgttcttgatatgcaggatgatttcttgattgtttaattaatccatggagacagtagctttgttcagcagaaagttagtgtgtatctcagtaggacggttcatgtgtgtgtatccaggtgttcagtcctggcgtagcgaactccctggcatttcggatgcgggcaagtctgtgcaatctgtatttgcaatgcttgttgcccgcagaggaagcttgcttaccagtgtttgtaacctagtattgtgcagttcatgatctatgcatgttgaataatgtgtgtgtatatatatatataacaggtataacgggagcactgagcttccaatagttaaagaaagcctaagccgaccaaccctgcaacct

SEQ ID NO: 41224 - DNA, 1738 bp, Zea Mays
ccgatctgctcccccaaacaacacggacgcacacgcgcgcgcgcagggaatcaatcacgcacacgcgcacgcaccgccacccttcccgaaaagtctcctcacctcccggtcccggcctcccttcctctctctccccccctctcaaacatccccgcgccgatggatctccgcctcgcccactaggcctccggcgcgaccgagggtgggcagggggatggggctcctcgggcggaggacgttgctgcggctcctcgccctcgcttccgcggccgtcgccgtcgccgtcaccgtggaagcctacgagggcgacgctgatccgctctacaggcgaaccttcggggttactccgttttaggcctcgctggacatcccagtgctgtccgtctcggtgcctctggtggtttcagcgaaggcgagcggttccggaaaggaataaaaatggtgctgtctgtcttcgcctcttggctactggcattgggggtgtataagttctgattacgctacatgattcagaagcttgtgtggaaggatgccaaaagacaggctccctgaaggagacttctattaaacattgtatggtgccaaccgatggccaacctgttgacaagtcatggtacacgcatgagccactgtacttgcaatggaaggactggaactgcaagagtgaatgcagataccactgtatgatggaaagggagaatgaaagggcaaagcttggcctccagcctgttaagtatcatggaaaatggcctttgaagcgtgcctctgtgtttcaggaacctttatctgcagctctctctgcgcttactcttgttgtgcaatttaatgggtggctatcatttttcctcttgctttattataaacttcctctgcggccagaaactcacaagacatactatgaatacactggcttgtggcacatctatgggctccttgccatgaattcatggttctggagtgccatatatcacagttgtgacacaatttggacagaaaaactatatttttcatcagatgctgcctttctggggtattccctcattttggcgatactgcggactttaaatttaagagacgaagcatctagagttatggttgccgctcctattctagcatttgtgacaacccacattctgtacctcaacttctacgaacttgacaaaggcctgaacatgaaggtttgtactgtgataatcattgctcagtgtctcctatgggcactgtgggctgtcatgactcggcatccttcacggctgaagatcatatttgttgccatcggaggtgcggctgcggtacttctggaagcttctgacattcctccgcgatggggatatgtggatggccgtgctatatgccttgctgtggctatccccctttcgtacctttggtggagctttgccaaggaagatgcggagatgcgaacgtcagcaatcctgaagaaggcacgttaacaagtcgcctgtgtgataatttcatgcctgcgcccagccattgtaaagataaaagtttcacttgtaatcttaggtaactactaacttagcatgtgaattaccgtcttatttttgttccacgatgttcttgtcccagttcagaaggccatgttgtttaaggggccacttctattctttaatttatacagcaactgccacttggtaggctcgtgctcatcaactataatctcagaagattgttaccatgggttatcagtgagtggctatcataataatgtctttttttt

SEQ ID NO: 41225 - DNA, 2734 bp, Zea Mays
cactcctccaaccaagcgttctgcttccgtcctccaatgcccacagtttctgagagaaaagaaaccgacagctcgacccggatcatctctgactccctgcagaatcaatcatcggttccacactatctcttccaaaatttcgttgataacacctggcaagttttttatcgcacctaaaattctatctgtctgttgtctggcgctgctgtatcactctgaatttttggttctggcccaaatcttgttctttttccggttcttctgatcccgtctttatcctctcaaatccactaaaccactccaaagatagaatttttctgcatccgaagcccagatatttttttccttcggtttgttccggcggcaggggtgcgaaatccctcaagctggcaaccccggcgcggccatggacctccccgagagctctgtcccccgcgcagacaagggcccggcccctcgccgtctttgccccgtcgaccgcgaggagctggtgcgcgccatggcacagtcgctctactcgctcgggtacaggcgggcggcggccgcgctcgaggcggagtccggcgtgccactgtacccgccggagcatgaccgcctgctgctggaagtgatggccggtcagtgggacgcgtccgcggagatcgtccgctcggtcgccggcgtcggcgaagcggaccgcacggtcgcggagttcctggtgtggaggggctactacttggagctcctggggatgcgcggtgacgctggcctgcgccgggcgagggaggtgctacggcgtcggattgcgccgctcggcgtcgacaggaggtgcgtacacttgctggcgcgcgccatggtctccagcgagggggccgttgcgccggaggccgtggttgggtggaggattgcggtgttcttggatttggtcgaggtgttgccaccatggttccatgtggctagtgggcggttagagcatttggtggagagtgcggtaaccaagcaagtagaatcttgtatatatcacaatttgccggatgagatcactctgtttgaagatcataggtgccatgaagagcatatcccctcccaatgtgcacagattgatccctatctatatttgattttggaagcataaaagtgcaatgcagttgggaaatgcttctcaaagtacctcagcaatattaaatttctcctgtaccatgtttgcaatatattatgtggtcataataatgaagtttggtttgtaaggttctcaaataatggaagctacctggtgtcatcttcaagtgattgcactgccataatttggaaggtggaaaatgatgatacattgaccaagaagcactgcctccagggtcacgaaaaaccaatttcctttgcttcctggagcccaaatgacagaatgctgctcacttgtggtactggtgaatcattaaaactgtggaatgttgatactggtgaatgtaaccttaaattcagaggctcagcagactgcatcatcagttcatgtgcatggtttcctaattcggagaaaatagtatgtgccagctcggagcctgcaagtgctccaaataggatcttcacttgtgatctagaaggccaaaatctggaagtatgggctggagatagaataccaaaagtcagtgatctcgctgtgacacctgatggccgacacctaatctttgtatcttgcaacgatatctggattagggaacttccaagggggcgggaatggagatttcgtgagaagcagacgatttcatctctttctctctcaggtgatgggcagtcactcattgtgaaccttaacagtcaggagattcatctgtggaaaattaatgaaagttgtactgtgcctgaaaagttcatggggcacaagcaagacaagtttgtgattaggtcttgctttggtggttcaaactcttcgttcattgctagtggcagtgaggattcacaggtctacatttggaagaggcacgtggagatgccgattaaggttctacatggccacacgatgattgtgaactgtgtaagctggaatcctgcaaggccccacatgctggcttctgctagcgacgaccgcacggttcgaatatgggtagggcgcaaaaatgcaacaaagtaaacgctgttgaagtgtgaagttttgtatgtctgtgtaaatagttgtacatctggactgcatccacaaacctgtttgggacaatgctctgttcttcacccctgatgaatatgtcgtcgtagctatttgttcagaaataaacctgcaacagccataggtagccggtgctgctgtgtccagatgtgtgcctggctaaccggtgagttttgacatgtgtacaggacaaagatgcatcagaactttgtacatcttgttagtatatgccttggacactcgaagtgctgaaatatgccttctgttgctgtggatctagtgttcgtgtccttttatctttttcgcttggttcatgtgctatcttgctttttgtttagaataccccataacttctttctgatgtccttttcaggtgactttgcaacctttggcatggtcaacaaatatgtataagatttgtaacagcattataattggctagaatcgtgcactagcaaactgtccagcacctcttagcacattttatgtacttgtagttttgctagacagttttggggtgatatcttttcacccttgagagaggggatgaatagatgatattgtaaattttgctcaaaacaacacaaacttggtttataa

SEQ ID NO: 41226 - DNA, 3338 bp, Zea Mays
cgcaggcagtcgctctcgcgcggcggctctccccgcctcgttcgcccctaccgcgccatcaacgtgcctccccgccgcccctgtcctccccatgcccgccgctcccacccgagatggttagcgcccctcctccttccggtcccttcccctgcctcggccggccagccatggattcaccaagcgggctctggtggcggccggcgccgtcgtcgtgtcctccattcccgtcaaccccctcgatgtcgccaagatatgtttaccagacgaattgatatctaggctatttatgtggttactaattttgactcctctaagacatatttacacagggttggtcgttatgggagatatgggcaccttggtttggcagtgaacttgaccacttacaaagattgtttcaacttatatagtattgataaaaaaaacttggaacggaaattaagacaatacccccacaaattgacctgtttgtatactgccaatgatgatagcgacagcttcatgagctggaggaggaggagaggcccatgtcggtggagctggaacccatcgccagcgagcagcagcttaactaggtccttggagaggcgtagcagctccagctcctcatcgtcctgctctggtaaccccactttcctagatcggtttgtgcctgtagggtgttcttgttaaagtttgcttgtaatgtctgtgagattgcaatcatggtcgtgtatgattgcggtgttcacagattttgtttgcttgttcctagatagtcatttatgtggtgcaaatttagcatcttggatgaagtgaaaatggacaattttgttcatttgttattaggttctggcacttggacttggtatttagtaactgagaatttacttatttagtagttatacagcccgtgtcattgtcgttgggcgaatgaatttcatcgtcagtctattgcatgaatgataaatgcatgtcggtggccttttgccgaatctaccattttgtttgttcctcatctccattcctatctgcttgtttattggtagtagaagtagaactgctatttatggctgaggcctgagggaaaaaataatcaaatgttcaaccaacttcatttttttcttgagtgcatgggttgcagcctttggctagcttatgatctcgtgtggtctatttaccatataaataaatagcagcattagttcaatttgatgttcatagttctctctctctaaagagtcatatgttagattcatgggaaatacttgaactatacatttttttaatgtatcagatgtgtgaattatcatgtccggatcaatttcaaccaaccaacagttcctttagcaaatttgtcaggcatatttatgcacttgttcgcataactgagactatattatttttataagactaaggtcagactattgatggtttggtttgggtggcaccttgttcttcgttccttgccatttccatgccatccttttattatatacatacatttatttggagataaaatttgatgtcaagagaaacttgtctttctttcactctccaactcatcttcgtagtttgattctcatgggaggaccctgtttccatcatgctgcatctttttatctgataaagtgatatttcttagagcatcaaggttcgacaaccaacatattctcgtgtgaggaaatggaaaagtgatgtcttgaggacattttttatcttttgatgttgataattgttcatattattatggttcaacaactcctagcaccaagtcattctgtatgatctgttaacttgatagaagttaacatcatttgattttaagaaatgtaatcatatttcctgattgctcagaattgacttgttcatcatttttcaatgtccctaattggtattagatttttgtgatcttgtgtcatattctgtgatcaacaatgtacaatttgttgaataggctgttgttgaaaaagctgtatattatgctcttgtatggatcaataggctgttggctgtcggtcatgacatcgccatcaagacagataggaaagttatattttttcctaactatatatgctcttacctattcctgttctccatagtacaaaagatgatattgattttgtggctggtttcatttgttggaatgctcttcaactttcttacgctcatttacattggtgagttctctgtccatgttaattttaagtgagtatgtaactatatgctctcatacgctttagggatccgctacgagcagcctacacatttatcatctgttcccatgcttatttttccttttttttattagtgatgggaatcgtatatccataaatagatctggagactggagcagtttttgttgggataaactttgtactggaccggagcatcttatctctggatgtgagtgccatgaaagtgatacccaacaaacaactaactctggaacacctttggtatgtcgggtaggcgcaaagccagcaagacaacaactgcttgagcagctttggccagttttgcttgccaccatgaatagccatatgttggccatcacatggtaccttgttcgtcccaaactagaccagagcattacaagcaatgactgccatatctaaaattgaaaacatgtgcggcttataagtatcctaaatttgctccacttctaagtatccaagatctactggttttgatgcgttccattgcttgcagcttttctctgcggtaaattgctggcttaaatgcatgctgcttgaaccctataatcagatagaccatcccgaatgcaagtcaaggcctgatagtggtctttctgcaattacagagctggaccctggttatataacaggtcctctctcttcagtatggaaagaatgggtcaaatggtgtgtagagtttggcattgaagctaatgcaattatcgctgttccgtatgattggagactgcccccatcaatgcttgaggagagagatctgtactttcacaaattaaacaggatcagtaagagttaatggcccagtgacggattcaaggtatcctgctcaccaacagatcccacaagcatacggttaccgccaaatgcctgcaaggttggacagtaccaacccatcacaggccatgggaggttacacgctgcagtcacagaaggaaacattatttgaagagttgccattttgaagagttactcgaatccaatattttgctcttttgaattccttggtgtacactggcaaatattagcatatttgaagagttgccatttcgatcatcatcttcatttgtactttttgggtcagatctaataaagcatcagcattaaatttacaatgatcacctaaatccatggtttttattgcct

SEQ ID NO: 41227 - DNA, 2195 bp, Zea Mays
cggacggcaatgtaaactagttcaagccagtagtgaaagccgccgggcagggcggcagtataaactagtgatagccactagtggtagtggcgtctgggtctctatatatgtacgtctgccatcatcccatccctatccccccgatcactctttcactctactccaaccactccgcggaatcgtaccttacccagccttcttcctcgtcgccgggctcgccgccagccatgtcggcggcgttcaaggcgttcctgaatagcccagtgggccccaagacgacccacttctggggacccgtctccaactggggcatcatcctcgcggaacacagaaaaatgaagtccggcacaaactaggcccgtgcgcgccatgcgtgagttgctgaggcaaccaatcacgtagactgtgaatgaacgctcactacagagtacagacgcaccatacaatagctccacaaaactctgcagcccactgttgacacttgacagcgccgacagaatctcttcttttattttaatccttttattttaattcatcatctcctttaatttgccttcttcaacaagcgtcttttggacttccattattacgtaccgtttgatttacatattggtaacgtaatggataatctatcgacgaaaccaattgtatattatttgatgaaatcactctcttatcaaggaacgaattatttgctcatccggtctgaaagtatctgacatccaatccaaaaaagaaaaagaaataaaatgttgtcccatgctaggatgcaagttgcaacccaaataatagaactccaatcattgatactcagtctgatagctcatatgtgtcttacctctacgctctgtaagttgttttaggggtggaacatgaaacaggacatttctccccccaaaccgtcctcttatcccatgtagattggatgagattgaaatagattataaatgattttgacttggctaggatttaaacatactaaatctcacccaatccatatggattgggaggaaaacgaacaaaccctacaaagggcactaccccaagtgtcttttaaacatcttgtttgattttaaacatacaaatgtaatatcctgcattgtttttaaatgttatctggatttaaataaaatgaaatggctttgctaacttttcactaaagcttctaactatgaaataattttaaaagcacaatatctgattcacacttgtttccgttcactattaggtgtgtttgattctcctcactaaagtttagtcaatgtcaaatcaggcatttgaatgacgattacaaatattaaatatagcctaatcataaaactaaatatatagatacaaggttaaatgatgagataaatttgttaaccatagttaattcatgattagtaaatatttaccaattaggcttaatagattcattttacagtttagttcttatctatataattagttttgtaattagaatatatttaatatttctatctagcatcaaaacatctaatgtgtcgtggactaaaatttagtggagtatccaaacaccacctcaggatttaacgcttggcgttgcattacaattacacaactaatgaaccctgaggatttcttttaatatacatacatatatattttgcagagcgtggcagacacgaaaaagcctcctgagatgatatccggcaacatgacaggagtgttgtgcgtgtactctgcgctcttcgtcaggttcgcgtggatggtgcgacctcggaactatttcctcatggtaacccacagctgcaacgagtgcgttcagctctaccagctgtcgcgctgggctagggcgcaggggttctttgagaagaaagaagaggagaggcccaagagcgaagattgaccgacggcccggccctaaaccatacaatactacaatgtgctcggttgtaccacaaaggcaatatttgatgcatgtattgtaacgtgaaaaaaagcctcggttatacatgttgtaggttcatctgcggatattgaactatgaatttccgagcataaagcatcaatttccactgccgtcgtttctcccacatttaaattatataaaaaactaaaattatacataaatgaggatttgaattatgactattgattctaaatcgttcctcccacattcaagttataaaaaaactaaaattagacataaatgatgatttgaattatgatta

SEQ ID NO: 41228 - DNA, 979 bp, Zea Mays
aagagcacacggaagaagagtagtgagcacggaaccccaccaggcagaggcagtaagccaccagctgcagccgccagcacagcgcagggcagagggagagggagggcaccggcacaccatggccgtggggggccttctgcggggcctcgtttcgccccccgcctggctaccctgccatgagctcttcgcctcctggcaccactggcttccctccctcccgcgcctccgcccgcccgcatccgacggcttcaagcttctcttggtgctgctgctcttctccgccgctctagccgaggtccgctacatcgcctcctcctccatggcgcccacgcttcgtccaggcgaccgagccgtcgccgagaaggttacatacttgttccggaggccatctattggggatatagtgtttttcaaagtaccgactgctgtgcagaattatggtgtcaataaggatgttgtctttattaagagagtattggcaacaccaggagacttcattgaggtccgacaagggcagcttattgtaaatggtgtcgcactaaaggagcattacgcagcagcaacgtcattgtacacaatggaagcaatggttgcgccttcctgaaggtcacgtatttgtcatgggtgacaaccgcaataacagctgtgattctcgtgcctgggggcctcttcccgttgccaacatcgttggaaggtacatgacatcatttacaagatcctctttccagtaactggggttccactcaatgttcgtcctcataaatcaatcatagttagagagttgtggagccaggcggctgctatcttgtcaatttgtagcgatgtttgttgtatatgattctcacttaatttggacatgcatgattgtgtacttgtgttgttataaagtaagcatgttttgttgttgtatatgatcgcacttaatttggacatgcatgattgtgtacttgtgttgttataaagtaagcatgttttgttc

SEQ ID NO: 41229 - DNA, 1922 bp, Zea Mays
gccaacagagcaacgcccaggaacacacgacacgaatcaggcaaccagctgccgagggaggaaccctagcggaacaggtgacggcggcgcgctaccggtgacgggggatacggcggcatcgtcctcctcggcccctcctccatccccggcgtggcggcgccagcagccggcctgcagattaaaggagccccaggagccccaactttcggaggacgacccagctgccttcaaagttcaaaatcaaaatgacggtggtgagggtggacgagaaccctgcgccggatggagagaactctcccctagacgatgagtacgtctcggccgacgatgaacacgttgatgatgaagacaaggagaccgatagcatcgacgactatgaaaaccccagcgggacgccccagatgaagaagggtccctggtcgcccgaagaggataagcgtctcaaagactacgtcgaggtacacggcgcggggaactggaataaggtgcagcagaatgccaggctcaaccgctgtggcaagagctgtcgtctccgctggacgaaccacctcaggcccgatcttaagaaggagcctttcaacgctgaggaagaggaaaagataatcaagcttcacattagacggggccccaagtggtccatgatggcctcatatttgcctggccgcacagataatgaaataaagaacttttggaataccagaaaaagaagaaaacagagatgtggttcgcctctctatccagaatatatgctttctcaggttagtcataaagacatggactttgaaactcttggagagtcacatggcaagaaacggtcaaatgagtgctcaaaagaaaaggttgttgatgtgcaagaacttgtggatgagttaattgtatttgagcaccttgactatggtaaggatatagtgtttccaatcagacctttgaaatgccatgcatctactggcagtgtgcaaatttctggtgacattcggaaaaccttttgtcccactgatttgaactatgtaatgacaaagaatcagtcggtgcctgttggtagtgccattggcagtggctatccactttctgtgcccctgaacatgatgcctgttctgaaactcaagctccagacttatgttcaggttcagatgttgttttcgaccccagccaatgttatccagttgctagtttttctgatcttgggatctcggatacaccactaacatcaggtttcttgaatgatataacactagcaagtttgttgaatgtcaatttgaaggacctgtcacatctcaaccgacaggaacctaccaatgatacatcacttggaggagcaagtttattgaatgctaatttgaaggaccagtcacatctctctcagtgagctggaatgcatgtgcctgacttgtgggggcatggttttgaaattctcaggccaactttccttcactcgagagcttgatagagagaattcacgaggatggaagagtagcagagaagacactggacctgccaatgtatgccaagtacaaagactcgccttatctgagaaacccttcgaagcacgggagtactatcggtgggacccaggctgagatggattccaagtgagaagccccctggagggccactagataatctgttacttatttgccctatggtaaatgcgtcggtgttgatgcagaaacaattggactcattgtgagcttactcgcttcttttcgaaagtagttagtattcctcgaagtggtgtttttaccttgtaataaaggaaaaaaaataaagtggggttattgaaacttgagagtcaaatactgagatgttatgcgcgttttgatttctgaattaatcgatcggtatcacttgtactgtttttatacgacgatgctcgaaaccattcatttgtcattttaatttgatacacttgaagtcaacaatat

SEQ ID NO: 41230 - DNA, 2388 bp, Zea Mays
cccgctcgttcgcctgcacacgcgccaccccgtcctcctcaccccgcctccctctctcgtctcgcccccattgcgcggcgcgggcggcagcgatcgcgcgcgggggaggcctagacctagttccggaggggcaccgacccaatgcaggggcaggcgtacagccgcctaggcagcttcggcgccgcggcgagcgcgccgccgccgccttcggctccggtgcggcctggggccggcgctggcggggccagccggacgcccgcgaaggctggtccagcgagggccatcccggggaccgcggcctcggcgacggcggcggcgcgggcgggggttgcccaccgtggtggcggcggcgcggcgcggagggtggccagggcggtgctcgcgacactgctgcggaggcaggcggtgttcctcttcgcgccgctcctgtacgtcgcagcgatgctgctgtacatgggctcgctcccgctcgacgccgtgccgcggattatcgcgcgccagccgcccgggtccgtgtaccgcagcccgcagctgtacgcgcggctccgcgccgacatggacgccgacaactctaccggcgcgctagcaactgtatggaggcacacttacaaaggtggcacatggtggccctgcataaacaacatgacaaatgatatgcaatgcagtcgccattgctggttttctgaatgctactcttatcatcccaaatttccatttccatagcatttggagggatcctagcaaattcagtgatatctatgataaagatcactttgtacaacgtctacaaaatgatgttcgagtagttgacgaaattccggatttcatgatggagcgatttggtcataatctcagcaatgtgttcaatttcaagataaaggcttgggcacgcattcaatattacaaagatgttgttcttccaaaattagttgaagaaagagtcatcaggatttctccttttgccaaccgactctcatttgatgcaccttctgctgttcaacggttgagatgcttggcaaactttgaagccttaaaattctctaaaccaattgtatctttgtctgaaaccttagtttctcgaatgagagagagaagtgctgaaagcgatggaaaatatatctcagtgcatcttcggtttgaggaggatatgattgccttctcatgttgtgtttatgacggtggtgatgaggagaagaaagaaatggatgcagccagagaaataggttggagagggaaatttactaagagaggacgggtaataaggccaggagttatcagaatgaatggaaaatgtcctcttacacctttggaggttgggttaatgcttcgtggaatgggtttcagcaataagactgcaatttttttggcgtctggaaagatttacagagcagagaaaaacatggcttctcttcttgaaatgtttcctctcctacagacaaaagagacactggcatccgaagaggaacttgctccattcaagaatttctcctcaaggatggctgctgttgactatagtgtttgtgcccaaagtgaagtttttgtgaccacacaaggtggaaatttcccacatttccttatgggtcacaggagatacttgtatggtgggcattcaaaaacaatcaaaccagacaaaagaaggcttgtcgtactctttgataatccacgtatagggtggaaggcattgaagcggcacttgcttaatatgagagcacacagtgatgccaaggggattgaaatgaaaagaccaagcgaatccatatatacatttccatgtcctgactgcatgtgccgcttgaacagaacagaacactctaaatccaaacacagtagatagtatctcatagttgcatttccagactaaccctattctttctgacatccactttagtctgttcattcttcatttgctgtgcggcttttcacttcatcagcaagcatactcgccagttgccacagcattgagagcaacctattctccgtatatagcggtttttccttgtatagcatatgccagaataaccccagattcgtccgtggagtattaaaccaattgtgatgctaactatacatcatctgactataattctcaacaaccgatctggccccagtaggacaatgaagtatcaaatgtttttgggtagtagtattgctgttgtacatggttcattagcagtctgtcatcatgtacaaatttaaaatggtaaacaggcattgtaaaaaaattatcttgccctaaacatgggcccatagcctctctgtattcttttagctaggctttcacggttgtaactgtgtcttacacttctattcacaattctaacaatagaactgctcagtgcaactttattcttgcttcatcagtatagtcgcaatctttcttcttttttg

SEQ ID NO: 41231 - DNA, 1605 bp, Zea Mays
ccagcccaaagttagcgtcgtcgtgtagtcgtctttctcaagagtcaagagcatcatttcacctagtacccagtaaatggaggcgctcgtggtgcggcagctgggcgatcccaccctgccccctggcggtgaagcctccccgttcgccgcggtctctggggatcacccagtgccggagatctcatcgccgacggctgtccgagtgcgagtcgcggcgaccagcctcaacttcgccacgttcctccaggtgcagggcaagtaccaggagcggcccccgcttccgttcgtgcctggatccgactactctggcgtggtcgacgcagtcggtcccggcgtgcgtgggctccggcccggcgaccgcgtctgctcctttaccggcctcggttccttcgctgacttcatcgtcgccgaggagaagcagctgtgctacttgttcttggtgctgctggtggtgtcggggcatctgctgtgcaaataggaaaagtttgtggtgctgttgttattgcagttgctaggggggctgagaaatcggattatctcaaatccataggtgccgatcatgtaattgactcaagcaaggataatgttatagaaagtgccagtctttcttaaaggctagaggcttgaaaggtgttgatgttttatatgacccagtcggggggaaattaactcaagatagcctgaaacttctcaattggggagcacaaattcttgtcatcggatttgccagtggtgatgttccagttattcgagcgaatattgctcttgttaagaactggacagttcatggtttgtactggggaagctacttaactcaccggccacaagtactcattgattcgctcaatgaactcttgtcatggctttcaaagggtctgataacagttcaaatttcacactgctacagacttgttgaggtccatcttgctttctctgccctgagagataggaaggcggttggcaaagtgatgattgtaatgggctcctcagctgtaccaaggctctgatatcattcagaaacgtttctctacgagatcataccaaggctctgttatcattcagaaacatttctctacgagatcatgaggcttatactgtgtatctcttttatcatctgagactgaagtagtttccttgtcaataatgtggtgtatgatctacaaaaataatcagagaaataagcagtttatatcgacacagtgccaagcagcatatacaactgatgagaaacagctctaccatgccaatgctgtgagtagtggcatgtacaataaatacaacctgattaaccagcatctagatcgcaaggattggattatggtggcagtgggaagacctcgccgttttttttatgttttacaccattaggtgatcttattccaaatatgttgtgtattaaatataatatgtagctccttagaagcggatgcactcgaccatagcaaagtgtacaacaacgagaaaagagaggcttaggtgttgtttggttcaagaaatgtacaacaacgagaaaagagaggcttaggtgttgtttggttcaagaaatgtaacgcaaatggtaatggtaatggtttacgttcgattactggcggtaacaaatttgaa

SEQ ID NO: 41232 - DNA, 5201 bp, Zea Mays
cctcccctcccctcccccctacagattttcactttccaattcctatttatctcttcttttgttctttaatttggttcgtacgtacaagacttctcggatcactcgtcttctttgattgcatcatcgagacctgcattttcccttccaaattcgtcactcactctggttggccgccttctgtcttctgatccaatccggttgaaatcctccgtctccttccagcaagatctggcacataaggagaatcggcaagaaccattctgcaaatgaggccggatacgcggcttgaatcggcggtgttccagctcaccccgacccgcaccaggtgtgatttagttgtggtggcgaatggacggaaggagaagatagcctctggtctgctgaacccattcgtcgcccatctcaaggttgcacaagaacaaattgccaagggaggctattctatcacacttgagcctgacccagagattgatgcaccctggtttaccaggggcacgttggataggtttgttcgatttgtcagtacaccagaggtcctggagcgggtcacaaccatagagtctgagatattgcagatcgaggatggcattgccgtccagggcagtgacagtcttgggttgagatctgtggaatactataatgggaaattggtggactgcatggaaggtagtaaggcaagttacaatcctgatgcagatagggcacttgttccatacaaggctggtacacaaccaattccaccattgcagaatcatgatgctacacaggaggagaattcaaaggatcaattgctcagagtgctagagactcgcaaaacagtcttacgtaaagaacaggctatggcctttgcacgtgctgtagcagcaggatttgacatcgacaacttggtgtatctgatcacttttgcagagtgttttggtgcttctcgcttgatgaaggcatgtacacaattcattgagttgtggaagcaaaagcatgaaactggacagtggattgaagttgaacctgaagcaatgtctgcacgctccgaatttcctccgtttaatccttctggcattatgtttatgggggacaacatgaagcagactatggaatctatgtctgtttccaacggagatgcaaatggcgaagatgcttctaaagcagatcaaaggacatctcagcactctggtgctccccatgagttcttccatggtccatatcagtcagcatatccaccatgggcaatgcatccaccttactctatgcaaggcatgccttactatcctggaatgaacccatattacccttccccctaccccccaatggatgagaccaggtaccacccctcagaaaggagagtatcaaagaaacactcagatagcaaggactcagaaacttcagatgataaaagtgaccagagtggttcagagagggaaacttcttatggtcacaggtcccataaaaaagataaaagggcaggtaagaagaagcctagtgtggttgtcatccgaaatatcaatgtaacatcgaaaaggcacggatcatcagacagtgactcacaaacaggttcagatgtagtatcagaggatagcgacgattcacacgccaagtccagaaagaaaaagaataatagctcaagttcaaagaaaaaagatgctaggaagatggttttcgagtctgcagatgaatatagcaagaatggaatgtcatatgggcaagatggagaccaagggagctggaatgttttccagagtttcctgctaagagctgatgagaaaagagataatgacgcggacctattcgccagtgagaaaaaagcacccccagcaaggatgaaggagagcacaagcgttgatgttgattcaattctcttggtggagcaaaattctgctggggccaatgaacataatacaacaggtttcagtatggaaaatgagaggattagaccccagcagatgctgtctggtgatgaacttatgatgtatggggaaggtgaaggcatgagctttggatgtgatgacataaaggagattgaagctggaggtgtgagatacagaagaggaacaagtgatgacttcatgatatatggacaggaaaagtcaatggacagagggagttctttggatcctcttgcagaagcacagtacaagagccccaccctggttgacaaaaatgtgcacagcttggcagatgaatcgtttatgatacctcttaggtctacctcagaggataaccatgaaccagaatgtcgtactgccattgacattgatgttgagcttccctcaactgttcagaagatatcagatgctaaagctggtagtcagcttttctatgagccagctgaattgatgccggagcgtggatgtgaagacgtttcgtttggatatgatccagcaatggattataatagtcagatacagagtcaatctgccaccatggttgaagatgcacatatggaagatgcattgttgagcactgtggatgaaataaagaagccagagaaagacaagaagctaagaagttcacaggagagtttggataaacgtagaaaagatgcttcagcgaggaggttgtcatcatcaaaaggcccgctgactgatgcacagaaacgcgcacaaaacttgcgaatatataaagcggaccttcagaaggcaaagaaagagcaggaagaggaacagatcaaacggctagaaaggcttaagctagagaggcaaaagaggattgctgcaagaagcagcacttccaatgcaccaacaccacagcagcccagagtaaagccttctcccaaggtttcccccagcacctacaagagctcaaagctcagcgataccgaacttgcatcctcttcacctctcagaaaatttcctatcaaaactaccccagggactgatcctgaaaaaacagcaaaatcaagcaaactaaatgacaatactaatgcagttagtaagccaaccttgacagacatgaaggagagaagtgggaggaccgaatcatccaacgagagattgagaaaacttgctgaacctaaaaccaacagttcgactggccatactttgaattccaagtcagcaagcgtggaccgcccgcggagaaaaagcatgccacaagatagccagacaaagaaaatttcagctataatgcagcttgaccagagtaaatcagcaacactaccagaactgaaggtcaaatactcgcaagctcctgctgttgtgaaaaatgcagtagctagtagagagagaaaagaggtttcagctggagctaaatctcttcgtacaacagaaactgctagtgtaaaggaaaccaacggtaacatctcaaggatgaacagcagcgacgataatgtggtggttgagaagaccgttgtgatgctcgaagatgaggcggtcattctacattctggaagaaatgcagcaaaggaaacttgtagtgatgacaggacagagaagcccagcccagaatcggagtacatagctatcagggctccgctgtctccagttattcttccggaggctgagagatctgatgacctggggagctcatatgaggtggtgactgagtgtctaaaggatgaacctgaggagccaaccttgggcgccgtggagaaaccttaccaggccccctttgctagggtgacatcgctggagaatgcatcagacaacagtccattacctgaatcacttgcgcatgcaaatagcattaaggctcgagtgcctgagcctgtgtacacagtttcagttgagggccatgtggtaagtgaaaagcctcgaagcaaagagccaaaaggcttgaggaaacttttgaaatttggcaggaaaagccatgctgagggcgcaatggattcatcagttgacgaagcctcagcaggagatggttcgatgctgaagaatctcatttctcaagatgactctggtgcgtcttcttcaaaagcttctcggtccttctccctactgtcaccgttccgcagcaagcacaaggtgattgttctgtgagcacaagatccctggaacagtgaaggctttcttttctgtggctgttataacggaaattggaaatggttcttcaacccttttctggaaggatcgctggctgcaaggaaaaaggatttggctcctagactatttgctgctgtgcccaagagaaatttgaacactagatcagtccaggaggctttgacagatagaagatggttgacagatattagaggtgcagtttcagttggagtgctagttgatttcctggacctttgggacattttaagctccattaacctgctgcagaatcaggaagataaacatatattcagatttgcaacagatggaaagtattctgccaaagctgcatacgaaagtcttttcattggttctactaattttgggcactgggagagaatttggcattcttgggcccctcccaaatgcaatttttttttcaatggttggctgcttttaagagatgttggacagcggatcgactccaaaagagaggtcttatccatccagaaagttgtccgcaagagcctgaggacaggttggatgtgtctttgctaggcatttctggtttcgtttgctcggtcaggttaatttgcagggattcagcccccaaccaggtgaatctagcagtatgcagtggtgggagagattaagtgaccagctgcaaggtgtagccaaagagggtctcaattctctaattattttagggttttggatcctatggaatcatcggaaccgctatgtgtttgataaaatccctccaaatttctggtttctacttgtcggtttagacctttttctcttcttaatacaatgatgcgcagttctcttttgttttcgagaaaaataccatatggtttagaaacaagaggtctaaagtggaatggaatttgtaagaaacccaacaaaaccataaagtttgttgcatctgaacgcttcatgtgactctaaacatagccggctcaactctgaactctcactcactcatctgtccaagtataaaagtaggtaggcacacgacaagacaaagtattccctcctgggatgttggattttcagtcgtgaactatctcaacctcacaggccactgctgtcatcgtcaacaaaaccataaagtttgttttcatcgtccgtccgtccgtcgcggtagacatgccatttcaagtatctctggtggcctggcagcagcggccgcagccgaggggcgaccttgcagtcggagcagcagca

SEQ ID NO: 41233 - DNA, 2522 bp, Zea Mays
gaatgattcaggagtttttccgagtgtcagtaacttgacttagattactttctctttctcctccaaaattaaggtgagaggacatttggtgtgttgacaaagcttgatttaatggacaagggaacaaatgcacttgacgttcttgaaggaagagcttacagactgcagcatccctgggttggaattgtgaaccgttcacaagcagatatcaacaagaatgttgacatgattattgctaggcgaaaagagcaggagttcttcgattctagtcctgaatattctcatcttgccagcaggatgggttcagaatatcttgctaaacttctttcacagcatctagaggccgcgatcagatcacgcattccgagcataacctctctgataaacaaaactattgatgagcttgaatctgagatggatcacctcggtagacctattgcttctgatgctggggctcagttgtacctcatcttggagctttgccgtgcatttgacaaaatatttaaagaacatcttgatggcggccgacctggcggtgatagaatttatggggtctttgataaccaactcccttctgctctgcggaagctcccatttgatcgtcatctctccgtgcaaaatgtgaagcgggttgtttcacaggcagatggttatcagcctcatttaattgctcctgagcaagggtaccgtcggctgattgaatcttctctcaattattttagaggaccagcggaagcctctgtagatgctgtgcattctgttttgaaagagctggtgaggatatccattggggagacacaggagttaaaacgatttccatctctacaaacggagctagctgctgcatgctataaggcccttgagagattccgcgaagatggcaggaaaactactctacggctggttgatatggagtctgcatatttgactgtggagttcttccgcaagctcccacaggaagttgataagactggaactggaaatcccagaaatgccaatcctcctgctccttcggatgatcgttacgctgatgcacatttcaggaggattgcttctaacgtgtcctcatacattggcatggtatctgaaacgctgaagaatactatccccaagtctgttgttcactgtcaggtccgcgaagctaagcggtccctgcttaaccatttctatactcaagtgggcgggaaagatgctaagcaacttgcagtactccttgacgaggatcctgccctcatggaacgcaggctgcaatgctttaagaggcttgagctgtacaagtctgctcgggacgagattgatgccgtgtcgtggacaagatgaaggtaacgcatgccatgcttgttaatatattcgctttctccattagacacattgtaattctactagtgcagaattagcagctagccattgtgcacactgattgtcaagtatagcagaccgagcacctgtctcgtatcttagcctgttaatatcagtagttgtgtgcttgactgcttgtgttgtatctatgtctcaactcccaactgttatcaggtgcaaatttctgtccttagtaacccatgtgcaaacttgtatgcacgaacgatacctggattctgtaggatgcacatgccgatcttcttcccatgctgtagttaggtgtagactgcagaactgggacttctaatgtgaaaataatgttttatgcaacttgtcattagtcaatcacattatcacactgtagaataattttttgttggctgcgagcattaccatgcgatttgggggtggtccacactaacatgtacgcattgcatgagaccctttcaataaacaatactggcactgcgtctgaacattcttggcctgctggacctgcaagacacgtctgccatctatcttagttcaatttgttagcgttattgcttgacattttccacatccgggatgaatgacgcgtgctgcgtgcggtgcagaatccgaaacaggtcagtcaactcccgcatgatccttggtcaatttcacgatacttatttgccctgctcgcgttcttttctggtcagttgcgcgctctgttgatgtgacccttttggtccgtccgggaaatcgtcgcctgctggccatggattcacgctttctagaggacgtgtgttgcccgccgtgcgcccttccatgagttccccgcatagaacaggtcgtcttctggaacagaaaggcgaagcgcgtggcgagctgtcctgattttgacgagtccatgcatcttcagcagattggactggtcgccataagaacacgaaactgtgattaggaggcatacacgtcatctgctagtgtttccggtgaagtcagttgccaccatgacctgctaggcagaaataaatatgcccctattaatcgggccttgatctgtcgtcctcattgctgaaaacctcacccaaattgcatcttatagcacattcgtcgccatggatatggtcattggctgtgccggctgtgagctgtcaacattttgtacagtactacatttccaaaatctaaaccgg

SEQ ID NO: 41234 - DNA, 844 bp, Zea Mays
ccactccaccccctagccgccactcctctcccccaatagttgccagccatcaggctccctcttccccacatcgtcccttctttctccctattctctattccaaggtgcaggtgcagcagccccctcattccccatcgaatctatggtgctaggaagcctagagctagtgacctgtcccgttatctggtccaagcgcgtagggagggctcctctctgctccttcccagtgcatggcgcagggagctcttccaggtccacgcctccatctccatggctggccagcaaacctcaatggccgagctccccagcgccttcctcttccatggcggacgtgcatgtagccctactccaagtgcctcctgttgggggccttcctcttccgaaggtcctcaaaaacatgactaaccatctactttcagcataacatggattattacagggagcttcggcttcaggatggaagttttctactagggcaaaggtgtataagaagaagatatagcccgaagatgataagagtgaacgctgaagttatagccgaagagtaacatcttcggcttaagatgatgatgaagatcaaacatgatgctgccctgaagagaaaaagactagccagtccctaatgatttatgttataattatgaataaatgttgaggacacaaatgtacttttactcgggctgagtcccgtgcctataatagatgaacagtagcaacgtactgttcacgctgaattgtaatcactttcgcatcaacaccttcgaacaagtcgaaggtattagtgtaatataaattctgttaatgtacatatgcgtattatgaaatacatatgtggataagctga

SEQ ID NO: 41235 - DNA, 2655 bp, Zea Mays
agtaccctactgcttccatcaaggagaactgcaactggaagcgggtgcgagcgactgcgatccggacgaggggagggacctgtccgtaatttcggaaaggagcctgggggagaatgccgatagacatgccgcggggtctccccttcgccgtcgacacgtgggggtcctcctcccgaagccggcgccaccgcttccttacccacgcacaccgggaccacctcgtcggcgccggtgcggacatcgatgggggagggatcgtctacgccactcgcctcaccttgcacctcgcacttcgccactttccccagttggggagttgggagttcgtggagatggaggtgggaaggacgttggtggtggatgatcccgtcggcgccttctctgtcaccacgtacgacgcaaatcactgccctggtatgaggggtggcttatccttggccagtttcgtgatttcaggggcagtcatgttcttgtttgagggtcaatttggtaccatacttcacacaggggactgtcggcttacaccagattgcgtacagaatttgccaatgaagtacataacaaagaaaggaaacgagaacatttgccgacttgactttgtattcctagattgcaccttctccaaatgcttcctcaagctaccgagcaaggactcagcaatccgacaggttatatcttgcatatggaaacatctgcatgcaccatttgtcttccttgcttgtgatctgcttgggcatgaagatatactagttgaggtgtcaaggactttcggaacaaaaatttacgttgaccggaaattggattgttttaaagcactctcactgacagcccctgaaatcatcactgacgattcatcttctcgctttcagatggttgggttccaccaattacatgatagagcaagcaaagagcttgcagaggcaagggcaaatctccaacctgaacccttatttattcgtccatcaacacaatggtatgcaacctgtgctcgaagcccgaaacccagcctaacagaagctgagcaggatgagcttggcatctggcatgtttgtttctccattcactcctctcgtgatgagttggagcaagcactacaacttctccaacctcactgggttatttcaacaactcccccatgctttgccattgagctgagctatgtaaagaaacattgtttcaagacccgcttaacagctgatgatccactctggaaaatattcagagatcctctgggaaagtcagtgtcctccccttgttcagtgcttgcgacacagacagatgaaaataactcaaattttgttgttgatgatgaccattcttcttcctctagcgatggatgcacatacttaaatgtaataagcactcttgaactgaaatttgtgccacctcaaccacctgaagaaccggacattacattgtttggaagagcaaggtttgcctctcaagcaattgactttatgaaagaagattacattgccttagaagaagccagggcatgtgcaccaacagattcggttcatggcagtagtgaagaagtcgaaacatattctggaatggatttcggtgtgaaacaaccaccagcctcccagcaggatctcatggaagttggagatgatgtttctttcaaaaaagttggagatgatgtggattcctgtaagcatgaagtaacctcaacacaattagaagggtttcgagtcaagtcattacctactgttcaaagcaatatgttagtggtgtctgatcaacttgaaaggtcagaagttgtaggagagtcaaaattattgaaatccacggaagacttaaaccttaccattgtcagaagtgcagaaagaactgattgtcaaaaggaacctttgtgctatattggatcatcgaaatgtttgaatgcaagtttgaagaggttttacaggtcaaggaatatccctgttcctagacctcttccatcgcttgtcaaacttatggagtccactaaacgggtcaaaatacaaccaaatactaattatactttgttgaactcacgacacagcttaccctaatgaatgattgagcttatacttggcatattatgatagccaaaattttcagatttatgagtatatgaatggattatttctgaagaggacacctgtatattggttattgtgataaccaaaatactcggattctattgggtatacaggtatacttggactggttccgaagaagatacctgtttagtattgatccagatccacacttatacaggagctttgtacgattctcaaactgttgtacagaaaattgatgtaattacatgatgactctattggataatccgaagtgtattattcttctgcaatactagctaggcatcgtatgatgtcaaatatattctcagcaagttcgctttacgacttgatttactgaatatcatgatattctggcgtggatctatattgcttctgattcataattgtttgctgcaggagagtacataatatcttctagttcactaatgcataattttatacacaaagcagtgtcgccatggcatgacccttcaatccgaaaatacagattcatcacgcgacaagtcccgatgctactaggaattaaatcgtccagggcttaacagggcataaacttaaaaaaaatcgaaaaggagctaaaataaaa

SEQ ID NO: 41236 - DNA, 313 bp, Zea Mays
ccggggattaagggccgagcaggggcattcgtggcgcgcggcggaatccgacaacggcgagaaatctagggcgcttggacgggcctccgagctcaatacttcatgctagcgatccacacatgccgatgaacgatcctgactccacactggcctccaatcgtcggtataggcacgagcccacggcggcggacgacggtgtctctttgatgcgtggttttcgcgatgatggagagggacgacaggtctggtgagagtgtagggcttcagggctcgcggtcgaggaggtgatgcggggatttatcctcgggtttcg

SEQ ID NO: 41237 - DNA, 87 bp, Zea Mays
atgggctcaagcaagccccaagagcatggtatgaatgcctgcgagatttcctcatcactaatggcttcaaagtcggaaaaagccgat

SEQ ID NO: 41238 - DNA, 720 bp, Zea Mays
ggtctgactaggtatattaatcgtgatgattctgcagtgagtcggattgctatttctgttattagttcgatgaagggaattgttagatatactaattatatcggtcctattgccttagtatatatgtgtcgtggtggtaggtataatatttattaggatgcccgagtcgtttacagtgatttggtcgatgtcgtgtagtgaaagatgtctcaataggtcccagtgcttgcgggattataggtgttaaaaatgggaagttttattaatatatatgatacacaggttaaccggaaaattagtttagaaagttaatgaaagttcttctatcaaattttataagtattaggtgtccaagaatggtaaagttaaagttataagtcgttagtgtgctctttaaactaggtataatatgttgtctgtgttggtcactttcataattggaatggatgttgattgctacctcgaatatttagttaaggctgtaattcaagttaataaagacacacggtttaggagttaataaaaagctagaaacaaaaatgactccacatgcgaatattaatcataatatcttgtgagattagtttaaatcatatctagttagattgtaagagcatgattgtcgtaagtaacaatatatcgataattagtgtccgcaatgccttgtcattaagtgggttattcctcttttgcgtagcatcataatatcttgtgttattc

SEQ ID NO: 41239 - DNA, 1200 bp, Zea Mays
aaaaaaataaaatcgaatgcccctccgtcttcctccccttttgttctcccacaacgaactcggggctcgcacccagaagggagagaactcgtcgcgacgaggagagaagaacctgaggtggtcccgaatcagacgcggaagagggtgggttcaggagcaagccagcctgccgccaccatgaggcgcgcctcgaagaaatccttgtcgtctgccgcgaccgctagcgctggccctactaaagcagtttccaaggaagtagaacggattgatcaatttttctatacttatgccgataactcatctgtcatgattgacccagaaggcattgaaacactctgttctcaccttgaagttccccacaccgacgttaggattctaatgttagcatggaaaatgggctgtgagaagcaaggttattttaccttggatgaatggagagctggtttgaaagctcttcgagcagacagcatcagtaaactgaagaaagcatttcctgaactggttcaagaggttacaaggccgtcaaatttccaggatttctacatatatgcatttcgttattgcctcacagaggataagaagaagtgtatagaaataccagttgcttgtgagttgctgaatctagtattaggcttgcagttccgccctcaggttgacaagcttagtaattacctcaaggcaatggattctacttttttatgtggttctactcatcctttcttcatgaagactcggtgctcaattgacatgctatatttggactgtgtttcagtaccaaaatgactacaagataaacttcccatcacttgacaattatgattcagaccttgcttggcctttgattctagacaattttgttgagtggctaagagaaaataaaagctagatcttctattcatgtggtggtgaagttgtcattcaaaattttctgcaccctggaggatgccgattcggcttgtttccggttgcttcggtggaggctgctcccagaaaatttaaagccttctcatgtcatcttttgattttgcatatttttaaaactggaaacggtctgcatctgtctgtaaaatttgtatcaggatgctatatttaatggccatgtcatgttaatcagtcttggtagagttttaagatcttgcaagttgcaaatatttccatagattataaataaaaagaaattaactggcgagttcatccatc

SEQ ID NO: 41240 - DNA, 3623 bp, Zea Mays
ttttagtttttttttaaaaaaatagatctcgtggaggtggacccgtttagatagaagaagctgaaatagacataaaattgttgacctaaagcttttctaaacatacccttaggtgccgttcggttttcacggaacgaaagactagaacaatttctagctggatttcttctctaaggtatataaattttgattatctaaaacgattctaagtccattattgaataaacgaacaagtccttgactggctctagataagagagcaacttgttaacatgaggcgtgagcgtgagacgccaccgcactgtcgccgccgtgcaggctccaaaagatttttgtacgtattttccttttcagactccggcaaacagaaactcatgttttccctagttctgtgggcatcctgaagttgacgtcccgacccagggcaacccttgctgcgttgccgcgttcgcgtccttcctcagcagccctgtgtctgtgtgctgggccggcggcggcgagtgtgtgcgatgcggtgaccctcacgcagcccacgcctgacgcctccaggggacaggacgggcctctgcctctctctccttcaccttcactttaaaatacaccagcccgcggctcctcagcgctctctctcgctctcgctctcgtcaggcacgcacgcacgagtgaacacagacgcgatctcctgctctctgcctccctcgttctcctctgcccgtgcgcgctccagggcacacacgtacggagcgtgcgagcaccgtcatggaggaggacggcggcggaggcgcgcggcacgtggagcggtgggagggctacgtggactggaggaaccggccggcgaccaggggccggcacggcggcatggccgccgcctccttcgtgctcgtggtggaggtgctggagaacctggcgttcctggcgaccgcgagcaacctggtgacgtacctgatggggtccatgggctactcgccgtcgcagtcggccacggcggtgaccagcttcatgggcacggcgttcctgctggcgctgctcggcggcttcctctccgacgccttcctcaccacctacaccgtctacatcgccagcgccttcgtcgagctcacggtacgcgcgcgcgtcgtcataacataacgtccgtgcacgcacactactactactaccgtacagaacagtagtgtacatacatactccttcctctacatcaccactctcgatcttacgtgcgtgcgtgctgtcatgcaaatgcatgtgcctcctttctatatacgtcacgttacatgtcctgctatatatatatatatgctgtccatcgtctgttattaattgtcatcacgtcatgggagtatgggactgggcatggcgccagaaataaatgaacagtagtatgcccgcgtacacggacccctgttccaggcaggagtcggggtagtatagtagtattacgatgtttcctgataaaatctatgggtgggccacccggttccctgcacggcagctggatacacaaggggcttgattggatagcttcgcgcgtatggacaggctaggcacgctctggtcggctggataccgtagttttgggcatagggacggatgtaggttaataatcttaaacagcgtgtttggtagactgggtgaatagagaaattgtacccgcagagttataaagcagtgtttgtttggttagcttctctatgcatcccggctctactcgaagcgaccgcagccaggcttccgagcaaagctcgcggcgagcgtacgggcccagccaggctcagtacatgcaacggcacgtataccgaggggttggtgatcctgacggtgcaggcgcgcacgccgtcgctgatgccgccgcggtgcgcctcgccgggcgcgggcggggctgcgtgcgagcccgtgtcgggggcgaagaaggcggtgctgttggcggggctgtacctgacggccctgggcgtgggcgggatcaagggctccctgccctcccacggcgcggagcagttcgacgagcgcgcgccgcgggggcgcaaggcccgctccaccttcttcaactacttcgtcttctgcctctcctgcggcgccctcgtcgccgtcaccttcgcggtatgggtcgaggacaacaggggatgggagtgggggttcggcatctcctccgtcgccatcctgctctccgtcccgctcttcgccgcgggctccagcctgtaccggaacaagctgcccacggggagcccgctcacaaccatcgccaaggtcctcgccgccgccgcgctcgcgcggcgccgcggcggcggcggcggcggcgcgcagagctccagcaacggcgccgtcatcgaccgcgcgcccagccccgcggggagcgccgacgacatggatgagtactgcaagtccggggacatggaggagatctcgatctccgacgcggcgtcgccggccgccgagccgtcccgcgagctcgcgttactgaaccgcgcggtgcagtgccagccgccgcggcacggccgccgcctggcgtgcacggtgcaggaggtggaggacgtcaaggtcgtgctcatggtgctgcccatcttcttgtccaccatcatgctcaactgctgcctggcgcagctgtccaccttctcggtcgagcaggcggccaccatggacacgcgcgtggggaggctcaccgtgccgccggcgtcgctccccgtgttcccggtcacgttcatcatcgtcctcgcgcccgtctacgaccacatcatcgtcccgttcgcgcgccgcgtgacggggaccgagacgggcatcacgcacctccagcgcatcggcaccgggctggtgatgtccgtcgtcgcgatggccgtggccgccgccgtcgaggtgaagcgcaaggacgtggcgtccagaagcgggatgctggaggactccgggaagccgctgcccatcaccttcttctggatcgcgttccagtacctgttcctggggtccgcggacctgttcacgctggcggggctgctcgagtttttcttcagcgaggcgccgccgcggatgaggtcgctggcgacgtcgctgtcgtgggcgtcgctggcgctggggtattacctcagctcggtgctggtgtccgtcgtgaacagcgcgacaggccgcggcgggcaccggccgtggctgcagggcgccagcctgaaccactaccgcctcgagaggttctactgggtcatgtgcgtgctcagcagcatcaactacctcttcttcctgttcttggccgtcaggtacaagtatagaaacgcgggggtcatcaaagtgatgaggacatcactatgagtacgactacaccagcagcacctccacatcaagcgccacttccttcattagctgggccaatcactcgggcccgtgccagagatcttaacttcgtcatgctactgaagaatgagggcccagaagaatagacgaccagcccaactgcggcccatagtggacgacctagggttggccgcccctaggggctgcgccccctctatttatccaggagctgcgcctcctttattttcgagttttgttttacgttagccttagctactctcgaacacgcgcaaatctgcgctgtcttcgtgtattcagaactccaccctcgagtaatagattagattgctcgc

SEQ ID NO: 41241 - DNA, 1212 bp, Zea Mays
atgggtctgtcgggatgctccagtctctcactgtcgctgccatgtctgactcacaaaaaggcaaacaaacagcaaatacctcagggattgacttgtgctcttgataagccccttgaagctgctacagctgaaaacgctccatacaaaacagacaatgaagaaagagtgtctgatcattgtgaagaaagaggaggtcgatctcaccgtgcacctcgcctacgcccaccagatggagcttgtttacctttagatatcatatgccttcaccttgagaaggctgcaatggatagattaagttcaggagaagaattagttggtgatgatgatgttgcaagagctcttcttggtgcctgtaaaggtcttcgacctgtacttgctgtgtatgatcagctgttatcgaatggtgcaatcataccctcactaaatctgaagttgcgcgtgctgcgatcagttctagcaatcctccgtgagtgggggatatctgtcattgcacacatgataggcaccacaagtgctggcgcttcattctttcttgatggaacattctcattgaaccaaactgggactgcgaatcaagattgaggaaactgatgaagcaaggaaaaaattctctaatgctaaggcaatttcgtcatctcagttttttggtactcaaaacagagaagagaaaggctcagctatcccttcataaattcgcgggttcttcatccatttcaagctctgatctttttggttgtcccaatgtggacgattctaacctggacctaagcgctgcagatctcatcaacagaatatcttttcaggcgtcacaggatctgtcttcactcaaggacatagctggagagactggaaagaagctgacatctttcgcctccaatttcatcagcgacctggacagaatcctttgagtaggcgaggccatgccagcaaagcatttttcctaccttgcaccagaatttaccttctagcttggattgggtggcggactcgcgggtgcatcaccgacagttgaaagtagttcttgcacagctacagctctgtagaggattcctattacgcgtttgtattttgatttttgttgtgagaattgaaggtatttttattcgtgaatacttcacaacggtgaagggtgaagtgtacactacaatttacatacgttgaggttgcttgtatcttggaaggaaggttcatactatgtcctgtgcgtgtggt

SEQ ID NO: 41242 - DNA, 1614 bp, Zea Mays
tggagctggcgaagaaactctaccaaaccaaactgcaccaaattctccggtccccgcctcagcgcctccgccatcgacatcccacccgcccgtcccctcgcggctcgcgcccgacggcccgaggcatggcgacgcggaaccgcacgccgctctaccgcaagtaccgcgacgcgctgcggcacgtccgcgcaccggccggggcgacgtcgtcgtcctgcgggggcgggggagggtcggtgatcgagatggcctcgctgctgcgctccgaccggccctacgcgcccctcagcatcgaagacccctccgcctccagaggtgctgtgtcagtcgggctacccccagcctgggtggatgtttctgaagagatatctgcaaacatgcagagggcaaggacaaaaatgacggagttggctaaggcacatgccaaagccttgatgccgtcctttggcgatggcagagacgaccagcgagcaattgaggttctcacacatgagataacagacttgctgaaaaggtccgagaagaggctgcagaagctgtccatgaaagatttgtcagaggattcaaatgtccgaaagaatgtccagcgttcccttgctacagacctgcaaaacctgtcaatggagttccggaaaaagcagtcatcatatttaaagcagcttcgccaacaaaaagagggtcaggatggtgttgatttggaaatgaatatgaacgggacaaagtctacatttgaagacgatgagtttgatgatgtgggtttcactgagattcagatgtcaaaacttaagaaaagcgaagcattcactagagaaagggagagagaaattgagcaggttgttgaatcagtcaacgaacttgcacagattatgaaggatctttcagttcttgtgattgatcagggaaccatcatcgatcggatagactacaacatacagaacgttgcagcttcagttgaggaaggttacaaacaattgcaaaaggctgagaggacccagaagaaagggggcatggtgatgtgtgccactgtccttgtcattctgatcttcatcatgatagtccttctgattttgaagaccattttctgacatacttagctatctcattttaatggttgatgaatggtggccaagcacacaccacgctcatctattcatgtgagtgaggattgcaccatgcctgcatatcaagaacgccacaaattcatttgaatagcggcgatacgactcactgatctgaagatggaaccatcttgagtcttggccacaatttttgcatcgttgcagatgtagacatgccctattcatacaggactcttaattttagagagagaaaaatctgaagaggattgtttgacacgtttcaccttccagtttgccttggagcaaccgggttaggctggctgtgtatgcctctgtatagagtgagttgtatcatacatcagggtatcggaaatcagaaagtaggttcagttcctgtgtcatctcttttctgctttatgttgtctgcccttctattttgagctagctttgaagtggcatttcattgtaccatatcctaacaattgttctgacaactttcgcccgggtagtcggatatgcaatgagattttgtgct

SEQ ID NO: 41243 - DNA, 2450 bp, Zea Mays
atctattagtacccagaccgaattctgttctagctatatatatgtgcttcttccagcatcaggctgcttaaggctttaccggccagtcaattcaagcagagagtggccagtgctatcaaaaagggaaaggtgatcgtctatatatggatccatgccgaggaaggagttcgtcaaggaggggctccattgctgctggagctggacatggtcactttgatgcagacgacgatgcagcagcactagttcctcctccttaccgcctgttcccggagccggaggagacggccgcccgcgacatccagctccgtcagttcttctccgtggatcggcgccagccgccgcagctggaggccagctggcgacaacaactaccagcattttatcctggaggcggcgtcaccgtcgccgatccctcctctcaactggcaacaatgggtgcacaggatgcaactgccctgagtgttcagcagggccgagcgaggacagctgctgaaaacctcgtccacgtccctgccgcccaggtttcacttccaggtgccctagccctagggaactttgagcaagagctcggagaagacgcgctgctgccgccggtgctgagccaggagcagcaggacgccgtgaagagatacaaccatctgatgggggtccacgtggcgtacttccgcgtgtgcatcgaccctacggtggccagttccaggcggctcctccagcaggcaatccaggatctcaagaaccactgtgctggcgatgctctggtggcgcattattacgtgaacaacaggaacaacaacgacccagcagatcagccagacactactacggccattcggcagcaagcaattgctcgctctgctgatgcctcctctcggcagcatcatggcgcctgcagaggattcaacgaccatcatggcggcggcgttgttccttccgttcaccgggaggaggaggaagctctggcggctccggtggtggcgatgagcatgagccccgccttgcggctcgtggacatcaagggcaaagtcgcagctttctgtgccgatcgcaacgggagccgcttcgtgcagcaggcgcttgaggcggcagcgccggaggagatcgccatggtttacaaggagatcatgccctgcgtgcgcacgcttgccgtcgacatgtttggaaaccatgccatccagaagattcttgagcatgggccgaggtcctgcaagcgaggggtcatcagtaatctgatcggccatttgttgcccctaagccttgacaagtacagctgccgggtggtacagaagtctttcgacgtaggggagcacgaccagaaggtggcgatggccaaggagctcggcagcaaagtgctgaggtgtgtccgcgaccagttcgcgaaccacgtcgtccagaagtgcgtcgagtgcctgccgtccaaggacatccactccatcctccgaagcttctacggccgggccaaggcgctgtccacccatcccttcggctgccacgtcatccagaaagtgctggcccgctgcaaagaccacgagatctaccacgcgctgacggcggagatcatggagaacgtgaacaagctggcggcggacaggttcggcaactacgtggtgcagcagctggtggagcacggaggcggcgccatgcggtccgcgatggtcaggaggttcgccggccgcgtcgtcggcatgagctaccacaagttcgcctccaacgtggtggagaagtgcctggcgttcgggagccaggaggaccgccggctcatcgccgacgagatcgtcgccggcggcggcggcggccagcagcagcacttggaccatctcgtggacatgatgatcaacccgtacgcgaactttgtgatccagaagatggtggtgacggcggaggagcggcaggtgaggttgctgctggaggtggcaagtagcaacgcggcgagcctggcgaggtacgcgcatggacggcacgtcatcgacgccatggagaggttccttggcggcgccaaggctgttgtgcacgcagaccctgctgcactaccctgccgccgccgatgatgagctcggcggctagcgacaccgccgactgcaatggctcctctcgatcgatcgtcgatgctgcagcaaggaccactagtactgtccaccctgtacgtgaagctgggctggcacatatgcatgcatggcaaaaacaagccatatcataataagaccaaaggaatatgaaggctgcttagcgtcttcatatatcatatcgcatcagtatactcaattcgtccgctcggtttctccttggtgtagagtataatataggtgaattgtccatctcctctcgtcagcttaaacttttgtgttaaattggttgatgcttagaacttaatatggtatcagagctatatatatgcctcgagtccaaaaatactggttatcacaattaaataaaaataattattgctcgctctt

SEQ ID NO: 41244 - DNA, 1313 bp, Zea Mays
gtcttgagcacgagagtgcaaaagagcgaccagaaaagctggccggtcgctggcaacagcacgcattcctactctactccggcactgcacactcacgagctgtggatagctgatactctcccccggcgccaagaaaccacgaaatcgccccccacacacaccttcccttcggtccatcccgatcttaccaagaatccgagatccgcctgcgacagctagcggtcctatcttgatccgatggtgtcaccggcgccgggatgtagggattcgggggaggatggcggcaaggcggagtggctgatctacgcctttgtcgcgcgcggcatcgcggtgctggcggagtacacggaattcaccggcaacttccccgccatcgccgcacagtgcctgcagcgtctacccgccgggtcgtcctccgccagcaccgggcctgacggccgcggcggcgcgccggtacggttcagctatgcatgcgacgggcacacattcaacttcctcctgcaccgaggctacgcctattgtgtagttgcgaaggaatccgttccaaagaatgtctcagtggcatttcttgagaggttaaaggatgacttcatgaagagatatggtggcggtaaagctgatacagctcttgcaaaaagtctaaataaagaatatggactttggaccgcggagaaaagttgagtgaactccaagacaagacttctgatctacatagtcaggcccaggagttcaagaaacagggggtgaagattcgtcggaagacatggctgcagaacgtgaaaattaagttggtgattcttggaatccttttgctccttgtgatcatagtctgggtatctgtttgtcaaggctttgactgcaccaagcatgaaacatagtagtaataagaatggtgcagcacgactgtggcagagctgcgatggatgcgagtttgtgctggtgaggtcaagtgtgtacccacatatgctttggctctcaagttcgattccaccagacaagtatcacggtacaaatgtaagtccgagctggtctttgttgcacgccggaggtaggtgtacttgcaatgcaagactagcatgatataaagtgatagcatggttccttctgtactagctgaattcgctagaatctagcataaaatgcatttcaattaccacttatttttgctcaacctattaacatatatagggcggactgagttcaagatatttagtgttagctaggttaaaccatgttacaagcagaaatagaagggtttactgttttttttttgagtggagcgtacatgtttttttaaataacaagcatcaaga

SEQ ID NO: 41245 - DNA, 2972 bp, Zea Mays
cgacgaacagagctgaacacaaacacccacatcgatccaacccaagccacgcctcggcgacaggccgacagcccacgagcgagatccaacccaagttccgacgccgcgggcgagaccgatcagatccacctcagccgtctcggatggcgtcagcatcgacggcggtgcggatgctccccgacggcggcgctgacgacgaggagcggtggctcgccgagggcatcgccggcgtccagcaaaacgccttctacatgcaccgcgccctcgattccaacaacctcaaggacgcactcaagtactcggcgcagatgctctccgaactgcgcacctcgcgactatcgccgcacaagtactacgagctgtacatgagggcgtttgatgagatgaagaagctggagatgttcttcagggaggagactcgccggggcagctgctctgtggttgatatgtacgagcttgtgcagcatgctgggaatgtcttaccgagactctatctcctgtgcacggtgggatctgtgtacatcaaatcgaaagaggctcctgctaaagatgttcttaaagatctcgttgaaatgtgccgaggcattcagcatccccttcgtggcctttttctgagaagttatctttctcaaataagcagagacaagttgcctgatattggttccgagtatgaaggggatgctgaaactattaacgacgcagttgaatttgttcttcagaatttcatagaaatgaacaaactctgggttcggatgcaacatctggggcctgcccgagaaaaggaaaagcgtgggaaggaaagaaatgaactgcgtgatctggtaggcaaaaaccttcatgttctaagccagattgagggtgttgaccttgatatgtacaaagaaactgttcttccaaggatattagagcaggtggttaattgtaaggatgaccttgcacagttctacctgatggactgcataatccaagtctttccagatgaataccatttacaaacattggaaacattattgaatgcatttccccagcttcagccaagtgttgatatcaaaacagtactctctcaacttatggacagattgtctaactatgctgcctcaagtcctgaagtgttaccagagttcttgcaagttgaagcttttgctaagttcagtaatgctattggaaaggtgatagaagcccaacctgacatgccagttgttggagccgtaactctatatgtatcgcttctgacttttactctccgtgtacatcctgaccggcttgattatgttgaccaagtgctcggtgcatgtgtcaagaaactttcaggcaaagcaaaacttgaagatagcagggcaacgaagcaaattgttgcacttcttagtgctcccctagaaaaatatagcaatattgttactgcattagaactttcaaactatcctcgggtcatggattatcttgataatgctacaaccaaagtgatggctgtggtaataattcaaagcataatgaaaaacacaacctgcatatctacttctgacaagattgaggcactattcgatttaattaaggggctgataaaggatatggatggggctcaagatgatgaacttgatgaagaagattttaaggaggaacagaactctgtagcacgtctcattcacatgttgcacaatgatgagcctgaagagatgttgaagatcttatgtactgtacagaagcatatacttcagggaggccccaaacgtttaactttcactgtgccttctttagtattctccgctcttaagctggtcaggagattacaaagccaagatggagatgtcactggggaggatgttcctgcaactccaaagaaaatattccagatattgcatcaggctgccaatgactgtgatttggaaccagttgcttatgagttctttactcaagcgttcatattatatgaagaagaaattgcggattcaaaggctcaaatcactgcaattcacctgataattgggacccttcagcggatgaatatatttggggtggaaaatagagacactctcactcacaagacaacagggtactcagcaaaacttctcaagaagcctgatcaatgccgagcagtttatgcgtgttcacatcttttctgggctgatgaccaagatgggataatggatggtgaaagggttctgctttgtttgaaacgtgccttgagaatcgcaaatgctgctcaacagatggctagtgctacaaggggaagcagtggatccgtaactctatttattgagattttgaacaagtacttgtacttctttgagaaaggaattccgcagatcacaaataccgtgattcaagatttgattgaattgattagaacggagaagcaaagtgataactctgtagctgatccatctacagaggcattcttttctagcactttgcggtacattgaatttcagaagcagaaaggtgggagcataggcgaaaaatatgaacagataaagacgagttcatgagtcagaactagcgcggcgccacgactggtttcgattttgttgagaattgggtcgtttgtttggcatggttcagtgaaatagaaaccataagttttagctcgctccatgtaaaagatgtttatacgagctgttaattctcaaatctcacggtctgagcgggtctgttcgcccattggcaacactttcaggtttagtcaggtggcaataagctgtgtcctttggggagcacaggtctgtacaggattacttgtgttcgtgatcagttctactgctacctgaatttcatcgttgtatatttccgccccttatgcgaagcttatggattttagatctctgtaacattcggagtacatgccttcatttctgagttctgactggacattgatgattgtttcagagtggccagtgcaggacttgaacattttggatgcccgttcgttgacattttaatgttacccattactctgctgtgtggcatgacctcgc

SEQ ID NO: 41246 - DNA, 1439 bp, Zea Mays
atggagtcggccaatgaagagcggaaggaggagagggtcaacgggggctcaatagctggttggtgtagatgttgctggtttgagaatagtggcggcaagatctcatggagagaagctatgcggactcccagaaaaggcgaaatcatcgtgcgattgtggagattgtcgatgggaggctccaccagcgctagggtgcggccaacaagacgctgctcgccaccgcttgagtcggtagtgagatcttagggggagaagccctgcagcccccatgctcccactccctcctgcaccccacgcttaccggcgagccgctcgacctcattggagcttgccaagccgtcatgtgccccagtgcggtggtcgacatcatccacggcgtcgaccgcgtgctggtcctgcgctcaatgcaggagtccttcaactggcggcggtggagcaaccgtactaccacagcgcgtacacaggacgcagagaacaactccagaaggcgagccccaacccctagatctgcgatgcagtcttctcaactgaaaaaagagggcagagaacaactccagaaggcgagccccaaccccagatctgcgttgtagtcttctcgactgaaaaaagagggcatctctaccgccaccaaccactagcaggcggcagacgttgctggcaataggcaatggcatgcatcagggacggagatctgtcgtcgaagaccacctcattgtttctcatggcaggcttgcttgctctagcttggcacaatatgtcgcttcaggcttcagtcggttatgtgatcaccagaacattatgggctctaaagtaggacttttgagaaatgccaggcgatggtgcatgcatgatgaagctgttgtccattatattgacatgattgatcagaccacgcttggtcaccggatgatcaagaaacaattcaacaagactccaagagctggctggcaaatcgatccttttggacattctgcagttcaagcttatttgcttggagcagaggatgacatactgatgtttgactataatgttgaagaacgagttaatgattttgttgttgtagccatagaacaggatggccaagtgcatgcactgtattctaccccatccatttacacagatgcaaaacatttgtcaaatgtatcttggccagtaaaatatgatgagtatttcccctatgctgattcaaaaaattcatattggactgggtactatacaagccgtccaactttcaagcgatatgttcgagtgttgagtggttattacctggctgcacgtcaaatagaatttttagtaggtaggaggagttccttagggttgttcacgaccagcttggaagacccaatggcaattgcccagcatcatgatgcagtctcaggtacaacaaacaacacacgacagatgactacttgaaacaccttgctcttggagcatctaag

SEQ ID NO: 41247 - DNA, 448 bp, Zea Mays
accctgcgtagctaggctctatgtgttggcgtggatttactggaggaagccacgactgcatttagagttcatagctgtccttgctgcaagttcaagcatccaacccctgtgatcttttccctgcctatataaagagcaactggggagggaaaggtagaaacccaaccagtgatccttagttcaccatcaaccatgttgagcagccatgattagtagtactacacccccaaatcataccctagacacacccaagttccatcgatcaaggcaccaaacttatttgatgaccaccccggcaacacctcggcttcacgtggccagacgactgtgaaaacgaagaagagagtgaagtgactgaagagaagacaccaccacctttggaatctcaggcagggacttggctctacttcgacatctgcgggtccgagcctgactcacctactaacga

SEQ ID NO: 41248 - DNA, 1471 bp, Zea Mays
tcagttggtgttcacttgttcctcaatggaggccaagaacaagaaaaaagggtcaaagatggagagagtttgtgagaacacagtggctgttgacttcaagcagactaagctgaacaactttgtgccattcatccggtcaggggaatggtctgatattggaggtcgcgattacatggaagatgcccatgtgtgcatctctgatctggcaaagaattttggctatgactcagtcgaagatgaagtaatttctttctatggggtgtttgatggccataatggcaaagatgctgctcattatgtccgtgataacttgccacgggtcatcgtggaagacgctgattttcctcttgagcttgaaaaggtggtaaagaggtcatttgtgcaaactgatagtaagtttgcagagaaattttctcatcacaggggactttcttctggaacgacagcacttacagcaatgatttttggaaggtcccttctggttgcgaatgccggtgactgcagagcggtgctctcgcggcgtggcactgccattgagatgtccaaggaccacaggccttgctgcatgaacgaaaggaagcgcgtagagtcacttggcggctacgttgacgacggttacctgaacggtcagctggcagtgaccagagcgctcggtgattggcatctggatggcatgaaagaggtgggcgagccaggagggcccctgagcgccgaaccagagctgaagatggtcacgctgaccaaggacgacgagttcctgataatcggcagcgacggcatctgggacttcttctcgagccagaacgccgtggacttcgcgcggcggaggctccaggaccacaacgacctgaggctgtgctgcagggagatggtcgacgaggcggtgcggcggggcgccagcgacaacctgacggctgtgatggtctcgttccacccggacgcccctcccccgagccgagccaacaagaggaccggcagggtcaccaggagcatttcggctgaggggcttcacagcctcagagtgctcctggaaggccagtgacgtcgccgggcggcgcggcgccattgctgcccgttcgtccctgatgctgtgctacgttgctgatgagtgttaactgtaagtagcggtttccggtatcttggtgcttgctcttcttcttccgctgagggcgggcgactattcttgtccttcctccgacaataaaccaacgggcctgagatctcactgtgagacgctgtaaataaggaaatatggaagttggagctcgtcattaaggacgagttagcggtgtgcatccagggggcttttgtggctcagtatgtgatgccttttcgcccctcctgattttctgtaaataaaacgatgctgggagccatcggtgtgattgaactagtgttctgttatgcgtgctccccatcgattcaagatctacagtttttatttactaattactactagtacaagtcttta

SEQ ID NO: 41249 - DNA, 1475 bp, Zea Mays
ttttcctttttggggctacaattgggtacatccagagtcttctacggagtgaataaaataaagagaagtagacgtcacattcaacgagtactccgcagtcatcggacgccatcggctccccaagtcccccaccgtccgctgttcttcagggataacactttcattgaaagccaggttcagggagctaatatttgcgagttcatccataaaaagaagagctcagacggttgaatatcgaccatcaacaaaggggaagtacttttaagtggtggtgcagcctaccattggtacttcaacccatcaattgaagaagctactgctttttacaacaagattgaatctgagaagataaacatagaattacccagccttgacggacaagaaattacacctccacaacttccacaacgagaacatcatgaccttaaatacatattacctctaaacccacatgatgtaccggatgaaggatatgaatgcacagtaaccattacaagtattcctgaaggcaagacttggtattatattgcttgcaatacttgcccaaacaaaccaagcattgatcctatcatccgtcaatgctccacatgtggatcaacaaaatactgcttcaggtacaagctcactttcaaggcatcagatggaactgcagaagctgaaatgtttgctttcgacactgttgcaaggacaattattgggaaaccatgtccaatggttgttgcatcattttccagatgcatcagctatcccacctgaaattacagcaatcgtttcacggaaatacacattcattgtagtgttcaacaaccaatcatacagatttctagaaaaagcattgctcataaaaggaattgtagcatcatatggaagaatgacatcactaccaagagttcaagaaaaacttgatgtgcaccttcctcccaatccagccaaaaacaaactgataacaacagctgctcaatctccctctacagtcatgtctagactttccacggcggactcaccaagtgtgagtcgaaagctaacctattctccagcaaaggataaacctgagacaaaccctcttgatgctgataaaaatagagctcctgcaacaacacttgaatcacctacaaaaaggatcaaacaagaccctaagaatcaacaagagtagacgttgtgtgcaacacagtaaggaatacttctgaacatcacgcccaaacttcaacaaacgaagcatattcctcactattttgtctataaatattatgtgtgccttcttctatgaagcaaaccttaccctcgatatgctatatataatatctatgtattgtcatgtaatataaccatctataaactcatcagttgctacaatatattctaagcaaaccttaccctcgatatgctatatataatatctatgtattgccatgtaatataaccatctataaactcatcagttgctacaacatattctcatgttatgcatataaaat

SEQ ID NO: 41250 - DNA, 1152 bp, Zea Mays
cacgagaattccatcgccgcggtattaaaaagtccctcccacgccgccgccacctaaacctcctcactcctcagactcctctccgcacataccctccctacctcgccgtcgccgtcgcatctgccatgggggcgtacaagtacgtctcggagttatggagaaggaagcaatccgacgtgatgcggttcgttcaacgcgtgcgctgttgggagtacaggcagcagccggccatcgtccgcctcacaaggcccacccgccccgacaaggcccacccgccccgacaaggcccgccgcctcggctacaaggccaagcaggggtatgttgtttaccgtgtccgtgtcaagcgtggcggcaggaagaggcctgtgccgaagggtattgtctatggcaagcccaagcaccagggtatcacccagctcaagttccagaggaacaagaggtctgttgctgaggagagggctggacgaaagcttggtggactcagggttctcaactcctactgggtgaatgaggatagcacctacaagtacttcgagatcatcctggttgatgtggctcacaccgccatccgcaacgacccaagaatcaactggctatgcaatcctgtgcacaagcaccgtgagctccgtggtctcacctctgcaggcaagaagttccgtggtctgcgtggcaagggccacactcaccacaagaacaggccgtccaggagggccacctggaagcgcaaccagaccctttccctccgccgctaccgttgagcacacacatcttgatgctctgctactgtggaacccgccccatgcaggctctctgatagtatttggtatatttgtttcattgttaaattttgctacatgtgttacttttgagccccttgaactccgttgtctgtaccatggagcaagtgacgcgtacgagtcgatgaaaatgattgtttagtagtgcattgctgtgtattctgtctggcacgattgatttagggcatgtttgggaacacttctttcaaaaccacggtttatattaccatagtttaccgtatgttatgacatgaacatattgtattttacatcattctaattcaacatctgtttggagccgggaggagaaaggccaagacaaggaaggagaaaggggctagactgcgcctgcgg

SEQ ID NO: 41251 - DNA, 1078 bp, Zea Mays
ataaggaaggcaatattgttgacaaagatgttcacatctaggaaggaaaatgcaaatctgaactttattgagccattaaagaactcttcttggacacataaaaaacttttcatgtcctgtctctcctgatagatcaacacccaaagagaagccacaaaagagagacaggagtgaaggaaagaagcaaaagggtggctcttcaggagctggatctggttttctcgtgccccttcaactttcggatgatttagtaaaatttatcggcactggtgagagcatgttatcacgatctgatgtcgtgaagaaaatgtgggattacataaaagggaacaacctgcaggatccttctgaccggaggaaaataatctgcgatgagaagctgaaggacctatttggagtggaaacattcaccggctttactgtttcgaagctgcttgcccctcattttaccaagacgaagtagcaacctgccatccacatcttctaaaaccaaaaaggcttgggacataaaattatctgtgcggtgtggcttctagtgcgttcttcccgagttcatggtccaccatttttcatgctcagggttgaggatgacattgctcggtctcctcagatgaccctagtggtcatggaaccgtaaagacaaggggggagcactagcgcttgtcgcctagggtttcagggttctccacttgccagtgaatctttcatcctttttagctcctgatatggatgaagtttgtagcactagcgcaaccgccttttgctgttccttcccactcacttggtaccggttgttcagaggacgccagtttatatttgtatggaccacctaaactgaagctgttttgtcatgtgggtggcatggcgaagtgggtcgatatcgcgacggttctgtaacgcgatcttgcgctgtttccaactgctggtgccatttgcctgtcagttcaaagttaaattgtgttcagattctggttccgagggggtacaggtacgtacacattgcacgagcagaatgtgattcaggggtagggtcggagtccgtttcagcagttgggtcgtcgtgctgcgttggtctcca

SEQ ID NO: 41252 - DNA, 843 bp, Zea Mays
ggtaactcaatttttgccaacattttcagaccatcctcggaaaggagattgtttagaatacatttcctatagttttatttagttcgttagacataaattattctagaaggctataaggttgttcaacaccgcacaattatagcctggtaaaatcaccaactgctttattgaagcaaagaaatttcaagtagaccgcaatgttgatagaaatcacacaatggcacttgctttgaggctgaaatcaaattatataaccccagtttggtctacctagaattttacatatgaagggttctggggaaaattcatgcattcaaaactgtcactaactctcaaagacgcagaacccgatagcattaccaaatattctaacacagacttgatgcctagtaacagagaaatttcctttaaattcagtcatgtttatgtggcaaataaaacattttacctcaaaagaaatgtaaccacttgcattaccaaaaacatcccttaacaagtgatttggcaggtttactcaaatgaatacaatgaaaacagaatgcttagatcggaaacttgcaatgtaaataattagcagtacaatgattctgaaaggatgaaggataaaacatgaatgtcctaataggcatatgaacaaatagtctagtagcaggttgtaatgtcatctatgcatatacctcatctgtctctgagtcagcctaaaagaacataaataacacagacaatgaaacggaaaagtaaggttactcagcttaagcaaaaaatgttccgagactccaaacttacttgtgtcatcacattatgcagttggcatagtcagtttaggatagctggggatctgag

SEQ ID NO: 41253 - DNA, 1652 bp, Zea Mays
atggcttgggagctcattgaggtcccgggcaacctgaatatctctctccaagactctacagttgatgtggtggccgccaagattgatcccaagctagctaatactctcattaggcagttaagccaggtgtgtccattggaaaatctgaggcatgtaaagcgtgtacgtcgaggtactgaatgtgatggaaaatctgagttatcaataatcctatgtgtttctactgggtctgaaacttgtggcatacagttttctgaagatctaaaaaagatagtggatacttatcagctgagtcctttcactgcaaaagtaatgctgcatcctttgggaagctttgatgttgtcattttttattgaaattggtaatatgtgattctggcatgatggttctaggcttgttgagaaaaggttcttaatctttttgtatcttacagctacagatgcattaaaatttgaatcctttggaataactgcaattatctagctagactcatcttgtgcccttgtcgtatattgacatttactatagtaaaagtctttattaggttgccaggtgttgtgctacatcaaaagaggagtgggagaaacagtgcaaactttggccaacatcttaccatcctgcacatgaccttgatattgtacgaggatttcaagaggaggaattaccatcaatatttaattgcatgaagactactattcaattatcaaagacgggcaatgctgcaatcattgttgacccatcaagcatgcaaatagtcgcaaaggccacggaccagacacacaagcatgatacgcctgaagggaacacggtttctgaagcaaatgcagatgttacctgctctttgaatgaatcgatgggtaatggcagcaatttgtcactgccaggatcctttcttcctaaatgcgacagcttgaacatggaaatctcatgtataaatccttggggatggatgaaaaaaaagacttgtgagcggaagccattgccctgtgatggctgttttgcatggcatcctctgagacatgctcccatggttgccattgaaaatgctgctgagagggatagaacgatgttcccttctttggcttcaataaccaagacagattcaaatggcaatctagagaagtattgtgataatgaacaagcaaaaaggctaaagacagatacaaaagataatgagccgtcggcatctgaatcattctgtggtgacttgtctgaaaccagcagaccatatctctgcacaggatttgatatctaccttgtttgggaaccatgcacaatgtgtgcaatggcacttgtacaccatagattcaagcgcgtgttctatgctttccccaatcctgtcaccggagcgctcggtggagtctacatgttgcatggggagagaagtctaaatcatcactacaatgtatttagggtttcagtacctgaggcatactcgaatggtttgaattagttgttcgaaggaatgctgacccaacatcctgttccattttgtttagaaaaaaaggatccatgagctcttgattttcactatgggtgccattttgttgcacaagagcttcagattaggcttaaacttgtccttttgtattattaaaattttacctatgttgtatcactaaaatagtctcttcattctctttaatatagg

SEQ ID NO: 41254 - DNA, 2138 bp, Zea Mays
atacttttgtcatactttagctttagcatcttcaccatacagttgagtgtctctcggatccacctgtttttgctctgtacaaactttgcttaaattacgaaagaaaaaggaaaaggaaaagtctctcgagaattcgaaataattggaattagatcgtcgtggggattccacatcgtaaccactgaagacgaggcggcggacgagacggagagcagaaccgcgcagcgaagcagcagcggcgacaagccctcgcgtcggtagaggcgccgtccgccgtccgccccctcaactccggtagccgctggccgctgcaggtcgagtcccgtcgagccgactcgcgcttcccgatctgggtggccgcggcgccggcatggcgcggttcgaggtgaacggcaagtcggtgcaaggcgtggacttgctgcggcggcgccactggccgtcgcgcctcgacttctggcccttccttgcactctatgcgctctggctgctgcttgctgtcccggcgctcgacttcactgacgctctcatcatccttgccgcgctctccgctgctcacattctcaccttcctcttcaccgcctggttcgtcgatttccgtgccttcgtcgggtactctaaggtcaaggatatccatgccgctaacacgtgtaaggtgactcctgctaagttctcggggtcaaaggagattgtacctctgcacaaacagaaaaatgtggcctcaacttcagctgcaggaattgatcggtcattatggcaagggcactggttatggaactgaggccaagattagcaccgcagtggacaagtggggcagaaatgtattcgaatatccacagcccacatttcagaaattaatgaaggagcaaatcatggaaccattttttgttttccaggttttttgtgttgctctatggtgcctggatgcgtattggtactacagtttgtttacacttttcatgcttttcctgtttgagtctactatggcaaagaataggctgaagacattgactgagctaagacgtgtgaaagttgatagccagattgtgttgacctatagatgtgggaaatgggttaaagtccctggaactgaactactaccaggagatattgtgtcaataggccgctcaactagtggtgaagatagatctgtaccagcagatatgctattgttagctgggtctgcaatagtaaatgaagctattcttacaggagaatctactccacagtggaaggtttcaattgctggacgtggtcctgatgatatgctatctataaggcgagataagaaccatatcctatttggtggcactaaagtattgcaacacactgcagataagtctgtaaatcttcgatcacctgatggtggctgtctagcttttgtattgaggactggatttgagactagccaagggaaattgatgaggactatcttattttcaactgagagggttactgcaaataacaaagaaagtggcctgtttatactctttttgcttttctttgcaatcattgcgtccggttatgtgcttgtgaagggattagaggacccaacaaggagcagatataaacttttattgagctgttcgttgattattacttctgtgataccaccggaattgccaatggagctctccatagcagtcaatacatctttaattgcattggctcggcatggtattttctgcacagagccattcagaataccatttgctgggaaggttgacatatgctgctttgataagacagggactctgacatcagatgatatggaatttcaaggtattgttacatcggaaggtgatgacttaatatctgatgcaaataagctgcctctccgaactcaagaagtgctttccagttgccatgcactggtatttgttgacaacaagctggttggcgatcccctagaaaaggctgctataaagggcatagactggatctacacatctgatgagaaggccatgtccaaaaagcctggtggtcaacctgttcaaattgtgcacagataccattttgcttctcacttgaagagaatgtctgttatcgtccgtattcagcagaaattttacgctttcattaagaattttcccaaaacagcaatgtcgagtcttcaggaaaaaaatgcaacaacataggga

SEQ ID NO: 41255 - DNA, 318 bp, Zea Mays
accatcaattccgatcaacgttagggggaaaaaagagaggagaaaaaaaagtcaacttcttcctagaatctgcccggacgtttcctgaatctggacagcgttattatacgctgtactagtactactgtgcgtgactacggttgcagccccgtttgtttaacaggatcatgccgcatctggcgtgtgtacagggcccaagatatttctgccgcgactgcctttgttcgtcctttctctatcgccatccggatctctgtacaattggttatgttagccattaatgcatgaccccaaagggccaagcaagcaacgttctta

SEQ ID NO: 41256 - DNA, 2232 bp, Zea Mays
ctgaactctagaccgagatgagcacctcttcagacgtcctttgattctttagtggctgcccttgatacacgtggcacccgggaagcacagctgcgttcaatgttgcaaatgatcgagacaacctttaaggaagctattaaaaggagaagtgcaagtatagaattatctgctacagtgtatccaaagaatggagctactgacatgataagggcaaattatcatagagaggttggaagctcaagcagtactccttttaatgatacatctgatagtgtaacagcatattctgattcttttaaagtagagcttgggcgtaatgattttgagaaggcagctatatcaaaaagggcagatatatttttaaaatggatgtggagggaatgctacaatcaggaagagacatgtgccatgagatacggcaagaaaagatgctctgaattgttgcattcttgtaattgctgctatcagatttacctagccgaagaaagacactgttcttcttgccataagactttcaaatccatttacaatttttctgatcatacaacacaatgcgaagagaaatggagaactgacccttactggaagatgcaaatcgctgattattctgttccaataggaatggtattactcaagcttcagttagttttgattgaggcatatataccatcagaagcacttcaaccattttggactgatgtgtatcggaaatcttggagtgtgaagctttatgctaccaaatctattgctgagacattccagcttttgactgttctggaaggtgcaataataccagatcgcctctcttctgattttgaaacaacaagcgaatgtctaaactcacaggttatcgcaccccaaaatcctgtgttaccagctggatttgcttctgtccttccatgggttcctgacactacttctgctgttatgctccgagtgttagaccttgactcagctattttgtatgtgcaaaatcaaaagatggagagggatgatggaggttttatgaaatttccatcaaggtatacagttgttaagagcaaacaagaaacaattccactcgaaccaactggtatggatttgtatgatggaaggtggcttcctggtagtggccgtaggggacgtggccgtggaagtagaggaggtagcaggggaggcaggggccgaagtcgaggtggaaggatcccaagaggtgttagcagctcatcaaggatcgagttcaaggatggcattgctgcttctggtagagcgccaaggaagaatgcacgtcgaggtcgaggtcgaggtcgaggtcgtgggcgtcgaactgtcagacctcggcagccatctgtgggcagaggcagatcaattccaaaggaaaatttgatgggaagctttagcatgcttaccagctcaaaggctgccgacattgaggagtctccacgaagctctggcgcagatgagtggggcttggagaccagaatgacatacactgagcgtgacgagaacagttctggatcacgctatgaagataacgaggaaaacggccagcccatggacgaggattatgaagagcaggttccagattactcaatagactattctagtgggtcgaggcaccatgaaatgatgtccatgatggatcacgagactgacgaggaagatgaagatgctgaaggtgatgagaatgtggaagaagatgatgcagaccacgcagttgacgatgccgatgttgagatggacgaaggtgatgatgaaattggtgatgacggagaggatggcggcgttggcggggagatgactccggatgaggatccagatgctacttcatattcatctgactacagcgaataagaaagcagaaataagtgaccttatcctagagatcctccctcagcgtccctttgtgaaccaaaaggaaaagctaaggagcgatagatgtgcatactgtttttttaggcaccgcaggttctaatagatttcctgacgtatgcctactcattcgatgagtggttgtatcttgctaggtatgtgcatgtcactgtagaattccccgagctatacagtgtctaaggagagatgatatcatatcgcaatttgctaatttggttcccatgcgtcatcccgatcctaatctgatccttaaatagagcccattgtccccttaagtagaagtgatcttttatcatgagttttaccatctcttaaaagtaaatatgaaattggagtctgctttctaaccgagaacatggc

SEQ ID NO: 41257 - DNA, 766 bp, Zea Mays
gcgtgcgctggctgcttttggccaccgatacgctgcgtcggcgctccaaagttccaggcaagcacacttcctcccctgctctccacctcattctggttcccattgctagggtttgtcgtgctagggtttaggtcgctccttctccaccacctggccgcccaccctccacctctcgtgcttcccggacgccgcggccgccgagacgagggccaggagcaggagccaccgagcagtcgtcgccaccgccataaaccaaactaactaaggcagctagaatctctgctttgagttcttccccgtcaccgcacgggctgcgatctctgctttttttggttccccaatcccattccgtgtcctcatgctgccattttggggttcaaggtcaggagaggctagagttccaaatcgtagttcgtgtgaaccagtgtgaaccagttgaatctcatcaatcttatcaagtcatctaataaaaaaaggttcgacgcgtcttagagttctacgatgcatccaagaattcagagaacgttgacaaatatatagatcagctgaccaacaatgaattgtcatcaccacccaaaaagatgaagcacacccaggttaacaaagccattccagattctacatgttccaagaatgacaacagttagaccatcctgaaatacatcaaggttgggcggcttccgaagtcattcagacctgcgtccgagcctacatcatcatttggtttgaatcgcggaacgatgtcgttcgtcactgcgttgttcta

SEQ ID NO: 41258 - DNA, 1475 bp, Zea Mays
agttaccatccattggtgtggacgtgtggtggactggtggttgcgttgcgttgcgttgcttcgagttggaggttggagttggagtgggccgcgtgcgagaggatctgagcggataggccatggagtggagtgattagcggttgctgggtcaggagaaggcggcgtgtgttttgatcctactcgcgtttgaggggccccgatttcgagcgggtgttcagttttggtgccggatttcgagcgggtgtttagttttggttttggggacaatggttttggactgcctgatattcgattcataggatttcgagtcggcagatccaagggaacgccgaattttgcctgatttcttcgcaatttttggtccgatcaagaggctcctagccttttttttttcctcgcgagaagcaagggggtctcccttttcttctttcgctatgtccatggctttgagccgcttcacgcaatggctgtggccggggggcgccgcggcgcgggtggacacccacgagcaccccagtggggggctaacgagctcctccttccctgacttcccctccgggttccgggagcccgacaccgtcacgttctacaccggccgccagcgcgcgcgcccgaggagggtcaggaatcgccgccgcagccgcggggaggcccgtgtcgaccgggagtacgacatggtcatcgtcccgtccgacggcggtggctgcctgtctggctccgactccgacgactccgactggtccatcggctggctcgagccacaggcgccggagcttcagacggacggcgaccccgagaactgcttcgccgtcctcgttccgtgttaccgccacggccgccaggagcagcagccacggaggcaggagggcaggtttcttggcgccggcgccctcaccgatggtggtccctctgatggaaagaattttgtagagcagtggctttcttctttccagaactaatatcgtcagacctctcctaagctaccctgtaaatagtatcactctgttttagttctactacgtttgtcctagtcgcacaacgtatcgatgaaggaagacatgaaaaagaaatctaaaaagaaaaagaaaaaaaagaggagcagtagaattttgatttctgaagcagcaccaattggatatgtccttcctgagggtcccaggttattctactcttgccaagcaaggcgaaagctgagctgcacaaactgcgcgccgtcgagaatgattttgccgtcctgatatgtgctgagtgctaacacgtagagatgaactgctattccattgttaatttgtcccatttgcttggcgacctcggattctactgcctgtacagtgttcttgcagtgtatatagtcttgcgcaggactactgcagttgcgcgatttttcagtgtgtgttggtacgtgtgtcgtattcttgtacatggaactgaatttctgatgaatgaatctatctggtgtatataatttttgtgac

SEQ ID NO: 41259 - DNA, 2031 bp, Zea Mays
aaaccaaatggaggccagtcagctacctatccttgctgcacaaaatctacaccaaccgaaagagcagaaggaaagagtgggtgaggggagggaggaagaattatacatctcaaccgttgtcccctctagcatgccagctttagcatggcaacctacatgcagtagtttttggccaagaaagttctcagccaaagtgccctgtgggtgttcaacatgttcacatagcccttgccctgggctttgtgtcaaggagatatgggtccatggatgagctgaaggaacttgtgaagattttccatgaagctggtatcaaggttcttggcgacgctgttctaaatcataggtgtgctcagtttcagaacaacaatggtgtctggaatatatttggtggtcgtatgaactgggatgatcgagcagttgttgctgatgatccacatttccagggaagaggaaacaagagcagtggagataatttccatgcagcaccaaacattgatcactcccaagagtttgtgaggaatgatcttaaagaatggctttgctggatgagaaaggaagtcggctacgatggatggagacttgactttgttcgtggtttctggggtggatatgtcaaggactatttggaagcaagtgaaccatactttgcagtaggagagtactgggactccctcagttatacttatggtgaaatggactacaatcaggatgcccacaggcagagaattgttgattggataaatgctacaaatggaactgctggcgcatttgatgttaccactaaaggaatacttcatgcggcgcttgaaagatcagagtattggcgcctgtccgatgaaaaagggaaaccccctggagtattgggttggtggccttcaagagcagtcacatttatagagaatcatgatactggttctactcagggccattggaggttcccctatggtatggaactgcaaggatacgcctacatcctgacacaccctggcactcccgcagtcttctatgaccacatattttcacacttacaaccagagatcgctaaatttatttccattcgacaccgtcaaaagattcattgccgcagcaagatcaagatactaaaggcagagaggagtttatatgcggctgaaattgatgagaaggtaacaatgaaaatcggatcagaacattttgagccaagcggtccccagaactggattgttgctgctgagggtcaagattacaaaatctgggaagcgtcttcatagacttggcgggctgcgagtgccatataactgctcaaagactaaaaagctacaagaaagcataatgctaggagatggcgcctcagaatggtcagctggcgggagctgctgccgctgccgccatggagcagcaaaattcaacaacataagctatggaagcacttgccacggcgataggattatctaataggactactgttgaacattcgatatatccagaaccacccatcatttgcaggcacattggccattaaaatttagcttcgtcctctattttggagctatgtaaaagcatgcacaactctatttatgtgtgaaataaaatttgaatcttcatcatgggtcaagagatgtattttgccacccacaacatgacttcggtgattctacattcatagcatgcaaccgtaggcagaaatgatatattggacgaaccaaacttgaaaacatcgaaaagataacagtgaaggtgaagattccgagctttagacaatgtgtcaacggagtaatgtacttgatcacattgtcgtttgcagattcagttctcaacatctaaaaccagctagggagaccgcgaactttcaggatgacaccaagttcagagagagctgaggttcagaattatttcactcgacctcaagtattgatacggagacttgactgtgctaggactaggggggatcggcatcatcatcagggcttgaggaccagtgatagcccaaacttgggggtctgcaagaaatcaaacctgttgacgtcgacctcggtggatagggtgcagaat

SEQ ID NO: 41260 - DNA, 2430 bp, Zea Mays
tacaaacggtggcggccttgccaagaaagcaccatcgctccagttcgcgctcatggcccccactgctgtggatcccggtcccagcgaccaccttctagcgccggcgccggctgccatggctggaggaggggatggcggtgatggacagatggaggtggtgttcaatgtgagcagcagcgacaccgactccgatgacctcggcgccggtggtggaaagaggtcgcggcccgtggcggggcaaggtggtggcagggatcgagaggacaagaaggccagaatcttggccgctgccgccacggtcccagccggattcctagagccgctttcgccggtgaggttactccccccgccggcgccgggaaggagcgtgacgaagcagttctggaaggccggagactacgtcggcaagccggatcacctgcttgccgtagtggcggctcagcattctgattctggaatggatcacgttcgtgtgcatcccaaatttctacattccaacgcgacaagccacaagtgggcactaggagctttcgccgagctgcttgacaactctcttgatgaagttgtgcatggagcgacatatgtgaacattgacatgatagaaagtaagaaggatggaactccaatgctgcttgttcaagacaatggtggggggatgaacccagataagatgcgtcattgtatgtccttgggttattctgcgaagagcaaagtcaagaataccattggacaatatggaaatggttttaagacaagtacgatgagacttggagctgatgtcttagtgttttcatgtagtcgtggtattgaaggaacaaggcctacacaaagcgttgggatgctatcatacaccttcctaaggagcaccaacagagatgatatcattgttcctatgattgactatgaaaaagagaatgaatggaaaaggaaggcacggacaacattgactgattggtgtatgagcttagaaacaataatacaatggtctccttattccacagaagcagaacttattcaggagtttggctcaataggggaacaaggaactcgaattatcatatacaatctgtgggaggatgatgaaggagagctggagcttgattttgatgctgacgcaaatgatattcagattagaggtgttaacagagatcagaacaagatcaagaaggcaaatcagtttccaaactccaaacacttctttacttatagacattctctaaggagttatgcatcaattttatatcttatgctcccggataacttccaaatgattttacggggaaaaaagattgaccaccataacattatcaatgatctcatgctaaagaagcaacttacttataatccaacagtgggcgatggacttccaaaggatatgcatgtggcagctaaggtgacaattggttttgttaaggatgcgagacaacatattgatattcaagggtttaatgtttaccacaagaatcgcctaataaagcctttttggagagtatggacttctgctggagttgctggccgtggtatcataggtgtactggaagtaaattttgtagaaccagctcatgacaagcaggactttgaacgcacaaattgccttgcaagactcgaagcacgattaaaccgaatgcagaagaaatattggtctgataatcgccatcgaattggctatggaaccaatgatgctagcacagattctgtaaaaaggaaaacaggactgtcgttgcgtccatttggccaaggttcctggaagtcagggtatctgcaaacgatcagaagtgatggcagatcatgttctaatacaacaaataatattatgaatgcaagcatgtcatccccagaaacttccaagcttagtggtcccaatagagagttctcttcaacaacagtgtgccagcacagagctgaaaagtctgcaaataccataagatctgaaagatcagttttgcatggcttgtcaaatacagatggtggaaagactgagactgccaacgccccatccaaatcaacttcccctatcctaaggactagtttgccaccaactcccaatgaaggaaaacgaagtgagaggattgctgccaaataccaatcgaagcaagtaaatgcaacaactaatggagacagggaatccattgttgaccctgaagctatcatcaagaagttgaaggaagaaaattcatcgctaaaggagagttatcttgggttaccattctcagtgtggaagatcactaaggctgatattattgccctcatcgacaagattgatgaccgactaccacgttggaaagctgccttgatgcaccaagctagaagagccaccatggtcaaattggtgcttattgtgatcccaatttaccgtttcattgtcttacattgtcccaaatgggtcctcaagtccattgataaaataagaaggggatttctatggaaggg

SEQ ID NO: 41261 - DNA, 4331 bp, Zea Mays
atggcgagcgggggaggggggattcgggcgacgacttcggggaggatgaagtcgcgagggtggggagattcaagcgacgactttgggacaccggctattgcgctgaggcgtgggggcgactgtagtggcacggcgagttcagactccagcgccgtcttcttcgcggtcgccttttgcgctccatcccctgggctttccgtcacggcggccgcagccatggtggagatgcggcagcggaggaagccgctggtgctcgcctccacgcaggcgctcctcgactcgcttccgggggatcgcccgccgccaccgccgcagaagccggtgcgccttaaggccggcgtcctccgattcccctccggaggtggtggcgccgagttcggggagctcgcgtctttcgtcggcatccctgcccctgctctccgacggctcgcggtcgtcacgggtactcctgtgcttgtcaagaatactgacaataatgttgggaggattgtcaaagcagtattgtttggtaacccgtcccttgacaagtcctgctcagaacatactgaccaagtggtctctgcctctctctctggtcatgcaatgggcttcttaccttgtcgcacgttccctgctattggttttacatccatggatgaagatgttggttatgttagcccacttttggcattcaacttgggattgcatgtttcttgccttaaacttcttattcaaagagaagggcagcctttcaagttctgttctcgagctgaagagattgatgcaactgccagttctggaagtgatctttctcttcacttagaccttcttccatgccctcaagtgcctaaatatgcattgcatttacgagtttctgttgtgaggattcctgattgtggtgtgcttgcttctttaaagatatattcatcctttggaggaagtgagtaccaagacatggtagatcaagctttgaacgagtactttaagtttgataggttcctagcaagaggagatgtttttggtatacaaaacagttggaagtgtggctcaagctgctgcctggcatgcaataagcaggataataaactgaatccccgtaatatgatctactttaaggtgactggcatggaaccatcagatgaacctatacttcgtgttaattgcaatgaaacagcccttgtacttggtggagctgcttctgctgcaatccccccttattccttttttgcttcttctggtaattcagtaccattgcacagtgaagtagtggagcatttagcatctgtcattgcaccagcattgtgcccttcggatattttaccaaaaataaagttttccacttttttatatggcccgccaggatgtggaaagcgcacagtggttaggcatgttgctaaccatcttggtctgcatgtggtcgagtgtagctgtcatgatctgatgacatcatcagaaagtggggcacctgctgcacttgcaactgcctttaaagaagctcagaagtattctccttgtataatacttcttcgccactttgatgcaattgggaatgcatcctcaaacgaaggtccacagtctgagcaatctgggattgcatcgaacattgaatctgtcattaagcagtacattggacaacgttgggttgctaaggattcactgccaggaaaagatgtaaatgggagctcatacctcgtggagcctgaatgtgtaagctctcttcaaatcatactagttgcaactgcggacagttctgaaggaatgcaacagtcaattagaagatgcttccgctatgagatcgacatgaagactatgaatgaagaacagagaaacgaactgatatctgagacacttcaaggcattcctaaagttgctgatgagagtatttgtgacaagttcataaaagatttagcagcgcaaacgtcaggtttcatgcccagggacatacttgcattggtcgcagatgctggtgtgtcttttgcgcataaaattgcagcagggaaagatagcaaagcaatcagtaagcatacggaggtccttccagaaagctcttctgccactcaaaatgaggaacaccatttcagcaaagaagatattatgtcttccttggaacgagccaagaaacggaatcgtgctgcactgggcacacccaaagttcctaatgtcaaatgggaagatgttggtgggctagaggatgtgaaaaaggttattctagatactattcagttgcctctgatgtacaagcacctgttttcttctaaattgcgcaagcgatcaggtgtcctgctatatggacctccaggaacagggaagactttactcgcgaaagcagtagcaactgaatgctcattgaactttcttagcgtcaaaggtccagaactgataaacatgtatgttggagaatcagagaaaaatgttcgggatatttttgagaaggctaggtctgcacgcccatgtgtcattttctttgatgagcttgattcccttgctcctgcacgaggatcctcagcagattctggcggtgtcatggacagggttgtttcccagttacttgtggagatcgatgggttgagtgacaacagccaggcctgaccttcttgattctgcccttcttcgccctggtcggttcgacaagcttctttatgtcggtgtaaatactgaggcatcatacagggaaaggatccttaaagcacagacacgcaagtataagctgcacaagaacgtttctctcttgtcagttgcgcagcgttgtccaccaaacttcactggtgctgatatttacgcgctgtgtgcggatgcatggtttcatgcagcaaagcgatcagttgaaacattcgaaatcgatccttcaagaagtaatgaagccagtgccgaagaagtcatcgtcgagatcgacgattttatcacggtgttaggagatatcgcaccgtcgctctctctggacgagctacaaaactacgaacagttgaggcagaagatcgaaggaccttctagatgaagttgggtttccactccctgctgacattcttaaactgctaacacaccaaaacattccctgtcttacattttcgttcgtacacaagttttcctccctgaaaacttgggcacttctatatccattcctgatttatacaatcacatccttgtagcagcatctgtattgacatcagaatgacattttctctgaagagaaacatcctgtcattctttgttagcagctccgcaactattctgaatgagcccgtgaagtcaagcactcaaagccttacctgggaaacaaaatgctattcctgacctgaaggaagcatccaccaatacagctagtttgggtacacacgctgaaccagctagttcgcctgggagaggcctctgtctcgtttagatgccatcgtctagaagttgtatcggaaaaattataagcgaatgttgcaatgaacagagttccttgtactgctgtgatttgtcattggtcaaagagaactaactgcagcgtttgtctacctacaatacttgtttttttgttgttgctatcttgtagtgccagcagcgatgcctccttgttggtgctcggcaagtcggctggtgtgagcaaaatccgtacgtcgtcgtctccagtggtgtcattctaaactggatctgctgctctcgagaccgaacaactgcaacaaactcaggcagggactcagcatctacacatcctgttctacggtacggtgattgtgacacaaatcggctgcatgggaaccatactagctgccaagaaagatgaaagtgttttctccgacccaacctacaatgtgtctgttctttttgggaagagagatgagccactcctactagcttgcgcacgtcaacttattgagcacataagtggctcagcccggtcattggtgatttctctgggtctgaaagatcattctcagggaacgctgaaggatattactgtagctgtgatgattgaatagctgatgagctgggcatggggttggctcgatggttggcatattcagccccatcgataaagatactgtttagcattgcgcaagaggagccatcgtttataccatgcactaaattctggtagttttgtagttggaccttctatctacttggattaacaaaaggtggttttaagctggtgtcaaaatttgagtgtcaactttcacgctaaacaaaaggcactgtacactggtaaagcacttctgaggcgaatcatgcttttcgaggacaatttcggctatccgtgctggggctgccactgtggagctctgtgcgtactcctttgccgtctaggactagctaggagagctactgtactcgccactcacatcacggctttagaccaactccagcaa

SEQ ID NO: 41262 - DNA, 4373 bp, Zea Mays
taaacataacgaacacgcgcacaaaaaatattgacaaaaaccggaggggtaaaaggggaaaggccacggccgcctggaggagcgagagggcggaagaggggaagcggcagccgcaggcccgcagctcgtcgatggtggttagggtttcgccgcccgcaccctcgaccagctgaagaatcgcccggtggttgaagaggctcgcgcctcgccctacaaggctccaagggaagaggggatagacagcggcggaccgcggcgtgcggctgatggccgagcaggaggggagggacgcggaagcggggggcgatgccgcggccgcagcggtggcgtcgcacaccagcagcatgcagcgtgtcaaagtataccgtttggctgatggtgggaagtgggacgatcaaggaacaggttatgtttctattgattacattgagggttcaaaagaactaggtttgactgttttagatgaagatgacaatgatacactacttatgcacaacatcacatctgacgatatttacagaaaacaagaagaaacaatcatttcatggagagatcgtgaagcagcaacagacttagcgttaagctttcaggaagctgctggatgctcctacatatgggaacacatatgcgatattcagagaaaccttcagttcagtaaccttggtgctctggaagttggtcctcgtcaatcatcagaatctctagaagcctctagaataatgcattctaatgatgattcattccgctctgccaacggcggcgaattcagggagcttcctcctgttgagttgtctaatcttccttttattttgaagactgtattggaggctggcattacagatcagatgcacgtggcagagttgataacacaagataatgactttttcccaaagatagtggacattttcagaatgtgcgaggatttagagaacatagatgatcttcacatgattttcaaattggtcaagggaataatattgttgaacagtccatcgatctttgacaagattttctctgatgagtttattcttgacataataggtgcccttgaatatgatccagaggttccaagagtgcaaaatcaccgtgcttttctgaaagatcatgtagttttcaaagaggccatacgtattgaaaatgtttctgttgtttcaaagattcatcaaacatacagaatcggctatcttaaggatgttatactaccacgaatactggatgatgccactctagcaagtctgaacacaatgatacactcaaataatgcttcggttatttccctgctaaaggatgacacactctttattagacgactatttgccaggatgaggtcatcagatatttcaatggaatcaaaacgagaattggttctgttcttgcatgaattttgcacacttagtaagagtctaccacttgttcagcaactgcgactgtttcgggatctttcaggtgaaggagtttttgaaataatttctgatgtgttgcagagtcaagatagaaaaatcatttcagctgggacagatatccttatactttttcttaatcaggaccctaacctattgaggtcatatattgtccaacaagaaggaaattctcttctaggacttctggttaaaggcatggtaactgacttcagtgaggaaatgcactgccagtttctagaaattctacgcatattgatggattcttttactacgtctggagcacatagagacgtagttattgagattttctacgaaagacatcttgactatttggttgatgtaatagcatcctcttgtcccccgaggagcttgtctcgatcatcatctaactcggtacatgttggtggaaatgctgaaggacactgtatcaagcctgagattttgttaaatgtttgtgaactgctgtgcttttgtgttgttcatcatccctacagaattaagtgtaattttcttatgaacaatgctatcgagaaaatccttacattgactcaacgaagggagaagtttttggttgtagcagctgttagatttatgcgtactattatatccagaaatgatgaccatctcattcgccatgttgtgaagttcaacttgctgaaaccaataattgatgtctttgttgacaatggggagagatataacatgctacattcaggagtactcgaattgttggaatacatacggaaggaaaatataaaaactctcattatctatgctattgagtctttctgggatgaacttgccatctttgaacactttggaagtattcaggccttcaaactcaagtatcaacagtacctggagagcgctgaaccaaggttgaatgctagtgtgcctgacatgagaaagaaggcagaacaaagaggtcttgagaaggaagaggaagactacttcaatgaggacagtgatgaagaagattcaggctccggccggcgggctaaacatgcacagaaccaaaataacaagcctaagtccaaggtccccaatggaagtgaagctgatgacactgatggcgcctctaggcctaaatctgctggacttgtggactatgacgatgatgacgatgaggacttcaatccaccaccaaaggagccttctaggcctgcagaggatgatgtgcccttaaacatatccccgttgaagcggaagccagtgaatgcagtggatgggaaacattcagacggagagggtcgcaggaggcaaaaaatagaaactagaattagttgtgctaaaattgctgctgttactagtacagctattaagcacacagatctacaaaacaagtatgcttcccacttgcttacgtcagccacaccaagtactgaagccaatggtatttttagtgaacatggtactaactatgaggagcaacaacatcctatggagaacacagaaacttcacgacaaactggtggtgattgtataaaagatgtgggcagtatgtctcccgagaaggccgtaaatactaccaatacaagcgattcggagccttattcagtaagatgactactacacagctggttggtccatgtacccatcctgtgctgtggtcaacaggaaggaatcagaatgtgtttggctccaagcgctgaatgcatcgatatcatgctggaaacatgattggaggtgacatagattgcagctacctttacatctcaagtaaaattccagttacccctttttgcgcctgtaaagttaattttccgcaaggacagatctgacaaacatgataataggaatgactgtagattcgaacattggatgggccttgctcctgctgctgcgctcgctattgtatcggtttatgagccaacgtagtagtgaatatgtgccttcaactttatttttctccacaattattgatactgttgtaaaacaagtaggaaggcatagtttatgttgaatagcgtttttgcaagactttgtgctaactcacctatatgattgtaatttgttggttaatagttttggtcggacatgttacgttggataattaatctggtcttgtgatagaataatttatgcagaattttttctttgttaagccaaatatgttgtgcacatttgacacaaactactacggtagaatttcagaagtgaataatgttcgatgtattgagatctgggttatggagtttatgttgaatagcgtttttgcaagactttgtgctaactcacctatatgattgtaatttgttggttcatagttttggtcggacatgttaccttggataattaatctagtcttgtgatagaataatttatggataattttttctttgttaagccaaatatgttgtgcacatttgacacaaactactaaggtagaatttcagaagtgaataatgttcgatgtattgagatctgggttatggatgacaggtgtacttgcgagaattgcaatggtatcctactgctccagaacaggtaaacatggtcactccatccgcaaagaagaatcatgtgttcaaccagtgtcaattcaacagaataaagaagaatcatgtgttcaaccagtgtcaattcaacagaataatctgttcagcagtttgctttatccgtgctcattgtactacgaacctccgccgtctacttgaatatcaagcctccacgggcagcaaagaatggcgcaaattattgagactcgacagcaatgagcttgatcagtatgttcagggacggtccggaggtgtccttgagggggtcgccgatgacggcagctttctgagcgtgcgacccaaccgaggctatatctaacaaactgcactatgtaaacagtctacattgtaaaataatattttacacggttatatacactctatttaagcatgatcttagtgtggttgtttaaacatggtcttagtgtggttggatgcaccacttgcccttgtt

SEQ ID NO: 41263 - DNA, 3158 bp, Zea Mays
gaaaaataagtgttagaaaaacaacattgatttttatcaactaaccagggaaagacaagaagcatgaaattacctttcatgacatgtgtgagaatcttaggtcccattacttgagtataactttccctactgccatgtaacaggttgagtatctgcacaaactgctatacagaacgcaatgtgttctgcttagtattgacagcattgtatcgccatggcattgtattgacaggatgaacgtgtacaagatgaataatagcacaagggtatatccgtatatgcaacataattaagcttgcctcccctctgcaagaacttcatccaaaaccttcatctccacacgaacaacttccatccttaaaatggtggagttgcttactgtccctaacaattatatctcttcgtactatattagaaatcatcttcaatatcctgtgacaactctgacatgtgtattggtttttggtgacagaaattgaggtgccaggtgtggtattgatcaaaccaaaagcaacagcaagtctttcgctatgaccacaaaagatgtcatccttcaatacttcatcttcaggacaatgagattcaacaggagcataaccagatgctttcatccgctcatatattccttcaagaacagtatttatttctctgatttgtggatgcgactcatcatctgtaagaaatgcatggaccactcctttaacctcaacccagctacatccagaatcatgatccagtcctttctcccgcatggttttcctcaccctagccaatttatcccataaacaagcatcagcatacagatcacacaataggacatgatatccggcatcattaggctccaatgcaaggacatattttgcagcaagctccccaagttcaacatgccggtgtattcggcatccatttagcaaggctccccaaacagcagcatctggtgtgataggcatttcatttatgaagttgtaagcttctgtcagctgcccagcacgacttagaagatccaccatgcatgcatagtgcttgagatttggaacgatagagtatttctcagtcatgctgtggaaaagctcccaaccttcgctgaccattccacccctactacaagcacatagcagagcgacaaatgtaacttcatctgggcattctcctattttcaccatttgattgaagaacgataaagcggtatccccatgaccatgagcaacaaaacctgcaatcatgatattccacgacacaacatcctttgcaccatgtgcacagaactgtgcccaagcatagcctgtctggccacattttacatacaagtcgataagggcattgggcaaataaccttcatattcaataccacaccttaaaacatgtgcatggatctccttaccactcctcaaagccccagtagcagcacaagcagcaagcgcagcaataaaagtgacagaattgggcttaacatctgcaagcatatgcctgaaatagtaaagagcctcaaagttcctatggttgaagcaaaatcctgcgatcattgaactccatgacactacgtccttctcatgcatgcacttaaaaacttcaatagccttatcaatacgcttggactttgcatacatttcaaggattgcatttgtaactacgatgtagcttatgaatcccttgctctcagcaagttcgtgcaacttgacaccaacatccaaactccccaagcaagcacaagcagcaagggcacttgcaatagtaatatcatcaggacttacattgttcacttccataagtgcatacacttcaagagctttatctgggaagccgtttttctcatacccagatatcatagctgtccatgtcatggcatctctagtatccattcttgagaacactgttcttgcttgcctcatcataccaagactcgcatacatctgaatcaaagagttacagaatgcaacatcaccggcaaaacccctcttcactgcaagtccatgcatttcctttgcaaaggttacgtcagataacaagcctgatgcaacagtaacactagttattgtcatgaggttaggctgaacctcatcatgtagcatgcgtagcgcaaaagggccacggataggactgctgtcttttcactttcagttgtcaatactgactggaagttaatcctgaacttgatgggttgcaatactgactggaagttgctatttttttaccgagaaaactggaagttgctgttgttcgaaacccgcaagagaaagcctttcggtcccatgttgaatgtgatatctttgttctgtctgaaaataatcgcaaaagagcataaacattttggtcgacatttatgatgactctatcgttcagtttaacgcagaagaagtggttgaataccagcttgagtccttaaaatacaatgaccagccccggcaagattatgggatagaggtcatgtaccggtttgcaggctttgaaccccttcgaaaggtcaacttagtttggatgacagtttggtctaggacaggaccggtttaaacaaagagtttggttagaaggagcccggccagaggaggaagaaatatttcaatccacaatggttcagagagtcggaggctcatgggatggttactggctaacggagagcttaataataaacgatggagacgcattctcgggtcgcttactgatgtagtgaattggtccaaatcaggtgcgttgaactcatgcggatacaggtcaatgacgtgatcaagcagcaggtgaacgcgtatttgcagcaaactacggcgcggttcttctttcttaacatccttttctgagttttgacgactgcctctttttttcacttctgttctacgtgtccggtggattctgtgtcgtcgcttttggtcagcccgtgttctcggttctcgcgacctacgacggcttaaaatgcattgtttttacagtacagaacagagaccgctgtgctgcaatgaatatatttgtagtaacgggattcacactcaccggaaaggctacctaggaggaaacttgcagtgcttgcgattgggcacgtcagtagcgtgcttgtgagacgaaaggaacatgagatcggctgtgtatatccatcctctgaccactatgtatgatctatgcagtgtgatgtgatcaggtggtttggtgaataaagtagcacctctttg

SEQ ID NO: 41264 - DNA, 616 bp, Zea Mays
gtactgcaagaacatcattggttgtgacaattggtccatctccaagacatcgtggggaaactaccagtacaataatgtttggacaaaggaaaatgaaaggcaaaggaaacattttgacgatgaagttgagagaataagagctgaagctcaatgccgcattgctgaggctgaaagggaatgcaaaatcacattagagaatgagaaaatgaagtatcatgaagaatacttagactcaataagaatactggaggagaagtggaaagtacatcagcaatcacccaagaaacaaaataaagaggctgagtctacatccaatgatactggagaagtgcataatttactgcagaatgagaaaatgctacgtcaatcggctgaagatgaggccagtgacctcaagaatcaaatatcacactggaaaaagctggaggctacagctacagctgagataataaaactacagaaaatgctagatgctgaagctagccagaaagagaaacttgaagaagaaataggtgttttgagaagccagttattgcagatgagtatggaagccgatgagacaagaagtcttgataaaggagatgggccaggaaaaatatttcctgggtttagattc

SEQ ID NO: 41265 - DNA, 1248 bp, Zea Mays
cccaccccccccacacacacacactcgcgctcgacacgcaggcgacggtggcggcgatcaggcccggtatctcagcacggccgacagtcccaggctcgacggcggcgtcagcggctccccttcccgcctctagccagtggcctcgtgccctcggctccggtcctctgcacaccggccggagaccctgcatttctttatacgatgagctggagatttcctctattcgggtttgtcttcatctccagccacacctacctcttctagctccagtccacatcaaagagcttcaaataatctgcagttttcatcccgtgggcaaccatctcctgctgaggctgcagagataattgcccatttgaaggacaagagtattgaggagttacagaggctattgaaagagaaagaggcatataatgcattctttaacacattcgatcaagtgaaaacccagaacaatgtgcgtggcgagcttagaaaggagacattgcaacttgcaagggaaaatttagaaaaggagcagcggattttggagcttgggaatcagtgcacaataattagaaccacacaactggctgctgctcaagaccggcttactgatttggagaggcaaaaggatgatattatgaggtcctattcccctgctgcactactcgacaaactccaaacgtcgatggcaaagctggacgaggagtctgaggagctgcagcagaagttcctggcaaaggacatcgacttcccacacttggtacagaagtacaagaagctccgcacggcttatcacaagcaggcgttgctccatctcgccggccagacataactccactgacatccggcctgcatcatgtcaactttgctgtattcctctgcttggccctgttttattgctgcagcttcctatagggcttgccaaacactttgcacgatttgttggatgataataaagctttcgtatgcttcatgtttcgtggatgctggctctggtgagaggggaattggagggaatccatggagaaattctcttgctattcaaaattgtcccatgatctcctcttattagggtaaattcttcttagggtctgtttgtttccgttcattttgatgaattgtaatttaactaacacagtaggctattttttagaatgtgacatttcacaactttctaaagtgtatatataagcttatctcaaattcatgaggtgaaagatgaaaattaattccatagatttacatgctacttttcgaatgtac

SEQ ID NO: 41266 - DNA, 2471 bp, Zea Mays
atttcctgttcctccgcctcgtctccgcctcccatcgccgcatcagatatccgcacaaaccaagccatcagcgccatggcgatctccacctggagcgcgcgccttctcctcacccctgcttcctcccgcgccaccctatcaccccctcgccctcccactacaaacccgctctcatcgttctttcctcgcaatcgtctccatttcgtgcgcccgcgcccgcgcccgccgtgcgcctacatctctgcgccagcgccgggcccggaggccgcatacgcgccgccttctctcgacgccaccgccgcggcagccgatgtcgccgctgcgatatcctcctccgacgcggtcacttgggccggcgtctgggcgctgctctcgcgacacagggcccgcatcgcggtctgcatcgccgcgctcgtcgcctgcaccacctgcacgctctccatgccgctcttctcagggaggtttttcgagaccctgattgggagggggaacgagccattgtggaggctcttatccaagattgcgatactgtacacactggagcccatcttcaccatcatattcgtgatcaatataactatcatctgggagcaggttatggcaaggctgcggagccagatatttcgaaggattctgatccaaaagatgttattttttgatcgtcacaaggttggtgaattgaccggtttgttgacatctgatttgggttccttgaagagtgttgtaagtgataacatatccagagatcgtggactgagggcactctctgagatcattggtacactttgtatacttttcacactatcaactgagctagctccagttcttgggctccttatggtgtccgtctccgtgctagttgctattttcaagaggtcaactgttcccacttttaaatcttatggaatcgtgcaagcacgcatatcagactgtgcatcagagacattttcagctattcgtactgttcgatcatttggtggtgaaaaacgacaaatttctttgtttgacaatttggcacatgcttaccaaaataatggcacaaaacttggagtgctgaaatctgctaatgaatcattaactcgagtagtcgtctatgtctccctaatggcactttacattcttggcggtagaaaggtcaatgcgggcaaattatctgttggaaccatggtatcttttattggttacaccttcacattaacctttgctgagctgttaatacccttggtgatctgcgtggcacattggcttccgtagagagaataaattctattctttcagcgaaggacattgatgattcacttgcatatggtttagccaaagaacttgatggcaaagagtttgatgattccaatggagtgtatgaaaatggatctgttaacaaacatttcatgtcagagctgaaatcatccagtagctgtagtaatctagcctggtctggtgacattcgtctgaaagaagtccatttctcttatccattgagatctaatgtggagattttaaatggccttgaccttacaattgagtgtggaaaagtcacagcacttgtcgggcctagtggtgctgggaaaagcacagtggtacaacttctagcacggtattatgagccaactcaaggttccatcactgtcgcaggagaagacatccgtgtatttgacaaaagggaatggtctcgagtagtatctctagtcaatcaggatccggtcctattctccgtgtctgttggagaaaatattgcttatggtctcccagatgatgttgtctctaaggatgagataataaaagctgctaaagctgccaatgctcatgaattcatcatctctcttccacaggggtatgatactcttgttggagagcgaggtagtctcctaagtgggggacaaaggcagaggattgcaattgcacgagccctcttgaaaaatgctcctattctaatacttgatgaggctactagtgcactggacgcgacaagtgagcgactcgtgcaggaagctctcaatcacttgatgaagggaaggacttctctggtcattgctcacaggttgagtaccgtacagaatgcacatcgaattgctgtttgttcagagggcaggataactgaactggggacacaccgagaactggttgctaagggaggcagttatgcatcacttgtcgggacacagagacttgctttcgagtaatcacacgtcaactgcgaggaacggatcgactgcaatgtaggggattctatatattactctattttccttcagggcccatcggaacataggaattctcgtggaaatcagaatgaatttcatgggtaaaatatagaaaacagaagatgaaaaaaaacccaccttctgaatgtggccttggttataggttgtttcttatccacagaagcaacacatgaatcagaaaacacatgtatgtatcgaactttataatatattaacctaaacaaaggacaacaaacttcttatcctcac

SEQ ID NO: 41267 - DNA, 4771 bp, Zea Mays
ctcgatctcattgttagcagaagactattgatcttaaatatgtgccctcaaaatctcagttggcagatttcttcaccaaagcacaaacaagagcacaacatcaatttcacttgatcaaactcaaagcttcagatcctccatttccaccttgagtttgaggaggggtgttaaggcccattaggcctggcccactatctatatgtatataatagtccttagggactgggtaattatctatcaattctcaggtttgtaacagggatctcgtttggatattgattcaaaattggagtgaataatgttcctattgacaaaatagatagaagatatgaaacaaataactccaaggttaaccttcaactattttgatatactaaagatgcgaaagggcctctagctgagttggttaagtggtctgagtagcactccttaggtcctaggtttgactcttcatggaagtgaatttcaggtcgaggttaaaacaagtcactcgctggtttccttggttggcatgggtggaccgacctatggtagacgggccctcatgtaaggggctggtcgtgtgggttaggccccaaagcacgggtcaaggcccgaaccatagggggcaacatcaccatgtatgagggtgctagcttttctcgatcaggctcccgttgatcttttcttagtgaaatagtgtggggcggtctttcccccaccggccgagttttgatatactgaagatatttggatatcaacatatttggtatccttgttggttcctagcaagctttccaggaacaaggagccaagttggctccctttctacagaaatattattgctactcatcaaggattagatgagggattcctcttttgaaatcttgcaaagaaagaatgaaatagtcaatattacataatgacttcttgctccatcaagagtgtggcaaagcaccttggtttgttttcaagttggaaagttaagccacatcgctttggcgtcgactagttgtatacttgtcctatcatgattagacaatgactagccatgatttatcgatgagtacaaatctggagagcacatctcttcattttgggagaaagattacttggaaatggcagtgaagcatcaccactaacaattacagcccaatgtctaaaacacaattgacttcaagattgggaaagagaaaaactttgacgctcaaagtcattgcagcccaatgcctaatcaactcccgatgaaaattaagcatctagcttgcctctagccctctctaggccatgttattatgttgattcgcaagtgctattttttgacgtctaatcactaacatatcaatgattagaagaggatctggtatcatcttgctcattttgcatggccatctaaaaactaatcaagctacaactacaaggaatacaacaagggaggatagaacatttgaggtgcactcatgactcgtcaaacctactagcccaacaaagtaaccgagtatagacaaaaaatgcataagccctaatggtatggttgggggaataggagtttagaaatacatagtttgaaatctctcgtttattttgtggcagtgggagggactgttagggcacaaacgacatgtggttttaccatctatttaggttaaattaaccacaattaccttgctaaatgaggatacggaaagcctatcattgtctcacgaggcaatgagcctagctcgtgctcccagagactttcaccgacgttgtgtgagcgagcgtcattagtgcaagatcgagtgcaggcgcaatggcagcaaattgttcctctcactcgcgaaagcttccatgtagatgcatgttttgccaatggcaaccattgttaatacagaagggcacaaggttgtggccatgagctgatagggtgatggtgacacaaacataagcagatatacggcgcaaggtgatatatctacccttagtgttacatagaatagggtctatggaactaggtcccactagtcacttctcttaccaaatagaagatggatacatccacattgttatttgtgattagatgcatgccctacccatcagttgccaaatgcaccataaggctccccattaccaattattgtgtttggttgccaaagaaattacagaataataatcacatgaaaattctagatcatgtttgattgcaaaagaaattgaagttgccattgattcacacatcttgttcatattccgttcggcttctctccggccattgtcgtcgtcgccaccatggcagggaccatgatcattgttgggcccattcatggaacctaatgggaccaaagcttccttcgtcccataatgatccacctcttcttactctgcaaccccttcgcctttgcttgtaccaccacttctcaactatgagaacaaagaggacatggtggaccttgacgagaaaggtgatgccggtaaaggatctcaacaatatcaacttgcctgcacaatgcttgacatcaccaccatctcatggatggagaggacaactataacagaaacactgacgcccaagcgggcgagagggtgtggcacaaatgttttattgctagtgccaatgaggacccgaagtcccgaaccacatcttgggtggctaatttaaatggtaaccctcaaaattatggcctacctatttcaattccaatccaacttaacaaccaaacactcaacatgaattgggaccattcccattccacaaagtggggctcaattcatgggaccaaagcttctccaatcccatattgctccacctcttcttagtattgcattgccaacccttgactccaatatccctttgcctctactgccacttctctcaactatgagaatgaatacaaggacatggtggatctaggtgggaagttgatgccaacaaaggatctcggcactaccaatttggccaccacaatgcttgacatcaccatctcatagctagagacaccaactattacatgatttcagagacaggtgggtgtcaacaaggaggtgcaaatgttggccgtggcagcaccagaatcaccaaaaagtggagcttacggggcagaatgtcatcatcactgaagacgagggccacatctgtgttgaacaattcagacgatgaccccaaaattatggcctacatattttagttgtccataattcaaacacatttcaagtccagtccaacttaacaaccaaagactcgaaacgaactaggcccatcaattcaaagttgggtccaattcgtgggaccaaagcttccttcatcccacactgccccacctcttcttactgttgcattaccaacccttgactccactacccctcacctttgcctctaccaccaattgaacctggagcaactgatcacagaatgacaaattcagcaaaggtagcataattaggccaatatgaggcttcaattgcagcatggaggcgtcaactgaccactgatctaggtcaatactgttgaagtgtataaatggattggccaccttctcctatcagcttaagcttttgggttgaactggttagttcgtccactctaacatgctatcaaagccagaggcctcgagtttgaattctggcaaagactttatttgtgcctccacacatttatttccatgtttgcgcctttctctctggctgcacgtgagtgtgggtgttgaagtgtataaatggattggccaccttctactatcagcttaagcttttgagttgaactggttagttcgttcactctaacaaatattgtgtggttgccaaccccaacaccaattactttgcattttgcctaatgcctaatgcaactaggggcatgttaaacgcctgtatctacgaaccttcccttctcatcaaccgcctttaattaagcgagatgttatcatgcatcacatgattgtttaaattgcacttaataagacaacaaaataaattaaatttgtaagtgagaaaaaaagacagaaaacatattcctgacatgcaattaaattggctttaactagaagagatgctatcatgcatcatataattacttatttatccttcatacactaacaaagtcatatttatgttataagtgaaaaatacttgtataaaacattgaattaaaccacctcacatattctggagctgagggagatcaaatttccttgaccaacaagtagaagctaacataactttaagttataactaaaatacaaaatagcatgttggatctatagtatttacaaatgttcctaaaagacatactttatggacctcttggcagaaaaatgctagttcataatatcagaaaaacgcagtgaaagatcaaatcacaaccataaatagcaatagttattaatcattagcatctgtctaaaatagcacatccaaaaggtaagggagcataaagattcctaaaatagcacccctactttaatgttcctaagtactccaaagcaatatgtggaataaagttggtagttctagagagcagaagcatgcatatttcacatgcaaaaacacattcttgtacaatcccctactcaaagcatgccatgcaaaaaagaaataactcgattttggagaaacagacccaaaaaagtacattaaactattaagtctaacaaaggaacaatgaatatagctagtaaaagttatttgctttcacagtaccagtcattagcatattacaggcaaagaatttaacagaaagtgtaagtaaccacataaactgcttattcttgccttatttaaataacataacaactgattgaaataaacatgacaaaat

SEQ ID NO: 41268 - DNA, 2649 bp, Zea Mays
cttctttctctagtgccgctgcctgtgaatcgattcacagtttatccacgagaccacgacatccccagactcccagcatcggctctcgcgatcagcaagcacagctccaagcaggctgccagcaatgctgtcccacgcgccgtctcaaatccccgccgcctccaaaccgcgcctctcctctcgcaggcgcagctcccgcctaggcgccaaacacctcacggccaccgccgctgcggcctcaacactccgcagcgtatccgcctcccgccgcggcttcgtcctcttcgttccctcgctcgccgccgcatccgccgtcctccgcccgctcccgtccgccgccaccgaggccgatgacaccgaaagcccggctccacatccaccgcccaccgaagaatccctctccccgcagcccgccgcggatgcggcggagacgaagcctgaggccagcgagtcggccatgtcgagggtgtacgacgcgacggtcctcggggagccagaggcgttggcaggggacgcgcgggggcgggtgtgggagaagctggcggctgcgagggtggtgtacctcggcgaggccgagctcgaacccgaccccgacgaccgtgtggtcgagctcgagatcgtcaggggcctcgcgggccgctgcgctgacgctggaaggggcctggcgctcgcgctggaggcgttcccctgcgacctacagcagcagctcgaccagttcatggacggcaggattgatggtggaatcttaaagttatacacatcgcactggtcgcaggagctatggcaggagtatgaacctcttctgtgttactgccgtgatactggaattaagcttattgcttgtggaacaccactggaggtgaaaagaactgtccaagcagatgggattagagctctcaaaaaagcagaaagagaagcatatgcccctccagcaggctcaggattcatctctagtttcatgtttggctcaggaaggttattacgagagaacttagtgatggagatgtttcacggttgctaattgttgtgacgggtgcaagccatgttatgtacgggccacgaggaagtggtgttcctgggagaatatctaaaaaggtgccaaagaaagaccaagttgtggtactgcttgatcctgaaagacaggttataaggagggaaggtgaagtccccattgctgatttcttatggtattcagcggctaaaccttgcactagaaattgttttgaccgtgccgaaatcgctcgagtgatgaatgctgctggtaggaggcctgaagctttacctcaggatcttcagaaaggactagatcttggtgtagtttcacctgaaatattgcagaacttttttgacctcgagaaataccctgttatgacagaactgattcatcgatttcaaggtttcagagaaaggctgttggcagaccctaaattccttcaaagattagccattgaagaggtcatatcaataacaaccactctactagcgcagtatgaaaggcggaaagggaggttctttgaagaaattgactatgtcctcacagatactattagagggtctgttgttgatttctttacagtgtggcttcctgctcctactatttcagtccttcagtatgctgatgatggttctggttcgagtttggagtttgtcaaaggccttttaggatcattgccagataatgcattccaaaagaacatcttgggccaggattggagtatcaagcaaagaattgcagcagtgttggttggtggtctgaaacttgccagtgttggtttcatttctagtgttggggctggggtttcctcagatctcatctatgctgcccgaggaattgtgaaaccttcagaaaatgtggaaacgggaaggaagagatctcccatctggaagtcagcagctgtttatagttgctttcttggaacatcagcaaatttgcggtatcagattattgctggtctagtggagtatcgactaggagagagcctggtgacatactacaaccaaccccttattgctggtttgttgtcattcgtggctaggacactgaactcatactggggaacacagcaatgggttgatcttgcgcggtacactgggttacagagaagcgaggaaaagcctcctgctgaggccactatgccacctgattcagcacatttggagggttgtacgacggaaggacatgattttgatgacagcagcaataacaccaacaaatcgactggtccgagctagtgatttgattacttcacagtggctgcagatcacatggcctattttcatagacaatgaaagtggctgccttcctgctcttgggatcacaaggaagcggaaatttgaggaaatattagtcacaaaaatttgttcagattctttttcagcgttaccacaagagtgcacatacagttctcgtttctattcgttagagtaagtattgttttgtacaatctacatctgtaagaactgcagcacctaaaggatgttcagcaatgagggctttaacttgtcgcattgcatgctcgtaagcatgtttgttgcggctttaatcaagctgtttgttgcggctttaatcaagccgcgactacggcttctacaatattttgtctctatagattgcagctgcagcagtccgaaagtgtagggcataaaaaa

SEQ ID NO: 41269 - DNA, 422 bp, Zea Mays
accaggaaaaggaggcggaaaagatattcaatgacacacatccacagtacccgccaccgcaaaagaaatggagaccaaaggccattgaggaaaagcaaacgaccacaaaaatagaaaataaaacagcacttgtacaacaccctgcaagtatggcagacagcccagctaaaaaggctggaccgctacggaaggcgcgggccgtccgacccctgagtccggaccgtccacaccacaccaggccgcctccgacgacgtaccaacatcaatggaggaggacgacctactaggagaagatctggtcgactatgaagcttctccagaacgcccaggtatggatgtaaatgttattacattttccaccgattgtactattgttggtgacgatgaacctgttgttgcccaatttgattttggtcctaaag

SEQ ID NO: 41270 - DNA, 5999 bp, Zea Mays
gtgaagtgattctagttcagagaaagaaagaagttgagaatgagaagcaagtgaggcgcgtttgctgggaagtggttcttgtgaggtttaggagttcacccttcttttcttccccttctagaaatggagatggtcctacggtcgcagagccctctctgccttcggagtgggccggtgctcatttttcgaccaaccgtcgcgggcggaggagggggcactcaggttgtcctaataggaaatctaggacagcgtctcccaacgtaaaagtagctgcttatagcaactatgcgccaagactcctcgttgagtcaagctccaagaagagcgaacaccatgatagcagcagacaccgtgaagaaactattgatacatacaatgggctgtcaggttctgatgcagcagaattgacaagtaatagagatgtagaaattgaagtggatttgcagcacatttctgaggaggaattgccaggaaaagtatcgattaatgcatcattaggagaaatggaaacagtggatgaagctgaggtcgaggaggataagtttgaggtagatacctcaggaattgtattgcgcaatgttgcagttcgggaagtggatccaaaggatgaacataatgctaaagatgtatttgtggtagattcgtcaggaactgcaccagataatgctgcagtggaggaagtggtagatgaagctgaggttgaagaggatatggttgatgtggatatcttgggacttgacttgaataatgcaacgatcgaggaaattgatttgatggaagaggctttactggagaacttcgacgtggattcaccaggcaatgcttctagtggtcgaacctatgggggtgtggatgagttgggtgagctgccttcaacatccgtggattgcatcgccattaacggaaaacgtagaagtttgaagcctaagcccttgccaattgtcaggttccaggaacaagaacagatagttttaagcattgttgacgaagaagggttgattgctagttcatgtgaagaaggccaaccggtggtagattacgataagcaagaggaaaactctaccgctttcgatgaacagaagcaattaactgatgatttccctgaagaaggcatatctatagttcacttccctgagccaaacaatgatattgttggatcctcaaaattcttggagcaaaaacaagaattggatggttcttataaacaagatcgatcaaccactggattgcatgaacaagatcagtctgttgttagttcacacggacaagataaatcaattgttggtgtgcctcagcaaatccagtacaatgatcaatctattgctggttctcatagacaagatcaatcaattgccggtgcacctgagcaaatccaatccgttgctggctatataaaaccaaatcaatctattgttggttcttgtaaacaacatgaattgattattcctgagcctaagaaaatcgaatccatcatcagttacaatgaaatagatcaatctattgttggttctcacaaacaagacaaatctgttgttagtgtgcctgagcaaatccaatccattgttagtcacagcaaaccaaatcaatctactgttgattcttatagacaagctgaatcaattattggtgtgcctgagaaagtccaatccatcaccagttacgataaactagaccagtccattgttggttctcttaaacaagatgagcctattattagcgtgcctgagaaaatccaatccattgtccattacactaaaccaaatcagtctattgttggcttgcccaaacaacaacaatcaattgttcatatcgttgaaccaaaacagtccatagatggtttccctaaacaagatctatcaatcgttggtatctccaatgagtttcaaacaaagcaactggctactgttgggactcatgatggattgcttatgaagggtgtggaagctaaggagacatctcaaaagactgaaggggatacacttcaggcaacgttcaatgtcgacaacttgtcacagaaacaggaaggcttaactaaagaagcagacgagataacaattattgagaaaatcaatgatgaagaccttgtgatgattgaagaacagaaaagcatagccatgaatgaagaacagacgattgttaccgaagaagacattccaatggctaaggttgagataggaattgacaaggccaaatttttacatctgctttctgaagaagagagttcatgggatgaaaatgaagtgggaataattgaggctgatgaacagtatgaagtcgatgagacatctatgtccactgaacaagatatccaggaatcacctaatgatgatttggatccacaagcactatggagtatgcttcaagagcttgctgaaaaaaattattcgctgggaaacaagttgtttacttatccagatgtattgaaagctgattcaacaattgatctctatttcaatcgtgatctatcagctgtggccaatgagcctgatgtacttatcaaaggagcattcaatgggtggaagtggagatttttcactgaaaaattgcacaagagcgagctggcaggggactggtggtgctgcaaactatacattcctaagcaggcatacagaatggactttgtgttttttaacggacacacggtatatgaaaataataacaataatgatttcgtgatacaaatagaaagcaccatggatgaaaatttatttgaggatttcttggctgaagaaaagcaacgagaacttgagaaccttgcaaatgaggaagctgaaaggaggagacaaactgatgagcagcggcgaatggaggaagaaagggccgcagataaagctgacagggtacaagccaaggttgaggtagagacgaagaagaataaattgtgcaatgtattgggtttagccagagctcctgttgataatttatggtacattgagcccatcacgactggacaagaggctactgtcagattgtattataacataaactcaagacctctagttcacagtactgagatatggatgcatggtggctataacaattggattgatggactctcttttgctgaaaggcttgttcatcatcatgacaaagattgtgattggtggtttgtagatgttgtcgtgcctgaaagaacatatgtattggactgggtttttgctgacggcccaccagggagtgcaaggaattatgacaacaatggaggacatgattttcatgctacccttccaaataacatgactgaggaagagtattggatggaagaagaacaaaggatctatacaaggcttcaacaagagaggagggaaagggaggaggctattaaaaggaaggctgagagaaatgcaaaaatgaaagctgagatgaaggaaaagactatgagaatgttcctggtttctcagaaacacattgtttacaccgaaccacttgaaatacatgctggaactactattgatgtgctttataatccttctaatacagttctaactggaaagccagaggtttggtttcgatgttcatttaatcgttggatgtatccaggtggggtgttgccacctcagaagatggtacaagcagaaaatggttcacacctaaaagtaacagtttacgttccacgagatgcctatatgatggactttgttttctcggagtcagaagaaggtggaatttatgataacagaaatgggttagactatcatattcctgtttttgggtcaattgcaaaggaaccacctatgcacattgtccacatcgctgttgagatggcaccaatcgcaaaggttggaggtcttggtgatgttgtcactagtctttcacgtgctgtgcaagatttaggacacaatgtggaggttattcttccaaagtacggttgcttgaatctaagcaatgtcaagaatctacacatccatcagagtttttcttggggtggttctgaaataaaagtgtggcgtggactagtcgaaggcctttgtgtttacttcctggaacctcaaaatgggatgtttggagtcggatatgtatatggcagggacgatgaccgccgatttggcttcttctgtcgttctgctctagagtttctcctccaaagtggatcttctcctaacataatacattgccatgattggtcaagtgctcctgttgcctggctacacaaggaaaactacgcgaagtctagcttggcaaatgcacgggtggtattcaccatccacaatcttgaatttggagcgcatcatattggcaaagcaatgagatattgtgataaagccacaactgtctctaatacatattcaaaggaagtgtcaggtcatggtgccatcgttcctcatcttgggaaattctatggcattctgaatggaattgatccagatatatgggatccgtacaatgacaactttatcccggtccactacacttgtgagaatgtggttgaaggcaagagggctgctaagagggcactgcagcagaagtttgggttacagcaaatcgatgtccccgtcgtaggaatcgtcactcgcctgacagcccaaaaggggatccacctgatcaagcatgcgattcaccgtacactcgaacggaacggacaggtggttttgcttggttcagcgccggactctcgaatccaagctgattttgtcaacctggcgaataagctccacggcgtaaaccatgggcaagtgaggctttccttgacctacgacgagcctctctcgcatctgatatacgctggctctgacttcattctggtcccatctatatttgagccttgcggcctaactcagctcgtcgccatgcggtatgggaccatcccgattgtccgcaagactggagggctcttcgacactgtcttcgatgtggacaatgacaaggaacgagcccgagatcgaggccttgagcccaacgggtttagctttgacggagctgatagcaacggtgttgactacgcgctgaacagggcgatctcagcttggttcgatgcccggagctggttccactccctttgcaagagagtcatggagcaggactggtcgtggaaccgacctgccctcgactacatcgagctctaccgttcagcgtccaaattgtaataatccaaccaacggccaatgtagtgtgttgtctgcaggtctcagatgcagccattcagcttttgcaggttcctgggcattgctgtacagcctccttgtctttagttagctccattccccgaggagcacagtgcaattttttatcctcagttattatgcatagattgtctcagtagaatgctttcttcgggcatgtatgtttgtttcctctgttgttgaattctggtgttaagtcgtgtataggaatctacaggaaatgaaaaagtccatttcctgcttcaaccttttagggctaccatgcacatgagacctttcaaatgcaaagaatattaggactagactactagtctgtgaactctatttttttccaaggatttctattttttcaaggaaaaataaactaatttttcttcggaaaatggaaatctttttaaaaaatggggttcccaaactagcccgtagagtatagatctagaattggtctagtggtttctcaagaaaaaaaaacatacgccttttcttgtcatatgcttatttaagtttattttgtacaaactttgagatccttcaaaaacaccccaatggctggtgtagtgaccagtgaaataaagaggatcaatggggaggaatcccccacctctctcccgcagatgtcacccagcaccggccaacctcacctgtccagtgaaattaaggttggttgcgacgacagcccatcaatggaaaccaacctcgccccgtgtcgggatctaccttcctcaccaccacgccgatctcaccttccataggagctacctaggcactgttacctattataggtacatgacattgtacatctttgtatgaacttacatcaatgccaaaaatccttcaaacatggactatacagtcataggagggtatctttgtcttctc

SEQ ID NO: 41271 - DNA, 2058 bp, Zea Mays
aacgactcgactgtccccaatccagtatcgcgagaagcgctacgcggccggcgaggcgctccccccaatatggtgcgcgtcgtcgtctccaccctccccgccctccgtccgcttctccgccgtggctctctgctaaaccataaacccctgccccgctcacgccttcagccgtggccgttctgcacgctctcgtcctcgcccgccgccggcgcgcccagcgccgcggtgaagggggaggaggttgcgttggacaagcaccttacccggtgcgcggcggcaggcatagcaccgttgcgggtggcggtgctggtgagcggcggggtggatagcagcgtggcgcttcgcctcctccacgccgccggccatcgctgcaccgcgttctacctgaagatttggttccaggaagatttcaggaatttctggtccgagtgcccatgggacgaggatttgaagtatgcacaagctgtttgtgacaagattgatgtgccattggaggtggtccacctatccgatgaatactggaaccatgtggtgagtaagcttcatttgagcctttcccccccatagatttgcacacaacactttttagagcctttgctttgagaagaaatactgtgaatttgatatctaggtatcacatatgatcaatgagtatcgctgtggtcgtacaccaaatcccgatgttctgtgcaacacgagaataaagttcgggtctttcttagaagccattgaaaatttaggatttgactacatagcttcaggacactatgcacacgtagtacatccttccgctgaaaataccgaagcgccatccgtactacaattatcaaaggacaagatcaaggatcaaacctatttcctctcacatctatctcaatctcagcttagaaggcttcttttcccactaggatgtattacaaaggatgaggttcgcagactggctactcaaatgggccttcctaaccaaggtaggaaagactcacaagggatatgctttcttggaaaggaaggaatcatactggaagctgagtccggagattacctagggatacaccgtgggttttggttttatacaattggtcagcggcaaggattacggcttcctggaggaccttggtacgttgtagagaaagatgttcaaaacaatgtggtttttgtatcaaggaattattattcattggataagcggaggcgcacatttcgtgttggatcactaaactggtttgataattgtggacctggaaacaatgagcaactcaaatgcaaggtgcgacatagccctgaatttcatgattgcactttggtaaaagagcgtagtgaagaaaatggggatgctttggtggtgcatctggctgaagatgaccagggcttggcagctggtcagtttgcagcgttctatagtgaaaatgtatgcctggggtcaggcataattttggattcatgggacaagatgagcttccctgtctgctcaagggcactcgaaatcgcaaagttggcggacaagtcgagcttagggaagccaataagaatcgtgaacctggaacatatcgtgaaacctgaacaacaggaggaaatcaaagttgcctgacagattggtgccgtaaccttctcctagctccgccagctgcccccttcaaatcaattcatcaatcaaccgtatcgcaggccctggaaatcgaaggatgaggggtcttctagaatctaccgatatatacccccagttggaaactccaggtccttcttggaaggatgatatagtggaatatggcatgacttggtgcgctcgtgttgcagaggaacgatgaagcttcgtgcgtggatagggttgatctgaattaactgttgacagtgattttacgatctcgcgggaaagcaacacaatagtttgggcacgtcctctcctgagtggaatgatctggattcagtagtagtcagtggcacttcattaaaactaatacagggaaatcgtgacgttgtatgatagtggtaagatattgtattgtgaattttgacgataatatcggtgcgtgattgtgccactggatttgttcatcagta

SEQ ID NO: 41272 - DNA, 938 bp, Zea Mays
ccaggacttatctgctcgcagcgctgtgttctgcaaagcaaaaaaaatcctgccgctatctcatcctctctctctccctcgcgatgtcttctccagcccagcgtttctgccgtcgcgcagctcgccgcgcccctggtccctgccatggcgcgctcctccctccgcgcgcttctatctgtcgcgcggacctctctcctcccctgcgcgccgtcccatctccttgcttctccggctgtctgcgcgcgaagctcccctgtcgctgttagcaaccagtctcctaacaggaacacacacgaactggagaagagggagagagggatacggaggaactgggaacgttcccccgagatagattagggtattcggatagatgttttttacatgacaagtttcaactctccttccttacagcatataagaaagctacagttaactacggcactctgggccggcaaagcgaacgctgagcctcctagcgcagcggcccatctcccttgtcgctcgcccattctgcatgtcttgctcgtgctcactggtatcctgagtacaggggctgacatccccctccttgaaacgacgcttgcccctaagcggccgcggtcggaaacttcatcctcagcggggcttcatcttcccaggacgccagagatgtgtccatgccagaccaacgaacaagcacctgtgccactgatgatccccctctagagactgagcgacggtctagaatctgcgctggaaattgcagagccaggatctcaaaaggaccaaagaacttgaagctgagtttatggcaagcacgaagcgcaaccgatccttgaacatacggctgtagcttgacgaacacgaggttgtgcttgatgacgcgtaggattacctcgcgttgggacagccattctgaaagggaaatgtgcctttgggccatttctaagtattttggt

SEQ ID NO: 41273 - DNA, 388 bp, Zea Mays
tggaaataaacccaaacctcctcgtcgtcgttgtcgttatcgtcctcgggtggaggtggtgaacgtggccgaggaaaatagggtttcagttgtggcgtggatctcttggcagagaagaagagggtcatcgggcggatccggctcccacctgtccccaccgctggggtcatccaccgacatctccgacgacgacgagtcggagtcctcttcctctgtgtcacattccccagcatctgcgcgcccgcctctcgcccccggcgctgccacccctcagatccagctcccgcatgtcctcgtcgtcggggctgtactccggcatctacgacgacgactgctcccacttgtctggcatgcaggacgcgaaggagggcgaggcagagaacgccgt

SEQ ID NO: 41274 - DNA, 1076 bp, Zea Mays
atttgtgtcgcgcgtgactaagtcaccaaccattgctattgcctaaatcctatcacttggtctaggactttggtggatatcgacctccacctttcctgacaacctagagcaaggtaataggtcaattttgttatttcatggttgatttgaggaatgggctagctagtttgggtttgaagcaaatttagttttggttgatatagaaagttagttaggtcgatcgattatgtttgcaaaccagtgtttattgtttgctcttgatttgtgcgtgtacatgtagttgcaattgtgttatgggtaggttagactattcatttttatgcttaggttttgtcgagtttttttggcagtgaatttatggtgtaggttgctagatcgagaactaaaattaaatacacaagagactcaaagatttagacagattcagactctcaatacaaggtaacaccctatgtactacttatgatggtgtctattgcctatacaatatgatatgatgatctgccctcttggagctccccgaccctccttttagttcgaggggctgtgtttacaaggtttgcatctaggttggttacaaactcgataccgagtcagttacttaatataagacgtgaccaagttagtcctgaaccatgtacattttgtgctctatacttttacatatttcttccttatcctactaggattttaccatatctacatatgtcatcgtgtgatggtcagggataatagaagagtactccttttagatttgaccagggccttggagtatcacccaaacacctacacgaccagttgggatcagtttgattaaccagagagcgagcacaacaaacacacacgagcattgtgaggaagacaaaagatttagagatgtgtgggccaccagagcgtaataccatactcttttactagattggattgcttggaaacatctaagtgccaagcacaatgatggttgtaagagcctaagtgtggaaatcatgagcgtgatagaagagtcactatatagggggtcatcctctcccttttataggccatgggagggggtacaactaacaagtgaggtcagg

SEQ ID NO: 41275 - DNA, 3465 bp, Zea Mays
gtgtttgtgaatgcaaaatctagccagacagctgaggaagggtgaaagcctccttgttcctgtagactgcagtgcgaggaggaggccgccgcatcctccccttccaaaccactccactccggtccccatcccacctgcgccagcttcgtcttgctttgagctttcgcccgccggcgatctgctagctatctcgctcgcacgtggtgcctgactgcctggtggcggtggccatggctgccccgctgggctttttctgcatgctgctgcttcttcttcttcagctgggccactcttcttgtaacaatgtgtacattgtgtacatgggggcgaggaatcccgagctgcacccggcgctggtccgggacgcgcaccacggcatgctcgccggccttctcggcagcgagcaggcggccaaggacgccatcctttacagctacaggcacggcttctccgggttcgccgccgtgctgacggacagccaggcggcgcggctcgccggttcgcctggggttgtgcgagtggtgcggaaccgtgttcttgacctgcacaccaccaggagctgggacttcatgcgagtggatccatcgcattcggctggaatcctcccagagagtaggttcggtgaggattccattatcggtgtgctagacactggaatctggccagagtcggccagttttagagacgacggcatgagcgaggctccgcggcggtggaaagggcaatgcgtcgccggggacaggttcaatgtttccaactgcaacaggataggaaaataataggcgcgaagtggtacatcaaagggtacgaagccgagtacgggaagatgaacaccaccgacatctacgagttcatgtccgcgagagacgccgtcgggcatggcacgcacacagcctccaccgccgctggtgctctggtagccggtgcaagcttcaggggactcgccggtggcgtcgcaaggggaggggcacccagggcgaggctcgcggtctacaaagtgtgctgggccaccggagactgcacttcggcagatatcctcgctgccttcgacgacgcgatacatgatggcgttgacgtgctttcggtgtccctaggccaagcgccaccgctccccgcgtacgttgacgacgtcctgtccattgggtcctttcatgctgtcgcgagagggattgtcgtggtctgctccgcaggaaattctgggccttattcagagacggtgatcaactcggcgccgtggctcgtgaccgtcgctgctggcaccattgataggactttcctcgcaaagatcatccttggcaacaatagcacctatgtgggtcaaacactgtactctggaaagcatcctgggaatagcatgcgcatattctatgctgaagacgttgcatctaataacgcagacgatacagatgcaagaagctgcactgcaggatctctgaactcgactctagtgaagggaactgtggtactttgcttccaaacaagggcacagagatcagctgcagtggcagtggagactgtcaagaaagctcgtggcgtcggagtcatcttcgcccagttcttaactaaggacatcgcgtcttcattcgatattccctgttttcaagtagactaccaggttggaacagctatactcgcatacaccactagcacgagaaatccaacagtccagtttggctcagcaaaaacgattcttggagaactgatgggcccagaagttgcatatttctcatctcggggtccaagttctctgtcccccgctgttctgaagccagacattgctgctccaggtgtcaacattttggcagcatggactcctgctgctgccatatcatcagccattggatctgtgaagttcaagatcgattcgggaacctcgatgtcctgtccccacatctcaggagttgttgctctcctcaaatcaatgcatcccaattggagtcctgctgcagtaaaatcagcacttgttacaacagccagtgtccatgacacatatgggtttgagattgtatccgaggcggcgccctacaatcaggcgaacccatttgattacggaggcgggcatgtggatccaaacagcgctgcacaccccggtcttgtgtatgacatggggacatctgactatgtgcgcttcctttgctccatgggctacaacgtctcagccatcagctccctggctcaacagcatgagacctgtcagcacacaccaaagacgcagctgaacctgaacctgccatccatcagtattcccgaactgaggggcaggctcactgtgtcaagaacggtcaccaacgttggctcagccttgacgaagtacagagctcgtgtggaagctcctccaggagtggatgtcaccgtgagcccctcactcctgaccttcaactcgacggtgagaaagttgacgttcaaggtgacattccaggccaaactgaaggtgcaagggagatactacttcggcagcttgacatgggaagatggcgtgcacgccgtgaggatccctcttgtggttcggacgatgatcagtaagttctatgccaattcatgagctggtgggtgtttgtgtgtactgtgtactaactttcgctcaccaccggtgacggtgggacagataagatgtaacctgctaatttgtcccaattctaatggcattggtgattggttggggttccttgactagaattcggttactgattattaagagaaattgaatctttcttttgtttgtaataactcataacttcctcctgttacacaacaaggaggctgaattgacaaagcatcttaatctagcatataacacagcaggaaaacaagagaactgtaatgtctcgagtgctaagaattggtaccggcgtatgtgaatctggtgagacgccagcaatctaattcagttcagagcagaagaggtcattacacatgagaggcgcacttcaggatttggcaccttctttgggcttggtatcagcagagtcgtccttgccgccggagcctgaggaggccgcgcgcgcggcgagggccttgtcgtacgcgtcgagctcgtcgaaatatatgtcccagacgcagcgaacgcagccgctgccgcagcagtcgcccgggagaggcttctcgggcggcagcggcgttggcgcgggcgtgggagccggcgcggcgtcgggcttcccggtgccgccatcgcaaggggtggccgaggccatgggcgtttcgggcgggaggtagtggcggcggcggaggagaggggcgcgtcggcccgggcaggaaaggtaggatcgggcccgggacacggacgacggcgcccagcatacagcccctcgctcgtcgaaaggggaggggaggggacggtcgcggaggccaagaggctgcgtgattgggacgcaggagaatccaactgccacaaggcaactcggacgaaccaattggcaaacgacacatcgtgctcggttgattggttggttatgtagtcatgttgag

SEQ ID NO: 41276 - DNA, 6824 bp, Zea Mays
gagaaaacagaaggagaaagaacatagaatgcgaaaagttgcccttaatatttcaaaggatgtgaagaagttctggatcaaaatagaaaagctggttgtttataagcaccagctggagcttgaggagagaaagaagaaggcacttgataagcaacttgattttcttttaggtcagactgaaaggtattcgacaatgttggcggaaaatcttgtggatatgccctatcccgaaaacctagaaaacaggacttcacagataaaccaacgatcccatcaagaggaagtaccagaaaagaacttaaatgcaaccatttctgatgattttgataatatggaagtcgatgatgattatgagagctccttggacgaagagccagaagatgatgagcacacaattgatgaggatgaagctcagatcactgaagctgagcgcaacgaagaactagctgctttagaggcagaagctgatctaccacttgatgttattctcaagatgtacacaaaaactaaagttcaatatgtctcagttagcagggaaggcagtccagatagcaaagacatgctaagtaacttaggttcgaagattttgattgtagattctttgaagcaggctaatgggcgtgatcatgaacctgctcactcttcaagtgaagatggcaattcttctgaggaagtggatgatggccattcttatgctgagtttgtgaagaagaatcatggtaaaagtaacggaaatatttcttctatcaatgaccaggaggacaaagattacattgctactgaagaagtaaaggatgatgaagcaactttgtctgaagaggaagaattggcaaaaaaagaagatcctgattatctggaagaggttaagttactgcagaaggagagcgagataccactagaagaacttctcgcgaggtaccgagagatcatgaaacagcggagttgaagaattcaccccattttgttgaagaggtcaatactgacatgtctttggatgatcaatctgtgagcattttggaagcgaaaagtgatttatttgtggatcaccaatccagggatgtgctggaaactgaggacacggctccacgatcagaaatcgcatcagagccttgtgctaaacaaaattttgatgaagagaataatctcactgatgttaagacagtcaatggagataagagtgatgatgtaaagagtgatgatgtaattgctgatgctgcagctgctgcaagatcagcacaaccaactggcaacaccttcttgactacaaaagtgcgcacgaaattcccattccttcttaagcattctcttcgtgaataccagcatatagggctggattggttagttgctatgtatgagaagaggcttaatggaattctagcagacgaaatgggtttaggcaagacaatcatgactatctccttgcttgcacaccttgcgtgtgagaaggggatatggggtcctcatcttattgtcgtgccgactagtgttatgctaaattgggagactgaatttcttaagtggtgtcctgcttttaaaatactgacttatttcggaagcgcaaaggagagaaagcagaagcgtcagggctggatgaaaccaaatttcttccatgtttgcatcacaacatataggcttgtcatacaggactctaaagtgtttaagagaaagaagtggaagtatcttattcttgatgaggctcatctgataaagaactggaaatcacaacgttggcagactttgctcaactttaattcaaagagacgtattcttctgactggaactccactgcaaaatgaccttatggaactttggtccctcatgcattttctgatgcctcatgtgtttcagtctcatcaagagttcaaggattggttctgcaatccaatttctgggatggtggaaggtcaagataaagtaaacaaagaaattatagatcggttgcacaatgtccttcgtccatttatactgcgtcgactgaaaagagatgttgagaaacagttaccaaagaagcaagagcatgtcatatattgccgactttctagaaggcaaagaaacttgtatgaagattttattgctagctcagagactcaagcaacactggcaagtgggaattattttggcatgataagcatcattatgcaacttagaaaggtctgtaaccatccagatctttttgaaggtcggccaataataagctcatttgacatggctgggattaacatgcagctcagctattcagtctgcatgctccttgataagagtccattttctcaggtgggactgtctgatatgaatttagtgtttacgcaaaatgaatttagcatgagttcctgggaagctgatgaggtcatttctgcctttcctttgagtaccacttcctggaaccatgaccttgatactttttgctctaataaggatcgtcagggaagtaatttgacaaacatttttgaagatattcagaaagcactacaggaggagagaataaaggaatccagagaaagggcagcttccattgcatggtggaatagagttagatgccaaaagaggcctgtctatggcacaaacatgatacatgttttgactgtaaagcatcatgtatcaaatattcttgataagaggaacaaccctttgtgccacatggactattcatcaagccttgcagatcttgttcttccatctgtggaacgctttcagaaaatgcttgatattgttgaatcatttacattcgcaattcctgctgctcgagctcctccccctgtttgctggtacagcaaaggaaactctcctgtttttattgatccagcatatagagaaaaatgcatgaacgagttttctcccatcctgtctcctataaggtctgctattgttcgacgtcaagtctactttcctgataggcgtttgatccagtttgattgtgggaagttgcaggaacttgctattctgttaaggcgcttgaagtcagaagggcacagggccttgatatttactcagatgactaagatgcttgatgtcttggaagagttcataaatctatatggatatacatatttacgtttagatggttctactcccccagaagagaggcagactctgatgcagaggttcaacacaaatccaaagttcttccttttcattttgtccactcgaagtggtggtgtgggaatcaaccttgtaggtgcagacactgtcatcttctatgacagtgactggaaccctgcaatggaccaacaagcacaggacagatgccacaggattggtcagactcgtgaagttcacatatatagactcattagtgaaagcactatagaggagaacattctcaagaaagcaaatcagaaacgagctcttgatgatttagtgatacaacgaggtagctacaatacggaattcttcaagaaacttgatcctatggaattcttttccgggcacacatctcttcatgcagaagatcaggagaagaattgctctacaacctcaggagtttcaaatgatgttgatctggctctgtcaattgcagatgttgaagcagctattagacaagcagaagatgaagctgactatatggctctcaagaagctggaggaggaagaagccgtggacaatcaagaattcagtgaggaggctgcgggcagacaagaggaggatgaattggttaatgaggagaatggaaaacccgatgagcacattaacgaagaacaaaaatataactcttctgatgtagagaaggagaagcacattactctgtctaccaatcgattaaataaggaaaaggctcttacattggctgttggtgatgaagatactgacatgcttgctgatgtgaaacagatggcagctgcagcagctgcagcaggacaagcgagttcatcatttgagaaccagctccggccaattgatagatatgcaatgcgctttatggaactctgggatccagtaattgacaaagctgctttaaatcatcaagtaaatgttgaggaggaagaatgggagcttgatcgtattgaaaaattcaaagaggatttagaagcagaaattgatgaggaccaagaaccactttcttatgaatcatgggatgttgattttgctacgacagcctatcggcaacatgttgaggctttaactcaaaagcagttgttagaagaacaggaaaggcaagctcaggaagcaacaaaagagttggaggagaagaatgataatatgagtcaccacagaaagtcaaaaaagaacaaaaagaagacaggcaaactcaagcccctgaaaagagtgcgtctgtcgcctgaatcagaagtcatactggaggaaacctctgtagataatgcaccctcacctgagcttacaagtgatgaatcgccacaccattattgtaacaagcgtaagaagattacggttgccactgaggaaaatagtaacagcagaagtttaaagaagctcaagaaaactactaaatcaagttttatttctgaagccttgtcacctaggctgaaggaggaccttaatgattcagattcaaaatcagtgggtagaactaaaagtgatggcagatttttcatcccttgcatgccagtgaaacgtgttattgtaataaagcctgagagattgaaaaggaagggaatatggtctcgagattgtgcttcagactcatggtcatctgaggaagatgcagttctttgtggaactgttcatgagtatggtccactttgggaattggcaagtgattttcttcattttttgccaggcggttccttgtataggggaagatatcatcatcctgtgcattgctgtgagagatacagagaactgttctgcaaacatggaatgtcagcaacagataattctaacagtgaaaaggttccttctgggactggaaaggctatacttagagtgtctgaggatcaagctcagatgttggtgaatgtgaccagtgaacttcctaacaatgaattgcttctccagaaacacttcatggctgtaatttcgtctgtttggagatcaaaatgtcaccgtgatacctcctgttttacgaacacttactctagtgcattacatgtgttttctcctgtgaagaaacctggtggatcatgtgagaactggcccatggtaaactttagaccaagcttcaatctagttaggaaagcccttgcagatgttcaggctaagtctacactaatggtgattccacctccgtcaaggaatcaggaatacccatgcaattatttagaattagagttagatttcttgaaagatcaacatgcttatgatgaagacatcccatctgtagtaaatgtgtccatacaggaaccagaaccatccaaacagacgccagagccagtggaacaatcgttgttgtctgcactttcttgtagacaggctgagaaccggctcagaagcttgttatgatggtgaaagttctcattgggcatcatcagcttttcacataaatgatgctgcccgccacaaatctggttcaaagtctataggaaagcacaaagccgcattggaatctggtagacttctcaaatccaaagttcagaagattactgaatcgcatcaggaaggggcaattgctatgagtagttttctccgtatgcctgctcaactattgccaagtacagctgacttccacattagtgactccctatctgactttggtatcagagattctgaattctatttttccgaggatctcttgcaagaggttgacgcccttgagttcttcccagatcagggtgactctggtctccttcctggtattgaagagttagaatctctttcggatttcacagatatcggatgaacatagatgagcaaattattgttgatgggatgccctcctataccaagaggagacaagattgcctctggcaggagcccaaggatacaggttgaattgctcagccgtgcacagatgtgttgcaagcagcaagctatcatcatggctggctggagcaaagcactggcttggtgaggtcacattgatctgacaagctcggaggatgggtttgcactaatggcggcatttgggtaatttccatacatgtatgtatattggtagtctagaatcgtaggatgtagaaatgcctccctcatttgtgtttgagggtaggaccttgtaactcgaccacatggaaattttgttgagcaggtaccaacatagaagggaaaagaagaggccctcagcatcacccatttgtcgctgtatctcttgttatgttcattctctgtttaatccaatgctgtttggctatcttgccattgaaaacatctcagatgtcaagttggtggtgtacatatctatcagaagtttaggatgcggcgtcaatatagctgccaaagaatgatcagtcaagtgcaacttatgggcacattatatatttggtcaggactcaacgcatggtatcaatattggcagaaatggtgttccagatgcacttgaggactgcaatttctggtttgattgagacaccggagacaggtttttcataggaggtaaagagcgtggtcatagttgtacatgtaataaaattatgtagggtagtaatctccatcctgtacttttgggcttatggttctttggactctcggtctcggttatgcacttgtagaacagcgggctgctgctgtgagcctgtaacaatgctattgattgttccccaccatattgttgttttggtaagtagactctgcatcactgcaaagcggcgttagatactgtgacgggtctgtttcgctcaaaaatactttgagcttgtattcagtcttggcctccaataatctgtaccgctgtacgctgggaatgtttggccaatcccattaatggtaagctg

SEQ ID NO: 41277 - DNA, 4511 bp, Zea Mays
gaactaccaccgggtgcgggtagctagcgggtagggtaccaaaacggcggcgctagaaaggaaaacctgccgtactgtcccctcttcccttttactgccgcctgccggccgcgagggagggagggacggaggtgctcatctgtgcggcggcttcggtgtcggtcccaggggaggcggggagccatggcgcggaagcacggctggcagctcccagcccacaccctgcagatcgttgcaattacagttttcttccttctggtggttgcgttttatgccttctttgtgccgtttttgggaaagcaagtagttgagtatattgcaattggcgtttatactcctgtggcacttgcagttttcatcctttacattcgatgcaccagtataaaccctgcggatcctgggatcatgtcaaagtttgaggatggccttatcaatataccaaccaatggctctggaatagaaggcatgaatttgccccagaaagtaaacaatgctacaggaacaaactctccaatgtctacttgcagaagttctctagatgggcattctaatcaaagaggttcatccataggggaggcaaacatgaatctaggatcacaactgccaaagaaaagatcaagctgttggttgctaggtgggcttctatgtgctacatttgtcaaggaagactgccgaaaaactgatgactcggagcagcaagcaaatggggaggaggctctgttttgcacattatgtaatgctgagtggctaaataactgtgttgggcggaagaattatttcacattccttgctctgatggcaatcagtcttatctggcttgcaattgaatttggagtgggaattgctgttattgtactatgttttgtcgataagaatgcatcaagaaatattcaagacaagttggggaatggcttgactcgtgctccatttgctgttatcgtggggattacaacttatgattatgttgttgcaatgagagctatgagtgaggcagctccagaggacgaggaaggagaaaatatcatttactcgccatcaaattcagcaacaactgggttcagtgtaggaagttcacttggtattcaccacaaaggtgcttggtgtactcctccaaggatatttatcgatcaggatgaagtgatcccacatctggagcctggaatggtgccttcaaccgtggaccctgatggtgctggatatccggaaagagcaaatagagccaagaaggcagtcaaaatcagtgctcgcagcctcgcaaagctcgataagaatgaggtaatgaaagctgctgcaaaagctcgggcatcatcctcggttctgcgaccaatagatgcccgccatggtcatgaagctgatgtcatctccagcggcagtgccagtgtcaggagcagcatgagtgttgactacagtggcacaaaggaatcaaacagcgagatgaaactttctccgcttcataactcatacccccaaagccttgcaagccaggatgaatacgataccggcacaccaaccgcaagcagtttaagcagtctggtcaacatccacaagcttgcatcccactctcagttcagtgctgcgcctcgccctgcacctccggaaagacctgtgccggcgatggtgcggccacctgttcccaccacacaaataaccaacccagggataccgcggccagctgttcccacaacacaaacaaccaacccgatgttccaatcagccacatcttatgttcgagagaaccgaagggcctctgtcgtctgggatcaagaggctggtcggtacgtgtcagttcctgcacagacaagaacgggaactggagccgacctgccagcaagaaacccacggttcttggcgaacccaagtggcgagccaagcagccatgtgaggggtgttgcacccggcaacacatcgtcctcagcaatgccgtcagggcagccttcggagaggctgacctactctgggcagtcgatattcttcggtggccccatgctgaacacccctagcctgggcgcccagaggaacgaggcaggcgcaagagcgcgtccggagggaagcagagatcctaatgcccagcagcgtgacatccggggtgagaaagcgaggacaggctccttgccagtatttgctcctgggacgatattgcagaggcagaaggggcaagcagataaaacctcgcgggctttgctagtttgcttcaccccttcccttctccccaccgcccccgtccccgtcccccaccactggcactcaggtgaagggattcctgtgccgccgcctgccctcgccttctgcctcccggcgcccactcggccttgcggataatttgcggctcggtcccgggcgtgctcagtctcggttccagtggccgcttcgatgtacctgaccgccgtttccttcccccccgcagccgccttctcgtcctcatcccagaagctgctgcctaggtcggccggggtcggccggcgtctggtggtgcgggcagacgtcaaggtcatatcgacgggcgaggcctgccgccgcgggctcgccgccggcattgacaagctcgccgacgccgtcagcgtcaccctcggccccaaagatgttcattgcagggaggaatgttgttattgaccaagatgatgtacctaaagtaattaatgatggtgtcacaattgccaaggctatagagctcccaaatgcacttgagcatgcaggtgccacgctacttcaagaaatagcatccaagacaaatagcgctgttggtgatggaactacaacggcaattgttttggctcgggaaatcatcaatcttgggttgttggcagttgccactggtgctaacccagttgcattgagaaggggtattgacaaagccgttcatgagctaattaagatcttgaagagtaaatgtatccctgtgagtacaaaggaggacataaaagctgttgcgtcaatatcatctggcaatgatgaatatgttggtaatctcattgctgatgcattggagaagataggtcctgatggtataatcaaaattgagtcatcatcttcaatatacactacagttgaggtgcaggaaggaatgaagatagacaagggatatatttctccatacttcatcacaaatcaagacaaatcaattgttgaattcgaaaatactagagtgcttttaactgatcagcgtgtgaatgatgttcaagagatacttcccttgctggagaagacaacacagttgagtgtccctttattaattattgccgaggatgtgtcgcatgaggtatattcaacactggttcttaacaaactgaatggattgctaaatgttgcggttgttaaatgtcctggtttgggagatgaaaagaaggccattctccaagacattgctattatgacaggtgcagatttctttgctagtgaccttggctggggtcttcatggcattacttctgatcagcttggtatggctcagaagatcacaataactagtgaatccacaactatcatagcacatccttcaatgagaccagagattgaggccagaatcatgcaactgaaaaaagatctagaggagacaacgagttcctatctaaaagaaaggttctctgcaagaatcgctaaactttcaagaggtgttggagtcatcaaggttggggcagccactgaagctgaactcgaggataggaaactgagagtagaggatgcaaagaacgcaacttttgcagccatcagtgaaggcataactcctggtggtggggtgacatatgttcatttatcaaagcatattcccagcatcatggaccttgtggacgacacagaggagaaaatgggtgtaaatatagttgggaaggcacttcttgtccctgctatgacgatagctcgcaatgccggggcagacggtccagctgtcgtggagaagcttctcgccagcgagtggcgggttggttacaatgcgatgactgacgagtttgaagaccttgtcgctgctggtgtggtggacccgtgcagggtcgcgagatgcgtgctccagaactctgcttctatcgcagggctgattcttatgactcaggctatgatgtttgacaagatcaagaagaagaagtctcccatccccgagattcctggtattccaccgcttcagataagccaaaaagctaaggcttgagctgttggatgctgccctggtgttgttggctggatgagttgtgttgacctaggaagcagcagaatgcccagtgagctgcccaaaccaggtagaacagtgagcacttggaatgcccatgttacactcgttatataatttggtggtcggtgcagtattacttgtcatgtctgcataaattttgcattggcgggtgagtcggcaaccaatttatgtctgacttgggaacgtaaacgaacgaatggttgatttgttgctacatagagggccccctttgggcatcatctcgagcaaagctattttgccttgtatctccctttgaaagcagatctgtttcatcaattaacatacgaggtaacacagtagcttgtag

SEQ ID NO: 41278 - DNA, 454 bp, Zea Mays
cagccatcttgttcggttttggaactcgatgctaactgttaactaacgcatggggacctgaattcacatttgactacctgataactattttgatagataacagagctgtgttgaaaggagggttcatcggagagtggccactaacatattctgcagactgttgatccatatatttcagatgagagagtaggattagctgagcctgcagaagaaatacagactgtgccctcctcatgggaaaaaactagactatttaatatgctttctatgctcacgccattgagcacaacatacaatttgaacttgtttgaacttgttgctttgagttgcttgtactgacttgcctctgaaaaaactttgctttggtccgaagaacactgaaaaaactatgctttggtctgctctgaatctagatgataatttcttcgattctaattctgaaatgatggttgag

SEQ ID NO: 41279 - DNA, 2269 bp, Zea Mays
ccccgtagtctgtcccactctgctgctgcttcccgtgatcacgtccacgtgtcgctgcgacgaccgatcactgaccaccggccgccgcaacctagtactactgggatgagagtgatcggggcatcgggccgtcggggcacgaacaaaagcagcgggaaagtgacgacgggcagggcgggaggagaagctgtgggtcgatcacttgggtcttgggtggcacgcgctacaagctagggcttctgctccgtcctccgcgaatccgcggcgagcctgctagctgcgtggcttccctcttcccgggagcggcgcggcggtagtgctggtgctgcccggaccagaccagacccgaaagcggagaggcccccgtgcaaccggagccgtgcgttggaggtggacaggtggtggcacctgtgggcaacggccaacggcacggcagattctggtcgatcgtcgatgaggccggcgccggagacaagcacgcggcggccgcagctgcgtcgccgtcgtccagtgccattggtgacggtggccgtgtctttggcgctcatctcgctggcgtgccttcctgtcttcgcggatgcaagcagagcgctgcaccgcgaccgggaggagcaccggaggcagcaccaccgcacggaggacaagaagagccgcgtctcgctccctcccgacgctgacggcgactctccgcccgagcctccggactccggcggcgcgccgccgcctgccgacgacagcgactgcggcaacgtgttcgacgtgagggcgttcggcgcgtcgggcgacggctcgtgcgtcgacgacgacacggccgcgttccgcgcggcgtggaaggcggcgtgctcctccgactccgccgcggccacgctgctggtgccgtcggacggcgtgttcaccatcgcatccaccatcttctccgggccgtgcaagcccgacctcaccttccaaatcgatggcgtcctcatgccgccggacggcccggcgagctggccggcgacggacagccggaaacagtggatagtcttctacaaggccgatcgcttgacgctggcgggggaaggcaccatcgaaggcaacggtgaggagtggtgggatctgccgtgcaagcctcacaggctcatacgattcttctcgagcaatgacgtgacggtatgcggcctgcggatcgagaacagcccgcagttccacctcaggttcgacgactgcgagcgcgtgcgcgtcgacggcctcttcgtcagctcgccggcgtccagccccaacacggacggcgtccacgtcgagaacaccaagtccgtccagatcctcaactctaggatctacaacggcgacgactgcgtctccatcggcgccggatgctccgatgtccacgtcgagaacataacatgcggccacggccatggaattaggtacctgtcagtctgtcactcactcactcaccaacgtgcttccatggcgcgcggtaccgtttgtagtgaacctgacgcggcgagctgctgctgtcaccctcgcagcatcggcagcctgggtgtccacaacacccacgcctgcgtgtccaacgtcacggtccggaacgtgcggatactcgactccgacaacggcgtccggatcaagacgtggcagggcggcgccggcgcggtgtcggcggtcgagttcaccggcgtgcagatgcagaacgtgaagaactgcatcgtcatcgaccagtactactgcctcggccacgggtgcgccaaccagacctccgcggtgcgcgtggccggcgtcgcgtacagggacatccacggcacgtacaacccgcaggccggcgcgcccatccgcctcgcgtgcagcgacgccgtcgcctgcacggacatcaccatgtctggcgtcgagctgctgccggccggcggggacgacggagcactgctcgccgacccctactgctggaacgcgtacggggtcatggagacgctcacgctgccaccggtgtactgcttgctggagggcagcccggagtctctccaggatccgctcaccagttgctgagatgagatcgttttctttactaacaaagatttctctcctgagacagtcaacgctaatacactggacattctacatgtgacaaattacaaattacgcagacaatgtgaatttctgaaatggcatgctcccagcaactgaaagttgagccgcaatgtattcaagagagtgaaatacgcactcgagtcctcaaaaactgaggatggatagatactcttcctcatccaaataaaaatacgccggcataagg

SEQ ID NO: 41280 - DNA, 1870 bp, Zea Mays
catcccacagctcgtccgtttccttcctctctctctctctctctctctctctctctcttctggggcttgcagcagaatcgcagcgaccgcgtcgtccccacgcggtgcggccgctgcgcattgcgggccgggagagcgagaacggagtggggaagatggagacggtgaagagccttctgaagccgaagccgacgccgcagcagcagctgcgcgagtggcagcgccgcctccgcaacgagggccgcaacatcgaccggcagatccgaggtccaggctgtcgccctcgacctcgatgtgctgcagatgtgcagagggaggagaagaaggtggagaaggccatcagggaggccgccaagcgcaacgacatgggatccgccaaggcgctggccatggaggtggtgcgctcgaggaaggcagtcaaccgcctgtacgagaacaaggcccagctcaactccatctccatgcaccttggcgaaatcgttggtactaataactaactatcccacccgttggtactaggcaaacaaggttgtgactgaactgaatcgaccttccttccatgtttggtatttacattttttggaatgctatgtgattatgacttaaccgaccactgcacttgtccactggttggatgccatgttcccatctaatacttgtctcggtgtctcaggctgaagcctaattaaccttatttatttctacgtataggtgtatataagtgtagaaatagatgaagtgaaacgtcatgtgccaattccttgtatgccatcggaaaatatactcgttccttgtgtgccactggctccacatgtcatacacacaaaaaatgttggctccacatgtcatacacacaaaaaatgtatctatatgccactcagtggcacacaagggaatgagtataaaatctgatagcataccaggaatttttccaagaaaatttttagtagaatacctcctactgacaagaactataaccttgtgtgtgttcctcgttacctaacgtcggactagcttccctctgttcctttctttcaaccactgacatagatcatgtggatcattctttattgtgtccttatccgtaaacatggtaatgacactcataagtgcaatatagtaatcgcagtatgattgtatgaaacttagaggttgtacaagctgtactgacaataagctgggaataccgtaatctttcagctacagctaggacagtaggccacttgtccaagagcactgaagtgatgaaacttgtcaacggcctcatgaaagcccccgaggtcgcagccacaatgcaggaattcagcaaagagatgacaaaggctggtgtgatggaagaaatggtcaacgatgctttagattcaacgctggacagcgaggacatggaggaggaaattgaagaggaggttgacaaggtcctcactgcaatcgctggggagaccgcctctgagctcccggatgctgtcaggaaggaaaaggagaagatgaagcagccttcaacaagtgtacctgaggagagaactgctatagcagaggctgttgatgacggtgagctagaccagataagggaaaggcttgccagagtgaggtcatagaagatagctgaacaaggtcagatcattgaggtgttacggcacatgacatctcacttgataatgtatacacgtatcacacacaatcactgtgattagcagaccgatttccccacatccagcaatgtgattttgtccaggccctgttgtaacctgtatgggtcatgatttctaatatatatcacgtattatatgtttggaagcaccgtgtttaatactctgaataatccatacatttcattgcactgcgacgaagtggaaagagaagagaagtgggg

SEQ ID NO: 41281 - DNA, 4739 bp, Zea Mays
atccttcggttttgtattcttcgcttcctttcgccttcctcttcgcctctctctcgtgttctggcgtcgccgtcgccgctggcgcgagatggtggagacgcggcgaagcgccgcggcgaagcgctcggcggcggtggtggaggaggagaagggctcgctggcatcgccagcgctggagcccgcggaggacgcgccggcgggtcttggagcgggtgacgatgtcgcgtcgtcgcagcccccgaagcgcgcgaaggttgggtgcacggagtcggataccgcgaagccgtcggtggcgccggctgccggcgctgttgcgggtccactgcccaacacggctgggctgcaggccaggaccggcgccatggacaagctggaggccttcttgaagtccaaggaggctcagtccaatccggccggtcataagcaggggactaatgataaagatttatcggcgaagatgaagagagtcatggatttgtcggaggatatatcggagaagataaagagaagcaaggataggttggctgtgttattgaataagccggctgcaggcaccagcaggcgtcaggagccctggtgcagactaatttcacaacattccatgcaccctaccctttctatttacggtgcgattttcacaattggtcatggagcgcatcatgatttcagactggatgaatcatccactgcctcatctgtttgtagactgaagcaagctaagatatttgagcaacttcatgaggagaaatcaagcacttcagtgttatcttccacttgcacttgcagtagtatccagctggggcaacactcacatttcaatgatattcaggatcatgtgtcatctaaagggcgcaaagcctcatcctttctctttggaagaggtctatcagcagacccacttaatatatgtaaaacgacggagggccggagccagtttatctctgaagataatatatcatctggtcggtgtcagctactaaaggaggatttgattaatgcaacggttgatgtgagtgacatctctgagtcatttgatagttgcccatattatctaagtgagcataccaaacatgctctaatgtcagcagcatttgtacatttacattgcaagaactacttcaagtttacaaaagatatatcttctcttagtcaacgagtgctgctatctggcccaacaggaactgatatgtatcaagaatatctggtgaaggcccttgcaaagtattttggtgctagattgctcactatagattcttccatgctgtttggtgggcaaacttccaaggaatcagaatcatacaaaaagggtgatagagtgaggtatattggctcaggcattatccttgatggacagagccctccagattttggttcacagggtgaaatatttcttccttttgaagaaaacagatcatcaaaggttggtgtaaggtttgataaaaaaattctgggaggaaacaatcttggaggcaattgtgaagttgatcatggtttgttctgttctgttgattctttatgccccgacattccaggatgggaggttacgttcaaacatccatttgatgtgatagttgagtttatctctgaagaaattcggcatggccctttaatcctttttctgaaggacacagagaaaatttgtgggaataatgattcctatcatggtctgaagagcaagctaaaacattttccagctggcgcttttataattggatctcaaatccagcctgacaatcgcaaagagaaggcaaatgttagttctccttttctttcgaagttccggtacagccaagctatacttggcctcacattacaggacattgatgggggaaatgataataataaagaaacatcaaaggcaataatgaagcatttgatcaaacttttcccgaataaagtgacacttgaggcaccacaagctgaaatggagctttcacggtggaaccagatgttaaaccgagatattgaagtccttaaaggaaatgcaaacatttcaaaaatacgctcttttctaacaaggcttggattggaatgcactgaccctgaagcgatattggtcacggatcgcattcttacaaatgagtgtattgataaaataattggttttgctttgagccatcaacttaagaactgtacaaatccagacccccctttgggtagtgtgcagtttgctctatccagcggaagtcttaagcatggcgttgacatgttgaaaagtatccagtctggctcgaagagcagcaccaaaaggaaatcacttaaggatattgctactgaaaacgaatttgaaaagagccttcttgctgatgtcacccctccacatgaaattggtgttacctttgaggacattggagctttagaaagtgtcaaagatactctgaaggagttggtgatgcttcctttgcaaagacccgaacttttcaaccgaggacaacttatgaagccatgtaaaggaattttactttttggcccacctggtacggggaagacaaatgctggctaaggctgtggcaactgaggctggtgctaatttcataaacatatcgatgtcaagcatctcttcaaagtggcttggtgaaggagaaaaatttgtgaaagctgtgttttcactggcaagtaaaattgctccaagtgtaatttttgtggacgaggttgatggcatgttgggaaggcgggagaaccctggagaacatgaagccatgcggaagatgaaaaatgagtttatggtgaactgggatggtctgagaacaagggagaaagaacgtgtattagtacttgctgcaactaacaggccatttgatcttgatgaggctgttgttaggcggcttccaaggaggttgatggtgaatttgccagatgcatcaaataggagaaaaattcttagtgtaatactagccaaggaagatttggcagacgacgttgatctagaaactatagctaacctgacagaagggtactcaggcagtgatctcaagaatctgtgtgttactgctgcacaccgtcctattagggagattcttgaaaaggaaaagaaggagagagcttcagcagaagcagaaaatagatcattgcctccgtcacacactagcaatgatgtccgtgcattaagaacaagtgatttcatacatgcgcatgaacaggtgtgtgcaagtgttccctcggattccagtaacatgagcgagcttgtgcaatggaatgatctctatggagaaggcggatcaaggaaaaagacaacgctaagctacttcatgtagcttaggttataaatatattgggagaagtgccctggcacaaagcagcaatagttggaggcggtgcagttggaaaaaaaaagctatgctcatctgccagacatccatatcaaagagaattgatggttcaggtggagcggaatagaatggaatggaatagtatacatacacatggttgctgcctctgctctgggccatgcatcatgcatctggacaggacggctatcctggcttgcagttgccctatgcagttttgagtgcaatggtcaccatctgtgaagcacggataccacagagatcctggccccaaccactcttttcacaaatggagctgaggacctttggagttctaccaaaagtgatcttaaatctttgttctttgactttccgttttgtgaacggaaggccccactctgctagtatggattgttgatcctccgtttctctggtactgactgaactgctcatacaaaactcgttcaacaggcagaaatgctgcctggtggccttctagagtgcttctttgacgccgcagagagcacatcaaaaaaaatgtgtttgtttcgaacgatttgtgctgcattccattcacggcgatatcaggtgccgttgtttgtgtttggttccgcaatcaagggagtgaaagccattagcacatccaatcaaacaaatagcgatatctctttcactgtaccagttagcgctggtctcggatgctattaacattgctgttgtctgtctcggaaccaaacaccgcctaactcgtcggctgttaaatatttctgaactgaattactgcacttggttggggtttcatgcttatcaagttggcttatatagccaacaatactttgtgcagttctgcatcctctgcctgcttatgcgcgatctcattggctgagcggtacgaagataaaacggtagctaatccgaagcgatggcttctctttttctttctacggtattttgtctctatgaattacagttacagcagtcagaacagctgatttaaaaccgcagcgaaaaggctgattgccttgcccatttttgggtgggtggaggttaatacagatttctgtaatttttttactttaatattgtttgacatattgtgcaaggcaaatgatttcctaatgatttgttctacttgatattgtaatccatattgacctatatgctatgctcagttccttagagcatctccagtacttgatattgtaatccatattgacctaggggaaaaaaaggagaatttaacctgatgacactggtggactatgctatgctcagttccttggaacatctctagtagttttgtaaaaaaatctctctaaagacagatgtaaggagttgctacataataatagggagtaaaaatatctgtactctcatgtagtctttatttttagttaccaaatattataaattatgcctgctgaaactcctctccctcacgttatagaaagttttatgtttttccaatcaaac

SEQ ID NO: 41282 - DNA, 2176 bp, Zea Mays
gtgcacgccagctactatacaaaaccagccgagcgccagaggagaagagctccgtcttgccttctcttctctacctgccgcacccgcacagccacagccaaccacacaccccacatcacaacagctccctctgcatctccgcctcgtcgccgtcgtctgcctgcacaaccttcttcttcctcatctctctctctcttcttccgctgccaccctcccagcaccgagggaagggaagcccaggaatctccgtcccgctcccggccgccgtccttctcataacctcatcggatctgtattgggttttcagtaaggagcagaaaacgccttagggaatgcagaaagatgtgcttgcacgtcgaagagctactttgtgagggacttggcaggaaagcacgccatactcttcattctctgccacctcttgatgacttcgaagctcaagagtacacgtatctccacctcgtgctttcgcacaatggggttcgacgtggcggctcaaccgtcttcttagatcaccatctcggtggagacggttgaagtcttcacaccctctcgacctctttgctgtctcattttttttaactgtcaaggataagcaagtgacctctgtgtgcataccaccaccaccatacgtagcatacacaggcacagatggcagagcataaagggaacgttctcttgcacaagtatgagatggggaaattgcttggccaaggcacctttgccaaggtttaccatgctcgtaacacggcgacttcggaaagtgtcgcgatcaaagtgattgataaggagaaggttatgaaggttggtctcattgatcaaatccagcgagaaatttctgtgatgaagcttgttaggcatccaaacatcgtacagctctatgaggtcatggccaccaaaaccaaaatatactttgtgctggaacatgttaaaggtggagagctgttcaacaagattcagcgaggaaggctcaaggaagacgcagcgaggaagtacttccagcagttgatctgtgcggtggacttctgccacagcaggggtgtctatcatcgagatttgaagccagaaaatcttttgctcgatgagaatagcaacctaaaggtatcagattttggtctaagcgcacttgctgaatgccatagacaagacggcctgctccacacgacttgtggcacgcctgcttatgttgccccagaggtgattaacagaaagggttatgatggtgcaaaggctgacatatggtcttgtggggtcatcctgtttgtgctattggctggttatcttccgttccatgataagaacttgatggacatgtataagaagattgagaaagctgacttcaaatgtccaagttggttttctaccgatgttcggaggcttttgcaaaggattcttgatcctaaccctagtagaaggatctcgatggaaaaaatcatggagaatccatggtttaggaagggtttaggtgcaaagctacttaggtacgatttacagaataagaatgcccctcatgtggacaagaatgcagattttgattcactgagcgccaacataacaactgagagcaagcaacatgaagaaaagaagcctatcaacatgaatgcatttgatataatctctctatcaactggcttggacctctctggtttatttgaagaatctaacaagaagagagaatccaaattcacatctaccaacacaagctcgacaatcatatcgaagatcgaagatattgcaaagaatttgcggttgaatttgacaaagaaggatggtggtttgttaaagatggaagcttcaaagcccggaaggaaaggggtaatgggtatcgatgccgaagtatttgaggttagccctaactttcatcttgtggagataaagaagacgaatggcgacactctagagtatcaaaaggtcctgaaccaagaaatgaggcccgcactcaaggaaatagtgtgggcttggcaagaaaagtaaagaacaaagaggttgcaatgcgattggtagctttgttcacgagacgaggaagacacggttcatgattaagggatgtaaaaaaaaaacatgtgtcgcagatgatccgagcccatcagttatgtcttaacctaatcccccaagaagaaaaattagtaaatgtacacagaccaggggaaaaaccgtgggtgctcagctgtatgga

SEQ ID NO: 41283 - DNA, 1139 bp, Zea Mays
cttcagatcaaagggcccaattccacccatccccatcgcgatcgcctctctccagctaagcgatgaagaaccctaaccctcctccctcgcgtccctccgccgcaggcaaggagccccccgcaggcatggcgccgccccgcaaatctcgctggggcccaccgccaccgggcgttgccggcgacaaggccgcgccatccacctccgcccgccgcaccccgaccccgacccccacccgcacagcggactccaggcgccatccgggggcccctcacgcgccagcaccgcacgcccgcaaccccgggtcgcaggcggtcgctctccggccgcaggctcgtccgcaacctccggcggtggagactcctcccccgcagccgtacggcttccacaacctggaccgccgcgtcatgcccctcgccgacggcaccgtccgaacctacttcgccctgccccctgactacagcttcgagccggtgcccctgccacccctcccacaccgcctcctcccccgcgccgccccggacctctggccgccgccgctacatttgcagatgccgccgcacgaggctaggcgcaaacaccctgccgaacaggacgagggcttcgcgaggcaccccaagcagccgcggctcgacgagccgcatcaaccgccgccgcatgccaaggtggacgggcatgcgctcaggagggcgttcctcaaatacgccaagatgctcaacgagagctcggcgcagaggcggagctatctcgagggcggccgtgtcccgtgcctcgcctgtggcaggtcttctaaggactttgctgatgtccatggacttgtcatgcatgcttacaacccaccaaatgcagattcacttgttgatcatcttggtttgcacaaggcattgtgtgttcttatgggatgggattatacaaaagtccctgagaactttaagggctaccaatcattaccttctgaccttgtccaagcaagtagggaggacctcattgtctggccgcctactgttatcattcacaatacttcgactgggaggaagaaagatggtcgcttggagggtttagggaacaaagaaatggataaaaaaatgacagtgccaactgcggaactgcgaaggcagtactcatgaggtgctatgctggta

SEQ ID NO: 41284 - DNA, 1231 bp, Zea Mays
tcgtcttccgcggctccaacccgcactacgcgcacctcctcctgcaccacgcccagcagctgttcgagttcgccgacaagtacagggggacatacgacagcagcatcgcggaggtgaagagctactacgcgtcggtgagcgggtacaaggacgagctactgtgggccgccctgtggctccaccgcgccaccggcagagatgactacctcgactacgtcgtcgacaacgccgacagcttcggcggcaccggctgggccatcaacgagttcagctgggacgtcaagtacgccggcgtccagatcctagcggcaaggctgctgctgagaggggagcacgcgccgcgccaccggagcacgctggagcggtacagggccaaggcggagcggtacgtgtgcgcgtgcctgggccggaacacggagggcggcgcggacgccaacgtggagcgcagccccggcgggatgctctacgtccggcagtggaacaacatgcagtacgtgaccggcgccgcgctccttctctccgcctactccgactacctggcggccgccgaggccggcggcgccgcccgggccgtgtcgtgcgcggcggcggccgaggaggtgttcgcgctcgccagggcgcaggcggactacgtgctgggcaccaacccccggggcgccagctacctcgtcggctacggctccaggtaccccggccgggtgcaccaccgcgccgcgtccatcgtgccgtacaagcacagcagggagttcatcggctgcacgcaggggttcgaccactggttcggccggcggggctccaaccccaatttgctcgtcggcgcgatcgtcggcgggccggacaggcgcgacaggttcagggacagccgcgacaactacatgcagacggaggcctgcacgtacaatacggccccgatggtcggcgtattcgctaagctgcgccggatggcgtggctggagcgggaacaggggtccacgtcggtgcccgtcaccgtcacgtccacggcggccgaggtgtaaatagataggatgtagaggaagggggctgtacaattttccccattctttagttcatttttttcgagctttgaatttcattttacacagatcgaggttattgtatacgagaaagaaaaaaaagagaaaagggtggaggcgcctacatgcatgtgcaattctgcaaaatgtaaattcactactggtacatatggagaaatttgacattatgaaacacg

SEQ ID NO: 41285 - DNA, 1170 bp, Zea Mays
cccctgcgcatatctgcctacccatgcggtcctcccccaaacgtcttcatcacggacgaagccaagaagctgccagcgtcgatccacacatatcgtttggtcctcctctggcgccaagagatttgctgccggtccaacctcggcgactatcggagagggagcagagtgcatggcgaagtcgtgcggggtgcaacgtccggtgccgctgttacctgtggccgtggtaccgctgtcatctgttgcttccgaaaagccggtgccttctgtgggcctcgacaacctggctgtcgctgctgcaagcccagtcgttgccgcgcgctctgctccaggctgggacaccatcgctgcgctagataaagcttggagacgaagagagccaccgtgtggctgctaaggcgaggtcgaagccactatccagtatcgaggtatgactcctcccgtggtcccgacttgttcatcgctccgcattagcatcgtttcggtcggggttggctcacctgggtgtggcttggagtcccgaccagggcacctccgtgacgggcaggccgccgccgtcaaggcagggtgctctaatggtggaagacacgcgccaaccgtgcgatatgttacgagcggcttggattagtgcctgggtcctttgatccgagccactgatccgtgatcggacgatcctagtgtgtaagcattgtattaaatccatgtcgttaatccccaatctggcggttggaggtccataccggtccatcgcgggcggggctcgatctgtgccgttagtgtttgatcaaacagcccctgtcgcatactgattcgttataaacaagatctaatctggagcgtcggttagtgatcgggcggatgagacttattgataccccttcggtagcgtgaaattgtaaaagagaccctagattatttaagaataaacctgcagtccgtggtagtatttgaactgtgcctggaagattttatgagttaaaccctgaactccctggaaattggcgcccagtccatagctcagagaaatcagttatttaaatttagaaaattgattttaatacaaaaataaatccagaaacttgtacaattcatatttgattcatttttagctccaaattgatccattccagttacaataattttgtttttaatattatttatcatctagtaact

SEQ ID NO: 41286 - DNA, 1439 bp, Zea Mays
aacagctgcctcatactctgctgtgaagttgtgttgaatgttgcttgggcattgtggatggtgatgatgttgaattgaataatcttcatcgacagataattcataaagaagcatatgttggacaatctaaagtgaagtcagcagctgatgcttgccgtgatcaggattaattcctctatcaaggtagtagagcatcaccatactctgaagccatgcaatgctttggagattgcacggaaatatgatatagttgttgatgcaactgacaaccttcctactaggtatatgatcagcgattgctgtgttttgctgaacaagccacttgtatctggtgcggcattaggcttagaagggcagttgactgtttatcatcataatggaagcccatgctatcggtgcctctttccaactccaccacctgtggcagcctgccagagatgctcagacagtggtgtccttggggttgttccgggagtgattggttgcttacaagctctggaggctataaaggttgcaactggtgttggtgagcccctatgtggaagaatgctactatttgatgcactctctgctcgtattagagttgttaaacttcgtggaagctctccagattgcacccattgtggcgaaaactccgttttcacagaagaagactttcagaagtttgactatgagagcttcacacagtcaccaatgtctgataaggcagcagcaagcgtgaacgtactcccagagagcgcgcgtatcacttgcagagagtacaagaaactggccgacgatggtgaacctcatctactgctggacgtacgacctgcgcatcacttccagatagcttcgatctctccgtcccacaacatcccgctctccatgctggaagagaagctgcccgcgctcgaagcctcgctgaaggaagcaggggaggggtcagccttggttgtcctgtgtaggagaggcaatgactctcagagagccgtccagcttctccgcgagaagggattcgccaacgcgaaggatatcatcggtgggctgcaggcgtggggacaagacgtcgatcctgatttccctgtgtactagcgagatggaaatggatgcactaccttgtaacagtttggatgccgctagaacgagaactctgatactatgatttgagtactaattttgccataccgtgtacttgcaaaaacaaatatacaactggtatggacacggtattgtgatgaataatgccatggacaaaataaaatttgagtgatatttttttgcaggtttaaatttttagctttgtgtactacatttacgattttgtaatgattgttaaaacattgcgacatgttgagttaactatattttggctaaaggggatgcccgaaccccaggacaccaatgaattattgttgtttcaatccagagggcacactgctctgttccagttaacaggc

SEQ ID NO: 41287 - DNA, 2676 bp, Zea Mays
ctgatttgtgatacacaccgaaaccaaggcgtgcgcccccatggctgtcctcggcaccgcggcggttgaggtgctcatcccggtagcggcattggttggcatcgctttcgcgttgttgcagtggtatgtggtggccagagtccccgtgccttcgcacgccggcgaggacggcggtggaggaggcaataagaacgtgagggaggaggaggagcatgtggaggaggacggcatggactaccttctcgtggaggcccggtgcgccgagatccagcgcgccatctccgtcggcgccacgtcgttcctgctaaccgagtacaagtacctggccgtgttcacggcggcgttcgcggtggtgatcttcgtgttcctgggttcggcgcagcggttcagcgcgcgccctgggccgtgcgcgtacgacccgtcgcgggagtgccggccggcgctggcgaacgcggccttcagcgcggtggcgttcctgctgggcgcggcgacgtccgtgctgtccgggtacctcggcatgcgcgtggcgacgttcgcgaacgcgcggacggcgctggaggcccgccacggcgtggggcgcgccttcgccgccgcgttccggtcgggcgccgccatggggttcctcctcgcctccagcgcgctgctcgtgctctacgccgccgtcaatctcttcggcctctactacggcgacgactggggcgggctctacgaatccatcaccggatacggcctcggcgggtcctccgtcgcgctgttcggccgcgtgggcggcggcatctacaccaaggccgctgacgtcggcgccgacctcgtcgggaaggtcgagcgcaacatccccgaggacgaccctcgcaaccccgcggtgatcgccgacaacgtgggggacaacgtcggcgacatcgccgggatggggtcggacctgttcgggtcgtacgcggagtcgtcctgcgcggcgctcttcgtggcttccatctcctccttcggggcggagcacaacctcacggcgatgatgtacccgctgctcatcagcgccgtgggcctgctcgtgtgcgcgatcaccaccgtcgtcgccaccgacgtcaccgaggtgaagggctccgacgaggttgggccggcgctcaagcggcagatcctcatctccaccgtgcttatgaccgccggcatcgccgccgtcaccttcctcgccctgccgcccagcttcaccctcttcgacttcggcaacgacaagcacgtcaagaactggcacctattcatctgcgtgtcggccggtctgtgggcggggctcgtgatcggctacgtcaccgagtacttcacgagcaacgcgtacggcccggtgcaggcggtggcgcggtcgtgcaggacgggcgcggcgacgaacgtcatcttcggcctggcggtgggttacaagtcggtgatcgtgcccatcatggccatcgcggcggccatctacgccagcttccgcctggcggccatgtacggcatcgcgctggcggcgctggggatgctgagcaccatcgccacggggctcgccatcgacgcctacgggcccatcagcgacaacgccggcggcatcgcggagatggccggcatgccgcaccgggtccgggagcggacggacgcgctcgacgccgcgggcaacaccacggccgccatcggcaaaggcttcgccatcggctccgcggcgctggtgtcgctggcgctgttcggcgcgtacgtcagccgcgccgggatcacggcggtggacgtgctgagcccgcgtgtgttcgtgggactcctcctcggcgccatgctcccctactggttctcggcgatgaccatgcggagcgtcggaagcgcggcgctgaggatggtggaggaggtgcgccgccagttcgacaccatcccgggcctcgccgagggcctcgccgtgccggactacgccacctgcgtcaggatctccaccgacgcctcgctcaagaagatgatggcgccgggcgcgctcgtcatgttcagcccgctcgtcgccggtacgctcttcggggtcgagacgctcgcggggctcctcgccggcgcactcgtctccggcgtccaggtcgccatctctgcctccaacagcgggggtgcatgggacaacgccaagaagtacatcgaggccggcttgtcggaggaggcgaggtcgctggggcccaagggatcggaggcgcacaaagcggcggtgatcggggacaccatcggcgacccgctcaaggacacctccggaccgtccctcaacatcctcatcaagcttatggccgtggagtcgctcgtcttcgcgcccttcttcgccgcgcacggtggcatcatcttcgaccacctctgatcaatgcatgctgctgacgttccatggcaaaggcgccggctgtcgccgcaagccgcctctttgaatttgccgtgatcagttagtaagaataatcgtcgtgtatgtagcctgtaacaagtaatgccagaccaccagagttggaggcttattcatgtctggccctcttatcttacccttgaatatgttgctcggtatgctgcaactgcaatacaaagcgcgaacactagtcggctagtcgctggtctctcctgcctgctaaagcatcgcgcaactacatatgctgctagagaagtgacaagcctaacctgagactggttcataaagaagtgagaagattt

SEQ ID NO: 41288 - DNA, 2218 bp, Zea Mays
ctactcggcccagcgcaccgctcggctccccgccaccgccgcagccgagatggaggacatcgaggacgtgctgggcgcggccggcctttctggcggcggagcgcctccggggctccgcctcccgctagccgccgtcgcggtgaagcccaagcgccggtcgtccagggtcgcacaggcgccgcctcagcccgaggccgggatccccggcacgcagacgatttacgtcaagacattcgggtgctcacataaccagagtgacagtgaatacatgtcaggtcagctctctgcatttggatatgcgatcactgaagatcctgaaggagccgatttgtggctaattaacacatgcacagtgaaaaatccaagtcaatctgcaatgacaaccctcatatctaaatgcaagaatgcgaacaagccacttgtagtggctggatgtgtaccccaaggaagccagggcctcaaggagcttgaaggtattagtataattggagttcaacagatagaccgggttgttgaagtggttgaggaaactttaaagggacacgaggttcgcttgttgagtcggaaaacattgccgtcacttgatttacctaagacaaagcatgctcgtggccatttgggaagctatactattgacagcttggtggatcgtgtgaaaactgtcgtctccgaaggtgtccgggagatctggttgagcagcgaagatactggtgcttatggacgggatatcggtacaaatcttccaaatttgttaaatgcgatcgttgcggagcttcctgttgaccaaagcacaatgctccgcataggcatgacaaatcctcctttcatactagagcatttgaaggagatagctgccgttttgtgtcatccctgtgtttactctttcctccatgtccctgtgcaatctggaagcgattctgttttaaaggcaatgaatcgtgaatatactgttggcgagttcagaaaggtagtcgacactctgtgtgagcttgtccctggaatgcaaattgctacagatattatctgtggctttcctggtgagaccgacgaagatttctctgagactgttaacctcgtaaaggaatatcaattccctcaagtccacatttcgcagttctaccccagaccagggacgcctgctgctaggatgaagaaagtaccaagcaacgaagtgaagaagcggagccgtgaattgacttcagtcttcgaatcgttttcgccataccaaggaatggaaggcaaagtagagaagatctggatcaccgagattgcgtctgatggtgttcacctggtcggacataccaagggatacatccaggtgctggtaactgctcctgatagcatgttgggaacgtccgcggacgcgaagatcacgtctgtcggacgatggtccgtcttcggtgtagtggtagaaggatctgttgcagtcatagaagcaccaatacaaactagtgccgaactgcaggaggaacacgtacagaatcaggtggaggaagctggttgctgtgccaccgactcctgtggcgcctgcgcgtgctccaatgaggcgcaaccgtgtggcccagaccgatgtggagatgcacttcgtgccccgcagacctgtggtggtgacgttgttacaactcgccaggaggcactccagcctacgctcgtgaggagaagcgtagatggaaccacgaaaggaagcgacagtactgcggcgcattcagcagggaaggaacagcgggtggaagtagtgactaggcgtggggtagatatcgacacggttctgtggtgcggtttggccgcgagcttcgctgtgacggtagccctgcttgcactcctcaccagcaagattttgtcgacgacatcacactagggctaataaggcgaagctttgtaacttgtggtttggttcttgagcgtgtcgctggatcgattttggcggtctctttctttacttgatccgcctgtatgtcgttgcaaaaaactgtgccactgtatacaaaaacacgtggttgcaaacaagttttctcgttgctttcgggtgctggctgcatcaatgatcagggttccatgaaggtgaagtacattatgtgtgtttgccaccgtgctaaaaatagccgaaaaggggagcaggtgctgccaaacgaacaggtcggagaaacgattgagcaggagggaaccagacaacagcagcaaacagactgaagcacaaaaaatcggaagaataaaaaaa

SEQ ID NO: 41289 - DNA, 1950 bp, Zea Mays
tgcctcccgcgatctcgctcgtgatattccagccccgccgccgccgtccccgcccccatccgtgacaccccaccatcaccgccgcgccacgcgcgacaactccatcccccgtccgcacccctaccccgagcatcgcagcgcctcccgcacgaggtcgttgcgcttgtcgatctgatggcggcccatggcaaaggagcaggtagaaaatggccgatgccgaggatatccagcccctcgtctgcgacaacggaactggcatggtcaaggctgggttcgctggcgacgacgccccgagggccgtcttccccagcatcgtggggcgcccgcgccacattggtgtcatggtcgggatggggcagaaggacgcctacgtcggtgacgaggttctgcaaaccgatcatgacaaaaccaaaggtagctttgaagccgcagactctgtctccacaacctgaagcccaagcacctcatgatcctcaaacaccagagcaacaacaaagcgggactggtgtaggcgtgtagctggtgagccgggtagtgaaggaggtgtgtaccaggcctccagtgagcaaatgggcatggtgccggatgcatctgcggccggtggcaggaaggtcgagctggatggggacatgcgatggacatcacagaacagaagacgaaatgaatcgcaaggggaaactaacatgcgagagaggaggagctagccacaaccaaagagcttggttcaatacttcaatggctagaataatgaacgatatgaagatcaggtagcattatatatgtcaataagaagcagaggagagaagcagcccacatcgcaggagacaaggacttcacttgtttggccagttcaggacttcaggatgttgtcgatgatgtccatgctatattccctcgcttcatgcttaacaatgagggagagactaagtgaggggctgaaggccgttggtgctgtcagaatgtttttttggagttttggtggatgatgctcagtgactgcaatgcaaaggatccttctgttttgtatattgaatgagattacatcactgtttttttcttagcgatatgttgagctcatgtgctcgtttatgttagtcgatctctggctcttgtagtaacttggaaagcttgctgctttttttaagggcatacatgcctgtgatgtgtggtcatgatcatttttttctcctgttattttagttgtcgtatcataaatgccatgtttgcattggtgttccaacatgtcaatattattgaataaatgtttgcattggcggcagcggggacgacgctaagtcgagcaatggcgaagcggcccgtggtggcagtaacggtggagagaagcagggggatgaatccaacggtggcgggatacttagcgctgtggcttccaggattggcgtggtcgtgtccagcgccaacggggaccgcagcggcagcgctgaggatggtgccaagacgagcgctggcgacgctggtcacggtagcaagggcgaggagaaggggcgtggtgtgaacggtggtagaatagtcgagcagatcatttccaatctgccctcagatgatcaggcgcctgatgccgatgaagcttccttgctcatcgccattatcgaagattagctccatgttccgaaggctctctaggtcgtcctcaacgccaggatcaaatcatcagctgagccggagactgaaaacaataaagaaaagcaagcagctggtcatagtaaacatcatgtagcgaggcttagcagattgcttttttttcccgttagaatcagtccacatgtcctcgacacgggctagatttgttctaggattatttttccagtagtaagccatgtatccatggacagtccacagcgcgacgtctaatgtaacatcatcaaggttcttttgactatcccataagaaaccattccttaagacaaccgatattgtgagttgataacc

SEQ ID NO: 41290 - DNA, 1422 bp, Zea Mays
tgaactctgtaattcctttcctcttccccaaggccaactacttcagccgccactctgctctacttctccgttattctcgttcttattctctgtggagtgatcggagttgctaacaccctcacatggacgcgccccctgctcgtgatctccccaggaccgagcgcccctccccaactctcctacaccctcaagtcgagtgggctctctccatgggtgaagcttaggcgccgatgctctccttctctggttcgacatgtcagcttggtgccctctctcccatgcccgatcctgaggtccctgcctcgacctccacatcggcctccatggcgctcttctccctgggcacccagacgtgtgcgcccccttccctgctcttgccgcggcgagctccttccctccaagcaccagccctggacgccaggccgcaggccatagttcccgtgcacttgtccgcagccagaaaaactccccgtgggctctggaagtgcccagctcgcgccggagcgtggcgaggcttgactaacgcccagccatggtggctgtaggctgagcagacccctctgctccagccatggcgcggacctcctctggtccgagctcgagcagtgaactctccgtggcgccttcccctgcaatttttccccttcctcccctctacttctgtggcgctcagcactcctgccacaggacgccgagcaccctccccacagatcgctttttccagctgcgccggacactctgtgatttggccgcgtcgcgtccaggacttccatggctgcctccctggcgtacctcgcgcagcagccgcgacgccagttcgcgcagccacgtgaatctcctttgcgtcacgccctcggcgtgctcgacataatgccgcagcaagcctgcagcagcagccccggatcccctccgcatcgagagcagccgcgtcgtcgatccgtgcaaccccgacgtctccgtgtcttgcttcgccgtcaatctgcgcagtccccgtcgcgatgccgtcgaaacccgcgccccttgtcattgtcgcgcttcgcgcgtcgtttctcgacagaaagccaaaccaacatgcacgcatgcacaacaccaatcggatttcggccaggttgttcgatttagaaaaattgtgttttttgttttatttacgattcaatcgatggcgtgaatatgtgtgtgaaaatataattgtatgaatgaacgcgtgtagagaagaaactgaagtagaaaagaactcggacatttttatattttgataggaaaattatgcgatgcgttgtttgatgtgaaaaactaagttacaaaatgtggattatgttttgggaaatgcatcgatatgtgtttatgtgaaaagtataattgttctatgcaatgtgctgggattcgtgattatatcggggatatatttattgatgtgacgag

SEQ ID NO: 41291 - DNA, 247 bp, Zea Mays
ttccggtctgacatgcataccataccaccattaaagaagtccacgtgacagtatacggcaaggccttttttcctaaaagaaaaagaaacatagacgacgacacgacgactgtctagtgtctactaaagaagacaaaagaagacagagctgagtcatcaccccctactggcacgtcgcattagctcttgcgtatgcaaatacgccatactcccgtccacacacactggctgaggcatgtggttctgcc

SEQ ID NO: 41292 - DNA, 634 bp, Zea Mays
cacggtcacggagcaccagttctggtgctgcggaagcagccatccgcgcccaggctcgccctcgctccatctcttccctgacgcgcgtcctccctgcgtcgcgcctcgtgctccgtgcgcgtgctcatctccctccacgccgcgcgcccctggagtctcctcgccgtgcgtcgctgctccatggctggctccctgagctcggcccctggcttctatgctacgcgcgcgcggtttcctctctcctcccttcatttctcttcagccgtcgcgccctagttctctgctcggccatggaggtcgcggttccctgatctcctgctcgcctggccacgccgagctccatccagggccggagtctctttgctcggatttcgtcgggcccgcgagctcccctacgcgctcgtactccagctcggttttccttcaccgcggctctccctgacccagcttctctctccccatggccacggcacccctgctccctggtacagcgcgcagcttgcctgctcggctgtagccaccgcgcgttcccctgccctcggcttcctgcatcgcgtggtcgcacccctcccttgcttctccagctcgaccgttcctcctctcttttcctgctaatcgcgcgccatggtgttct

SEQ ID NO: 41293 - DNA, 2542 bp, Zea Mays
tttgcccttcctctatccatcactcacgagcgctccaacatcggccgtgatggcggcggctgcgccgtcatattcggcaacaacaactgagtttggagccacgagatctttgtcgccggcaacagtcccggagtcgcccaggttcggatccatggaggcacaaatcactgcatcggccacagatccgaagtcgcctcctcgtccttccttcgctagatgttctccttcgccggcggtcttgttgctagaggcgcccccgacctgtgcatccgtttcaacgccaactcctccaccagtcagttcaatttctacagcctatggtcatgctaactcattcggagtaggtttagaaattgattgggattcaattcagctagaccctagatgggaggaggaagactacaagaagttgttaacgtggaagtggtgtatgatacactgggcctgacaaatgaggtgatgggtggaaccaattgtgatggttggcaaaacgattatggtgatgcaggggcagctatagaatgcaaggacattgacgatgacattgtaatgtttgatatgaaaaatccagttatgaggcttggtaacatatatatatagtagcatgaaggagtttaggctcgcaatgatccaatatgcaattaacaaggaatttgagctaggcattgaagctactagtactcgaaggtatagaggttattgtaaaggggatgattgtccatggagtattcatgccagaaaagaagtagaagaatcgcctatcatcattgttactgccatgacagatatccacacttgtacatctagtggtaggtgaaggacaaagacacctactagtggttgggttgctgcccaagcaatacctctcttgaagaagaaacctggcatgggagccaaggagttgcaaaatgcactacatgacacttataatgttcagattgcatatctaactctttggagagggagagagaaggctttgtatgagttgtttggtagttaggaggatagtttccaactttgttctcttggaaggaagctgtgttggagaaaagtttaagaaagcttacgagggaagaatagagcaactaggagataagtctttttggccaaaagtggagatggcaaatgaggtgggggcaccactgggtaggagaggtgtgggcagacaaaggaaaaatagaatcaaaggttgcctagaaggcggtaggggcaagaaagcatgtgcaaacgaaactgtaaagcaatggaaggtaattcggggacaataaggatgtctttggtttgaagtcaaagtaggatgaggcgggggcgacaccgtcccctcaattttttgggatcacgccgtcaccaaaaaattactccggtatttatttcaccccacgtgattctcatccaaacactatagaaactgtagccatccccttccatccctccttatacatccaaccaaacacaccctaaatgtttatattgtggggagctaggccacaagaagaacagccctaaatgtcctttaaatggcacgaagaagaggcgtgtgttttatgtgttgatctttgttcctgtttcctgttctgttttttttttcaaaaacttacagctggtgtgtattcttataggccaaggaagcagcgacataactctactcaaaaatggttttatgtgttgatctttgttcctgtttcctgttctgtttttttcaaaaacttacagctggtctgtattcttataggccaaggaagcagcgacattactcaaaaatggtttcctcgcgacgacagatttacacaagaacctagaacaccgcatttcgacaaagttatacaagaccctggtacaccacatgaacagccatcgtcttcgcagccacttccaagggtattgataaaaaaaatcactccaagaaagaggaagtcggttccactaagcatggacgagatgtagtatctgttagttgtatcatccatgtgttgtcagcatgtgactgcagacatgtgccatgtatcagacttattgtatcagactacgttcagcctactttggaagtctcaatgccctgggaaaagaagaagagagccacgagaaaggaaggggcaaaactggaagtctcaatgtcgctccctggttaacgcccagcgttctcagttccaaatgtgaaagaacatcagctttcaaccattgatagtcatggatctcctcctcttggtggtggtactatcacaggcagcaaattgggtagataatggtatggtgaagaggataagggatgtttcgttctccaggagagtatctccatagttggaaagccacattatatatgatgcacgtgggtttgggatccacttgtggaattttgttttatcatactttcctgtgggttttggaatccactatgatactagcaacaggctagacacatgaatctagagaatgtttcccacagttcgtattgtgcctaggggaaaactataaatggaaaaggtgcaaaacagaaatttgaaccataagactaatttatataagcctagtagtaaaagactcc

SEQ ID NO: 41294 - DNA, 1094 bp, Zea Mays
gcggagagacaaaaaatggaaccaaacatctacacgatcatctcaagacatgtccataccgtaagagcaaaatgaccggacaaagcaagacatttagtcaaagctcattgaggtttggttgtcatgatacagggaaagtgtcagtggagaactatacttttgatcaagaaattgctagaaaggagcttgcatctatgatggttttgcatgaatacccattatgcatggttgatcatacaggatttagaagatttgttagagcaattcaacctttatttaaaatggtgacaaggaacactattaggaatgacatcatgaagcaatatgagacagaaaagaagaaagccattgctttcatggcaggaaataactctagggttgctatcactattgatatgtggactgtagacaaccaaaagaaaggctacatggctatcacagcccattttattgattaatcatggaagcttaggagcattgtgatgaggttcatttatgtgccaagtccacatactgttgaagttattgctgaagagttgaatgaatccttagttgcatggaatcttgatgagaaggtatcaactccgactgttgacaatttttctacaaatgataaggtcatagacttgttagtgagaaagatagggaaagataaacttatgttaaagggtagcacattgcacattcggtgttgcgcccatattctcaacttgattgtgaaggatggtttagatatcatacataaggctattgaaaggattcatgatagtgtagctttttggacagcaacaccaaaaagagttgaaaaattggaagaaattgctaaatttgtgaaagacactataactaagaagttgtgccttgattgcaaaacaagatggaactcaacattcacaatgcttagtgttgcccttccctataaggtttttttattcatgttgtgcgtgttgagaaacaatataaatgttgtcctagtgaagaagaatggtcatttgtccatgatgtggttgataggttgcgtatgttttatgaaatcacataaatgttctctggaacccaatatgttactgctaatatcatgtttccaaagattt

SEQ ID NO: 41295 - DNA, 1270 bp, Zea Mays
atatttgttgtgcaagaaagccttggaacatattatgctggcattcgcctatggtgtctgctgaaaatatatggaagctgttatgttggaccttcttagaatagttgggcatcacaaagcaaggcttgctacccaaattcgaacagttcagaaatcatatggcaatgcagacttcgataacattccttttggagaggacatgtatagtcgagtccgtggccggccacttctgattgatacatctgcaaggatcagtgatgacaaacccaggcctcgacctgtatcatcacgtgaggagcagaaagtcaagacaaatggctcggtagatattaagtccagttcccctgaaaatgctagttcaagcaactctgaaaagcaggaaccgaaaaaaatggtgcctgaagatactcgggtgaagaacattaagggtgataatgtgatgccagtaacaccatctttagatcctgctacgtcaacttccaaggctggtaaagggaagacacgggaaccagagcccactgagcggcaaggagatgggtcagtctcggtggctaatccaaagaaagaatctagaccagtttttgaagataacattgttctgggcgtagcccttgagggttccaggaggacactgcctattgaagaaggaaatcctcatctatcactatctgagactgaggtggacaccgaagaggcggcttcatcaccgaaggataagataggccaaagcccaaaactttgaggtccagaaaaaaagccgttcagaggaatctcgataggtcatccgagttcaaactgtatccttgtgaagatttgtcaccaagcctaccttttttgtgcgcttgtgcaaatacaatgccaccacacatcagtgttgtatgcttaaggggtaaattcacactgacgattattcagggaacattacctgtcagtcgtattgctacaggcttgtaaagaagcaagtgcttcaataggcattttgtaaagattatattattgctcatttaagtggcttcttgcatatgcatcggcaattcagcatgcgccgttgcaactgtcatctcggtttccaggtttggcttacgttagttttgtttccaatgccatctgctgcgagctgaaatatcatcgtctcttttcctttttttttttttacaaaagacacgctaagtcgtggagacggtgaattcttccggatggcgtctcatcttgcagacgactaaaacggaataccgcgattatcgaaaaggaaacggaataccgcgcggcg

SEQ ID NO: 41296 - DNA, 603 bp, Zea Mays
ctctgggtcgcgccctcaacatgctcgatgatatgctacaacgagctccacctcgatctatgccgtcccggcatcgtcgcgcagcgagctccgtcgtcgatctgcgcaaccgctgttcggttgttgttccgcctccgtcgacctcctccatgcacgagcagcagcagccccgtgatctccgcgtcgcgtgcgccgatccgatccgcgcagccccaacgtgtcgacgtcgtcggctccatgatttttgggcagcccggttgcggtgtcgtgaaacccagaggaatttcatgtgtgtgaagagaagcaaggcacgtggcgcttgctaggtgtcaaatagaaagaccgaacccaaaccacaactcagcctccacagctcggcttccacgcacatcaaattccacggcttccacgcctagtgaagttactattcagatattgatcgaaccatgaagaagttaactgggtgttaaaatatctgaagtaccaaccatgaagacaggagtaacacttccaaggtctcgctcgccctcgatccgattcggagcctttttctagtaccgctggacacgtgtttttttgttgatcggagctgtgggggatcta

SEQ ID NO: 41297 - DNA, 1818 bp, Zea Mays
tttttccttttatttttgtttgtttggattctctatatttttttttctattgttatgcatcctttagccaaatatcatcttaaacaaaagatggaccaagccaagagctaacagttctgtgtcttgtaggtgcagaggcatcttctgaccaatgaaaatggtgaaaccaggtagagtatctgactcaaagataacaacgtttacatgcagatacaagacaacaatatcattgttctctgaacacacatgacctccattgtgacccagcctgtgatgtcttctcgtggtcattctcaagctggctgaagttccccttctccttgatcagctggatgtggtggtgcttgcagtacagcttcccctcgtgcgcaatgtagttagaagggctgatggtgcaccctccatggcagcacttgaagcagctcttgtggtacatagtgttattaacagtgacctggatgcttaaccggttgtcaagtgaagaaggctcaaactaccggaagaatgattgagatggttgaacacagaatcttaccctctcagttggatagactgtcttgctgcatccaacacatttctctctggtgccagcaaaggcgcttgagactttagtagcattctgccaaataatatgcaatcatgatgagcatcatctagtgccagttgttcataaagaacaaaacatgaatggtgtcaactggatgggtgatatgaaacatgtttaaaaccatatacagcactgatctagtcatatacctcatgaatatcaagttttttttttgtgatctgttaaatatctggtgttctgatctttttattggacaagatttactctgttctgatccaagcataacagttaggttttgagtggatctttctctctctaaccattgggattgctgtgcattcaagatccaagcatctcacatcatgtttaaggagttgtttgtgcatcaatgattgaatgtatttgtttcctgtgctactctggactgaaaaagtgaaggaaaaaaatgcaaactttgtaggcactgagaaaaacacataaacacatgaatattaaggcgttgcatatacctcattcccaacgtttctttctggcttgacaaccttcggagttcctgaagccatttgtaggtgaggagacacgcaagaacaccactggatctatttcgtactgcaaagggaaggggggaaaacgatgataccttcgaagctcttgtccaagctccctgtcctcttgaacagctggtcgaagtgaggcctgcagtagagcactccctcgaaggagttgtagttggcgagctgcggcggagaacatacatcctcagacgcacacacaaaccaatgctggtctcagctttgcagatgaagcatgcaggtcgtggtaccttgagggtgcccttgcagtggtggcagcggaagcaggccttgtggtagatgcggttgtcggcggtgagcttgtccacaaggtacaccgtcttgtcgcaggcggtgcacttggtggtcgtcccctggaaggaggtcgccatggccgccgtcgtctctcttccaacgacacactctgcttacggaggcgaggctgtgtagccgatggctgcctatatgggaactgtgggttggttggttggtggtggtggtgagctgcagccgggtattgataccgctaggtaggcaggacacagctagctagtgagggagaatgttgggggtgtcaccgtgtcaggcatcagccatgggaaggagagagagagagagagagcatacgaggtggaggtgggggtcggtcctgcacgaatgccgccataccaccatgat

SEQ ID NO: 41298 - DNA, 631 bp, Zea Mays
tcggattggtaggtcggaacaattccgagccagattacttctctaatttatataaactttgattaaccggaacgattccgggtacaatccgatgtaaacgaacaaggccttaatggaatccacgcgataaggatttgacgacccacataacgccttctccacccagccacgaggtgagttgccgcacgtgccgcgatgacgaagcgccagcgaaccccccccccccccccccccctgccccacaatctaccgcccaaacccagatacgaggagtgcgggttgatgtggatgcaacggcgagtttagaggagcggccaccaaccggaatcacgacgatgttggcggttcttcccatctccctctctctccagttgttcacgatggctcaggcagggtggcgacactagatcttcatgcaccggggcaagggtcccgtagagcacatatcgggtcgtgcgcggattcccagcggcgggcggatttcactgccatggcgacggcgaacgagcggaaccacagcggcggcacccttccagcacgctgcatgcccatggcgatgaggttcatcgagaagctctcgactttggtgtagatcgaaagggaagcacggctgtcccatatatagcccgag

SEQ ID NO: 41299 - DNA, 1549 bp, Zea Mays
agaggatttctattgtagaaatgcagttaggcccattaggttttgcccttttttttcagactcggattggtccgccctccttgtgctccgccggcaatggcgtccaccgccgtcaagctcatcgacatcgcagtcaacttcacagatggcatgttcaagggcatctaccacggcaagcagtgccacgccgccgacatcccggccgtactcgcgcgcgcgtgggctgcaggcgtcgatcgcatcattgtcaccggaggctccctgaaagagtccagagaggcattgcagatcgccgagaccgacgggagactgttctgcactgtgggagtgcacccaacaagatgcggggaattcgaggagagtggagatcccgagggtcattttcaggcactgctggctctagcgaaggagggtttagataaaggcaaggtcgttgctgttggtgaatgtggtttggattatgacagacttcagttctgtccggcagatatgcaaaagaagtacttcgagaaacaatttgagttggctgaagcagtaaaactgcccatgtttcttcacatgcgtgctgctggtgaagacttctgtgaaatcatgacacggaatttgcacagattccctggtggggttacacattccttcactgactcagcagaagatcgggacatgctactttcttttgagaagatgtttataggtgttaatggttgctctctgaaaactaacgaaaatcttgaggttctacgaggcattcctgtcgagaggttgatgatagaaacagattctccatattgtgacataagaaatactcatgctggaagccagtatgtaaaatctgtctggccatctaagaagaaagaaaagtatgagccagattcaacagtaaaaggtcgcaatgagccttgtttagttaggcaagttcttgaggtagtggctggaagcaaaggaatttctgacatagaaggcctgagtagaactctgtaccacaacacatgcaggctcttctttcctcaagatcttgacgcttctgctaatgcgcagcttgagagtgttgcggcggcgtagggcgggggtaggacagggcgcccacgcggtggcggaggccgacatggtggcgctgcaggttctggaaccggaggctgagaagcggggcaggggcgtaatggcggctgcggtggccatggccggagcgcagagatttatagaatatgacgaatattgaataaattattcactatccaggcgtaggggtgggcattttaaaaccgaacctgaacccgaaccaaacccgaatagaccgaattgtcggtctattcgggttttcgggttcgggttcggttcctatatgtgctatatttcgggatatgtgttcgggttcggttcctaacctttaaaacccaaatagacctaataacccgaaatataaaaaagctcttaatatgtgatggtattattatatgtatgatttataaacttagtagcttgaaataatgatatcatcttaacgatagtatatatatctttgtatgctattttttatagtcacttgtag

SEQ ID NO: 41300 - DNA, 603 bp, Zea Mays
atttcagcaatgataattccatgatctggacatctgattaagaagttcagggatgcacttgcaaagcacaaagcagataaatgtagccttggcccaacttggggactagaatcagaactgttggccctagctgcaaacaaggatctccaaggagacactactggtttcaagcatggaagacttcgcggaggtcaggaccgctgacaagccaaggcttctgacatcactgatgccataggcaatatagggatatgatggcatgcccttggtctcatccgagagatgaaatgtggtgatcgccacttcctttattcacgtgcagttcttcactattctttgtgtgtatagtttgtttgttccttttcatagtcgcggggtgtaagcttccagatttttacttgtgaagtctgcccacactggctgctagaaatgaaaaaatgtgttagcagtagcagcaacaagcgttgtgggcgtttgatcttctggaagtcgtgtggtggttgtatgaatctatctactccggtaatgttgcatttcataaatcactgcacatgagtttctcttgttctttatagtgaaatgaaatggtatggtggctttgtg

SEQ ID NO: 41301 - DNA, 1774 bp, Zea Mays
ctttacttgaggctgctgcggtgttgcccacagcctagcctggtcccgatagtgcgagagtttcacatcatcaacaaaataccgatcgcccgaccccttcagtgccttgactcacgcccgcggcaaccggcgacgaggcggcacgaccctccagtccggagtccgccatgcctcacgccgccgccaccgccgctgcggcgctcccgcgtgcctctctgctcgttatctcggcgccgctccgcgactccctcgccgcggcgccgtacgagccccccgcgggcgcatccgcctccgtcaagtccctcctcgcctctctcctcccttcgccttcccctccccagccccagcttcaggagccggcgggtaaggagtctggggacctcctcctcttctgcgctgccgtactcgcggcctccccggagtaccccgcgctgcactgggtcccggcgagcctcgtgggcgcggccgccgccgcggtgaacgagctggcggcggcgggaggttggggcagcgttggggatatggtggtggccgtggcaccggaggtggtgcctcctctcaaggccgtggtgaaggactcgtgcgtcgatgctgacagcgacgagattggggctgtgaagccgcccaaggagcacgcagcagtcgccgcgcaccagttccggtggctggtgtctcaggtaagctaccctaagctcggggatttgtgttcgttagtcattccatgtgccctgacaaccttagatcattggtcaccagaagttaaggtacagggaatggtaagctttgtacacatagcgaagaatgtgaaagcaacggaattaagtttgtatgaagatgccatacttgatgcgtgctgtcagaacattcctgcagatgatgagttatggtaccaggttattgaggtatctgtgatgttgctgacattcacccagcggagcaatcctcgtagcccctggtatgatcgaatgcttagtgagatgttgggccacctggaacggcagccactaaataaagagcgtcgtgttgcatggttgacccttattgggccagtttttgatgctatgggcctcttcctgttggcacattttcgccgccttttctcactgtttttccaatggatgcacactgatgataataagacagttcttctgactttaaagcaaatacatgccattatcaagcttacctggatcaggaagtcaccttatactttgaggctggtggacgagcttgttctattatataaagaatcagccacaaggagcaaccgtgaaatcatgcgagatcatatcctggagatacttgtactgcttcagaactgcaagggacatcaatttgaggaagcttggaagaaacatgaactagacccagacttgacgatgctgctgtccactttcaataagctttgtataaaaaacagttcaccgtgatgttgagttcaactacatgtgttatcagtgtaaatatttcaccatcgcctatcctgtcactgaatatttcactactgcctattctgccactctcatctgctgaaggaaatcagccttgattcttgtggcagatccattttaaaaaaaaatctagtacctgtagaggcagctggacaaggtaatgaacaactcatgccttgtcgacagccttcttcctctgcatccgttctggtacacgcgtttgtgttctgtgtgacttcatcgtggattcagtgcagctgactgcactgcatgcaacgtgtatattttgctcacactcagtgtggctcacagcttgatgatag

SEQ ID NO: 41302 - DNA, 1551 bp, Zea Mays
atggccggccggggcgcctccccggccgcggcggccgccgtccaggtgcgctgcgccggctgccgcggcgtgctcgccgtggctcccggcatgaccgagttcatctgccccaagtgtcgcatggcgcagcgcctcccgccggagctcatgccgccctccccgcccaaggcctccccgactccgcctccctcaggtccaactccgcctccaccacctccaccttcgctgccgcctccgcctccgcctccgcctcagccagtgccgcaccctctgacccgccgctccgctccccgggcgcagggcgtggaccccaccaagatccagctcccctgcgcgcgctgcaaggccgtcctcaacgtgccccacggcctcgatcgcttccgctgcccgcagtgcggcgtcgacctcgctgttgacttgtccaagctccgccatttccttgcatctgctggcccaggcttttttccgcccccactcccacctcccccacccccgcaacccccagtgccaatgcctcatctgccctttctgccgatgatgccacgccttccattgcccatgctgccgatgctctctcctgctgagctaccggaggagatcaatgagcagtgcaacctccagaacctacttacaagttgactatcatgaaagaattggatgaaaccaatgcattatcttccttacagattgaaacaatagtgtatgcttgtcagaggcatcatcatcatcttccaactggagctagagcaggtttcttcatcggtgatggggctggtgttggtaaaggacgtaccgttgctggattgatctgggaaaattggcagcagggaaggcataaagctttgtggatatcaattggttcagacctgaaatatgacgctcgcagagatctggatgatgttggtgcaaaatgtgtggaagtgcacgctttaaataagcttccatattctaagctagactctaaaacctttgggatcacagatggagttgtttttgtaacttatagcagcttgatagcatcctctgagaaccgttcccgtttgcaacagttggtacagtggtgcgggtctgagtttgatggtcttctggtgttcgacgagtgccacaaggccaaaaatctgattcctgaggcagggagccagcccacccgcactggtaaagctgttcttgagattcaggatatgttacctcaagcacgggttgtttattgttcagcgactggtgcatctgagcctcgaaatttaggttatatggttcggcttggtctctggggagatggaacatcgtttgagaatttcaaccaatttttaggtgctcttgagaaaggaggtgtgggtgctcttgaacttgttgctatggacatgaaagccaggggaatgtatgtttgccgtactctaagttacaagggtgctaactttgatatcctagaatcacttctggaggaaagaatgatggatatttttgttagtatgattgctcattgacatgaagtagtattcttttaaatttaattaacttggcgagaacaaagtggtagaaactgaaaggaga

SEQ ID NO: 41303 - DNA, 3500 bp, Zea Mays
cgcaaacctacctatttcagtagattggttagagttttctcacttgaggatggcccatgtggtaacatctggggagccattggagtaccagtgagcatactacctgaggacgcaaacctacctatttcagtagattggttagactatgatggcatacttgtcaattctattgaggcaagaccagtattctcaaggccccccatcagaagcatttcaggttgacagctttattgctaaaagttaccacgaagacgtgaagatcagcttgggcttgaatcctaaagattttttaattgctattgttggtaattcattttcatacggtgataatttgatggaagaggcacttgtcttgcaagcattgagtcctctgttacagagatatcgctctgagaatagcgcacaatctgaactgaaagtaaagatcttcactgggaacataactgagaagcataggatggcccttgaggtttatttatgtcttcatgccctgtctgatcaagtgaactgttacttacagtctgagtgctttaaattgtatctaaccgtgtattagttttctgatttctgatagtctgttgctctaagtgttggcttcccaagaggtgcagtggagcatgttgctgctgaagataaggacaacctccttggtacagctgaccttgttatatattattcttgtctcgaggagcaattattccccagtgtgctagtccaagccatgagtcttgagaagctggttatagccccagaccttgcaattattagaaaacatatcaatgatggagtaaacggacttctgtttccaagaaagaatattggcatgttagctcaagttcttcttcgagcagtgtcaaatagtaaagtgtctctttcagggcaaaaaattgcttcagctgggaaggctcatgccaagaatcttatggcttctgagaccattgaaggctatgctatgctattgaaaaatgttgtcaagctccccactgatgcactaagccctttaactgctgatgagatacctttagctctgaaacaagagtggaaatggcacctatttgacgacgtgaagcatttacaccgtgtgaatacgagtttgtctggctacaagatactccagaaactagagcaggagtggcatagcaaccaaatggaaaactcttctttgagtacaaaaaatatcaatgacgcattctctgcaattgcctgggaggaacagagagtaaatgaggttatggacatcaaaagaaaaatggaggaagacgagttgaaggacaggaatgaccaacctcatggaacatgggaggaggtgtacagaaatgtgaaaagggtagagaggttaaaaaatgaattgcatgaaagagatgacaaggagcttgagcggacagtcttcaaaaggtcgaagaccaggagcggacgatattgatgcttcttctcgtcttccacttctcaataatgtttactacagagatattcttggtgaatttggagctttctttgctcttgccaacagaattgacagaatacataaaaattcttggatagggtttcagtcctggagagctacagcaagaaaggcaaacttgtcaaccaatgccgaatctgcaatcttagaagccattcaatctcaaaagcatagagattccttttatttttgggttcggatggatcaagatccaagaaaccacgctaataaagatttttggtccttctgtgacgtgatcaatgctgggaactgcaggttagctgttctggaggcctttcaaaggatgtatggtgtacatcttgatcgtgacctggatactctgttacatatgcctaatgatggagacacgtggtctgtgatgcaaagttgggttttgcctacacggtcattcctagaatttgttatgttctcaaggtatgggttttgtttttaggaatcttactgacaatcaagcaagtgttattacatgtataactagataaaatatgtatgcactggtttattatctgatgttatatgcatatatcaaacatactgtgaatgagcacttggatatagctgatctaagcatatttatgtcagcattgctagcagtatattgctaatgataatttggggttgtgtactttgtggaaaaattacctgttaaagcacagccttgctttaattgactcggggtccaaaaaagattagttttcaactagtatctggtcatttgatcatttcgaaggattatgttgttataacaggcatccagcatcctagatgtcaacaaggttaaagtctttttggtcgctatttgcttgcttacattgttctatgttcattccttttacctgataggactgtcatatgccatagaaattcaggcttttctatatgcttcattagggctagtttgggaactccaattccccaagggatttctattttcttaaaggaaaataaactaatttcccttggaaaaatgaaaaccccttagaaaaatgaggttcccagattagcccttagtgtttacattatgctgttgattttcagaatgtttgttgatgcactggatgcacaaatgtatgacaagcaccatcaaactgggcattgcatcttgagtctccacaaggaccagcactgctactcccgtcttctggagttgattgtgaatgtttgggcattccacagtgcacgacggatggtctatgttaatcctgcaactggtcaaatgcaggagcagcaccatctcagcggcaggagaggtcaaatgtctgtgcagtttttctcctacgccactctgaagagcatggacgaggagcttgcagaagagtttgacttggatcacccagacaggaggtggctctggccacaaactggagaggtcttctggcagggtctctatgagagggagcgtagcatgcggcagcatgagaaggagcggcggaagcagcagagcagagagaagatccagagaatcaagagtagagctcggcaaaagacgttggggaagtatataaagccaccacctgatgatacagttgtctcgaacgatacaacgactgtagatttatagcattttgaccatactttagggtgataattcttaccgtggaaaattttggttcattctttcattgttacggctaatgtcctcggtcctcactgagtacccccggcaggtgtgaatatttttggtcagttttatcgtgccctctggtgttcagggtgctttacaggcgattttgtaacatatctaggccattaagtttaaatttgggttcccgtagcgtagatgcttttgttcttttcgcttacgagcttctcaataacaggcaacagctgctccgcgtttgcagtctccttggtacaaattgagttgacttgattgtgtcagtctgtcagatatttggttgaacctgcgctattatctacgtttcggtgttgagaattttgttcaacatcctgtaacatgaaaaaccacattatatcttcgattgttttggtgtcttacacaaaatctgtcattatg

SEQ ID NO: 41304 - DNA, 834 bp, Zea Mays
agaatatgcagtgttcggcttaattactactacctaccacggggtaggtgtagtgttggtttcacaactttcactgcgagtagttgaatctcgacgaccatggccatgcatatgcatgcatgcatgagttctagacttgtagtacgttttacgatgcgtgcgtgacagatgacgaccaagattatattctactcagactattacacaccttcatcaaatccatgcatagagaacctctccaagaatctctagcagctagcagggtttcacttgtgacaccagaccacacgtacggtaattaataatcatccatgcacgacgacggcgaggcggaggcagagacagacagcgaccttccccccgttccctggccctctgcgcaacggggccggagcatcgggtccaccgcgcgcttctgcatgcatgcatgcatgcccgtcgagctacggacaacgcagcgccgcgtgggcgcccgccgcccaacccgccattgacaagccagcaccggcgccgtccgacgtgccgcgcccccaagcaacgcatgcagaagaagctccgatccgatccgatcccccagcagaagggatgccggccggccccgcgccgacgacgatgcccatgcgtcgtggctgctgcgggacgcacgcaaccgtggtggagtggaggccggcgcgcgtcaacgtccgtcgtcgtcgtcgtccggccccgccgcatcctccccccatttccatttgcttttttccccgatcggaagaggcctttttgggaggcagtggcacctgtgctcccccctgttgacctccggaatgctgtgctgggctggaggcattctcc

SEQ ID NO: 41305 - DNA, 5233 bp, Zea Mays
  misc_feature (1)..(2): n is a, c, g, or t
nnatatggctgataatggtgatgccaaagggggatctggcgcctatgcaattaatatagagaattttagtaagcggctgaaggtattctatgaccattggaaggagcacaagtctgatctttggggctcgtctgatgctattgcaattgctaccccacctccttctgatgatctccgttatttgaaatcatcagccctggatatttggttacttggatatgaatttccagaaacaataattgttttcatgcacaagcaaatacatgttttaagcagtcagaagaaaggaaatcttattgggaccctcaagaaggctgcaaacgaggctgttggtgttgacattgtgttgcatgtgaaaaccaagaatagtgatggtgctgacttgatggatgacatagtgcatgctgctcgtaatcaatcaaaatcagataagccagttgttggacacatagccaaagaggcacctgagggtaagcttcttgaaacatggataaaaaaattatctggatcaggcctacgactcgttgatgtaacaaacggcttctctgagctctttgctgtgaaggacaccacagagatcacatgtgtgaagaaggctgcttacttaacttcatccgttctgaaaaattttgtgattcctaagttggagaaggttatcgatgaggagaaggaagtctcacactcatcgttgatggatgacgcagagaaggctattctggacccactaaaggtcaaggtgaaattgaagcctgataatgttgatatatgctaccctccagtctttcaaagtgggggtaagtttgatctaaagcctggtgcgtctagcaatgacgagtacctgtattatgattcagcaagtattatcatctgtgcaattggttccaaatacagtagctattgctcaaatgttgctcggacatatcttatcgacgctacccctacacagaataaagcatatgagacccttaggaaagctcatgaagctgctattcaacaagtgaaaccaggcaatcagatgagtgcagtttatcaagctgcagtggctgtgattgagagggatgcacctgaacttcttcctaatctaacaaagtcagctggaactggaataggccttgaattccgagaatctggcttaaatctgaatgccaagaatgatcgtaggataaaaaagggaatggtttttaatgtatcccttggtttgcataacatccaggcagaaacaaccagtgagaagacaaagcagttttcactattattagctgatacagttttagtcaatgaaagaggacatgagatcttaacagcaccctgctccaaggcattcaaagatgttgcttattcgttcaacgaagatgatgatgctgttgctgctgaggttaagataaagtcgaagaccatagatgttatgccaaccaaggcaactctcaggtcagacaaccaggagatgtcgaaggaagagctcaggagacagcaccaggctgaacttgctcgccagaagaatgaagagactgctagaaggcttgctggggttggtactggatctggtgacggacgtggtcctgcgagggcttcaaatgagcttgttgcatataagaatgttaatgatgtaccatttgtaagagatttggtgatccaagtagatcagaagaatgaagctgtcctcttacctatttatggtagtatggttcctttccatgtttctactgtcaagagtgtgacaagtcaccaggacaaccgcacctgcactatccgtatcttcttcaatgtgcctggcatgccattctcaaatgatagcaagtttaattctcaaggtgctatctatctgaaagaaattacattccgctcaaaagatccacggcatagcagtgaagttgttcagcagatcaaaacattgaggaggcaagtggcatcaagggagtcagagagagctgaaagggcaactcttgttacccaggagaaacttcagattggaagcaacagaatgaagatgatgaggctttctgatgtgtggatacgacctgcatttggtggtcgtgggaggaagctcacaggaaatcttgaggctcatttcaatggtttcagatattctacttcaaggtctgatgagcgtgtggacatcatgtttggaaatataaagcatgcctttttccagcctgcagagaaagaaatgattactctccttcacttccatttgcacaaccatatcatggttggaaacaagaagacaaaggatgttcagttctatgttgaagttatggatgttgtacagacgcttgggggcagtagaagatcggcacttgatcctgatgagattgaagaagagcagcgtgagagggataggaagaacagaataaacatggatttccagaactttgtgaacaaggttaacgaccactggtcgcaaccacagttcaaggggcttgacctggagtttgatgtcccccttagagagcttgggttccatggtgtcccatataaagcttctgctttcattattccaacttctacatgtttggttgagctgattgagacccccttccttgtggtgagcctgagcgagatagagattgttaacctggagagggtgggctttgggacaaagaacttcgacatggctatcgtgttcaaggatttcaagaaagacgttctccgcattgactccatcccttcagcatcgcttgacgcgataaaggaatggctggacacaactgacctcaagtactatgagagcaggctgaatctgaactggcgccctatcctgaaaactataatcgatgatcctcagaagttcattgacgatggcggctgggagttcctgaacatggaggcgagtgactcagagactgaggacacagaggaatcagaccaaggctatgtgccttcagacgctgagcccgaatccgagtcagaagatgatgactctgacagtgagtccttggtggaatctgatgatgacgatgaggagtcagacgaggactcagaggaggagaagggcaagacctgggaggagctggagcgtgaggcaagcaacgcggaccgtgagcacggtgcggagtcggacagcgaggaggagaggaggcgccgcaaggcaaagaccttcggcaagtcgcgtgcgccggagcgcagcagcttcaagggagcgccgccctccaagaagccaaagttcaggtgaatgctgccttcggcaattcgctcgtgccaaagtgcagcagcttcaagggagcaccacctccaagaaggcagctctggttaatgggactccttgaagctttggcccccggagtagacgtgtctgtaggagtgtggtttgttatatctagattatctgcagtagcttagtccatctaaatgaaatgtgacagctgaactttggaagtcgcatcattggggaaacgaaatttaagtcgattgatttgttaatgccctcgttgatgtaatatttcccttgttcggtggatttccggtctgtataatatttatgcacgcttgcactttatccatggtatttgtatacccgtataaggcagcatggaggatgtttcttgcatgtggacgcattgattgatatatatatatatttaaggttcttttttttttctttttgttgcatctggttgtcgttgtaacagtgtacagccgcaatttgtttgccactaagggtctgtttactgattaacttgtctcattttacctaacttttctatctaagattagttcttcgatccgaaaaagtaactttatataatatgtggcgtaattaactcactttgcctaacttttcaatctaagattagtttttcgatccgaatgagtaactttatgcaagatatggcgtaattagccatcaaccaaacagtccgtaaaagacttgttcctcgaatgttttggtgatggcatctgcctatgatttgaagcccgctccgctgcgtttacagctgggtgtgagtttcctggccgcatgaagcatgaaaagatgggattcacagcggaactttcgttaggaatttgatggcaatcaagtttagttaaatttaattttcaaggctaggattctatgtgcacagccctgatatgcaccggatatcatcccgaatttatattgttatacatatacgaaaagcagtgaactctgctctgcaatcgtctgcatcgtcgtccttgctctctgttgcggcgacacgcacaggccagagcccgtcgggatggaaggcggcggctccggtgggcgggccgctgccgtcgtccccgcgcgtatgaccaccttgtcccggcactacttcggcggcagcgcgtctgagcgccaccacgacctccgcgtggacatcgtcgagaacatccaggaggactacggcatgtttgtctggccatgcagtgtcatccttgccgagtatgtgtggcagcacagatcacggttctctgcttccagagttgttgagcttggtgctgggacctcactgccaggattagtagctgcaaaggttggggcagatgtaacactaacagacattgcgcagaatgcagaagtactgaacaacatcagaagcatatgtgctctcaatgacgccaattgtactgtttcgggacttacatggggagactgggatgaatcggtatttgatttacatcctgacattattcttggagctgatgtactttacgactcagcaaatttcgatgatctgttcgcgacggtgacctttcttctcgaaaattcttctggggcggttttcataaccacataccacaaccgcagtggtcatcatctgattgagtttttgatggtcaagtggggtttgaagtgtttgaaactgctggatggtttctccttcctaccgccatgtaaggctgctttacttcaggggaatattcagcttgtcgaaattgcgcttgacaaggaaaaacataaatgaccctgagtttgattacaggagttgacgaaaagcacagagaaatggaatgccatatttggtcctctgcatacatgtacgagcaactccatgtcaagccatccgtttggactgtcatcataaggatgttcttttaattaaaagaaactcatggggagcatcgttgttcgaatagcctatgcatgcaagaaaaaacagaaaatgttagcagatatgtactcttttgtgacatctgtacagaacatgttggtttcctgaaaaaagatgcagaatgtccttttcttgatgtattcgaaaaaatgagctaaatgcataactttacacaa

SEQ ID NO: 41306 - DNA, 3181 bp, Zea Mays
gggctgtgtgaggataatattggaagtgggaggtgggtatccttcctccactgtcctttttcatctctctctctctcttttctctctctaaaagactttgctaattggcctgctagccggtctccctcccccggcctctttccctttcagctggaggagatagatgagagagaggatcagaggaagcaggaaggagagagggatatataggccggtgtcttctgtagagagagagattgagagcaaaagggaaataaaggagctctcgcaggcactcggtactgacatgagtgatctcatgctcttgataccttgggaaaggacagcacgtgccggagctcataagctggtagctgcatcagttcctgaggtaactgacatagagaaatagatagagatggtgaggaggaagatagatgtgtgcgctgctggggtgatgtgtatgtgtgcgtgcttgtgttgacatctgcgcaccccgtttttttctttgttaaatcacttgatgaagatgggatgatgcctgccttttcctttccttattaatatattttttctctctctctgatactgatgcctattccacatctctctcaagctatctcctctcgagctgctagatatagctagcttagtgtgttcttccttttccatgcatatatacatgctggcatgctgcaccctagctagctacacatctccctctcccccctgcaaccttcactcttcatggatccagtttcacttctcacgccacatactcctcaaatcattgctttggcaaaaccacctgcttacgatcttgcagtcatcatcacgctattagttgaggataatttcgcgcacaagagcacgacaagccgagatttttgggggcgtcggcgtcgacctgtaggcgatggcggcgtactaccacggtggcgccggcacggacatccaggccagcaccgacggcctgcagacgctgtacctcatgaacccgagctacgccgtcgggctacaacctgtggaccccggccatggctggcggcgccgcggacatgtcgccgcaggcgcaggcgcagactcccggcgccgcgggtgctgctggggtcagcgccgtgctcagcctgtcgtcccgcgaggcgccgccggtcaccgtggccgcggtggccgcctgcaccgacgagggcaagtacctgggcgtgtcggccacgccgcaggggcagatggtcatgagctccaagtacctcaaggccgcgcaggagctgctcgacgaggtggtcagcgtcagcaagggcgtcgaggacgctaagacggccgctgccgccgcgaccaagagcctggccgcggtgaagaagaaggaggactcggagggcgcgtcaggtggcggcaccgacgacggtgccggcgcaaagagcggcggtggtgccgcgccagagatgtccacggcggagcggcaggagatgcagatgaagaagagcaagcttctcaacatgcttgacgaggtggagcagcggtaccggcagtaccacgggcagatgcaggcggtgtcgtcgtcgttcgaggcggcggcgggggccgggtcggcgcggacgtacacggcgctggcgctgcgcaccgtggggtcccgcctccgctacatcgaccaccagctccggcagcagcgcgcgctgcagcagctcggcatgatgcagggcggcgcctggcggccccagcgcggcctccccgagcgctccgtctccatcctccgcgcctggctcttcgagcacttcctgcacccataccccaaggattcggacaagatcatgctcgccaagcaaaccgggctcaccaggagtcaggtgtccaattggttcatcaatgcgagggtgcggctgtggaagcctatggtggaggagatgtacctggaggagacaaaggaccaggacgctggaggcggcggcaacgacgagggcaagtccggtggcggcggcagcaagagcagcgacaccgtcgacggcgtcatgccgagggcggacgtgatgtccaagtccgcggtgcgcgtgggaggcggcggggcgggggcggagagcgcgtccaccaacaagggcatccatggctcctccctgctcgagctcggcggcggcgatcaccagcagtcccacgcggggttctacgacgacgatgaagacgacggcgacgacgtgatggggcggaggctcaagaaggcgcgcggcaacgagccggcgccggcgttccaccacgtgcacgacatagccacgctgcacgcgcaggccgcggcggccgcgaggcagcagcacgaggaggtcagccaccgggagctcctcatgaagttcatggagagcggcggcggtggcggcgtgagggaccaccaccaggacggcggcgggtactcgctgttcgcgccggggccgtacgggcagttcaccacggagcccttcgcgttcgctgggaacggcggggtgtcgctgacgctcggcctcccgcacggcgccggaggcagcgccgagcagaccgcgtcgttcctcatgggcagcaccacggccggcgacagcggcagccacggcgccgccaccagctacgacatgaacatgcagagcaccaagtcgttcgcggcgcagctcatgagggacttcgtggcctagctcccttaggacgcatagcatagcagtcgtccacgcaattaatcaaatcatctctccatcgatcaattaatttagagcttgtatagaaataaagggttcaagcctaaatatgctttgcgtatataaagcagttaagcttggactcataggtcttgctgggaatgtaaagatgggatatatatcatggggccatgtatatataggtataggaggataggtaactagttgatacccaaacattgtacaagattttatatgtagatcatagggattggggggtatacagtaaagtatgcgaaaagggtatattggaactggacttagtgtatgctgtagaaattggcctactagtattatctgcagcaattcagtatttgttttgcttactgtaaacatagcacattgtgattcattggcagcaccatgtgctgttagatgacattgtggataatgctgctccagtgagatgtttgttggtggcctcagctagaatccagtgatctagtacctctgaatgttgccagcagtatctgttcggagcaatgacaaatctgctc

SEQ ID NO: 41307 - DNA, 1056 bp, Zea Mays
acctaacccttcggccttcgttgcggacccgccactcacttcttctctcgaccgcatcttttctccgcgccgccgctcgcctgcacttctacgtgtgaaccgcgtccgcgcctatggcctgcccgtgcccagctgccccctctccacacgagcctctctaggcgtcaagcgtgccattaagcaaccgtggcccccacccctcctcggctctctgcgtgagcacaagcacgtctctgtagcccatgttcaacggaagcgaaagtgccgctggaccacatacgattgttgatggtaaagaagttgtgaactttgcatcagcaaactacctcggtttaattggcaacgaaaagattattttcattggagaaatatggtgttggttcttgtggtccacgtggcttttatggaacaattgatgtccatcttgactgtgagtcaaagatagctaaatttttggggactccagactccattctttattcatatgggatttctacaatattcagtgtgatacctgccttctgtaagaaagaagatatcatagtcgcgtaagttcaccgtattacaaaattatgaaattcacaagtattattggaaccttgacttgtttggtgtatcgaggtatgcatgcttggccttttagacataatatggatttatccagctcaactttaggctttagcacaacattgtcatctctttcttgtgtctattgatgagttgtttttccttgtcagttaactgtacatgggtagtttgatgtgattgcggtgacgagggtgttgactgtttggtgaaatgcttgggacaaagtggccaacaagaatggagtcatggaacatcgacaggaggggtgcggcagcagcaaccgatgtatcccttggacaatctggttttgacaagatgcaaatcaatccgctgtacactgtattccgcacttgcacagattgtttggttaattacaagattatctcagtgttttgattggtacacttatgtatgaaatattgattggtactcatctatattatatgaattatattattattaaatata

SEQ ID NO: 41308 - DNA, 2412 bp, Zea Mays
catgtcgtcgcggcgacgccagtcatcctcgtggcttcacagtccatcgacgggacaaagctgtgaatccatcaacggagtccccggattccttactacattcgttcgttccacgccgccgtagaaagcaacccgaagtccccaacgccaccggcaccggcacggcgaactcgggcacgcaccgcagccagccggccggttcggcaggcaggcaggcagagaggattgcattgcactgcttccatctcccctgcccgccccgccgcggcagatcccgaggcggctcgcacttccaggtcaactcaaagtacgcccgcgcccgcctagacgttgtcttccctccctgcactccccgccacgacgccgcagcagatccaccatcgacgcgcgcgccgcgcgccccgacgcggaacgctggatcccgcgcagcaggaggcggccaaccagtcgccgtcgcccccggcccccaccccgcctgccgcagcaagcggcgtccgctaccgcacgccctcgtccccggacctcctcctccccgccgacgccgccaagatgcgccgctactccgcgctgcccaacggcggccgccaggagacgctggccgaccgcgcgcaccgctaccggggcgtcgtgctcgtcatcctcgccccgctcgcgctcgtctctctcgtcctcctcctcatgccacgctcacccgctggcaccatgggcggcgcccggaggtccgggccggccggggcagacaggtacgccgtcatcttcgacgccggtagctccggcagccgcgtccacgtcttccgcttcgacgccaacctggatctcgtccgcattggcagcgagatcgagctcttcgtccagataaaaccggggcttagccactatgccaacgacccccgggaggctgccgagtcgctcgtctctctccttgacgatgccaagcgagtggtgcccgccgaattgcgcgaccaaacgcctgtcagggccaccgcagggctgagaaatttgggtgcacaaaaatccgaggcaatactgcaagcggttagggaccttcttcgcgaaaagagttcctttaaaaaccaaccggattgggttacagttcttgatggaacacaggaaggtgcatacgagttactatcaattatctgttggggaacttgggaaagacttatgcagacacagttggagtagtcgatcttggtggtggatctgtccaaatggcatatgctattgcggagaaggatgcagaaaaggctcctaagccatccgatggggaagatgcatatgtgaagaaactgtttctcaaaggaaccacatattatctttatgttcatagttatttgcattatgggttgctggcagctagagcagaggtcttaaaagctggcaatggcaatggttacagcaactgtatgttagagggatttcaagggcaatacaaatatggcgacaattcatttgaagcatctgcttcaccttctggtgctagttattcaaaatgcaaggatgatgcagtgaaagctcttaaggttgatgaagcatgcacccacatgaagtgttcttttggtggcatttggaatggtggtggtggtgctggacagaataatctctttgtagcatcctttttcttcgatagggctgctgaggctggatttgtgaacgccaatgcacctgttgctaaggttaaaccctcagacttcagacaagctgctgagcgcgcttgctctttgagtgtgaagaacgccgaggctacctttcctggtgtccaaaaggataacattccatatatctgcatggaccttgtttatcagcgttgatccagaccatgagatgaccttggtaaagaaggtcccctacagtggtgcatatgtcgaagccgcatggcctcttggcagtgccatcgaggtggcatcttcatcatagcaaggagacacagtttagcaaggtaacatcggacggcattgttgtcatgaagttttagcgttgggagtcccccccccccctgaccgcttactgaattcacaccattttgtcactcaatccatccatcctccccatacggtaacgggtagctttacacaccaagggaagcctcggctgtacttggttctagcggccattgtaagccctattactattattgttattaatatctgtatactactaatgcaagtaagatgagagcctcaggcattctttttgacctctgtatactgggatgtgcatgatataaagtgccatcattcgctcactcaaatgcgtacatgtttggtcattgtgtttactggcagccctttgctgctggaaaaagagtacatatttattaaccgtgtgggcctgagctgcttatctactgctggcttgctgtgccctgtgcctgtacagacgagcttcggcccggtaaacatcggctttact

SEQ ID NO: 41309 - DNA, 1419 bp, Zea Mays
cacgcagcaaccctcgttgccattttttctccgcgtcctctgtgccccaggtagcgatgctgcctttataaacctccacctccaactcactcgtatctcccttccgttccccaattcgaaatcgaatcgggtccgacgggtcggtcttgccgtgcgtgcgtggctgcgcgagcgactcgactgcacccccgctcctcccagtccccacacactgcgcgccgccgccgggtcctcctagggtttcgccgcgatgtcgctccggccgagcgagcgggagcagatgcggaagggcaactacaagcagacggtagacgcggaggagagccgccgccgccgcgagggccagatggtggacatccgcaaggccaagcgcgaggaaagcctccagaagaagcgccgcgatgggtttcccgcctccgccgccggtgtgccgccgatgggccactccaccgcgctccagcagaagctcgatggcttgccggcgatggtgcaggccgtccactccaacgacccctccgtgcagcttgaggccaccacacagttcaggaagctgctttctatagagcgtagtcccccaatcgaagaggtgatcagcacaggagtggtgccgcgattcattgagtttcttacacgtgaggaccatccccaactccagtttgaggctgcatgggcactcaccaacattgcatcaggcacatcagagaacactaaggtggtggttgagagtggtgctgtgcccatctttgtcaagctactcaactccctcagcgaggatgttcgtgaacaggctgtatgggctttaggtaatgttgctggtgactccccaaagtgccgtgatctggtacttggtcatggtgggctataccctttgctgcagcagcttaatgagcatgctaagctttcgatgcttaggaatgctacatggactctctccaacttctgtcgggggaagccacaaccaaactttgatcaggtcaaaccagcattgccagcactacagcaccttattcactctcaggatgaggaggtcctaactgatgcctgctgggcgctctcatacttgtctgatgggactaatgataaaatccaagctgttattgaatctggcgtgttccctcgccttgtggaacttctgatgcatccttcggcctctgtactcattccagctcttcgcacggtgggtaacattgtaactggggatgacatgcagactcagtgtgtcattgacaatcaagcacttccatgccttttgaatcttctgactaccaaccacaagaaaagcatcaagaaagaagcatgctggacgatctcaaacatcacagctggtaacaaggagcagattcagtcccagcaacttcaatgatatcacctggttggtctcttattcaactgctccgttctgtttggtttcttcccaaa

SEQ ID NO: 41310 - DNA, 357 bp, Zea Mays
aaaaaacaaaaaattcgggcgccgggccgggcggcagaacccagcacgaggcgcaggcggacgcgtgctcgcctgctgctggcggggatcgggcgtccgggtctgaggcggcgtgccgtcgctttcgccgcgccctcgagccggcggccgatcggcgcgcggtccgcgtgaccccccatgattgcctgtcgtcgttaggttacaatggatctggctgcgtgcacccgagaaaatgtgttctcctgggcctgacgacctggccggccggccggccggctactggtcgcctccagcatcttgaataccaccgccctgtcgctgacttcagtttcggatttctaaaaaaacttgaacgcg

SEQ ID NO: 41311 - DNA, 1794 bp, Zea Mays
tgatcctttcctcttcctcagctcctcacacgacgtggcgtggcgttgcctccccttcgcttcactccgatcccctatcgcggccatgacgggagccaagcaatctcgccgatgcaacctcctgacgtttttctccaccatattggccaccgttctgcttttgatcttccagcgattctcgccgacggcagctgcagtgccgcagtggagaaggggaggaactcaggaacatatcgacgttgcgcggggagccgaggcagtgggccacgggcaaggacgatgcgaagattctctccgaggcggaagctcgcgctggcggcggaggagagggtttgctgacggcggacgagggacgcgagttcgcctcgctctacagcatgctgcagtgggcaattgggaactctgatccggataagttgagagaaaaggctgcagaattggtgaaactatcggcagaggaattactcaagagacagatggagattaaggagttgatggagaagttcaaggcgccatcagatgctgagttgataaagattgctattgctgacttaaataattcctctctggaggaccgccaacgtgcactgcaagagctcttaattctcgttgagcccatcgacaatgctaatgacgaaggaataagaactacttcagcatgggtgctgggcaaagccagtcaggacaatgttcttgttcaaaaccagatcaatggatatggagctttggacagattagtgaagatgggttattccagttctggaccagaagctgcaaaggcattgtacactatatcctctttgattagggacaacgaacatggtcaggagttgttcctttcagaaaatggttatgcaatgttgcagcacatattgtcaaccacaaacactagtgttcggcttcagaaaaaggttgtgtctttactggcatatatagctgactttcagctaaatacagggaagtcacaagctcaatccttactcaaccactttttcatataatcagtagttgagatgatatcagcagtgcctgaccttgacctccaggagaaggctttgttagctgttaggaatctgctgcaccttacgtcagctgatgctacagatcttcagaagttttcaggcctggatgattccctgaatgcactgaaggtgcaattggatgagttgacatctcatgaggaacaaagagagtatgctccggaaattgaaattctccggagagaagtccacactgtcttccagcggaaaactgaccaggcaagggtggtgacaaatgaaggcaaatataatggttagaaacatttgctgtccatataagcgtttgttcggttcttccccaaaccaagagggttgggggatttaatagtcccccctcaattctctccaaccccttggtttcgggaggaaactaacaagctctaaaggtgatcacataacaattcctcaactgaatgacaagttgtcaatagaacgagttgcatgggatcatagatacttcacagagataggatgtcacaaaatggtgattgtctatcaagttacagaacgaagaagtgcagtggaacagagttctcattctcactgatttctgcttcgtgtgaaactgtttcatagtacacttgtagcccattgaatgtcgatgttgttcatacgcaaggactcaaagttgttactgggcctgaactaaggctacaatcgcaatagccctgattcagttgcttcctgttcaaatgaaatgttgctcgagttctttcatacgtaggcattttgcgcaacttccactggaagtaaa

SEQ ID NO: 41312 - DNA, 2422 bp, Zea Mays
ctctctggctgttgacctccttgctccttgtgttccatccgaggcccgtccaaacgcaaaaccccacggcgacgtgttccatccatccggacaagctcgttgcacctcacgaccccgtcttaccacatggcctccagtccccgcttcataagggaaaaaggaaaactaattattactagtatactgttactgctactacaaggttcaactggtaggccctcctgcggtcctgccgatgaccacggccgatacagaagcacataaacacattcgacgaggtcacgactcacgaggggactcccgagcgcacgcgcgaatcgccgcggacctcgccggaggcggcgacgagctcggatcccggcgatctagtcgccggaggcggtcccgatggctcggcggtcgtcttcctcgtcgtcggggacctggcggtacctgaacccggcgtactacctcaagcggcccaagcgcctggcgctcctcttcttcgtcttcgtcgcggccaccttcgccttctgggaccgccagtcgctcgtcagcgagtacgagtctgagatttcccgattagaagatgatataaatcggttgcatgaccagctaagaaaggctggagttaatctggatgaaaatccagtagtaagcaataagaattccagaaaagatcttgtagtagaaattgatcctgtcaataatgaaagacgggaaaaagttaaagaggcaatgctccatgcttggaattcttatgttaagtatgcctggggaatggacgagcttcagccacaatcgaagaatggtatcaacagctttggtggtcttggagcaacccttgttgactcacttgataccctatacataatgggcctgaaagatgaatttcagaaagctagagactgggtggcggagtcattagactttgacaaggattatgatgcgagtgtttttgaaacgaccataagggttgttggaggtctgcttagttcatacgatctatctggtgataaagtatttcttgataaggctaaagatattacagatcgactcttacctgcttgggatacaacatctggcatcccttataatagaataaacctagctcatggacgagcccataatcctggatggactaacggtgatagtatccttgcagattctggtacggagcaacttgaattcatagctctgtcacagaggactggagatcccaaataccagcagaaggcggagaacgtcattaaacagcttcaaaagatatatccaagtgatggtttactgcctatttacataaatcctcattctgggacagcatcatactcaactatcacatttggtgctatgggagacagcttctacgaatatttgctcaaggtctggatccaggggaataaaactgagcatgtaaaacactacagacaaatgtgggagacatcaatggaaggtctattaagtttaaccaagaaaactacaccatctaattactactacatttgtgaaaagaatggtggctcgttgtctgacaagatggatgaacttgcttgctttgctcctggtatgctggccttaggagcctctggttacgggccagaaaaatcagagcaaattatgaatcttgcaaaagaggacatgggtgtgggcacgtcgtggaacatcttgagaccggagactgttgaatcactgatgtacctgtggcgcttgacggggaataaaacataccaagattgggggtgggacatattccaggcatttgagaagaactcccgcatagaatctggatatgtgggactgagagatgtgaacactggtgaaaaagacaacatgatgcagagtttcttcctggcagagacgctgaagtacctgtacctacttttctcccctccatcagtcatatccttcgacgagtgggttttcaatactgaagctcacccattgagaattgttccagtaagtgataacaaaggcattggaacaccggtccgacaattcgggagaaaacagggaaagcctgagtaaccttggatatagagcagtggatttttgaatctgccgtctgattctgacctccctgttgatgtgttctgacacgagggaactttctgcctgaagcagtaagggttagaaattacggcgatagattgtttagagcaaaaatcataggtagaggatgatgttatatgcggggcagtgacctccgtgaggtcaagagccccatagaagcttttatctttggatttgcttacgcaccctgaggtgcattgttgatgtgtagcatacatctaactcactgtccatatgttgttgctttcctgggggctctgcgagctgtattgtcattatgtaccccctagttattacttcttttcagatatgattcatataaatataaaacgtaaagtatctatgttattagttgggttttcgtattaatatt

SEQ ID NO: 41313 - DNA, 1403 bp, Zea Mays
gatttttcagccgttagccttatccctcgcccttcctcctctccaacgcacggcgctccctctatcctcttcccatggctgagcgcgcttggatcttctccctgccaggcgttcggcagctcggccgctcgttcctctccgctgctcgccggttccctttccccaagctccatggctgctgcacctccccagccgagcggctcttccccacggcgctccctccctgcttctccttccctctcgcgtcttctcctcgccggcgtgctcctgctccagccataggacgcgcccctgcttccatggatgccgcacccgctgcttgctccccttgcttctccagtccgagctccttcccctcgccttcccatggccagcttcgagctcacccagccctttctctgtttctttcacggccgagtctctttttccatggttgcagccgttttcctcccgcccggccgcaacctcgcattgctcctcgcgtcgatgctcaccgagtccttcctcagtccgcgctctctcccagcccatcgtcgtgtcgttcgtcatcgcgtcgtgtgtgcagcaacgtcgctaattcctccatgatgcttgtcaacgaacctcgcttcatcgattcctcgccttcggttcggctcatgtatgcacgccgaatgcgttcgccgcttgaccctgtgtcgctagagctcgtaacctcgctgtcgtcaaagtcctcactgtattcatgttctagccagagctcgcgttaacctgctcgaccacacctcaccagctcgctcctgactcgatctcgtcgtcgttccgtgcgtcatcaagaaatcccaagaatcgggtgaagacaaagcttgacaaagtgctcgacaaaagctcgaacaagtcgtcgatcgccatcctcatctacgcccaagatccacaaagattacgcgtagaaggaaataaatcagtacgcgaccggagaattctcgatgtggatgaagatgaagcgcgattcgacgcagcactcaccctatttttggtgaaatgctgagctgaaaggcgtcgtcgatttcatgatttcaagtcagatttaattgatggtacacttattaatcacgagatgtggaggacaagagccaagtcaaccccaagacgacgtaacgggtggactactctacatagtgaagctgatggacgagtctgaagaggggcagactgaacaagtgccaacaccaaaggttgatcgtgaagtaatcatcgtctaacaacactaacctagtgttacccaggcaagccccggtgtatttgtcacctccttgctgttttaaaatctttatcaccttgtttgatgtattaggtgataagagttgtgtgctaaacaattgatgcatttcctttcttggaaaattgattatccttccttgata

SEQ ID NO: 41314 - DNA, 2213 bp, Zea Mays
tgatggatattatttgggaaaaatggtgtcgtgctaaagaaagcaaagaagattgcaaacgggaagggagatgtgaatctctcgctgggatcgtttgtggacactcttgttgtttgcccagatgaccttgtacaagttattgcaaagggtctttcactcccccttaaaggtgtctgtaaacctcttgattccaacgtggttgctgccagtggatccttgaagcctcaaatttcacatgcaaatgacccaaaaatgcaagctgagaaatgcacctcggtgggtcaggagaaaaatacttctgttaagagaaatggtcaagataatggtattactacaagtttaagttcttcaaccagacatgtgggggcatgtttatccaataattgggattctaggtctggaagtatggtgcctaaagttgatgttatcacaagttcagcttcagctgtgcccgtggtggcttcaggtgttaaaccctctcagccagtcaataattcagttgccaagattgtcacgtcaagcaaaactgctgctaaggaattcaaactcaatccttccgcaaaggtcttttctccatcttttgcaagttctaggcaagtacttgcagctgcggcccctgttgacacatactacatttcacactctgcccctgaagtaccaatgggtgtgcctgtatatgaaccaaaatctgtgtcaggtgtttcacctctatccaacaaggtttattgtagtaatctatctcctgcaaactatgccatttcacctcagtatgtgccgtctgtaagtgcttcgatctattcttatgtgtttttgattgtttcatttatttcgccttcattggataatactatattatcctcttgatatttaaaaaggctattggatggcaacttgtaacatgcctttggttcaagttgataacttgctgcatatggcttaggcttactccgttatcatttgttctatatttgaggccatgcacgtactcagttactcctatgtgctttgcctttgcagttgagctattcaagccattcttacctgttagctgtctaatttacttgtctgttggattaaatgaataaattgaacttgtaaactgattcttcatgtcaacttacagcttatcagctttaatttaattctgatgcaagaaaaaaaatctttttactccgaactgaaaaacctagctcacatgtaaatgtattttttatgtttgaaagcttcttttaacaacttgccttttatgttctattactgtactttgtgcaagcatattttaatacacttaaatttggtcttgcttgttgcctctatcatggatgtctaacattaccatgcttctggattctggtactacttaaccttttgggtcatagatcatgggccataatgcatcaaggctagacccatccagaattggcacaccataccatcctatgcaggtgggggcaacttatactacccctagtcctcagcctgtaatggctgggaagttcagtcctgttgtttatgttcaaccaggtcctcaggatgcaatgcatggaacaaccgttggttttcaaggatggccttgccctttgttattgaattcgtaccaagctagcatgcagaaattccaaggcaaccccccggtgtatttagctcctccagtcatggcaactgggaaccttccattggtggtaccaagccctgcatcacttgtgcagccgttcgaggccattcatcccataatggtccctgctgcaagcagcatggtcccaggaaaatacatgtaaacttgtcgtaccaatgacaatctccttttgttggaagaatcctggcgtacccattttgtctgaaaggactctagtctgttgattcacttgtcagttgctggtctgtgtccgtattttagttggaagggctttgcaacttcttgtcattcttcatgcttggtgtgggtttccaattttttttaggggcgggacagtaaaatgaattagggagaaaatgcagcgattctttgttatcttagcgacacctcttcttccaagagcagtatgtacaatgtgacattgtaaaagattcatatagtgaaggccttattttcacgaggctaatgtacatccatcttgcaagtgtaacagcttctgaagttctgttttgagaaaataaacttgttcgacaatattgtttaggtaatatcagcagtatatttttggatattagag

SEQ ID NO: 41315 - DNA, 3070 bp, Zea Mays
cgtgctgcagctatgctacggctactcccctttttctttcccatctccgatttcaaaattcaaaagtccccttcctcactcgccttctctcttctccacgggagcgaggccgaggccgagacctcgaggcggtcgcgtggcgtctcggaacccgggaggaatccacagaaaaatccgcgcgtggggggccgaatctctgctcctggggcgagccggcgagtgttgaatggtgtttggagtgtggtaaactggtaatcctgggaaaagatgaaagaggaaatcatgtttgacaaccaaacaaagccatgcagatcgagggttgactccaaaagcaattcaagttctctgaaacctaagtttggatcatcatggggttcccaaattgtcaaagggtttacaacagacaagaaaaccaagaagacagcagcaaatgcaagcaaaaaaccacctcttccaagtgtcgaaaatgttaatcaggccaaccaacagattccgtatcactctagggtgaaaagatcccttattggggatttcccttgttcacctgctggtgctcaagtccacccccatgtctttgattgccacaatattaggtcccctgcatcccatgatctttttcttgagctggatcatctcagagagcagcttcgtgagtcgaaagaaagggaattgacattacagtcagagttgagacagtgcagagaaaacccaaaagtttcagaacttgagaaggagcttgattctatgagggatgaagttgacaggcttgcacgactgaaaatttcattagaagctgagaaaacaagcatatctgaacagttatcagctctatcttctatggaagaacatcatgaagaaaatgtaagattagatagccacggcaatcggatacttactgtagatggggacaatgcaccttcagaaaacttggagtttgaagttgttgaactacgccggttaaacaaagagctacagtttcagaaacgaaatcttgcaattaaactctcttcagctgaatccaaattggctggccttgagaagaatgaagagagtgatattgttgccaaagttcaagctgaggcatcgttgttgaggcatacaaatgcaaacctcagcaagcaagttgagggattgcaaatgagccgactaacagaggttgaggagcttgcttatctacggtggatcaattcttgtctacgccatgagctttgtaactcagatcaagcagctagagcaacgacggatatagattacaatggtggcatggcttttaatgaggatgataatagcgaaggtgatgcaaaaacttccgaggacagttctgatataaaattcagcattgcagaacgcatcaagcagtggtcccagaatgataagagctgccaagcatcgaaaaaggaatcccttcttgatagggcatggattgaagctgcagaagcacgaagcccgacacgtaggcactcactcggtggaccaaagggatgtgcacaagacttcaacatcattaaaagaaggcaatccgatacctttatcagcctcccggatgcgacagatgagtcatttgcctttaataaggatcctgcaatcagggagaagcgtgatcttcttgtagacaagtatgattttggtcgatctgaaagttcaagatttgttctcagcaagccagaagtatgcaaatcacagtgtctggatgttgaaaagcgtgcgttgcgcatccctaatcctccaccaagaccttctgtttctgtgtcaaattctggtccatcaaatggatcgactgtaaatccaccgcgaccaccgccgccgccgccgcctccaaagttttcctcaaaaagtactggggtcatgaagagggcacctcaggttgcagagctctaccattcacttatgagaagggactccaaaaaggatacttccggtggcggaatctgtgaagcagctaattctgcgaatgtgcggagtagcatgattggtgaaatcgagaaccggtcttcccatttgcaagctatcaaggcagatgttgagactcaaggtgaatttgtgaaatcattaatcaaggaggtgactagtgcagcctacaaagatatcgaagatgtggttgcatttgtgaagtggtggatgagagagcagtgttgaagcattttgattggcctgagagaaaggcggacactctacgagaggcagcttttggctaccaggacctgaagaagctggagtcggaagtttcaaactacaaagatgatccacgcctgccctgtgaaatcgcactgaagaaaatggttgcattatctgaaaagaccgagagaggtgtctacagccttctaaggacaagagatgctatgatgaggcagtgcaaggagttcaatatccctacagactggatgcttgataacaatcttattagcaagataaagtttgcttctgtgaaattagcgaagatgtacatgaaaagggttgcaatggagcttcagtacatgggtcctctgaacaaggatccagctctggagtacatgctgcttcaggctgtgagatttgccttcaggatgcatcagtttgctggaggtttcgatccggagaccatggatgcattcgaggagctgaggaacctcgttcacgtcagaaacagcacccagtagctaggacgcggcaccgcaatgtagtgtttgaagaagaggattagttttcagactctcaggcttaccatctcagtaagcgtagcaggcacgatttttggtcgtgtgatgtttgcatgtgttcctgcgtggtgtgtttcagtgtttgcagtgtgtaagatatgtttgttctgtaccgcgtgtggtgggtgggatgaagtgacccgccggcgctggcttttaacctcactgttgccagaaaatagaaaacgcactgggacatgcacatgcttttgttttgtgcctattgagcacagaagtagcggtggggttttgatttgagggtttgtttaggacgtattcaattgctttggatattgtcggagaccataattaggggtacctccaagacttctaaattcggctggtaaccatcatcagcacaagctgcaaaggcc

SEQ ID NO: 41316 - DNA, 864 bp, Zea Mays
tttattacaaaaagttacaagttacaacaaaatttacattatatttatcggagtggttacaaaaataagtgtttcaaaagaattacactttaaaatgttatagaatatttgtaaatttgaaatacatgctagcttaagtgataatccttattaaagaaattatagaagggatatacttatataagaaggacgagcccaccgacacttaacatcaatcacaattaaagtgactcgtaacctgcagcaacaatgggaataaaactctgagtacgcaattactcagcaagacgtacccgacaaaagaaaagactctcaagggtatgctggtttgtcgggaataaaggtaaagcttatcaaatttcaaagactcatttttgcagaaaaggttactagtagtggatccttatgccaaatttttacatcataagttaagtacttttcctgaatctagatttgtcgaatctagagcattcacttgtcctacactagctttcttttaaaatcaaaattttgtttcgcttgttatctacgatgaagggcagcgatccagtcttcatatccgagaagtaacggcaatctgaaccgattaatacccagctggcgatctccaaccacacgatatatgtagcacttaacccttgcatatgtctaccattcccacggatcttccactacgtgaaccggtccgtgccacccgagagcacagtactccccatgcagcctcttgccagggggtacacgctactctcaccatctctccactcccagtgcgcgattgtcttttcacatagggaatagccgggttcaggcttacccatgacgaggtatgtggccagttaaaaggtcctagatcatcaggccaac

SEQ ID NO: 41317 - DNA, 1489 bp, Zea Mays
ttccctcagctcggtggaggccctcaagtcctacgcgctccgttcccctttccctttccgaagcttctcgaccccccatcccctccctgacatggccgacaacgcgaaggccgcggcggcgcatgcgaggccggagtcgtcgcaggaggaggaggaggactggaaggaggccgagggggacgtcgccgaagtcgaccgcgccgccaccaatggcgccggcgaggggggcgtgcccacagacaggccgatccgggtctacgccgacggcatctacgacctcttccacttcggccatgccaagtcgctggagcaggccaagaagtcgtttccaaacacatatcttcttgttggatgctgcaatgatgagttgacacataaattcaaaggaagaactgttatgactgaggatgagcgatatgagtcacttcgtcattgcaagtgggttgatgaagtcattccagatgctccatgggtggtgacagaagagttcttggataagcataacattgattttgttgctcatgattctctgccgtatgctgatgctagtggagctggtaacgatgtttatgaacatgtaaaaaagcttggtaagtttaaggagactcagcgcactgatgggatatcaacatcggacattataatgcggattgttaaagattataatgagtatgttatgcggaatctggccaggggctacactagaaaggatcttggtgttagttatgtcaaggaaaaacgactgcgagtgaacatgggacttaaaaacctgcgtgacagagtgaaacagcaccaagaaaaagtaggggagaagtggagcacggttgcaaaactccaggaagagtgggtggaaaatgcagaccgctgggtggctggtttcttagagaagtttgaggaagggtgccactcaatggggacagccatcaaggagaggatccaggagaggctcatcaaggcacaatccagcgactttggcagcctcctacagtacgacagctacgattctgatgaagccaaagaaaacgacgaggacgaagacgaagatgaactctttgaagacgtcaaggaatagcacctccgtacatatacaatggttttgtagctgcaaattgtgttgtgagtcagttgcctctctctggttggtgatctttatatatggtctcaaaggtaggtcaggttgcaatgtttgtagctgctcttggtgtttgttcaggcaacgcatggttgtaaaagctgtggaaagactcttgtgcagtcaaggatacagattccgatggttacctttgggttagaacatatacggctgtaaaattggaagtcgagtctgtggaggtcaccgcgtctgccatcgaggtcgcgagagcaggattctcagccgtttccagcacgaggaatgttttggaattattcttgtgttgattgttgattgaagtaatgaacaaataaaagcgtcttggattcctcggtgcctcccgtggtaatgggacac

SEQ ID NO: 41318 - DNA, 2027 bp, Zea Mays
aagcttctacatacagccttgtcaccatgttcgataaattggcctcctctccagaataccagcaccgagctgcaatggtggaacaattcaacagaagcaacaagtggaagaagcgtggcatttcttgtgtgcctgtaacatatgaggtgcagcttcggccaactccaggaaaggtgtctatcatgaatgatggttccattgctgttgaggctggaggggttgagctaggccaagggttgtggacaaaagtgaagcagatgacggcattcggactgggacagctgtgtcctgacggcggtgaaagccttctagacaaggtgcgggtcatccaggccgacacattgagcatgatccaaggaggggtcactggtgggagcaccacttctgaaactagctgtgaagcagttcgtaagtcgtgtgttgcactcgtcgagaggctgaagccaatcaaggagaatctggaggctaaaactggcacagttgaatggagtgccttgattgcacaggtgaggataagctttgtaaattccaattttctcattgccatgccaagaataacatctcattgtttaaaactttgcctccttcctttgagtcattaacaaatgacaagcaatagcagtagtaattaagggaggagatcctacagttctgaggaacacagtatttgttagtacttcaattggccatgtcattttgctgatcacttgcaggcaagtatggcgagcgttaacttatcggcacatgcatactggacccctgatccaactttcacaagctatttgaactacggagccggcactagcgaggtggaaattgatgtcctgacaggagcaacaacaattctaaggagtgaccttgtctacgattgcgggcaaagcttgaaccctgctgtcgatttgggccaggtggaaggtgcattcgtccaaggagtaggcttcttcacaaacgaggagtacgcaaccaactctgacgggttggtcatccacgatggcacatggacgtacaagatccccacggtcgacaccatcccaaagcagttcaacgttgagctgatcaacagcgcccgtgaccagaagcgcgtcctctcttccaaagcatcgggcgagcctccgcttctcctagcttcctctgtgcactgcgcaatgagggaggccatcagggccgccaggaaggaattctcggtctgcactggtccagcgaactccgccatcacgttccagatggacgtgcccgcaacgatgcctgtcgtcaaggagctctgcggcctggatgtcgtggagaggtacctggagagcgtgtcggctgccagcccaacaaacaccgctaaagcatagatccagtaggcgctctacccatggtgtgagggcttaatcaatctgtaaaacactaagcggcgtgacatgccgagctttcagtgttagctatgatgtacagaagaagaggtaccaatggcgagttgtggccatgcgaatcaggattcaggaatcatgaacaatagagggggggaaataaagtaaataagtgttgcgcaggcgaatgtggggacgaaatcatgtgatttcaactagaatttgaagaaatttgctaggttcgtactacttaccttctggatatatggggtcagattggatggaccagccacctaggttaagcctcgtcgcgactttcgctggcagcttctcccccgcgcgctgggtggatggaggataacttctctcccggctatgttttgcctcacactccccgcgcgctgtaacctgtaggctggcgagcaagtgatggcgacatcgcgcctattcgaactatggggtcagtggcggggttgagaacttgagatcagactctacttgatttcgcgggatgtgtagctgtgtgctcttgcccatgacgcacgagagagctgatgctgtgtgggtgttgccggatcgccgctgccgttgggttaggcccaatgtttggcatggccgtggcggaggatttcggccgccaacgcctgaaccctgcaactgcaaccaagcctcggg

SEQ ID NO: 41319 - DNA, 580 bp, Zea Mays
agtgtttaaattgaggctgggtgctggtgttgtatgagggcatgtgagccacgtagttaactcagactgtgttggcaccctgggatcattcctttgctgcatgcttgacatgttcactaggtgtttgctccatttcagctgccgtagagactttgttcagtgatattctacttcctatcctcaagctctaaccagtgtccactgcaaaggtgaagcagctctggcatttctactgctgttaccttctccatcataaggttgaactactcaagagccttgcacaccatcgccagtctggtgaccatgccacccggttccctcacctcgccgtggccaagacttctcaggcagtgaccagcccgcatgaccctcgttccacgttctcctaagagcacctagaagaagtggtgtttaaaggaggagtctactccagtggctgctaatcaagtggaggagccatctaactgggtattggatagtaggatctggaacctcttcactgcaagaaggcaagccccggtgcatgcaacaccttctttgtattttaaaaagaattttatacactttaagtctagtgaaa

SEQ ID NO: 41320 - DNA, 729 bp, Zea Mays
atttgagcatggcagccacgtagatgtgtccaggtactgctggcaccatgggaatacgaccttgctgcatgttgaacaggttttaggggcatctgtccattccagttgcttaaaaggcaaaattaattgaaggtcgccctccgtgccttgagttccacctacagaccactgcaaggtgtggagctacttgtattctattttgtgtagcctctccccagtccctaggtttgcctgaccctgaaccgagcacaacaatccctgagtggtgaccacaaccagcagttcacctatatcaccgtggccagaacggagtcaagtcatcgtggaactggtgctgcgggcagcctcaccgtggaccgatcgactggagtcatccctggtcaatctcgcgcacgcaccgagactttggaaggtcagtgaagctctctacgccattaatttgaactcgaccacgagattaggatcgtcagagcaactgtccgccgccgctgacagtagagtggttccaaagtctctgcgggtaaattgagtgcacggccgagtttgccatagcctggagagttggttggtaccgtcgctgtcgtctgcgatgtgtgatcatggcggatccgggtgccggttcaccggagaactgtgcggcggtgtcggggccgaggcgttgtgaaagaaggaaagccgaggggcttaggtgcatctgtcagtgacccgagaattcaatcggagtgcggg

SEQ ID NO: 41321 - DNA, 557 bp, Zea Mays
ctcgatctgcttgttgcattcatgcatctccttgtcaacaactcatgttagcctagcctatccctgaagagagtgatccgactgtactctctttttcccgggacttggactgaaaccgactggattactccagagtcctagaggttgttagcactactctcgccacatctcctgtgcaacgatgcagctcaccttgcttcatcaccatcatgggcactccagcttttgttccgatgcagcgtcagctcttggcactgtggcacgccaccacacacccacctcgtgtctttcttattacattgcattcgttgcacatgaaccaagaaagaaactgatgatgatgtagtagctagtgcagccaaaggggccggcatcatcttaaacattgaaccaagaaagaaactgatttgatttgatgtaggacaacatacacaagtttctattgcacgtacgtctttttcatgtcaggggtacgtaactgagaacatagtgatgctcaatccacgcgcttattttgcgtttacataccacatcaaaataatgtctcacagatcggc

SEQ ID NO: 41322 - DNA, 5108 bp, Zea Mays
ccacgccggatgccacaatagacaagcatattaagactgtcatgtctctcaatctctgcccatacttgaagccaatctggctgatcacaaaagacagtcatcaccctttaccgcacgtagcagcccagtattcgagattaaatcctgaatttgattgttaaaagatatcatcatatcaacgaagctaggccacaagactagcctgatacactgtgatgcctgcaccacttaaggtactactttcctgaagaaagtcaatttgctgacaatgcaatgaccattcccttgcctattcacatggagaaacttgatgttcatatagaaataaatatttctagacacttcaagtaataaaaatacaaaacaacttaagactacgtatgaatggctcaaaataatcattagtcacaaagctgaaaatacaccgtgacctaacttttttaattgtggtctcacagtttgatgtatatagtgcaaaatttctttcaatctttgcttacttcaacttctttctataaagtggacataatctaactttccaggcacatgccctagaagatgagatcttttcttcattgcatgaattcttgagaacctttatttgaattctagtgttaatttcttttcaattgattttctccctgctgatatacatgcttataaagaaaaataaaattatttctttttcacttatatatgtttaaccttttcatgagagcagctttatatattcacgatttcttgttgggttgccaacgttatgtttatattgaccaactttattaggacactgcattctggtatttggcacttaacagttccactttgcaggaagaaaggttcagattgtgagacaaaggatatatgtaccatatcactgctcctctatcaagcatcagttctcattatgtatatagttttaccattatgacatccattttccttatcaaatgaatatccattttatccctaggaagaatgggataactgttagtattaattaggtatgtgatattcgtgaaaggcactgtgactttactacatgaatatgctcaaatcactttaatataaaacccttcatataacacatggtaacagaactgttacttatatttcctctaaccattctagacgatttaccctacaatctttcagttccttcattaatacttttcttttcaattcatgcctgtgttcttatacaacacacaaatgactacttatgttttatagctccgtctagtttagaatcgtagaatttcctgcccgtgcaagcattagattgttttttggattggttaactaacagttatcgataattatttgttgtagtcactgttgttttcttttttcctttttttacttgattcaaggactgctagtggccgaagggcactgcctcctccttttgcttttacgtgctgcaagaccattgttatgtatttcatgtttattattacttcgaatacggctagaatacaatgttttaacaaggtatggtgatggattactctcggttgttgattaatcttgtagcacgtcctttactaaatattgtgtttaaatggcgaaggatgatggagatacaatgaacacgaaagtcattattatttttagccttggcgctatatgtttgttagcagaggttacatgattcttctttcggaataggcggaaaaatgagagccttcactgttgtttatttagtagaggttgagatcgtatttcaaattattaagaacactattgttttagattctttcacatattcatacgtttgaaaaaaaaccgcattctccatgatgttttggtcatagagaatgtaataaaagtccattaaatagcattgatactcccatactatagtattttcctttgtgttgaggattaatgcaaccacagtgttgtggtttgaacactaatcgagaaggcctctttactgttgtctaggtcagttataactttcatatatgtgcttccatacactttaatgttagtagtacaattgctgttagcagattaaaaacttagttaaacatatgcgtactcacatatttattatttctctttacatcaaggattcccatggacatgtggttgtccattacacagatgttgatacaaatgttcagctcctttttaggtaccgttgctcatgttgcagcccgaggttgtagctacacaggaacacaaattcagtgcagcttttgagcttgcaagaacggatgttggctgtgtttttgcaaatcagggtgacaataatgttgaaagaatccagcgttcgaagtatttccaagctcttcttcagaagtctaaagcaaatgtttctgaacaacggaatgcaacatgtcaagagttctcagttcaatgggctccatgcgtcgatgaaagccaagctgaaatggaaaatgagaagctaagcatcagggcttcaaagttaatgatgcaaacgaagttgacatcattgtatagcagtaagtccttgaagacaaatggcgtacccaacaaaaatatgttcaaatcagagaactcatctaaagtgtgtgccggtgttgaaaatagaacaagtcaaaatagtaacaggcggcatgcttacctggacgttgaggaggatgagaaatcccatgggcaattgcagaatgcaaagtggaaacatacagggttcagaagtcctatatttgaggttgcaaattctccatcaagtaatgatgaagctgatgctcctgccaatgagtttacgactgccaagagaatgatgagattctcagttcgcgccaaagtgaggcaatcggggatcaggacagggtcaacacaagcactgttagtcggcgcgtctagccaaaccaatgccgagctaggcgtacaatggtgccgtcccccttagcacggcggatgcgacggtgcgcctcacgcaggtttgaatgcgcgacgacgcaatcatggggtcgggtcacacggatccggctgctcgcattgcacctaggatttcaccctagagatgccggcgacgatgtgctgagaagaaaggtggagatttaatagtatcatggcccaactcgacacgattcaaagtgggtctgtgccatctgtctcgagaaccgggttggatgttgtgcaaaagccagcacaaaatggtccacaaggtgcttctgtatcaccacaatgtgataacaactatagtacacggaattatggcgtgagaccaagttggaattctcgtcgtggaccacgtggtagttttataccccctatcagaaacaatggaggatcaggtacaacgatctcacgggtcactggtaaaaatgacgagtccatggaagattcaacaaggaaatgtattgaaatgctttgtgctcctgatggtgagcttcctgagaagctgaggaatctagaacctcgccttattgaacatgtcagtaatgaaataatggatagggatcctaatgtccgctggaatgacatagaagtgtgtgacagagatggtgatatggccactgctacgtcctgatatattccgtggttgtcggtctcctggaagaggtctactgttgtttggacctcctggaacaggcaaaaccatgattggaaaggcaatagctggtgaagccaaggcaacatttttctacatatctgctagttcactaacaagcaaatggagaggagttacttctttggagtctggctggggctagaggaatttctcatctcactctagtgccaagtgcaaactagggctcctcagtcgaggtcaagttgtcttttttactgtaatagattggtgagggtgaaaaacttgttcgggcactttttggtgtggccagttgtcgtcaacctgctgtcatatttgtggatgagatagactcattattatctcagcgcaaatcagatggtgaacatgaatcaagcaggagactgaaaacacagtttctaattgagatggaaggttttgacaccggaaatgaacagatcttacttataggagcaacaaacagaccccaggaactggatgaagcagcgcgcaggcgactcacgaaacgtctatacatcccccttccttcattagaagcacgggcttggataattcgcaatctattggagaaagatggacttttcatgctctcggaagaagaaacaagtgccatctgtaaattaactgaaggctactcaggatctgacatgaaaaacttggtgaaagatgcctcaatgggaccactaagagaggctcttcagacgggcgttgaaatcgcaaagctcagcaaggaggatatgcggccagtgatgctgaaggatttcgagaatgctatgcgggaggtaagaccttctgtttcctcaagcgagctggggacttatgaagaatggaacaggcagtttgggagcctatcgatctagtctgtcggcaggcatcaacgaatacaatcatgtcggcactatagaaaaaggagctcaacgattttagccggaacatgacatgcataacacagctctacagtttaacaatcttttgaagcatcaaaatttgaactgtctatttggagtgctgagtaatatccaggagcctacatatcaaatagtttcaattgtttttaaatcttcacttttctgtaaatttgtttgccttggttttgattgacatatgactagcgcggaagtcaaatactccgttccaaattataaaatgttttagcttttccgcatacagttttttagatgaataaaaaaattaatgtatctataaaaagcaatatgtaaagagatggtacaacattgacaacaaagaagaagatttgtgggtccaactcagacctagaccgtcttcatgggtagtgtaaaatagagaatgcggaactgtagatgatattgtttgatactgtttgtaaagtaaagtttgtttgatactgtttgtaaagtaaagtttgatatataggatgagataggagattggataatagatctgctagagataaccttctcatgctctcgaggatcgaaatagataatgttccatgggatcgaaatagataacgaagaggactcatcttacaagggttgtatctttgtaatagcagtatgtcttgaattataagggattttatgtaaatattgaaata

SEQ ID NO: 41323 - DNA, 4170 bp, Zea Mays
cgcgtgcctagcgtcggctaccgcgactgcagcgtcggcggctgggaccagcggatgtgcgttcctctctctagaagctccgtccgtcttcacagccttttcctcccaacaacgcataatattagctagggtttcaacgcatctgacggcggaagctagggcgtcgccaccgtcaatgtcttggcactcccgctctgttcatcaatcgcatcgacaggagccctatcctcaatcatgtctttcccgccgagctacacaccttcaggagcccatcccctcctccctcaaacgacgccgggtgacaagcaggaaaagtagtgctccatgattctctataacatccgaaataaattaggattaaagcaagaataggaagttattcaaaactcaaaagtaaagggtttccggtcttccagttaaatgaccaaatgacctgtagaatgacagcaagcaagcaaaataaacggcagacaaattgcaccaactcagagcagtgcaggccagggaagaaagcaaaatttgacacatctcattgtctagtaagtttgaagcctcatatcagtcttaaatgggatcaatatctgaggaaagttgtgccagagaaggaacaagttggaattttgtggtcagacttggcccctttcatggaaagccagaaacactgttcaggccttgctgatgttatgtatgttcctccagagattttctctcttaagagcctgaaaggtgtgctatcctatgaggcatggtctacatctcttacagaagccgagagaaaatttctcatacaattccttccaagcgagactgatgcagaagaaaatgtaaaattgttgcttacgggacaaaatcatcactttggaaatcctttccttagctggtcatcttctctttgctatggtgatattcatccggatgcactacttaacaaggagaagcacataaaaaaggatgagaaggcatatcatgttaacttgcttaattaccattccaacatggttgaaaccttgaagagttggaggaagagatggctaagttgcggtgatacagagaatttgttcagggataaccctagtaatcagatgcaaggagttatgcagctgaaagctactaacagtggaatgcccatgaaggttgcacaaagaatcgatgtttcaaagtttatgtcatacatcaaagttagtagaacacagctcaaccatataaagagactgaagcaatctggggatggtattcagaccaagcatgtttcacgtgtaattggcggccttgataaatctcatgtgaaaccttatggagctttattagaggatgaacagaggagactgcgcgagcattggctggaaatgtcttgcaatgatttacctgctgcctttgaggttcttagggaaaggaaggtgctgatggagaaatcaataaagttattaggccttgagcttcagcagaagaatgtatctgtcttgagaaaggttcgctgtgacttgtccttcaattctttttcttaagtctctaatttttgtcttgagggaagtgatttacttgaatgtgtaaaaaatacagtggatgagaataccgttgtatgcttacttctgttatgtatcttccccatttacaatgtatcatagcattcgccactatagatgagaataccatgactataaagatactgaattgtaatagaggcatctagtatgaaagccataggcagtatttcattatgaatggtgaattgccctgcagtgttatcttatttgtataagctaatatattgtcacatttttgtaagtatactttgttgtaatcttcataatgaaaataaattcttataaaaaacaatcttaatttgtttttaatacccaatagatgattatggtttatttatgtttgtttatgatgagaaggcagaccagttaacagacataatgaaagggctaggacaacctggtgctagtgaaaatgatggtaccccagtttttcaaaatgaccaggtagaatgctcaccccaaagtatattgcaaggtgggcatgttcagagcacatctcttcaccatcaggatgatgagcagtctgtttaccatattcaccgtatgaatgtggaagatcatgatctcatggtagtcaggggtatagacataactagtcagagtgagaaaaactctgatgtgccagatcaaagtcgtaatggtatcagctgcgtagataaaggcatttactgctgtgccaacaaccctgataagcagagtgatgttctcatggacatcaaattatgtaaaggtggactggttgtttacaatcctgactgcaaaaatacgcaactagaagatcttgatggagtttcttacaaaggtccatcagttcatgcttgtgaccaagatcaggacctggaaagcatcggccatgctgttgtgaaccacaattgtcacaatagtccaaatatttcttcggaaatgagtcatccgacgacgaacgctgtaattgaccaggaaactgagaatgttatggaaccatcttgcagttcttcacaactacctaagtcgtctggagaacaaatgcatgtggaagattttctgtatctaaatgaccaagcagcaaaatttgagaaagtcagtgggcagttggcaggccctcttggccctccagagaatatgatgtataatgactcaggtgacttgcagattaaacagacttatctctcttcaggacaacatttttcttcagtttacttgaataatggcattttaagccatcagcaacctcaacttgccacaccagcttttgctttggacaatccagcatcatttattgagcctttctcaaatctgcagagcaatcgtcagcccgagacagaaaaggacattggagcagtcttctatccctttcgacacgcaactaacatcaaacagtcagcgagtttgcattgtttagtgaataaaggcttggctcaatctgcttcatttcccaggttgttgcaagagcggcatcagttaatcgatcagagtgacagtgacctctatgcacaacctcatgaggattactgcacagatgtgagttgtccaactaaagtgaaccttcatatctccgaacagcattcttatactgcttttgcttcgatggatcataggtataactggttccccgagggctgtcagtcacataataataatgataatctgttggggttgcagtcaggtaacttcttaccccaggccttaccaagtggaagcagcaccgatggagctctgttcagcaccgcatcccagtacaatcagccatcagtacacatgggacatggtgggtcaaaccgcagccaactcattgagccaaggaatcaatttggcccacctcagaattttctttctaagagtcaagacacaaaccctatgtttccggatatgtatggcttcacccagaatatagccagtggcacaagcagtcaggtagcacctatagggtctctggattgctcacattggacaaatttcatacaacaaaattctggaatgccgtctgactttacaaacaggccatctcgagggccttggaccagataactctatgacaccctggactggatgtactagattggttggttttaggcgccacctaagttggttaataaggaaactggggcaggttggaacagaatgttttccagcatccatgacttatgtcatgtagtggttttgatctgtttgaatggtgtggtttcaggaattgcttttgcaccatacctgtctgaacgcaagcgctgggaatctggagtcaaagctgaggattcccgcttttgctgtcttgccctgctgattttttttttattttgataataagctgtgccccagtttccatgtgtagtctgcctatggtgccctcagcaaaacatgatgctgtgttgttctcaattattttgttatttttttttgggttgacatgccagttatatatgaagacaagatatgtataccagtcgggatgccattttaggtatcaagagcgggcagttcgaaatgaacaagtacctttccttttggttgggaggcactaggatttctttattcaggcgtgtttacattccgtttgattagttggccgcaccgtttcgtcctaagtcacttagtgtattgactttatctaaatgtttgtttggttgtctgtacatagtgatgtataaag

SEQ ID NO: 41324 - DNA, 3824 bp, Zea Mays
cggcgtccatccaccccgacccatccaatccgttccattcctacgtcggctcggacctcggagacacagggatcgtcttcgtccccggcctctcgccttcctccacccccctctcctctctctcgctggctcgtggccaacccacccacccacctccgctccgccccgcttccatcgatccattccgcgatcggccttacacgtctaacagtacatgagtttctaactggtgcgagcccaagtaaagttctgtaattagtcacattcctgcacaatgtcgactgcgaaagtggtgcttgagcctgcatttcaaggagctggccataaaccagggacagagatatggaggatcgaggatttcaagccagtcgctttgccaaaatcagactatggcaaattctactgtggagattcttatatagttctgcagacgacatgtaaaggaggtgcttttatttttgacatccatttctggatcggaaaagattccagccaggatgaagctggaactgcggcgatcaagacagttgagcttgacagcatgctcgggggccgtgcggtgcagcacagggagccacagtgctacgagtctgataaattcctctcgtattttaaaccgtgcatcatacccatggagggcggctttgcttctgggttcaaaaagccagaagtggacaagtttgaaacacgtctatatatctgcaaagggaagagagctatcagagttaaagaggttccattttctcgttcatcgttgaaccatgatgatgtctttatcttggatactgagaacaaaatatatcaattcaacggtgcaaactccaacatccaagaaagagccaaagccttggaagtgatccagcatttaaaggaggaataccatgacggagtgtgcgctgttgcaatcgtcgatgatgggaaactgcaagcagaatcagattcaggagaattctgggtcctttttggaggttttgcgccaatagggaaaaaagcaataagtgatgatgatgttgttcttgaaactacatcaccaaagcttttcagtatcagtaacggccaactgaagttagaagacgctgtccttacaaaatcaattttggagaacaccaagtgctttttacttgactgcggggctgagctattcgtgtgggttggtcgggtaacacaggtagaggacaggaaagctgccagtgcagcagttgagaaatacattattaaagaaaatagaccaaagacaacaagaataactcaagtgatccaaggttacgagaatcatacgttcaagtctaagtttgagtcatggcctgtaagtaacacgtcagggagtgccagcacggaggaaggccgagggaaagttacagcactcttgaagcagaaaggtgttgatgtcaaaggaatctcaaaaactagtgtgccagtaaatgacgaagttcctcctttgctggatggcggtggaaagcttgaggtttggtgtattgatggcagtgccaagactgctcttccaaaggaagaacttggaaaattctacagcggagactgctatgttgttctctacacttatcattctgctgaaaaaaaagaagagttctatctagcttattggattgggaaaaatagtgtacaggaagatcaagaggcggcttttcaaatagctaatacaacttttaattctttgaaaggaagacctgtccagggtcgtatttatcaaggaaaagagccaccacaatttgtggctattttccagccaatggttattcttaagggtggtactagctctggttataagaaatttgtagaagagaagggtctgaaagatgaaacgtattgttctgatggcactgctctcattcaaatttctggaacagcggttcataacaataaaacgcttcaagttgatgcggtcgcaacatccttgagttccacagattgttttgttttgcaagctaaaaactcgatgtttatatggaatgggaatgcaagttcttttgaacaacaacagtgggctgctaaagttgctgaatttctgaagaccggtgttgctgtcaagcattgcaaggagggcactgagagctctattttctggtcttctattggtggaaagcagagttatacaaatagaaatgctgcacctgatgttgttattagagagcctcatttgtataccttctctctgaggaatgtgaccctaatttttcattttcattttttggcttcaatcgcgataacatcgtcaccatttgtcagggaagctggagatgatctgttgaccgaagacatgatgatacttgatacacactgtgaggtttttgtttggatgggtcagtgtgtggagacaaaagaaaaacagaaagcatttgacattggccagaaatacgtacaacatgccgtggcctttgaaggtatttctcctgatgtgcctctctataaagtcaatgaagggaatgaaccttgcttcttcaggacatacttctcctgggatagcgcacgatccgtgggtggcaataagggctcaggtgatggtgggccaactcaaagggcatcagccttggccgctctttcatctgcattgaatccatcgtcgcaaggaaaacagtcagatgagaagcccacaagctcagatgacagcgagcatactcaacgagcttcagcaatggctgccttgtcctctgcccttaatccatcgacaaaacctagcagcacacagacacaatctcattcaggtcaagggtctcaaagagccgctgctgttgcagcactgtccaatgttttgactgcagagggatctcatagcccccgccacagtaggtcgtccccaacagcagatgcagacaagactgaattagttcctacttctccccatcaattagaaacagggactgcagaagatgtccgaacagagcctgatgtctcacaggaacaaacagctaaagaaaatggaggccagacaacctttagctatgaacgattgatatcaaagtccactgaccctgttagtgggataaacaacaagcgcagagagacatatttggtggacagtgaattcgagaccgtatttggcatgactaaggaggagttctacgagcagccaaggtggaagcaagagttgcagaaaaagaaagccgatcttttctgagacaaggctggcttcgaactaataaaagcccttacgtcgcacaggattgtccagcattctcatcatgctcgttccgcgtatgatgatcgatcaccagcagctttatccgtgagttgtataggctactcttttatctgcacatggtttgggagcattatatatatatcccccttgcccgtccattattctgaggtcgttcttgatgttgacctttcacgtgttttctttttttattgtattataaaaaatcaaactggtgtaaatggcattactagtgagatttttgtaagtaatggtgcatgggcaccaaggtgtatgcaacatatttttgttgtaagacttcagcttctattgttctggtggtgttctattgaccactggtctaatcatctttactggcttaggtaatggccaacatatcatggaccatgcaaaacactgtttcacattatagattactttatttataaaataaagtttgaaataaaagacgtagataagtaagctgctggagatagcattaccgctgagcactgcagctgtgctcaatgatgatatggttggtttgacaccctactagtcttcttgatggtgtggctgcggctctggaaggagaggaacaggctattttcaaagtatgaatctgtatggtgatgataaaaatttccaattagcctttcataaaaaagaa

SEQ ID NO: 41325 - DNA, 367 bp, Zea Mays
ccgcgcccctctgctcgtcgcccctccccagcagagatctctccccagcaaggttcctcccatggccatcgtgtgcagccacgagctccagtcctcttcttcctccctgcgtgcggatctcccctgctggcgcgcctaactccagctcgctctccagccgttcctcccatgccatggtcttccctgctccagctcggtatcctctattcctccactgcgagaacgccaggctgcaccagtttgttgggcacctgcgccgaactccagcccgccgtggtctatgacctcatcgttgaattctatgatatgcgactggacctcacctcgcttggccacgcgtcgatgttcctgttcgtctccatctgtg

SEQ ID NO: 41326 - DNA, 4893 bp, Zea Mays
tgggaactaggggataatgtcgtactgaattcgtgtaaattattattatgttaggatagaatagaaatcatttactattggtaggtatgatcccattttcaacttttgttgcctgtttggtttgttggtttggttccgctcagcggcgtcgctagttcgctgctggatccgctagtttaacttggcctcgttctccctgagccagaatccagaggctccgtccttcggctaggcgagatcacgtgtctgaatcaaccaaccaaaccctaacccttgcagaggctgcggatgaagccatccaccgccggcgacgcctctgcggcggcggcggcgtcctcttcggggccctctacctccgcgtcgacatccgcgtccacgtctaccgcggacgccacccactacatcgccaagcgggtgctccggggaagcgccgtgctccacgtcgccgagggctgcttccgctcgcccgactccgcggacgtcgtcctcgccaaggaaacttcactggagttggttgctgttggtgatgatggtgttttacagtcaatatgtgaacaagacatttttgggattataaaagatattggtgtattgcaatggcactctagacataatggtttaattccacagatagaatgcaaagatcttctggttgtcctttcagattctggaaagctttctcttctttacttttgttctgagatgcacaggttcttcgcaattgccaatattgagttatcgaaaccaggaaatctgaggcatcatctgggaagaattttagcgatagatcgagaatctaatttcgttgctgtcagttcatatgaggataagtttgcccttatacatgtttctgtttcccagagtggttctggcagcggtattatttctgagaagattttgaagatcttccatgtcataatttcagaaatatttttatccaccagaaaatgaagatgacgcaaggatcataacttcgtctaggaccagcatccgtggtacaatttggacaatgcgcttcatatctgtgccccaagatgaagaatactatccagttctggcaatgataattaacaggaaaggctctgatgtgaatgacttgtcgttatttggatatgactccagcagctgtgttatcaaccacctctctagttattcagaaattggacctttggtacttgacgtatcagaaattcctgaaacgtttggctttgcacttctgttgcgtgttggtgatgctttattgttggatcttagaaatccaacaaatgtctgctgtatccaaagagtcagcttgacgactaacctgattggagagccaatcactgttgaagatccctgtccaggattagatgttgatgatgatgtggctgcttgtgctttgctagaattgagagattctggtaataacataatgaaggatgatggttatatggacattgatggtgttgacagcagaagtaatgtgaaaccaaggatcgtttgctcgtggagctgggagccacctgaccctgtcaggcgaggatgtgcaaggcttctattttgtttggatgatggagaatttcatattttggaatttactttggatgttgaaggggcgaagctgtacacatttgaatatattgataggactttgccttgtagacctcttttttggatgaaaaacagaatgataatagggtttgtagagatgggggacggcatgatttttaaacttggtcaccgcaggttgcttcataaaagcactattcagaatgtagcaccaatattggatctagcaattgctgattaccatggtgagaaacaggaccagatgtttgcatgttgtggaatgtcccctgagggctctcttcgagttttaaggaatggtgtcaatgtggacagacttctgaaaactgaagctatttaccagggtgtcactggtttgtggactttgagaatgaaggcaactgatgcctaccattcttttcttgtgttgtcatttgtggaggaaaccagaatactgtcagtaggactaagttttaatgacatcagtgatgccgtgggattccagcctgatgtttgcactttagcatgtggtttggtggctgataatctgctagttcaaatttacagcaaaggtgttaaggtctgtttgcctacagtatacgctcaccctgaaggtgcccctttaacttctccaatttgcactgactggtatcctgctatcactatcagtgttggtgctgtaggacataatattgttgttgttgctacatctaatccttgttgcttatatgtccttggtgttagatcatcatcttcttaccagtacgagttgtatgcaacacatcatgtgcaattgcagtatgaagtatcatgcatatcaatcccacaagaggattgtatacatgataatgtatctttcagctgtggagagggtgatgacatttgtaagaacccccctcctaaagttaatgtttgcaagtttgctgttattggaactcatagaccttcagtggaaatcatctccttggaacctggagaagcattaagggtattaactattgggactgtatctgtgaataatgcacttggcgcacctatgagtggttgtatacctgaaaatgtcaggtttgttgcggctgagaggttttacattcttgcaggcttgagaaacggaatgctactcagatttgagtcagaaacacgtgattatctccctggttttctctacaaggactcttctattccttctgttaatacattccttcagttgatttcgatacggcgtattggaattactcctgtactgttagtgccaatacatgattcagctaatgctgacatcattgttctcagtgatagaccttggctattacatgcagcaagacatagcctggcatattcgtccatttcatttctttctgcttctcatgtcacacctgtttcatctgttgattgccccaatggtctactgtttgttgctgagagctgtttgcatttggttgaactggttcatgggaagcgattgaatgcacaaaagttttcaattggagggactccaaggaaagtgctataccataatgaaagcagaacactgttggtactgagaactgggctaaatggtgcatcgtcttcttcagatgttgtacaagtagatccacaaaatggggtattactttccagatataaatgtgaacctggcgaaacagcgaaatgcatgcaaattgcaaaaataggaaatgatcaagttttaattgttgggaccactaagtctgctggacggccgatgatgtcaaatggtgaagcagaaagcatcaagggacgcctgattgttttaagcttggaggccgttgaaagtcctcgtgagagcagttcgtttattccaacttttagttttaatccctcttcacattctggttctcctttccacgagattgttggatatacaactgaggaattttctagtaacagcatgtgcagcagtcctgatgagtttagctgcaaccagatccaagctgaacaaatgacagggcaattgagatcattgactcaatatatattgaatggcgcagttcttgctctgtgtccctatctagatcgttatgtgttggcagctgctggtaatatgatttatgtatttggtttcacaaatgaaaatccccacagaataaaaaagtgtgctgttggtaggacacgatttacaataacttgcctgaagacatttgcatcacgaattgctgttggtgattgtcgtgatggtgttctcttctattcttataatgagagtcataggaagttggaattggtctattctgatcctgctcatagattggtgggtgatattgctcttttaaattgtgaaactgctgtggtatcagatcgacgtgggagcatatctgtattatcatgcaccagattggaagtttcagaaagtccacagaagaacttagccgtgaattgttcattttatatgggtgaaacagccatgagcattcagaaggctgcattcaggtatcggcttccaattgatgatgatactgacccggtgcttgagacagtttacaactgtatcgtggcaagtaccatgttggggagtctctttgttatgattccactttcaagtgaggagcatcagcttttgcaagatgtccaagaaaaactctcagtacacccattaactgcaccggtcctgggaaatgatcatgcagagttccgtcagcgtggtaccccttcggtagtgcctcccattcttgacggtgatatgcttgtgcaattcttggagctcaccggtgaacaacagcaagccatccttactcatgctttgccagggaaggggcaacataggcccctctcggttttccaggttttgcaaacattagagcgcgtccattacgctcttaactgaggctttcttcaatcacagttactacaaggtttggatattagagctggttgaccttcattgtttgagatgccgtcagagctgaggttttagtgaccttcgcaatctagacggccgattccaagtctgccatgatatttatcagaacgtttgattgatgatgcaactggagcttgatactgggaagtctcatggtggcgagtatcccgtggaggcaccagattcgtcgaacctcctgtgtatatacagtcggccgcttttggtagactgttgtatggcgcattctgcatagaaacgaatattctttccgtttgtttcaatagataatgtaatgtttcttacgtcagctggtcggatgctcaacgagaaataagggaaacaatgaattgcattggccgtcctgctctatcacatgccattactgattagtgatgaatgcatgcaccagctgccgcagtgatgatcttgccgcggcagctcctggtcagggacggcgcccacggggacgc

SEQ ID NO: 41327 - DNA, 4173 bp, Zea Mays
cttcccccgagctccgacacagccgtcgccctgagcccgtcatccatgctcccttccatccttctccccaccagcacaaccacaccccctctcccccctcgccgcctccccagaccccgacacgtcctccccggccgcaatgaccgctccccgaccgtggtccccgctagcaaacccaagctcgtcggggagaagagcaaggggggcgcagaggcttgcctacctagctcgtcggggccctatggagatccagcaccaccggggctgggcaactccaaggttgtgaaggtgcagagcgaggaggcgtgggatctgttcaccgatcgagcgagcaatgaaggctgggccaggtatcggcgatgccctcggcgacatcgaaatctactccgcggccaccggcgagcccgtcctgttcagagacctgtgggactaggacgagggagtgtctgttgttgcgctgctaaggcatttcgagtgcccatgctggtgagtgaggacgcttctttgtagctggtataacatggttgttatttgactgccgcagtcctatcatctctttgctctgcgccccggccgggccctaccgtccacatcatgccctgccgtccgatcctccagctcgctgtttctgagcacaaccgcgtcgtaggggggaatggaaaatctacaccgtcgctgtcgggggtggcgtcttggcggtcgagcaagtgggcggcccgcgctatgggattcagcggcagcgacaacgaaagcagtggtagactggtagcggtctagccgtgccgtgggcggctggccgctggccgcgtttttgcttccaatgtgagtgcggaactacggatcggcaatgagcatattttacaatcaacttcttcctttgagctagctgtcggctctgattatgcctccgtgtagctgggagttggcctctgttctgaaggacacaaaggagagatttgattctgcgggagtaaaactgattgttgttggtgttagcactccagttaaagcccgtattcttgccgaggagcgtgtatgtatatgttccatttggtaacctagctttaaatctttggagacacacagacagactgaacctgcttttaggctctgagttttgaccaagtaacccattgttcttgtttactggtttgctagacgacaaatttctaacggaaggagagatagacatgcctatctgttttagtttgtttttgggcattctgcaaagaactcacaaaccttaataatttactctagaattcatttgatgcagttgccctttccgttggaatacctctatgctgatcccgatcggaagtttagtaaatggagaagtaatgttggccgatccgcccgtagatcctctctccccattaccgcgatttatttggtacttcgggcaggagggtcctgatcggcgactccggcgtcggcaagtccaacttgctctcacgcttcacgcgcaacgagtttagcctcgagtccaagtccaccatcggcgacgagttcgccacctgctctctccaggtcgacggcaagttcgtcaatgcccagatttgggacaccgccggctaggaacggtacgtttcgtttcagcttgctccagctcgtctcgcctttcatctctctccgccgttgccgcggcagctggcagtagatctgatttgcgtctcggttcggctgctgctagcgtgcgtatcctcattttcaccattaagattgggttctcgctttggatctcgctgccgaattgcgttgcgtgctgctgttgattaccatttgtagggtttggtgcattttcatttcagaatccgatactggaacacgcgaatcagcatgcaggcatccttttgttgacaaactagagttgtaggatgatgatgatgatatgatattcttctattgcacaaacgttttttatactgcccggagcttggttttcgagtacgcagcaggtggcgtggactggagatgacttggtttctttgccttggctcatgccgaacatttagcctaggaggagcagaccggccattttccttttctcttgtttgcatgcagcaagcctggccagttcagttaatttagtcgtcaaaacagtaaaatgcgcacaatgcaaatatggactggagattatctgaaaaaaaatgtgagctctatccaaattatggatttcttcagtttaaattgaccagtggattagaaaaccttttcttcctatcttaattgccaacaatcagttttttttgcagtgtcaaggttcatcttcttaccttgaaaccgaggtacttcattcctactagataattgttgctaaaatagggttacattattaacgtctggctgtttcgtcacgcaactaccaacatatctatatcttctccgtgatctgcacaacaaattagataatttgaatccttcaatcaagccttttcttagtacttctaaagcaaaatatactactactcattgccataagagcacacaagattttcttgacaaaatccagccactattcttagttttaaggaagcatctggatggagcagtttcaatgatcaaagatggtaaccttctattccataatttttgcttcgtgttacttttacaatgtttgaattaataattagtgggctgagtcggtttcttaatggtcggggttgtatgtgctgggagggattacaccccctcctttgtggatcttttcttcttagtgaaatgacacaactttcctgcattgcttgagaaaaacaatgtccgcatttcgtataatccttcattgaatgtccttgctttcgattggtaacatgataagctactactcttcagaattagagagctgtttagatgactggagttcacattcatcttctgctggcaacccaaacataccatatgtggttgtctccaagtcatcaattgtgactgctgtatgcaaagagattcttggctgctacaggaagttacttggcattcctgatctgttgaatcaaccaaacatgtcaattctgaagcaacttttgcagactttacagccaactgaaaattttgatgatgttctttctgagttccaatcatctcttggtccttgcaatgttgattacctatattgtggagaatgtaaaatgttggaggatattatggattcagtgtcctcattttcataccttttgtcttctgatgtgttaattactatacaatcaattgtaaattctgttgttgtgttgttggacaaatccggggaaccaaatgggaaaaatatacacatgggatgctccaaagcaatcatttcctttctgcgaaagcgtcttggatactcagctcataagctgctcagtgctgatttccctagcgaagatgttggaaaaggatggcagagtaaaggtgatcttatacagaagatattgcaaatatacctcaggaatagtgactctacttcagatctacttgctgagataggtcgtgaattgcctaaggtgggtcatctcttcttctcgagtgatgctctcgagttatgcatatgccaccactctgccttaaaaagaacatctggcatcattctgaatccagccgaagagtgagcataaaaggtttagcaattcacaaataatctatgttcaatgggcatgagtgaagaataattagtaagtgcttttcactgctgacttgatagcaaagtagtgtaaaaataatggtaaaagtggttacgccttataaactgggacggagggagtactgttatattagcaagtacaaaagcattccccgctaacattgtttgtgtattagaagtcactaccggaatttggctctttgccgagtgccatattctttgccgagtgttttatttcgggcactcggcaaagagctctttgccgagtgccacgcaaaactaggcaaagacaattttaaaatcacattttaaagtagtaaattaattcaaatgaaaaagttttcaactacaaatttgtataactcattatgatgtacaatttatatattaaacatttcttcatatgacaaaataaaaataaatttgttcataaaatctatatctctctcgtagtttatgaaactacgagagagacgtatagaatttgtgcatattgttagaaccatcatctgagataaacaaattatcaaacaaccaaaataaactttataaatctt

SEQ ID NO: 41328 - DNA, 2539 bp, Zea Mays
gtctgtctccacgactccacgcatgcttcagcttcacggagacacggttcacgccgcgatccgggatcgctctctctttgggctaccggctccgccgccgctccgccgccctaagccaggtgctgaaggccttcgtcggtcttttcaccggcgacgacgacccactaggaaaagaattttcctggcatatttttgtttccagaaatattcgtgtcaagttggtatgtcagggatcacagcaatttggcgtcggtcatgtccattagctgctagtcagattctaatggagacatattttggcccatctgtatcttctggtgttctgaggtggttcagcagcggcactaagcactcaagaaaacctgaattttctgttgctaaccatatcagggtggtggatttgcattctgcttctgcagttaattatgtgtcaacgatcagaaggttgcccctttcatgccgtatggacactaattggttgattacttcaaagtccagacatggtgcattgccaggattcttaggtgtttcaagcttctatcgtggatactcctcagatactggaatcaagccagaagcttcgcagagtggtgtctctaatcttccttctacagaaagctctgaggttggcactgcaggtgctggtgggggttcatggattgaaatcttggacaatgctcgcaagtctactatagatgctaccactgatgcaggcaagaaagttaaggagctgactgatgcagttgcacctcatgtccagcagctatttgatacatatccaaatcttgaaaaggtagttgttccacttggcggaacaatatttggtacaatgatggcatggttggtcatgcctatcattctaaggaggcttcacaagtacgcatcacaaagtcctatatcagcacttctggggaactccaccaagaatgatgttttgtaccaaactagtctctggtgtgcattagaggatcctgcaaaatatctgatcacgttcatggcattttcagaaatggcaacacttattgcaccaagcgtatcaacttaccttccacaggcatggagaggtgcatttgttctgtcttttgtatggttccttcagaggtggaaaaccaacttcattgctaaagctatgaccaaactagatgcctcaagtgttgatcgcgacaggatatcggcatttgataaggtttcttcattgggactgattggactaggagtaatgggtcttgctgaagcttgtggtatagctgttcaatcaatattaactgttggtggtgtgggaggtgttgctactgcttttgctgctagagatgttcttggtaacattcttagtgggttctccttgcaattttctaagccattctcagttaacgactacataaaggcggggtcaatagaaggcaaggtggttgaaataggactcacttctacttcattgatcaatccagaaaagctccctgtcatagtacccaactctttgttctccagtcagatgatagttaacagatcacgagctaattggcgagctagtgtgacaaagattcctattcgaattgaggatattgagaaggttccttctgcatcagaggagataaagactatgttaaggtctaatcaaaatgtgtcctttgatagtgatgttccttactgctatctctcgagattggaaagttcatatggagagctcatcattggatgcaacctaaaaaacatgaggaaagatgagtggctatctgcccaacaagaaattcttttgggagctgctaggattatcaaatcacatggcattgaactgggaagcaccatgcagtgctgttaattcacgcttccggcacttttaagtaaataccgttagcctgcagaagtgcagaacttcatacagacgctacctagccgttttgttcttcaacgttttatgtcttcagaccatggacacccactaccaatactattctgttactgccgttttctttggaactaaggtcttgtttccttttgtggtcgtcccttttggttggtgcttggatccgtttctgggagcttctttgtctatgtatactggtgaacgtttgcaccgcgcccacgcctgccctgtggatgaaccctgagcgttttattggtcaattctgtgaaatattgggttttatcctcgaaattctagtgttttacgtagtactcgattaactagactaataggtgaccatcttgaagcaattcgtgtttgacactgaacattcctgaggacttggacttgcatgccccaggatagattccaccgctgttttaccatgctgaacgtaagagtactgacaggctgccatgatcagcatgtttctacaattctactgatctactttcaccttttctttaatcctcggtactccttttttttatgccttctaactggttgcagctacagtatcgtcttgaatacaaaaccattgtggcgtggttgcagtactcctcaaaagtttgcgtgtcgtaggcaatgtgggacacgcgctggagaaggttttggtgctcgaaggctgcagtttcg

SEQ ID NO: 41329 - DNA, 1491 bp, Zea Mays
cacggtccacggactcacggagacagacgcagacgccgcacccgcacggccgtagctagccctagccgccaggcaccagcggccagccggaggcccggacgactggactgccattctgccaaagccgtcgtcgccacagggaagcgccagtacgccgccgcgccggtacgccgctcggcccttctacagtgttcgtagtcccagttgttccggcgagtggcgactatcagcttcagagcttccccaaatcagccactagaaaggaattggcagcaccatggatgtaaatcacatcactgagatggaggatggtttaaatgatgatgaaatggaatatccatttgagggtgatgctaatgccagtaacaatgatcagatagtagaggaccatgctgatgatgcccctattgctagtggtgagaatgccatcgtccaacagcaagttggtctgagaaagaagaagtacatgtatgtgaatgaccatcgtgttgtgaaacaacggaaactagtaccaacagtgacaattcccgctatgaacaaggataaaggtccaatgccaatgagtatctccaagatgaaaaccaagaagccaatcggtacccctactagcagcaagctaatggcatctgcattcaaggtcacatcaagcaagaatgaacttatggttttaatgcaaaaatcagctgaagttgtgcaacctgcaattgcaagtgctaccgctagtgcaaacgcaagtgcaagttcaagtgtaagggcaagtgcaagtgcaagcataccagcaagtgcccaagcaagtgtcggcgacgatgaaaaacaagtagatggccagattgggaaaagactcacttcatgggtctggcaacatttcacaaggtatgaaatagatgttgagcaacctgatggttccagtgttaagcaaaagtgggcaaaatgtcttcgatgttcacataaagctaaggctgatgcttcaaatggtacaaaggcttttagtaaccacttaaaattgaaacattgtcttgtgaagggtcaacaacagctaagtcagagtgggaatgacatagcgacatataaatatgatgagaaagccagtgtgagacttctatattatgccatcatcatgcatgaatatccattcattgttgccgaacacaagtattttatgaaatttatcaaatcactacggccatcctttcctttcaagtctcgtatcactgttcgtaaagagatccttcgctatgttgtttgcgcttttgtaataaactatgtagcatgttgtgtatctcttttaatgttgcggcgaacttgtgtgaaatatccactatctattatatatttgtggaattgtgaacttgtggattatacataaaagacggggtatgctgctgatttacttttaaaattgtgttgtttcttctataatgaacctgtgtgaaatatctactatttgttatatacttgtggacttgtggagtatgcctaaaagaggggata

SEQ ID NO: 41330 - DNA, 2647 bp, Zea Mays
gcggccggccccacgcgcgggcatgggcatgggcatgcatgccgtgcccgcacgcaagcactcacccacccactgcgggcgctcgtcgatcgccactttcggccccggctaaatcaggatatagaccagtgagggagcgacaagaggcggaggaagaggaggtggtgccggtggtcgtgctgctgctgctgctcgtggtggtggctgtgcaggtgcggagatcgtcgatcgatcgctgcggttcgtcggcggcggtgtcgagatgtcgatggacttcggtgccccggcggatgaccccaaggctttccgcaacatctgccgcgaccggatactgaaggacctgcttaagcctgacaaggataaggagaccaaaagctcatggaaggttcttataatggacaaattcacggtgaagatcatggcttatgcttgtaagatggcggaaattaccgatgcagggatttcgcttgtagaagatctgttcaagagaagggagccaatgccttcaatggatgcaatctactttcttcagccactgaaagaaaatgtcataatgcttctatctgacatgtctgggagatgcccactttacaggaaggcatacatcttcttcagctcaccgattcctaaagacttggttacttacataaagaatgacagtagtgtaataccacgcatcggtgcactaagagagatgaatttggaattcttcactattgacatgcagggctttgtaactgaccatgatactgccctgattgatttatacggtccaagtgaacaaaattccaaaaagttcaacgatactataagcacaatggctactcgcattgcgactacatttgcatcattgaaggaatttccatgtgtgcggtatcgggcgccaaaaggagatgcttccacaacaactaaattcgatatggttccaaagtggcttgctactgctgtttgggaaattgtgtcaaaatataaatcaactattcctgaatttccccagaaggagacatgtgaactgctaattgtcgacaggcccatagatcagatagcacctgttattcatgaatggacctatgatgcaatgtgccatgatctactcgaaatggatggcaacaaatacatttatgaggtatcaaagatgggttcggaacctgaaaagaaggaatctttattagaggatcatgatcctctttggcttgaacttcgccatgctcacatagctgatgctagtgagaggttgtacgaaaagatgaacaattttgttgccaagaataaagcagcacaactttcaagagatggtggtgaagtctcaacacgggatctgcagaaaatcgttcaagcattaccccaatacagtgatcaagttgagaaattgacgctacatatagagattgctggaaaaatgaacaggtgtatcagggagtatgggctccgtgatattgggcaattggagcaggatttggtttttggagatgcgggagcgaaggaagtcatcagtatcctcaggtcaaagcaggatatgagcccagaaaacaaaatgaggttgctgattatatatgcaattgtatatccagagaagtttgaaggtgacaaaggggaaaagttgatgcagttagcgaagcttccacatgatgatatggatataataaattgtttaggatacttggatggttcaaatacaaaaaaatcatcaaggacgggtactttctctctcaaatttgatgcccaaaagaagaaaaatgctgccagaacagacaaacaagatggtgaggaaacatgggctttatcacgttttttcccacttattgaggagctgattgagaaactgagcaagggtgaattacctctaaaagagtacccatctatgagtgaaccaagttctgcttctgcttctcaagatgccacacaaactgcatcatcaactgcacgaccagcacaaaatccacaaccgatgtctatgagatcaaggaggacaccaacatgggcaaaatctcgtaattcggatgattcttcaagcagtgattcttcagtcctgagacacgcatcaggtgacttcaagaggctaggcaaccggatttttgtcttcatgattggtggagccactagatctgaactgcgcacggtgcacaagcttacaatgaaaatgaagcgcgaaatcgtcttgggctcttctagcatcgatgatcctccgcagtttatttcgaagctgaagtcgataggtagtgctaccaagacctagcttgtatgccgagcgataaaatgaattctcaccttatagtactcagtataagcttacacattatacatacttcaccaatgaacagctctacattttactaggatgttgtcggctgtcaccagcgacccattgattatcgtcgaactgatcacagttattattctcttaatttttttttaattgaggaagtgagctggcttgtctggatgtaaaataagaaatacgtacacaacgttttgtttgttatttgatgttcttgttgacaaacagataaagagagaagtcattaggaggttttgtaaaaaaggcctaaaattgatggttatatgatatagaaactgtattgcacggatctataacagaatatggataaaattgattatggagggacacaacttcctttgcttgctc

SEQ ID NO: 41331 - DNA, 576 bp, Zea Mays
cccctgaaaaatctgtttttttggacagccacatacccggattcaaacggtgataactttcaatttataactccaaattgagcgcataaatactcgttggaaaggtaaggtaaagttctacatgatcctcatactgatttcccttaattcctcacgaaaaaaacacagaaactgctagactactgctgttcacccaccacctaaaattctggacagcccccctctaccccaatcgcaaacgcaacctctaatcaattaaattgcagcacaaatgaacaagggatgaacacaaaaatcaccttggattctccccctttccttcctcccttcttccctccaccaaaacgattgaagactcgcaccacgacgacgatgatccgaccggcaaggattggcaccttgggaggaggggattgagagggggggcagctagggtttggtggctgcaagaattgagagaggaggagatgggcagggggcggcggccaagggggaagagaagtgggggggctgcacatgggggagggggttaggagggaggcggctagggtttgggagggttaatgggccgaaact

SEQ ID NO: 41332 - DNA, 1326 bp, Zea Mays
acgccccaccccgctcggcctccagtccagctccaccgctttcacccgctccgctccgtttccgtcgctcccgtcccaaggagccgcgccacgcgagagggggccacggacggtggcagttttctgtttcggtgggcggggacgtcgtcgaccgaccgaccggagcggaaggccggagatgatggaggagggggcgcccgatctgcgagagctcgtgcgcctgccggatgttctcgtggtatgctcatctactggatggacagatgaaaagcacatgctttatcttcgattattggaagaaacatttgtgcaccaattacatggaagtggttgcatttttaagggactgtttaattgctctccaagatattgtaggcaaatgaaatcatctaagcaaattgttaaatacactacgcctggtcaggggtgtgccatagttgagggtggcaaagtcaagtcctgcataaaggctgagcatgttgagtcaccttcctgttgtggaaatcagcaagatgaaaaagttcgttccctggaagataatgcatcaaccactaagcccatggaaaaagccacttcccatgcaagggcagcaagcccaggacaagcttccacgtgctatgttggcaaacacagacattctccttccagaagtgcaggtattaagttcatttacttgagtgacgtggccagatttttaaaagagaactactcgtgcatttactcagaggggtcggatcagaactttgatgaggaaacccaagggactggagaatcaaaacatgaatacaacccgaagcgactgaaatctgctgatggcacaagggatcatcagaagctcatcaggtgggctgccttgatgtgagtgacaaaaatagcgagaacttcagtgcatcgtcaaaagtgcttgctgcatcacttgatgttgaagctgggtctccctccggcgactgcaaggatcatggaccaaaaggataatgcaatgtccaccgagtgttttctggagttgactaacacacccacctggcgcgccgcaactgaatcagagataggaagtcaatcagtgcaagtttgtaagataagctagcttgcccgttattctggtttggaagtcaaaatagttcgttcaacttagcctaggcagttgacggttttgttgtgtttctgagggactctgatacgaaaatcaaattccctttgttctgtgtttggcgctgcaacctgtaaatggagtgctttttttttgcgtaccgtgatatctgcgttttggaatactataatatcagaatttggagcgtgtttcgccatgctcgcctcacttgattgggc

SEQ ID NO: 41333 - DNA, 308 bp, Zea Mays
aacaaatggatgcaaccactccgaaatactccaaggcacgttatgatgagattgtgaaggaagtctcatcctacctcaagaaaagttggatacaaccctgataagatcgcctttgtctccatctctggttttgagggtgacaacatgattgagaggtccacaaaccttgactggtacaaaggcccaaccctgcttgaggctcttgaccagatcaccgagcccaagagaccttcggacaagcccttttggcattgttaaattgattttaggaagtcgtagttttcttcagtatgtttctttcccccccc

SEQ ID NO: 41334 - DNA, 2330 bp, Zea Mays
gtctttcacgcttgaccagccctgctctgctcattgctggaggcaaaggaaggtttgcgctggaggggttcgtcagagatggacttcttcagtgaatacggcgatgcgaacagatacaaaatccaagaggtcattggcaaaggaagttatggcgttgtttgctcagctgttgaccaacatactggtgacaaggtggcaatcaagaaaatacacaatatctttgagcacttatctgatgctgcccggatcctacgtgagatcaaactgcttcggctattacgccatcctgatatagttgagatcaagcatataatgctgcctccatcaaggagggacttcaaagatatctatgttgtatttgagctgatggatacagacctccaccaagtcatcaaggcaaatgatgatttaacccgagagcatcatcaattctttctctatcagatgctccgtgcactgaaatacattcataccgctaatgtttatcatcgtgatttgaagccaaagaatatattggctaatgctaactgtaaacttaaaatatgtgattttggattggcaagagtggcattcaatgacactcctacaacagtattctggacggattatgttgctacaagatggtatagggcccctgaactgtgtgggtctttcttttccaagtattcgccagctattgacatatggagtatcggttgcatttttgcggagatcttaactgggaagcctttatttcctggaaaaaatgtggtccaccagttagatttgatgactgatctcttgggtactccatcacttgatacagtttccaggattcggaatgagaaggcaaggaggtacttgagtagcatgaggaaaaaacagccagtaccatttactgaaaagtttcctaaagcagatcctgctgcactcaaacttttgcagggctgatccgtattttaaaggcctcgcaaaagtagagagagaaccatcatgccagccaataacaaaaatggagttcgagtttgagcgaaaaaaggcgaccaaagaggatgtcaaggaacttatattcagggagatattggagtatcatcctcaacttctcaaggattacatgaatgggactgagaaaacaaactttctatatcctagtgctgttgaccatttcaggaggcaatttgcaaacttggaggaaaatggaggaaagagtggggcacacgccgcttcatcagacaggaagcatgtttcgctcccaaggacaaccacagttcattctaatccaatccctccaaatggaacctcccaggttcctcaaaagattcccacaggtagaccaggaagagtggttggtccagtaataccatttgagaacgcagctgcagttgatccatacagccaacgtagggtctcaaggaatccagtacttcctccaaccacgtcgaacatgtcagcctatgcctaccaccggaagtcagacaactcagacagagagctccaacaggagctggaaaaggaccgcatgcagtaccagccagcacagcggttcatggacgccaaggtagtatcacagatgtcccctgacttgaggtcttcctactacataccaaaaggtgtcccaaaggctgatcccgcagatagaaccgctctgcattctagcatgattcatgggatcgcccctttcagtggcattgcagctgttggaggtggctacaacaaggtcaatgcagttcagtatggagtttctaggatgtactagttctagttgcattggccatctccgaattcctcagctgatgagttgaagtaataacatggcgaagaccagatgtaggtaccgaagaactgccataccggctctgagccaaagatagaaaacatggaatacggatctcggatcgaggacgtgtccgtcagattgaaaacagatactgggcagcagtcatggttctgtccattggacctagcttttcgggaagcaatgccatcgccccgcggaaacggtaaaataaaaggagaaaaaaaaatgcagtactgtcagttgattgctgcttataaagaagcaaagggggcagagacgacgatttttacaggtaaaattatgtactttgcaaggagggaaacatgtgggaataagtagtgagcctacgtttagctctgtatataaagtgacttgattttatatgtactattacggctggtgaaacacgcttctttaattcaaagctatggagttttggcctaaataccataggcagctcagattgatacagacgttcgtttattttgccctctttacctctgtgtttgtatattacgactagattagaaatgaaaattaccatcaagccgtc

SEQ ID NO: 41335 - DNA, 3012 bp, Zea Mays
gctggcccacatgtgataccataccagcaacacgttacacacagttcctttcaggcttcacccgttttgctctcgagtctctcccggttcggatccaaattcagcaatccgacctgagaccaagaccgcgcaccacgcggctcgccgccgatggcgaacgccgacgccgacgaagcgccgctgctctctgtggaacacctccgtccaggatcctgcagccgcgagctcgagctgcgggagttccgcgaccgctacgtgatccgttcgctcgacggcgccgccgctttcgccgtccttcgctccggcggctccatccgccctctctccccagaggaagccgtagctgagagcgactgcaaggtttccagaatatacggcgtggtcggcaccataagattgctcgctggaagctatgtactcgttatcacttctcagaaagatgctggctcttatctgggctcccctgtgtaccaagtgaactcaatgaaattcttatgctgcaacgaggctatcaagcacttgactccacaggaaagaagggatgaggcatacttcatgtctctcctgagaattgcagaaactacttgtggattgtattattcatatgacagggatttgacactaaagtaagtgctttgtcatgcatgtatctgaataaggcaaccaaaagacattggcttaatattcagaaaaggccaacaacctttgtgtagtgattatgcacatccttaagatatttttttttctcaaacaacacatgagaactgtgtgcatttcattaagtagagaaaaaaaaccaaaggagaagcagtgtgtggcgctgttagccttgtactaggtggcctagggaagttggcctcctggaaaaaagccgaaacagtcagagcaccctgaatgtcctggatccagagattctgatctaaatcctcctgtaccgttcatctcctcgtcgacatttgtaactaatcgattgcctgttagttccattgttccttgcagatgtgtagtaggttcttgaagtatggatctattgagcacttcttaagaggttctagttgtatgactgttatcatgtactgaatgcctctgtggtgcatttatttttcttttgttatactggattgtatctaactgatgagatagaaataatgcgatgatggaatgctcctcaatgtaaagctataaacactatgattatgtagcttgcagagggcatccaagttggctgctgggagggtacataaaccactatggaagcaggctgatccacgttttgtttggaacaaaaatttgttagaggaacttattgaagctaagcttgatgagttcatcatcccactgatacaaggaagttttcagtcagcacaatttaccttgaaggatagaccagtgaggataacattgttctcaaggagatgcaacaggcgtttaggaacaagaatgtggagaaggggtgcgaatcttgaaggcgccacagcaaattttgtagaaacagaacagttggttgagtatgaagatctcacatcctcatttatacagcttcgaggttcaattccacttctctgggagcaaatagtggatttaagctacaaaccacggcttagcattattgaacatgaagaaactcataaggttgttcaacgccactttcatgatctttcacaacgatatggcaagataattgttgctgacttgactgataaacgaggtgatgaaggagatttgagcaatgcatttgctgctgaaatggacagaattcctggtgtcaggtatatacattttgatttccatcatgtttgtcgtggaggtaactttgacaatttgcaagctctctacaatcaaattgaggaagctattcataagcaaggctgagcagatattttcttatgaacactaaaggagagattttgctggagcaaagtggtgtagttaggtccaattgcattgattgcctggaccgtacaaatgtgacacagagtttccttgcaagaaaatcattggattctcaattgcagctgatgggagcattattgtcatctgaaagcatttctctctctgataacattcatgatacattcaaaaaattatgggttgagcacggtgatgagctgagcctggagtatgctggctcttatgctttgaaaggggatctagtgagatatggaaggcagacattgcctggactaattaaagatggaatgagtgctctttcaagatattatttgaataattttcatgacggagtgcggcaagatgctcttgaccttattagcggttattatacagtcagccaaggcagctcttctccttttcataatggtgttgattcttcttcgtatctgccggtggcttcagcaatcatagttggtgggattaccgcgacaactttcactctcagtcaagttggacggaacgcgcagcacttgatctcctccattatctgtgcgggcttaacagtcggagtagtagccttggtgaaagccaatgggaaacagttttgctctaggccccgtctgtgtggtctaatctaatccttggtcttttccccccttccctttcatattgccctttgttagaaattgaatgtaaaaggattagaatgttgttttattcgttgcaagagtaaggttaaataaggaggcaggatggcctgccggtcccgtaatctgaagctgctaatttgtaagcctatagtttggatttgcacattctatttgttatactttttatgtatccatgaatagaaaattacgcctcgaaattccaaatttgtaataaatccgagagaccacatatttttttagtgtgactggttggtagcgacggtcttggcgtcttgcatagttgctgacacagaaaagacacctccgtccctctgtctggtacagtgagggtggggcatcaaaaacacaaagatgctgttcttatcaggcacagatgtttgccaagtataattccacgttgcgctatacagtcgggtttgctcgtatgcatttatgatctagatactta

SEQ ID NO: 41336 - DNA, 829 bp, Zea Mays
ccatgccacggaaaacatttctgaccagtaaagggctggctggcaatgctggagaagtataggaactatgacttcgggcggtgcccgcgtgtttactgctgtggtcaaccatgcctgccggttggacaatcagatattcatcgatctagtaccgtgaaaatatactgccccaagtgtgaagacatctactacccacggtccaagtaccaagacatcgatggcgcatattttgggacaacgttccctcacctgttcctgatgacatacgagcacctcaagctacagaagcccttgcagcgctatgttcctcgtgtctttggcttcaagctccacaagccatgagcctcatgtatttggcttttaagctctacaggatgtggctcactgggggaaaacccagagttttgcgagatcaaggtccttgaagactacatataagagcgccattggctacatataaaagcgctattgacagatcagtggattgataaaactccaccatgcagcggagcgcttttaccttacctggctggcacctaccaacatttgaatgtagctctaaggataacgatgttgttgtaacctaactgtaattgtttttttgattagtaaaccaggaccccgtacgatgtagagtatgggcattatttatggcttatgcaaaaaaaatcgttatgctgtcccaggctcccagcaaccctttacctgtttttttagatcctttacctgcttggttctcgtaagatggcctttgaatttgataacaaaattctatattgaattgtgatatgtgaagggcgcaccatcttcattgcctgcgctctcattt

SEQ ID NO: 41337 - DNA, 3855 bp, Zea Mays
ccgaacttcacggggacagcgtataggagtaggtcgcagcggcggaggaaacccgcttggcaagggatctatcccctcgtattccccttgcgtgcaaagctcactccccgtgccctcgccacgggcacccgaggaaagcctcgtgcactcgcggataggcagtgggccctgggtggaagagagtttgctccggggacgcgaagccgggtggggagaggcaaaccgggtgggatttcttgggattatttaagggcgagggagggagataggcacacgaaagcaacagcgaggagagagaagggaaaagggtgaaggaagccagggcccagggagttgttgaatttcggttctggtcggcgtcggaggggaagggacgacgagcggcgaggaagaggtgtgcgaggggaggagggatatggtggccagctgagtctgcggattgcggcggcagcggggatcggaggcagtgaggggcggcggcactcggatggtactggctttcgccagccccggaggcggcgatcgtggatgggcagcggcgggattgcggggcgggggttgtaggagcggtggcggcggggaagttggactcggagcgggtgcttgtgctggtctccgggctggggcagggagaggaggtgagggagcggcggggagggatgaggcgggggaagggggcaaggaatgggttgctgccgagttcgctgcggatcatatcgtcctgcctcaagacggtgacctccaacgccggctccgtcgcgtccagcgtgcgctcggccggcgcctccgtcgccgcatccatctcctcccaggcagaggacgagaaggatcaggttttgtgggctggattcgataaactagagcttcatccatcatcattcaagcatgtcctgcttgttggttattcaaatgggtttcaagtgcttgatgttgaggatgctgcaaatgtttgtgaattggtctcaaaacatgatggcccagttacgtttttacaaatgcaacccactccagtcggctctgaaggcattgaaggattcagagcatcacatcccatgcttctagttgttgctggtgatgagacaaacggcctgggtgcgattcaaggtggtcgcttaagtgctcttatcagagacacaaacagtgagcatcaagctgtaaattgcatttcaaccccaacagttgtccgtttctactctttgaagtctcacacctatgtacatgttcttcgattccggtctgctgtatatttagttcgctgcagtcctaggattgttgctgtagcacttgcagcacaaatctactgctttgacgctgttactcttgagaacaagctcagcgtcttgtcatatcctttgcaaggtgcacctggggtaaatattgggtatggcccgatggctgttggccccagatggttagcctatgccacaaatactcctttattgtcaaacacaggccgcctaagtccacagaacctcacaccttcgccaggagtgagcccatctacttctcccagcagtggaagtttagttgctagatatgcaatggagtctagcaagcagttagcttctggtattattgacatgggatatacattttcaaagtactgccaggaacttctgccagatggttctaactcccctttgtcatcgagcccaggcaggagatctggtaaaattctttccagtgtgcatccactggaagctgacaatgcaggcatggtagtcatcaaggatttcacatccaaaattgttgtctcacagtttaaggctcacacaagtccgatatctgctctttgttttgaccctagtggaacacttttggtgacaacctctgttcatggccataacataaatgttttcaggatcatgccaacctgcattgctaatggctcaggcgcaacacgttatgattggacagcttctcatgttcatctctataaactgtatcgtggcatgacatcagctgtcatacaagacatctcgtttagtcattttagtcaatggatatctattgtttcatctcgaggtacctgccatatttttacattgtccccatttggtggtgatgccagtctgcagccacagaattctcacagtgatgggccccctcttgccccatgtcagtcaaggccatggtggtcaaagccatcctttcttatggaccaacagcttcaccaagttccctcaactgtgacacattcggttgtcagtaggataaagaataacacttctggttggctaaataatgtcagcaatgtggctgcttctgcaagtggaaaactatctgtaccatctggcgctgtaactgctgttttccataattccatctaccagggttctttgccagttccatctaaggctaatgctttagagcatctactggtgtattcgccatctggtcatgtcattcaacatgaacttttaccttcttcaggttctgagtcctctggtagcagcccaagagttggttcaggtcctaacttgcaactacaagatgatgagatgcatgttactgctgaaccaattcaatggtgggatgtgtgccgtaggacaaactggccagaaagagatgaaaacattgccaacattgtattgtataaccaaagaagcagtatgatggctatgggtgcttctgactgtgaagatagcgagcattcggattccactgcatcaaatgatggtatctctgggaaagagattatgagaatccgagaaaggtcaagctggtatctatctaatgcagaagtacagataaactcgtggcggattcccatctggcagaaatctaagatttgcttctatgtgatgggctatcctgctgcagagttggtcgaatcagttagcagtggtggtggagaaattgagattgagaagttacctcttcacgaggttgagatcaggagaagggaattgctccctgtattcaagcagttccaatattctgatcgacattccagtgataggaatattgcaaatggaggctttcagaatgccttgtcccacatcagtaatgcacagaatagctctgtaaaggataatggtgaatatgaaaccaaaccggtggctttgtctgggttttacgcagacacgaggaaaacagctaacacaaatggtctagctaggcaaacattctcagctgttaatcttcagcaagtggggaagtgcaattctattgaatctcttaacactgcaattgtgtctggcaaaacagagaatgggaacaatggctatatatccacgccacctgaaacaaaagcgtctatcagatcattgagcagctattctctcttggatggacatgtggacggaatgctgtctccaaatagcgcatcacacaagccagaaacaacaaataattctgtgctcagcaatgctgcaagcactgatgtacaaaatgggtgtctcaccactgtcgattctggacagcaggaggcgtctcattctcacagctcagtggagtttacccagtatttccaagagggctattgtaaaatatcagaactcgatgactgccgtgagttaactgaagctgttactgatgctgacagcagcagcagccactgcgagagagagaagcccgaggaagatggggataacgatgatttgctcggaggagtttttgccttcagcgaagaaggttgaacttactatatactgccttacttgagatcgagatataacgaaaaatgtgctcaaaacaaaacattcagtgtgcaatagtatgtaggggatggctttcatggaataaagctgtgtggaatcgatcatctggtacatatttttcaagctgcgtgatttgggcaactcaaattacttatagtcgaatgcttcttcaccttctgatcgtggacgatgg

SEQ ID NO: 41338 - DNA, 1299 bp, Zea Mays
atggtgggcaggggcagaggggcgctgcttactgtgctgctcgaagatcagtggttggtgattggtggtgctggtggcggggaactaaaagcttggttgaaagaatactcgagacttgttaggatagtcatagtgacagtgcctatggatggagataaatcattcgggaccatcgacaaggaaaacagaaggtttgaactggcattggtaccactgccgattccatctactgattcatatccaagagtagagccatcaattccatttatagagcagccacctcctttagtggattgggattcaatagcaattcaagaagaacgagaggatgaaggacacatagaactttgtgacgaagcacaagtttatgcacttttaggtttgagacatgaagatgagatggaggaagaaatgaatatgcaaaatgacgctatcccaaatcctagtgttgatgaagaaagtggttatggaattccataggtataggatgatgaaggtgcacttataccggttgttgataatattccggagatgtcaacgattgagcatgatatgaacaatccatctatggaggtcacagtgttgaatgatgtacacacgtgtacatctagctgcaggagaaggacaactacaccttcatgcaagtgggttgcctccaaggcagtttctatactcagaaaatatcctcatatgggtactaaggagctgcaagttaggttgcaagatgagcacaagtgcacaattggctatgacacggtctggaaaggaaaagagaaggctttggatgaattatatggctcatgggaagagagtttcagctgttgtataattggagggcagaggtcatgaagagaatgccagatagtattattgaaattgaatgcaaggtggttaagggaaaggcttatttccaccgttttttgtgcacttggtccttgtattgaaggttttcgaatgggttgtagaccatgggttggtgttgatgcaactgcactaaatggcaggtggaatggtcatttagctgctgcaattggtgtggatggtcacaattggatgtacccacttgcatatggattcgtggactcagagacagaagacaattggaaatggtggatggctcagctatataaagttgtgggagatcttccaaaacttgttatttgttcggatgcttgcaaaggattgctaaatgtagtggggtatgtgtttctagaaaaataggatcaaaagttgcctcgaaggtggaagtggtgggtctaaatgcactaaaaaggttgctgaaaatgagaatgagaagac

SEQ ID NO: 41339 - DNA, 1031 bp, Zea Mays
cctccgctttcattcttcttctcttttctcgttccccccgttggggttttgagctccgacgaaccctaataatcgccggggaccggcgaccgatcgcccgccggcatgcaccattagcagcggatgaagcaggcagcggcggccgcggccgcggcgcagcaggcactgctcctgcagcagcagtcgcagccgcccttgttccccgtgcaccacccgcaccccggcctcctcgccgcaccacagatagagcccatagtcagtggaaacctgcctcctgggtttgattcaagtacatgccgcagcgtgtatgtttgcaatatccatcttcaagtgacggacgcagtactgcaggaagtcttccaaagcattggtccagtagaagggtgcaagctcatcagaaaagaaaagtcatcctttggtttcattgactaccatgatcgcagatatgctgcactagcaattttatctctcaatggcagacaactgtatggtcagccgattaaagtcaattgggcatatacaagtactccgagggagggcacatcaggtcattttaatatttttgttggggatctttgcccggaagtcactgatgctactttgtttgcatttttctctggttactctacttgctcagatgctagtgttatgtgggaccagaaaacaggacgatccagaggatttggttttgtttctttcaggaaccagcagatacgttaattgatcacgaaatacggagggcacgagatggattaatctcaagtgaagctgatgaatgaacttgaagattggatgatctgatcaagtgccaggatgggacatgctcgacaagcgagtatcatctaacaacactaacttagtgttatcacagatacgttaattgatcacgaaatacggagggcacgagatggattaatctcaagtgaagctgatgaatgaacttgaagattggatgatctgatcaagtgccaggatgggacatgctcgacaagcgagtatcatctaacaacactaacttagtgttatcacag

SEQ ID NO: 41340 - DNA, 222 bp, Zea Mays
ggggacggccagaatatcgtgttcgtgccatcggaaaaccacgattcgtcatggcagatactcgattacgagggggaaggcacgacacaggtatcgtcttgtcggtgcccatggacgggcagaaacgcatggagtgtacctgaccttgggccttgggaaaagagcgagaggagctaggcatcaaccatcggtacaatcagcgttgtgtaggacacgttaatc

SEQ ID NO: 41341 - DNA, 444 bp, Zea Mays
attggatgtatcctttagcatttgggtttttccaatctgagacagttgaaagttggatttggttcatgtcacaattgaagaaggctgttggaggacttggagtactcgctgtttgttcggacgctcaaaaaggcttaatgcatgcagtgacacattgtttcctttatgctaagaagagagagtgcttccgacatctcatgggcaactatgtcaaaagctactcaggttccgaacacatgtatccagctgccagggcatataggagggaagtgtttgagcaccatgtcagccaagtaagaagtgttcctaagatagctgaatatttggatcaacatcacaaattcctttggtacaggagtggtttcgacccatctattaaatgtgattacataacaaacaacatggctgaggtctttaacaactgggtgaaggatcacaaggacc

SEQ ID NO: 41342 - DNA, 2633 bp, Zea Mays
ttgttgtcctcaagtccttcttcactgtgttcctgtgaagacccgtcgagcatgtctctttgctctttgctataaagctggggcagggaagtattcccttgatgtccctgtgattcttaaccaaagcatgtttgtgtgacgcatgcccatgctcttgtgaccaaaatctcccacctcaccatgcccaaggattttcaaaggttttctcagtcatgtgacgtttgttccgtgctcatctaagctggcgctttccctgagcaacttcataggaaggtccgcagtgctctatgtgcttctagttggagctctactgtactgttgtcctaggatcgagtttatcatgtcggatctcactggcgtcgtggtcagagcctatgagtgtctgacatgggtgttgaagggttgtgcccgggttgtgttggccgcggacatgtctcagtagtagttgggggacgccggagagcagcgccgacgcggtcgtaggcgccgggtcaccggagtagcacgacgggcatctggttcaagtttttctgaagttggttgtgaagccgggttggatgtgttaaaccaagatctctctaagtgaagttggttgtaggatttttagagctgttagtaaatattaagtgaattaagggtgctcttaaaggactatttgaattttagaaataagaattgagcaccaaaaaaatcatggaatttttttgagaaatttgttatcagaagcttatcacttggtaaaagtttggggctgtttggaacctttttgctctagaaaccttgtaagccccaaaatagagtggttaatccctaatcaagtgtgggttaatgctttggaaaggagataaggttatctagggaagagatgcagttgcttaagaagttttaagcttttggatgagatataagttggattagttccttggtttacctaagtgaattcaattggtcacttttattgaatgctaggttgtgtagaagtatgtgtatacttgtcatgtacttatttaggagtgtttatgttccccacttctccttatgagagtttgcattccatatcattacataagcatacatgtatttgtaattgacttgtagaacacctagaagaagtggtgtttgaaggagtctactccagtggctgctgatcaagtggaggagccatctaactgtgtattgggtagagggttctagagcctcttctctgcaacaaaggcaagccccggtgcatttgccccttccttgtatttttaaaaaagacttttatacacttaagtctagtgaaatgtgcattaagtttataggaattgcttggaaactatttgatgcatcgcttaccttgatatccatgcctttatagatacttctgatggagtatcaaaatatgatttacaaaaaaaatgcttagccctgcttagatcttgtggatagaggttgccctttgcaataatgcctagctcaggggttatcccgaggaaggatgacttctacctgcaagaatattttcattgggagcatggtgtgatcttactgcaaagttcactataatgctcttttcatcctaaggaacacaaaacaatcctaagggtggaagtacttaactcgagacttgggctaggaacaggtgatgctccacccaggttaattaaggattggatgcgtatgtaggcctatatgatcaaggactattttaactggccacatgccgtggatatgggacagggtaagcttgaacctaactattccatacgtgaaaagataaccgcgcactgggcgtgggagatggtgggagtagcgtgtaccctcctggctagaggctggacggaggagtattgtgctcccaggtagcgcggaccggttcacgttgtggaggatctatgggaacggttgacatatgcaagggttaagtgctacatatgtcgtgtggttagagatcctcaactgagtaaatcgatttggatcgccgttatatccccggatagtgaagacttgatctctgacctacaacctaagtcaggatgtgaacattatgaataaaaatgatgttgtattgatgagatggtgaaattagactagatgcaaacagagtctattaatatttaatctggcgttaaaatgttgaaagtaaggactcactttagtaggctatttctgcaaaagtacctaagttgattcttgctaaagccttttccttgattcctatttaaccagcatatccttgagagtcatttttccttagtcgggtaagacttgcgaaagtacacttcgtactcagggttttcgaacccatgttgttgtaggtgatgaggagtactctaggtgttcctgtggctggagggcgtttccagttctggaagaggattagttaggcttgtgtataagttttggagggttcctaccttcctgctattgtaataagttatgcactttgagtatatcaggacttgtaataaatgtaactcttcctatgtaataaacttcagttttagaaatgaaaagaatgttttataaagtcttccgctcttatcttcgaagtgtgtgtatcgaatgtgattactgtaatatgcatgtatggtgggagatccttgggatgatgagttcaagttgttgaactcgtgatagccttgttaagt

SEQ ID NO: 41343 - DNA, 3651 bp, Zea Mays
tgatcacaaatcattagtgtacaaagacaaagtcatggaaaacacccacacccaatgtgggtgttggagagggtgggggtgtttcttccatatatatgtttaagtatatgaagacacatctaatagtttcatatggtccatgaggctcctatagtcaactccgatataagagtcttctctctctagcccccaaggtctaccagcgccggctgtcgccgtcggggtttgcatcaccaccgccgccgtcgccacctctgccgctgtccccatcagtgccctctcctccggcgacactgccggtggcccaatccccgccagggacacctacacctctgccgtggcccgtgtcgagacgccggtgtaccacccaccgctccttcaccacgacccacgacacgtccacccgatggtgacgcggcacgcggctggtaccctgctgcctcgagtcctggcggccacgaccggagacttgcaggtttctccggtaccctcctctgttcgcaccgccctgctaaacccccactggcgtcgggcgatggaggaggagtacgcggcgctcgtcgccaaccagacgtgggatctggtgccccgtccgcccggcaccaacgtcgtcaccggcaagtggatctggacgcacaagcggcagaccgatggtaccctggagcggtacaaggctcgctgggttcttcggggcttcactcagcgccctggagtcgattacgatgagaccttcagcccggttgtgaatccggccaccgtccgcacggtgctattgctatggctagcccttgctcgctcctggccagttcactagctcgacgtcaagaacgtcttcctgcacggcgccctcaccgagaccgtctactgctgtcagccagcgaggttcgtggactcctctcgtcctgacatggtctaccgactcagcaggtccctctatggcctcaagcagccccccccgggcgtggcactccagattggctacgttcctggtgacactgggcttcgtggaggccaagtcagacacgtctctgttcgtccaccatcatgaagcagagattgcctacttgctcctctacgtggatgacattgtcctcaccgcctccagtcagtcactccttcgccgcctcgtcgacgcgcttcagcgggagtttccggtcaaggatctgtgtgtgcttcaccatttcctgggggtcactgctgagcctcgcccctcaggactccttcaccagcggcagtacactcttgacattctggagcgggccaagatgattaactgcaagccctgctctaccccagtcgacaagcaggcgaagctctctgaggccatgggtgacccagtcgaggaccccatcgggtataggagtcttgccggtgcccttcagtacctcaccttcactaggccagacatctcctacgctgtgcagcaggtctgtctccatatgcacgacccccgagagccccacctcgcggctctcaagcgcctcctctgctacctccggggcaccgtcgactacgagctgcttcttcacaggtctacctcctccgagctggtcgtctacaccgacgctgactgggccgggtgcccggacactcggcgctccacctccggctacgccgtcttcttaggcggtaacctggtgtcctggtcgtcgaagcgccagctggtcgtctcccgctcgagcgtcgcggcggagtaccgtgccgtggtcaacgacgtggcggaggctgcgtggctccggtagctcctcgccgagctccacagtcccctctccaagagcacgttggtctactgcgacaacgtcagcgccgtctacctctccaccaacccggtgcagcaccaacggaccaagcatgtggagatcgatctacacttcgtccgagatctggtcgctgttggtgatgttcgtgtcctccacgtcccgaccacctcccagtttgccgacatcttcaccaagggtattccgtcctcgaccttcgccgagtttcgctccagcctcaacatcagtagtggctagttgagtctgtggggggatcctagtccagtctgtaaactccgctgcgacggaagttcagactgcggggggtgttagagtatagggttaggcccatgtggcccatgtacaaacactatatagctaccctctggggttagccctaataatatacaattattacctgtaacagtttttggttgtaaatgcttcattcttaacaagaaagtcaagagccctaataatatacaattattacctctaggggtagcctgaattcctcatggatttgtttctttatgcttgtttctggcctccgtaaggagcgtcttttgtattatgttttttccctcttcttaatataattaaaggcgcagttcccctgcgctttcgagaaaaaaagagctcgaagtttgctcctagaatggacgagggtttcttgcttggttatgcatcaaatgcgcatggatatcgcattttcaacaataccaccggtcttgttgaaactgcgatagacatgacatttgatgaatctaatggctcgcaagggcatgtttctaatgatattgcaggaaatgatatcccacctaatgaagccatcaagaagcttgcaataggtgaagtgaagccacaagaaaaggacgatgatgaagggagaatttgatacaattttgacatcatgctgtcttgggccgtttacctggcactactgtgtacaggaatacattgcagtaccctgaggcttatacgtataatgggatagtagtggttcgaattgatgcaccgatctactttgccaacattagctacatcaaagacaggttgcgtgagtatgagctcaatcttccaagttcaaacaagggacttgatgttggaagggtgtattttgtgatcctcgagatgtcccctgttacatatattgattcgagtgctgttcaagctcttaaagacttgcaccaagaatacaaagcacgccatattcagattgccatagctaacccgaaccggcaagtgtaccttctgttgtcaagatcgggcatcattgacttggtaggagctgggtggtgctttgtgcgagtgcatgacgccgtgcaagtgtgcctacagcacgtgcagaattcatcttcaaatgcgttgaagctacccgtgcaggcatcaggcgtgttgaccgattctgtttcgactcctaaaccagagcagcagcatcaaaagcagcacggcctcttcaaggacctatggaaggcacaggacagtaacgcggatgctggtggtgaggtgcagccactgctccggcaaaaccttgtgtaatactcctacaaaatacggagtacttcctgggatggactcacgccctcgctggcctatacatatacgtgtttatttatttgtctatgttgttgttaacatggtatcgtggtgaacaaaagaaactgaacatgccattgttactgtggtgtggcgttttttgtacacttttgatacctaaatggaactcctatgatttgggtctggaaagggtgtgtgaagatgttttgttccaggttttggagttccgctcccagattggcttgacaagcatgttaattccatgaactctcttccacaaaaacagtacagctgattatcagttttatgtttagaatgagaaaatagccctggc

SEQ ID NO: 41344 - DNA, 1462 bp, Zea Mays
ggggagagatgcgtgttcgtcttccttcccacccatccctgtttctagctcctcctccttccccagcgggtggccgcagcaatttgcaagcagaggaagaaagcttccgggcgtctcggcgcgaagaacagcgtcacgttctgacggaggagaacaggagaagatgagcgccaccatggcgtggtatccattaccgcagagcggaggcacaggcacgccgtcgggcggcggcgagctgttggacgaccagagcggcggctgggcgctctggagcttcggctcagctgacgacgaccacggcgctggcgtggtgcgcgcggagacgcacgggagttcagacgagcggacggaggagggccggcccgcgccgccgcagcagcagcagcaggcaacagacgacatcttcatgagccagttctcggacgaggaggtgaggaagatggacgacgccccgttcgaggcgctgggcatgttcccggactccatgcaccagctgctgtcctacgagaacatgctgagcggcggggcgctgctgagctgctgcagctcggaggacctgctcctgaacgccacgctgggcgtggacgccatggacacctgcggcttccctctcttcagccacgacctgcagctgcagagcgcggcgccggatctcacgctcacgcctgaggaccaggtactggtttgcgcaagtgacgtgtggtgctgctctcgactcgatcacgcacggcactgctctgatgagccgagccctgggtgttcgttccgttggtgccaggatggggcgagctttgctgcgacgaaaaggagcaggtcatccgtcgcggatgaagggggcttcctcttccaagcgctggtgctccgggagctcgaggacgtcgtgttccaggctggccgagagttcgagtgccaagtgcggcgctgcgaacggaacgccgccgccttcctctgcaactgcaactgcaaccggcggtaggatctcaacaccagggccaggccgcccggaacgggagacgaacgccatcgacaggacggtggcggacctcaccatgcgccccgctgtcctcgcgagccgctgccccgccgacggcgactcaggggcggaggcgcactccgcaaccaccgaccggcacgacgacggcgtagaaagggcaccgcgcgactgatccgtcttttttttgccggctactgctacgattcgttcggccatgttgggcgcagagagagagagagatgtacatatatatgatgaagagaaccggctgtcgtttatgcatttctacggaacttcgatatagtgaagtcactgtctgatgcagctgaacactggcaccgtttatacagtggtatttggaactggggtacacgactgttattaattattatgtttcttttcttttttagctttcggttgcatactgacacacgtgtgtttgtttggaaaggcaagaaactagaagtg

SEQ ID NO: 41345 - DNA, 3229 bp, Zea Mays
ctcacccactcgtggactcggtcctcgctcttcacctgcccgcgcctcggtaggcgctagtcgccttcctccctggaaggaaaaacaaacaaacacgaaacgcaggtccgaatccaaatctagcggcacgcttaacgtcgcgatcccgcggactccacccacgcccgcggcggcagcgcggatcccgcctagggctcgcgtgtcggtcgctccggcgctaactagtaactaccccctcgcggcgacgggaggtcggtagcggcgatcgcgctagcggagccgcttcttcgccctcgacgccgccggcctcgatcaggccccgccgacggaatggcatccaaagtccgctttacagtgggttctcaagtttgggttgaggatgctgaggtggcttggattgatgggttggtggaggaggtacaaggagatgaattaattataaactgcacttctgggaagaaggttactgcaaatgtctcaagtgtgtatcctaaggatgcagaagcgaagcgctgtggcgttgaggatatgacgaggctagcttatcttaatgaaccaggagttttacagaacttaaagtctagatatggaatgaatgaaatatatacttatactggcaacattttaatagctgttaatccatttcaaagacttccccacctttataacaatcacatgatgggaatctataaaggcgcagaatttggcgagctgagcccccatcctttcgctattgcagatcatgcatataggcttatgatgaattgtggaaaaagtcaagccatattagtgagtggcgaaagtggagctggtaagacagaaagcactaaaagccttatgcagtatcttgcatttatgggtggtaaagctcaatctgggggaaggtcagtgcaacaacaagtactggagtcaaatcctgttcttgaggcatttggaaatgcaaaaacagtcaggaataataattcaagtcgttttggaaaatttgttgagattcagtttgacaagaatgggaagatctcaggagctgccataaggacttacctcttagaaaggtctcgtgtctgccaaatatctgatccagaaaggaactatcactgcttttacatgctatgtaatgcaccagctgaggaccgtgagagatataaactgggagatgccgcatcatttcactatcttaaccagtctagttgtattaagcttgatgcgatggatgatgcttcagaatatatcataactaggagggcaatggacattgtgggcatcagttctgatgaacaggatgcaatatttagagttgttgctgctattcttcatttgggcaatgtggaattttcagaagggagtgaagcagattcttctgtacccaaagatgacaagtcccagttccatcttaggacagctgcggagcttttcatgtgtgatgagaaggctcttgaggaatctttgtgtaagcgtgttatggtaacacgtggtgaaagtattgttaaaaatttagatgcacgagcagcagctctcagtagagatgcactagccagaattgtttactctcgtttgtttgattggcttgtaactaagataaatacttcaataggacaagatctaagctcgaagcttttgattggtgtactggatatatatggttttgagagtttcaagacaaacagtttcgagcagttttgcatcaacttaactaacgagaagctgcagcaacactttaatcagcatgtgtttaagatggaacaagaagaatatacaaaggaagaaattgattggagttatatccagtttgtagacaaccaagagattcttgatcttattgagaagaaacctgggggtataattgctctactggatgaaacttgcatgctgcgaaattcaacccatgaaatatttgctgaaaagctgtatcaaaaatttaaggggaacttgcacttcagtaggccaaagttctcacggtctgatttcactattcatcactacgctggaaatgttacgtaccaaacagatctgttcttggataagaacattgattatgctgtgaatgagcatcaagttttgttacatgcttcgagatgttcgttcgtttccagtctttttccacatgaagtatcagctaaatctacgaaatttacatcaataggttcaagctttaagcaacaattacaagctttgctggaaactttgagcgcaacagagccacattacatccgctgcataaagcccaataatgttctcaagccagcgattttcgagaacagtaatgttctccagcagcttcgatgtgggggagtattagaggcaataagaataagctgccttggatatccaacaaggaggagatttgatgaatttgttgaccgttttggtgttttactacctgaagttcttggtgaaagttatgatgaagttactgctacaaacatgcttcttgacaaagtcaatctcacaggatatcagatagggaaaactaaagtgtttctgcgtgctggtcaaatggctgaattagatgctatgagaactgaggtcttgggatgttctgctagtaaaatccagagaaaagtacggtcatacttagctcgaaaaaaattcattcagttgcgaatatctgctactcatctccaggctatttgcagagggcaaattgcaaggcattattacgatgatctccgcagggaggctgcttcattgaccatacaaacctgctaccgtatgtactttgcaaggaagaactacataaatctctgtactgcatcaactactatccaatctggtctacgtggtatggctgctcgcaagaaactccagttccgtcaacatacaaaagctgcggtgaccattcagagtttctggcgtagttatgtagcacgctctcgattcatgagtttgaagaaggcagccattgctactcaatgtgcttggagaggaagagtggccagaaaagagcttcgaaaacttaaaatggctgctaaagaaactggtgctctccaagctgctaagaataaattagagaaacaagttgaggagctcacgtggcggctgcaactagagaaacgcatgagggagtacaatatgttgatctctaccgatgaccaggaggtgatctgggagatcaggtacataagccaaccagagaatcacgtaaacagggaaataaggtaaccaatcaatcacctaaacaggaaaagggtgcctaaggcaactacccaatcacctaaacaggaaaggacat

SEQ ID NO: 41346 - DNA, 1853 bp, Zea Mays
tgagagggcgagaggcctccgctcccctgcttccccggctggctcccccacgccacccgtctactccgttgtctcgtcgcaggcagcaggtgaaaatctccgccattaagcgcgccccagggatcctcctcggccgcaaacaaaaccctcctcgtcatccgcgcccgctttcccccctgccggcccccggtctcgctctcgcccaagcaccaaatcttcctcccactcatcacaagacgaagtttcagtgcctgcgcgtgccgcgcgatctctcgtccttggcgtcgtcaagacgcgttagtttcagtgcgcgcacgagtgtgtgttgtgggagttagtgagagcgagagcgagagcgagcgcaccaagcgattcggcgggcggcggccgatggggagggcgccgtgctgcgacaggaccaagggcctcaagaaggggccctggacgccggaggaggacaagctcctcgtcgactacatccagaccaacggccatggcagctggcgcctgctccccaagctcgcagctgcctccctgccggcctcaaccatacggatacggctgtgatgcttctcgctcggattgcaggcacacgcgcggtctcatctaacccccattcgcggcgcatttgcagggctaaaccggtgcggcaagagctgccgactgcggtggacgaactacctccggccggacatcaagcgcgggcccttcacatccgaggagcagaagtccatcgtccagctccacgccatcgtcggcaacaagtggtccatgatcgcggcgcagctccctggccggacggacaacgagatcaagaactactggaacacgcacctcaagaagcagctgcgtcggatgggcctcgacgagcccccgcccggcccggccgccggctgcccctccgcgcgccacatggcgcagtgggaaacggccaggctcgaggcggaggcgcgcctctccctcctcgccaccgccgcctcctcctcctcctgcggcgccatcgcggccacctccgcctcatcctcctcctccaccgtggacttgaagaccgcatgcgccaggcccgcggacatcttcctgcgcctgtggagctcggacatcggggactccttccgccgcaagacggccgcggcgcccgtggtcaagaggaaggacgcggtgatcaagcaggagtcgcaggcgctgctgctgggtcccggggacgactcctcggccgcgtccaacgagacggaggtggcggaggcgctggaggagtaccagatgttcctcgacttcgccggcgaagagctggggctgtttcacggccggcacggcggcttctcgctgttcccgccgctcgacgtgctcgccgaggcgtccctggacacggcgttcaagtgaagacgtagcgagtaccacgtacgtacacatacctattgccatgggcaagcggcagtggacatgcctctacggctagctgtatactgtacgccgcctccgccttaacatgagcgcggatgtactatgtatatatgcatgctgtctcgcgtattataccgcgggctggcgcgcgcgcatacgtacggtacttctacgtgtgactgctggcatcaggagttttttttttgttagggcatcaaccaaccagcaagtgcgtggtttagcttgttaaccgggttagttttggaccttttggtaggacgccatggtgtgtatggggggattctctgtgcatgcgtcagccgtaactagatatgctgtgctctaatacatcaacaatcgattatgggactggttttcgcactgcaaacatacttgacctgttttttgtagcataaatggagtatggcctgccgcaattttcctattttctg

SEQ ID NO: 41347 - DNA, 392 bp, Zea Mays
tgagctatatagaataaaaggggttggtctatcgacattttttacccacttgaccaataagttgtcagaacctccctgcagacctttagtatgtagcccacaacaacttgagggctactgacgtcgactttatggattctgggattgtgtattgagtaccctggcgctgaggatctcattggctagagctggattatattatggaattcatagaatacgtcgcttggcaccattggatgtgagaaatgctttgaaatcagtactgtcaagtactcctcttaaatatgattggaaagagtaaatttcacaacatggacatccagtcctcaaaaaggttttaaggcacatccctgttgaagataaaagcaacaaaaaggttcaggagaatgaag

SEQ ID NO: 41348 - DNA, 374 bp, Zea Mays
ttcatttttttgaggccactaagaccacggaaaactggcatgaacagaaactgtcgaatctgccattctgcagaaaactaaattcgggatcaaaacctaaccccacatcaaatccaacctctaatcctttaattcccatgatccacaacctccaaaagcctataattacagggaggaacaaggatctcatccatacctagggtttccccaagaaatcttcaagaagagatggggaagaacatctccttgatcctctcttcctcttcaattcaacgtgcccctccttttctcgatccttgctgcgtagggggagatcttggggggaggaagcaatggatgatggctgccatagggggagggggcgtccagccaag

SEQ ID NO: 41349 - DNA, 1412 bp, Zea Mays
catctcctgattcgtcttcgtctagaacgtcagaattcaccaaatcagccctcgcgtttctcccttcccccggctcccggcgtctctgcgctgcggccgtacggcgatgcggtggctatcgaggctgctctctcaagccgtcgccgccaggagggcctccgcggcggcgaggtccaacactagtctcgtcaagggaggatcccacgggttcgctagtggcggcagggatgggtcaccggaggtgcctcgggagtggttgcggaagctgtgggtagacgagctgaagaagcagaaggaagccgcgaggagatggggcgtcggctcatcattagaggttgcaggagcgaccgaggaggcaccgtcaaggagctatcagtacgaatacagcggctctaaccccgtggaggccaaactggctccgcttcttgcaagagctaacctcgtcattgccagggatattgagtgggcaaacatcatgtttgcttttgagcaggtatatcataatggacccactctttccacaatctccagtaggttttattcgagagaaaagcaacatcatctttagacagctactcagaacaagacggccatttgttgcagaaataactgatgctatgggtaacgagatatttaaggttcgccggccattttggtggatcaacagctcaatttatgtagaagtgaatgataaggagataggtgtagtccacaggcgttggcacctttggcggagaatttatgacttgtacttagggaatatgcaatttgcagttgttgagaatccaggattctggaactggacctttaacctggtggatgaagatgataaaatgttggctcagattgatcgtaattggaggggcctcggctttgagctcttcacggatgctggccagtatgctatccggtttggtgatgaggggcaaagccacaagtttgctcccgcagaagatgtcgaagaactgcatgttgttcgccagctgactttgcctgaaagggcagtggctcttgctctcgcgatttccttggacagtgattacttctctagaagaggtggctggggacttccgtttctgatagccacagagtagacaaatgaaccaccctcgcccacactcaaggaaaaaactttttttggggctctcaatttcccaagagtgcaagtgtatgatatgagtggcttttagaattgctaaaactcaatcattactacgccattgtcacattagttggtaaacaggatgttgttgatgaaagggatgacttttgcttcatcggtgcccagtcggtgtcccagtcttgatcagcttgaacggatgtgttgcctttgcctcagcggtgcccagcaacgacgtgtccgatctcgtttacacaaaacgtgtcgttggaataataatgacaagtttcac

SEQ ID NO: 41350 - DNA, 1276 bp, Zea Mays
tccaaatttatcgcttgcaacgtccccaatccggtgaaagccgggaaaataacgccatggctatcctcgccgttgcctctccgttcaaaaccctaaaccctagcccgccggaccacagccgcacccgcaggcgcctcccctcctccattctccaccttccgctaccggtgccacgatgtcgccgcctccggtgctccgctaagtacagtgaagcggcggcgccgtccgcgtcgacaacgacgccgcggccgtctgagataccttggagcaaggatatctgcaattcggtgcggctcattgggactgtgggcaccgatgtcgagctgcggcagctgcccagtggctccgctgttgcgaggggtcgcctcgccgtatggaagtcggccaccgagactacatgggtaacactacaattctgggatgatatggcaattgtgtcctctgagcatgttaagaagggtgaccgaatatttgttgctggacggcttgtgtcagatactgttgatgaggggcctgagaagcggcacgtttactacaagcttgcagttcaacagttgaatttcatcgagtcccagccagttcgattatatgaatcagatgcaagccaggatgccccagaatagggataacatgagctcttctcggtcaactgaagagctgtggcaagcgttctttgctaatcctcttgactggtgggataacaggacaaataagaagaacccaaggtatccagacttcaagcataagcacactggtgaagcgctatgggttgatgggaggaacaaccctaactgggttacatctcagctggcagttttggactcaagaatgagttctctgcaagacaatgagagaaaaccagtctcttacatgtatgctgacgagttcatgacattggaaggcaatcgataatctttatgaacgaggaagcttcgcagcccccattttttgtgcagcttggctggctgttatgacgattgtgatgtcggagtagctaaccttgctgtctcagttttgttgtacatatctgagcggctctggagggttgttatgagcgtacgtagtatcatgtattcggtagactgtaaggtcgctatgagcctatagcaggcataaacaaatgggagaaacccttgcttcttctgactctgttagtagtattatctggtttgtgacatggtttttaactatgctgttacgtcgagcggttatggtatgtaaaccgtggcctctcatgaagtttttccttttgtcttcggaagaatttggaaataaa

SEQ ID NO: 41351 - DNA, 261 bp, Zea Mays
ttcagaatttggatcacaaactcaacaaactccaccttgagacaaattccttgtagcatcataatagcaacctccaccttaaacaaatgcatcatcatcttgccggcgccaacagccactaagggctaatttataataccaactagctcaaacttagcaacagaaacatgcttcgtcatcatatcagctggattattatcagtactgatcttgcataccttcaccaaccctttttcaatgatatcacgaatgaagtgataa

SEQ ID NO: 41352 - DNA, 1176 bp, Zea Mays
aacggatagatacgcatcgaggcagagggcttggccgagatctccccactaccccgcagcgtctttaaaaccaggacctgcttgtttgattgtttcatcgatcgtcaatctaagtagctagccagcactacagaagggcgtggcaagaatcaggagagagatagcaggggggctagctagctgagctcgtgcgacgaagaatggccggaattggcaggaacatggtggcgccgctcctggtgctcaacctcatcatgtacatcatcgtcatcggcttcgcgagctggaacctgaaccacttcatcaacgggcagaccaactaccccggcgtggccggcaacggcgcgacgttctacttcctggtgttcgccatcctggccggcgtggtgggcgcggcgtccaagctggcgggcgtgcaccacgtgcgcgcctggcgccacgacagcctggccaccaacgccgcgtcgtcgctcatcgcctgggccatcacggcgctcgccttcgggctggcctgcaaggagatccacatcggcggacaccgcggctggcgcctgcgcgtgctggaggccttcgtcatcatcctcgccttcacgcagctcctctacgtgctcatgctccacacgggcctcttcggcggcagcggtggctaccgggaccacgactacggcgtcggcggcgcggccggcgagcccaagggggtcaccagggtctgaggattctgatcgatgcagctcgtacatgtgtcatcatatcaggcgctgctggagtgtgatgacgtaataagtagtacccatatatatatatatggtgtgtgttgacgtaccacgtatactacgtacgtgtgtacctagtagctagctagtcagtccatcgtctgctcatctcgtcaggtcatcagatctctcggttctggtttgtacatcagtacgtgcatgcatgtatcccgtgtcaaatgtatttcgtcacccgtcagtttcagccggtcagtgaccaagtttatttcgtcacccctcagttcagtgacattggtgacatgaggtcgtggtgtcaacttttggctcaatgtattatgtacctgatcttttttacaggatttctatcggctcgtcacacttgatcgtacgtacaaatattcagttagtaacaccactgtttttaggatcgagccaataatat

SEQ ID NO: 41353 - DNA, 1534 bp, Zea Mays
aggagcccactcttgggcatacctcagttccaaaaagctcgcaacagccagccctaggtctgaactctctcggacgggtgacaggctgacagccgccgcccgccagctttggagagccacggtgacaggccgccagcagccatcgacggccctccctccacctcgccgtcgtccctcttcccccatctcgccgagccatcgtccctccacagcaggaccacctcaccgagccgtcgtccctccacagcaggagtgcaggaccgcatcgccgagtcgtcgtctctccacaccaggttcgccgtcgcggcgcggctacctcgctccggctcccagctcgtccggtccagctcactcgcggtcgcgaccatctccgtccacctcatccctccggcaagcagttgctaaactcatccagggtcagatcagcagctcttgccttatcccgctggctggccgcagcaccggtggtgtggtggaggatggcatcgaaatacgtggccagggtaccgtctccatggtgggcgccacaacgtcgtttggttggttcatgggtttccgtctgctcggtaaaatgcggtgcattgggaggacgggatgttgtgtgcgctgctgttagcttcagaccatgcatcgacattcacaaggggaaagttaagcagattgttggttctactcttcgggattcatccaatgatggcatggaacttgtgacaaactttgaatcagacaaatctcctgcagaatttgcaaaatcatataaagaagatgaacttcttggaggacatgttataatgcttggctcagatcctgcaagccaggctgctgcactcgaggcactacatgcatatcctggtggcttgcaagttggaggtggaataaatttgcagaatgcaatgtcttaccttaatgaaggggccagtcatgtgatagtgacctcttatgtgcttagcgatggcaagatgaacattgaaaggctgacaaaacttgtcgagctggttgggaaacagaggcttgtgctggaccttagctgtcgaaaaaagatatactattgtaactgacaggtggcagaagttcagtgatgtgtttgtggatgaaccggcattagaatatctcgctgccttcgcagatgagtttttggttcatggtgttgatgtggagggcaaaaggttagggattgatgaggaacttgtggaactattggggcatcattcaccaatcccagtaacttatgctgggggtgtgtcaacaatggatgacctagagaggataaagaaggcaggcaaaagtcgagtagatgtaactgttgggagtgctctagatatatttggaggagatttaccctacaaagatgttgtcctttggcacaagaagcaaagtatggttggccaagtgtcaaggaacatgtggtagcgatcagtattgccagaatttattgtgtatcgctcgctaaaagcatatttattttcattacaaaacttcattgtgcgtttgaattactgagctttcttttgcttttgcttttggttgtttagac

SEQ ID NO: 41354 - DNA, 629 bp, Zea Mays
atggttggtgatggggtaaatgactccccagcattggcggcggcagacgtgggcatggcgatcggtgctggcacaaacgtggccatcgatgctgctgacatcgttctaatgaagagcagccttgaggacatcatcaccgccattgatctctcacacaagaccctctccaggattaggctgaactacatgtgggccctgggctacaacgtcctgggcatgccgatcgccgccggcgtcctgttccctttcacgggcgtcgtctgctcctccagctctacaagaaaccgctgcacgttgaagacgtgcccaggcccggggaggactcagatttggtgtgactgcgagccatcgactagaacaaagatctttctagagaatcatattgttgattcagaaatttctcttacagccactgttaatttgatttggattttgagcattaccagtttattatttttgttaatgcaagccttgaagcgtatcaaactctatgaactgaagtacaaagatattagtaaagtcgagaaggacatcgttctcaggccatcaatggcgccgcgctgcacctcttcagcttcgccgaggccatcagcatcggtcgcccacctagaaactcttcaagatcatag

SEQ ID NO: 41355 - DNA, 927 bp, Zea Mays
cgcgaaacgcgccaacaaccagatcaatggagtgaggcagtgactcagctcagggcctcgggcccagcacaccaaccctccagtagtatctctgacgtgcgggctccgccagacaacgagctcacgagtcacgatccaaatcccttttccactccgccggacgtcgagagaggcggtgggtgcgggacgcgaaggcgaagccctagccccctccctgccgcggacgccgatggacccacctcgcgccgtcgcctttcttctcatactcctgcccgtgctcgccccggtggcctccggtgtacctttcgtcgtcctacacgggattggcgacgagtgcgggaacgatgggctgtcatccttcaccaagatgcttggggagtggtcaggctccaagggttactgcataaggaagaaccaaaaaagaaggatgtgacacaaaacaagaggtatgggaattggtttctgaaaaccaggtgcattaggcgaagggtacttcggatccgacgcgctacagtctccgcttgactcgcttccataggggagagaaggcgagggcccgtggcagacgagaaggggggctcgctgcagcctcagacgtaccccgaaggccttcccttagacggcgaacgcccagtccaagcgaaggcaaggacatgacttcacagaatcaagggtgcgacacacgagcggaggcctcgacaggttacggagaaacccaggactccgccccgcagtcatctgggcccacttgtaaaccccttgcggggtagattttgtagtgcgtccgaattaccatactccgtccactgtaatgaccccgttagaggaatattttgggaatgtaacagtacttgggacccactacccctcccggttacctataaatacccctaccttgtacacagatgggacatgcataacaagacg

SEQ ID NO: 41356 - DNA, 2519 bp, Zea Mays
caggcgtgcgatggcgccattgtgtggcctggcttccgttccgcccgccgaggccagtgtggcaggcagctcccgcgcgagcgcgagcgcgatccagaggctggcgcacctgcgtcactcgctccgcgctgccgcgatctcctctgacgtcgaagtcgcccgggggatgacacagggggaaggggtggtgtgggaggggtgaacaggagctcggtgacttttgtgagggccgccagatggaggagcgccggctcgacacgccggcgatgaggagaatcagcgagtggtatatacgttcctagcttctcctaccatccctgctgcgtctccttgctctacttttcattaattggcatgttgctgctgctgtttcgcatttgattcgatgagttcgtgtccgtaaccggcgctgatagcttgttcagtccgattttgaactgaaaacaaacagctatcgtcattaagctagcaacacgtgacctgtgctttcagatcttcacgtcttttacccgctgaaccgctcgctctagccaaaccctgcaaatgaagttttgcggagtttgaggctggctcttttgcttcgcttgattgttgcaggattctttcactagagttcccaagcgatattaccatccaggttggggaggcgaccttcaacttgcacaagctcccgttggcatcgaggtgcggctacataagggagcaggtgtcggggatcaatggctccagggtcacccacatcgacatcacgggcttgccgggcggcgccgcggcgttcgagctcgtcaccaaattctgctacggcgagaacttcgagctcacggaggacaacgtcgccatgctgcggtgcgccgccgagcacctgcagatgaccgacgacgacagcaggggcgggaacctggccggcaggaccgaggcctacctggaggccgtggcgctgatgagcctcgcgggcgcggtcaccgtgctccggaggtcggaggacctcctcccggtgtccgaggaggtggacctcgtcggcaggtgcgtcgacgccatcgcctacttcacctgcaacgacagtcagttcagcatgtccaacgagagtcgtaattgccatgaaggcgagggggttcaagggcattgctctgggcacgctcatcatgctctatgcgcagaagtcgctgcgaacgctggacacacacggaagggagaagcaaaagatggagccgaggcaggaacacgagaagcgtgtggtgcttgagaccatcgtgactctgctgcccaaggagaggaactccatgtccgtgagcttcctctcgatgctgcttcgagcagcgctgtgcctggacacgaccctggcgtgccggctcgacctcgagaagcggatggccgcgcagctcgggcaggccgtgctcgacgacctcctgatcccgatcttcttgcccgacgccggcaacacgttcgacgtcgacgcggtccagaggatcctggtcgggtacctggagcacgaggccgaggcggaccggctggactacaacaccgacgacgacttcacctcgacggcgtcgccgcccaacgacgtcggaatggtcggcaagctcatggagtcctacctggctgagatcgcctcggacgtggacctgcccgttgacaagttcaccggcctcgccgagatgatcccggaacgcgctaggttcaacgacgacggcatgtaccgttccatcgacatctacttgaaggcgcatccgtatctgagcgaggccgagcggaagacggtgtgccgggtgatggactgccagaagctgtcgcgcgaggcgtgcgcgcacgcggcgcagaacaatcggctgccagtgcagacagtggtgcaggttctccaccacgagcagcggcgcctgcgcgaggcccctacgtcgtcgttctacggcggcgagtccccgaccccggcgccgagcctccagggccggcacggccggagcgtgccggacgagatgtcacagctgcagcgggagaacgaggagctcaagatggagctgctgcggctgaagatgaacctgagggacccgtcggcgcccccgcagcacagcgacgctccaccatcggggcgccgcccgctgccgaagaaggcggcaggcggcagcggggggttcattaacaacgtgtccaagaagctcgggcggctgaacccgttcctgcggcctgacgccgtgggtggcgccaaagtgcgcaccaagccgtccaggaccaaggatcggaggcactccatcggctagtgattggaattggctcatgctcattgccggcttctttcatcttgaatcttcttgacggctatttcactcgatgaacgtaaaaaaacactcgttgattgattgattgaatggccgagtcgtgagtaaagatgtgtagctatcgcacttgaacataaataagatgctatgttatactttcttcattctttttttatatgccgtgttttagtttaaaaataaactagcgaataacacatatttgaaagtggaataatagtaactctagcg

SEQ ID NO: 41357 - DNA, 1066 bp, Zea Mays
tctgtgctctcggttggcgtgaacctgatctggtcttaagagccctattggcgagttgacatatgcaagggtcaagtgctacatatgtcgtgtgattggagatccttagctgagtataatcaattcggatcgccataacttcgcggacatgaagacttggtaactgccctacacgtagcaatccagggaagaaaaagggtgataaaagacggctagtataggccaagtgcttgaactagggtagaaagaactctagatgcaggtaattttacttaacttgacaagtaaaaatggatttttaaggatccacttttagtaagcatttttgcaaagcagagtctttgattcttgataagccataccttgaatccctctagccagcatacccttgaaagtcttttctttagtcaggtaagtctttgctgagtaattccgtactcagggttttattccctgttgtttttcaggttatagttttgtgctgctgatgatggtgttaagtgccggtgggctcgaccttcttataagtctaaataactctcctatacttcttattgaggatggtcacttgagctagcatatatatcaaacttatacttttgtaatcactccgatgaatataatgtaaaacttttgtaacttgtaaaatttgataataagatttccgttgcaaaaatattggtgtgtgtgatttgtgttacttaatcttgtggtcctggttataagtggtttatccgatgtccttagggcaatcggacggatcctgttaagttatctggtgcacatgcatagccgtctgaggtctttgagacaaggacaggtgcatgtgggcccaataacttgggaggttctgccacaccttcggcttgctcgaagatttggcgctcattccctttggttgcaaacaattccttcatcctaaggaccttcggcagagaaggggacccccaacaacatctgctatttctctatgtggttttgggtgttattataaatatgattcatgatcatgctttattattgtgattctattctttaatgttcatgataagattatggtgttaat

SEQ ID NO: 41358 - DNA, 360 bp, Zea Mays
gggcaatgtgccccacgacatttattgcgtcctgtccattccactggtagacggcgctagggccaccctgcagacggtgcacctgtccagtccgttgctgaaacagtacgcccgtgctgcgcgatgtattgtactcatcccttgtgcgagaagcttcccctgcacgccgagactatacaagatctcgggtgtcagggcgcaagaagattgctccatcaggagatatcagtggctacatccgctatgttcctgggcccacatgtcggggctcagcactcttgtacatgcccccctttagctataaaaggggaggcatgcaacgttacaaggaggctcacctagacccaagtgattcaagac

SEQ ID NO: 41359 - DNA, 537 bp, Zea Mays
atgtatcctgacgatgctggcgccgagccttgtatgttgtcttcttttatactgagggagctcagtggggaagacctaaaggtgaagactgttcccttgccccaaagaaactccatgttcagttcaagaccaaagtacaaaaagaaatcttcaacctacaatactactactccatttcattccttacaagcggaaaaactcagggagaagctgaggcaggagtgcctgcggaaggggacggaactggcgcatggggtggctgacgccctcttcgctgtaccacccaccgaggacctcgacggccctatcgtacacctcccattgcccgttgtccgactcccgcgcgagaagcatcttggtgctgggacctcactgccacgattagtagctgcaaaggttggggcagatgtaacactaacagacattgcgcagaatgcagaagagataattcaacaccttaagcatagttgtccggcccatctatatgctacttccatgtcgccaccagcagtccaacaagaaaatatcaaaattgct

SEQ ID NO: 41360 - DNA, 453 bp, Zea Mays
ctctgctcgatctcgtcgaaccacgaatcctggactttagacaaaaataagcgaggtctctgtgcatcgcttatcaagtactcgatcgaatacttcaatcaaagatcgtcgtcattccgtgcgtcatcaaggaatcccatggatcggatgaagacgaagctagcagcgcgatattccccaagcgctcgacaaattgactgaatcagaaaattgctaccgatctcgtggattcatgtcagctgttgaaacggtaagctgatgaattattcagaatagttcgatcgttgaataaattaatgtgctaatgtgatgttgattaggtgctcgataaattgtgtaggtcacgaaactctcgtcgacttcgcggttcttgcgattatcgagccagattcagttgtggcgagttatttcgctattctggttaattagttgaattagtgtaccgagtagaat

SEQ ID NO: 41361 - DNA, 1637 bp, Zea Mays
cggccctggtcttagcagtgggcggtgtcagtgtgcgccatcgccccccactcagactcagccactgctgcagtccgccggctagtacacgtacgacaggctgtaccgaggttcagttcggtagtgtagttgtaggttgcgatggcgaggcggctgctggcggcggtcgccatagtagtcgtggccgccgcgctcgcgtgcggcgcgggcgcgcagctctcggcggggttctactcgtcgagctgccccgccgtgcacagcatcgtgcgccaggccatgtcgcaggccgtcacgaacaacacgcgcagcgccgccgccgtgctccgcgtcttcttccacgactgcttcgtcaatggctgcgacgcctcgctgctgctggacgacacgcccacgacgcccggcgagaagggcgccggccccaacgccggcggctccaccgtcggcttcgacctcatcgacaccatcaaggcgcaggtcgaggccgcctgccccgccaccgtctcctgcgccgacatcctggcgctcaccgcgcgcgacggcgtcaacctggtctctctcggcggcccgagctgggccgtgccgctgggccggcgcgacgcgacgttccccaacagcacgggcgcggcgacggacctcccgggcccggactccgacctggccggcctggtggccgggttcgccgccaagggcctgagcccgcgcgacctcgcggcgctgtcgggcgcgcacacggtggggatggcgcgctgcgccagcttccgcacccgcgtctactgcgacgacaacgtgagcccggcgttcgccgcgcagcagcgccaggcctgcccgtcggccgacgccgacgacgcgctcgcgccgctcgactcgctcacccccgaccagttcgacaacggctactaccggagcctcatggccggcgccggcctgctgcactcggaccaggagctcttcagcaacggcgcactcgactcgctcgtgcgcctctacggcaccaacgccgacgccttctcgtcggacttcgccgcgtccatggtcaagctcggcaacatcggcccgctcacgggttccgcgggggaggtcaggctcaactgcaggacggtgaattcgaattcgtgacttcaggacggtgaatgccacccatttttaattctttttccctacaaggagttgtagaatttgcattccttcaacgatttcgaatttcgaatttgctgtgagtcagctgaagtggtatcgcctcttgtccattaactgaaaccaacccgtccagaccagacggccaaaccgctctggacagcactgcggcgtccgtccgtgggcggaccacagcagacaccaccccgtgaccgtgaggatcctagcgggaaagacgagcgttccggcgagacgcgcacgtcaagcgtgaagaattggtttctgaatgcgcctaaaaaccttggaaagcgacatgccaacaagagacatacgagttgcgtctgcctggtgtgcatttgtaatatgtggctacctctgccgcatgcacgtatctgtagatattctcgaattggctgtcacttattctcgaagtagctcattggggttgtgattttttgacgcaggaaacttctgatttttattaagcataatgtcgttttaca

SEQ ID NO: 41362 - DNA, 269 bp, Zea Mays
agtccgtctccccccaactctaatcccctccccgcctacgctcgtggctctcccggatcctcggtcccccaccgccgctttccatcgttcttgggtccagcttccgaccatcgtctctagtgctccgatcgcgcaaggatcatcgtctccgtggtcgtgtgtcgtgcttggacatctatactccctccctcctaacctctcctctctcgatccgtaaccctaaccctaatcccctcttatgtaccttggtccttggattccgaccatca

SEQ ID NO: 41363 - DNA, 1527 bp, Zea Mays
gtatgcgttcggcgacgcgacgcgcacggcgcaccattccgcggccacgaagagcacaatcctgttcgccacgccatgcctctccacgcccgcgcaccgccgctccgccactcccaccttctactcaccgccgccaccgctcggctccgcccgtgcgcagcgccagcgaccaagccccgccgccgctccctcgtcctcgtccgcgcctccagctcggaccctccgcagcagcagctcaacctctccgtgctccgcttcaccctcgggattccggggctggacgaatcgtacctcccccggtggataggcctcggtttcggcgcgctcgtcgtgctcaaccacctcctctctgcgtccccgacgcccgcgcagctcaggtccgaggctgtggggctgtgcctggccgcgttctcggcgacgctgccgttcctggggaggttccttgagggcgctgatgctgccagccgagtgccgttgcccgaggggagcatccaagtattcgtcatgtctgagaacctgtcagctgtgcagaaggaggacatggcgtgggcgtcgtacgtcctgctccggaacacaaacaccacgtctgtggtcatagcaattggggatctcttgtgcgtacgaggatactggaatccacctgcaaatacttcaaaatattccacgatcgagtggttcaaaagtcagatgcagcaactaggacttgttgatttgaggggtgctttatacttccctaattcgtcagattctcagcttgcgaagattctgccagatgggattctttctgtgctagcgcaacctattctgagtcctgatccagctaataatgaaacaaaaactgaaggtgtcatcctgttggcctgcaatgcaaattatgcatatagtgagaaagatagggcttggataagaacagttgcagacaaatttcaacgtgcttaatttagagtcaggcagtactggaaaatggaccgggaaagattggggagtgtaaagtagactgactggtccaagaaggatttggagtcttggcaacgtggactgagcagaataagagagttttgcagttgggaggaaatcagcattaagctactgtttattagggttggcgctagttgaagcaaaatagtccagcaatagtttgttcagttggctagagactatgtggtgatgtgtttggtttgtctctgtgcctcttgctttggtatgtatgtctgattggatttggcattgaagcagaaaggctgctccagagattagtgacatgtgcaaagtagcaatgctgtcataatttacgcatactccagcccaattgaggcagttgatcacctggctgcatttatataagcagtaaaagcatttttagttcaaagtgttgtcacatttaagattgcaaatactgctgatcaatcacattccttcatatatgtacctagattttctattgcaggcttgcagctagtgaccttttcagttgctattgctagtatacacaaacttaacagacaagggaaatgtttgaatcttctg

SEQ ID NO: 41364 - DNA, 3472 bp, Zea Mays
atggcgagcgggggaggggggattcgggcgacgacttcggggaggatgaagtcgcgagggtggggagattcaagcgacgactttgggacaccggctattgcgctgaggcgtgggggcgactgtagtggcacggcgagttcagactccagcgccgtcttcttcgcggtcgccttttgcgctccatcccctgggctttccgtcacggcggccgcagccatggtggagatgcggcagcggaggaagccgctggtgctcgcctccacgcaggcgctcctcgactcgcttccgggggatcgcccgccgccaccgccgcagaagccggtgcgccttaaggccggcgtcctccgattcccctccggaggtggtggcgccgagttcggggagctcgcgtctttcgtcggcatccctgcccctgctctccgacggctcgcggtcgtcacgggtactcctgtgcttgtcaagaatactgacaataatgttgggaggattgtcaaagcagtattgtttggtaacccgtcccttgacaagtcctgctcagaacatactgaccaagtggtctctgcctctctctctggtcatgcaatgggcttcttaccttgtcgcacgttccctgctattggttttacatccatggatgaagatgttggttatgttagcccacttttggcattcaacttgggattgcatgtttcttgccttaaacttcttattcaaagagaagggcagcctttcaagttctgttctcgagctgaagagattgatgcaactgccagttctggaagtgatctttctcttcacttagaccttcttccatgccctcaagtgcctaaatatgcattgcatttacgagtttctgttgtgaggattcctgattgtggtgtgcttgcttctttaaagatatattcatcctttggaggaagtgagtaccaagacatggtagatcaagctttgaacgagtactttaagtttgataggttcctagcaagaggagatgtttttggtatacaaaacagttggaagtgtggctcaagctgctgcctggcatgcaataagcaggataataaactgaatccccgtaatatgatctactttaaggtgactggcatggaaccatcagatgaacctatacttcgtgttaattgcaatgaaacagcccttgtacttggtggagctgcttctgctgcaatccccccttattccttttttgcttcttctggtaattcagtaccattgcacagtgaagtagtggagcatttagcatctgtcattgcaccagcattgtgcccttcggatattttaccaaaaataaagttttccacttttttatatggcccgccaggatgtggaaagcgcacagtggttaggcatgttgctaaccatcttggtctgcatgtggtcgagtgtagctgtcatgatctgatgacatcatcagaaagtggggcacctgctgcacttgcaactgcctttaaagaagctcagaagtattctccttgtataatacttcttcgccactttgatgcaattgggaatgcatcctcaaacgaaggtccacagtctgagcaatctgggattgcatcgaacattgaatctgtcattaagcagtacattggacaacgttgggttgctaaggattcactgccaggaaaagatgtaaatgggagctcatacctcgtggagcctgaatgtgtaagctctcttcaaatcatactagttgcaactgcggacagttctgaaggaatgcaacagtcaattagaagatgcttccgctatgagatcgacatgaagactatgaatgaagaacagagaaacgaactgatatctgagacacttcaaggcattcctaaagttgctgatgagagtatttgtgacaagttcataaaagatttagcagcgcaaacgtcaggtttcatgcccagggacatacttgcattggtcgcagatgctggtgtgtcttttgcgcataaaattgcagcagggaaagatagcaaagcaatcagtaagcatacggaggtccttccagaaagctcttctgccactcaaaatgaggaacaccatttcagcaaagaagatattatgtcttccttggaacgagccaagaaacggaatcgtgctgcactgggcacacccaaagttcctaatgtcaaatgggaagatgttggtgggctagaggatgtgaaaaaggttattctagatactattcagttgcctctgatgtacaagcacctgttttcttctaaattgcgcaagcgatcaggtgtcctgctatatggacctccaggaacagggaagttacttgtggagatcgatgggttgagtgacaacagccaggaccttttcattattggggctaccaataggcctgaccttcttgattctgcccttcttcgccctggtcggttcgacaagcttctttatgtcggtgtaaatactgaggcatcatacagggaaaggatccttaaagcacagacacgcaagtataagctgcacaagaacgtttctctcttgtcagttgcgcagcgttgtccaccaaacttcactggtgctgatatttacgcgctgtgtgcggatgcatggtttcatgcagcaaagcgatcagttgaaacattcgaaatcgatccttcaagaagtaatgaagccagtgccgaagaagtcatcgtcgagatcgacgattttatcacggtgttaggagatatcgcaccgtcgctctctctggacgagctacaaaactacgaacagttgaggcagaagatcgaaggaccttctagatgaagttgggtttccactccctgctgacattcttaaactgctaacacaccaaaacattccctgtcttacattttcgttcgtacacaagttttcctccctgaaaacttgggcacttctatatccattcctgatttatacaatcacatccttgtagcagcatctgtattgacatcagaatgacattttctctgaagagaaacatcctgtcattctttgttagcagctccgcaactattctgaatgagcccgtgaagtcaagcactcaaagccttacctgggaaacaaaatgctattcctgacctgaaggaagcatccaccaatacagctagtttgggtacacacgctgaaccagctagttcgcctgggagaggcctctgtctcgtttagatgccatcgtctagaagttgtatcggaaaaattataagcgaatgttgcaatgaacagagttccttgtactgctgtgatttgtcattggtcaaagagaactaactgcagcgtttgtctacctacaatacttgtttttttgttgttgctatcttgtagtgccagcagcgatgcctccttgttggtgctcggcaagtcggctggtgtgagcaaaatccgtacgtcgtcgtctccagtggtgtcattctaaactggatctgctgctctcgagaccgaacaactgcaacaaactcaggcagggactcagcatctacacatcctg

SEQ ID NO: 41365 - DNA, 528 bp, Zea Mays
gcgctccctacgtcactgacccgtgggaccttctcccatgcctcactgatgtgtgggacctctaggtcagggtcatcttccccattggcgcgtacacagcagatccgagcctcgtttgagctcagagtttgttaagatttcgctagatttatcaccgcaacaacccaagcatctctatttatatgcgtccacctaggattcctcgttttatctaaccctagccacaacaccgagagattcgaactgtagtggaggcgaagagagggaagccgtgaccaccatggtcgattcgtggacaagcctgcgtcggagcctcaattgattactagggaaacttccttggcgtatgcaaaagcggatagtgtaggttggcgggtgcaggtctgaccggatgtgggtgaattgatcgccggagatagggctctgccatggatccgccaagccgcgtgggcagccatcctcgcaagcttaatagacgttctcttgtgcaggagaacgaagtagacaactgctgctcctattttacta

SEQ ID NO: 41366 - DNA, 2807 bp, Zea Mays
gccgcaacccctctctcattttcttcctcgtctacacctccttctctcctcctcgatacattcgagcacgcccggacgcggtcagaagggagaaagcagcaagcggcgccgggttccccctcccttcgtcgcccccgatcgacgccgatcggggccgactgctcgtgggggacgccgaccgaagcccgggcggcgctgcttcaatatacggaagcagtttctagttttcttcagttcgccgctgcagtttctagtttccagcggttcccaccagttgtctaataacttattgttgttgtacgtgaggttgcttttgtcgtatttgccaggttgcttttgttgtatttgccaggatcaccatgctgtcttcttcagagacttgccagcttggttctagttctagcaaccctgtcatggatcagcagaatttacttcccaacaactctaacgtggatgaacagattttactcccaaatgcattagagcatgaggactacccacactatttgctcaatagtcatgaggtgggaatgccaagtggaagcctgattggtcagcaaaatacaagcttgagcttgtgggaaccagctggatctagctcaatggagtgcttagttgatcatgacaactttttccaggcaaaaagagaacatcttgcctcttctcggtctattggtgccccgttaagtatagagaggaggagacatgaaggcactagttcattgccttcacacaacctaaacatagacctcaacattaatcaggctgatcaatttggctctgatgatgttgatcttgcacatggtaatggacaaccaagagcaaatactgtcacagcccacaggggctctttcataactgagcatattctgcatcatggagtttcttcggatgctataggaaattcttccaggaatgcagagtgttttgttggtgcagcaggccaagacagtcatcatgcagcctttaagagaaagtatcttgatggatgtcatgcagagtcttctgctaacggaagctcacgcaatcgtcaccagaataatagtactctgctacctcctccgaccacctgtgaaagttttactatacccaccgcaacaaattttagtgttccgtaccatcctgtggagcagctaaaccagagtactaatattgctgcaagctctactttgtctgatcactattcttcatacagtgatccacgtggaaacgaattcgtgcgaaatacacggatgcgaataaaccctagtgattatgatcaatcgctgcccagtctattacctgaggggagtttcaggtgctcggcttaccaatctacacagcagcagtcatcatttattccagcgcaacctagacaagttagctcttcttctggttctcatagtcgatctcatgtgcctgctgttactcagttttcacaaaatcttcgccgtccatcaactgttagttttgggtcaagaattgggaattcttccacttctggttctacaataccaatacctgcttcacaagatcctggtacaagcttgttgggaagcgattatcctgagccacttttgttaggttctttgtttacagctgattcaacaaatttcttatctgcatctggaagcataagtaaccagcaaaattctggatccagctctagttccatgctcaggcctgctgttaatgttggaacacaagtccctgagttcaacgtatctcagccaagtacaactttaagaggttcatctgatgtgttcaggaggtccttaatttctgctggcatttctcattctagaagttcaagcatcccattgcagcaccgtggaaattcatccacatcacatgagattaggaatcatcagccaggatcaagctctcgtgcacatcagcagcaccccttaagacccggtcattcctctgtagacaggcagagctctggttacttggaccttcagtcttttatgcagaccatagcttcaagggaaggaggcagaccaatgtcagagatccgcaatgtcttcgatcagattcgtcaggggagaaatgcacgattggaggatttgcttctcattgaccggtcacttattatgagacgagctaatttgattgatagacatcgggatatgaggcttgatgtggataatatgtcctatgaggaattgctggcactaggtgaacgcattgggtacgtaaacacaggacttactgaagaaaagattttgagtaacttgaaacaatggaaatgtgtcttaaaatcattggatgatcctccaacaagtgttgaaccatgctgtatttgccaggaagactatgtggaaggcgaggacctgggcaggctggattgtggtcatgacttccacaccgcatgtatcaaacaatggctggttataaaaaacctgtgcccaatctgcaagaaaacagcactggacacctaaaaacatggctgcctttttccttaggaaaaagccggtagcggcagggcaagtggttgccatctaaccacaccctcccatgactagcaaagtatgttacacctttcccatcatcaacatacatgtgggaatctatactataggtggtacatggcacttgcctgaagccaatggctgtagaccatggagttttatcctttgtttttttcaatcttagatttgggatttaaaatttattcaatgacatttgatttacttgggcaatctgcgatatttgctatcatcatcgatcgcttatcatctcagattttgttgtttgatttgtgctgtgactagcagcttgtaattcgttcacctcgattcttgaacacgctgtcggttccttgg

SEQ ID NO: 41367 - DNA, 4104 bp, Zea Mays
cgcgctagcagaggcgctgagctgagctctcagccatggaagtggtcgatctctcccccacgtcccgccccctctcaccgctcctctccaccgcacccgcccgccgcctccgcctcctccctccccgctgcgtcgtcggcctgcgcgcctctccccggacccgagcctcagtagaacccgctacccaggaattgggaacagcggatgcagtggagtggagtggggatgccatacgtcggcgtttccttgaattttatgcagcccgtggccacaagatccttccgagctcgtcgcttgtgcctggcgacccaactgtgttccttaccatagcgggaatgcttcagttcaagcctatattcctcggcaaggtgcgacatgcattgtgttagtgaaggcttgtgtgcttgtgaaatgcggcaccacatgagacctaagggcatgtacaacctgagacttggttcggtttttaaaatacaagagacaactaagagactgcataatacaactgagactctgggatactaaatgtagctaagagacaacatgtacaaagagtcatgaagagccgttctcttgtatttttttcacttagccacttagaaacctcttaagagaccccatatttttttcacttatgatttatgaactccgctttgcatgtggtcaataaaattggaaatgttgcacaaaatggctaagtatcaatgcgatcgcctacagggacatctgatttttggggttgggtacacgaggacgagggcttgtttgggaattttctggaatatgaactaataatccttagacatcaaaatatgtcactgacccatctactcctggttcaaagttgccccacttatttttttctaggaaatggttaattgataactatctattcttgcctttcttttatgacacgtacaagttatttgcaaaaatttaaaagttgaaacttcacggttgcaagtgcatttctaattatttatacacaatcagttactagaatcagtagaataagccattgagcatgatcctatattttcttttgtacatctgtaacgataataatataccacctatgatcaatttcaatgcagtcgtgacattcagactcgaactaagattctgacctcgactggaacaggcactgtttcctgtttcattttacttcattccaggtcttttgtgttgctacttacaggaacctaggcgtgtgccacgcgccactacctctcagaagtgcatacggacaaacgacattgaaaacgtgggtcgcactgctcgacatcagaccttctttgaaatgcttgggaatttcagttttggtgattacttcaagaaggaagcaaccacatgggcatgggagctggcaaccaaggagtatggattgcctgcagaaaggttgtggattagtgtttttgaagatgacaatgaagcattcaacatctggcacaatgaggttggtgtgccaaaggagcggatacagaggatgggtgcagaagataacttttggactagtggcgcaactggaccttgtggaccttgctctgaaatttattatgatttctatcctgagagaggatcatcagatgtgttgtttgcaggatttgggcgatgatagccgattcattgaattctataatcttgtctttatgcaatataacaaaaaagacgatggatctctagaaccgttgaaacaaatgaacattgatacaggaatgggccttgagcgtatggcacgcattcttcaaaaggttccaaacaactatgagacagacttgattttcccaattatagaaaaggcagctagcatggcgatggtgtcctatgcaaaagctgatgatgccacaaagacaaatctcaagataattggagatcacatgagagcagttgtttatctcatatcagatggggtaattccctcaaatatcgggagaggatatgttgttcgaaggctaataagaagagtagttcggatgggtagattgataggaataagaggtgacgggcatggaaactctgaaggtgcatttttaccttcactagctgaggtagtgatcagccttagcactgagatagattcagatgttgaatcacgacggagatcgatccttggagaacttcaaagggaagagatgcgatttgttcagactttggaaagaggagaaaagttattagctgaacttctggatgaagctttattaaatgctggtaataatggaaacaagccttccttatctggaaaaaatgttttccttttgtacgatacatatggtttcccagtagagattacagctgaaatagccagtgaacaaggcgttactgttgatattgagggatttgatattgaaatggaaaaccagaggaaacaatctcaagctgctcataatgtagtcagactttctgtaggaaatgagaccgagatagtaaagaacatcccggatactgaatttttgggatatgattctctctctgcttctgctgtcattaaaggtctcctagttaatggaaacccagttaatgaagtttctcaaggttctgaagtagaaatattattagaccggacaccgttctatgctgaatcgggtggtcaagttggagataatggtttcttatatgtgaatggaggggaagatagaagacaaacaacagttatagaaatcaatgacgtccaaaagtctctgggaaatatatttgtgcacaaaggcatgattaagcaggggtctgtagaggttggcaaggaagtagatgcttctgttgatgcaaaattgaggcagggggctaaggctcatcacactgcaacacatctactacaatctgctcttaaaagcgtagttggttcagaaacttcacaggctggttcccttgtggcgtttgaccatctccgatttgacttcaatttccatcgcccactttctgaagaggaattaacaacaattgaagcacttataaaccaatggattggcaatgcagcacatgttgagacaaaagtcatggctttgcaagatgcaaaaaatgctggtgcgattgcaatgtttggagaaaaatacggtgaacagagtcgtagaggttcccgggatctcattggaactctgtggtgggactcacgtcagtaatactgctgagattcgtggtttcaagataatttcagaacaaggaatagcttctgggatcagaaggatagaagcagttgcaggtgacgcttttgttgactatgtgtgtgctcgggacaattacatgcggcgcttatgcttatcccttaaggttaaggctgaagatgtgaacagtagagtagaaacaattcttgaagagctaagagcaaccagaaacgtagcatcatctctacgcagcaaaattgcagtgctaaaagcagcttctcttgcaagtagagctacaactgtggagccccagaatgtcaggattgtggtcgagaacatgggtgatgtcgacgcagatgggctgaaaagcgccgcggagtatctcatagataccctcaaagaccctgctgcggtgattttaggatcaagcccaggggatggtaaagtcagcctggttgctgccttcagccctgcaatcgtcgaaatggggctgcaggccgggaagttcgtgagtggcatagccaaactctgcggcggaggcggtggaggcaagcccaatttcgcccaagctggggggcggaagccggagaacttgcccgacgcccttgagaaagcccgagctgaaattgtggcacgggtatcaggttcgagctgattctccgctgcctcacacctgatactggaagtatagggataggattcatatgaaatgtatatgtaattgtcattggcattctaagcgaaaacacttgtatttctccctaccttgccgtgtacgctttctgcagatgacggagcaaattttgtagcttgtaattgtaactagtggccgaacagaacggggaaaagatcaaatcttcacacagcaaaactactgctcatgtttaatctaatcttaaaaacataagaaattatttgtcacatgatcaactaatagtctaatacctagactagaccaaatacatctgatcaagtcagccagccacgtgcgtccaagcaaagattgagc

SEQ ID NO: 41368 - DNA, 1189 bp, Zea Mays
atgcagcctctgggaattagactatgtgattgtgcaggttttgattccagccccatattgggtcagttatcctgagatggctagactggctgatgcgactccagtgattcttcctacaaacatatcagagaatttcttgttaaggccagagttgcttaccgacaagatcaatgagaaatcgaggctcttaattctctgctctccatctaatccaacagggtcagtatatccaaaggagttgcttgagaaaatagctgatatagtcaagaagcatccgaggcttttggttttatctgatgaaatttatgagcatattatctatcagcctgcaaaacacacaagctttgcttcactacctggaatgtgggaaagaacattaactgtaaatggtttttctaaggcttttgcaatgacgggttggcgtcttggttaccttgcagcccctaaacattttgttgcagcatgtggaaagatccaaagccagttcacctcaggtgccagcagcatatcacagaaggcaggggttgccgctctgaatcttggctatgctggtggtgaagcagtatcaactatggtcaaagcattccaggaacgccgtgactatcttgtgaaaaatttcaaggaactgcctggtgtgaaaatatcagaacctcagggtgccttttatttgttcattgacttcagcgcctactatgggtctgaagtagaggggtttggcactatcaagaattccgagtccctttgcatcttcctattagagaaagcacaggttgcccttgtccctggtgacgcatttggggatgacaagtgcattcgtatttcatatgctgcatccctaactacacttcagactgcgatgtcaaaattaaaggaagctgttgctctgctcaagccctgtgttgctgcgtagcaagatcactaaattgcaataaggagtgaccaaggcacctttaactaacctttcacattattttaaacacaatgttcgaattgttgggcagacttggtctgttgtttttatatgtaacattatggatttatgatgtgtacatgcaaataaaaatgttttgtttagaaaaggctaggttgtggtactatgcgaattaccttctatacaaaagaagatggtcgctggagcaataatcatttcagtcctgcaacacttagatggaaaagaacagcaatgcat

SEQ ID NO: 41369 - DNA, 1842 bp, Zea Mays
gcgcctgtctgccgttctcctgtttccgcctgcgctgagcgtgaatggttgtaataagccatggctggaggctgcctgggttcgggagccttggttactggaacagatagtcttcttgcaaaccaatctccggctcaattcattagtccatgcgatatttggttgctggttacctctgacatattctgctctcatgtgttgaagacatatatctggcttcagtgctttgatggttccatacaacaagtggaggaggaggttgcaatgttctgccccatgatatgtcaggaaattgtgaaaaatggcacagggtcatcaaaaaatcatgctattgctctcccggaaagagttaatccagccaatttgagtttgattcttgactactgtcgatttcatcagatcactgggcgttcaaacatggagcggaagtcctttgatgaaaagtttgttaggatagaaacagaaagactctgcgaattgacttctgcagccgacagtctacagttaaagccacttgttgatcttactggccgagcgcttgctcgaatcattgaaggaaagacacctgaggaaattcgtgacattttccatttaccagatgatttaacagaggaagagaaattggagcccctaaaaaatataaatgatggtcctgctaggattcgcctactgaaccggttgtatgccaagaagcggaaagagctccaggagcgccataagctgaaggatgttcaagtacagaaagagcaaaaagatgagagatctttggatgagttacttagttttattaatggggatggaggttcaggaggcaggaaagctaccaagagtaagaaaaagaataaaaggaaggatcatgttgagaaccccccaaaagctgactctgagcctgtaaatgcgaatccagatatgcaagatgatgccgagtacccttttgaagatgctgacctcgatgatggacttgatcctgcaatgaaagaagagcttgatagagaagttgaggcctttgcgaagaggttggattcagtttggaaggagtcacatattggtggtaatggttctgcacggagatttcctgggtttaatcacatgtgagtgttaagctggtaggatcagaaggcagaagcagaggagatttgtggacatacagcctggaagagagtaaaaataccaaacagtcgacttgctcctgtgtgtttgataagggcatgtacaaccctgaaatcatggatcggttttgcgaagtacaaaagacatgttaagagactgtataccctgagcctttggatcataaatgtaagtaagaggcaatgtgtgtagaattgtgtagagacagtctcttcgcggaaagagagcctgtctattgtatttttttcaattaaccctcaagagacttcatattgaaagaggttatacatgtcagagccaagcatgcagacatgctattttgttggggaggaggctgcctagttgggatgaagcttagcatggttcaaggaaaaagtgtagttttttttctttggaaagggaggattagaggtctgtcttgtctgtgttgccagggaggaggctgcctagttgggatgaagcttataatgcagtatatagtgtaaaacagtgttttgaatgactatatggctgaactgttggacacagtttgtatcaatgaaatttcgttgattcactgtattgtggtggtgcacataaaaaatgtcctttttttggctgaccttacgtgggttggaatatactataagcacgtgttcttatttataattaagttaaacaacattttatcgtatatatcaataataatagaattggatagatgaatgatagaag

SEQ ID NO: 41370 - DNA, 1067 bp, Zea Mays
agataacttaacaggatccgtccgagtgtcccaaggaccccggataaaccacttacaaccaggatcgcaaaattaagtaaacacaaatcacacaccaacatttttgcagcggaatttctttattacaaaagttacaatatacaacaaatttacattatatttatcggagtgtttacaaaagtgattcaaaggaatacactttgaattgttataaattatttataagtttgaaatatatgctagcttaggtgaccatccgcaataagaagtatagaagagttacttagacttataagaaggtcgtgcccgccatcgcttaacaccaatcacaatcaaagtgactcgtaacctgcaacaacaatgggaataaaaccctaagtacacaagtactcagcaagacttacctgactaaagaaaagactctcaagggtatgctggttttaaaaagaaaagactctcaagggtatgctggttttaaaaggattcaaggtaaggcttatcaaggatcaaggactctatttgtagaaaagcttactatgagtggatccttaaaaaattatttttacttgtcaggttaagtaaagttacctgcatctagagttctttctaccctagttcaagcacttggcctatactagccgtcttttatcatcccatcagttcagtgcattgctacatgtaagtcggtgaccaagtcttcatatccgagaagtaacggcgttccgaatcgattaatacccagctggggatctccaatcacatgacatatgtagcacttaacccctgcatatgtcaagtcgccaccgggtttcttaagaccagaccgggttcacgccaaccgagagcacagatacaccaccgtccagcctcttgccatagagggtacacgctactctcggcatctctccactcccattgcgtgttggcctttctggtattagtttgtccgagtcaaagcttacccatgatgaggcatgtgaccagttaaaaggtcctcgatcaacaggcctacatcggcacggtccttaatcgactcagatggagacactacaccgagactcccttct

SEQ ID NO: 41371 - DNA, 314 bp, Zea Mays
aatcagtttagttatgtattggttgttgctaaaaaaattatgaaatatctagatcgataatatatgtggtattcgtttttatataatcatttttgcactaacatttttttatcaatattaagataccttggtcgttcttttttgatggattggagtcatcctcccaccgaaggcttgaagagataaacatcttcctcatctctgagatcatgatgcacttcggcaaaaaaaaaaaggcattgtatgtttaccatcgagccgatgcagacacgctggccgtaaatcagcgatgaggtttcttatcaaaaagatcg

SEQ ID NO: 41372 - DNA, 2525 bp, Zea Mays
tgctgtccggtgctcctcgtcgggcgcttcgctgccgccttgcaattgcaacccacggcaaatgctgctcgacgatgagcgaggctagcaggagccacctcctcacctggatcgatggcggccgttcatctcggctaagatccaaatctcggcatcggcggcacccctcgactctccccacgcccctagccatcctaactgcgaccgtggatgaagatctcaaagaatcttggaggtgcagcgggatgacagcgtagggaggcccaatggtgtgatgtagcgagtcctaacggtgctcggatcggggcggatggcccccagtctcggcaggagggacaggcttgtacaacatttgatcgatgagtcagtgggcctaaagaaaataaagcagcccaagatgatctccatcatgggaatccgtggctccggcaagaccgcacttgccacagaggtgcatgagaggcatcttagactatctccagcagcttacccatccccatacccatattcaaactctactctgcgaacagcgcaatctatagtacaaaacagtgcttttgggtaaactatgggtagactgctgcagacggtcttaggacagagaaattcaataactccggacacaatttggataaaatgatgatcaacatggtcaacttttcatctgacagctgcaacctaaaagaagacaaacgtcaaacgcgtgatatagaccacgcgctacacacagtatcaccaagcccaaaacataccaaaaaaagttgaaccaagtggttgagaattccccttttgctctcatggccatggagaacactgcgccatgcggtgacttcgggaagatcgtggccgatcttgagtctgagaacttggtggctaacgtctctgccgtgaatcaagcctcggcgttgattgctggaggtaaaatccctgaaccccagcttctgtgccgcctgatcgctggtcttgcttccaatctggagaagcctgaccatgactctgccatcaagaggtgtgtttcctttactctaaaggcaatcagggtggccgtcatcaagaaccgcatgaacatggattcctcagctcgtggtgaggctctccatgccatctggtgttgttttatggatcaaggccttcgccgtattcagcgtgattcaaatatggtgaggctgtggacagtccaggatcaattgtctgcagtcaaaatcatatgtactttcttccgtctctcaccggtaaacatcagtgacacaaggtgtgtcacagccttcgcctcactgatgttgtcaccgtacagcactgtggtgtgtgcatgtgcagatgccctgctctctttgccccctgttgttccaggattttcatttgccattgcaagagcctattgccatatgcttgcaacagtgtcaccacaatcaccacttgaggtaagcagcatggttgcgatgcttggtaggctgaagcaagtaagtacgaccatggtccaccacccaggggtttagtgaccttgctgtggatgtcctagcagctttatcaaattgcaatcttgctgttcgaaagaatcttctgaacctgatggtgaggctcctcactccaaggaacatcagtgctgtgctattgctccttgataatgagctgaatagggctgctaacatccatatcgagtaccacaagatgctagaggaggcgatcagagaatgccatgctgcttttccggggtgtattgtagaattcacactagatcccaagtacagtgtgttcattgatagtattctgtacatcatagacatcatgaatcccgaccagtcgttgcgaggcccacttctgaaaggtctactaagggcgctccggcatgtgaagtcaccactggtatgcgccgctgctgtttgggccatctcaatgttctctggatcactggaagaggtcagtgatgccattgttgcactttcatgcttcttcaaggacctgcttgatcgacgtaagattgagaagctgatacttggaggagaagcggagaatcaatacaagctttctactgactattatggtgtcactgccggagatgcaacacagggaaagcaccagcagccatggctgatggagatggaggaactgctgtttgtgcgcatagggctcacacggcaagcaggtgggagctatgccattccttcgagttccaagagcagtgctagttcttcaaacgcgtatcttcctgagccattgggtaatacagacaatctgatcttcctcgtgcattctggagatgccctcttggcagatttcgtggaaatcatgctgtctaacctcaagaagaaggtcaaagagctggagtgatgctgatgagttcatttgatgtaataatttggaggtcaaataactagaaatggagtcgttgaaccttggccaatcgtacctcaatatgcataataatgctgtcttctgtgtgcttattacttctattattactatattatcactgatactttttctattcaacattttgccatctatttgtgtgacttgtgtggtct

SEQ ID NO: 41373 - DNA, 2314 bp, Zea Mays
tgaatgattgcttgccatgtgtgggacaaccagatcctgtgctgcgcccagctcaacaatcccaaattccattactgcccacctgcatcgtcctctctgtaggctgcggtgtttgcatcgtccaaaactccaaatacatacatacaacatgctagcctagtcctcttctagtcgcctctacccagttacttgcatcgccccgtcaagcacgccgccggcacgcggccctcggtctccccgccgcgccctctgcctccgcccgaacaaagccgtctcgccgtcgcgttgccttccttaccgtccaccgcgggcagccgtcctagtactcggttggtcctcccctgctgcccttctacggtggaggagcggagatcctgccgttttccggctgatttcttctaattgcggggcaagttccgtggatagtcaatactgcttgtgctgttgagctaatattaagttcctgctgggagaacttctgcagttcctatggcaaagcctctcaatggcagtggccgtagcatgccaagatcgaatgagggaatgcggctcatattttcggcagttgtaggtgtcatgctgggttacctgtttgggatctccttccctacagtcaacataaccaagcttcacttcccttcgagtatcatctcttatatcgaagataggaactctggcatcacaacccagacattgttgaaccatgcttgggcatctgcaaacaatcataaaaagaatagttctgaatctaacactgatgaaattcccgagatttatgttcctacaaacccaaaaggtgctgagagacttccaccaggcattgtagtgtctgaaacagatctttatccccgaagactatggggtgatcctagtgaggaccttactagcgagccgaggtatcttgttacttttactgttggtattgggcaaaaggcaaatattgatgcagcggtcagaaagagtgggatgaatttgagtggtctaaaagagcaatccatgtgagtgccaggaagcagacaaaatggtggtatgcaaaacgatttttgcatcccgatgttgttgccagatatgattacattttcatctgggatgaggatctaggtgtagagcatttcaacgcagagaagtacattgagcttgttagaaagcatgggttggaaatctctcagcctggtttgcaacctgatagaggactaacatggcaaatgactaaacggcgtggtgaccaggaagttcacaaagtaactgaggagagaccaggctggtgcactgatccacatctaccaccatgtgcagcgtagggccaaatgtttgttgtgtatttagttttcattgtctaattatcattttaaaagaagggcaggcctggtcaagtggtgagagctctcacttagtcaccatgtcccaggttcgaagcagcctctccgcatttgcgccgagaaggcttgcctcgatttatcccttctgtagaccccactcatgtttgacctccaacactaggtcttccttttttttaattatcattctaaaagttcgattttgatgtgcagatttgttgagattatggcaacagtgttctccagaaatgcatggcgctgtgtatggcatatgattcagaatgacttggtccatggatggggtcttgactttgctcttagaaaatgtgtggagccggctcatgagaaaattggagttgttgatgctcaatggattgttcatcaatcagttccttcacttggcaaccagggcaagtcagataatggaagaccaccatgggaaggggtaagagcacgctgcagaaaagaatgggggatatttcagacaaggctggctgatgcggagaaggcttattacttggagcgaggcatcacacccccgaactcaacatcagtttagatgaacacatgctcctcagatgccacggcaaggtttctgttgggggaacctgctgcaaactggcatgttcatcgaagctgctgcagcccagggcaaatccatatatttgtacattagaggtcccacgaatcgccatgattaatctttagtgtcgctcacctggttttaatgtcatttcttttgttagtgatactagctgcgatgtaagtaggaggatacagcagagaccgtgatgatacccatttgtgtattaatgacctgatgcaatatggatgttgataatcctttcctcagtttcagcatgtaaattgtttgttctagaccagctgtatgcaactgggtcaaatactacattgatgtaaggcccaaaatttgtataagaaaaaaataataaaataaatatatgaagaaataaaat

SEQ ID NO: 41374 - DNA, 2327 bp, Zea Mays
ctacctcccctcccgtccttcccctccccctatcctttctctctctcctctccctcctcttctttattgctttaacgttactcccactagccacccactcttcctcgaggccaccacaacacccccgggacacacacacagtcacacacacataaaaaaaaaaaaatcccccctcgcctcggattcgctcgcgcccccgcccgccgacgcaacagcgaggtcgttccgttccaggcttcggacggaggcggggtgacgtaaggaggtgcgcgggaggatccgttcgcgcccggaggaccgggatccggcgcccgtcgtcgtcgacgcccatgtcgggccacctcgatcgcttcgcgcggccatgttttgaagggtgctcaagtcacgatgaacgtagagaccataagtcagactttgaagtctctgaagatgaaaagaagacaagaataagctctttgaagaaaaaagcaatagatgcatcaacaaagattaggcactcattaaaaaagactagaaggaagagtggtagtagggtcctttctgtgtctattgaggatgtgcgcgatctagaggagctgcaagctgttgaagcatttagacaagcattactcttggatgagctgttgcctgcaaggcatgacgactatcatatgatgctgagatttctgaaggcaaggaaatttgatatcgataaagccaagcaaatgtggattgatatgcttcagtggcggagggagtatggcactgatacaattgtggaggacttcgaatacactgagttgagcaccgttttgcaatattatcctcatggttatcatggagttgacaaagaggggagacctgtttacattgaaaggcttggaaaggttgaccctagcaaacttatgaatgtcacaacgatggatcgatacgtgcgataccatgtgaaggagtttgagaggagcttcttgattaaatttccagcttgctctcttgctgcaaaaaggcacattgattccagcacgacaattctggatgtccacggagtggggttgaaaaatttcagcaaaactgcacgcgaattaattcaacgactgcagaaaattgacaatgataactacccagagactctataccaaatgtttatcgtcaatgctggtccgggcttccggttactatggaacactgtgaagtccttccttgatcccaaaacgaccgccaagatacatatagtccaaagtggtggggttcattgtgctcgtcaaattgtaactatttccaatggtgaggaaaaatttattacttacgccaaaccgaagcgccacgcaatgagagggagtgacacatcaactgctgagtctggttcagaagctgatgatgctgtgtcccccaaagctctcagaagttacatatcacatcctaagttgaccccagttcgtgaagaggtcaaaatggtcagggctactagcttttctactcgtgtccctgaatatgatgtacctgttgttgacaaggccgtggatgctacatggaagagagagcaaccacgaaaggcaccatccgtgccccaagatgcagactcatctgtgaaaactgcatccaagccatctggccgcccctgggataagatcgctgcaaatctgatggcttgtcttatggctattgtaatgttggttcgatcaatcaaagatcttgccacaatgagattgtcatctaaaggcgggtcagaagaaagctactgtacattgtacccggactccgtccagaaagaggaattccgtcctccttcgccattccctgggttcgctgaagccgacctattcgccgtggtcttgcaaaggctgggagagcttgaagagaaggtccagatgcttcaagaaaagccttctgaaatgccttgcgagaaagaagagttgcttaacgctgctgtgcgtcgtgtggatgcattggaagctgaactaattgtaacaaagaaggctttgcacgaggctcttatcaggcaagaggaactgctcgcgaacatcgacagcaaggagattgccagggctcagagaaagaagaaaacaatgttctgctactaggacaacacctgcttccgtgaggagatgacaaacgcggcggaccccttcatttttctgacacttgtgaatcaacaggtttccgttgtaaatcaacaaaattctggcataaataaaatgttttttttttaaaaattgcaatcctgagcattgctgcctcctcccggtctcgcaatctggttgttgttagttgcagcataactgcataattggttggttagccgcgccgatgataattggttggtttcttagctgatgcgtatcgtcaag

SEQ ID NO: 41375 - DNA, 664 bp, Zea Mays
tgaagacgaagctagcagcatgatattcaccaagtgctcgacaacagctcgaacaagttgtcgagcgtcattctcgtctacgccaagccgtgaagacactctggtgctggccacgcgtcaccagctcaacaaaaggaatcccaaggataactggtcaagaatagaaattgtgtacatcgctcgccagacgtgtgtgatcaatgacgtcaaccggaaatcgacatcgtgcttccgactatcccatcgaattagtcaaggtaagcaaatttgttattcgtattagtggattgatagatggtttgactaggtataatatttattagattgcctgagtcgctttggtaatttggtcgatgtcgtaggataaaagaggtctcagtgtttgcgggactgtaggtgttaaaaatgggaagttttattaatatatatgatacacaggttaaccggtaaattagtttagaaagttaatgaaagttcttctatcaaacttcataagtgttaagtgtccaagaattttgaagttaaattataagtcgtttagtgtgttctctaaactaggtatgatattctatgtatgtttgtcgatttcatgatttgaatgaatgttgatcgctatttcgaatatttaggattaagtaacatcgatatatctgtttcaaccaaa

SEQ ID NO: 41376 - DNA, 333 bp, Zea Mays
cttcgctagaatagcgaatgacactgacttgcgggacccaccaaactgtggggctctggacatataaacaggagctttcattgtaagcgtttcttgtgccatttcagttgcttgcattgcgctcgtctttttaaagtttcttgctttgtcgagtttaattggatttcaagcttcggcatttcaacaaccatcgacttaatggctgatgagaagaagattgttgattcggcgctgtctgggttctatgaagccatggaaaaaactaatgtagagaagattgcgaacgagatgctggctgggatatctgagaactccagcgatagtgaaagtttc

SEQ ID NO: 41377 - DNA, 1534 bp, Zea Mays
tgcgctgcggctgtttgtctggcaccggaaagaaaaaatccttctcggctcggcacaccgctgccggccatcgccgcagccggagatggaggacatcgaggacgtgctgggcccggtcggcctctctgtcggcggagcgcctccggtgctccgcctcctgctagcctccgtcgcggcaagctcaagcgccggtcgtccagggctgcgcatgcgcggcctcagctcgaggcccggatccccggcacgcagacgattcacgtcaagactatcgggtgctcacataaccagagtgacagtgaatacatgtcaggtaagaaagaacaagtttattgagattcttcctattaatgttggatgcttgggtgcctgcacatactgtaaaacaaagcatgctcgtggacatttgggaagctatactattgacagctttggatcgtgtgaaaactgttgtcggcttgtcgctgaaggtgtccgggagatttggttgagtagccagtagcgaagataccggtgcttatggacaggatatcggtacaatcttccaaatttgttaaacacgattgttgcggagcatcctgttgaccgaagcacattgctccgcataggcatgacaaatccacctttcatactagagcatctgaaggagatatctgccgttttgcgtcacccctgggtttattcgttcctccatgttcctctgcaatctggaagtgatgctgttttaacggcgatgagtggtgaatacactgttggcaagttcagaaaggtagttgatgctttgtgtgagcttgtccctggaatgcaaattgctacagatattatctgcggctttcctggatgaagaaggtatcgagcaatgaagtgaaaaaagcggagtcgtgaactgacttcagttttcgaatcattgtcaccgtaccaaggaatggtaggcaaagtagagaggatctggatcactgagatcgcgaccggtggtgttcgcttggtaagtgcataccaattcttccgactaattgctgattatgttcatgcctggcgcaaagcttactcctgcacaggttgggcataccaagggatacatccaggtgctggtaattgcccctgatagcatgttaggagcgtcagcaaatgtgaaggttacatctgttcggcgacgtctttggtgaagtggtggaagaaggatctgttgcggcaggagaagcaccgaagcgaactagcgcgacttgtagtggtggttcttgagcgagcgtgtcgatggtcgattttggcggtttgttttgtttactcggtctgttctgtatggcgttgcaaaattgtgctactgtacaaatacatggttgcgaacaggttaacgcggagtcttctgatgctgcgtcacgacggatcagggtttgatgaaagtgaagaacatggtgcgatttgctaccgtgttcggaaaaatttggtagtgcatcgaaacccaaggcgtgacgtgttctctgtgtcatcactttaaaaaaaaaaagaaaactgtgttcgcacacgaggcaaaacagaa

SEQ ID NO: 41378 - DNA, 2452 bp, Zea Mays
ctcattctcacccacgcgcttctctctctcaccagcaggccacgccgccgctgcaccaccgctctccggatcatcggctgtccccctcctcctcctcctcgcccactcaccggccatccctgctgcggtgccgcgcgttcaagcaggaggccgacgacggcgacggcgacccgactgaggccgacgcgcggaagcgcaggaagggcccgatgtacaagctcaaggcggcgatccagggcctcgcgggatctcgctccgccgccgcggaggtgtatgggggagagtaccagttccagcgcgccgtcgagaatttgtgcgagccaaggttccccaatccactcacgcgcgcgcatcgctgtggtttcctgtgttgctttccaccctcgcgcgctcttcttcttcatggagccatggcaggaagcggcaacaggagatttggccgggatatggtgtctagcagcacacatttctcccaatggcagatggtctgggttggagaccacgttcctggcggcagagtcgatctgcaatgtggaggtccaatctggccaccgatgtcagctcgctccggagccaattccgattccctagcagtgacgacgttcagatgcagcttcagatgcagcgacgacctctctctccatccatggatctctaggcaactgggaaccaggcatcaaaatgaagggaaccaggaatcgaaacggccccgagaatcccaaagcacgagaaggggaacaagggaactaggcatcgtgaagagagcccggggtgatgaattgttacggttcatggacggagcaagcaaggagcctctccgcaaggtaaacactaacacgcgattcctcttcaatccccggtcgtttcccgagatctggtgttataacccttgtagcttcgactcctagcttcagttggggggcaataacggattcggaaattttgggctgaaagttgttccttgtgttgttgaggtgctggaggggagtggttaattgtggtgtagcgctatggtgtcaaaaggtggatggagtccgtgacattttctcattgatttattttagagctgcttttttgtgtgccataattaggcttgcccaaccggtgcaggtgacttatttagcatgctgaactgtaggtagtattctagtttgtggccgtcgtgcaagtacatatgtgttggctttcagttcaaccgtctttacagtattcggaaattgcttaaaattcagtgttgatcatagaggcagcacaaatgtttcctattcagagctggtaatggtatggtcattactctgaatcatagtatcagacaatggctggcatagtatttatccaccatgaaaacacaattagcttgcaggtctaaatttggcatcctctacatgaactgaaaccagttaacctcttacgaagtaagaatccttggccttgaacaaatcaaagctaccatgcttgatggaaccaaacatttcctcaccagtaacacatttgttgaaacaatactttcattacactccaggtacagccgtacagtgttcagcttaacctcatgatttcttactactgcaggtctaacatttacattggtaaccttttttttatctttccagcactgtcggtccagtcactattcccttatctatacttcatgggacttgaaagtggcgaaagaggagcaagacattgggttttatgctggttttgttggggctacctatttccttggaagggccatcagcgccatgccatggggcatgttcgctgacaagtatggaaggaagccatgcatcgtgatcagcatcctctcagtgattgtgttcaacacactgtttggacttagcacaacttactggatggcaattgtgactaggggattacttgggttgctatgtggtatacttggacccatcaaggcttatgcttcagaagtctgcaggaaagagcaccaagctctgggaatctctcttgttacatcttcacgagccatagctcttgttattgggcctgctattggaggcttccttgcacagggatagtggtcgacaaaaatatttctagcatcaggaaggtttccataattccttccttgctttgtaatatcgttgctagcagcaggatcatgtattgcatgcatttggcttccggattccggctctcatcaagtgactcctttccctcacattgactttgcggacagatgtctcaattctagtggtggagctacgaacaacaatccgatgtcctgatcgagagcgatggagctaatgtttgaacttgtgtgtttgaacttgtgaactaaaaatgtgaactatggatgtgaacttgtgtgaatatgtgaacttatttatttagacatatgtgaatttgtgaacttatatatttggacttgtgtgaatttgtgatatgaacatatatcaatgtgtttgaaatctgtattgtatgtgatata

SEQ ID NO: 41379 - DNA, 1948 bp, Zea Mays
gtgcgttgcggcagcgcacttatattagcctggtcagtacacccaccgtagcctcacacttcgctggggagacgaagctgctagccgatcaggggagaattcttttgtaatggagctgctgcgaccacgcggcgatggttgttgcccgcgcgtgctctcggtttctctgctgctcctcgccgccctgctgtggaagcacgtctctgcggcggcgattaccaggggtgatttcccggaggggttcgtcttcggcgccggcgcatcggcttaccagatcgaaggcgcatgggcagaggacgggaagaagcccagcatctgggacacatacacgcacagtggatattcgattgaccgtgatactggagatgtggctgcggaccagtatcaccattacaaggaagatgtgaagctaatgcatgacatgggcttggacgcgtacaggttctcgattgcctggtcaaggcttattccagatgggcgtggagctgtgaacccaaaggggttggagtactacaacagcctcatagatgagctcctcagatatggctctccaggatgaatacaacggcctgctcagtccgagaatcatcgatgattttaccgcttacgcagacgtgtgcttccggagcttcggcgacagggtgaagcactggatcacggtgaacgagcccaacatcgagcccatcggcggctacgaccaaggctacctcccgccgcgccgctgctcctacccgtttggactgggcgtcacctgcacccacggcaactccacgacggagccgtacgccgtcgcccaccacctcctgctcgcgcatgcgtcggctgtgtccctctacagacgcaagtaccagggcgagcaaggaggacggattggactgacgttgctggcctggtggtatgagccagcgacgcagaagcccgaggatgtagaagcagctgccagagcaaatgacttctcgcttggatggttcatgcatcccctggtgtacggcgactatccgcccgtgatgaagaggaacgtgggggcaaggctgccgtcgctgacggcccgagactcggccatggtgcgcggctcgctcgatttcgttgggatcaaccagtacggcgcgatcctggtcgaagcagacctgggccagctcgatcgggacctcagagactactacggcgacatggctaccaacttcgtcacggtaccgtttgagagcacagtaacgaggaaccagcaggtgcctcgacttgggctgcggaaccatgaggcgccgtgggctctgagcaaattgctggaacacctgcagacgcactacgggaaccctccggtgatgatccacgagaacggagctgggcacgagcccgacccgtccggcgggttcctgtacgacgacgagttcagggcccatttcctgcgggtctacgtcgaggcggcgctcgcttccgtccggaacggctccgacctgcgcggctacttcgtctggtccttcatggacgtgttcgagtttctcttctcctacaggttccgcttcggtctctacggcgtggacttcgccgccgacaaccggacgaggtacgctcggcgctccgcgcgatggtacgccggcttcctccgcggcggcgcggcgacctcacgcccgcctctgtttcaacgcggacacacggctccacctattcggagtgaaaatcagccgcacgtgtctgtgttatagattcatcgcgagtgaacaagtacatgatggatgttcttcaccctcatccatgtctgtcgtatgcggcattttcccgtcagttgtgtatttgtttgcatttgaggaataaattcagttctgtagtaggctgtcggcagatcttggcgattaaaagtatctctaacaaaagtgatttaaaagtgccccaaaatttaaaacactacataataaaacattgagaacgatgtagaaaaataaagatatgtact

SEQ ID NO: 41380 - DNA, 763 bp, Zea Mays
cggcacaaagccttcaatgcacaaaccgcggatcgctcccaggttttccggcccaaaaaccacaggcggttcgccgatcgaccttcgtctccccccgccaatgccatgccgttgcgggcgggcggccgccgttttgtcgttggggccgcgcgctcgacaccaccgcgcgccggcccggctgcggcttccaatggaggcgcgcgccgggctggcaggcgtacgtacttcgcgtgatctggtgaccggcgacgaggcgtaccgcgtacgctcgcatgtgccacgggccaggacggttaactgccgacgtacgatcagttaattcgacccgtccgcgtcgcctcggcactccacagtttgatcggggcatggcatgttcatgtcacagtgtcaccgtactgcggatgttcattccggctaggccttcatacttcgtgtggaacgtcgtgtcgatcgatctgggttctggagtactactgatcatccgtagttagtgaccgagctggcgtacgtgaaaaacataattaatccgcccgggtgattagctgaccaaacgaacgtgaggccgggcaggtagctacagtgggagaagggaccagcagtagtagagtcgccaagcaaaaaaacgaaacaaaaacacagcctaattaacgtgcgcgggacgtgcccgaggctgtagaggagtacagtacccgcatttgcgtatgaatttggtgtggcttggtctgttcggtatcctgctgttgagtggtcaaggagctgttcg

SEQ ID NO: 41381 - DNA, 422 bp, Zea Mays
gtccgcgccggtctcggaatcctggtgcagggggttcgcgcgcttcgtgaacgtgcgggacgacaccggagcgacgccgctgcacctcgcggcgaggcagggctggcggcgctgcgtccacgtcctactcgagaacggcgccatcgtgtctgcttccagtggcgccttcggattcccgggcagcacgccgctgcatttggccgcgcgcggcggcaacctggactgcgtccggcaactgctgtcctggggcgccgaccgcctccagcgagactccgtcgggagaattccgtatgaggtcgccgcgaagcgagggcacgtcgcgtgcgcggcgctgctgaacccgtcgtccgcggagccccttgtctggccgtccgctctcaagttcatcagcgagctggaacccgatgccaaatctttgctcg

SEQ ID NO: 41382 - DNA, 2213 bp, Zea Mays
cattattggatggactccgtcactggctgcgacggcggcaagaaatcggattaggacgagtgtagggggtacttgtcttaggaaaggggatggggggtctctgctcgaaggtctcagctgtagacaagtcaccgagcgacactgcgtttggccggaaccaggtcaccgatcatgatccgggggcgtcgttggagttggagaagcagccggtgtccggaaaggcagctgcaccggcaaagcggctggacgagcagcagcagcagcatcagtctttctcgttcctagagagcgtcgtccctggggttgcttttcatgcccgggctaatgctagcggcgaaacggggcccaggacctcgccgcaactgaccagatcgctgtcgcagagggatggcgtgggcaaggcaaaagccggtgctgacaaggtttcagaagtgagctcaattttaggtagagctagcactgttgggcttgaaaaggcagtggaggttctggacacacttggcagtagcatgacaagttttaattctagccgtggttttgtgtcaagttctgcagcaaagggaaacaaaatatccatgctggcttttgagatggcaaatactatagttaaaggctctaatctgatgcattctttatcggagcttagcataaagcatctgaaggaggtggtgcttcattcagaacttcagaaggtgttcaacaccttatatccaaagattttgatgaactgctcaagatggcagctgccgacaaaagggaagagttagaagtattcacaaaagaggtcattcgctttggaaaccgttgcaaggatcctcagtggcataacttggaccgctactttgaaaagctggcatccgaactagccccatgaagttatctgaaaggaaaagcagaatcagtgatgcagaaactggttacatgtgttcaaaatacagttgaattatatcatgaattgcatgctttggatagattggaacatgattatcgccttaaacagaaagaacaggatggcttgagtttaagaggagacagtctggatatactgaagcaggcagtgaaggtccagagtaagcatgttaaaagtatgaaaaagaaatcactttggtccaagaatttggaagaggtggtggtaaagcttgtagatattgtccacttcttacatttggagatatataacgccttcggtcatcctgacaaggaagagccacaagaacgtggcaaacaccataatagattgggaccagcaggccttgcgttgcattacgctagtatcatcaatcagattgacaatcttatctgaaatgaactgcaagctatcagggcagaaggacatgtcccgaatcgagacattgtatcatgctgacaaggagaagactgaagcacttatcctggagctggtcgtgtggcttcatcatcttatcagtaaatcaagacacgccagtggaggtgtaaggtctcccatcaaatctccagtcagctcaccaacacaaaatggcgctgcaatcacactgttgccgggcaaaacgaaaatttcatcaccgattctcacccaagaggatcaggatatgctaagggatgtcaagtacaggaaatttgtcccagggataagcaaaagtcaagagtttgacacaaagtcaagtcacagcaaacggagtaggttgagcaagagcaacagccagtccccagctagtggcaacaggaaataattgctcccagttaggaggtcttccatgcttccagttattgacttcgaaattcacaggaccaaagctttggatttaattgacaggcttgacaacctaaaaatacaacgagcaggaagctaaccggaacgtaaacttgaatgtggtcatccgcagtcttgaaaccccagccgcgatataaacagttactgagtatcagatatgagtagcaaggccggccgttgaactctggtgagaagctaacagtatgagaagctaacagtatgagaagcaagctggtatcgtatatcctgtaccgaatagaataggcaaaatgttgtaaaaatgacatatcgtttgtaactgcacaagaaataagaagtgcaagttttttagtttaaaaagggagggcaaaaaggatgtttttgttctatgttttgatggccactaggccagaatggcttgtatgaaccttagtactcttttttgttccaaattatagatcattttagtttttctaaatacata

SEQ ID NO: 41383 - DNA, 1381 bp, Zea Mays
aattttcgaacccttctgccgttcgtgtgcacctggatggggtccataaatatagaaggcctcttcatcttcctattctcctttctctaaaccgccgcttctgttctgatctgctccccgaaactactaaaacaaatcgaagtggggaacagacaagagagaagggagatggcggaggcggtggcggtggcgtacgaggagcaacggcggaggcagatagaaatgaacaagcggaagctggaggagctgcagctccaccacctctccgccgccgtcagagaggccgccgccgctgccaaaccctcgtcggccaagaagcggaaggcgccggtgccgcgggacgccgccacggagccgccaaggcggtccgaccgactcgccaacctccctgagaagccaatgtaccgcgaggtcagggtgaacttgccatttccggagggcagcaagtccaatgcgcgggtgccgctggacgctgccaactccgtggtggtggagccactacggtggtccgaccgactcgccaacctccccaagaagcccatgtaccacgaggattcggacgaggagaggagctacgccatctctaaggctgaggagctggtgcaagagctgggctccagcttccccatcttcacccagcccatgacactgtcccatgtctccggaggcttctggctgggcctcccgaagcatttctgccgggagcacctgcctaagagtgatgagacgatcaccttggtggatgaggaggatgacgagtcagacacgttctaccttgcaatgcaggctggcctcagcactggatggaaagagttcgccatccagcacaagctgcttgatggagattgcttggtcttccaactgattgagcggacaaagttcaaggtctacataattcgagcaactttgtacttcgaaagtgatcactgatgaaactagtagcttctaatatggttattggagcacggttatgaggcagttgcgttggacaagctctcatctggaatttgctcggcatcttgaactttttgggtggcagaaagttagctgatatataaatgtttacttaacctagtatctagttatttagcagctgctaatttgtgtaattgggcttaccaattgcacggttcagaaacctgcactatgtaaggggatgttgatggcaattgacctcattttataaatgattgatgtctgtccatatttctcttggatcaatttcagtgttcagtcaatcctgtgtggttcattttcttatagttatttggtaccaccattagtggctttgtggtgttagtattcagacacatggtcttgtaaattggactaggcttgctatagggatgaaaacggatacttatttaggtatcaatttttt

SEQ ID NO: 41384 - DNA, 1777 bp, Zea Mays
ccgccgccgcctcaaaaccctagctcgatggagacattgagggaggccacagcctgcaggtaggttcgttcgactagtcatgggccgcgaaccatctactgcaatttgcagcccatgagagacgatcgggctctccaagtgggcatggtgcagggtagctgggctccctgggctccaacaaggaacgaggcccatctataatgacggttagacaaagaagtggcgcagcggcactaggccatccgttgaagcgttatcccgcagcgggcaaccacggtcacgtacgcgaaatctctctctctcgtggtcgtgcgcttccttcccgagactccaatgcccctgcctcccctgctcccgcgcctttaccccacgccgcctccacttcgcgccggggacaggggtaacgccgtccctctctctcctggaagaagaaggccggcgcttctcgctgtcgtccgcgcaaagagaaaggacgaggcaagcttcaccgaccgcatccttgactacatcgagggagggccaaagttaaggagatggtatggagcacccgatttgcttcccaaggatggggctgcggaggatgaggaggacgagtctcaagatattgaggagtctcgggacgctgtgctagtcaccaatggcgacagtgagattggacagatggtgatattagcactaattctgaaaagggctagaacaaaagcacttgttaaggataaacgaaccactgaagaagcttttggaacttatgtggaggatggttttttctctgaaccgatcgacctcaagggtgttcaacacattgttctgctatcacagaaatagtggtggtttgcaagctattatgaacagcaagctgaagacgctagcagagaaggatgaagaagtggttcttgcatctggcatcccatgtacaataatcagaacaggttctctgcaaagcactcctggtcgcgagagaggttttgattttactgagggcatagcaagcaagggaagaataagcaaagaggatgctgctaccatatgtgtggaagctctgaatagcattcccctaaagacacacatttttgaggttgcaaatggtaaggagaaggtgatagactggaaagcatggtttgaagagcagaccaaaagagaagaagaaatacagtaaaaaacaaattggaagtgtttttcgcttgttggtccatgagaaaggaaaatagaaaagagcaaaaaaaggagaggatttataaaaacttgatggctagtttggaaactcaaatgctcttcggaattgaaggggatgggagaggaaattagttcatttctacctcaatcctctccaattccgaacgagatttgaggttcccaaatagcctaaaggaaatgagctgaaggttacgtttgatcctctagccttgctggcaattgaatcatactagtatatccgatgaagaaacaaaagtgcgtggagaagtggaggcacgtctatgaactctacactctgcagttgggctgaagcccctgatccctcattgtttatcaactcattcattatcttatataaaatgcagttcaaattatttgattaaagactttaaccatccacgagtatttctgtacacatgtatctagcgtttctgccagtattgtttgttgttcaatttgaagattaggccatcaagttattacttcagggcaacagaagcctcaagtcaatgtcacatggtactggatttctgcagcaaacatgttaacatgctgccgtctttaagggtttgttcgctttcct

SEQ ID NO: 41385 - DNA, 4249 bp, Zea Mays
caacgggccgagcacgccacaggcatcatgggctctcagcaagatggagacgccaccgccggtgaggtcgtctacctccacggcgtcctggaagcgacagtgttcgacgccgagcacctccgcaacgccgtccacggccggatcatgcaggccatggagaagatgcaggagtccctgggcgtgcactgcctccagcacagccggctctacgtagacgtcgacgtcggcgcggcgcgggtggcgcgcacccgcgaggtggagttccaccccaccagcccggcctggaaccagtcgttccgcctgcactgcgcctaccccgccgcggcggtcaccttcacggtcaagaatcagcaccttatcggcgcgggcgttctcggcgccggatccgttcccgccgcgcgcgtcgcctccggacagccgctggagtgcttgctcgacctccgcggcggcgagcacgcccacgagacgcacacgccgagcctccgcgtccgcctccagttctttggcgtggagcgcgacccgttctggggcgccggcgtccgcctccctgacttcgcgggcgtcaagcccgcgttcttcccggagcggacaaactgcagcgtcacgctgtaccagaacgcgcacctgtccgacgcgttcgacccgggggtccgcctcgacggcgggctggcgtaccggccggcgcggctctgggaggacctctacgccgccatccgcgacgcgcggcggttcgtgtacgtcgcggggtggtcggtgaacacggagatcacgctggtccgcgacgcgggccgtcgggcggttcccggcgccgagggcgacactctgggcgagctgctgaagcgcaaggccgacgaaggggtggccgtgctggtgatgccgtggcaggacaacacgtcagtgtcgttcctcggcaacgccggcctgatgaagacgcacgacgaggagacccggaggttcttcgagggcacaaacgtaaggtgcttcctctgcccgcgcaacgccgacgcgtcgctgaccatggtgcagcacgtcgagaccagcgccgagttcacgcaccaccagaagaccgtcacgctcgacgcagccacgccgggcaccgacgaacgccacgtcgtcagcttcatcggcggcatagacctctgcgacggccggtacgacgacgagaaccacacgctgttcagggacctcgacaccacgtactcccacgacttcatgcagaacaactacaagcacgcctccctgcggcgcggcggcccgcgggagccgtggcacgatgtgcactgcagattgaaaggccccgtggcgtgggacgtgctcgccaactttgagcagcggtggaggaagcaggcaccggatgacatgcgcggctgcctgctcgatctgagcccggcggcgttccccgaccccgtcagcttcgacggcaacgacccgtggaacgtgcaggtgttccggtccatcgacgacgcgtccgtcgtggggttcccctccgacgcggccgaggccgccgcgatggggctgacgagcggcaaggacgtgactgtggaccgcagcatacagatcggctacgtcgaggccgtccggcgcgcgcagcggttcatctacatcgagaaccagtacttcctcggtggctgcgcgtcgtgggcggcggacagggacgccgggtgcctgaacctggtgcccgtcgagatcgcgctcaaggtcgccgccaagatccggtgcggcgagcggttcgcagtgtacgttgtgacgccgatgtggcccgagggcgtgccggctggtgaggccgtgcaggccatcctgctctggaacaggcgcaccgtggaaatgatgtacggcatcgtcgcgaaggccatcgacgacgccgggttgcgcggccaggcgcacccctgcgactacctcaacttcttctgcctggggaaccgggaggcgccgctccctggcgagtactcgccgccggagacgccggatgaggacacggactactggcgcgcgcaggtgaatcgccgcggccccatctacgtgcacgccaagctcatgatcgtggacgacgagtatgtcatggttggctcggcgaacctgaacgagcgctcgctggccggtaaccgggacagcgagatcgcgcaggggagctaccaaccggcgcacctgaacgggccaggcggccgggcgcgtgggcaagtgtacgggttcaggatgtctctgtggcacgagcatttcatgggacgccatgccagtgaggacgccgacgacggagccttgttcctggagccagagagcttggagtgcgtacgcgccgtgcggcgagcggcggagaggctgtgggattcgtacacgcaggacagggtggaggacctgccggggcacctgctcccgttcccgatcaccgtgtcagagttcggcgaggtggctgacctgccggccgacgggtgcttcccggacacgagggcgccggtgagggggacgaaagcggtgaagctcccggacatcctgacaacctgatatgcttgtttaatttgcttgtatggttacgtcagttgtaagcgcactcccaaagaacgtttctagttcattagttatagcatactaaaacatagtggtgtgccaatagaattaagaaagaggggatgtaatggtttgagggtgtttggtttatttaatcaccctcctaaatttagtgacaaaacttaagtttctaaaatttctatttgggatacctcttttagtcacatcatcaccctctttagcagtttagggattaaaagcgactaaactttatagcaactcatgtgaaccaatccaaaaagaacttttacagtaagaagtcttctctaccgcgtccaacaactcccgtatttctcccaatcttttggcgattacacaaaccgagctcatcctcccgcaaatatccaggagggatcgaaggagctatggagcggtgccgtgaggggcgtctgcggcgctggtgtgagggtttgattcggaggcagcagtggatcggcttaggagacaatgtggcctagctcgacaagaacaagtccgtcgcattggcgaccagttcctttgtcgggtccaatcgcccgacggcgatagaaggtttgaaagatccgatggtgaagacctaggctttaccggcgttgaagaaattgcaggtgagatgcaaggtcatgtttcgttgcaaaaaatcctggttttacgccgccgtaccggggcaacggcgcctcctcagcaagatttcaacacatagacatgggcaacacatttatcaatgggaatggattttttccaacatgatgatggatggaagcatgcaaggggatgtagataactataccaacacaagtgttgcacagtattcacaagcaaaacctgttgggacaccagctcttattgcaaggccaaaccataagacatccaaaaaagttagtgatcagaaagatgaagtactggtttccgcatggttgaatgtaagtttggatcctgtggtagggaaatataaaaaaggtggcaggtattggtctcatatttatgagtacttcaatgaacacaagccatgccaatcacagtgtaccattaattctttaatgcaccgatgggagaccattcagaaatgcaagaataatttttgtggttgtcttgcacggattgagctacgacattagagtggcaccacaatgccggataaggttgtgaaggcatgtgccttatataaatctgaagatgaacaacataaggcatttcaattcatgcattgttggaaaaagttgaggacacaaccaaaatggcttgctaaatttgacaaattggttgctgctaaaacttagaacaagagacagaagactagtcctgatggtgatgctactgcaagggtaccaagtgaaacatgagcaggtgaggtccaaggcgtagaggatattcagttgacaaggcctagtggaaagaaaaaaaagctaaagcaacaccgttacaagagaagaagaaaagtgtgacaacaacattggaaaatatgtgggcacaaaagagagaaactgatgttgagaaagagctaaaaaagaggagtggttcaataaagcctttgcacttgaacaggagtgagttaacaatgaaaaagaacttgtggaggtgaggaaagaggaggttcaattgcagaaacaaagagatgaagagtggattatgactatatgtcctccatgtgtaactaatatacttgtgcatatgtatcatgtttttgtgtatgcatcatttgcaggct

SEQ ID NO: 41386 - DNA, 597 bp, Zea Mays
taggtacgttaattaatcacgtgatgtggagggcaagagttggattaatctcaagtgaagatgatgaatgaacctgaagcttggatgatctgatcaagtaccaggatcggatgagagatgctccccacgcggacgtcatctaacaacactgacttagtgttatcccaggacttgtaatggtgagcgcatcattgaaagggaaatgtgcccttgggccatttctaagtattttggtgatttagtgtccaacacaagtgcctaagtggaaaaaggtggacaaagtacaaatcaaggataaaggtatgtttctcagacttagtacattgttttatggactaatgtattgtgtctaagtgctggaaataggaaaaatccaattgaaaatgtcttggctcgagcagccaagactctgctcagtctgggtgcaccggacagtgtctggtgcgccaggctagctcgagcgaactggccgctctcgggaattcaccggcgacgtacgactataattcaccggactgtccggtgtgcaccggactgtccggtgagccaacggtcggccggggcaacggtcggccgcgcgatctgcgcgggacacgt

SEQ ID NO: 41387 - DNA, 1987 bp, Zea Mays
ctctctaacaatactaatactactgcatcaatgtttgtatgtatagagagagcgcaccttatattataggtatagaataaaaagtggttacgccttatattatgggacagagggagtatctagctagctagttagttattgtgtgtgttgctcacctcagtacttctgcctgttcctttgccgccttgctctgcagggagatacccaaggaggtttacaacaacttggacactggcagccaggatgagaaatggtgggagggagtggacctccaaaagctcattctggctcacaataatcttgaggtgttaagagaagaccttaggaacttgtcttcgcttgttgttctaaatataagtcacaacaagatatcttcccttccagcagctatcggagaggttgacttctcaaacaattgccttactgagcttccacctaacctcgccacatgcccggacttgtccgaactcaaggcatcaaacaacaacatatccagagtaccagatgtacttgctggctgttccaagttaagtaaattggatctagagggtaacaagcttgtggcactttctgaaaacatgtttgtgtcatggacaatgctcacagaattgaatctcgcaaagaatctacttacagccatcccaggtagcattggagcacttccaaaactaatccgcttggacatgcatcagaataaaataacttattgtcttcaataccagctgatattggcacgttatcaaagttaggcatacttgatctccattctaatcagctaaaggagtatccagttggagcctgcaacctcaaattatctttccttgatctatcaaataactcattatctggtctaccagctgaactaggtaaaatgactaccctaagaaagcttctgcttactggaaatcctatgaggacacttaggagttcattggtttctggaccaacaacaacattgctgaagtatctgcgcagccggctttcatccgatgaggaagcatcaggatccagaagcaccccaactaaagatgaccaaattgctgcagcaaggcgcttgtccttatcttcaaaggaactggacttgagtggccttggagtgaccagtgtaccagctgccgcgtgggagacaagtgatgtggtgaaactggatctttctaaaaattcaatagaagatctaccaaatgagttgtcattatgctcatcacttcaatccttagttttgtctaataacaagataaaaaggtggcctcacacagtggtttcctcccttccctgtctgtcttccttaaagctggacaataaccccttggtagagatatcatccactgatcttgtgcctctgtccaaacttgaagtacttgatctaagtggcaatgcttcagcacttcctgaaccttctgcagtttctgcattaccacagctgcaagagctttacctaagacgaatgaaactccatgaatttcctaatggtttgctgggcctaaaactgcttaggattcttgacctgagtcagaatcaccttacaactgtgccggagggcatcaagaatttcactgcactcattgagcttgatctgtctgacaacaatataacagcactcccagcggagctgggattgcttgaagctaacctgcaagtgctgaaactggatggaaatccgctaagaagcataagacgaactctgttggagcgaggaacgaaagcagttctcaagtacctcaaagaaaaattgccgtctgaataatatttatagaacaaactattgttggagtaatggaataaaatgtttttttgccactgtatctcagttttctggactgaattttgtgcaaaagtatctggaccttgtgtgagaagagagctttgtgagtgtgttgttggatatactggttatagtccacatgttttattggaacaaaaatattttctctgttcaatctttacatggacacaacctggaaagatgttatccaccgttgtatcgttc

SEQ ID NO: 41388 - DNA, 474 bp, Zea Mays
gtttgggagggctctggctcctctaaaactggctccaacagcggctcttttaaaagagcagcttctctaccggagccgatgtcttttacaaatcatttgacaaaacagtgactcccaaacacttttttaatttattttataactcaaatgtccaaagtgctattggacatttacacaaacacttcgtgtgcgccttcgcacgcgttcttcacggccacacctcctcctcaagcttcggcaaggaatcccaactgcagcggtgattgcaagtaacaaaaatcaaatctgcgaataaaccaggccaaatcaaatcaccttgtgttgtcgccctcccacgtcggtaccgcttgtgcctgccgactccgcgctcatgctactgtttggcggcgcgcacgctcgtgcagtctccacgctcgccagagatggtcatcacggagccggttagagccactttttcgggctccggctctcggc

SEQ ID NO: 41389 - DNA, 2087 bp, Zea Mays
acccgcacctgcactgcagcacacgcgccgccgaagcgctctgcccacctcgctcccctccagtggccgccggcgcggctcagcggtccatcctcctgacgccacctgcaacggcgccaggcggtgatccattccaactcgcgctccgtcctggtatccaaacatgtggtctttgggaaggtggtcagtggaatagctttgcttaaaaagcttgaagcagttggtagtgaaactggaaatccttcttatcaagtgaaaattgtagactgtggtgaagtttccaacacaaattctccggatctgctaaagggagagaaagaaaaaaaactaagaacggcagatggtaactccactgctgaagggagagccaaattaaaaaaaacatccggtgatcataagcaaaggaagaagagaaaacactattcgtctgattcatatagctcagatacttcagactcattgtcctattcttcagatagtggctctgattcagaatcagattcatcaatggatactagctcatccagtgatcataggcgtaagagaagaaaaggatctaagaaggataagcgcaagcccacaaagagaaagggtaaacatacaaggagtaagagaaagagtagaggatccaaaaggcgatctagacggagccatgggagttcaagtgatgattcagtaagctcaaagacagataacagcagttctgacagtgaaaagggtggccatcataccaagcgttccttgccgaaagcagataaagagagtaccaaaatgacaatttcagaacaaggaagaacttttcaagaagcggacaaagacgaacaaacagttactaccatcaatcgatcacaatcacatgatggaagtaaaccctcaaacaaagatggcaacagggctgatgaaagatctggaaattacaattcagaagataggaatggtccaggtggaagctccaggaacaatcccattcaggttgatgtaaatttaacgaaaccagtaaatgtagatggcaacactggtggtgataatgcagaggctggcatgtctagaactggtgaaggaaggcaccttccaagcaatgattctgtgtccaccaatggtaaagatttaggtgtgggttctgcagacaatgggcaacctcaacgaatcaggaaaggacgtggttttactcagaagtatgggtatgcacgccgatacaggacgccatctcccgagcgtccccctgttcgaccccgctacgatggagggagagatgatagatggaacaatttcaataggtatgaaagaaatggtccttacagtagacgctcgccagtaaggagataccatggctcgccaagagccaatagcccatccaggtacccaagaagagaacgaatgaggagtaggtcacgcagcccagtgaggcgccatgaccgtggagggtatcaccgccccagcccaagacgtagccgcagccctgcagaaccgagacagaatgtgaatgataggcctcgatcaggtcatggcggaggcgatcctgaccacagccctcctgccaacaggtccagatcgaagagccgggaccccttgggacccagatctcctgatgctgccccagccaagagggagagctccagatacaaccgcaggcgcagcagcagctcaaggtccagcagccctgatggaaacaaaggcctggtttcgtactgagaagtaacggcacaacagtttgcaggctccatggaccatgtttcttgctagtttagcatcatgtactcttttgtaatggattctgaacttgaactgctttcgatgcaggtgtagatttatatgttctgttagatttgaatgtttcttatgccagatatttatagaactactgagtagagcaggggaaaggctcgagcctcgtgaactggcttgagcttgctaaggcttggagaggctcgcgagtttgtaagcctgaatcgagactacttttatgactcgctcaaacgccgagccctgagcgaacttgagtcgactcgggagtctgcctaataatattgtgctacgttgttatattattatgtttttaatttattttcttattttttatggattca

SEQ ID NO: 41390 - DNA, 558 bp, Zea Mays
actgttggggccatgcttcgtcgccgaaggtcccgcaagaagaaacaccttcggcaaacccgtttaaacgtagtaccgaagctaccgctcatgaagcttcgatactgtaacgtatctgaagaagaaggttcgaaccgacttaaagatgaaatgacttcttagtccataagggtctgagtcataattgtaatcttttgtaaggggcatgattgtaatttctcacaggctacgccctgtgcctataaataggtgaacaatactcctttactgttcacgcaatcctgtaatcatcggcgtaccacactggaattatcgttctttgccaaggcaaaggtataaatgtaattaaatatcatattctaatactcaaatttgtataatgaaatttatgtataataatatttgtccttgatataaatttccttaatgtttcatattcaacattgtttacataattttatagaaatgatcacgaagataagaccttcgtgatattttgcttatggtgttcgtccgaagttcattaaatcctaaaggagataatgcttcagcggacga

SEQ ID NO: 41391 - DNA, 1049 bp, Zea Mays
accaaatcagccttagcgtagcaaatacgcccctcttccagccttcccctccctgtacctactacccgccccgcccttccagttccagaagtttctggaagccaacccaagccatggacgccgccagcatagccgccgccgccgccgccgtggccaccccgccccctggcccggccgtgaccgtgcaggtaccgcgcgggcaggtggatctgattgacttcatcgactggactggcgtcgagtgcctaaaccaggactcctcccacagcatcgtcaacgcgctcaagcagagtttgagggacgacgaggggctgtacctcgccagtgattcggacgagcagctgctgatctacatccccttcatgcaagtggtcaaactgcattccgtgctattcaaaggccccgaggaagagggccctaaaacagtaaaactcttttccaacaaagagcatatgggtttcagcaatgtcaatgactatccaccaatggacacccttgagctatcctccgatcatttgatagagaataaacctttgccgctaaagtatgtcaagttccaaaatgttcgcaggacaatcaatctggaagtgatgtctcgaaaattcaaaaggttgctctttatggcacaactgtggacacgacaaatatgaaggatctgagaaagacagaagagcactgagaccatttaaaggctgagcttaatccagtgggtgtatgacatactagaaacagttagatgttgaattgagcaatttctagttgaccctggcaaactttttccccaatttttatacacgaggagttaaaagacggtctggtgatgccgaagctattacctcttggcatcttgtaatcctgcaatttatgtcttggggatccgaattcatttcatgaatttaccaaaattagtccatgcgtcgatggtctcgcaaactttgccagcagagcttagttcgttcatggcgctgtgatatgcgtaagatttaatcaagtcgtggctgtacttgccgtatggctgctggcctggccaatctgtgtcttgctgtttt

SEQ ID NO: 41392 - DNA, 1859 bp, Zea Mays
ctattctctttctctctctccttcccccgccccctcgcctcccctctcccacccccaccaagcaccgccggtcactatccctccttggtcttctccctcctcagagcagggaggggaagcggaagagggaggcgagagcacgggaaacctgatctgatttgcttttggtcgccacaagagaagggagttggtgcagtttgtaggcgtgcctctgtgtctccgtgtgtgtggagatggaccccaagttccccacacccctagcgctaaacaaaacggagcccaccaccgcgacgaccaccaccacctcgaccgcgcagcatcatcagctggatcctaaggactaccagcagcagacggcgcagcaccaggagcagcagcagcaccaccatcacccccacctgcaaatccaaatccaccagccgccgccgccgccgcaggacgggggcggcggagtgaaggagcagcagcagctgctgcaggtggtggcgcagcccggggatcggaggcagcaggcgctcgcccccaagcggagctccaacaaggaccgccacaccaaggtcgacggcaggggccgccggatccggatgccggcgctctgcgccgcgcggatcttccagctcacgcgggagctcggccacaagtccgacggcgagactgtgcagtggctgctgcagcaggccgagccggccatcgtcgccgccaccggcacgggcaccataccggcgtccgcgctcgcctccgtcgcgccctcgctcccgtcgcctacctccgggctcgccaggccgcaccaccaccacccgcaccacatgtgggcgccgtccgccggcttctcctcgccctccttcctgaattccgcgggcgcgggcgacggcaccggtatcggcggcatcatgcagcggatgggggtccccgcgggcctggagctgccgggaggcggcgccgccggcggccacatcggctttgcgcccatgttcgctggacacgccgcggccatgccggggctcgagctcggcctctcgcaggacggtcacatcggcgtgctcgccgcgcagtcgatcagccagttctaccaccaggtgggtgccgctgccggcggcagtggccagatgcagcacccgcacgggcaccagcatcaccatcatcagcagcaggaggacggggaggacgaccgcgaggacggcgagtctgatgacgagtctgggcagtagtgtagtcgttcaaccttgcgttttctgggtcttccctcaagtggaggaggagagaaaagtgtatgcgtgcagccacggaatgcttctgctactcctggattcttgttggtcgatggatttttatgttttttttttctctcgtgtggtatccaaactcggcggaggcctctcttgctgtgaagacttgcgggctcaagatcatcctcacttcttcctacaatctcatggggtggatgatcgccacagccttctctccgacttccaggtgtataatagctgaaaacttgatggattggaccaatcacccttgatgcttgctgtggatcttttcgctttaaacaacatgctgaagacaacatcgagatcaagccgactttaagcatggacagcggcatgttgggtaaagttgctgagagtgcacagaagatgactttttttttctatgtgggtatcatgattgtgttggcaagtgtatgtgttctactccctcgggaccaaattataagttgctttgatttgttttttttacatccattttactatacatctagatatatagtacattatttgtctagatagacacatagcgaattgcatgtaaaaaaaagtcaaaacgatttataatttagaacaaaggagtactagtttgtg

SEQ ID NO: 41393 - DNA, 3499 bp, Zea Mays
attacccattctgttgtagatgataattgttaaccgagctgcaaatgctgcttggcatatgggtgagtgggaccatatggcagactatgtttctcgcctggatgatgcagatgaaaataagctccgtatgttgggtaacgcaacagctagtggtgacggaagcagtaatggtgctttcttccgggcagttcttttagttcgttacaaaaagtatgatgacgctcggatgtatgttgagcgagctcggcggtgtttagctacagaacttgcagcactggtacttgagagttatgagcgagcgtataataacatggtgcgtgttcaacaactttcagaactggaagaggtgattgattactgcactcttcccatggaaagcccgattgctgacggacggagggaacttattcgcaatatgtggaatgaacggattaaaggaacaaaacggaatgtcgaggtgtggcaagccctacttgctgtcagggagttggttcttccccctaacgaagacagagacacctggataaagttcgctgaactttgctggaagaacggtcgtattagtcaggctagatctacgttagtcaaacttttacagtttgatcctgaatcttcccctgaattgacactgtatcatgcacatccacaagtagctctggcttatctaaaataccagtatgcagttggtgatgagcttaaaaggagggatgcattttctaaactgcaagagttgtctgtgcaggttgctaccaccatgggcaatttacctggaacatcagcaaaccatggcaccatgtcaaatgctggagtaccactcattgctcgtgtctacttgacacttggtagctggaagaaggcactatcacctgcattagatgacgattccattcaagaaattttgatttcttaccataatgccacgctaagtgcaaaggactgggggaaggcctggcacatatgggctttgttcaacacagaagtcatgtcacgctatactttccgaggccgaccagatattgctggaaaatatgttgttgcagcagtaactgggtatttttattctattgcttgtgcatctactacgaaaggggtcgatgatagcttgcaggatatccttcgtctgttaactctttggttcaaccatggggatacctcagaagttcaaacagcgttgcagaaaggtttttcccttgtcaagattgagatgtggctggttgtgctgccccagataattgctaggattcattcgaacaatagagtagttagagaactgatacaatctttgctagttcgaattggaaaggggcatccacaggctttgatgtatcctctcttggttgcctgcaaatcaataagtatattgagacaacgtgcagcgcaggaggtcgttgataagatccgccagcacagtggaggtcttgttgaccaggcacaacttgtgtcgaaggaactgatacgggtagcaattttgtggcatgaaatgtggcatgaggcactcgaggaagctagcaggatgtattttggtgagcacaatatcgaaggaatgcttgctgtacttgagccattgcatgcaatgcttgagaggggggatgagacaattaaagaaaatgccttcattcaggcttatgggcatgaattactggaagctcatgaatgctgtttgaaatatcgggctacaggagaggatgctgagctaactaaggcctgggatttgtattaccatgttttcagaagaatcgacaaacagcttccaagtcttacgaccctcgatctgcactctgtttcgcctgagctactcaaatgtcgaaagttggaacttgctgtgccaggaacttatgctgcaggccaagaaagctgacaattcatggaagtgatggcaatgattatgcattcttgcttaaaggccacgaagatttgcggcaagatgaacgagtaatgcagctttttggtttggtgaatactctcctagagaactcaaggaaaacatcagagaaggatttatcaatccaaagatatgctgttatacctttgtcacctaacagtggtttaattggatgggttccaaactgtgacacacttcatgctctgatccgtgaatacagagatgccaggaagattttcttgaatcaggagcacagacttatgttggcttttgcacccgattatgatcacttacccctcattgcaaaggtggaagtgtttcagcatgctttgcaaaatactgagggaaatgaccttgcgaaggttctgtggctgaagagtcgaacttcggaagtatggcttgagcgccgcacaaactacgctagaagcctggctgttatgagcatggttgggtatttgcttggtttaggagatcggcatccaagcaaccttatgttagatcgctatagtggaaaaatattacacatcgacttcggagattgctttgaggcttcaatgaatcgagaaaagttccctgaaaaagtaccattccgtttgactcgaatgcttgtgaaagctatggaagttagcggtattgagggtacattccgaacaacttgtgaaaatgtgatgcaagtccttcgcacaaacagagacagcgttatggccatgatggaggcatttgtacatgacccgttaatcaattggcgtctgttcaatttcaatgaggttcctcaagtgtcgaactatggtaatgttcatgctcacacggttgtcagtagtgaagaagcagtggctaaccgagagctcatgcaacctcagcgaggagcacgtgagagggaactgctacaggctgtcaatcaactcggtgatgccaatgaggttttgaatgagcgtgctgtagctgtgatggcacggatgagtgacaaactaacagggcgtgacttctcttctgggtcagctttggctggagcaggtagctctatccaacatggcagtgagcatttggcttcaggagatgcccgggatgcccaacctggtctctcagtgaaggttcaggttcagaagctcatactccaagcgacttcacacgaaaatttgtgccaaaactatgtcgggtggtgtccgttctggtgagctctcttggaaacagtagcagtttataacatgtaaatattgtgaataccgtgtgcatagaagtttcgtggtgacagtttgtatgtgcagctttgtaattagcagaacttcaagatgccttggaccatccttttgtcagtttcttagaccgtgtttagcagttcacccttatggccatccaaaacactgtttttgtactgtagattgtattgtttgtagattgtactgttcgcagggtggatttttgaatatgagtataagaatgtgtaagctgttgaagatagccttaggttttcttccgtgccacttgagggtttgttcgattagctctcaatttatgtggattgagtgagatcggattggtttaaatctcaagcaagttaaattttcttcttaatttttctaatctcatcaaatccatgtgtaacgggaataaccgaac

SEQ ID NO: 41394 - DNA, 2564 bp, Zea Mays
cacggagctgtttcgtttccgctcgcaggcaggcacagcgccaagcggcgaccgagagtccgagacccattcccatccacgcgaccacgctgccgttctctccccttcctccccgtcgcttccattcccgtccctcacaatctcacccccgccagccgagccccaaccctaacgaaatttacacctgcttcgtcggcgtgagcggtcttaggcgccgggcgtcgctgcggtccagcggtgtcggatccgggtcccgcgccgttaggtcgaggtttcttcggcgacggtgcagccgctggatgttagtctggcagatcggggccgaggcagtgttgggttgtaaaatttgtatcgcgtgaatgaactcagagcatctcaatgttaaaactgtaaaaggggcagacctggtgccagaggctcccacatgagtgggttctagggaagggataatccgaagcaagcctcccccctgcaaatgcagagatgtggctttgaacccgtgacctggtgactcagtgagacacctctcaccactgcaacgggcgtgtccttcctcagcgttaaaactgagcatattaattcccctgcttaagcaatatgggagctaattgctgcgttgctgcaaaggagaggacacagccgtgcatcactcctatagaagtatcgacatacaggaatgtgaggcgctcgccatcatggaacattcgatgggacaatcgcacacatatagaagacataatggatattcctactctgttctccaaccatagtagtggaagcattcatcctgatacaaagagtggttccattgctccaactgaagggttctctaatggaaatagccttggaactagcccttccaatgtgttccatggagcaaagtggcacaaatctgataaaaaaatggaagcacgcaaggttacaaagtctgattctcgagctgatcgctccacagcaagtaactcttctcctgagacaaagctttccaggaaatcactggacatatcaagtgttgcttcagatttgaagacttcagtgtctgttccttcaacgccacccttagtatccagagcagatccgtcatcctccaaggggcattctcaacctacagattcagatttgatgaagaaagcatggcggtcaccagggtatcaattatacagacaggtttcggacagtaaaattccatctctcagatctctcaatgagataaggtctcctgaaggaaggcctccctcttccatgttatcagcctgcagcaacgacttgtcagcagcaggatcctatggtgagtcatccgatggttggtcaatgcgcacattttctgaaatggtctcaacatcccaaagagagaggtggtcacttgacagtgagctcttgggatccatttctagtaaaatgacaagatcaagtgcttcgagttctactacacgcccccctgaccaagacgtgtgcaagctgtgtttaaagctgctaaaggagagatcgacatggaacgcgcaggagctggctgttgttgctgttttgttgtgtggacatgcataccatgctgactgtctggacagcataactacagaagctgacaaatatgatcctccatgccctgtgtgcacgcacggtgagaaattttcagtgaagctatttgggaagctggaatcaaagatcaagaacaagataccaaaaaatgtgtcagttgatattaatctagatgggaatagtagtaataagcaccagaagaaaggtagaagagagcccaggttaggtacaagttcaagcatgaaggtcccatttagtcgtccatttttgaggagacatttctccattggatctcgaccacctcggtcggtctcagaaactgattccacaagaaagaagggattctgggcaagacactgggagagagtagaatagaatccaattgtcgttaggtgggttggtctcaattattatgttttggaaggatctttaagaagaggtgaactccccagtatacaagggctgccgagcaaccaacatatttggaagtttctctcagccatcgtattctgatactggtgcagagcgcacaacaaggtttcttataccatgcgaggcagggtcgttgtaggccccgcttgcatctaagtaatagtagtatcgatctaacagaaacggtgtggccttcctggatttaaggcccaatgctgggttataagattacacaaccagcatgctagattatttactgtacccgcagtttttttaattattggctaaggtatttgttggtggttgatggaatgcgtttaatttgaaggctttagtggtactgtagaacttttcaatcagattggctgaactgatcatccttgcgttcacatatactaaatatagacgcacttatagggtgtttggtttgaggagtgagttagtctcatctttttattccgtattttttgtttggtttgtggaatagaatgagctgattcatcatcaacttatttctcatagttagttaatactaatataataattctcatagttagttaatactaataatgattctcatagttagttaaaactaa

SEQ ID NO: 41395 - DNA, 390 bp, Zea Mays
ctgtttcgttcttcccagaacagaagagctccgtgtatcgcaaccactgtcggggctctagaattgtggtgtataaataccaaaccgagacccgcccctcgtcccaacggagcaccatgagttatccccatgctgatgatccactggtacatcaagatggtgccgtcgcggtgcgggatgtgatctgcccggtcggtcttcgcccgaatcactggtccggccttggtggcgggtccgggggaagtagggtgcatgggggatttgtcagcggagtcaccatgggagatcctagcgtctgcaccgatgaattcttcacagtcaccgtgggtccgccatgcgtcgcggtcggggctcgacaccactcagatcatggtaggaagctcttcatta

SEQ ID NO: 41396 - DNA, 1247 bp, Zea Mays
gtcgcggctgccgtcgtcgagcaagaccaagagctgcagataccttaatgaaggcagtgatggtgacaatgctccagaaacaagcagtgatgtaagcaatgagagtgacaatgacaatgacaatgaaaggtctattggaagaacaacccaatgtttagtagaaaatatttgcaccgatcaagaaaggttgtccagtgatgactgtgattccagtaaccaggaacctccccctgttttccaatatatggagcatgatgcaccatatggaagacaaccattagcagatatgatttcagtatttgcatgtaagtttcctgatctaaatacatacaagagctgtgatcttctcccgtccagttggatctctgtagcctggtatcccatataccggataccaacaggacctacgctacaagatctagatgcttgctttttaacattccattcattgtcaacaacacctgatggtacgataagcggttgtcctgagacaaataacttacataacagtaaagttgcttctgttcctgggaagatcacactgcctctgatcggcctagcatcttacaaattaaatggttccttgtggacgtcaaatcagcaccatgagcagcagttgactacgtcgcttctgaaagctgctgatgactggctttgccagcggcaagtagatcacccagattaccgcttcttcctcacacactaaattggatgtccatccaaactacctacctactgaacatcacagctcgatgcccactattttattcaatgaacttacattatcactttatatagtccacaatcacaagtaccagtatgctctgtaatatcatttttggggcttagtttatgttagtcccatattggtatctaggcaggattagttggtgactgttttggggttgtactgtaggaaccaattagacatagatcacctatattacgttcagtaccaattgcgggtgtgggtgatctgcaatcgggctaagtaggagattgattggcaatatacatttggcgtacttcaaaggcggttctaggatatattgatgatggcgataaaaatatttttctacttccctctgtgtgtttgatatattgtaacccatgtagtgctgctgctggattgttattatatgtattaccccgagaacgtatcatgtgttaccacaggttaggctgtgtgacatcatgtgatgaaattttggtttgaaatgaaattggcactaaggtggttggacttt

SEQ ID NO: 41397 - DNA, 1249 bp, Zea Mays
accccctctaggcgactttcaaatatcacttgctcactcgaaggtgagacatagagaaatacaataaagcataataccaaaaatttaaagaagtacttaagtgttattacagcatcggagttcaaaagtagtaaaccattatttttcatgcaacggaaatagctaacgaagataactgagtaacatggcaaagcctggccaattcactcctcctggtcctctcctgcaaaggcagcatcccactcggtcgtccaacccggtggcaaggtggaaggcaagtcacaccatcaaccatttcttgcaagatgcctgaaattttttgtgccacaagtaaggttgagtatactaatactcagctagacttacccggtgtgaggagtctactcctctacctctagactatgaagtcgtttggctgagtgatttggtttgccaaaaagcactagctgaatctaagtcaaattttagcttttcaagttttagaataatactttaaactagatgagtacctagctatccacacatggtatcaaacattaatcaatcaacatcttttgcaagtacctagttatccacttattactcaatgaagtacagtggatcaagtagtctcattatctgcgagaagtagacgattccaatcgagttttaaccttgcaacataaacctagacacacgacatgtaggaacactccatccccgcacacatcaatagtccctgtggcagaaccttccaagttattgggcccacatgcacctgcccttgtctccaagacctcagacgactatgcatgtgcaccagataacttaacaggatccatccgagtgtcccaaggaccccggataaaccacttacaaccaggatcgcaagattaagtaaacacaaatcacacaccatcaatttgcagcgaaaatcttattaccaaattttacaagttacaacaaatttacattatatgtatcagagtggttacaaaagtggttcaaagaataaactttgaaatgttataatttatttataagtttgaaatatatgctagctcagtgacaatcctcaataagaagtatagaagaagtacttaaacttataagaaggtcgtgcccaccggcgcttaacaccaatcacaatcaaagtgactcgtaacctgcaccaacaataggaataaaaccctaagtacgcaagtactcagcaagacttacccgactaaagaaaagactctcaagggtatgctggttttaaaaggactca

SEQ ID NO: 41398 - DNA, 1306 bp, Zea Mays
ctagtgccgtccggcgaaccgtcccgtccgtggagtcggggcgcggtgcttcccctcttggtcctcgctcgcaatggcggattggaatcgaccgtgggacgtgaatgcacattgtgatcgctccggcagcgaccggcggcctcctctgcctcggcctgatagcagagacaattactacccagtcccattatgggaaagaaaattctgccgcaacgcttacggcatcccttggaagaagttctgcgaaaagaagcaatttattgaattatacaaaaacgtcatggactgggacgattcaggagctttggaaaattttgaggctgcaaaggagaggttcagggcaaagtatcatggggaacctttcgaggatcctttgctagaccctgatatgtacatcgacgagatcgaccacctatgcgaagtcgacccagagttggtagctgacctggataaggtacctgacgtggataaggtacttgagcaacaattggtagccaacttgggttgtgaagagccggttgctgatctggtacccatgggtcacggagaactgggtgccattccgacacccacaggttggggagaagaggatgccattccgacacccacaggttggggagaagaggatgccaatctggcacccgtaggttggggagaaccggttgccaatgtggcagccattggatggggagaatcggccagcctgacacctgatactgcttgggagggccgcaactctggatggaactctcctctggatcagccgcaatgcacaccaagcaactggaacgataactcctatggcgatagatcatccaacaattggtaccagcaggaagtggatccgagccacatgccatttgggactagaaggaatttgaatggcggcggccgcggcagtagttgcaggaactcgaacggtggcgttggcaacaggaacaataacctctatggaggtagatcatccaacactcggtaccaacaggaggtggatccgggccgcaactcatctgggactagaaggaagctgaatggcggtagtggcaacagaaacaataacttctatggaggtggatcatccaacaataggtaccaacaggaggtggatccgggccgcatgtctcctggggctgggaggaagcagaatggcggtggccgtggctgcggccgcagtggcagtaagtggaatggtggtggtggcagcggctggcagcagggccagagaggaagaaggaccagggagatggagtggcgtccggtgcagcacaagagggatccccaagatgaccctgccgcttgatctcgc

SEQ ID NO: 41399 - DNA, 256 bp, Zea Mays
ccgatgtgggctagctgtcgctagagcgagcgcttctggcgcgggcgtcgcaccaccacagcgacgacgataacaagttcgtcgcgcatggatcgtaggctatgcataatagcatataaaaaacagtaaacataccgctcgatcgcgtagagggaaaatcgaagcatgtcgcgtaggacagttcggctaggccggaggacctgccggtttgacggagagttgatgcagacctgatcccgcagcaacgtcgaggtag

SEQ ID NO: 41400 - DNA, 941 bp, Zea Mays
gtgataaggcctcccatgtaatggacagcctgcaaactacttgcctgaagagatgaggaacccagattcgttcaagtggatgctgcagaatccaatgtaccggcaacaactacaggatatgctaaagaacatgggtggatctcctgatcaatgggataaccgtatgcttgatcacctgaagaactttgaccttagcagtccagaagtgcggcagcagtttgcgcaagttggcatgactcccgaggaagtggtatcgaaaataatggcaaacccagatgtagctgtcgcattccagaacccaaaaatacagacagccatcatggactgctcgcagaaccctcttaacattgtaaagtaccaaaacgacaaggaggtcatggatgttttcatgaagatatcacagatctttccccaaatcaacggctagctggtcttcactgcgggattgcagtcttgattttttttgtcggcctatcatcccctgtgtctggagggcctgctgcggtaaccatctttgaaggaaaagggaacacctgttgctgttgggccgtgacgctctggatacaccctccctgtgtcgagctttttgagtttcatatgtagtagtacatcgtgtgatgtagcggccttggtctagctatgagtatgattgacccaccctcttcccgcttcataaagtcaggctagtgagcgtagcaggggcaaatatttgttatttacattgcatgggcagccagccggtctgcgctctgacgttgcatggtttatctcgtaggatgtgaaaggcgcagcagacagacatggttcgtatcagatcaattttgatatatactaattgctattgttagtgtgtaatacgtcagtgacacaatggcaatgcaagtaatctgtttcgagacttgctgaccatgtttgaccagggttgcgatgcaacgtattcc

SEQ ID NO: 41401 - DNA, 1502 bp, Zea Mays
aaaggaagttcgtcctctctctcacggtctcacctctcacgtccagagagagagagagaggatgccgtcgcgttcgccgcggcagtcggcccgaccccccctcccgaccgccgccgagccccctcccggcctcttcccggccagggaggacctcgtccgcttgctcgccgtcatattcatcgcagcggccgccgccgcggcctgtagcgtcctcaaccgccgccctgagcccttctgcgactctccccagtggcccgatgactacgccgacgattcgtgtcaaccttgccctccgaacgggcgatgtgtggacggcgagttggagtgcgtccaggggttcaagaggcacggcaaagcatgcatagaggatggactgctcattcaaagagctaacaagatttcacagcttctacagctaaggatctgcgatcagcatgctcgtgctttatgtggccattctgccgaaatcctgtttcaggagcatgaggtctcaaatgcaattgatgaactcttgtcaaagattcccgctggtctaactgaggatgggcttcaacttgtgaaaactagggtgctggagagtgccgggggcttcttcgatacaacatttacttccagcaaagtcaaagtatataaatgccctgagctggttgcggagcttcatatgccaatgggttgtcgagttcgccaatggatctttagaaataccacatctgtggcaatcttttgtatcctgcactgctttggatactgtggatcatttacaagaggcggacattatctaatagagctgagcaaatatacgagcaggtatgtgaaatccttgaagataatgctgtaaacgccgagattgacaactccaattctgaggtttgggtggttacctcctggctcagggatcacctgttggttcctcaagagagaaagaatgctttcctgtggaagaaggtcgaagaactcatacgagaagattctcgaatagatcaatatccaaaggtgattaaaggggagtcgaaagttgtttacgagtggcaagcaagtggctcgcttagtgcaaagattaaaaaggtgcaaggtgcaagggccaagtcaaggactggtgtaggtgtcataaaatttggggaagaaatgagtgcttcctccttgggtgaggtgagggagcagggctcgtgtgatttaacacgcgaagaaagaagtaaggacaaggtcacgtgcagtgattaggttatcaatcaatctatctacatgtatgcctctggtctttagaggaaccagcacgtgagcttggcaagagttactgatcttttgtaaattttgatgataggagccgagccgtcacagtgtgttgttgctgttacagttgagtttgttggcatgtcatgagattgtctggtacagtttcaacaactgatgaatgaacatggtcactggaagatgctgctgacggagcagtcgtcgtgcacacgccagatggtctcaccgaggaggttagcgacggagagcac

SEQ ID NO: 41402 - DNA, 1101 bp, Zea Mays
gcaggcctaaaaaagaagattagacaccgctcctcccgtccccgccgcccccgcccgaaccgaactcatctcctttccgtttgggcgccaaaacagcatccgccgcgcgacgcgtctcgtcagcgccgccagccccgtcagaatgtctaagaagagggggctttcgttggaggagaaacgggagcaaatgcttcaaatattttatgagagccaggaattctttctgcttaaggagctagagaaaatgggtcctaaaaagggagtgattagtcagtctgtgaaagatgtggtgcaaagcctggtggatgatgatcttgtcttgaaggataaaattgggacttctgtgtacttttggagtcttccaagttgtgctgggaaccagctgaggaatacttacaacaagctggaatctgacctttcaaactctagaaagcgttacatggaccttgttgaacacagagataacttgaaaagaggccgggaagactctgaagagagggaagctgctttggaggagctgaagactgtagaactacaccataagaaactcaaggaggaactggctgcatatgcagatagtgatccagctgcagtagaagcaatgaaggatgctactgatattgctcattcagcagctaacaggtggacagacaacattttcactttgcaacaatggtgttcaaccacattcccagaagcaaaagaacaactggaacatatgtacagggaggttgggatcacagaagattttgagtatttgcagtgatgtccaacagcctattacagcgtcgaaaatgtgccacggaatgttggatcgatcacagatgcaagtttatcatggactacttttcctagatgctaccaagtggctagactataccgaaggctcctgctatgcttgaaaactttaccgaaggctcgattttattggatgtagtggctagactatatcatgaaatgtatatttctttgctgatggaaagaacaacaatagcttggcatctggaaataaaaatactgccctaaaaatagctgaaaataataataccagaacctatagaaactaagggttttgaagagcatatgagaagggcatttctg

SEQ ID NO: 41403 - DNA, 1741 bp, Zea Mays
tttcgacatatttcatagcagggaagtcagtagtgacaatggtccccaaactggtgcacggtttatgtgtgatcctttgaagccagatgatccacgagttcaacatttaatgctgctgatttggtagcaccactgcaccagtactctgtccatttgcgcagccaatatttttggcaggcaaatggcttccatgcgcaaatgaactggtggacagcttactgatagcattgtacacaccaattttggtagctatcaaaatgctagcaaaatttctttggtgttgccaaacttgtgaaggcttgcggggatccaaaccaaatagccctcgagaaccctatgctgctgtagccaagcagatgcccgctagtccctcgctttctctcttccacccgctcctcacgccgccacagcgccactgctccttcggcctagttgaggagagatacatccatcctggcctggattggctggtgctggtccttctgctggttcttcagttgccaaggccatatccctggtacctgattgactagtcgctgcttattgtcataaagctttttggagggtttgctggttgctgccatgacaagtccacctagggtgagcatggagatcactgatgaggtggtcaagagcatgaagatagggttggtctttcaaggctataatggcagaatttgttctatggactttcacagcaaggctaccaactatctcgtgacagctagcgatgatgaatcaatccgtttatacgatacccaagatgcagtgtgtttgaatactattaatagcaaaaaatatggggttggacttgtgtgcttcactgataacccatctattgtcttatattcatcgaacaatggctgggatgaatctctgcgtctgctctcaatgaatgataaccggtttattagatattataaaggtcaccttgatagggttgtctgcatcgcactttgctctggaaaagaaaactttctctcatgttcgcttgatcgtaccattctcttatgggaccatcgggctgaaaaaccgcagggcttactgcgcgcgcaaaggaggcctacagtttcgtacgacgcccagggcatggtatttgctgtcgcctatggtggccgcataaagatgtttgatattcggaaattcggaatggggccttttgcgaccttctctgtcggcactgatgattcggaagcccatgtcgtacagttcagcggtgatggcaggcggattctgttaaccactaaagctgggcgtgttcatgtgctagattcttttgaaggcaacagcattgcatcgtttcgcgcgaagccaatattaaccaattcgacactggaggcatcgttctgtcccgagggaaaccatatcgtatctggctccggtgatggtagtgtctatgcttggaacgttgagagcggaaaggttgcatgctgggaaagcacagatgtgaaaccgccgcgggtaaggtggtctccaggatccttgatgttcgtgacaggaacgtcggagctgtcctgctgggtgccggatttgtccaagctggagtccttcaccatcagccacaccaacaccaggtccagctcgtccctgtaggcttggaccgatttgcatgccgtgtggccggttgacgcgaaggaggaacaagaaagcatagcggagcatcttgtaccaattgagtttgtgatctgttcctgatggcccggtaagctactattgcaacgattgtggtctgcggcaacgg

SEQ ID NO: 41404 - DNA, 2110 bp, Zea Mays
tcgcgctgcgcgcacaagtggactgactactgagcaagcaaccaagttccaaccatacatcgcgcgcgcgcgcggccgaatgcagtcgacggcggccatgcggagcggcggcggcggcaataagcgcagcctgctgctgctgctgtcggcgtggtggctactcctcggcagcctcgtcgcccagctcccggcggcccgcggcggcagcggccacgtcgtcacgcgcatgcccgggttcgacgggcccctcccgttccacctcgagacagggtacgtggaggtggacgagcagctcggcgtgcagctcttctactacttcgtgcggtcggagaaggacgaccccggcgaggacccgctgctgctgtggctgtccggcggccctggctgctccggcctctccggcctcgcctacgagatagggcccttccattttgatgctcgagggtacaggggcgggtttcctacccttctctaccgacccgagacgtggaccaaggtgagcaacatcatatttatggattctccggtggggactgggttctcgtacgccacgtcggatgaggggctcaagtccagtgacactcaggctgtcaggcagctagccatttttctcagaaagtggcttgaagagcatcccgagttcctgccgaacccgctctacatcggtggagattcatacggcggcatgattgttcctgctcttgcactacaaatacacacaagtacagaactcggtgaaaacccatccttcaacctcaagggctacgttactggcaacccggtgacggatagccagttcgacacggacggcgtggttccgttccttcacggcatgggactgataccatacgagttttatgagaacgctcgcgagatgtgtggtggaaagtacagtgatgcagccagtgttgcgtgcgcggaggtcacccgagctatagccaacatcacgtcggctgtcaaccgggaacacgtcctggagcctgcttgcccggacgacgacgacgacgagctgttcggccccaaaactaccatggcggagacagatggcggcacgagtcgtaggctgatgctgcagtcggcagactatttcctgccagctgggttcaaatgtagaagagcttcgtacgtcctatcccgcgtctgggcaaacgacgaaacggttcaggagagcctcggtgtccgcaagaggttgtttgtttaggactataatctgtctagattatataatccaacaaataatgtgttatttgctggattatataatctggacagattatattctcaaacaaacacccgctaattcttccaggggacaatcggagcgtggaaacgatgcaaccaggacatactttacaaccagaacgtccaaagtgtagtgccgtaccattcgaggctagccgcgaaagggtacagggcgctgatatacagcggcgatcacgatcgtatcgtacccttcgttggcacacaagcatggattaggtatctcaacttgaccgttgtagatgactggcgaccatggtatgttggtggccaagttgccggattcacaaggaactcaggcaacctaatatatgcaactgtgaagggcgctgggcatactgcaccggagtacaagcccacggagtgccaaacgatgtttaggaaatgggtttcacgggatcctctctgatattacgtcgtctgagagaattacgtacgtgtcgctcctatgagtgtaggccggacgtacgtggtatgccctactgcaggccggagatcaaaataaaggagattttccattttcatgtagaaaaaatgagtgtccatggtgtctacttgttccctgtattaaaaataaatgcaatttttatactgcatgtagccactctgtcggagaagaaatctccccggccaggtggcggattgcacccgccctagatcctaaaaagaggaggggtctaaacgttttgtttgttacgagactggtggatcagcacacgggagcatgcaagggtttagagtggttcgagccgccggagcgtaataccctactccactgtgtgatgtattgctttgggagcttgtatgaacttgtgagtgtgtgcctaagattgtctgtcttataacgccg

SEQ ID NO: 41405 - DNA, 409 bp, Zea Mays
ccgatgtctccgatctgtacctgccacgtgacgcccattgctactacaacttgaaatcggagacatcgagaactggatgaagatcatggacttcgattgtaaaagtatcaatgcagccatacgcaatattcaccagtcatgactctgcccgcgattacaatttcacgatttttaggaagtatccgtgtcattacgttctctgattagaattattgggtctggaaaccctctttttatggaaccgtgtctcctgattttcccatgctatgagtgtatgtacccttcaatttcaaagtgatgatatatataggatcaaaatacacctgtctgaggatgtgttcctagtggtgttagtctcgtgccattatcagaacaactgttgcccatcagcttgcatgttcaagaatca

SEQ ID NO: 41406 - DNA, 3535 bp, Zea Mays
cggaacgccaaaggaggcgggaagcggcaaaacccagcaggccagcaccagcaccagcaccagcaccgtgccgcccctgggccggccagccgccagcgcgacatcgagcgagcaatggaggtcggcggcgacctgcagtccctcctagaggcgatcaaatcctccgaggtgcttgaagatagaattgggctcatcaaccgactcgagagttcctttgagtattctgcggatgatctgagaccagtacttgacagtcttaatgtatcttgggatgattctggatgttcaggttgctctaaaatgttcatatatagaaacaactggttgtctaggccaatttcttgcacttggtgcaaaggcgagctcatggtgtcgaaagcatatcgtatgttccatcgaatctgttgatgattctgaagatgtccaacaggaagaacactccaaaatactcccagagataattttgatggccttaaatatatcaatcaagattcttccttctgcggcaaaatgtgttactgtagatatggtgcataatattggtgattttatctcagagttgctaagtcttatggaaagctcaatagttgacaatgacaagaaaattcatggagctgctctggatatcactaaggctgcacctgtttttctagatgaaacaactaagctgtgccgggcatactctgaggccacaaaagtagacaactgcacaatgagtataactgatgaagatgctactgtgaaacacaacaaacaaggtcttgctagtgatgtcatcaggattacatcatccactattcagactatgtgtagattgggaacctatgcagcatccagtggtggaagccaggtgattttactgaatgtatcatggaagggtgtagtctcattactccaaagcggtaaagggatgattgaaggaaaagtaaatgtcagagaaataattgtaacccttctatctctgtccatagaatctctaagagttgctgctgaaacatggtgtgcaccgttactagaaacccttggtgctactgaagccagaagggcgttcctaccaatcaagtttttcttaataaatgctgtaaggatttgttcaacatatccatctgaagcaatgattatatacaagaacataatcaattgtgcagtagtgatcacatcctcaagcattctatttagcaagaagccacagttgaaggcagcaaatgagacccttgttgaattgttggagcctactttatttgttttactagatacacttatgaaatcatctgacttaacaccagaatccaaatgccagcttgcacatcatttttttgaaaacgaagaagataagagtccagatcttatgggacaagctaatcagagagagataaatttggcctcactggattgcattttctctatggattcagatgtggatcatagaaatagagcacttttacctgctgagttgcttgtgtttttgcactttctcaatgcttcatcatggttgacagaaatggtggtcatcacattatctaaaaagctacagactcttcttaatatattgacatcagaagacatctactcctatgtccttggcttccaaatccctgccttaaatggcgcagaccagtctcctgcagttgtttggcaacctgtgtatacttctatcatacaagcattgaaggcttttatgatttctactgttgcttcaagtgctgcttggaacgagttagaggctttcttacttgaaaatattttccatccccatttcctttgcttggaaattattacagagctgtggtgtttcttcattcgttatgctgaaactgagacttcaattaatctagttaatcaagtctcccttctactaaagactgttgcatcaccagaggatgttctttcacctctcagtgctttgcggaaagttgcacgatcattgtgcatcatcttgagctatgcatcttctgcaactgttgatcaaatatatacttgtgtgctgaatggtgaaaactcttccaagtcttcaatcttacacttagcattgctgatggaaggatttcctttggattcattgtctgatggtacaaaggaacttgctatgaagaaaatgtttacctcttttgctggctatctggagagctactccaagaaccaccgagtaatcaatgtgccaacttgtaaattgggtgttgtaggacttcctatacatgctctagcctctgcattgcagcataggtaagtctgttctctaattaccagtattgttcactctgatgatgatgatggctgtcttatacacagtactttttttggcagtgtaataaatgttgatagtattgtagatgagaatagcatcactgctatgtttaagttcaccatctctctcataaagatgtttagaattgcgccagatagtagtaaggataaccttgccaagcacattagttccatgttggttattatctcaaacacgaggcatctttgtgcattcagtgagatggagaagttgactctgcagttgcgcacgctgttcgtttccacttctgataaatcaaatgctgtgctgtctcagtgcaaaccgtcaatggcttcctttatgtcaactctcggtcacttgaacgttaccgaagacgatgctaacgaactttgttctgcaatatgggatctgtatcatctcctgctgaaggaacggcactgggcgctcattcacctcgcaatggattcctttggctacttcgccgcccgcacatcctttacgcagctctggagatttgttcccagagatgctgccctttcgtacaatgcaagcacagggacgagcatagatgaaaacggattcatgctggagttgagggcttatcttcagaaagaggtcgccttgcacaccgataaatggtctgaagagcagattcggctcctggtttctgaggggagagcgctgaagaagctggttgaagcttgttgtgaaattccggttgttgctgagcctgagaaggcgccggttgcgaaggatgccagcacgaagaagaggaagatgccagatgggatctgtgaaggcatggcgatgctgcagaacggtctcaaggtcatgcgaggcgcctttggtgaaggggacttcgctgatctgaaggataggtttgctgcacacttgtctcgcctcgaggatgcagtttcccagtttgctagtttatccgacgaaatttgatatagtgcactgtatgtcgcgctgttacctttaactgcaaaagagcattcattctagtacagttcacgatcatagcacagctgatctctctcgtggcaagcaagctccagagtcatcgggttgacagatcgttcaacatggccagcacaacttcaaggtttgcaggtcatctccgcgccggcgcttgcgtggcgacggcccttgtggcttgttggcttgtggggcgaaaatgcaagaaaatggatgtgaattatcttttgtataataaccacacgacatcatgtactgctttaatttaacaattggtagtacaccctgcagacgaggcgaatacaatttttg

SEQ ID NO: 41407 - DNA, 5169 bp, Zea Mays
ggttctttctccaccccgatgcccctccccctcccccgtgtgatcccctctccagatcgatgtctgccccggccgtaacccccgcggctcaccgcacgaaaccgccgcgagatcttggagctcagcctctgacgatggctacgactacctcgccaacctccgcgagctctgtccccctccctctcctccaccggcggcgggggatccttggccatgttcctcccgaggcgccggtccacgcgcttcggcctccgcgtggtcatcaagcctttctgatggctcggaacagaggtcagctatgcgatgtggcgtggcgaggttaccgcgggcgccgcggaggtggagggggaaggggaggacgagggcacgggcaagagagcgcatcgctgtggacggtctcgtgagagggaccttgggtgatccgggtgcttggtttcttggttctacggctttcgctgctgttggatttgccgagccggagccgacggagatgaccgtcgacgagctgaagctgcaggcaagggccagcggcggccacgacctaaggaccagttccccgtcggcatgcgcgtgctcgccgtcgacgacgacccgacctgcctcaaggtcctcgagaacctcttgttccgctgccagtaccatgtgacaacaatgggccaggcagccactgccctgagctgctgagggagaagaaggaccagtttgaccctgtgatcagcaacgtccacatgccggacatggacggcttcaagctcctcgagcttgtgggcctcgagatggaccttccggggattaacagctgaaaacctcgcccgatttgtaaagaagttttcttgttcaatgcggcattgaatttgggaggaatgacaagtctcatgaaaacttctgtatgccctacacgtgaccactaaaagaaagagttagacaggacaaaaggctgcagcggcagaagaagagcttttacatacccttacaatgctgattttgatggagatgaaatgaatttgcatgtccctcggacggaggaagctcgcactgaagcgcttaattctcataggggttcaaaataatttatgtactcctaagaatgtgatgggggatacttcaatgcaataatgagcttcccacaaaattacccaaacagcccaccatcagtcagatttacctctgaaatgtggcatccaaatggtcaactttttattagtgaaaatagtatttatttactccatctacagttatgttttctgacatcatgcataatatttgaggaaacgccagtctaacctgatgggcgggtttgtatctctattcttcatccacccagtgaagatccaaacggttatgagctcgcaagtgagcgatggacacctgtgcacacagtatggcttcgtatactttgtttacatatcttttccccattgtaatgttactcatctcccttttatgtgtatactttttagagagaaaattaccttgtagtctcattgtttcagtttatggtccaatttacaatggcttcactgtaaatgggaaaacaactcggtaggaatgcttttttgaattataaattatttctatttcatacgatgcttataggtatgtgatgagtcctccaatctgagaagtagagcatggtaaagcactccaagctgctctttcatcgggaaatttatagcttgtaggtactgatcacagcacattcaactccacacagattgtccatgtttctttcagtcaccatgatttatcactaggtcattgtgtttgtggccaacgagtattgttctaacagttatgttcccatagctagctagattcattgttgtgttttgttcagggtactttcaccacttctggtatggttctgtctgtaatgtgccagggattattatattgtttttggtttggatttggaatggtttggggtccacaacgatgatgcgtcagagctgttccaaggattggatgatttccattcccctgctgccaattcgactaggctcgccgtctccgctctgcccaactggcaccaagcagccaatggaacttgagcagccaatggatgatttccattcccctgctgccaattctccgaactgctttgacccttcaactcaatccgcatgtacccagtaaatgttcaatctgaatttggatcattgctagcaggattctttgcttgctcttctacttctgaaaattcgcaaaatggatagataattccagttaattttaatccattacaggtatggtgatgcttgcaaacgctctattttcatttgaactactatacaccacttctggatgggagttgtttcactgcgtcaactattctttagtagcctgttcgtgcgtcaattattctttagtagcctattgtggcagcaaacagcgactgggtgcggaagccggaagggagaggcgcttggttgacccagaacggacgacaagacaccgccgggggttcgctgcaaccgcacgcgtggtggccggtgtgggaaggagcccactgctcaagcagcgacgacttccgtaacttctcaggccaagttgtagggagggagggcagcaaagaaagcaagcaagaaagaagccgattccactggtggttaaggttttggattaaaggagagaggtgcagagaaaaaaaggttgcaactccctgggccaagcagtagcccagcaagttcagcaccaatggcagccatatgaaatataaggcaaagcagataaaaagcttaatttttttcaataaggtaaaggcaatgacagaaaagtgaggagggtcagaggtgtacagataaggatgagggctgaaaagaggagcaggaagttgaagatacattcctgaggacgaatgggtgcagttatgggcttcctgcttgctgccagcagtcttttggtgcttttatattgctattaatttgtttgaaatttattatggtgatgactgggaaggtctttttgaggctattactggttatggccttggtggctctttggccgtgttggtggtggtcattgctgacaatgttggtgataatgttggagatattgttggaatgggatcatatctctttggctcatatgctgaatcgtcatgtgctgctcttgttgtggcctcgatctcgtcttttggaatcaaccatcaatttactccaatggtgtatccccttcttgtcagctctgttggtattatagcatgtctcataacaacgctgtttgcaactgatttcttcgagataaaggctgtgagtgaaatagagcctgctctcaagaaacaacttataatatccactgttgtgatgaccattggcattgcgctcatgttggcttggtcttccatacaccttcaccatttataactttggagcccagaagacagtgcaaagctggcaattgttcttgtgtgtggcggttggtctctgggctggcttagtcattggttttattactgagtactacacaagcaatgcctacagaactggagctgccactaatgtcatttttgggcttgctctgggttacaaatcagtcattatcccaatttttgctattgcgtttagtatcttccttagcttcagccttgctgccatgtatggtgttgttgtggctgctcttggaatgctgagtaccattgccacagaccttgctattgatgcctatggccctatcagtgataatgctggaagcttaagtctctccaccgccaccaccataggcggcgctccaaacacggtggcgccatgcgcgccggcgtggtgcggggacttggccatctcctacccgttctggctcgcaggcacgcatctgcccaagtgtggctacgaccaagggttcaaggttacctgtgacaaagccaaggacgatggcacttgcaacatcgacaagttcgtcaatgcctccttcgtccccagcccgccgttcgaaatcgagccccaacaaaaccaggagctgttcttcgtctacgactgcaacctgcgagcgccgcagctgcctcggtcttggacacccttgcgctgtggcaataatggctcgttcacctggctttctggggagtacaggcccgaagacagctccatggcgatgccggggaactgcaacgttgcgatgataccggtggtggcgtacgagggggcgaccgcggcagattatcagtggttcgtggagggaggtttttttcttagttactacctcacggacactgaggacgacgactactacgaccagtgccaagcttgctcgtaccgcgctggccacggccaatgccggacaattgtcagtgacaatgggttccagtgctactgctctgacggcgtctactcgacgacggcctgcggaaccaagagggctaactggaagacaacaattgtagaaagatatggcaacaaatgtggcaaacacgatctatctaattctaagaccatttttgtagttgaatcgaagcgggaactgaatcaagaatgttctatttatatcggtctcaggatgaacgagcaccaggagagagtccgggaggaggcatatactgttgggacgtgtccaagccagtggagatgcagtggagatggaggagatcgacattggcatggagaagctgcgaaacccaccgcagcagaaccccacctagaggaagaagtagaaaacttgtgccggtatgagcttcctaatgagagctgggaagtaaatttgcctcctgaaaaggtgtctcctgagctcccagtaccaacattaggcataaactttgcaagagatggaatccagaaaaaagagtggttgtccatggttgctgcacacagtgatgcatggttactttctgttgcattttatcttggtgctcaatttggtttcaataaaaattacagtaattctgaaaatatgaggcaaactgacctcaacagggttgagatgattccatcatacttatacgaagattttcctagcaaggcaagggataatgggtacttgctctgtgatgactcaaaaagaatgagattgatcgattgtgtagctgttgtagctccaattgagaaatattatcagtattaagctgctttgatggttgcccggtctattgcttgcatgtagcatgcatctccgcggagatccaagttgttatgctttgagctattgcatcaagagtttaagatagtctttatatattttact

SEQ ID NO: 41408 - DNA, 637 bp, Zea Mays
ctccgtccgcgcgccgttgtcttctgccgtctccttcccttctctctctcgccgatcttgcctcttgcctgggagatctccttgcctgaacctcagcgccggacgcaagcttcgtaccgaggccctgctggtgaagggaattgaccgagaagtgctgctgccaaaagatgggcaccaggaagtggctgaggtcgcgctgcagctggggaagtactgcatagatgaccccgtcaagtccccgccgggcggacggaggatggttattcgtactgccaaaagaatgggaggttgtgtactgctcggtgccaacctcgccgggcgggctctaccggacgcccttggccgcctggtattcaaaaccgacgagatggtccaggcggtggaagcgcctgacgtggtcaggaacaaggtgtcgttctccgtctttggcctagagggcgcagtgtcattgaaaggtaagctgaatgtgctggacagtaaatggattcaggtcgtgtttgaagcgccggaactgaaggtcggctccttggggtttcagtacggtggcgagagcgaagtcaagctggagaagggaaggagatgggagaagacaacagcgcgcggacggaggatagttattcgttctctcaacgattaa

SEQ ID NO: 41409 - DNA, 1968 bp, Zea Mays
accgcgctccttgcaccctccccaccacccgaggccggtcccgccgtccgtctgcctcgggatacgtgtcccggctgaaccgcctccgtgaaccgagaccacgcggaggctaccggcgaggcgccctccccggctcccagcttcctccctctttctactcctcaagtcctgactcctggagtcctcacacgtatgagacgccccccacctgcacgaagccaccatcccgacattcgccgctctttctccacgcgccggtcgccgcagacgcaagcccgcccgccgcagctgacgccgcgatctgcgagggtgcaagctagctctggccccgctgccggtgccgactgagatggacccgcgcttcacgctgccggccgccattggcggcggcgccggtcgggtgcaccaccggcgggcccactcggagtcgttcctatgcttctccgacgcggacctgctcctcgacccggacggagacctctccttctccgacctcgacttcccctccctctccgacgactccccggccgcctccgacccaaccccgcccccgccgctgccgcagccggccccggccccccgcccggccggcggggcccacacgcggagcctctccctcgacgccgccttcttcgagggcctcgcgtttcagggacccagcgggagcgccgggggtgggcccgggcacaagaggagcggctccatggatggggccacctcaccgtttgagggcgagtcggcgctctccagcggcctgccggactacgccaagaaggccatgcccgcagagaggatcgccgagctcgcgctcatcgaccccaagcgcgcaaagaggcagtctgcagcgaggtcaaaggagaggaaggtcaagtacaccagtgaactggagaagaaggtccagactctgcagacggaggccactacgctgtcagcacagctcaccctgctccagagggatacaactggtctaactgctgaaaatagggagctcaagcttcggctgcagtccatggaagagcaggctaaactgcgcgacggtatgatctgctctttcctctgaaacattttggttcacctggctgccatcatcgattgctcttaaagcacaaaatttcactgccaaggtctctcgttttacagacgaatttatttatctgttactaaatgaaatagaaagttctaatgagctcacgggaacatttcatttgctacctcacctcacacagctttgaacgaaaccctgcgggaagaagtgcagcgacttaagatagctgcaggacaagtcgggaacatgaacgggaaccccttcaatggtggactccagcagcagattccatcctacttcgtgcagcagcagcagatgtcgtactttggtggccaccaggctcaggctcagcatcacagtcaaaaccatcatcaccggagtccatcaaacgggagacagtcgcccagtgatcagtccctaaacgactccatggatttcgtttgaggacaatataccggggcaagtattacatcgtataccaactgcagttcagcaccgtaaagatagctagtgtacaatgcatgcatatgcctcattggtagtgtagtttagttctttgtatcgttaatctggaagtggctccagtatgtcaaaatggtgttttattttcttctttcctgggttgtggagtaatgtgttagacagaactagccacctttagcaatttatgtaaatcttgttagcctttcttttctccatggtggaaggttcttgttatctgtcattgttttgtgcccctttcactgtctcgggtttctaagttactattagacctgagcatggccgctcgatccggtctaacggatggccggatgggtatgagcactgttataatttatgactcgtaataattcacatagcaatgattttttacctaaaacctgttccaacctgaaaaatatctaacctaaagtaaaaaaaaa

SEQ ID NO: 41410 - DNA, 862 bp, Zea Mays
acaagcaaggtgaccaaccagttgcatatgcattttgtgcctactctacctttaaggcattcatttataaatggagtattctaatttgcagcagcaggcagcgtccttgaaaaagaacctctttgatcagggatacttggatgagcaattttgtcagattgaggacttgcaggatgaagcaagccctaattttacagaagaagttgtttccctgttcttcaagaactcaaccaggctaatgacaaatattgagcaagctatggacaggaatcccagagatttctgtagatgggatgtaaacatgcagcaattaaaaggaacctgttctaggatgaagaacgagtgcacctcattcagaaatagatgtggagacgagaacgttgaaggttgtatgaggtccttccagaacctgaagagggagcatggagtcctcaggcagaagctggaatcctacttccagctgctgcgacaagccggtcctgccgtgactgcaaccaggcctagaggcatgtaaggaacggctgttggcgtgcagggagcagtgcaagggacagacagcgtcatagcgatgctccactacgccattgttgaggctagctgtaacgatgggccacgaataagaagtttgcctatggcctgtgggggagttccctgcgggttttaaagtgtaacacccttcataatcgatgccttaagctggtgctgccgagtgccgactagctaggccggcatgtaagagcagcctagactgatgttgatgtggtctggcagacgtcctgtgctgtgcctgcctctgtatttcggtcaaataaataaactagatggagtttgcatgtttgcatcatgggatctctgttttttc

SEQ ID NO: 41411 - DNA, 1664 bp, Zea Mays
ttattttattgccatctcaaatctcgaagggaatttgagcttccaaactagtttttaagaattgaagagagtttagggaaatgaactaattttcactaaatcggcttaaatccctaatgggaggttagcaaactagccttacctggcaatgagcagggaacagggaagcaaacgcgacagtcggcagcgtaccgtccaagcggcgggcggcggccgcatgtgcggcgtgttggtaggggtacccagggaaggcctcaactccggctcgctcaaaaccctcgcctggctgcactgcacaatccactgacatgtggggaacaccaccgcgtgcctgagggagcgtgtagcggctcggaaaaccgcgcgccgtggggcggggaggtggtgcgaggaatgggcccggcgccccgcgctcgtcgccagccgtcacgtgctgtctgttctgtgcctgcgtgcgctgtgcaggcatcacttcttccagcagtcccgtccggtccggcaaggcggcaacaggagggtgcctggttttggacacaacacagccgcgtactgtaggcagatcggcgttggcgttggcctctctctctcccgcagaccgcagtgatcggtgaggaaagaaacaggatgatcctttcaatctcctctgcgcgggagttgattattagtggcctgcaccagggccacggaatcaggcgggctgacaggtgaacgatcatccgttgatggacgccggcgtgccgcgctggtccacgaacgcaagcgaattttaatgagcaattgagcataacatggactcatcagtcatagtaaatggacttgattgagatgggaaacaacatgctagtgaccacaatcacgtcccagcacataatgtggatcacacaccagcaaggactattacgctcgaggtcacacacgacctgtgtcatacgcatcaaacaactccaggatcagtgagataggtcacaggattgattcagccgatttggtatcctactttcaccgcaaaagctcgagaacacctccttgggtgtgcagaaagttgttcagtctgtctgtctgtgcgctaacgtcggtaaggccatcataataaaaaaaatccaaatcgtacgagacacgagtagttagagaaataaaaattcacaataaaatattgtctatctatcattttctcatatttttaaacttttatagataatttagaaggggtctgtttgtttcatcttttttccgacgagtttttcgtgctgtggcgagaatctaggctgaggggagaatccacgcgatttggggcatcacaatcgcggactaccctcctcgtccatgcgcaatagattgtgtggtggcttgccataatttgaaatgcactgtccatatttatagaaatgcgatgaaattaaatgccgtattctacattttctcatgcctttttattatttgaactcttttagttcgagtttgttcccaataatcgtatatcaaaaatgctactcaacatttcttttttttgtacccaaacctatttttagccccttaacttttatttaggtcctaaaaataatttaatttatttgtacaaaggtccaggtccatgtcccgagctcatctaaaccattagctaccattacctctatttttaatcccgaaaatgcattgtaattctc

SEQ ID NO: 41412 - DNA, 1725 bp, Zea Mays
aatattatatgactcatgtccacaaatcctggagatggaattctttccacccaaaaggggaaggtcatgagattgcagatcatttaacataaatggctgactcagaggacattcagcccctagtctgtgacaatggaactggaatggtcaaggctggctttgctggagatgatgctccccgtgctgttttcccaagtatagttggtcgtccacgccacactggtgtcatggttgggatgggacagaaggatgcttatgttggtgatgaggcccaatccaagaggggtatcctgactttgaagtatcccatcgagcatggaatcgtaagcaactgggatgacatggaaaagatctggcatcacaccttctataatgagcttcgtgtagcaccagaagagcacccagttcttcttacagaggctcctcttaaccctaaggctaacagggaaaagatgacacaaatcatgtttgaaactttcagtgttcctgctatgtatgttgctattcaagctgtcctttccctttatgctagtggccgtaccactggtattgtcctggattctggagacggtgtcagccacactgtcccaatctatgaaggctatgccctcccgcatgccattcttcgtctcgatcttgctggtagggacctcactgattccctcatgaagatcctgactgagaggggttactctttcacaaccactgctgagcgggaaattgtccgtgacatcaaggaaaagcttgcatatgtcgcgctcgactacgaacaagaactcgagaccgccaagagcagctcatcagttgagaagagctatgaactgcctgatggacaagtgatcacaataggcgcagagcgcttcagatgcccggaggttctcttccagccatccttcattggtatggaagctccaggaatccacgagacgacctacaactccatcatgaagtgtgacgttgatatcaggaaggacctgtatggcaacattgtcctcagtggtggatccaccatgttccctggcatcgccgaccgcatgagcaaggagatcactgcgctcgcgccaagcagcatgaagatcaaggtcgtcgctccaccagagaggaagtacagtgtctggatcggaggatcaatccttgcatccctgagcacatttcagcagatgtggatctcaagggctgagtatgaggagtctggtccagctattgtccacaggaagtgcttctagacgtcacctagccttaattctcctctggaaataccttcgtttgatgacatatctatgggtggttgctctgctatagctcgcagtttttgtgtttgccaatatatccggtaacattgtggagtcagccgtccactgtatgaagtatgtagtttggttatatatatattgattgtattatttactcgattctatgggttcttggatacctggaatgtgcatgatatttttaaatttttgtaacaatgtgtactccgtaacaaagttcgcgtttgaaacatcgtttctgctgctttaatgtaggtttgttcattctccgactgatttgggcactggcgtgttgcttctccaattttttgtgtggtgcttatgttctcacaaccacaagcatggaagaaaatgactggattgagggagattaaatctaggagtctacttcttctaaccgaacaagccataagatttttttttaggagcgagaggattgagcaggctaaaatcc

SEQ ID NO: 41413 - DNA, 1515 bp, Zea Mays
atgagcatcgcactagcacattaatttgttcaacggtcgaactattccgaataattcatcaacttaccgtttcaacggctgactcgaatccgtgagatcggtagtgattttccgattccaataatttgccgagcgcttggcaggtgccacacgaacttcacgcacaccaccatccaatctttggacatcttctcttgggaattcttttgtccgcacgatcacaattcagagacatcacgtagagaccgacatcaagacggggtgatcgaacgacgacagcaaaacaaaggttggagacgatcggatatcagcgacaagcactagagttttacgacggcctagaatgggtgcggaggctgacagcagggaactccgccatggacagcgagacttgacgacgaagtcacgagcaagggaggacgggttcaacagctcgacgacaaacgcgagcatgcgtgaagtccgatgacaacagaaatcgagctcgcgacaggaagcgatgacgacgcggcacgacaagctggaacatggcacgacaagctggaacagggacgcgtcaacatggggctggattcgacgcgggagctcgacgcgcacgaatttttgtttcattgctctacacacgacgcgtgacgcaggggacacgacatggtgtccaagccggacccgggcgattcacttgggcaggggcgagctggagcgccgcgacgagcgcaggggcgcggcacaggcgagggcaaacagccgcagggaggaagaagctggggaaggaagatccacggcgaggagacgcaggggatgaacgccgggcgagctcgccatgggagtgattccgagcagagcaaacgcacaaccatggaagatagggcagggcggcggccatgaaaactccaagccggcgcgacactggaggacagagggaaggtcgccagcgagcaaggagacgaacgccgagcaggaacgagatccgggctgggagatgggcagggatggagctgggccgaacggctgccagcagggggaagtcgccatagacgagcagggtaggagggagctgggcgcgcgaccatggagatggcggccaggagagtgagcagagggtgagcgccgccaagagcagggcgcggctaccaggaagcaggggcgcagggaataaggaagaagcgcgcggcgaggaggcaacctggaggctgagctgcagcagggaggaagctccacgccagggcgcggtctgagcagagaagcgccattctggcgagcaggaggaggagctcggcacagcggccatggccgagcagagaggggctggggactcgcgacgagcttggggaggtgggcggccgagcggagggatccgccatgggcgagcacagggagtgcgcgcgcgccaccatgggcgagctgggcgcgatgaaggggctcggctgggcgcagggaggaagacgcgcgagagagagataaggaggagaagggattggcggcgagatttttttttgaagcaggagcagagcggcg

SEQ ID NO: 41414 - DNA, 205 bp, Zea Mays
cgaagaggaagcgagctgggcaagcaatcgacgcgagaagatcagaagaaatctttcggtttgaagcccggttcagcgaagtttggaaattactactaatccttacaaatttatcaaaggaggtttggtttaattcagctcttttcgttcaagctcgtgcaacaggatgtttgatccttatacaatttgctggcgagtgactgtt

SEQ ID NO: 41415 - DNA, 2654 bp, Zea Mays
cgggctggtgcggtcgtggtgacgacccgatcgcgagcgggcgtcgcagattaatccccatttttctaattgcgttacatgacgcccggctggcttcgcctggccgtgggctgtggctcccctcgcccccccaccacctcgtctctctcctcctgtcgtgcccgcggtcgcgtccccttcaccaccaccccacccgcctccgcgtcgcttgtgctgctgccaccgccgtgagcctccaccacgggcgccacgcgttcccgggggcggatcgcgctgccgcaaaggcgatcggcgagtgacccaggggaggagatcgcccgtcggcgccgcagctgccgccgcagaccgagccgcgtttcctcccgtccggttccatcgcagctcctgtctgggccagtccgttgaggcagggcggggcggctcgatcgcccgcagatgaatcatggcttcaatgttaaacattgtcataggttctcatgtatgggtggaagataaagacttgtcctgggttgatggtgaggtattccgaattgatggtcaaaatgcccatgttcacacaaccaaggggaagacggtcattgcaaatatctcaaatattcatcctaaagacacagaagcaccacctgatggggtggatgacatgacaaggttatcatacttgcatgagcctggtgttttagataacctggctgtcagatatgcgaaaaatatcatttatacctacactggtaacattctgattgcaataaatccattccaaaggctacctagtctggttgatgcccttactatggaaaaatacaaaggtgcaaatcttggtgacctagatcctcatgtatttgcaatagctgacgccgcttacaggaaacaggcaaatgataaatgaaggaaagagtaactccgttttggtcagtggtgaaagtggtgctggtaagactgaaactacgaaattgttgatgagatatcttgcatttctgggtgggcgatccggaacaggagagaggacagttgaacaacaagttttagaatctaatccagtccttgaagcctttgggaatgcaaaaactgttcggaacaacaactcaagtcgatttggtaaatttgttgaaatccagtttgacaagagtggtaagatatctggtgctgccattagaacttacttgcttgagagatctcgggtttgccaaattaatagtccagagaggaactaccattgcttttacttcctatgtgcagctccatcggaggatcttaagaagtataagctcggggacccatcgtcctttcactatctcaaccagtcagcttgcattcaagttgatggaatcaatgacgctgaggagtaccttgcaacaagaaatgcaatggatactgttggaatcactgatcaagaacaggaagctatattccgtgttgttgctgctgtgcttcatcttggaaacataaattttgcaaaagggagagaggtagattcatccataataaaggatgacaaatctagattccatcttaagacagcaggagagctcttgatgtgtgattgtgagaagttagagaatgccttgataaaaagggaaattaatacacccgaaggagtgattaccacaacagttggtccaaattctgctactattagccgggatggtttagcaaagcagatatactctcgattatttgagtggcttgtaaacagaataaatgcatcaataggacaagacccagactctaacaaactgattggagtacttgatatatatggttttgaaagttttaaaaccaacagttttgaacaactgtgcatcaattttaccaatgaaaaactccagcaacattttaatcagaatgtcttcaaaatggaacaagaggaatacacaagggagcaaattaattggagttacatagagtttgttgacaatcaagatgtacttgacctgattgaaaagaaaccaggtggcattattgcacttcttgatgaagcctgcatgtttccaaagtccacacacgagacattgtctcagaagctgtatgaaaagttcaagacccacaaaagatttaccaaaccaaagctttctcgtactgcatttacaattcaacattatgctggggatgtaacatatcaatctgatcaattcctggacaagaacaaggactacgtggttgcagagcatcaagaattacttaatggttctaagtgctcttttgtatcaggattatttccaccagcaacagaagagaacacaaaatcatcaaaatcatcaattgcaactcgctttaagatgcaacttcacgagctcatggagactttaagctctacagagccacattatattagatgtataaaaccaaatagtgtccttaagcctggcatttttgagaataccaatgttctacagcagcttcgatgctctggtgttcttgaagccattagaatcagctgtgctggttatcccacaaggaaacaatttcatgattttctacatcgcttttgtgttcttgctcctgaaattttgaaagagaaaaatgatgaaaaagtctcatgtcaaaagattttggacaaaatgggactacagggttatcaggtgaaaaacacttcacttaccaatctcctcaacatgtattggaagagagtatttagatttcctaattggtggtag

SEQ ID NO: 41416 - DNA, 254 bp, Zea Mays
catggctcccaagctctgctcggcacccatcccagcgcgcgtccctgctccccttgtcgctgctccccattgcgccgagctcctcaccgttgtccagctcgccggctttagctgcagggcgccatcaaccgatcttcttccccaccccgtctcgctcaggaaccaggccatcgcgcctgctcccttcattccgtccgcccctgctgatgctcgcgctcagctgcgctcgccccaaacttggtggtcgcgtccac

SEQ ID NO: 41417 - DNA, 2047 bp, Zea Mays
atgacatctgatgggaaataacaaacctccaaacttagccgtgaagccaaacaacatgctaccaagccaaaaaaaaattctaagcaaactgagatattcaagcatcacacctgtacttggccttatggctctgacgtacaggcttgcaccggggaacctggcctgcctcattgtggagactccacagttcacatgacagttgagagtaatggattaatgcattaagcaaggtaatgaaatgtaccaaaagtgacttatggaaaagaaacagagcttgttcactgctctgaatgaggaactttaatctgatgcagtctcaaaagagcagagttttgggagcaatgtcatcctctttgcctattctgccaaatcctttgaaagggagcttctcaaggcctcataacccccagcatattcctatgttgaggcagctgcctgatgactctatgcccttgtgtattgacacacatcagtctgctagtttgcacccaagagctggtgttatcggggtaccatattcaggctacactgctagtccacttgattctgtgtctaaccttgatagccagacaatggctgcaccctttatttctcagtcatccaattttgaagctctccagtctctatctaataataccccagaaacacacactaaggcagcctggttcacatcttctatggatgtttcaccactcaacacagataatattgctgcttctgatgttaatcaaatccagagtatacgtcctgctatgacatctgatgagagtgctacacaaaacgattggtgggcagatataatgaatgatgattggaaagatattcttgacgcaacagctactgattcccactcaaaatcagcttcatctcatagtagggagatttgtcctgttgctagtcctcccaatagcagcaatgcttcagttgccaaacaacggatgagatggaccccagaactccatgaatgttttgtagatgctgtaaatcagcttggcggtagcgaaaaagctactcctaagggtgtgctaaagcttatgaaagttgatggtttgactatatatcatgtcaaaagccacctgcagaagtaccgcacagcccgctataaaccagacctgtcagaaggtacatcggaaaaaaggacagccactgaagagctggtcctggacctgaaaacgagcatggatcttactgaagcactgcgccttcagatggaagtccagaaacggcttcatgaacagcttgagattcagcgaaaattgcagttgcggattgaagagcaaggaaagtatctgcagatgatgtttgaaaagcagagtcaatcgagcacggagaaagtccaggatccatcctcaagggatacaacagctaaaccgtcatctaatcagagccagtctacaaacaaggattgtggtgcaaccatggacccaaatggaacaggaggcatcgtacggactgcagaactgggagaacgttcgtctgaattaggtgtaaaacagaaactcgtagagatcgaagaatctggtaccgaagtagccacaggcgacagatctaagatctcccaagagaagcggcgcaaactgcaagatagttaacatatcggttgcactattcagacatagctgttcaaaccgtttgcttggtgaaaaattggtaatctgtgtgtcgaattcgactattgatccgtgagtccattggtgagttgtaccgctcttcagttagccatatatatttataaaggatccaaaggaggaccaaaggagaacttcctggcagccgtctttataacattagcaataagagctatccccgaagttatggggtaaaataaggtcttgaaatttagctttgtttctgaattcctccttttcttttgtttgggttgaagtggtcaccgagtcgatgtagatgaccacatgaatgaatttatcggaagcaagctagtgctgttccctattggcatagaaaccaaatattgaaacacgaacactgtttgatggtgcaaacttttagaatgtaattctgcatcgatttgtttggtggtgttggg

SEQ ID NO: 41418 - DNA, 1229 bp, Zea Mays
agccgtcggctcggctcgtttcgtctcttctggtgcgacgacctgattcactactccgctacgccgcattcggatccggccctgagcctttcccgatcccgcccgcttccctgcaccgctcggcacgatccgcccccgctccccgctcccggctccacgaccggtcgccgagtgctacgtctacctgataccaccgaggaaaacgtctgcctcctacagggcggatgagtggaacgtcaacaaatgggcatgggaaggggcgcttaaggttgtcagcaagggagaggaatgcatcattaaactggaagataaaaaaacaggggagctttatgctagggcatttctcagagagggtgaaccacatccggtggaacctgtaattgacagtagcagatattttgtactacgtgttgaagagaatatagatgggcgtcagcgccatgctttcataggtttaggcttccgggaaagacctgaagcatatgacttccaagctgccctacatgatcatatgaaatatttaaacaagaagaaggcggctgaagagatgattcagcattatgagaagcaatcttcagtggattacagcctcaaagaaggggagacattggttcttcagcttaaaaatgaaacaggcaccaagacaaaatcgacattttttgagcaaggcctaaacaagctctccgttaacgaaaagacaagcgccaaggaggcccccgtctcccttaaactcccaccaccaccaccttcgcctgtctcaccgacggattctggagtcgctgcctcgcctttcaaagcagaatttccttcccaagagcaaccacctgctgaacccgtcagcagaaccagcgctctcccctccaaaggcgaacctgctccagagctaccggctgctgcagagaagatgaaggagcaagaatccgtggatgaagacttcggggacttccaggctgccgggtgatatcatgtatcttgtacatacatcatgttaccgagactttttttctttctttctttctatttttggttttcaatcagctgtggcttctgccggcactctgttcctgtatagagagcttccatctcataacctacatacaaatacatggacaaacgttgtacccttttcttcgagtttccatctcataagtcaacctacgagggaggaggaagaatgaaagcaagaggagctacctcctccatcctttgggggtgtttggtccctgatt

SEQ ID NO: 41419 - DNA, 247 bp, Zea Mays
gtcagcaacatcatgttattgcaatatttgtaggaaccttagtcaaactttacaaaggtgaatatacattcttgagtggaacatcagcatgtcggtggtacatcaacgaaaatgacattgctgaaatcaaggctttccagaaaagtttgccaagtgaacctgtacctatcaaaaagacctatctccaaaatgatgatgcaacacacaaatttgaggagaaaagtctagaacagctcaagcatgtaga

SEQ ID NO: 41420 - DNA, 2743 bp, Zea Mays
atggacgccagagattgggtttatgagggtggacctcaccgagtacaaaagaactgcgccctgccaactgcccgaatgatgatgggcgtcagacttcttcgattatgcggcgacttgggccgtcctcgtaagtgtcgaggttggagcttggctggtggtcgacgatggcaacctcgtacgccacgaggctcgactgatgatcatcgtggtggaccacacagatcttggcgctgcgcttgcaaccacttgcacgcccgatgtcgacgagctatcacggatgttgtcggagtggacgaggcggggttcgctggtggccaaaatcacgtggattgggagccgaaggtccctgcgcgcgggggtagaagccaggtggtggcggtggcggttacacgcgccaagacatggctggccgttgcggtttacaaggatccaggaaaagagacgaaaaagaaagacagtgaacagggggatatcaagaaatgcacttcgcctgtaagatgctattttatttgcactaagtctgggtggaggggggatgaggcttatattccaattgacaagtgccgcaaactgttcatgcatatccatactgctcccaccattgcaaattatatgaaaaggtttcatttgatactttccaaaactctaacactggatgttgatttatcgacaattgacgttatactgattgatgatgaaccttgtcgggacgagcatgggaacattgttatgctagatgggaagcgtttgatccatactgatgggactggcttcatatctgaaaatttggctaagaaatgccctagcagaataatcaaaggaaagaagtcaaaagtttatatgcatcaaggtgaaacaacggtccgtcttttttataatggatatgctgtaaagggaactctgctagttgacaaaaggattagtaataatactattgtgatccgaccatcaatggtaaaagtaaaagctgacccaaagttgtgccggatgaagtctctgagttctttggaaatagtttccacaagccatcaatccaataggacatcaacatcaaggatcttgattgcgttgcttcactatggaggagttaaggcagaatattttatggaacttctacataatgcaattgaaggggttaataatgctcgttatagtttcagacacgcgctgaagcttgcatatggatatgctaatatggaggattcaatgttagaacgcatgattcattctggaattccactagaagaaccatacttgctatctaggctgagttttatggccaaacaggaaatgaaagtattcagagaaggaaagctaccaattgatgaatgctattatttgatgggtacaacagatcctacaggaacgctgaaaccaaatgaagtttgtgtgatacttgacagcggacaatactctggagatgttcttgtgtttaaacatcctgggctacattttggcgatatacatatcttaactgcaaggcaaattgatggactagagaagaattttattggatattcaaaaaatgcaatactttttcctacttctggacaaagatcattggctgatgagatggccaatagtgattttgatggtgacgagttctgggtctcaagaaacaatatgttactaaagactttcgagaagcgaagtgagccatgggttgaactattaaaactgaaggagacccagcacaggcttagcaaacctggggatttaaatgaattgattctcgaaagagtgctatttaatgaatgcttgacgactatgtttatacccaattacacaaaaggtttagcgcctgactgttggttagcacatatggaccgattattaacagaaggagtcgatcaagatgagaagaagtcaatcgtggaaaacatgattaaattagttgacctttattatgcggctctggatgggcacaaggtagatgttgatcgccatctgagagtaaaagcatatccacacttcatggagaagaaaggatttgaatcctaccattcttcatctattttgggcagaatctacgatgagactgaggaaataatagcgcagcaatgtgacgaacagatccagataacgacactgccgtgcttcagtgaggtggaggcaaccccggaatgcacctccctatgggaacaccggtaccaggagtacttgacaaagagcaggggccttttcgatctgggcaaggaagaaaagaacgacgagttccagaaactctaccaacactacaaacatctgctatacgacgccgacgaactggaggagacctcgcgggacctctcagacgtgttcatggaggcctgcgcgatatacaggatcgtgtacgagcgagcatggtgtaccaggagcgtcagcaggtgccgtttcgtgtggaacgtggctggagcggcgctgtgccacctccacgcgaccaagtacgcggcgcagcgcggggagaaaaccgcgctctgcccgctctcagttatccgccagctttacatctgatatatatattttttttttggtaaagcagctgatttctgcctgtaaaatgaaacgggtgagctgatgcgtcttaagagaagtatatactggggctctcgatcaacttagtcaagagcttcacagttgctttgatttgatgaggttaatatagaattgctttcttgtacgtcaccagccttcaatcttaaagactcgttcgcatcttttgatacacagaagttgtgtaggtttgccgattttttttatctaa

SEQ ID NO: 41421 - DNA, 1895 bp, Zea Mays
tcgtcttcatcaccccgcacgtctccacttccctttccttacttcccactccttccccacccacccaacccaaccctcccaatcccacactcgtcgtcccagtcccaccgaaccctactcaccaacaacagacccgcaggagaagggggaaagggggggaaattcctgtggagacgacttcgccgccatggcgggcgatcccccgacggccgcggagaaggagaccctggtctcctctttcctcgagatcgccgctggccagacccctgagactgccactcagttcctcctgatgacgagctggcacctggaggaggcgctgcagctgttctacatcgacggcgagtccgccctcaccccggcgcatccggtggccccgccgcccacgtcggcggccgcgtcggcgttggcggcagcggccggggcggaagaggcgatgaggttcgctccacccccggcggctgcactgggcgatgcaatgttgcatggatttggggtcggggaggacgacgacgtccgcgcgcctctgcctgtgaagagggagactctgtacggcgagggcatcgtatccgtcatgcgacctaatgcatcagctgcatttcgtaactttgaacaagaagcaagacaatctgctgtttgggactctgaccagaatgctacatctagttctggtgataatcttgcttctttataccgtccacctttttctttgatgttcaacggaccctttgacaaggcaaagttagaggcttcttccctggacaaatggctattaatcaatttgcagtcgacagcggaatttagctctcacatgcttaatcgagacacttggggaaatgatgcggtggctcagttgattcggtcaaattttattttctggcaggtttattatgacaccagtgaggggaggaaggtatgcacctactaccatttggtgtccatgcctgctattctcctaattgaccccgtcactgggcaaaaaatgcatgcttggaatggaatggttcacccagatcgtttacttgaggtccgaaggagcaccatgcagctcaacctcaaaagcgcccaaggaaagttgatccggaagcttctacgggcaagcaaggcaaaatagctgtagaggatgaagatgaagagctagcacgggcagtagcagcttctctagaggagagtaaagaagtcattgaagcatcagacgccagtgatgacatggttgaagctgaacccgaggaggaaaatgagcccaccctaaacaccaagcctgattaccctcctctccctgaagaacctacaggaagcagggaccttctctgcagggttgcgattcggctaccgaacaaccggaggatccaaagaaacttccttcacacagatcctatcaagctcttgtggtcattctgcgctcctcaggtcgaggacggggagaggagggctttccacttcgtccaggcaattcctggggcatcccagaaactggagttgggaagcgacctaacattcaaggaagccgggctggccaactcgatgatcaacctcttgttggactgagccgcccgctctctcaacctgcactttgagatgagacgccgtcggccggtcgaggggtttgtatttcaggatgggcttgaagatgatggtgcgcttgggtatcttctttccttgaggattaactcttatcttttgctccactggagctaggagtccgaggacaaaccaaaaaaaaaagtctggtgtgccctgagctgtttgtgtgtggaaatggtccttttgtcgttcgttcttgtgtccgtatacatcctgtccccggtagggcttaactctatttaatgcacatatctatgaaagattcagtctggagcttgctttgatgctcccctctgggctctggtcgtgtc

SEQ ID NO: 41422 - DNA, 1145 bp, Zea Mays
ctttctcccaccaccggcgccgtagcttgcttttagcctcttcttttctgagggccatggagaaggcgcggcggcggcacgtgccggcgttcggggagtggaactactactactcctcctcctcgtcaacctccccggactccgcgcccgccgcggccgagccctgctggtggtacgcgccggagccggaggcccgcagcgaggcctggttcaggtactccccgcccccccgccgcaggccggcgccggtgccggcttccaagaaggcgcggcggcccgagaccgcgggcggcggcggaggagccgtcgccgccgccgtagctgcggagcgcaagagggcggcggcgcccaagggatccggccgcagggtggtggttgtcaggcccgtcgacgaggacctttaccgcgtgccgccgccggacgacaacgacggcgccgccgctgtctcccgccttcccagacgccgggtacgtacaagcgtgcggcgaggaggagcttgtggatgggttgcttgggcctcaactgcgtggcctgaagcctgaagccagtagtagtagtacgtaggttttacaaggtgcattcgggcggctaattaagctcagtagtactactgattagttaagctgtatacgtatagtaagtatgtcgtgccgtgcgtatgggatctgggcaagttgtactagtactagtagttagtggtagagtcagggtgctcttcacattttccatgtttcgtgttcgtcgttagcttagaccactcgcactgtactgtgtgccataccgattgctgtataaggcagcacggagcagattagaggacccagcagcagttgttgtgccagccaagaattagagtagtaccggtcaaattcaacagggcccagtagatgttgcagcatctcttgtctctctgggtttaccgaaactaaaacactgccttagttttcagccgcttcagatgtttgtactcatgtactgacaagtatgttgccataagcatgcagaacaaatatattatatatttatatagagagagagctatcctgttggtagccttcgcacgtactgacgtacacgtactgctggtagccttcgcacgtcctgatcattctgaactgacataaatatatatattgatctttatc

SEQ ID NO: 41423 - DNA, 1604 bp, Zea Mays
cattgactcgccgttctctcgtagactcgttcatcacttcgtcctctggtcctcccaaaatcccaaatcccattctccctgctcgtgcagttgagcagtccagcaaccggcactccagctgctcgagcagcaagcgtgcgagcgactgcgggcagactgtagagccatcgagcaggacaataggccggcaggcgggtgggcaagggcgcaacttcgcaaggcagtagaccagctagcagtccagcagtaggctgcaagcgtgcgcgtgaagggctgccggctgcaccgctcgccatcgcaggtctctcgctagtcagcagatctccaggtttgattttttgagaccgtcggcactagagatgacttcaccctcactaccccagagctctgacaggaaggtaagaactaagaacataaatcattgtctgatccctctccatatttactatggatctaattgtatattgtagtccttgtgtttgtttgtggtcttccatggaccatatcttcattgttgagtgactaacgctaacccaattcgacggtcctcacgaagggacgcctcgaacaagaatcagccaccacatgctaccagtgatgttacagccgcaaccccatctgctactcccataattattgttggaacctctgtcacatcatgtgatagtgcaggaaccgctatcggaaccactaccaaaatcattgcagtgccgtgtgctgcgcccccacaaccacgttcgaaaaagactaatggcaagaaaagaagtcgtcttgctattcaagggcctccttctgctccaactactccagatcaagatgtgtcaaccttcactggcaagcagctattaaaaccattggggttcaatttcaagcacgctaacctcttatttgttcttgttattacagttcacttaattttatggttgcacatgtatatgttgaatatattatatatttatatgcaaaagatggatgtacatgtatattgcatatttgtatgttttatatggtcgtgtgtgtagatatgttaatatatatttatttctcaactcagatttagtggcagccagcaagaaacactgtcacaaccacaacaagagtctattaatgatttagagccaatacaaatagatgatgatgagccacaactagaggatgtggactttggcactaagcggaagcttacttctgttgtttggaaagatttcaaaaaagtcaaagtccgtgatgatgtcaaggctcaatgtctacattgccacaagcaacttggtgagaagagcattaatgggacaaaacatctgcatgaccatttgaaaatatccacagtaagaaggatcaagctgatgggacagaacaaagcacttgcacaatcatctttaaggttaaattcacaaggagggaaaatatctgtggaaaattacacctttgatcctgaagttgctaggagagagcttgcttccatgattacattacatgagtatcctttatctattgttgaccatactggtttttgacggtttgtgagtggacttcagccattatttaagatggtgactcgaaacacaattaggaatgacatcatggatgcatacaatgacatcggc

SEQ ID NO: 41424 - DNA, 1983 bp, Zea Mays
cttcactgtaggcgtccacaggcttggttctgccatcgcgctccgtccgcgatcccctccccgcgcccgatcctccacgctcgatcctcgaatcccgcggcttccttcgatggcacgaccccatccatctcgccagtgtccgtggtcccctccccgcgctccccaccacgacgacacgaccccatccatctcgctgctgtccacgcccagtcgcgcctcccacgatcacgcccacggacgcaacctccctccctccccgtccccgttcatgtcgcccccgtccgtgatcccctccccgccctcctctccgcgaccccatccatcctgtcgccgtccacgcccagcagcgctcaaaagcaaaaaagggtacgaatacgaatcccaatccagggccggagggcgagcgaactcaaaagcaagctgttccagtccaatccgccccagtccaaatctaatcgccgggtttaggcagaaggggtgggacgcggcgaggtttaggcggggtttgttttgtccctttcgtgcgattctgctctccgcgcgggaggcaagtactgacggaagcgaagaccaaggcggaggagggggtccccggcggtggaagtggaacgcgccgatgcgcaagtttcaggactccatcaaggccctccaggccgacatcgatcatgccaatgcgatagcagggtgtcggaattcttgagggactacgatggctcggtcatccagatgcgggtggcgtacagcgccgtcgcgcatttcctcctgcagtggaccgactgcaagctcgccggcgcgctcggcctcctcaaggttatgctatacaaggtgtgcgcggacggctcgtcggcgcttcctgattgggacatggaggccagcatcagggagttttacgcttccgagtggcatcaccgagctggacgacaggaagcagaggaagctctgcctcaagaaattcaggagcagggatgagcagctctgggaggtggacacggagagggagcttgagtgtgggatctgcctcgaggttagccccaaggtcgtgctgcccaactgtgcccacatgctctgcatgcggtgctttgaggattggaaatgacacctactctactccgcagcttaaaacctcaagatatgtcggtaatcaaacaagtacaagtttcaaggaaatgggaatttcatggaaatacagacattgggtccatattacacattgatatgattttggctgacaaagagcgctgtctgaggtgcgtggtcaagtcgaggcgaagatgagcaaggaggatgtgctcaaggtgcaggtcttggattcaacatagtactagcagtttggaatcacccgacggggatgctttccatgtaataaatatttttggaacgtttcggatttaacttatgttgtttctattgcaatcaacatggtgtcactatttggattcaccagtaagaatatttgccatttgggcttgttaattagggtgaaattttatataaaacatgcctcgttcacttgctttccagttcttgatttcagatctctgaagccaattacgtacacattttcctaccacgacttttattctgctttccgtttctcaacgtcttggacattgccggcgagcgcggtctcctcgacaacttctactgctaactcgggtgcaagatgcccagcaaacttcccaatccagctgccggcaaggagatgaggttcccgacggcgacaattttccactacacaaccggattcttcagcagcatatggatccgttgaagcgccgtgtgacaatgccaccaaagagcagcaacaaacaagctcaaagtctccgctaaccactaatctcataaagcttgaattttctcattgctatgtttccttctcctagcaaagttaagatgtttgcacatttctagcttattaggtccttgtgtggaatgtgtttgaacaatgatctcatttaaacaatatcaacatgtgtgatatat

SEQ ID NO: 41425 - DNA, 6858 bp, Zea Mays
ccctttttttgctctgttagatgttatatcatacatgaccatttggttatcagcagttgagtttgctcttctgaagggtcgccatccacttatcaaagatgtggacatcacaattaacccgtccaaaggtctagcatttgttgaacctcaagtgaatcaaaggaaatctccaaaaggaaatagttttcgtcaacattctgagcttattttgtataataatgttgcacatggaataaatggactgctagttgattctgcaaataagtactctggtgctcaaaacaaagaaaatgggcagttgaataataatggtgacataggaactgtagacaaagatctggaagaagagttagaagagagttctgaagatgttgagaaaggtcaggcactacaatcagcaagtcttgtgatgaatatgctagatgctacaatgcctggcactctcaatgatgatcagaagaagaaggttctggtagctgtggagcaaggggagactcttgtgaaggctctagaagaagctgtacctgaagacgtgcgcggaaaacttacagcttctgtaactgaaattttacattccaaacgagaaactttcagtttaggtgcattgaatcgacttggctggaacaatgtaagaccaaccactaccaagacattggcccaggaaaagctcaaagattcagatcatgaaagcgggcttaaggataccaaaatggttgatcagaacaggatttctgcaaccgcttttgagggggatctgaaagacattaatatgacaaatgatgataaacctggagaaagcatcgaatcgtcacagggaaagccttctcaaacttctgaacctgttggaacagcgacagaaattggaactgaacagccttataaatcagataaagctaattatggaaccaatgatagcagtgaagggcagcatataacagaacaggacaatgaaatgactccaaagcaagtttctgatgatcagtcagtggccaactgtaatgggccttctaaagaaagggagcaatcagcagatgctacaacagaccagaatctacaatctaacacaacaacagaaaaggaaggtgacacaagtcgcacaggtgaagataagactgctcataatgtgaatgatcaaagcacacaagtctctaaaacagaagaatcaaaaccttcccccattactgtgacccaggcattagatgcattaactgggtttgatgactcgactcaaatggctgtcaacagtgtttttggagttcttgaaaatatgattgatcagtttgagaaacaacaggactctgagaatggtgaaagtgctgatggaaatgatggtatcacttccgtggatgagacagaatctcatgtgaaagagaatacagagaatgtgtcaagtggagaagatataaaccactcatctaaacaaccagaaggtagcagtcctggaaaaactgattcaatcatgtccaaatatgattgtgcttttggtgaggaaaatcccaatttaagcattgtttcatatggtagaggaaaaatgagatattaccgaggaaacaaagttggtgatcatgtgggtgctgatggtatcgagcgagtcagtggcttgcctgactatttattagatatagctgtcaactcttacttgaaggcgcaatatgcaatgtatcttcgtgaatttctttacacagaattgcaactcaaatcaccagagtctaattcagcaactgatcttttccttgatccacaagagggtaaatggaaaattgaagaacagatgggcaatgtgcaaaatgacaattttgaatcctcacaagagtcatctaagatggacaatgctattgagccaccctactttataccaggaaaaaatccagacatcgcatacaagtccaataaatggaataatacagtagcaaccaggtcaaaacctggtaatgatttgaacgaggcacttacacactttgttagagatgaactatcaagtgcccttaaaattgaagttggtcgcaaaatagggataacagatactaagcaacttgaaaggagtcttgcaaatgatgtagaacagattgctgctgaagtttctaaaactgttgtccttgactgtgagttgtattcagccatacatgtgcaaagaagtccaacaactatcaagtttggttcaacacatggaaaaaatgttgttgaagctgtgtcgactgcagttcagcaatctcagcatctgaggaatattcttcctgtcggtgtcatagttggtgtaactttggcatgtttgagaaattacttccatgttggtgtctctaagcatggtgaccatatgatagccactatgaagtcagatatttttggtgaggaagttattgttcaggacagcagcaaagagaatgttcaggatagtggaaaagcaaatacaaacgataataatattgaaaaaaccagtggggagaaccagcaggatatgacgaagtcacagggtcaagatatgatggtcggggctgtgacggctgccctaggtggcagcagcgcgacattgagcaggagaggtgagcaaatggggcgcaggtgctcatggtcatggtggtcctcaatttagttgatttttcccctttttctggacattcttttataaaacatttaactttcatatttcagcaaaataaggatgaaaattgcaaggattttgttgagatagaaggtgccaaacatgaggaaactgcacaggaaaagagccagaacagtttgatgagcagttttgctgagaaagccatgtctgtggcaggacctgtagttcccacaaagggtgatggtgaggttgatcatgaaaggcttgttgcagttctagctgaactcggacaaaagggtgggtttttgaggttcattggaaaaattgctctactctggggcggaattcgtggtgctatgagcttaactgataggcttatctcattcttacgtatcagtgagcggcccttatttcagaggattatgggattttctttaatggttctcatcctatggtcccctgttgtgattcctctactgccaacgcttgttcaaagttggacaataagtgcttcaacggggattatcggatatgcttgcattgttggattgtacatttctataatgatacttgtcatgctgtggggcaaaaggatacgtggctatgaggatccagttgagcaatatgggatgaatatttggtcggcgtctaggctgcgagagttttttcaaggtttggttggaggcgtaacggtcgtagggttggtgcactcgataagcattctactcggttttgcagcgtttcggacagggttctcttcatctttagctagaccccttgatcttctcaagtcttctagtaatgtgtttctgctagctcttcgagggcttgccacagcaactagcattgctgttgtggaagaaatggttttcagatcatggcttccagaggaaattgcagttgatcttggttactacaatgccattctgatatctggacttgtgttttctctaattcatcggtcactaccctcagtaccaggtttcttgctactttctctggtactttttgggcttaggcagaggacacaaggaaagcttgctgcacccattggcctacgttctggaatcatgactgccagttatttaatacaaagcagtggtgttttaacatccaaacctgaaacaccgttttggatgattagcacttaccatctgcatccttttgatggtgttatcggcttaagtatctgctccttgcttgctatctttttcttccctcaaaagcctgttcagaaggatacatctgtgtgatgaggctcagaagagtaaaacataatgctggagtgagcttccaacaaggactaatcaccatgcgtatgctgcgagcaatgaagggtttttcctaccatacatgttaaaatgcaatgccctgcaacttgctggcagcaaagagtatgtgctcggttagcttcttgctcatctgactgagggtactgctgattggaatggcttttggatctataactagagtatccaggtcatttgtacttaggcaagtgtgtatactactctatactggattatcgaaatgggggatggtttcttccctacgttgtaaggtggcggaggaacagatgatatgcctaggaagaggaactagtagatgataagagtttgcccctgatattaggcttcctctgaaatgcaggaattctagaggaatatacaggaatttcacaggaatcagtccattctcacagaaaaaatgcaggaaactgaaaaaaaatccccgcattccaaagggggcatcatctaggatttcttcataccgaattatcgattgacttcgaccacataccgtgcttttgttcatgtctttgaacacaggcacacccaaatttcgaggtagcaaattttgcccacatacactgtatataaagtagttacagtgcaagaacaatgctaactgatcaggtgatgtctcgtcctccccccggttctattattgttactgtatagctgtaattagtccaagtgtacagctgaatctactaaggtttacaaggaaaatcgccaggcagtaaaccttcaatgcttttggctaggttttcattctgaaagtcatgtcttccgcgtcagcataatcctgtattcctgtataacctctgttcggacttcgtagtgctcatctgagttctgattcggccgggcaactgtaaattctgtagtgttcgagaaaaaactgtaaattctgtaatattgccaagaattatgaatttacatgaactttacaggtataagttgcccgcctcacttcaccggctcaccgtgcttcacctgctatcttccatggcggcggctcacctcttctgctccgcaccggccgcctatcgcgccgcgaacccacggccccttgctacccgtggccgcgccaaccccgccacgggaacgtatctggtgctcaaaggggtatggtgctcatgtgcacatttcccccgggccacaccatcgagaagattcttcccctgccgcgcgtcgctcagccccgatggatcgctggccatgctcggggctcccagtcccaggatggcgccaccgatgaggaagccgtacatgcgggagcactcttgcctcatcttcccgcccccgcgcggtcgacgcccgctggcggtcatcaagttcctcggcggcgccttcatcggcgccgtccccgaggtcacctacggctacctgctggagctcctggcgctggagggctttgtggtcgtgtgcgtaccatacaacgtcaccttcgaccacgaggccgccgcgcgggaggtattccagagtttccatgcctgctacgacgcgctgctcgcgtcggggctcccggaggccggcctcagcgccctggacatcgcggagctcccgctctactctgttggccacagcaacggggcactgcttcagctgctagtgggaagctacttctcagaaaggataccagaggctaatgccattgtctcattcaacaataggccggcatcggaggctgtgccttactttgaacagatagggcccctttttaggcaactgatgcctatgatggaggcctcgcctgtttactcgatggccagaaatgcatcaggatatgcatggaaagctctatttgatttagctggaggtcttttacgtgagtatgatcaagaagctacggtatctctgagcaaatttattgatcagttaccatcagtaatgaaccaggtttcagaaggtgtgtctgaatttaaaccaacaccacctgaaaaccgtgaattctgcaagaattcctacagtgtacccaatacattattggtcaaattcactgtagatgctattgatgatacagacatagttgaagatgtcctgagaccccgcgttgattcaatcggtggacaaataaagaaggtcatactgtcaggaacacatctaactccatgtatacaggcactcagctttgttgtattgcaggatgtcaaatggcaagttggttcagaatacactccagcagatgccattgcacaaggattgaaatcattggctcttagtgaaacaagagtcctctcaagaacaattgctgattggtttacatccctttaaattttgagttattcaatacatctgttgaagtttggagttcttcttacaaaggaatgccttcatcaggtctcaacttcccattttgttgaagcagtccactattgtaatgagatgtaaggatacaatgtattatgtatggcacataagagcagtgcatttttgggctgtgctgagctggtcatgctcacccgcaggccctagccgtactacaaatatctgatcaagattggtggtttggggccttacttggatcgtagttgcaagctataaaaagcatcgaacccaaaagtccaagcagctcgatcctgtttgaggtacggtgccagcaaggttaagttggccaaatctgttgcacgcagacagcccaatgggggtttctgcaggctggcgaaagtaaaggcgtgcgataggaaatctgggaatgttttatattgccacattgtaattccacgttataggcgtatagctcaaatacatttggacggtttggaggtatttcgttggtgtgctggcagttgtttctgtatcgtgcatgtctgttgcaagaaggcctggatgctgctgacctgagaactgattgatttcgctgacgcttacagttcttgcaagggcgtgcaagtagaacaacccgtatgcttcaggaattagtattacacgaggttaacaaatgtaataggcttgggactttctttcaacagcatcactgcagtacgtaacctctgcaacaaatgggaccac

SEQ ID NO: 41426 - DNA, 2226 bp, Zea Mays
agtttctctctgccgcgcgcagctcgcccaatctttctgctcgatctcgtcgaaccctaaatcccggacattaaacaaaaataagcgaggttcctgtgcatcgcttatcaagtgctcggtcggagactgtaatcgaaggttgttgtcgatccatacgtcatccagaattccaagagtcgggtgaagacggaggccaacagcgtgatattctccaagtgctcgacaccaaagctgaattagaatccttgccgtgttcgtggataacgcgtcagatttagaatgaagatgacccaagttgaccccaagtgcgggctactccgtatggtgatgctgatggacgaacctgtctgatcaagtgctcggacaagaatgattatcaagtggtcatcgtctaacaaacactaacctagtgttccttcaggcaagctccggtcaaagttttgtgctgctgatggtggtgttaagtgccggtgggctcggccttcttataagtctaagtaacccttctatacttcttattgaggatggtcacttgagctagcatatattttaaacttacaaaaagatttgcaatatttaaaagtgaaattcttttgtaaccactccaataaatacaatgtaaacttgttgtaacttgttaaatttggtaataagatttccgctgcaaaattgttggtgtgtgatttgtgtttacttaatcctgcggtcctggttgtaagtggtttattcgaggtccttggggcactcggacagatcctgttaagttatctagtgcacatgcatggtcgtctgaggtctttgagacaaggacaggtgcatgtgggcccgataccttgcgaggttctgccacagtgcaacactatatcagggatctgaagtgcccccgaggctccttgttgtatggtggcagtgacgaagatgacttcctttactgtctgccagacaacaaagagatacatgtctgccaggaaatgatggtcaatataggatatccgaagcttgaacttggcttatctgtaatttccaaggatgagtttgcagatagccttgcttacaatagtctgaagggattaattctaagcaaggctttaaaggcctagaaggaagcagaagatgagagctgccaaatagctcttgggaatcttcgctcagaagtcatcacactatggaacgaagctctcaaaaaggataaggtattactttccttagtggataggctgagatctaacgaagctaaaattgttgcacaagccgaagtggaagaactaaaaaggaaggttgttgaagcaaccgaaaaatttgaagttgaggcggtgaaacatgaaatttgcaagatcgaaaggtcaagagcacaaaagaacaccgatgagctacgtccttcgaaagacaaatgttatgaaatatccttagaatgagtcaagaaattaaaggacatatttgctagggttggggcatattcttctgagcaaaaattcatccacgacgaccctgatggagttgtccagtggatcagcggggaagccgaagcttttgacgaaatattaagcgaacgaggacatttctgcgcctttgctggtgcacggggggccacgtcgatcttagagaaagctggttgcgaacatgccaaggctgcagttcagccagaatttgtttttttggtggatgacattaaaaacctttgagccgaagcttctacactaggcaggaaattttactacgaggtgtggatgaagggcagccgtgagatagttgatgaagctattagaaagaatgaaaaagaatctcacgacgctcaagaagaagccaaacgagctgaagaagctgctgagcatgcgaggcttataagtacctttactgaggtatagcttcagaattcgtttttagcttcggaattaacaaacatattttatgatgtagctgaactttcaccgccaccggagccatacaacccagaagccaacccagccttgaaggaagcgctagatatgattataattgctaatgaagccgttgacaaagctgtcaacagattgcttaacgaagccgccaaggaagtgttgaaagaagattaaaactttgtatatttgagagcttagtttttgtacatatctttcgcttttgtaagaaccgagtatcaattatttgcatgtgtattaatgtaatatattcctttgtgatgcatgaaaccttcgtacataccatttttgagccgctggtgaaaaaaac

SEQ ID NO: 41427 - DNA, 1576 bp, Zea Mays
gtgactcacgcaatttatcgagcaccttaatgaacatcgcactagcaaatttatttattcatcgattgaactattctgaacaattcatcagcttaccgttctaaatctgacgcgttatccgcgaacacggcaaggattctgattcaggattctgattcggctcctgtgtcaagcactttggggaatatcatgctgccgcttcgtcttcctccgcttcttggaatttcttgctgacgcacggaacaacgacgacgttcagctgaacacccgcgagctttgtatactggcttcgttttcttcatccgcacacataaattgcatcgacgaatgacgagatcagaaatgctcggtgttggggaaaaataccagaaatgacgggtgatgaagctggtcgattacgacggtgctacagcgaagcgaataaggctagacaacggtgtggtctgttgcgagagaacgttggcacacagcacggtggactaggacatggatgcttgcgacctgggcgaactcgaccaggcgcagcaaggaatttctacggcttcgaacaacagggaggagagagaacgttggcacacagcacggtggactaggacattgatgcttgcgacctgggcgaactcgaccaggcgcagcaaggaatttctacggcttcgaacaacagggaggagagaggtctgaggaattctggcgtcgagaactcggcacggacacggcggccaagcagacccgacccagcagcgagaacaaacagagggggcgagctggagtatggacagagccgagctggagctgcgacgacaacttgggtgagcacagtaaagaggcacggcacgggcagaaactccagggagatgggcgaccgacgcaggggcagggagaatcgcgcggatgggtggaactccggccatggaaccaagcaaggcgcggcgttgggaggagcaggggtacggcgaccacagatccggcgataggagggatagcctgggcaagcctgaggcagaacgccggccagagaggagggaaaaactcgaccggtaccatggggatgacctgggactgggaaacaccatggtgcggagcagggaaagagcttcggctgggcacggcgcgcgccatgggaggccgagagacgagcggccgagctggagagggccacagagagagctccggcgtcaaccccaggcagcggtgcgtcgaggttgaagagaagggatgcctggtggagaaatcgagtgccagggagcagcagccagtcatggagagacctcggctggggcgagcaccagggagggcggccatggcaggatttctgcagaagggaaggtggaggctggagcttgcggctgctgaaaggatgaagacgaggcctgatttttcttggttgcacaaacagatgaggacgacggctgatgatcggcaagaaaaaacagagggagagattgagcggttgctgcaggggctattggcccaaaaatctgagcagggtcggcgacgggataaggccaggcgcaggaaaaaaaatcaacaacgcgcgtacagaaaaatcagccccatgagcagcgcctgcgcctag

SEQ ID NO: 41428 - DNA, 2353 bp, Zea Mays
gtcacatgatcgtttggttcattggcacacaaggaaagctaggaggaagaagaatgtctagatgtttaagatctgcgacttcatggagatgatatttatttctctttggaagatgagcaggaagacaacactcaacatcaagtgcattctagaactgcgttcagtccaagcagggatggttccatgttgtctcaacggcataatcggtatgaagaattgcctgacacatggtacaagccatatgctgacaaattcaggatatggcacagcaagcttcactcaggtgacaaagaaataccaaagagaacaccagagggaatgtctgactatcttaagatttgcagtgtacataaaaggaagagggctgtgtttatggatgatcccagcatatctgctcccatattggaaaatggcccttccctgcactcaaagaatgctggggaattcagcaattcaacagacgaattaattccagaaattagatttccatctgactgtgttccagaaagcgcaattcctaaaacaagtgggatatctagggctaacaaaatagaagttcatggagttcttgataatttgccagcaccatctagccgcaacactgcaatgcttgaaaggtttggcatggtgcctgaatattacaagacaggaaacaaatatagaggaaaagatggatctagagtagaagggaaatctttaagccaagagcaagcattgctcatgacaaaacagttggttgctcgctacttggcaaattcaggctttgaaagtggaactgtggtctctattgatgttctttcagaaataataattaagcacatatgtaaattgggacgcaacttgaagcttctaactgacagctacaggaagcaattttcatcaattgaactccttaagatgttcctacaaactgttgggtacagtaacattggatccttgatggagatcacaaagatggggaacagagtggccaactaccctattcatcaagatgcacaagttcttcagacacaaaatgcaatttccattcatgcacagcagcttccaaggcagtttcctccgcaaatgcttcagaatttgacaccacagcaacaacagcagcttcaaaatttgacaccacaacagcagcagcttctgcagcagcagcagtggcttaggcgcaaccagttatgcagcccccgtggtcctcttactatggcagacaagaaccagcctatggtgaatgtgaaggtagagaatactatggattctcaaatcgatgtcccatatgggtcttttactagacaacagcaatttaatataagacagcagcagcaactattgcatcagcagcagcaacagcttcaacagcagcagctccagcaacagcaacaacagctccagcagcagcaacaccaacaacagcttaatcagcagcagcagcaactgcagcaacagcagcagcaattgcaacaacagcagcagcagttcactcagcaacagcaattgcaacaacagcagcagcaactacagcagattaatcagcagcagcaccttcaacagcaacagcaacagcaactaaaccagcaacaacttcagcagcaacagcagcagatgaccatgtcaggaaatcagaatgcacaactagcacagcagttcaaacaagtctcatcaatgagtgcatatggcatgcgaatgccacctgtcaaagtagaagctttccatgaattggtgagcggggactcgtcgctgaagcacgataacgaccctaacaaactcacttctccaaagtagctgcggtgtgcaaaggatagcttttgcggtctgttgccttcctgccccccaacatcatgtctcgcctgtttgattgcgcacaacagcaagacgaaccgtgtatcgtaaatgtgaagcatttggctaattcactgccttcaaacaaactgatgtcaaatacgaactgataatagctccaagtttccttacattctgtacatggattaagggtgcgctgtcctctacataattagacctgtgcatattttaagtttgccagagaaagctcattcatttcatgccaagaaattgtggccattacgttcatagtgtgcgttggctcttcattttcaggccaggcctgggcttggatggaccatccgttagtttttagtatgaagacacttcaaatcaatatattagattggacttaggccaaggaaattttacgaatttggtgtttcgtctcatcctctaggttctattatgattttatccttatccttaattttaagccttttgattttgttctcaggattttaaataaaccagctccttgtttatgtaccacggaattaaatgatgaaaaacagaaaaaaaa

SEQ ID NO: 41429 - DNA, 3078 bp, Zea Mays
actccttttttctcctctcaatctcccccgtctcccccctccctctcccttgcttccctctccagtccccagcgcgcgcgacacgacacgggccaatcacccagccgccgccgccggcgatcgccggaactcggcgccggtgcttccgagcacgctccgctcggaaccatggtgaggagcgggagcatacggcggtccgcggtgcccgcgcctatgccggcgccggcgtttaccgtgtctcccgccgactacaggctgctggaggaagtgggatacggcgccaacgccgtcgtataccgcgcggagttcattcccaccggccggacggtcgctgtgaagtgtctggatctcgatcgggtcaacagtaacctcgatgatgtaagaaaggagactcaaactatgagcttgatagatcaccctaatgtcatcaggtcttactgctcatttgttgtgggtcataatctttgggtggtaatgccattcatgtcagagggttcatgcttgcacctaatgaaggttgcatatcccgatggttttgaggagccaattattgcctctattctaaaggaaacactcaaagctctagactacctccataggcaaggacatattcatcgtgatgtgaaggcaggtaatatccttattgataatcctggtgtagtcaagctcggggactttggtgtctctgcttgcatgtttgatagaggcgatagacaaagggctaggaatacatttgttggaacaccatgctggatggcaccagaagttctccagcctggaactggatataatttcaaagctgatatatggtcgtttggaataactgcactagagctggcacatggacatgctcccttttcgaagtaccctcccatgaaggttcttctcatgacgctccaaaatgctcctccaggtcttgactatgaccgtgataaaagattttcaaagtccttcaaggaaatggttgcgatgtgcttggtgaaagatcaaacgaagaggccaacagctgaaaaattacttaagcattcttttttcaagaatgcaaaacctccggagctaactgttaagaacattttaactgatttgccccctctttgggaccgtgtaaaggcactccagctaaaggatgcagcacaactagctttgaagagaatgccttcttcagaacaagaagcactttctatgagtgagtaccaacgaggtgtcagtgcatggaacttcgatattgaggatctaaaggctcaggcatcactgatatgtgatgatgatccacctgaaataaaagaagacgatgacactggtagaataactgacattgataaggatacatcttctgacgattattttggaaagacagcaccatcgaatggaaataactgcagtgatcgttcttctgtgccagcaaatcctggtcaaaatggtcccgaaataaatgaaatattgtcttccaacaatgggaatgcctacagtgaaaggaagcctgatggacgtaaaaacccagaatcagaaaatgattcattgccctcgacgtcgaagcatgatgctgatgggaaagattatagatgtgatttcaggcaaaaacagaggacatactcaggtccagttctgcaatctggtccgaataatagttcgatgactgaaaggggccacattattgaaagggatgcaggagttcaatctgtatctgataaacaaaagaatggtacaagaagagccaataatcttagtggtcctttgtcacttccaactcgtgcttctgcaaatagtctttcaagagccaataatcttagtggccctctgtcacttccaactcgtgcttctgcaaatagtctttctgctcctattcgatcttctgcaggttatgtaggctctttgggtgataaacctaagcgcactatggtggaaattaaaggccgcttctcagtgacatctgagaatgtggatcttgcaaaggttcaagaaattccagggagcagtgcctcacgtaaattgcaagaggggccttcactgagaaaatcagccagtgttggtgattggtcagcgaatgataagacaacgtctactaatcatcaaaggaaggaactctgcaatagctctgtatctacatcaattctgattccgcatcttcaaaaccttgtgaagcaaactgcattccagcaagatctgattacgaacctactaagtagcttgcaacaaaatgagagagtcgatgcagctcagtcaagagtccagagcacgacgagtgatacagtggttgaagctgctactgctgagagagaacactcgttacttgttaaaatttttgagttacaatctaggatgatttctttgactgacgaattaattgcggcaaagctgaaacatgttcagctgcaagaagagctaaatgtactctactgccaagaagaaatcctggatatgagagaggacgagagcgaagaagcatgatgcggtggagcctgcccccctttttttactactactactgagggggactaaaagccacatgctctaagcccgtgcaattgaggcttggctaactggctgcatacaatacaaggactcgaaggatcattggccaactccgggtgcaatcgaagaacctgcaatgagtttgatggagcggggtttatgatcgttggcctcggatttgaactgttatgtatattcagtcgacccgttcgatttctgactcgggtttggtttgttcagtgagcttttaaggcgtcttgcgatgcgcatctacttgatcattaagatggctatgacgccagcctctaatatatactactagtggtagtaataggtatagcgtccgtatagtaccattgtacttgtacctcagaagtcagcaagactgcgacaataattgcatcgcgtctgtagacagcggaatgcatgagtagctactgtagtacaatggagtgtccccgcatccaggctttgggctgggaaccctgcctgtgctgctgtgagcagtcatgttgtcacctgcgcccattacccgtacatgcgcaatcataaacaaatcagctagctcatcaataatgcactcacggacgggagggaatccacctt

SEQ ID NO: 41430 - DNA, 338 bp, Zea Mays
tcgagatcaaaacataaccccacatctaatccaacctctaatcctttaattctcatgatccacaacctccaaaagcacataattacagggaggaacaaggatctcatccatacctagggtttccccaagaaattttgcaagaagagatggggaagaacatctccttgatcctctctgccccttcaactcaatatttgtgctcctcctcttctcgatccttgctgcgcggggggagatctagagggaggaggaagccgtggagaggggctgccatgggaggagaggacagccagcccaagggaaaagaagagaggggcggccaagtgtgggagggggga

SEQ ID NO: 41431 - DNA, 880 bp, Zea Mays
atctttccatcattcatcctttcttctccaacacccgtcactctcttctccaactccaagatgtcggccgccaccgccctgcttcatcgaggcccaagacccaatgtctatttttgataaagaaatcaaacagcaacctagcagtcttccttcacttctctgcttccgacctcgtagcgaatcagatcggggggctagggttccagtgcgcctctacaaccagacgcgaggctaggctgggcatggagggaatcgtcacggcccgaaagaggtcccggccagagacggcgaacggggctgccgccgccgggaagcgctccaaagtgtggatgcctctctggccggtggcataatcgacaagggtggggtcaacactaagcagataagctgagttacatgcgtcaagctatccatccgtgaccaccagtctaaccccaacctaaagaacatcgagctggaaggcaattttgaccagatcaagcaagccagcgacttggtgtgtgatctcatcgcaaccatcaacgcaagcatgccagcgaaaaatccatcttccgctgtggtgccagcaggaggaggccgaggcagtggtccggggggaacgagcagcaactacaagacgaagttgtgcgagaacttcttgaagctatgcgagaacttccaacgactatgtatgagatattgtctcttattatgactagatgagatgtgttttatggctatagatgagacttttgtgatgtaattgatgagactatggatttaaatattgttatgtgattgtgtgtgagatgttttatgtgaaaatatgttgtgctatagttgttgatatatttgttatgttgtggaatgtggtgtaaaataaaaataaaaacatttgtaa

SEQ ID NO: 41432 - DNA, 4168 bp, Zea Mays
cccctaggcgcatggaggagtacaccaagcattctctgagcattcctaagcaccaagacttcaattccgcgcattcgattctttgtgatagcaattagagctccatttgagtagagaactctttgagttgtgttgagagctcttgttgtgacttgtgtgcgtgttgttgctctgattgtgtcttgtgtgcgttgctcatcccatccttacttctgtgcttctttgtgataatcaaagtgtaagggcgagaggctccaagttgtggagattcctcgcaagcgggatatagtaaagtgaaagcaaaacaccatggtattcaagtgggtctttggaccgcttgaaaggggttgagtgcaaccctcgtccgttgggacgccacaacgtggagtaggcaagtgttggacttggccgaaccatgggataaaccactgtaccatctctgtgttgatctctttgtggttattgtgttttccaagaactcctctctagccacttggctttattgtgctaacgcctaatcaagttttgtgggattaagtttcaagtttttacaggatcacctattcacccccctctaggtgctctcaattggtatccgagccgttctcttcacgaagggactaattgcccgaagagatagatcctaagggcaaggggattgtgatcaatgataaggagaaggagtcctttgtcaacgagccgaaagatgacaagcctactgactcgggctcgggccataaaagaaaagacgggaagaagaagaaaacaaggcgcatcaaggagatagtctactacgacagcgacgaatcttcctcttcccaaaaggacgacgacaacgactatgagaaaaagaagacggttaattcaaacttctctttcgattattctcgtattccgcatagttcaaatgcacatttgctttccattcctcttggcaaacctccacactttgatggggaggactacggattttggagtcacaaaatgcgtagacacttgttctctctccatccgagtatataggagatagtagaaaatggaatgcaatttgatagcacggatagtcctttgtttatcaacgaacaaatccataaaaatgcacaagctactactgtccttttagcatctctgtgcagggaagaatacaataaggtgagcggcttggacaatgccaagcagatatgggacaccctcaagatatcacatgagggaaatgacgtcaccatgctcaccaagatggagttggtggagggcgaacttgggagattcgcaatgatcaggggagaggagccaacccaaacgtacaaccggctcaagaccctcatcaacaaaataaggagctatgagagcacacgatggacggaccacgacgtcatccgcctaatgctaaggtcttttactgtgcttgatccacatcttgtaaacaatattcgtgagaatcccaggtacacaaagatgtcgcctgaagaagtgcttgggaagtttgtaagcgggcggatgatgatcaaggaggcaagatacgtcgacgatgcattgaatggcccaatccatgagcctcaagtcattgctctcaaggcatcgagtagcaaggaggcgctacctagcaaggtggcgcaagttgaagcggcggggctaaatgaggaagagatgaccctcatcatcaagtgcttcaagacggcgctaaagggacgcaaggagcatcccaaaaagaacaagacgaagggaaagcgctcctgcttcaagtgcggtaagattggtcattttattgctaattgtcccgataatgatagtgaccaggaacaagataagaagagggaaaagaagaaggcttacaagaaggctaagggcgaggcacaccttggcaaggagtgagactcggattgctcgttgtccgactccgacaacgaaggactcaccgcatcagccttcaacaaatcatccctcttccccaacgagcgtcacacatgcctcatggcgaaggagaagaaggtatgcactcgaaagtctacttatgcttcttctagcgatgatgaatctagcgatgatgaaatagattactctagtttgttcaagggcttagatagaactaaaattgataaaattaatgaattgattgatgctttgaatgataagaatagattgttagaaagcaagaggatcttttgtatgaagaacatgataaatttgtagaggcacaaaaatctcttgctttagaagttaaaaggaatgaaatgctttcttgtgaactatctacttgccatgagacaatttctagtttaaaaagtgttaatgatgatttaaatgctaaactagaagtagcaaatagatctaactcttgtgtagaacatgttatgatttgcaatagatgtaaagattttaatgttgatgcttgtagtgaacacctagtttctattacaaagttaaatgatgaagtggctagtcttaatgcccaacttaagactagcaagggtgaatttgataaactaaaatttgcaagggatgcctacacaattggtagacacccctcaattaaggatgggcttggcttcaagagggaagccaagaacttaactagtcataaggctcccattcccgccaaggagaaagggaaggcccctatgactaatagttgtcaaaagaaccatgctttcatgtaccatgataggaagtttactagaaatgttcattatgataggagttgtaatgcttacaattcaaatgcaatgattgcctcaagttcttctattatgcataatagaaatttgactaggaaaaatgtcattcatcatatgcctaggagaaatgttgctcatgttcctaggaaagtaaacaatgaaccttctacaattaatcatgcttgcaatgcttcatttgcaatttgtagaaagggtagaaaggtgattgctaggaaattaggggcagaatgcaagggagataaaacttgcatttgggtccctaaggatattgtcactaaccttgtaggacccaacaagagttgggtacctaagacccaagcctaaatttgccttgcaggtttatgcatccgggggatcaagctggattatcgacaacgtatgcacaaaccacatgacggggaagaagaagatgttcacctcctacatcaaaaacaaagattcccaagactcaatcatattcggtgacgggaatcaaggcaaggtgaaagggttaggaaaaatagctatttcatccgagcactccatttccaatgtgtttttagttgagtcgcttggatataacttgttgtctgtgagtcagctttgtaatatgtgatataactgcttattcacaaatgtagatgtgtctgtctttagaaggagtgatggttcattagcttttaagggtgtattagacaacaaactctatttagttgattttgcaaaagaggaggccggtctagatgcatgcttaattgctaagactagcatgggctggctatggcatcgccgcttagcacatgtggggatgaagaaccttcacaaacttctaaagggagaacatgtgataggtctaacaaatgttaccttcgaaaaagatagaccttgtgcaacttgtcaagcaggtaaacaggtgggaagctctcatcataccaaaaatgtgatgaccacatcaagacctttggagttgcttcatacggaccttttcggactcgtcgcctatctaagcataggaggaagtaagtatggtcttgttatacttgatgatttttcccgcttcacttgggtattctttttgcaggataaatctgaaacccaagggaccctcaagcgcttcctaaggagggctcaaaatgagtttgagctcaaggtgaagaagataaggagcgacaacgggtccgagttcaggaaccttcaagtggaggagtaccttgaggaggaagggatcaagcacgagttctccgctccctacacaccatagcaaaacagtgtggtagagaggaagaacaggacgctcattgacatgatgaggacaatgcttggagaattcaagacgcccgagcgattttggtcggaagccgtgaacacggcttgtcacaccataaaccgggtgtaccttcatcgcctcctcaataagacttcgtatgagcttttaaccggtaacaaacccaatgtgtcttactttcgtgtatttgggagcaaatgttatattc

SEQ ID NO: 41433 - DNA, 1643 bp, Zea Mays
tcagggagagcagcatgaaggggcggctgctgctgctgctgtgggcgtgggcggccgccacatgggtgtccgtcagcgccgtgactcgcctcggcagaggcgtcgccggagagcagccgctgtccaggatcgccgtcgagagggtggtcctcgccgtcaacgacgcggcgtacgtcaaggcgtcccctctggttctcgggcacaagggcgagaacagtgagtgggcggacgtggagttcttccacccgaacccgtccgacgacgactggatcggcgtcttctctcccgcaaatttcaggtatacttacaggcttggccataggctgatgaatgggacccgcgtctggagcaagtcatacagcttcaaagcgtcgccttaccctgggcaagattctttgcagcgagttgtcgtatttggggacatgggaaaggcagaggctgatggttcgaacgagttcagcgacttccagcccggttcgttgaatactacttaccagatcatcagggacctcgaagacatcgacatggtggtccacattggggacatctgctacgcggatggctacttgtctcagtgggatcagttcactgcacagatcgaaccgattgcttcaagggtgccatacatgattggcctcggtaaccatgagagggattggcctggcactggttcattctacgggaaccttgactccggtggagagtgcggcgtccctgcccaaactgtgttctacactccagctgagaaccgtgcaaaattctggtacgcgacggactacggcatgttcaggttctgcatcgcaaacacggaagaggactggaggccggggaccgagcagtacaagttcatcgagcaatgcctgtcgtcggtcgacaggcagaagcagccgtggctcatcttcctcgcgcaccgcgttctcggctactcctcctgcacctactacgaatcggagggcacgttcgaggagcccatggggcgggaagcgctgcaggagctctggcagaagtacaaggtggacatcgccttctatggccacgtccacagctacgaaaggacatgcccggtctaccagtctcagtgcgtcgtcgatggatccgaccactacagcggcccgttccaggcgacgacgcacgtcgttgtcggcggcgcaggagccagcattctcgattctgagttcaccacctcgaagatccagtggagccacttcaccgacttcgaccacgggttcgtcaagctcacggccctcaaccattcctccctgctgttcgagtacaagaagagccgcgacggcaacgtgtatgaccatttcacaatctcacgcgactaccgggacatcctcgcttgctccatcgacaactgcccccggagcacactggcttcctgaagtcccacagtagttgcagaccagaaattttagttcgtagcttttctgtactgcaccgaccaataaatgaggccttttcttttttaataatatataattatatgcatgcactattttcttgtacctatagtcataaatgttagaagccaatttcgatagcaatttaatctaggaaaaaattaagcatgggagatcaagagatagaaaacttatcgtcatcatatgcataactctagaagttatgatggaaaactttcg

SEQ ID NO: 41434 - DNA, 1011 bp, Zea Mays
gttttgatatctgttgtgaagtagtatattaaattatacatgatgtttgaatggtgacacctacgcgggagagtactttgctgataggatgcacggctttggaatctacagctttgccaatggtcatagatacgagggagcatggcatgagggtagaagacagggtttaggtatgtatagtttcaggaatggagagacacaagctgggcactggcaaaatggagttcttgatactttatgcacccagaactttatccctggatcacctattgctgtgaaccattccaaggtcctcaacgcagtgcaggaagcgagaagagctgcagagaaggcctatgacatcccaagagtagatgatagggtgaacagggccgttgcagcagctaataaagcagccaatgcagccagggttgctgccgtgaaggctgcacaaaagcgcaaccccaataatggtgatgatctaccactgtcagtagtgtgacaatgaaggaaatatatgttggcatgaagctgcttcgctatgccatcgcatcacccattgcccggcataaccttcagcttcccagtaggggaagccactgctcgtccatcaggccttggccagtggcgacacctgagtcattgccggcagcattcaagcttgcgggagaagaccaaattttcatacatatacatatttgtggtgtcttttgcgatgcagcagaactactgctctgaggactttccattgttcaaggtaactgggcgcgaggccagcagtaggtttctcctgcattttctgcagtgtaatactcacccaatgttagcgatacgacgaatgcacaccccaacatcaggagacaaaaacctactccctccgtttccgtttcaaactatgaatcattttaactttttttgagtcaaagcatcttaaatttaactaaaattatagagaaataaaaaaatgtgatatcaaacaggtatactatgaaaatatgattaatgaagaatatggaaatataattaatgaag

SEQ ID NO: 41435 - DNA, 623 bp, Zea Mays
ggacgcgcgcccgcgccgccagggaccgggagagagggcggagccgcgccgctatgtaagggcggactgacgggtggagcaggagggccgcgtgcccacgccaaagcggaagggagaggagggtcgccgccgccgataggaaagctgctgccgccgccgccgccaccaccaaagctttcgctgcaggaccagcagcagcttcgctagcaggagtaccaccttctggtttcgccacagctccactgacctcagaagcacatttcacaacttgcagcccgacagaagatttatccacaggagtgcgaaccttcgggagcaggcggtcgctggtgtaggccgacgcgctcatcggctctgacatcggattccggcacccggccggcaatgtgccccttgtgcttgacggcgtcctggccctcctgcgattgaaggggacacccccggtgttacaacccccgccccgaagaagtaaaagcgcccccttcacggcgacggcgcgacgcgggcgaataatgcagtgatagatgagggggaaggagaaggggttcgagttacctgcggggccgggcggctgagctcgcagaaggcgcagcagtcgtcgtcgtcgtcggtgtggagccagg

SEQ ID NO: 41436 - DNA, 1492 bp, Zea Mays
atcttcttcagttacatatacacctcgtcagcctgccggtcgttgctacttagagggtgtaccaacttccgggcaggcatctgcatccaaagggcgctcgattctctagctagctaggatctagcaacacaaacccgtctgtccatatattatgggttggtaacaattaattagactgaagaagatcatctaacgaggatggacgcaaagaaaccatacatgctggctattactacagtagcaatctacaccggcatgtacgtggtctcaaaggctgccttcaaccagggaatgaacagcttcgtcttcgtcttctaccgccaggctgctgcatcgcttctcctcctgcccatcgcacttgttctagaaaggaaaaatgtgcgatccatgtcctctgggttgatcctgaagttgttcttgcttgccctaatctggaacacgttaggcatgaatctgtgcaatgcaagtgtgacgctcacgtcagcaaccgtggcgtcggcaacaggaaactctactcccgttatcaccttctgcctggcactgctactgaggatggaggtggtgaagttaaggagcgtctctggcatagccaaggtcaccggcgtagcactgtgcctggccggagcgttggtcatcgccctgtacacggggccgtcgctcagcccagtcaaccgccatcaccgtgcctctggcggcgcccatggcttcaaagctccaacccgtggggggacatgggttacaggcacgttcctgatgcttctgtccaacgtcacatggtccctgtggacggttctgcagggcgcgctgctaaaggaataccccaacaagctcctcgtcacgacctcccagtgcttgttcagcaccgcgcagtcgttcgtcgtcgcagcggtggccgagagggacttctcgaaatgggcgctcaagcttgacgtcagcttgatcgctgttgcttacaccgggtttctcgtaactggcgtatcctactacctgcaagcttggtgtgtgcagataaaaggacctgtcttccttgctgtctggaacccactctgctttgtgctaaccatattctgttcctccttcttcctcggcgagaatgttcacctcggcagcattgtgggtggaatcctcttggtctgtggcctttatagcgtgttatggggtaaaaccttggaggttcatcagactgtggaatctggtgataatacggtcggtgaagtgcaaaatggacaagaagagaagaatcatcaacagaaggtgctggagaagggacgccaagaggaagcatcaatgacagcacccggtgtagtgtgatcgattgcttgattccataaagctagcaatctatggttcatttatgtcatgtctgtggttcttgtacaaattgcctgtgagtcacaataattgtttcaagatctttaaattgttacatgttttaaaggccaaaataaataaaatttaggtgataggcaaaagtaggatgatttttccaact

SEQ ID NO: 41437 - DNA, 3107 bp, Zea Mays
cctggcccctgtgctccccttgccaccgaacgagagccaaaagcctcccgccccacgacgcgcccgccccggcggcgacgccccggaggacgtttcccgcagcgaccggcgaccaagccttgattgcctccgccccatggctacccgggcgcgggcgtagccgccgcctcggccgcagcaggctcggtccgcccccctcggcgatttctgttccagtcgcatcgcgcgacagctcgtcgtccgattcggatccccgccaccgcggcggaacgaggcgtctccggtccccgagggtattcggggaatttgagactgataagtcgggatcctgtcgataatgcggggctacgtgtacgagaccaataccgcagaagggaagggagcctgcgctagttgctaatgacggagagcgaggtagagagcttgatcttggtctcgggcgcgaaggagctcctggtgatggtgcagctgctggtgcgctgtcgaccccttgcttgctcccttgtcaagccccagatgtccaggaaggtggactccctcgtgctccccatggcgcggacccatgtgcagggttgggggatggcgtggtcgtggctgacgggaagcgtggcctctacaaccacgagcgttggccagcatgctttgtcactgtgcgccagtttggaagaagggaaaggtcctctacgtgggcctccagttgctccttgtgtgctaggttggtgaggcccccgagcatggtggacatggcggggtcctgcatcattgccctgcccagccgcttcgccatggccacgagctatggattctgcatcggatatgtacctaagtggttcaactggggttaccaccaggaagtggaagatgagtacggagatgagtactatgatcaagatgagtatgaggaggaaggttcgggtgctggggatgggtatgctgaggaggaagagcctacagagggacaaaaggagatccttgaattgagagaaagattaaaagagcagattaggcgaaaggcaaaggctgctgctgcctgcacagctggtcgatcatcttcttcacaaatacctcaagccagggacaaatttggctctttttttgggccatccaagccggtgatttctcgtcgagtgatagaagaaagaaaatcattgaaagaactgcatagcacggttgcaagggagccaaggccttctggagtacataaggatattccatcgtcctctaaagtgcaaagtagagtaaatggacatcagcataaacaaaagattgttaatcaggtaaagaagaaggctgaggcacttaaggataaccgggattattcatttctactctcggatgatgctgacctgtcatcctctccaaaggagaaacctgctgctagatcttccttgactcaaagggctgatcgtgaggtgacacaatcaacagtaaagaggaaggcaccaacaagtcaacctgcacgcttgtcaaatggatatggacctaagaacacaatgtcaactcaaaggcatgctgaaggtaaggtaaattccatgagaagggaggatttctcgaatacagaaagggttgtttcacgtgacaatgagaggatgtatgaaagggttgtttcacgtgacaatgagaggatgcatagtattgcaagaaatggatccaaccaggcaagtactagcaaaaccacaatccaaaagcatccaagcaggggtcccattgctaataagcaaccgtccaaggattcgaatgatgcaactctgaggaagagcagtgtagcctcaaagcaccatcccttagagattgacagaccaaaatcctcgcaaagtcagaggatgcagtcagctggtcagagaccacagcattcttcccatggtcagacgccacatcaatccatgcagcataggacgcagcagtcattgcagagtcggaggccacaacaaatgacacagggtcagaagccacaacagtctttgcagagtcaaaggactcaacagtccttgcagaatcgaaggccacagcagtcctcacatattcagaaatcgcaatcctcacaagcacacagaccacagtcattaagtaacaggtctcaggctttacaaggacaaaggcctctttcttcacagggtcaatatccggagcaaagaagagtacatgcaagtgacagagtcaaacaagctgaaaggcagattcggcctccttccaagtccatgccatcacggccagtctcttccaatggaattcgtgatgatcatgcaaaaaggaagcaagtggcaaaaagaagatttgatgaagatgatgaagaccccttagcaatgatcagaaatatgtttgggtatgatcctagtagatatgcaggcagagatgaagatgtcagtgacatggaagccgattttgctactatagaaatggaagagaaaaggagcgcgaggattgctaggcaggaggatgaagaacaacttcgcttgattgaggaagaagagagacgcgagcaggagagaaagaggcgaaagatggcacgaggccgatagtcgaatacactcctatttggatgttataatatactaccttcgttctcgaatatttgtcgtccgctggttcatttttgaactaaaccgtgacaaataaaaaagaacgcaggagtatctggcaggcctgattgcctgaatacgaagccccatggcggatcagacaggcacttctcttgcagtcctgtttacccttaccacgatgattatctggaggcaaatcaagggaaaacgacaggtgaccaacactgggcacgtgtaacagcagactgtagttgtagtggtttagttctcgaagctgacatggactatatttaagttctcgtcagattgtttggatagcagaaggtttccattgttgcagcgcctcaccagattgtttcttcatatgatatactgattctttcagtcaagcctatataaggatgcgtaatacaagtgcccctcttgtatatctttttcgggtgtaatagtgttgtaataaacgatgttcgaattttcggatatgattttgagctttgtcaggcgatcactgcaccacggtccacagagatgcgcttctggccgggagccaatcgaaggaagcgggaa

SEQ ID NO: 41438 - DNA, 1134 bp, Zea Mays
tgccgccgtcagcttctggtcgggcctgtgaaccagaacgggattacaaggcgaagctgtcggatttcggtctagccaaagacgggccggaagacgacgagacgcacgtgtcgacccgggtgatggggacccaaggatacgccgcgccggagtacatcatgacgggccacttgacggcgaagagcgacgtgtacggcttcggcgtggtgctgctggagctgctgtcggggcggaaggcggtggacaagagccgccccccgcgggagcagaacctggtggagtgggcgcggccgtacctgacggacgcgcgccgcctggaccgcgtcatggaccccagcctggtgggccagtactccagccgggccgcgcacaaggccgccgccgtggcgcaccagtgcgtcgccctcaaccccaagtcccgcccacacatgtccgccgtcgtcgaagcgctcgagccgctcctcgcgctcgacgactgcctcgtcgggcccttcgtctacatcgcaccgccggagacgacgaccgccaacggggacgaagcggcgccggtgagtagtaataaggaaggatccggcagacgaggaggccggaggaggtcgtcaggcgaaggcgcggccgtcgtgcggccagaggagtgatgttccctcttccgtccgtgctatgacgacgatgataatatgggtggatttactagcttccacgtcttgtacgtgaccggactgttgttgcctgtcgcgtgcatgcagcttggctgagatatatctatcgatcgagcagctatacgatcggtggaagttaacgtcttcgtttgtgtgattgaaagcatccagctggttgcgtgttttagagagaactctatagattgaatttgttgcatatacagtaatctaaccaaacttctctatttttatagatctaaaacgacttgtagataaaccccgtgtgatgattgtaactgatatggatttgtattacaatcctctaatataaatataagccacaactttttgatagagataacacgctgatataaatttgcaacaacagactgacacgtctagtagtgcacccaaccactattgtaggaggtccggtgcacccacaataaatacagaattttcactcaattccaac

SEQ ID NO: 41439 - DNA, 523 bp, Zea Mays
cgcatacccgctgcgctgctcccatggccctgggtgcaggtgtgccgcgtccgcgccgctggcatatgccgctcggacctctgcaggcgcgcttcggcgattgggacgccgcgtagccgaccggaccagcgctgctgctagccccgccttgtgcgtcgtgcgtcgtgctgcccgcgctactctgcgcggcttgtccgccgaggtgaaatctgtctatcctcctctctctcccttctctatgcatagctagacggaggccctagtcgcaatcctcggccatgtcgctgctgaccgtggccgcagcttgcccctatgcgttgtgcccatcctcgactccggcaagcctcgccctcgcgcgctccttgctgcgtttcgctcctgtcacttgacgcgccatgtgccgagtcgtcgcttgcgcggtttcgcatgcttcatgcgggtagtttgagcggtgtcaatttcataatagtaactcaaacgtcttgccctaatgttcgtttaatataaatgcgacgtttattta

SEQ ID NO: 41440 - DNA, 2323 bp, Zea Mays
aactctaccgacctccgctcaccgccccctttcctcctatccctcccagagccccgacccggccggccggccggccggaaccctagccttatcgcccctccctttcccgcctcgcctccgcgcgatctcccgatcgccggattcgtgccgcggctggatggactccgacgtggagatgaacaccgccagcgatgaggaggtgatggacaacgatgactactacgactactgctacagcgacgtgggcgacgacggtgggagcaacagcgggagcgaggagctggtggccggggactacgacgagggcctcgaggccgaggggaccgacgaggtggtctctaggcgcgagcagacatttgtggttttaaacgaacaagttatatctgaacgtcaagccgaagatgtgagcaaggtatctgccgtcacactgattacaagggaggaggcgtgtgccctcctccatcactataaatggaacatcagcaagctgagtgacgaatggtttgcagatgaagaaaaagtccgccatactgttggcttacttttgaatggaaatcatgacccccgctctaggaagctagtctgtggaatatgttttgaggggtgttcttctgatatgatgagctctgctggttgtgctcatttttattgccatgaatgttgggaaggctacattagcgctgcaattggtgatggtccaggatgtttgtcattgcgatgccctgatccatcttgtagtgctatggttcttcaagggatgattaatgaattagctaaagatgaggatagaaaaaaatatgcacgatttctcttacgcgcatatgttgaaggtagcaagaagactaaatggtgtccagctcctgactgcacatgtgctgtggagttccttggtgatgaaaactatgatgtttcatgcaattgcatgttcagcttttgttggaattgcactgaggaagctcatcgaccagtgaactgatactggctaattctaagccctgtccaaagtgcaaacggccaatagagaaaaaccagggatgcatgcatatgacatgcacccctccttgtaaattcgaattttgctggttatgtctgggtgcatggtcagatcacggagagagaacaggtggcttttatgcttgcaatcgttatgaatcagcaaagaaagagggagtttacgacgagactgatgcaaggagggaaagagctaaaaactctcttgagagatatatgcattactatgagcgctgggcatccaatcagacatcgaggcagaaggcccaagcagatctgctaaaagcggaaaaggaccagattgcaaatttaactgacattttcgggataccagagacccagcttaagttcataatcgaagcttggtcacagattatagaatgcaggcgagtgttgaaatggacatatgcttatggctactatctggatgataagatcaagagtgaattttttgagtatctgcaaggtgaggctgagtctggtttggaacgcctgcatcagtgcgctgagaaagacttgcaaatttttttgccgtctgtgaaatctgacagcactgaaacaacgacacctacagtggctgaatttggtgaattccgcgtgaagcttgctggacttacaagcgtgactcggaattactttgagaaccttgttcaagctttggaagctgggttggaggatgtccgtgccacaggccaggctgctggtacatccagcactgccaccagctccaagaaaggaggaactaaatccaagaagaagcagcacactgcaccatcatctgaccacactgatgatgggtggccctgcgagcgctgcacatttcttaaccctcctacagtggatgcatgcagcgtctgcgaaaagagtaggtactagatgatggaatagctcaaagggagccagggaggcatcccaagaaaacctcaaagctcgtgagaagcatgcatgcatcggatgctgagaagaagagcttccagctgccgcaatgttgtacagagagttattttagggcctcggttggaaacggtgtggaggctcaagtggtcacatgtttgtgggggtcatttggttttctagttcttttctgttgttccttgtaaatatatttgttgtgatgtggtgacctgtgtttatgtgatgagtttttgtttctgacaaactgtgaaattaaactttaacaaaactgatgagaggtagctctgtttattccctcctaattgcgggcagggtctttgtctattcttccacattatttatctacggttacttgccaagtaaccatctgctagtgctggtcaatgttacttcaaag

SEQ ID NO: 41441 - DNA, 3683 bp, Zea Mays
caataattgaagcaatctccagtggttcagacttcagaggtgctctaggcttcaaggggcggctgggtgagggcagtgctcataactaaatgcccaaaggtacgctttgtatgttttattggaggaaaactgaaatttcttgatatttcaggctaacttaatgaccgaatttatcgtccaaattttggtttgtcatccctattcccccatggcttcttttattatctgcatgagtgaaggtgttcatgtttcattttttgtgaggtttcattgtttagttgaagatttgaagaaaatattgtgcgactgaggagctatctgaactagatgaaattaggttctctggtttggttcactgaataatatattgctgcaaaaaagaacctgcgccggcatagaccagtggtttgctccacctgacctagctgcctttactaacctgaatatgctagcaacatactagtacgtactctgtttccaaacaaagatgcaaccaaacaagtgctttgttttgaaaggcaagcaaagcatcaaacagagggaacagcaaccagaacaacacccacatactgtgtggttgacaaaacatgaagcaatctgacaaataaaggcatgcaacatctcaaaaatgatgcaggcaagcagcatgtcgagaacagctggccaggctaacactaaattaagtgaacaaacaactgggagcatgcacaaaaaaatattgaatgagttcacaaccagggcattcatatatataattaagtagtcatgctaatggattgaatgagttcaatgtcttcagagaaccaatcagaatgctatggactatgtattttgtggatctgcaattgtgtttttgtctgcagaattcagtgtgaaagatagatatagaacttgtgttctccttgaccttgtcaacgagggaaaaactaaaaggatttctgaccttacaatttcaaatctaaactaacacactctacctccctagaatactactactgtatttatcaattgggcaccgtaccagagaggcagagaacatccctcactctcagtttccattttgtagctatattctaagggtccctaatgtggtttctattttctagttaggatatatccagcaaaggacagaatgaaagtggtctctgtacaccttgctgctgctgttgctgttctacttctgttggcggcgaagcgcacccccgctattgcggttcctagccctcagtgccaacggcaatgtggcggcgttgacattgcgtttccgttcggcatcggtgacaactgctcgctatcacgaggattcaacctcagctgccaggaggtccaaaatggcgtctacaggccattcctaggtaatattgaggtgctcaacatctccttgataaatggcacggtccgggggctgaaccccgtctcgacatactgctacgactcctcctctggttccatggagcccagtacctggtcattcgacgtgagcagaaccccgtaccggttttcggacgtccagaacaagttcaccgtcatagggtgccagaccctcgtctacatcaaggacaacaccgacaagagctaccagagtgggtgcgtctcgacgtgccagagcctgtcggacgtggtggacggcggctcctgctccggcaggggctgttgccagacggccatacccaaggggatggactactacaacgtgagcttcgacgcaagcttcaacacgagccggatttggagcttcagccgctgcagctacgccgtgctgatggaggcggcggcgttccgtttcagcaccgcgtacatcaagacgacccgattcaacgacacgagcgctgggcaggtgcccgtggtgatggactgggcgatcagggagagggaggcggcgtcgtgtgtggtcgccaaacagaacgggacgggctcttacgcatgcgtcagtagcaacagcgagtgcgtggattcacaaaatgggccagggtacctgtgcaactgcacccaggggtacgaaggcaacccataccttccaggcggatgccatgatgttgatgaatgtaaatacagcccatgtcctacgggtgccgtctgccacaacacggtaggaggatacagatgctcatgccgagcaggactcaagttttctgaacaaagcaatagttgtggccctaatatcaacctaataattggtcttgcactaagtagtgccggtgccattctgattgtcgctgcagctgttgctatctttacacggaggtggcagagaatcgttcagaaaaggcttagaaagaggcactttcacaagaacaagggtattctcctagagcaactgttctcgtcatcagcagataacaacgctagtgacggtacgaagatattctctctggacgacctacagaaggccaccaacaacttcgaccgcacacgtgtggtcggcaacggcggccatggcacggtctacaagggcatactggctgatcagcgcgtggtggcaattaagaaatcgaaactcgtagagagcaccgaaatcgagcagttcatcaacgaggtggccatactctcacagatcaaccatcgcaacgtggtgaagctccatgggtgctgcctcgagtccgaggtccctctgctcgtctacgagttcatctccaatggcacgctgtacgatctcttgcaccaccgcgaccgcgagcaagacggacgacgacgaaccttgctgcagcagctgccctgggaggcacgcctgaggattgcagctgaggtcgccggcgcgcttacgtatctccactcagcagcatccgtgtccattcttcatagagacgtcaagtccatgaacgtgcttttgaatgacagctacacggccaaagtctccgattttggcgcgtccaggtctataccgattgaccagacacatctggtcactgctgtgcagggcacatttgggtatctagatccagagtacttccacacaggccaactcaacgagaagagcgacgtctacagtttcggtgtcattcttctcgagttattgacaaggaagaaaccgatcgtcgatggtgacagcggttacaaggtaaacttgtccagttatttcttatgggaaatggagaggaggccgcttgaagagatagtcgacgtcggaattataggggaagcaagtacggaagcgattctaggcatggctcaactggcagaggagtgcctcagcctaacaagggaggacaggcctaccatgaaggatgtggagatgaggctacaaatgttaaggtgtcagcaagatgttgctccaagggcacatccagcaaagagaacaaatatgattagtcatgctattccgatgcctgctagccagcacggctcacgccaatacagccaagagcaggagtttgtcttgtcctcgcgtgtaccacgatagattgttggcagaaaatatgtgtttttattggctagaatataaaacataaaaatatgtgtttttattggctaggtggatatgaatgagagtttataaccaacaaccatggttcaaaatgtttggatgttaactatgtctatgtcgttgtctgtggatatgtttgacccggttttgcaaacagtgaagcttcaaggcttcctaataagacccagtctctgctctttgcagtgccttgcctcgttctcgacgactcctactgtattgtttcttgtgtaacattggc

SEQ ID NO: 41442 - DNA, 1168 bp, Zea Mays
tgatccaatactcgtacgaacgctgataaatcctggctcaagctttctgtcatgcatttggtgaacaccatgctgttggctccatcttcacccgactcttgggatttcttgccgacgcacggaatgacgatgaacaaggcgaagctcgacgacacacaaagctatcatcccctagttgagcattccatcgagcatcgaatatgcgatgcacggaacagtactgtcttcactatccttagcgtgatatcgaggatccaccgacggccagacgctagcggtgaattgcggatgcgacgtgacagagagacgcgacgcggtggaattggataagcgccaacgagcagggaaactttgcgcgcacggcgaacagaggagcacggcgcgatggggaattaaagccgagcgaagaaaattcgcacgcgcgactagaaggaattgggaagctacggcgctggaggaacttcatggcacgtaaacaccagagaacttgacggcgaagcgtgcgcaaggagacacgcgcgcgcaggaaaattcacggcgcggcggtgagggaaataaaaagcagctgtgcgcagggctgcacccgagcgcagggcgagctcggcgagcggggcgcgcaggagctggagctcgatcaggggcgcggctatggttggggacgccgagcggctggagaaaaaaaacttgacgcagctcgcgcagtgaacaagcaggtgagcgcgtgagcagagggaggcgcgcagggcagagaacagcttggcgagcaggaacagcgcgcgcacaggagaagccagaggacgagctccatagatgcagggcgcgatagggagactccaggagaagcagcaagcagagagagaagtagagagaggcagagagacgcggctgtgcctggcttgaagaacggcacagggaacggcggcactggagagctgggctctggacaccgagcaaggagctccacggcgcggcgctagaaacagtagagaaggcgcggcaggggagctcgcgactggccacagaaatccgagttcatcgctgctgagggagacagtgctggggaagaaaggagcagggagctccggagagaagataagcattggtgaagaaaaatccagcaacggtgtggcgaggataaggaaggaggagcgctcggcggaggagaaag

SEQ ID NO: 41443 - DNA, 472 bp, Zea Mays
atggccgtgcccagccagccggccctccccttcccccctcgccctctctcttccatggatggaggaagaatatggagggaggaagaagatggctgttttgcaaaaacacacctagcagatttcgaaacccaacaatatgaaggtagaaaacgtgaacaacttcgcaggggcattggattggaccgcactagcaactttttcttcatggagaaagtggacatgatcatagctcgtgcatggcgaaggttccttgagaagacaagactgcaaaagctgttctcaagaaagaaaactagtaagccaaagatagattccaagaagaatgatgatttagctagtgaaatagaagacaaggagctttatgttgaacacatacgtcttgaaacaatggatttaagctttgggaatttatttggcaaggtcacaattcaagagcctacatttgaagaggtgattgtcttgtatagagtgc

SEQ ID NO: 41444 - DNA, 2758 bp, Zea Mays
gaagaacagagagttaaacaaacctatccgcgctgcaacagtgcggtgtttgaatccaatccagccagacagccgagaaagcgagcagccttgttcctatacactgtagtctagtttagctcccccctcaaaccactccacccggtccgtttcccgtcccacccgcgtcagcttcgtcttgctctgagctgccggcgacctgctagctaagctacctcgctcgcacctggagcctggtggcggtggccatggcggccctgctgggccttttcttcctgctgctgctccagctcggcccctcttcttgcagcaatgtgtacattgcgtacatgggagagaggagccccgagctgcgcccggctctggtccgggacgcgcaccacggcatgctcgccgccctccttggcagcgagcaggcggccagggacgccatcctttacagctacaggcacggcttctccgggttcgccgccacgctaacggacagccaggcggcgcggctcgccgattcgcctggggttgtgcgagtggtgcggaaccgtgttcttgacctgcacaccaccaggagctgggacttcatgcgagtgatgagtccgtcgcactcggctggaatcctctcaaacagtagactcggtgaggattccattattggtgtgctagacactggaatatggccagagtcggccagctttagagacgacggcatcggcgaggttccacggcggtggaaagggcgatgcgtcgccggggacaggttcaatgcttccaactgcaacaggaaaataataggcgcgaagtggtacatcagaggctacgaagccgagtacgggaagatgaacaccaccgacatctacgagttcatgtccgcgagagacgccgtcgggcacggcacgcacacggcctccactgccgccggcgctccggtagccgacgcgagcttcaggggcctcgccagcggcgtcgcgaggggaggggcgcccagggcaaggctggcggtctacaaggtgtgctgggccaccggagactgcacctccgcggacatcctcgctgcctttgacgacgccatacatgacggcgtcgacgtgctctcggtgtccctgggccaggcaccaccgctccctgcatacgtcgacgatgtcctgtccatcggatccttccacgctgtcgcgagagggatcgccgtggtctgctccgcagggaactccgggccttattcggagacggtgatcaactcggcgccgtggatcgtgaccgtcgctgccggcaccattgacaggactttcctcgcaaagatcgccctcggcaacaatagcacctacgcgggtcaaacgctctactctggagcgcatcctggaagaagcatgagcctagtctacgctgaagacattgcatctaacgacgcagacgatacagatgcaaggatccctgaattctactctagcgaagggaaaggtggtgctttgcttccaaacaagggctcagagatcagcttcggtggcggtggagaccgtcaggaaagctcgtggcgtcggtgtcatcttcgcccagttcttaactaaggacatcgcgtcttcattcgatgttccatgtgttcaagtagactaccaagttggaacagttatactcgcgtacactactagcatgagaaacccaacagttcagtttggctcagcaaaaacagttcttggagaagtgatcggcccagaagtcgcgtatttctcgtctcggggtccaagttctctgtccccctctgttctgaagccagacatcgctgctccaggcgtcaacattttggccgcatggactcccgccgccgccgtatcatcagccattggatccgtgagcttcaagatcgattcaggaacctccatgtcctgcccgcacatctcaggagtcgttgctctcctcagatcactgcatcccaactggagtcctgctgcagtaaaatcagcgcttgtcacaacagccagcgtccacgacacgtatgggtttgggatcgtgtccgaggcagcaccgtacagccaggcgaacccgttcgactacggaggtggtcacgtggatccgaaccgagctgcgtaccccggtctcgtgtacgacatgggggcgtctgactacgtgcgcttcctttgctccatgggctacaacgtctcggccatcagctccgtggctcagcagcgtgagactgagacctgccagcacgcgcccaagacgcagctggacctcaacctgccatccatcgccgtccccgagctgaggggcaggcttaccgtgtcaagaacggtcaccaacgtcggctcggcattgtcggagtacagggctcgcgtggaagctcctccaggggtggacgtctccgtgcgcccctcgctcctggccttcaactcgaccgtgaggaggctggcgttcaaggtgacgttccgggccaagctggtgaaggtgcaagggagatacaccttcggcagcctgacgtgggaggacggcgtgcacgccgtgaggatccctctggtggttcgcacgatggtcggcaggttctacgccaattcatgagctagttagttcgtgtttgtgtggtgctgtgtgttacctttcgctcaccaccggaccggtgatggtgagacggacaagatgtaacctgctaatttgttccgattctaatggcattggtgattggttggggttctttggctagaattcgaccactgattaagatgagcaaaactgaatcttttgtgtttgtaatagaccataacttcttcttgtt

SEQ ID NO: 41445 - DNA, 444 bp, Zea Mays
gggcaaggtggcgatgcacagctagacggagcagggacgtgcgcacacgggctataggctcgccggcgccacggcggagcaggcgcgcagggaggtaatagattgcgagagggaggggcagacgaaggggaagtgctcacctcaggcagcagggtcagggacggtgggtgtggaaggatgtcggtcggcgaacggcgaagacgggcggagcgacgcctgcggactgcgcgatgtaggtgttgcgacatttgcgccactgacatgcatggcgaccggaggaatgaagtaggggagggaagaggatgcacatgcgcttggatttctcgacatcatgggcactggcagttttagcgatggagaggcggcatgagcacgacaagacgagaaagagatggtttgggaagatgaacatggctctagcggcggctgggcaacctgcccacg

SEQ ID NO: 41446 - DNA, 412 bp, Zea Mays
agcagggccggagagcagaggcagaacaaattcctccgcgcctccgatcgatcccctacttcgccgctagctgcacggccggcctcggcctgatgccgagatcttgaactcccctcgtcgtcacgtcgctttccaggcctgccatctctgtcgcggcagccacctcgacgcatgtgctaccgtgggtgggcggcgtgcgctggcgcggcggaggatatatccccgtccatgataacgacactccctaatcttctcaccagacagatgatccatggccctcgcccggccacctcttgccgtggaagcatattatccacatacatactgccggttccgcacgcgcgggtagaaggtgcagtacgtatcgtctggagacggccgggagtatctccctttggcggcggcggcgacg

SEQ ID NO: 41447 - DNA, 1944 bp, Zea Mays
gaaataattgcctcccttcattggcctcatctctccctccctccttgacccatctgcgacttcccctgcattaaggatgacctcttctctctaggtcttacaaccctagacgtggaatcaggatcagtgtgcacggggaaccagcaacggcagcacgtacgtggaaccggcaccgacgaattgcacggggcagcagacaatcgtcgcctccttgactccatccgcgaccttcctccatccgtggtgccagcaaactgcacgagaagacctaggttggaacaaaaacaacagaaggacataaccaagcaggaaacacattacatccatatgaagtgcagcgccttagacaagttatgagaaacaatgcaaggctgcaacaactgggaattcctggtttatgcgacacactgccaaaggcatattcctttcatcacaacaaaaataagccaaattttacaaataatgaagattcagaatctgattataatccttcatcaaatgacactggtgaagaagatttacttgatgatgacaatgttcagggctcgaaggattataatatgaggactacaaacatgtctaatggtgtaatcaagctacgcactaaaagacttcttgcagagaaagaatctattagaattacaaggtcaaaaaaaactgctgcccagcctaatggtactgaagtgtttgacaacaacgatggccatacccaggctacagttcaagctagtgaccctgctctatttgacgagtacacccacatggctaatggaggtcattccattgctcgccctgatgggcacaacctgatgggaaacaaaggcaaagtttgatatcaacacaaatgatgcaccagtccaaaaggcttgttcccaaatgatgaaaaatgctataaggcaacaacggtacagactaaagaaaaaattctttgatccttttccactacatttggtgacaaaaacatcaccaatcagatcgatgagtaatgaagagtggaatgatcttgtggaatattggaagagcccaaaaaggatggagacatcacaaaagaacaaagataaccgatccaaagttaaatttcatcaaacaacgggatctcgtagctatatggttcatgtagaaaatttgggagataaaaacattggtcaagagcccgatgcattagatttgttcaaggagtgtcattacagcaggaaaaagaaatgttacacatctaccgtgcaacaagctataactcaaatggataacaagcggtctgcaactacagaaggtgaaaaatcaatgtctgcaactgaagttgttgctaatgtgcttgctgaaaatacaaagaagaatttgttccttcaaaatgtggggatacaaaatgttggtcctaggtctagtctgagaaatattgaagcacagttggaagtggagaagagggcaaacagtgaccttaaatctattgttgatgctcaacatgaacaattggatgcattgttaaagcaaatgcaagaaactgaagaaaataggatcagggagcaagaggaagtgaagaagaagcaagctgagatggaaacaaagatgcaacttgtgttgagtcagattcattcaagattgagatagtatttatgtcatgttgacaactttttttgttgttgcaacaactttctttcttttttatggaaccaactataatgttttggatatgatgtggtgttctggttggatagtctttattgtttgggattgtccatgtgaagttctagttggatatttgaatttaaatattgatattttgtcattataattgttatgttatgtgctgattgtgcttttgatgtgagaatgaaattattgaaaattattatgggctgtagttataaatggtcgataaaatttctagattttagccttggcaaaaataattaaactgaataaaataaatgcacaaattaaaatcaa

SEQ ID NO: 41448 - DNA, 1565 bp, Zea Mays
cgagagttctatacgacaaacgagcgtgtggtggggaaaatgaatagagagtgagatagagagggtcggaggggtgggcagtgcgtcacgggatgggcgcaggggcgaggctacgcacgatggcacgagcgagggtgatgttgagcgtgatggcaggagcgagttgcgcgcgagagcgaattggcggagcaggcgaggacgcaagggcgaggacgcgcctacgacctacgcaagagcgagctgtggacagtgctcgtgggctgtccagcgggcggtgcgcgggtgttgtgcagcgagcggtgcacagtggttgtgcgacgacgatagcgaagtctggttggggcactcgagcactcgcggtgccttatttctatttgattttgcgcaggttaccaggtcttcctctatgatcagcgtcttgagaatgtcagcacttccatatcttggacatccctcttagtgtttgttgaaatgtctcttagaaaatgcttctccgaatattgcattacattggcatcattcaaatttcaaaggctttgaaaataaagaagtattggtctgtagactttgatttagtgtaatttcattcgtgggattctcttcgaacaaatatataggaaaatacatctctcaaacattctacaattgttttgtttgtatgtttagagtggaatgctaggataaaaatgtagatcatctgctactgatatgtgcattcgtttgctgaaatgaatgaatgaaaaaacttgttgtgattctccctctcataaataatttttttgtctctactctccgcatgcagtttatatgctccagaaccaggaggctcatgctgcagaggcagtggcgctgagaggctccgggatctaccaccgccccgggatctaccaccgccctgagcagtcatcacattcttgtcaagatctggcttggcctttctctttgcttctgcaattacgccatccttgggaacaacagacaaaagcgttgggtttattaccttcgagcaatcatggaggacttgaaaggtaacataagctaagaatggttggacttgagacattcaagaaatgcaaggaggaacaacatactgcgtagaaaaattagtccagaattcctttctcaagtcgtctggatgcaacactaagaaacaagtgcaagctgccactaagtgcaaaagccattctggagctcacagccataaaaatgaataaccagtatgtatggcagcagccttgatgagcaactcaaaaggcgagatgattggtggaggcaacaagtatcgtcagtataattcaacgagattgaagcacacagcattatccacagcaccgccattgtttgtttgaatgaaatagctagcaaaatcgtatagaccaacatcacaaatgtgaacgacggggatcaatttttccttctctactattcattacaatagatgagctctttcttatctccaagaacatttttttgtaacacaatggcaggagctctggagcccagcatccgcgactttgtggggtagctcggtgccgccgccgctggggagcctactgctcccgagt

SEQ ID NO: 41449 - DNA, 818 bp, Zea Mays
tttatcagtctgctttcgttataaggtttaaactaaggttagtagtgatgtgtaaataattgttgccctagcaacgtcactttgtggaatcagtctgttttgctttccttttaacagtggaaagctgcaaaagaggagcttcgtgatgaagaggaagatgagcctgaaactgctctagaggcattagaaaggaagcgacaaaaggaaatagaggagtggcggaaacaacagatagcttttggacatgctcaggaaaatgccaattttgttcctgttcgtggtgattggcgtgaccgtgtaaaacgcagaagggctgaagcaaaaaaggagtcaaaagatgacattgttgttgcatctttaagtagttccaaacagcataaaggatctcctgatctagcagagctttccaagggtcttcctactggttggcagcttccaagaatttgatatctattgcaagtttgtaactgatacaaagaagtgaacaatcgtgaaacactggcatacttggatgagtctactaagcaggtctattatgggaacagtctcacgtctgagacgtcctgggagcggccaacaaatgaatgaagatctataaccttggtgtgcggtcaaccgaacgatacaagttgatttgttaatgtagttgatgctgttgaatgggcagcccaattttgtttggcagccaaccccatcctttagagaagaacaaaccacacctcaccaggagatggctgattgtttcattgtcttggtcacaaggcacaaaatttttgatgggataggttttgcttggctaacctatctgcaaaaaaaaa

SEQ ID NO: 41450 - DNA, 2082 bp, Zea Mays
gcgggctgcggcctagccacagccacgtcagcaatgtcgaaagtcgaaaccaaccccactccacgtctcccccaggagaagcgaccattcaaagccgccgggagctcggcgtcaccgccgcgagctcgacacctcgacacctcgtgccgccgcagcgcttgctttcgtcccccttacgccactcccacttggccacttcagccaccatctccctgaagctagtggctaacctcctcaccgccatgggcacccctctcctcatcccccttctcgtcaccctccagctgttcactacctcctcccccgcggtcgcgtcgtcacacatctccgccatcatctcgcagtcgggcctcgacttcgccaaggacctgctcgtatcccatgccgttgcgaccctcacgcccatgaacgtgccggacatcgagaggaccatgagcatacccctcgtgggcaccgtccgcatggccgcatccgggattgtgctccacggcctcgccgtcaccaactccaccgtcgctgtgggggacgcgggtgttgtcgtggccgcctcgttggccagcgcgaacctcaccatggagtggaactactcgtatgacgcctggattgtgaccatatccgacagcgggaatgcttcggtccaggaatggaggttggtgtttccatggtcatgaagaatcagaatggatctatcaagctgtctgttacagaatgtagctgttatatggaggacttggacataacactaaatgggggagcatcttggttctatcaagtgtttatagatggtttcagtaatcatatcatatcatcggtggaaaatgcaattaagaacaaagtaatggaaggtgcactgaagcttgattctttcctgggaaacctcccaaagaaaattgatcttgatagtgttgctgcaatgaatgtgactgttgttaatgatccaatattcaagagctcctctgttgagtttgatatagatggcttgtttattccatctgatgaaactgctccgagagacatgcatcttggagatacccaatttgcattacctcttgggagctcctcaaaaatgctttggatttcattggatgaagatgtcttcaactccgtttcagctctctacttcaaggctggtttgctgcaacggatggtggacaagattcctgatcagttttttctgaacactgctagctggagatttttggttcctcgattgtatcgagagtttcctgacgataatatgctactgaatatctctgcagtttcgcctccctctgtgagaattaatgtgggtagaattgatgccacagttgacttagatataacggttaatgttttggattttggtgagatagttccagttgcatgcttatcagtgtcggttgatgtttatggagctgcagcagtatcagagaataatcttgttgggagagtggaattggactatttctcatttaccttaaagtggagcaaagttggcaaactccacaccattctagtgcagactgtgctgaggattttgctgaaaaaattgtttgtaccatatgtgaactcgtatctcaagcatggcttccggttgcccatcatcaagggtttctccgtcacagatgcatatatcctcacttcttactcaagaatgattgttagctgcgatgttgccttcattgagccagaggttctgtctcctgtccaagagtccaacaccaacgaagatttgtcatatgaggttctgtctcctgtccaagagtccaagaccaacgaagagttgaccaacgaagatttgtcatttgaggttctgtccagtttactgcttggatctgccaaaacatcgcaaccaacagcgtaaaattcatgtaaatagtaaagctattcatcagtttattgctttgtaaaatgtgtaaataactgtgtattgtgtgtgtagttttttttaaaaaagtttaccatgtccctacatgagagcacctttctttttctttttcttcagcctcacgatcagacttcttattttgcttcgcttctctatgaatataagattggcagaattcctaccagcacttagaaaaaataaagtttaaacttaac

SEQ ID NO: 41451 - DNA, 6528 bp, Zea Mays
ccccaccttcttcctcacttgccattcttcgctgacctctaaacctaaccgcccatgggcaaaggggcccctcctgccgttgccacagccacctccgtccctgaggcgccggtcttccaccccacagacgaggagttcgccgaccccctcgcctacgtcgcccgtatccgccccctcgccgagccctacggcatctgccgcatcgtcccgccgtcctcatggtccccgccttacgccctcgacttcaaggctctctccttccccaccaagaggcagcccatccaccgcctcctcgcccgccccgcccccgctgaccccgacaccttcctcctcgactatcgccgtttcctcggggcttcctccgcacatcgccgtggccgcaggaagggccttcccaagtcgccctctctctcggatggtcgcccgctcgacctctgccgcctgttccatgctgtcaagcgcttcggcggttactacggtgcctgtgaggggaagcgctggggcgacgtcgtccgcctcgttgatgataaggcgccaatgcacatatcagagtgcgccaagcacgtgcttgcgcagctatattacgagcatctctatggctatgagaagttcgccaacccacagcatgggaacaagggaaggaagcagccacggcccggatctgatgatcgaccatcggtttctcgttcacaggacgaagagagcaacatatctgttactggggagatggttgaggaggttacaggccggaaaaggagaaatttctcacgcaaggaattaggcagagggacatctcatggtcgttatggccgtgttgttaacatcactggaaataatgtggcatctgctgttgcccagaagcggacgaggaggaactctgatgctgtggttaccacagtcgatgaggtgtctgctggtgtccggaagcggaaaaggagaaagtctgatgccgcgtctaccgtgtttaatgatgaagtggatcaagtttgtgagcagtgtagtagtgggttacatggggatgtcatgctcctatgcgatcgctgtgataaaggctggcatttgtactgtttgtcgccgccgctcgagcgagtgcctccagggaattggtattgctcagattgcctcaactccgatagagattgttttgggtttatccaaaggaggaagtcctgcttgcttgagactttccggcggtttgacgacagggtgagaaagagatggtttgggcagaggaatcccagccgtattcaaattgagaagcagttctgggagattgtggaggggaaggcaggggaacttgaggttatgtatgggagtgacttggacacttcaatttatgggagcgggtttcctcgtcttggtgatacagtgccatcatctatggacctagagacgtggcagaaatactgttcaagcccgtggaatttgaacaattttccgaatctgcctggctcagttcttaggacagtcaaggataaaattcctggtgtcatggtcccatggctctacatagggatgctgttttcgtcattttgttggcatgttgaggaccattgtttctattcaataaattatttgcattggggtgagccaaaatgttgggtatggggtgcctggagcaaaagcaaatgcctttgagcaggttatgcgccaggccttacctgatctgtttgatgcacaaccggatctgctttttcaccttgtcacaatgctgaatccatctattttacaagcaaatagcgttccagtatatagcgtgatgcaggaacctggaaacttcatcatcaccttccccaggtcattccatggtggcttcaatttaggtttgaactgtgccgaggctgtaaattttgcccctgctgattggttacctcatggtggaattggggctaatctatatcgtttataccgcaaagcgcctgtcttgtcacatgaggagcttctgtatgtggttgcaaagaatggtgtggatgctgagtcacttacccatttgaagggagaaataaaaaggctttttataaatgagagaagacgtcgagtagagctttggattaatgggactgtcaaatctagcctaatgttgccaaggattaatccaaactttatcggaagtgaagaggatcctacatgcattatttgtcgacagtatctgtatctttcagcagtctcctgtaactgtaggctgtcttcttatgtttgccttgagcactggaagcacctttgtgaatgcagtccgaagaagcattgcttactttatcgacacacccttgcagagttgggggatttagtgtgcgaggtctctttggttagcccccaaagggacaatgttatgcagaatccacacttgctcaatgatgtttatgtgccgtctaaaaaggtcaaagatcactatatattatatagacagcttgcagaagattgggtttcaaactctgaacatattctccagatgccatttgtggaaaggtcttatgccactgctttggaagaagctgaacaatttctttggggtgatcatgccatggattctgtccggaacataacagtaagactaacaaaggctatgaagtgggccttgggtgttagaaaatgtctctccaaaattcaggactttctgaaagatggctgctctgaaaaagtaaattatgtggaaatagaagaactagttgctacgaaatgtgccccgtgctgtgagcctagtcttacaaaattgcaggcgtatgcagaggaagcgaaattgctgattaatgaagtaaacaatgcactatcatctttcttaacagtagacaaattggaaacattatactcaagggtttcagaattcccagttaagctaacagaatcatcgactttgttttgggagttatcttctgcaaagtcctggttgaagaaagcaagtgattgccttgaacagaataaactgggcattatcgacatagatgtcctcaataaactaaaatcagagataatacaacttcgagttctacttccagagattgatcttatctcaaagctgtggaaagatgtggaatcatggcaaacccgttgtcaattatatctccaagacttccctgatctaaaggagctggagggttttctccttgctgcggatggtgccaactttagcattccagagctgaacattcttaagcaacattactcaaattgttgctcttgggtgagtcgtgctaagaacatactcagaaaactttatgctacgagtgactatcacaatgctgttgaggagttgacagttgatgaattgcctattgtggagaaagaactaaagaggtccttatgtaggaagcaagcatctgaggcacttgcaacagtaatgccaatggaggtggttgaagaaattttaaaagaagcttcgatactacatattgaagaggagcaaccatttgatgatctgtctcggatgctcaaagaggccacttcctgggaagagaaggctagacttattcttgaacgatcagcttctctctctgagtttgaagaccatatgaggtgttcagagggaataagagttatccttccgtctaaactgcatatgaaagcagaggttgatattgctaaattgtggatagacaaatgtcaggcctatttgagaccaggctgcaataaacttgcatttggagactttcttaaagttgatgatatcaaggatttaatcaatcagcctgcaaatttgaaagtcattcttgacacttcagaacttaattctgttctcaacaatattgaaaaatgggaacacagttcactaagtctactcaataattttagagccttacttcatttgaatagtattggctctacagttgacacacttcaaagaaaattggaggagctgcaaggtaaaatgaacacagaaatagaagttggattatctcttggttttgagttcaaggttctttgggaactgaaggattcttcgttgatgctaagatggatattgaatgcactgtctctgtgctgtatgattcctttattgcaggatgttgatagattaattgaagaagcagtccaccttcctgcttccttagcagattgttctttggttacattgttgatgagggcattgtcttgtctaagaaaatcacttattttgcttcctggttctggaacatctgcaaaatccaaattggaagatgttgaaaatattctagcagaattcaaggaggttgatgttccttatcctatcatgactgccaagctggaggatgctgtaaacaatcataattcatggatagagcaatgcaataccttcttcatgctgtctgatggccagtcgtgggctatgctgcaaaatctcagggacaatgggcagtctgttgcatttgattgccctgagatggataaagttgttgatgaggttaaaaacgttgaagagtggctcaatcagtgccactgtactctacttctagatggaaataatagttctttgctctccatacttgtaaagataagaggattattggatgatgtttgcacgttatatgctgaggattgtatgaagttaagattatgtgctgtatgctcatgtgacatcggagataggctggcatctagatgtgtgacttgtcaagactggtaccatggctcctgcgtggaaaacctgtctgctactacacaaacgacaattgaatggatgtgttcattttgttcacttttacagagtgaggaccaattgaagaaccaactatctgtaaagatgtctaaaggaaactgccctgcacttgccgcacttgatgaactcatctcttctgcaaagggtttatacactgggattgaggaaattaatttgctaaaagaaattgttgataaggctcgtaacttgaatgcctacttgatgcaaattctggatgattcagactgttatcatggagaagatcttactgtcatattcaaatctcttttagttgctctcaaggcgacatcagcttctggcttgtatgatgacaatgtcagttgcagaattgagtctgttttgagcagatatttgtggaagaaacaaatacataaactattgtatggtggtaaaaagtcatcgattcaagaagtactgtgccttgatgaagaggtaataccgtttttattttgtgtaaagactagagttgtttttaaggtcatctctaggtgttcagtaatgggtaaagttgtggtgagatgtggaagtttccctatacaccatattaggccattcgccaatgagagtgatacctcataccactgtggggggctaaattcagagaaaacaaacagagaaaattccttatttgacactcaaaaaacttgctcttcccaatttagcactttaaaactgctactcccctgcatctcttcaatcatccatcttgctcaaaaactgctacaatgtccgcggccgtttcgaggagacgtgccaagaacccatgccaagattttccctacgttgaaacagaagagtggctggcgtgggcccatgttcgcatggacctattatcaatgattctcagaggcgtatcatcaagaacctgggttactccactgatgcagcaaggattgaccaaagagcacaagacatacagtgagctgttcaagacgactatcaatgatgttcatctttctgctctagcggcgatttttggctggaggacagataaaatggatgatccttgtgcctctggtgcattgggttcacatttagagatatgtgatcaagatttcttcaagttggagattagtaaaataaaggaaaccagcctgcagtggctggctaaagcagaggaggttgcatgtgattctggtgagcttgcactggatcttgtgtatggacttatagctgaaggggaaaatctctctgtagactttgagaaggaactaaagttactgagggatcgcagtgtcctctactgcatctgctgtaagcccgacgataacagggccatgattgcatgcgaccagtgtgatgagtggtaccattttgattgcatcaacctgcttggaccccctccagaaagcttcttctgccctgcttgccatccaaacaatggtgaagaatctgtatcacttgcacgctcagaggatgatgaggatagatcaagcactggagccggagctcacacgccgccggacagagtggtggagcgagacttaataaagcttcttagctgccatagcggtagctcatggagcgagagcagaagggctcctcatcgaacagctagaaggcgtagtagtttcgtcggattgttatgatgtgcaggaaccttcttagcaccgtgaattgattctttttagttaggttagaagcaggaacgatccatcatctgctgttgtaatttgtagctgttgacaggaggtagatgtagcaaggcagagctgtaagaacccattattattgatcttgtagcagtctgaggttttggaaattgtatcatatactaccgccgttcttgaatatttgtcgcctattgtttcaaaaaacgacaaataaaaaaattaaaaaagaatggagagtatttttatgctgctgctatgcacggc

SEQ ID NO: 41452 - DNA, 1400 bp, Zea Mays
gttcgatttgttattcatcacagccttagcaagtctatggagacatactaccaggagagtggtcgggccggacgggatggattaccttcagaatgtattttgtattatcggcctggtgatgttccacggcagagttcaatggtgttctatgaaaactgtggcctgcaaaatctttatgacatcgtgcggtattgtcagtctaagaggagttgtcgtcatggtgcattctttcgccattttggagaggtccctcaggactgcaacggaatgtgcgacaattgtgcttccactattgagcagaaggatattgatgtcacctaccatacaaaaattatagtttcacttcttcacgatatgcaactttaatgatcaaagagctacactactacagctggtggataagttcaagtcaaagtggaaaggtttaggtagtttcaatgaagctgttgatcttagaaaagaagaagttgagcagttgatagttaaccttatactcgacaatgttttgctgcatattcatttgtggtaccacatttttcgtataaccatataatggggaggtaggggataaatgggctttatactttgccaagagcttgagagacattacaggattggaaagaagaatttcagcacacagcatattcaaccaacgcttatgttaccttaggagcattgtggaagccagcactacaaggaaacagagtagtcaagcttgagattgctattgcttctaaagatagagatgttagatccaagggcgcaaaacgaggtcgcatgagtgatttggaagccaaactagatgaactgcgtagggatctgtcatccacgggtagcgatgccatatttccccatgcagttcttactgcgcaacaaatttcactactgagcagccagaagccaaccactccagctgagctagaaaaggttatagggaaggtgaagacaaggaagtacggcagcaagatcattgagctgatgaggtcacatgacaattcaggaagtggccgaggcaaggaggctggcgatgaacacagagctaagaagatcaaaacgaaggatgaggatgttgtttgtgttgagagtagcgaggaagaatagaatatgcccttcacatacttggctttttagtctatcatctcatggttaattattttgccaatcatttcctccgacgtcatctttctgtaatttagactttcacggattaatgcacagtcatatttcttacagagaaagcctcgagcatccttttgaccggttcatagtcttttgcttcggtagctttgtatcttgttgatgatcggattaatgtgcgaatacttgggattaatgtgcgaaaactttgtgccaagtgtttgaatgtactatacacatgctgaggaatatggtaatcggta

SEQ ID NO: 41453 - DNA, 3685 bp, Zea Mays
aaaccctagcttctcccgctctctccctttccaatgcgccccaaaccctagcttcccgcccgcccacccgccggtcatgcgcgcctccgcctccgctgtccccatggaggcctccgcctccgcccgcagatccgccgctagccccgaccccggcgcgaagaagccgcgcctcgcgcagccgccggcacgggaccccagatcttacgccgctgccgccgccgcctccaatggcggcgcaagcgccgccgagcaagcgctggttgacgagctgctcggccagtaccggaccgcgcttggggagctcaccttcaattccaagcccatcatcaccaacctcaccatcatcgctggcgagaacctccaggccgctaagcccatcgccgccgtaatctgcgccaacatcctcgaggttccaagtgaacagaaactaccatcgctgtatctgcttgacagtattgtaaaaaatattggaaaagattatgtcaaacatttctcagcaagattaccagaggtgttctgcaaggcatataaacaagttgatccttctatacatcatagcatgaggcatctttttggaacatggaaaggagtgtttcctctacctcctctccaaacgattgagaaggaacttggttttcagtcatctaccaatggattatcaggtgctgcaccatcaaggactgattctcaatcgccgcgtccatccaatagcatacatgggatacttggaagtggtgctaagacagctgtaattgctgatacagacgatgatattgagagggctaataggctaggtactgaaagaagtgcagggagacgattggatgctcctaatgctagacctaacatagagcacattcagagggacccttttagcaatcctattcatgaaaaacttgcaggtagagatgtgaggggccttggattctccaacacttcacagcaggctgttgtgggaactggtcaagttcgctcaaaacccagaggccaagatggaattgggggaccctattatgcctctggtgttgtgtcttctgaagaaaaaattgacaagcgcagcaacttttatacaagcaaggatgttcggccatcaggatctgtacatttcgatagtgctcttcttccaactcgatcaattaatgctaatagagttggtaggccttcatcaaacaaaagctggaagcactctgaggaagaagaatatgtttgggatgatgtaccctctaaaacaacagaatatagtggtacccataatataataaaaggagaatggatgtctgatgatggcaatgctaagtttgcaagcctccaaagtgctaaatgggcagatgcaggacctgtggaatgtatagatcccaagacacataaagttgataatgtgtcaagatttggatttgcagcaggtcaagaaagaagaatttcagcatacatggatcaggaagagtaccttcttggcaagcgtgaggtggaagctagaattgatagggaaattaggccctatggacaacagttcccagcagctcgagattcctctctctgggtgtcccaggaaaaagcactccccgacaatgggttggacccttgggtatcaaagttttcaaatcagccagcagagatgtccatttgtactggcaccatgccagcaagtatcatatcatctgtacctgttaggttatcaggacactatgctggaaggtcaaacctagatactacaaatagtgtgccaataagatcaactgaggcttttgggcagcagaagcatagatattggtcatcttcccctccacaagctcacccaccttcatctactgcaccctttgcacgtcagggttctccaaatcatgacgagtctgatttttatccttctggatcattttctcaattgggccaagatcctcaagaagaatatagccagagagcattgcctgtacttgctaaaggttctcatgttgtggttcacaatgatgaacttactcagggccaacctagtctacaggcaaccctgcagacacaaaagtaccctatcatacagtccaagtcacatattaatccatctgatcaattgcaagcaagctttttgtgtgaaaattctccatcactgttcagaccttccattcagcttggagaagtatctttacccagtgattccacccctataagctcagatctgacaagtgctagtaatttgttggctggtctcataaagagtgggttcaaaccaagtaaccacagtgatgcacagcctcttggtccgagtggctcacttctagtggcttctttatcacttcaaaatgctgctggtgaaaataccattttgcagacacagacaccaaacacttctcgtccaccattgccaccaggtctaccaccacctccatcaacacagagtgcagagaaagctgcgccgctctcgagtcttctcagttccctggttgcaaagggattaatctcttctcctgcctctgattcatctgatgctgtcatttcacagccaaataaagaatcaagcataaatggtaaagatgtcgcagcttcaggtgtgcctttgccagctctgaagtcttcatttggtaaggtgtcatcatctaattctgattcatctgccccaccaaacgcttcgttacccaaagctatcgaaattgagatgggtgacctcattggcctggagttcaagccagagaaacttcgcaagtaccatgagcatgtaattagctacctcgatgaccaaagccatcagtgtaaaatgtgtggtaataggttcgggcttgaagaactgagtttgcacacatcaagctgtgggccaagggagtcaaggactatctatactggtatcgcacctaagagatggtatcctagcaggaacatttacattgatggatcacatgaaattgaggatagcgctgaggcttctgatgcaggtttaggttctgcagaagtgtgtgagtttatggtccatgcagacgagaggcaaattatctgtgcactgtgtggggaaccatttgatgacgtatattcttttgagaaggggaactggatgtacaaggatgcagtattcttggattatgccaagggtaaaaatagctgcggaaacaatgttaagggtgaagagcatgtgcctatagtccatgtaagatgtatgccaagaggctcaaacgatggcatggacgttgactagaatggttgttcacagaagccaagttctcgaggggcctagaggtggatgaggctgaagctggtgtttgcacgaggcaatgtgcatcatcaggtggtctgcggcaactgggcttaagacatacatgtaagatgcttggtggaggtggcaggcgttatcagaaacaaatcttgcgaagatctgcaaccatccatggatttaaccatgccctttacaaagtgcttacacaaagaataaagccccagaggagcacttcggccatgcggttcagaattatcaaaatcttcatatttttggtctccatctgagaaggggctgggtctttatgttgatacaaagagagctttgcaagaggatgtcaaaagaatgtatgatttctttacgtggaaaaggggtatgatatcccgcatgtaagttgagcactgctgttttctgacgatacgtttcttgactgttaggaatttttgcactacgaaactgataatacaacatgatagaggcaggactaagggg

SEQ ID NO: 41454 - DNA, 1041 bp, Zea Mays
aagcggccgcgcccgggccacgcgcagcaggcggcgccggcgtgctccgtgcagggctgcgacgccgacctgtcccagtgccgcgactaccaccgccgccacaaggtctgcgtggcgcactccaaggcgcccttcgtcaccgtcgccggccagcagcagcgcttctgccagcagtgcagcaggaggagtgacaaggttcacatcgtacccacaccgcttcaccacatccatcgcaaagcccgaatggggggcggtcgtcaagacggagaccgacgcgttccaagaccagtactaccctgccgtccacctcaacggcgccggcgccggcgccctcttccacgacaaggaccggaagcacctcccattcctgaccaaccacaacaatggatgccagccattcaccgtcaccacgacggcttcctcagagagcagcagcaagcacagcaacggcaactgtgctctctctcttctgtcagacaacccgacaccagcacaggcacagacggccacgatccctaccgcgcagcccctcgtcgccacggcatcgcagtacggcaggctccctggcggcgacgacgacgacgtctccctcgccgggatgtcgtacatgagggtgggagacagccggcaggcttccaatctgacaacgtcctcacccggtcctgccactgcagctgcaacacagcagcacctgcagtaccaccatggctactactaccatgtgagcggtggcgagcagggcaacaacagcccagatggcgccgccattcaggccctccccttctcgtcgtggtagacgcgcgactttctgatgaagatcatgtgctaggataggcaggcagtcgctcttgttgttcaccaaacacatgggttgtaacactaggctcggtcatactgaaaaaccatgacaaaaaatgtccatttttcagcttgttctgataggtctaatctatggaaaattcttccctaagttactatgtgattcagaatcgtgtaaaaatgcccactttcagttgcccacacggatgagcttgtgcaggc

SEQ ID NO: 41455 - DNA, 1504 bp, Zea Mays
gccgcccccaccgcggccgcccaagctcgcacccgctgcggctacccctagccccggccccgcccgccgcggccgcccccgcccctggccccgccaggggatccacgccgaggacgactacccgtacctcatggaagaaggctgttgcaaagagaaacaagttcgcacacaaaaatcttcacatgtgaactggatgatactaggatgcagggttctaatcctttgctctggcgtgcgtgtttagccccaagttgatgtcgtcactataactgggtacgaggatgtcctagagaacagcgagatcagcctgctgaaagcgttggcccatcagcctgtcagcatcggcataactgcagggagtagggacttccagttctacagagggggggtgtttgacggggcctgcagcgtcgagctccaccatgagctgacggccgtcgggtacggctcgtcgtatggccagaactacatcaccatgaagaactcgtggggcaagaactggggggagcaaggctacgtcaggataaagatgggcaccgggaagccagagggtgtctgcggaatctataccatggcctcctatcccttgaaaaatgcaacacgctgggggcgatgtccggagagtaagaacgaggcgacacagtatggactcgatatgaccgagcaacaatatcttgagcattcgattccatggatagctgccaatgatgctgcttggcgtgcgttttgtcgttactgggcttcggctgaattcaaggcaaagtctgtgcgacacagttctaatcatggaaccgagtcatatcacaagtatggaggtgatgatcactttcgtttggcaaaacgaatggaagctagcactggtgcagtgcctagtgatgttcaaatataccttagggggcacagaggaccagatcctgcaaatctagatgtgttgtacagccaaaagcaacagattgtgtggtacacaatgtttgctaacgtcatcgactcgagccaggtgagggttcagcgtggaggttcgtcgtggtctgctgctcgtagctcccgtctctccactcaagatccagcagaagtggaacaactgcgagaagaacttaggcgacatcaggatttcttgaagcaacaagctgcgcaacatgaatattatgctacacagattcaacaacagcaaaacactcatacaacaactagcacaggctcaagggatacacgtcctggtgcccccccaccaccacctcatgttcattatccttggtcttcacctccacctacacctacatctccatctaccgaacatcaggtgctcgttagatttggcggccgtggccctgaccacgaccaggctaaggcggcggcgaggagcggctgtcgccgtgatggggacgctcatcaacgggttcgtgctgaggaatgccattcttcttggcttgatggatgtctatggattgtggttcttgtgctgctggcttgctgccttcggatggaggggaaactgttggtataa

SEQ ID NO: 41456 - DNA, 970 bp, Zea Mays
agagaacactacattttgttgtaaccagtgaatataatacatgaataataatatcagcccctctcatatctttgtgtctcctgtatttatgagttaaggagcctttggactacactcggtagcaaatggttcttaacacgttatcagcacgaatgctcttgtgatataggagtttacaaaggtaagaatctagtcacactgcaacgtgcagagatatggccataggcccatccgatcatgctgaaggtgcatagcaggcatgtatttttttctcgtttctttgttcttgattccaagtttgcaacatgcaaggcagcagccgcccctccactaagtgccgctcgagcacaggcgagcacgcgggcacaacggccatggcaccgccacacaggcgagcgagcaggtcgcgctgtcgtacgcaggcgcgtgagcacgggcccagccgctactactgcaggcgaaaccaggcatcgccgctccggcaagtgggcgcgcagccgtcgcagcaccacctctacggcacgagggcgtcgcgccgccgttgctccaaaggcgtgctgacgagcagacgcagccctgtcgtgaccgagcacaggccatcgttgttgcatacgaagctcatgctgtcgctgcgcaggccagctcccgtgcgctgccgccgtcccgcggcaagcgcgcaagccaagccactgcgccgcgagcacgaacacaggttgagccacctccgccgctgcaagtgaacatgtaggcgcggctgattcagcggtcagcgtgctgactgccaccgccgccactacatgggcacgcaagcctgcaggcaccgaccaccaccggcgacacgacctcgaagatacgcaggctggcgcgggcaccaccgctccgaaggctggctggcgcgctagcagccgccgcagcctcggaggtaggtaggcacgaccgccaccacctcaagtttgcacgaaccgaaaat

SEQ ID NO: 41457 - DNA, 1355 bp, Zea Mays
gtcctccctgctcctctgcagcgtgcgtcccggtgccctatctactccagccatggcgtgtctctgctccatctccctcgcggcgccctttccaggcgtgctctctgctgcatctcgccatcgacgctggtcgagtcctcgtctccaacttcctcacgctcggctcccaggttttccacttcaccggctactgctcttcctggtcgtttccatgctgcactctttcatcacgtcgctcctcaagctcgtcctggtcactgtctttagctacaccgtcgccttcattcttctcgcaagctcctcccaatctgtcgtccctgtctctgattcctggcgtcattttccaaaccccgctgctccgcttccctctctcgtgctcgccgtcccacagcttgaagccgacgaggtggcctcagcacaagcgcgcgtagccttgacagttgctcatggtggcaatgttgtgtgtttatctaagaaagttgaatttctgaagcttcaaaatggcagtgacattcgtggtgttgctgttgctaggattgaagaatccagtcactcatggaatcactgctgctagacacgatatcctacaatttggattggcttcaacacctgcaatgttcaatagtacacttacagaagatgagagtagtcatttacctgttgttggagtcataatgatgacatattattcagtcaaggggagattccaagagtggtggattgaggagaaagtgaagctcagttcaaagttcgtcaggtgttcgattgaaggcttcaatcagagactgtcgtcattcttgcaaatattaagtcaagttgattatgcagccccttactcctcgtcgtcgatccacgccgcgtccacgacatgcccgtcgatcccgacgatctatcttcctatgcgcgccacttgcgttgagatccgaagctcccctgtcatgctcgaccctggaggtctccaacttgtcgacatcccttacgtcgtcttaaaatcccaagagtttggataaaccaacaaatcccgtgtggtgcttgccgggtgctccgcaaaaaggtcttaacaagaatcattgacgtctgcgcgaatttatggtcaatatggtacgttaaataactacgtgatgcggggaaccagagctgagtcaaccccaagatgatgtagcgggtggactactacgcatggtgaagctgatggaccaacctgaagatggttaaatcaagcaagtgctcggtcgagggatgctcgtcaagtggacgtcgtctaacaaacactaacctagtgttatccaggtaagccccggtgcatttgccacctccttgtgttttaaaatctttatcaccttgtttgatgcatt

SEQ ID NO: 41458 - DNA, 3017 bp, Zea Mays
gtcggttaaatttgttgtcaaaaaacttaaacgacaatcttagggagtaccaaaaaaatcaacacacgtgcatatggaatgtaattcttgaattaaaattttgtcaggtttgagcctcagttactgcccacagtcgccacagatagacctccagtaccagtcacacacgtgacactcgcaatcgcaaagtcgcaagcggatcgcaaactcgcaatcaaggctgctcccctccgtctccgtgttcgccactcggttcaccgcccgccgccgccgagacctcctcctcgccggctactcctgaccccacaaaggcagcgctcggaggtggccctctgtcgggtggagtggtggacacatccgcgcccatggccaacggcggcgctgcggccggcaagctcaccgtcgccgagaccttctccaacctcagggagcaaggcaaggtgcgtgcgtttgagacctcacgttcgtgcttcgcttcgtcgcaacccttgcggggcaattcaccccagcacccacatttctcttgctgttcctgattgagtcgcagggttggattgctggcgccgtggtggccgatacccaatgttggtcccggttggttgcagggaatacctaattttggtcccatttagttgcaaggaaatggattagggctttggaacaatctgtgtattccttgcatgaattgtccaaatctagtggttttatgtcgagtacacatcgtgctggtttaatttccgtaaaaatctagcctgatcttgcacaatagtggctgctggcttgatgtgcacattgatccgtctttgtctttaaaagcagtgtttatattttaggtgccacagtgttcattctcaacaaaggtaactgcattaagaaatttgtatccagagtagcgataacatgctaagcagagaccaatctttagttgcagggatcttgcattgtactccattccaaattctgtgttattttgtcttttctagatgcataccttattagcttttgttatgcactttgatatatggtatgtctagatatatagcaaaaactatgtacctaataaagcaaaaacgacttacaatttgcaattgaaagagtatggtgcagatctgccttaaatcgtatccagcagttcactcatatggttacccaaaatactgttttacactgttcgcagagtgaagttttaatatgggtgtgagcatgggtaaaagtcttagttggcaaatagtcttttggtgtaaggatttagaaaatactccagtgaacacgtgggaaaatcacttgtcagagagggagggtggagccacaaaccaaggagccgcacagatgccgacatcaatacacttatgttgtggagaggagccgcatctcgtaatgtctgattttgtttagatgccacacagtagtatcccagccatgggcgcatggatgggggatttggacccagggtcaatggaatttaattcccagatttagggggtgtatggtacggatccaggttccagctttaatttaaaggtgtagtttataatagaaatttaaatagttttaaaaatatttttaatctaaataataaataaaatgacttatctaaatgacttacgggggttcacaacttcaaaactatacgattttatggaacacctaatggcctgctctatcaattccactaagaccccgtttggttccaattagtcctaggactaaagtttagttctaggactaaactttagtcccttcctgtttaattctagggactaaacaaattctaaagtaattaaatatagtgtccaaagactcaaatacccctggaatctatagcaacatggacgtgggataagggcaatggaggaaaaaaatatggtttagtcccctttagccaccacttgagggactagggactaaactgatttagtctctcctttagtccttatgtatggcaaattagagactaaaagagactaaaacgaagagactaaaaattatcccttgcaaccaaacaccccctaaattttctggagctggatcaatcccagacagcaccttaatttaagttgacagtctaacctgggaaattttcagagtgcattcatcccgttcataactgctggtgatcctgacctggtaaccacatcgaaagcattgaagattctcaattcctgcggttcggatgttatagaggttggcgtaccatactcggatccactggctgatgggccagttattcaggcttctgcaacacgggcgcttaagaaaggcactacacttgattctgtcatagagatgctgaagggggttacacctgagctttcttgccccattgttcttttcacatactataatccaattctgaaacgtggtgtgggaaacttcatgtctactatcaaacaagctggcatacatggacttgtagtgcctgatcttcctttggaggagacagcgttgctgaggagcgaggccattatgcacaacatagagctggtgctgcttacaacgccaaccacgccgacagatcggatgaagggaattgcacaagcttcagaaggatttctctatcttgtgagcgctgtaggggttacaggtgcacgctcaaatgtaaacttacgtgtagaacaccttcttagggagatcaagaaggttacagacaaaccggtagctgttggtttcggtgtatcgactccagagcatgtgaaacagatcgtgggctggggagcggacggtgtgattgttggcagtgcgattgtgaagcagttgtgtgaggctgctactcctgaagagggtctggaaaggctcgaggagtacgccaggagtatgaaggctgctatgccgtgagctgatctcactccccgtcacaggcaagcatgaagtgtatctggatgcgaagaagcagtgttggtattgaactgtccatgtacgagttgtttgttgctgtgctttggcggggtgaacagctaggattggataggctctagtgccagccgagccgccagggcccatgaaaagtcaattgtttg

SEQ ID NO: 41459 - DNA, 1777 bp, Zea Mays
atatgtttagacctgacacacttcaaaagtttgtagatcggcagtctgagttagtccgagtttaaggatagaaaatgtattttgtcctctttgggttagaaccagcaagaggagtcgtgaatccgtgacaaccggcggcggcgagggaagaatcgaagatcgccgcagccgcaaggaaggaaaccgagaacaactcaatccgctggctatggcgttgctgatggagcccggcgctgagcccctgactgagagcgagcaggccgacctggccggcatcgccgccatcaaggagtcggcggcgcgcgaatacaaggagcaggggaaccagttcgtccggatgggccggaggcactacgccgcggcggtctcctgctacacgaaggccatcgctcagatggagcccctctcctccctcgacgcatcagccgctgctgacgcctccgttctcttcgccaaccgagcacatgtcaacatcctcctcggtaaccaccgacgggccctcgacgacgccgagcaggccatccgcctctctccctccagcgtcaaggcgtactaccgagcagtgaaggcggcgcttgcgctggacttgttaacggacgcggcgtccttctgcaggaaggggctcgaacaggacccccctaacgaggaattcaagaaactgttgtcggaagtggattcaaaactgagagagcaagatcgtcagagagcgaaggttgcacaagcaatcgccaaagccaaggatcttgctgctgctatgggaaagagaggggtgaaacttgggaaggcagcctatcaagagctgacaggggtaaagaagccagtgctggatgagcagggcgtgctccactggcctgttcttctgctctacccagaggtcatgtcgagtgacttcattgaggattttccagatacagatactttctcgccccaccttgatgtcatgttctcagaaacttctccaccattgccatgggatgataaccatgtttacacaagggactcaatcgaattatattatcagggtggttttggcaaacctttgtcccgaagtgaggtattaagatatcttctagaaggcaatgtagattcgaaggcgcttccagatagccttcttgacggggaagacgaagaacatgacagtaccaaatgtaccactgttacatcaactgatagctccagtaagtggatcaaggtaaaagaaggaaaaacacttcaggaggtgctgcaggataaaggctatattgttcctgcaattcctgtgttcttcgttgtttcaaggaagtccacattctataaagacttcaaggctggaaactggtctttgccatgaaacagaaccggacactaaggttcagcttaaatcgatctctgagacgggcagcggatatggcaagaaagcagaagatgccctcttgtgatcatggtcatttggtttaaaaggagtgtgcttttttcagtgtctgcagactgacagccttttgttaccgagatagacagaaaagacgaggcaatgtaatatgaatttttatgtgaaccgattcagcgtttagcatggtcgtagtatgttaagtctcggttgaaacgttggtgtttctaacggatggtcttgacagtagtgtctgagcagtgcgacttgggtgactcttctccgatcgagcaacaaacttggaatatatgcttgccgctgggagccggtggcctgtacacgcgctatgtacgaggcaagagtttccgcctggggtcaggattagtgctgggaatctgggctgggtttttc

SEQ ID NO: 41460 - DNA, 1131 bp, Zea Mays
gccggccgcccctgctccctaacctagcgcgcgccctcttccagctgaagtcgccgccgccctctgcttctctctctctctcccacccgcctcctctctcctccccctcgctcctctctccgatgcgcagccgagcagaccgtgccgaccgcgcgaccccgcggccgcgacaccgacgcgccagcgccctgccatgtgcgcctgcagccacccggagaccgaccgagctccctgcgcccatcgagccgcccgcgcgccacttcctccatggccacttcctctctgtcacttcctccatggtcgaagtctgggagcggcaaggtattggccccctacccttacaactcctagagctctaccctcacgcttaccttagggagacgggatgctttgctcgcctactggaggacatgctctgatggtgtttcctctgctaccatttttagttcttgcttgtttcaattaggcatattaggttttgtactaatctgctagggaatctgtggatgtagttaaatattctgtggatgtagttaaatattctgcaatgataacaagccaaatatactttccacattatgcaaaggggctcacggcaagtggcaataactttctgcaattgttccttctttctgtcaagttatttcaattgtcttatgcaatgattctgcaattattctgcaattgtttctgcaagtggcatatatgtggatgtagttaaatattctgcaatgataacaagccaaatataactttctgcaaaggggctcatgagcaattgtcttaactttctgtcaagttcaattcacctattcctcatcaatttcaccatatatgtcaatcattgtcataacttacacctctttaagcttaatgccaagcagttcagcctcggttaaaccaattgtattttttattttagagcttagttcactgataattgttttgttttttctctgaaaaattagagaaattaataacttattttcctgttcctacaacttaataaagtctcattacaagtcatgtttttaagcaggctatgcgttctttctccgagaaagatattctttctctaattgctaaacttgtactaaggggtgttgaacaaggtgttctggacaaagaaag

SEQ ID NO: 41461 - DNA, 4237 bp, Zea Mays
tagccatcgaaatgtcatgtcaatatctaattttctccagtatatacttgttctatctgtcgatgtggtcatattcttctgtgatggcccatgtatgcgctctttccatgcaaaagaaggaagtggtgaagactcctgttgtgttacccttggatacactgaggcagaagttgaggcaatgaaattatttctttgcaagaattgtgagtataagcaacaccagtgtttcatctgcggagtgttggaaccttcagatggagaagcagccaaggtgtttttatgtaacaatgctacatgtgggcacttttaccacccgaaatgtgttgcccaacaacttcaccccatcaacattgatgaagcctcagaattggagaagaagataacagaagggttttcatttacatgcccaattcactggtgctttcattgcaaaggtttggaggatagaacacaagaacctttgcaatttgctgtttgcagacgctgtccaaagtcatatcacagaaagtgtttaccaaggttctgttttagaacaagctatttttcttgtttttttaaatactttaagtgtataatctcttattcttcaaatatttggaattatttcacagcgaaatttcctttgacgaaaatgaagaggacgatatcatcatacgggcttgggaattatcaaaaagaattttgatatactgcctggaccatgagattgatagtgaacttgagacacctgtcagagatcatatcaagtttccaaagattgaaaaaccacttcaatttgtaaagaagggatctagcttgttgcctaagaagaaaaagaggacttacagtgagacagttcttgagcaatctcccaaagatactgtgaaaaggaaaagcaaggttcacatgctagaaagggaacaaaacaaacaagacaccagagaagtttctgcaaagagtttcactcaaaaccttgttgacacacctgtaaagaaaaaagccaagttgaaagagaaaatacagttgccgtatgtggccaaggatcattttataagcagtccaaaatctgtgaaagagcaagaacaagagttggtacctttgcccttatctgccatcaggaagagttcatttcctaaagtggacagtgaaactgaaaagaggtgagtcacttgtgtataaagtacttggggaatgaaatctccagatcatatggtatgtaactttatgtgcaaaaattgctagcattcatgaatttcctacaaccagacctgatgaggcattgaaattttgtttgtttgtcaggtctgatgaggcattggattttttttgtttatcatgttgcagaatcctctcctatactcatgttttaatcttaatgccatgtatccacattctgtatgataatgtaaacgatgtttgaagtccgcatactgttatatgactatatgagatcttctatttgcagggtgattaccatattgggaaataaagtgtcttcattgacaataaaagatgtaacgaggaattgcagtttgccatcaactcatgtatactctggcagattgactgacaagataccactgggaaagattgaacgttctgttcaggctgtagaagcagctttaaaaaagctggaaaatggaggtagtgtcaatgatgctaaagcagtatgtgaacctgaagttttaaggcagcttgcaaggtggcatagtaaactcagagtgtatatatcaccttttattcatggcacaaggtacagttcctttggtagacattttacaaaggtggagaaacttgttgagattgttgatagacttcactggtatgtggaaactggtgacatgatagtagatttctgctgtggggcaaatgattttagccgtcttatgaaagaaaaactcgacaaagttcagaagaagtgccatttcaagaattatgatcttatccaaccacagaatcgcttctgctttgaaaagagggattggatgactgtgcagccaaacgagctgcctcatggatcccaactaattatgggtcttaatcctccttttggagtcaaagcaagtcttgcgaacaaatttattgacaaagcattgacattcaagcctaagctcattgtactaattgtccctaaagaaactaaaaggttagatcagaggagaacaccttatgatttgatttgggaggacagtgagtgtctttctggcaagtccttctatttgcctggttctgtggatcttaatgataaaatagttgaagggtggaatgcatctgcgccacccctctatttgtggagtcatcctggttggacaaagaagcacatgcaagtggctgaagagcatggtcatacttgtatggggaagatagcttgccatgttgaagagagtaatctatcagatgacctgtccgtgaggaaacaatctgatgctacaaacaaactgaactcgagatcagggaaagagactccattcaatgacagaatgtccaatctacttgatgatggttctgctaggaagcaagcaagatctgaagaagagaagagaactctagggaagatagaacaccatgtgaaaaaggctaatataccagataacctcccagtgaagaaagaacctgaagcttccagcaaagtcatgtcgcattctggaaaagatagaaagattggcagatacaacaggaggagacatgacaacaggagcagcaaggggacacctgatcacacagagagcctcccccctgaaaagcaagtggaagttgcatatgaggaaacaagagttattcctagcaaaaagattgctcataatgaaaaaaagagcgcgcagtacaactacgagcaaactgcagcagggatgccaaacatgaggtctagaggaggggattctgacatgagtatctcacccccagtcagttgcaatgctcgaagcaaacccatgagctattccctgacgagaccaattgaacacttggatacgaatgctcaccttttggcagaagaacctagtgactctgtgctcaatagggttccaaatcatgacagttatttggcaatcaaagaggaatactgtgatggatttaagaggaaaaatgatcctatcttcagtcacattgatgatagctcaaggatgaggggctccagcatcgaagaagtgaccaagccgtatattactgctccaaacagtgatccgtggtctaaaggagatggcagcttttacaggcatccgagctcagaagatttaaacgctaatgctgatgtgcttatgccaggatacagtgcaagatatggacaaattggtggtgacagtaacccacaagctagtatggtcccactagcaacagattcaagactgcatggtggaacggttgctgataattacctctcggcaagatactcccttggatcttcaggtgctcgcgttagccaaccagctccaactgttcccccttttgggctctcaggtgcaagttcacaacgaggctcagtaatggacaggtattcgtatgggctttcgggtccgactggaacacagcgctcagttattgacaggtatgcgccgtccctcgatggaacgaacacaacaagatcgaggagctccttgcctgagcagtacccgttcggacaacctggctcttccggtggcgggtggcctcatcactgatcgctggaacttggtcctcagatttgaccagcaaaagtgcaaccgatttcttgagtccggtggagcctacaacctatctacggcctaactttttggatcctactagtcgtttcttcctggcgccttcgacgaagacatcacctgtgtctaccaatacagaagtgtagacttcaattcctacaaatacagaagtgtaggcttcaatcctattgtttgctctggatttctgtttatgagcgtatttacaagagtatgtttggtctatgttagtatattaggaatacaattccaaaaccgttgtaccgtgccaaagtttaatactatacgtttgggtctgtcgatgagaaaaaaggacgagtgggtgagaagatgctgccctccgcagaactcgatcaggccggttcctctgcgcgtcctgctatgagaggctaacctgagcccgacagaaccggcttggtcgatttgggacctggtaggccggtatttttttattgaagtgtaactttctaaattaggtcttgttggtttgcgttggattgcgtccggaatcgtttcaagtttatataaattagagaagcaatccggttagaaatcgtttcgat

SEQ ID NO: 41462 - DNA, 2284 bp, Zea Mays
gggccggcgtcgagtggagatccaatcgaaaatcgaactgacttcatcttctgttggtcaacaggagagcccgttgaaatcctggacctctcaattgtccttttctctctccccgcccaccttcccctgttctgccgcctccccagtccggcgtgcatcagcagcgacatcagagtcggcgatgggaggcgtcatcgacgttctcgtccccttatgttgatgaagtggtgtgccgtggagattccttgaccgatttcttgccggtaagacggagtctgccatctgcgtggctggtcatcgcggtgagcaaggaacgacgaagtgcgcccctccgcccttcggctcgtcgttgtgccttgcgtcgtcgggtggagttccttcccctgcttcaagctaattcggcagttataatagtaggaggtatgcgtgctttgtagaatcatacagatgcttgttgaacatgtgtctttgtttctgtgtctgtgtcaacaagatgttctagcatcaacaagatcctgattagcatgtcaacttccagacaaaaagagtagagcagcaaaatggagaaccatggaaaattggatgggtgggatgaagttctggaagaagaagatgagttagcgagtgtatgcaaatatcctattagcacatcgtacctttcttatggaacaagcagaagtatgttatctcatttccagcatctctcctcttagagagaatgttgtgagcaaaggaggactttgttttgttaaactataccaggtggacaatctaatgcgtgtcctctgtttccatactgcagggggcaaaagtgtaaagaagcctagattctcattacgaggatatgattttgttccattagatgttaagactgataacttgtgcattggggagcaagatggttcttctgcagtgccatcaactaaagcttcacaaaccatggtggctgaacggttggaaaacgttgaggaacaaactgaagatttggcaccagagtttgcccttccacccaaagcaaatactttagtttctgagctgctagataatttacagcgtaggggtggttcttttgtcaggacaccatctttggtgtgtgttgtcttgcattattttttcatattggagttcttacataacacttatattacttctgaatattttaatctagttgcaccaacatgctccaagcatatcaatcagggagcaggaagtttcatccggagtgccaccaactaaagcttcacaagctttgatggatgaaccgtttgaaaatgacaatggacaaactgaagagttgccatcagagctcccctgctcgatcaagagaccaaaattttcagttgcagaacttctagaagacctacagggtagaagtggttcttatgttgagacagcatctttgtcacaccaacacaccagagctaaacattggaagccaaagttcctttcttccgagaagaaaacaatagctattctaggagacaggagtattgacagtgaggaccccttggagcatgtaattgacggaacatctagcgaggaggaagatgctactcaaaaccacttgagtttggtgaacaaagatgagaaccagcaaactatggctgacctatttcaagaagtttttaatccaacaaacatggatggtgccatgaaatcaatgagatcaacaggagctggtaactatggaagaatgcaacagattatgcacatggagaaagattggcatgtggaattctcgaggcagtatagcagagagcacaattatgtcaaggtcattggaaggaaagctaacagtctgcagctgcatgttccaggaaaagggcaatgatgccactataagtaatgcctcagcagacggcaccatggatgaaagcagaactaggaggactattatcttcagtccaaagatatgtaacaatgtagatcttctggttggaaacataattcatatcttcccaccatggaaggaagttaaaatacaagaagagcatgtgattatttgcacctacttctcgcaccaccaccggacttgatactcggagatatttctgtgctagctgcaaagctagaggcagaccgccagcataaccgttgctgacagtttaatgttgatgtactcgcagggtctattctgtttgttttgtaatcacaagtgtactggctgcaaagctataggcagaccgcaagcataaccgttcctgatagcctaatgctgatgtacttgcagtctctcttctgttttacaatcacaagttactgaggcctagttcggattctctaa

SEQ ID NO: 41463 - DNA, 382 bp, Zea Mays
caaacccccatggaattggattttcctccgccaatgccgccctcatcacggggtatatagggctcatgctactcctacaaccgagcgccgttctagcagagggagagagaacccgtgagtttgcgcgccatcgccggtctttgggtgcgtcgtcgcccagggctcagaaaaggactggtgcgtgaggcgtctgctttacgctggtccgtgcggtcgcgatcgcgggcggagacccgagaactcgccggtgccaagttcctggggtgcgtgggcgcgaccgtaggcgcgtcgcggacggcttcaacctcacctaagattccggtgagtactaccccgcgctcaccgctaatctgtattcgaagaaaagaaaacctcagttact

SEQ ID NO: 41464 - DNA, 3512 bp, Zea Mays
ctgtatctatgatttgtgggtctgagtttaaaatagagaagttcacaactgagagtgacaaaatagcaaattttcctttaaaatgaccgcgcgttttttttaaaaaatgaccgcgcagtagctttggctgaaaaagaaaagaaaaataatcttccttcttccacgatagtcgatacggagcacccataacgttacttttattttgcagttcagcggttcagccccctcaagtcgaggtcgaggtactccgcctccgcaatgccgcccccttccgcctccgcctccccctccgcctcccgcttcgcgaagcactggatagctgacgtcctcgccggcgaagaatccgtcgacttctccctgctcaaggttctggtgggggcctcgtcgaagcccctcgcgggcgccccggaggccacgcgtgagcgggtcgcgctccggtccattcaggaggtgttgtccgtgatagccgctgggggtgatgccgcggccacggcgggggtgcttagtgttgatggcgcccggtcatgcgaggatgggctgtttcggcttatcagagaggttggaagtttcggagaattggagaaggatttgcttccacctttcagtcaagacatccaggaaaatatatgtaccaagaagtttacattaccaggaatttctttccagttgctagaaagagttgagccatggatagcatctatggccccacaaccccaaatggaacacaatggcactgaacaatgtgtcaatgatcagtcactgcgcagcagccacggatgtgtaaatatagagaagcctgtgttccatacagacaatgctggggttcagcaagagaccatggcagatgtagtcaatgaaagtgaaacaggaaatctccaaaaggatccacctgcaccaacttttatttttcaccaaccgtgtatgcctgaaagcaggtcttacgtccctccgcaagaagatactatagatgctgttggtctaggcgctaggtcctcagaaaggagtcctattgtggaggggaacatgtccgttggatctgtgcttgcttcagatggctgtgatgtacctttgcagggaagcattactgagccctttttccagcaggataaacatgaccatactgttatagttggaccaaaatcttgtaagcgaaaatctccaattccatcttactgtgctcatggagatggggcagatggtggtggctccagcaatcagtcatctaaggtttccattcgtgaaggacctagcactcatgccacagtaacttcaggttttgacagaatcagcgatgtcttaccaacagatgcacctgaatctgagcatttgcctgagtgcataactgcacaggatacaaccatttcacagcctgacagcaggaaagctcatttgagtgctctgcaacaggaaaggggtgagaaagtaacccaagatctggaagatatctctgcaaatattgggtcagtggaaaaggaccatattcatggggatctgactttgccatctgccagtgttttactttctataagctgcaatggtgctaatcaaggaagtaaatatgaaaccaaccttcaaccagggactgctacagaggatatgatggctttcgaagagcagaatgcagacaagtctcacttagaagtcagtggtatcaacaaggctaatcaagctctgcatgatgatggcggcgtcatgaaaaataatacagtacatggtgggttgattgtgcagactgctccagtgtctcaaaattgcaatgtaaccttacatgataaaacttcagagcaggaaaatgaaaagaacattcaaaaagataattgccatacttatgttccaggctcttctcaggataggggtggagaaagtgcaaagaaaacaacaaatgaactaaagtctggggacatttcttcaaaaatatgtgttcatttcaatgttcaagacatcaatgatactctggaggacttgtctcaacaaggtttgtgcataaaatgtggtgaaggtggtcagttgttggaatgcaatggctgttttttagccgcccatagcagctgttttggttcatcggcgacatttgaaggaaccaattttttctactgcccggtatgcttgtataagaaagccactgaagcatataaaaaggcaaagaaaacatattgtgaaactaggaagaaccttgttgctttccttggcacagcacaagccaccaatcaacctgacaaacaactaaatggagctcagccaggagctgccaacagagatgaagagcctcatgatgagcaacattctaaagggtgtggcgcatcaaaaggggcccatgaaaatgaagtatacaatcttgctcatcaggatgaagagcatcatcagcagaggaagaagcagaaaataaatgctatagtgctccagaataacaataaaacaccagttaaggatccagagaaaaagcagcaagcggtcaacgaagaagctcgcaaagaaggtggtaatgacaactcatctcatgaaacaggagcttcatctccgagaagatgtgatcctccttcgaatcaggacgttgaggctgaccaggacgatagccttacaacttctaatcaatctggtggttctgatgaaatagaagctacatcttctaatgactctgccaagcaatcatcacccccttggcgtggtatgggacacaacaaaaaaggattgcacgaaaaggagccagctgtatcaagtaaatctggaaaaggtattgggaaacaggatcaacatatgcatacttcacgaaggaaaaaaaaaatgcacacctgcaaaagcgctattccaatcctgttgcgccacctggaagacgcaaacaactctgttggacagaaaaagaagtagctattttgagggatgggatggcaaaattctctccacataataatggtaaaataccatggacccagatactgcaatatggccgtcgtgtgtttcacaagacgcgcctgccatgtgatttgagggtcaagtggaggaacatggagaggaagaagtgggcaggctactgatgctgatctgatgccgtcgacatggaacactgatgtggtactagaacatagcggaacactgatatggtactaatagcgaatggaggagggtttcttctaaaatagtattttgatgcacagggtgggcatccttttgtgactggttgtgtcaacctagacctactatgcccgtgagagagattgctaaagagtcaactttcttttggaactgaaccctgcactctagatgatgataacatccggtagctgtgtttcttaaggcaactgtgtgtgtttcatccggcagctgccagtgcctcgcccaatgttctcgaatgaggtaggcgtcgtatgctctaaacacatcacgaataatttcttccagcgtgttttcttcttcttcatctttttagtgaacgcaaccttgtaagtcacgttgcagaagctataaaaacagttagtgaaacctttaaccgtagaaatgaaataccctataagcat

SEQ ID NO: 41465 - DNA, 311 bp, Zea Mays
ctaatattattaatttttagaaccataagcagaggcattgggttcaccttggcatcaaaaaaatattttcgtactatgtaaaacatgttggaaaggaaaacttattgcttcatcctgtctcatgtgtacctggcatgctagtaaccagcaagatcttccttctgtatgtttttatcttgtttttcctgcttttccaagtgcattggctgctgcctgctcctaggttgtcttctgctttgaaattattgacaatctcccgttctatccatatatgttactacaactgtttcaaagctatcttattcgttacg

SEQ ID NO: 41466 - DNA, 2181 bp, Zea Mays
tataagtcagttggagcttctacgacgacacgacacgacagagcatgatgccctcttggcacaatcaataatagcatatagagtcaaccagtagcagcctgccactactaccatggccgcggcggcaaagcatatatagcacaccagcaggccggccgggcagagagctcgacgaccggctcggcaaagtcgcgcgcgacgatggccgtggcggcggccgagaaggcggtgaggtgcctgggccggggcttcgacatgacctgcgacatgaggctcaagtactgtaagcacgccggcgggtgcctcgtcgacaggggcggcgtcgagacggcgccgctcgccgtgcccggcgtcgggaccatcggcggcgtgcccgtcgacgttaagtgcggcaagggcgaccgcgtccggatcaagtccggcgtgctcgagttcaacaagatgtcggagctgttcaaccagcggagctcggtggaagggaagatcccgtcggggctgttcaacgcctgcttcgacctggacagcggcgcctgggcgcaggacgcggccgccacgaaatgcctcgccatggacggctacttcatctccctcttcgacctccgcctggaccgccgcccgctcgcgctcgccgaccgcgtcctccgcgacgccccggccgcctgggaccccgccgccatcgccaggttcatcgacaagtacgggacgcacgtggtggtggggctgagcgtgggcgggcaggacgtggtctacgtcaagcaggacggctcgtcggcgctgccgccggcggagatcaaggagcatctggacaggctcggggaccagctcttcaccggggcctgcgccatgcctcccctccgctgcaagtccaaagacaagctcaagatgccggaggccttcaacgtgttcgatgcccagctggtggcgcagcagcggctccaagcagcagggatgatcaccacgctggtctcctccaaagagggcgtgacggtgatatactccaagaggggaggcgacacgacggcgggcagccactcggagtggctcctcacggtgccggcgacgcccgacgtgatcagcatcgaggccgtgcccatcacctccctcctcaagggcgtgcctggcgccggctacctttcgcacgccatcaacctctacctcagatataagcctcctgtagctgacctcaagtacttcctggatttccagcatcacaagatgtgggcgccggcgctcggcgagctgcccctcggcccgtgctccaaccggcagcagggctccagcccggcgcttcatttcagcccgctcagtgccaagctctatgtcagcccaacacaggcgattgtccctaagttgccggtcactgggatgcggctgcacctggagggcaagaaacacaaccggttagccgtccacctgcagcacctatcgaccaccccgacgttcatcgccgccgcgcggcacgacaaaccgccggtgtggcgaggttcggacgcggcctccgacgacaggtactacgagccggttcagtggcggatgttcgcgcgcgtgtgcaccgcgccggtcaagtacgacacagggtggcgcggcgccggagaccgcgacccgagcgcggcctgtgtcgtgacgggcgcgcagctccacgtcgcggcgcacgacgccacccacgtgctgcacctcaggctcctctacgccgagctccccggctgcgccgtcgtgcagtccaggtgggcgcgcggcgtggcgaggctgtctgggaagtccagcggcttcctgtcgccctcctcctccccgggctcttccggtggtggcagtggcagtggcggatcgcagaaggagaggcacccgccggagggcgtcgtcaacatcaactccggcgtgctcgccggcggaccgcctgtgcccgtcgccgcgcagaagatgctcaggctcgtggacacctcgcaggtgaccatggggccgcaggacagccccgggtactggctcgtcaccggtgcaaggctcgacgtcgacaatgggaggatctcgctgcacgtcaagttttccctgcttgccccggcttcctgacaggccgttcatgcatacagagttgtacagctttctgatgctcagaactacgcaattgatgatggtgcagggcgaatgcattttttttttgagaaaaaaggtgaatgcaactacgca

SEQ ID NO: 41467 - DNA, 2627 bp, Zea Mays
aagagaagaaaggaaacccgcggcgctctcgaattctgatttctgcagcctgcgccgccctttgctttgctgccgattcttgggaagccctgtacctgactactggatccactaccaagctcttcaagttccaggatccattcctctttgtcgggcaagagctcttggcctctgtggattatcagcctgattcacaactctctgcaagaattcgagcgcagatgggccaagaaagcgcggctgacgcgattcctggtttgatggtttctgttggtgtttcgggctaacagactctcttttttttgtttacttcctcaaagttccacttcaacatatggatccgggcttcccgagttggaatctgatcactcgcgtcagtgcttcttagcttccttcatttgccgtcatggaggagcagaactcatggcttattaggaccaagttctcccatactgtctacactagagtggatccacgaagagtagcagctgttgctccggtgggcaaagatgtggtgctgccttttgctccgcttagtaaggatgttgagcggaagctgcagaaaattttcagtatgaagaagtctgcatcgatgcctgttgatcgggatgatgaagacacagggactgcattcaagcactgcgctagcttgccgctagtccggtcctcgcctcagcttgatagggacaaggtcaacaagcccaggagggcgggcctggaggttcctgcaagccccccgatgaactcagagagttgcaagacaccaaaggcaaggagcctggtcaagagcccaagttcgatgatgctcctgagctacttgaacaaggcaccatcaaaccaaggctacagtccgcaaaaggcttatggatctcggcccagaccgagatcaaagtccccccttcccagtatcgcgccttcggaagtgttcagggaagcgaagtctaccagcaagaggtttgcaagccctcctccacagcgaagaggatctgaaaagagtatctatggcaaatcgtttgctagacaggtgtcggatattggtcagagtcctgattggtgttcaactccagtggtatctggtaagcacaagtctcaaaagaatagtgcttggtcaaggaaatccagcggtggaaggaggattagcgcagtaaaccctgcggatgatcgtagggcgcagatggttagaatgaatcaggcggtgcagacgacgttcgattggacgctcgatccatccaagctgcttgttgggcacaggtttgctagtggagcgtgtagccggctgtacaaggggttctatgatgagaagccagttgcaattaaatttatccgccaacctgatgatgacgacaatgggaagacggctgcaaagcttgagaagcagtataacagtgagatcaattcgttgtctcacctgtaccataggaacgtgatcaagcttgtagcagcctacaaatgcccaccggttttttacatcatcaccgagttccttcccggaggctcgttaaggtcatacctaaacaacacggagaaccacccaatccctctggagaagaccatatccatcgctctcgacatcgctcgaggtctggagtacgtacactctcaagggatcgttcaccgcgacatcaagcccgagaacatcctcttcgacgaggactcgtgcgtgaaggtcgctgatttcggtatcgcctgcgaggagaccttgtgtgacgtgcttgtggaggatgaaggcacctacaggtggatggcgcctgagatgatcaagcagaaggcgtacaaccggaaggtggacgtctacagcttcgggctggtcatgtgggagatggtgtccggtagagttccttacgagaacctgacccctttccaggtggcttacgcagtggccaacaggaacttgaggccaacgatttctccagaatgcccatcggccctcgggcccctgatcgagcagtgctgcgccttgcagcctgacaagaggcccgacttctggcagatcgtcaaagtcctggagcagtcccactccatcctctcgcagggtggctgcctcgacgcgcagaagagcggcacctgccaggaccccaagaagcggctcatgcagtggatccagaagctgaaaccaacgcatggcgcctgagtaaccgagttcttacaggctatagcatcgtttcagccgcagttttttttttcttttctgtctagttgggtatgctctcagtagtttagacctgttaaggaggatccttggtttaaggaaccagcgttctaaggcggatgctcgtagctgtgtgaccaaccactggtctgcgagcatagatcttgcagtagctgtacatggttatgcttttgcatctcgtctccccatcatgttaaaacttccctgcaggttgttctcatggatggtaccatagtgtgtgcggtgtgcggtgtgccccctcactcgttgagctgaaagcgagaggaaaatcatacgacgcagagttgactcctgaggccgtctttcgggaaagggtcgtatgctaacacaattattgcgcctttcccttctattgttagcagctgccctgccgtgcttattgtcatcatgatgctgatatctgagacagcaacatctgatggctgcttgtctaaag

SEQ ID NO: 41468 - DNA, 1663 bp, Zea Mays
ccctgctgtgcagctctagctccggcgtccctagtcccagccatggaactcccctagaagctgctcggccgaccactcctactccagccatggtcgcgcctcccgtgctccggctcgccggtgagccagttttccccatctccccaagctcgtcgccatggctgaagctccctggcgtccgacctggaagctggagctcctcctagagtttgtcgatgccttccctatctccagccctcactagtgcgcggtcctctgctcctgcgcgcccctgcttttctccctcgcagtgcatctccatggccgcggtgtccctccctgctcgccgtgtccctgctggtgctcagctccagtcaaccccgcgcgcgctgctccctgcactcgcatggtgctcgcccctgacttcccatggccgaaactcccagcgccgtggcactccctctggtctgcgcttcctttagctcggccaggcgggacatcgttccctgctgcatgctcctcgttcggctcggccacaatctggccgtcattctcagctcgctgcgcgccctactccactgtgtcgatctgcctaactccctgagtccatgcgcgcgcgcggacccggccgttaacgtccagtcatgtgttcgttttcccagctcggattccgccagccaccattgtcctatccgcgtcagcatgtgatcgtggttgtgttcgtcgaattcgccaacgctcggttgccgatttgactgttgtcgctgcgtgctcgccgagtgtcgtctgttgtacctcagcactcgtgcttgccgctggcttgcgttaacgctcgagcgtctgcttgttgtcgctgtggtgcactcgctttttgtccatcgagcttcacgcatgctcgcgctaacctgctcaaccccacctcgccagctcactccagactcaatctcgtcgtcgttccgtgcatcgtcaagaaatacaaagcgtcgggtgaagacaaagctagcagtttgatattcaccaagtgcttgacaaaacgctcgaacaagtcatcgatcgtcatcctcgttgtttacgcctttccggagcgtcaaacactcaacaagaaccgtgacggtgccctctgcacaggggcggacggtccgcgcgcggggccggacggtccgcggtctggtgcaaggcgcggtggtactctctgcgcaggggcagactgtctgcggcctgcggccggacggtccgcggcctggtgcgcggctagggcttttctgcctgacggccggacggcccgcgccctcgggccatacggtccgcgcgtacgcagaggcggcagaagtcgtcggcggcgcctggatctcgctcccgggagggaccccgtcggggaggagagatcctaggtggtgtgtaggcttgggctggccgacctagactcctctaatcgacgtagagccgaagagagacgaagaatttaagaattggatagctaaacctaaactagactagaactactcctagaataaaatgtaaattgtattgattgaaggttcgattgattgttacaaatcggccgtagacctctctttatatagaggaggggggctggaccctttacacgactggattccgggttaatttcgcaaatctagccaacaaacatagcaaaaaactcggaaccctaaactgctctgcg

SEQ ID NO: 41469 - DNA, 2623 bp, Zea Mays
cacgcgagttatcccgtggttcggccaagtacaacacttgcctacgccacgttgtggcatcccaatggacgagggttgcactcaacccatttcaagtgatccaaggatccacttgaataccacggtgtttctttcttttcactatatcccgttcgcgaggaatctccacaacttggagcctctctcccttacaaatgatgatcacaaagaagcacatatgtaagggagggaaaagcaacacacacaagtctcaaaagcaacagctcaaacacgcacactagtcacaacttgagctctaagttcacacacggagttctcaactcgagaggagctcaaattgctatcacaaagaatcaaatgcgctagaatgaagacttggtgcttagagatgatcaaaggatgcttgttgtactccttcatgcgcctaggggtcccttttatagtcccaaggcagctaggagccgctgagagcaatctaggaaggcaattcttgccttctgtcgactggtgcaccggacagtccggttcaccaccggacactatccggtgcagatctctttcctattctggcgcagccgactgttgacgatttggagccgttagcgcaccggacactgtccggtgcacaccggacagtccggtgcccccttctgaccgttggttcggccacgcatcacgcgcggattgcgcgaccgaccgttggctcaccggacagtccggtgatttttagccgtacaccgccgttcagttcccgagagcggccagttgatcagcgccagcctggcgcaccggacactgtctggtgcaccaccggacagtacgatgcacccagactgagcagcgccttggctgctcgagccaagtcttttctatttgtcttttctctgattctagcacttagacaaatatgttagtacacaaaaaccaatgtactaagtctagaatcatacctttgtattgatttgcactttgtccaccatttgacatagttaacacataaccatttgtgttggacacttaatcaccaaaatacttagaaatggcccaagggcacatttccctttcaatctccccctttttggtgatttatgccaacacaacaaaaagcaacatatagaagtgcaacatcaatgcaaatgagaacaagaatttattttgattcaaatttggcatatttggatcatcctttgccaccacttggtttgtttttgcaaatcacactcaattttctatctctaagtcaaattcacttgttgaggcatagagaaaggttttcaagagaaattgatcaaatattcaaaaactcccccttttcccataatcaaacattctccccacaagagaccaatttttgacaataagagaccataagagtattttgacaaaacaaaaactccaactctactattttaaaaattctcaagtggtagctgatccatttcttgctttggccttattttctccccctttggcatcaagcaccaaaacaggatcaatcttggcccttaaaccccattacctcaccaaaatcttcaacttagagtaaagaggtaataagagcatggaaatgaacttggagtttgttaccctctcatcggagtgcagtggaagtctttcatggtccaagtccatctttccctttcaatccaccttcgagactaaatcacgcaagctcaaacacatggttagtctcaaagggtcaagttgtagcacatctccccctaaatatgtgcatcacttgtaaatggacttgtgaggtccggggagtgcttgtacaacttgagcaccataaataaacaacaaaatgcataaggaacatgatcaaggcataaaacacatgtatgttataaatcaatccaagttccgcgaatctaagacatttaactcactacgcagcctgcaaaaggtcttctcatctaaaggcttggtaaagatatcgactagctggtcctcggtgctaacataaaatactttgatatctcccttttgctggtggtctcttaaaaagtgatgccggatgtctatgtgctttgtgcggctgtgttcaacaagattatccgccatgcggatagcactctcattatcacataggagtgggactgttgggaccatgcttcgtcgccgaaggtcctgcaagaagaaacaactttggctaaagctgcttatacatgatgaccgaagctaccactcatgaagcttcggtgttatagcatgtccgaagacgaaggatcgaaccgacttaaagatagaatgaccttttagcccataagggtctgagtcattgttgtaaacttttataaggggcattattgtaatttcttacaggctgtgtcctgtgtctataaatagtgaacagtattcctttactgttcacgcattcctgtaattgcaaacgcattgctcgggaattattatctgtcaaggcaaaggtacaaatgtacttaaacactatgttctgacattttagattcatataataaaatatgtgaataatgttacctatttatgatacatctatctttaatgtttcatgttttatatattatttcatattattttgtaagtctaatcacgaaggtacgaccttcgtgatattctactcatggtcttcgttcgaagttca

SEQ ID NO: 41470 - DNA, 1296 bp, Zea Mays
cccttcctccatggtatagtgttactaggctgtccatctattgcaaaaatggattactaactcaataatggctatatacttaagcctacaaacttactaagtaataaatatatactaactaataactatatagtaaatattaaatgaccaaatcaaacgaaattacataatctatgaataatgtaagaaaacaatgtatacctgagatcgcgtacgagtccagctaacggtggagaaggtcaagtcggaagaacacctacgtacaaaaaaaactattgtcaatacaaaatttgacagcacctcccctataaagtgatgtttatagaacctgcaaataaacgacaacacgatggttgccaacacacaaaagtgcacgatatctacataacaaacaatatgttgaacatgtaatattaatgtgctaaacaaaatgaaaactatataatcactaacaatttactaaacactaactatatgttaaataacttaaagaacatgccccgagcttaagtctgattcctctgtttagcttgtttgggttgctctgatctgtgatcgaatagcggggcgtttgaaagtttcgatctcggcaactacttgggcaacaaccagttacctatttcagagaagttctctctctatgtgatcatccagctctcctggacaaaagtgaaactcatgctttgtacagactactcaatttaagttgatctgaggagtcaagatttaatgaaacggcgagcgcggtggggaataccttctgagttctgcgcggcggggaacggcgagcgcgacagggaacggcgagcgcggtcgctgagctcgctgcgcggtggccggagctcggtggccgggacagggcgcgcgcgcggccgggacagggcgtgcgcgggcggccggaacagggcgcgcaggcgcgcgcggcggccgcgcccggtatggtggcggtggcttgcggacgacgagcgcggcgttggctagcggcgacaatggcgaccggcggctaacgggcaaacagagaagaaacagagaagaaatggagaccccgagcttaagtcctagctcggcgccaagatctgtggcgccgagctaggcgccacgcggacggccacgtcagcgctgccagccttggccacgtcatagctcggcgccacagcctgtggcgccgagctgtgttagctcggcgccacaggctgtggcgccgagctaagggtccaaaactgagtttaaaatttttttaggtctaaacgtgattttacttcgatttaagggctaaaatacaaaaaattcggccga

SEQ ID NO: 41471 - DNA, 1735 bp, Zea Mays
gaactcacggacagtattcaggagaactcacgtttctcttggtcagccagtgacatcaccaacttgttgacggtagggagagcaagttcttcggcgatttgagaagaaacgaggagcgagagagcgtgggtgcgtggggggtgggggctgcgcccggggcccccggatcacggaatcctacccttaccaaccctagcctccattggtcgccgtctcgggccatggcagggccggcgccggatcgggccgccctgactgtgggtccgggcatggacatgccgatcatgcacgacagcgaccggtacgagctcgtgcgcgacatcggctccggcaacttcggcgttgcccgcctcatgcgcgaccgccgcaccaccgaactcgtcgccgtcaagtacatcgagcgtggcgagaaggttattttaacaccgacccatcttgctattgtcatggaatatgcctctggcggtgagctttttgagagaatatgtaagaacgtgcgattcagtgaagatgaggctcgctacttcttccaacaactcatttcaggagtaagctactgccattcaatgcaagtatgccaccgtgatttgaagctggagaacacacttctagatgggagtgatgctcctcgcttgaagatatgtgacttcggttattccaagtcatctgttcttcattcccaaccgaagtcaactgttggaacacctgcttatattgcacctgaagttctgttgaaaaaagaatatgatggcaagattgctgatgtttggtcatgtggtgtaaccctctatgtaatggctgttggtgcatatccttttgaagacccagaagagcctaagaacttccgcaagacaattcagcgcatcttgaacgttcagtacgccattccagactacgtgaacatatctccagagtgcaggcatctaatttcgaggatttttgttggtgatcctgctatggcaagtccttgtagttataatcgtgctttgatcctgatacacgaataacaatcactgaaatccggaatcatagttggttcctgaagaaccttcctgctgatcttatggatgatgatagcatgagcaaccaatatgaggagcctgatcagccaatgcagaccatggatcagatcatgcagattttaacagaggccaccataccacctgcctgttctcgcagtataaatgttctagctgatggactggacatggacgacgacatggatgatcttgactccgattcggatcttgatgttgacagcagcggtgagattgtatacgcaatgtgagtaacatctcagtaaccatctcagtatctcaccagtcaaccaaagaaccaatcaggcatgggacaccctgatgttgtacactctgccaaagacctagcatccttttgtaaaatatctccctgtagttttctcaaagaagcgcaagcccaacctgttctggggaacacggatgctgtagtcaaactggggttattcagattgtaaaactggcctcttgcttcctgcttactctcaggcttcgacttgtgtgttgctgttgaatatgtacttacaagaaacttctacggagtactcatgttgatctgttcgaagctaacatcggaaagagcatttaaaaattctgttggtggctttcattggaacttgtgcctgctaatgggttgggttgcaaggctgtctagaacaggtcacataaaatagggatttgtactgtagataatactattt

SEQ ID NO: 41472 - DNA, 2292 bp, Zea Mays
agaacagatttctaccaccttcagcagtttctgcttggaagacagagggatatgcctcaggaaaccatacaagtacttgatgttgtcctcagggagtcgccgtcttggaattatgtcacagtgtccagatcctttttctctacaacttttggtcacagaggtgatatcggtgaggggcttgagtgttggaggggttactaccaaagcctgcgcccaacacaaatgggcctttcgctgaatatagatatttcagcaacatccttttttaagcctgtgacaattatcaaatttgtggaggagttcctgaacctgcgtgatacatctcggccgttgtttgacagagatcgtgtgaagataaagaaagcattgcgcggtgtccgaattgaaacaactcaccaacaggaccaaatcagaagatacaagataacagggattactcccatccctatgagccagctgatattccctgttgatgataaaggaacaagaaagactgtagtgcagtacttcttggacaaatatgactacagattgaagtatgtctcttggccttgccttcaggctggcagtgattcacgacctgtatatttgcctatggaggtttgcaagattgtagaagggcagagatactctaagaagcttaatgacagacaagtgacgaacatacttagagcaacttgtaaacgtccccaggagagagagaagagcatacgtgatatggttctgcataacaagtatgcagatgataagtttgctcaggagtttggcatcgaagttagcagtgatctagtgactgttccagcccgtgtgctgcctccacccctgttgaaatatcatgactctggtagggagaaaacttgtgcaccaagtgttggacaatggaacatgatcaataagaaaatgatcaatggtggaactattgataactggacttgtttgaacttttcacgcatgcgccctgatgaggtacaaaggttctgtatggatctgactcatatgtgcaatgccactggaatggttgtcaatccacgcccatttattgaagtccggtctgctgctcctaaccatatagagaatgctttgagagatgtacacaagagagccacccaaatacttgcccaacaagcagtgggaaatcagctccagcttttgattgtaattcttcctgaagttagtggttcttatggtaaaattaaaagagtctgtgagactgacattggaattgtatctcaatgttgcttgccaaagcatgctagcaggccaaacaagcaatatttggaaaatgttgcactcaaaatcaatgtcaaggttggtgggcgtaacacggttcttgagcgagccttttcacacgatggtataccttttgtctctgaagtcccaacaatcatctttggcgcagatgtcacacaccccccaccaggagaggactctgcatcatccattgctgctgtggtggcatcaatggactggcctgaaatcaccaagtacagaggtctggtttctgctcaaccacaccgacaagagataatagaagatttatttactgtcagtaaagatccacagatggggcacaacgttaatggtggcatgatcagggacggtgtaagtgaaggtcaattcagccatgttctccttcatgaaatggatgctatcagaaagaaaaggcatcacacaaggcttttccctgaggttcacggaaggcgtgatatgactgataaaagtggaaacattcttcctggaactgtggttgaccaaatgatttgccaccctactgagtttgatttctacttgtgtagtcatgctggcattcagggaacaagtcgcccgacccattaccatgtgctctatgatgagaacgaatttactgctgatgcactgcagtcactgaccaacaatctttgctacacctatgctcgttgcacccgtgctgtatcagtggtcccaccagcgtactacgcccaccttgccgcattccgcgcacgctactatgtggaaggagaaagctcagacggtggctcgacacctggcagcagcgggcagacagtagcccgtgaggggcctgtcgaggtgcgtcaacttcccaagatcaaggacaacgtgaaggacgttatgttctactgctgagctgctccaagtttagcattcaagctttcttattttcgtaacttatccttgatatggagctggttgctcttattttcgtctctcggtattcggagtagctaggctatgactggagcatggtcttgaaggcctaacactctgtttggatgaaatcaatgcaaatactct

SEQ ID NO: 41473 - DNA, 255 bp, Zea Mays
cgttaccacgtccaacagggacacgagtcagggactaggccatgccatcgcagcatgctcgaccagccacaccatctaactgggcactggagcatgcagaacgcacgtcgagacggggccgacagaggatcacattcgaacacggcaacaacaatgtgaggggagctacacctttcatttagggccgctgctcctaaatctagtaaatcacacatccaatctacctacaaatttcataccgcatggattgattcg

SEQ ID NO: 41474 - DNA, 2255 bp, Zea Mays
atttccaattgaaactacagttaccctggtctgcgtgtggcatatatcgatgaagtagaagagagagaaggtgacaaggtgcagaaggtcttttactcagttctagttaaagctctcgacaatcatgatcaggaaatataccgtataaaactgccaggaccagcaaaattaggtgaaggcaaacctgaaaatcaaaatcatgcgatcatttttacacggggacaactatttggaggaggctttgaaaatgcgaaatttgctggaagagtttaatgaaaaccatggtgtccgtcaacccacgattcttggagtgcgtgagcatatatttacaggaagtgtgtcgtcacttgcatggtttatgagcaaccaggaaaccagctttgtaacgataggacagagggtcctagctaatccgttgaaagtacgttttcactatggacatcctgatgtgttcgataggatttttcacattacaagaggaggcatcagcaaggcttcctgtggtataaatttaagtgaagacatttttgctggtttcaactcgactctaagaagaggaaacgtcacccatcatgagtacatccaagtgggaaaagggcgcgatgtaggtctcaatcaaatttctctctttgaggcgaaagtggcttgtggaaatggggagcaaatactcagcagagatatatacaggctcggtcatcgatttgatttcttccggatgctttcatgctattttacaactgttggcttttatattagttcaatgatggttgtgataatagtttatgttttcttgtatgggagactgtacttagcattaagtggactggagtttgcaattatgaaacaagcacggatgagagggaaccgtgcacttcaagcagctatgggatctcagtctattgtgcagctaggtcttttgatggcattgccaatgtttatggagattgggctagaaagaggtttcagaagtgccctgggggatttcataatcatgcaacttcagctttgttcagtgttcttcactttctcccttgggaccaaatcacattattttggccgcacaattctccacggcggtgcaaaatatagggcaactggcagaggttttgttgttcgccatgtaaggtttgctgagaattacagaatgtactccagaagccattttgtgaaaggacttgagctgatgctactgctagtagtctatcagttatatggcgatgttgctacagattcgactgcatatatacttctgacatcatcaatgtggttcttggtcatcacttggctgttcgctccattcctcttcaatccatcaggatttgagtggcagaaaatagtagatgactgggatgactgggctaagtggattagcagtcgaggtggcattggggttccggctaacaaggcatgggaatcctggtgggaagaggaacaggaacatttgctgtccacaggtctactgggccgtttctgggaaatcatactctctctcagattcttcatattccaatacggtatcatataccacctgaatatatctgctggcaacaaaagcatctctgtttatggtctttcttggctggttattgttgctgtggtgatggtcctaaaggtggtatccatgggtaggaagaaatttagtgcggatttccagcttatgttccgacttctcaaattgttcctgttcatcggatctgttggaacactggcagttcttttcactgttcttcatcttacagttggtgacatattcgcaagcttccttgcatttgcacccacaggatgggccattctgcagatatctcaagcaagtaaaccggtcatcaaggcgtttgggctctggggatccgtgaaggccctctctagggggtatgagtacctgatggggattgtcatcttcgtcccggtggctgtgctggcatggttcccatttgtctcggagttccagacgagattgctttttaatcaggcatttagccgaggccttcaaatctctcggatcttggctggcggcaagaagcaaagataatgttaattcaggaaacattcgtacacacgggttaggcaagggattagctccaggatgattgttgtacatgggtcatgggtgtttgttggaggaattgtaaggctgctgatgctttcagagtcttggctgtatacacaaggctggtttttctttgtcatttccgttgtgtgtcatacgacattgttgcctcttggctcttggtacatacctaggctatatattttca

SEQ ID NO: 41475 - DNA, 339 bp, Zea Mays
ccccaatcaaccatcctagtttccacctccactttgacccacggtcagtcgccagcctaaggcccacctgacttgcttgaccatgttccctttccatcttcgagacctagacccaacgccagtcatcaccaccatcgccaccaggacgcaattcgcaagcggcaatctccaacttgctgaggtcaagcgtccaagcggtgtgcggccgatcagtcgtgcatggcgatgagtggtgcacgatggcgaggcggctaccgagaggcacaacagacaacatcactataacactgagctggcatggctatcgctagaagctggcacgacaacacaaggatcggg

SEQ ID NO: 41476 - DNA, 1561 bp, Zea Mays
cgcctctgcgcgctgctctgtgcgccgagtgcctacgcggccgctgccacgactccatagacggcagtattattagtgtccggcacttgaagcgacaaccactacgaccagatcaaagtcctgaggatttgcaacgttggaagccggctcccggacgcgcaactgcgcggacttttcctgcaagcttcttctgcaaccgaagcaactcttcaatccagaagtggctgctccagggcggcatggcgccaaaagtctccagcccgttcctcctcggcctaccctgggtcgtcgcgcacgttggatccatcaaatcttccaatgcacgctgcgccggcccgggtcgtcacgcaagaggtaatgcgacgccgacgcgcacccattaaaagcaacccgtcacttagcgtctgagcgtgcgtgccagagcagagctcccttcttgctagcgagtagcgactagcgagaggtcgccggcgcggcaaaaatccgaaaggcgagccgagatggcggggtcgcagtcgcaggcgatgctggagaagatggagctgcggcagagctaccgcaacgtctggcacaccgacctcaccaacgccgtcgccgcggacctcccgtggtgctgcctgtctctgtggtgcggcccgtgcgtgtcctacatgctgcgcagacgcgcgctctacaatgacatgtcaaggtgttctgctgcttcggcaactcggtagcttcaacccggttcctgctgcaggacgagttcaacatccagacaacgcagtgcgacaactgcatcatcgtgcgtagtcgcggccggccacgcgcgcctcgatccgtctcctgatgacttgatctgatcttccgaatcagctgactcgactgacgctactcatcttcctcgtcgttgcaggccttcatgttcttcctgcagcagctggcctgcatctgctccctggtcgcctgcatcgtcggcaacagcgagctctcggaggccgcgcacgtcatctcctgcatgtcgaatctggtctactggacggtttgctcgtgcatgcagacgcagcacaaggtggagatggacaagagggacggcacgttgaacaccatgtctgcgcctccgatgcagcagatgtcgcgttggtaggtgcgagtgagattatgtgccgacctcgatacggaggagggtagctgctggagctggaggctatcagcaatctcctactctggttaggacggtccatttttcagatttgggtgagataccatggctagtgtgtaaaccatgtcccgtttgtttgggcaaattttcgtgtttaatgagttgtgcatttttcacaacttctgttatacctcttacggctagatgccgaaattagatatcctaataatttattttaattgactacaatagtatgtgcacttgtattttatttagaaatgagacgagagcaacgagtgtagaggctcaacttatcctccgggtgctttgtgcctattgagtatcaaatttggcactttccctactattttttttatctcttcggctctacatcgtttgaaagcgttttggcacaataca

SEQ ID NO: 41477 - DNA, 1886 bp, Zea Mays
tgaataccagtatccgcagtgtaaaagcttcattttattacaaaaaaaaaaatcttcgtcctccccgcgaagacgcttcccgagcttctccttcgttcctcctcttccccgcggctctcctctgccccgcaccggcaccgctagggttttgccgccgacctctcgctcgcttccgggctccgcgaggcaaccgtccggaccggccggtcgaaatggtggatgtggaggaggtcgggaacaagatgcaatcgcagatgcgcctgcacgcggagccggatgacgccgccgccgacctccccctcccggcgctcttcgacagggcgtcgcggcttcacgccctggcctccagctccgccctcgaccaggatgggatccgcaccggggttgagctgctgcggcgctgcgacgagatggtcggcaggctcggtcttttctcccccaacgagaccaaggacgacgtctccaccgcaaacctcaagtacctactcgtcccatattaccttgcggaaatgaccgagaagatggcgcaggaggatcggatcccggttcttaaggcgtcgcaggaccatttgaaggttatcaattgctctatcacattgtttcagagttcattgctctatgcgaagtactagagcttattccagaggatgagctagaattgtctaggcagaagcagtctgatactatggcaaacagaagagcacagaaggttgcccggttcaaacgtcaaaaggctgcagaaacaaagctccaagagatcagagagagaaaagaaaggcgtggacgctcattgagagcaactgctttgtctgccccagttgaagctggagaggaagatgacctggaggatgacggggaggaagaaagggaggcttggttagctaccatctcattggctatctgcaaggcttttgatcttctcgacatgttaaagaaggaagaagaaatgcttctagctgtaaaggaaaggaaggcaaaggacgggaatgcatttgctcgtgaaatgctcgacgaacggacaaagaaggctgaagcatggcaccacaaagctgccagtcgtgtggcgtattccaaaccagccgatccgatcacctgtgcaacatttgctcaggatgtcattgaagggagagcgagcgtttcacaggcccacgagcacaaacaccagcccctgatatttggacctgcaagccttgttggcggcggtctgaccagtgaaagggaaagaatggcagcgcaagtttttcagcccagttacaggatgccaacaatgagcatagaagaggctggcttgcgcgagatgaagatgatggagaggtggcaagagaggaccgccgagatgatgagagaagcaaactccgcgtggcacaagggcggcgacagcagcagcagctcgatgccgcaaggggagggcggggacgaggatgccgaggaggccaaggcacgagcgtgggacgactggaaggacgacaaccctcgcggcgctggcaacaagaagctcacgccctgtggctagactgcaaatcgaagcacgctcgctgtgtgatcgtacggtgtttgactcgaccagtatttagtttgtatctgacgatcagtgtatttattatataggctgcttctgtaacagtgtgtttatacaccatccactgcagcttcttcacacaggtgtttccgaagttaactgggttagacaaactgtgttgtccaagcaagagtatctaacaaatagctacgtaactacttcatccgtttctttttagttgtcgttgatagttcaaaccgtttctttttagttgtcgttggatagttcaattttgcactatccagagacaactaaaacgaaacagagggagtattaactaatttactaaaaatagataatagttaaa

SEQ ID NO: 41478 - DNA, 1948 bp, Zea Mays
tctccacatccatcccctccaacgccaatcaactccgtcctaaactacacaatccgcggcaacagaaaaaggcgacaccagaaacagaagcaagattccctccgcttgatcgccctgtgaatcgacccgactgagtggctccatcgcccgatggacccgccgcggcccgcggccggccgctccggcggggtcggcactggtgactcgccggtgagttgggacgacgacgacgatgactgcagcggcggcggcggccgcgtcgaaggcttggcgggactccacatatttgaccaagaggcagacgagccaccagccaaaaacagcatggccaacagacttgatactaactgcattccagttgctaacggatgcaacactggaacctccgtagagaaggaacctgtaaacggcattgacccacctcatgagcatactggcatctgggtccctgtttctgtcccgccaatgacagcgcaagaccgcgaggagtggcacagggggtttagttgcaatggcaggaacttcccagaagaagagttcagctgggagctggatgaagagaacaatgagatgacaatgtgggatgtgtttgctgatatggttgttgcggcaaaagataaggtggtatcttctgcaacatatgattttgggagatatgggatgtcggtggtgtccaacttttttctccaagaggcttggaacgatatggcacaaacacttgcggatgcaaacactggtattgtgaacgagcttcttgacacagagccaactaagtggttgcctgacagtgctgctacctcttgcatgctctgcggcgtgcgatttcatccaataatgtgctctcgccatcattgtcgtttctgtggtggagtattctgtaatggttgttcaaagggtagaagcttgatgcctccaaaatttaggactgcagaacctcagagggtttgtgatgtctgcggagtacgtctagagagtatccaacctcaactgatgaatcagatcagtcgggccacacaacttcctactcgagatgtcacagacctgagtaccttgaggtcatggctgaacttcccttgggcacacacaatggaatatgaaatatacaaggccacgaattctttacgtaattactataaggtgggaagactgaaaccagagaaggctatccctgatactattcttagacaagcaaaaggtcttgctattgttactgtggtgaaggttgggatgatggttacatacaaacttggcactgggctagttattgctcgaagggtggatgactcctggtcaccaccttcagcaatctccacctgcggtattggatatggagctcaggctggaggtgagatagctgattttatcattgttctgaggaacacggatgccatcagaacattcagtgggaaggcacatctgtctgttggtgctggtgttagtgcttctgctggccatgttggacgtgcagctgaggctgacttccgtgctggtgacggtggttatgctgcatgttatacatacagctgtagcaaagcatagtatcaactcgagatactgagaacgctcgattttacggaggtcctgtcaaggcatctgatatccttctaggatcaatggcgaagccgcccgcagcctctcctctgtacaaagctctgtcagaattgttcgacaagattgggaaataatcctctttcttgcataccttgcctcaccttgtaaatacattcgaatttgcgtagtgaattggttggaagcaattgcataactgtacagtaaggccattcttcgacacatgagaaggctccctgccttcaccagtgtttagtggataccagcaacaaaaccactttgtacatactctacattggattgacagtcgtatcaagatgtgaaaaaaggtctgacgaatatgattattgattcgaattacatgggtagtacagtaatt

SEQ ID NO: 41479 - DNA, 2165 bp, Zea Mays
ggaaaaaaatccgaaatggccgctagtggcctcggtctctccacctccttcctccccggccacgacaccctcctccggcgccggcgccggcggccggcgggccacgccgccgcgtcgttccggccggtgacggcggagctcggcggcgtcgcgacggagctgggccgccagctggtggaggcggtgggcgtggggctcccctgcaccgtcatgcagtgcggcgacgtcatctaccgcagcacgctcccccggaacgacgggctcaccatcacggcccccggcctcacgctcgcgctcgctaccgtgtcgtacctctggtccacgccaggcgtcgcgccggggttcttcgacatgttcgtcctcgccttcgccgaacgcctcttccgccctaccttccgcaaggatgacttggtatttgggaagaagctcggggagggcgcattcggggtcgtgtgtaaggcttcactggcgaaccccgaagcggcgaagaagacaaaagcaaaaggtaagggagctgaagaatattggcttatttggcgttttgaaggtgaggatacactttatgatctcatgcaaagcaaggaattcccttacaatgtggagacaaaaattcttggcggtatccaagacttgccaaagggaatagcgagagagaataagatcattcaaacggtgatgagacaactcttatttgctcttgacggacttcattcgacaggaattgttcacagagatataaaacctcaaaatgtgatattttcagagggatcacgaaccttcaaaattattgatcttggagcagcagctgacttacgtgtaggaattaactatattcctaaagagttccttttggatccaaggtatgctgctccagaacaatatattatgagcacacaaaccccgtctgctccttctgttccagttgcaacaactttgtctccagtcctgtggcagctgaaccttcctgacagattcgacatatatagcttgggtctcatattcttacagatggcattcccttcactacgaactgatagcaacctcatacaatttaatcgccaactgaaaagatgtgattatgacttacaagcttggaggaatctggtggagccacgagcgagtgctgagctccggaggggctttgacatcatggatttagacggtggtatcggatgggaactcctcacctcgatggtccggtacaaagcacggcagaggaccagtgctaaggccgcattggcacacccgtacttcaaccgtgaagggctccttggcctctccgtcatgcaaaacgtacggctgcaactgttccgcgcaacccagaaggactacagtgaagcagcgcggtgggttatcggcctcatggcaaggtcaggaactgaagatgtgggaggctttacagaagcacagcttcaagagcttagggaaataaaaccaaagaaaagcagcacccagcggaacgcgcttgcctccgtgctgcgcctgcagaggaagatcatgagaacgatcaaggagagcatggacgagctcaacagccagcgcaaaagcatctggtggagccggtggatacccagggaggagtaggccggccgcaggcgcacatgtacatcgtccacttctgtatgaaacgtcacctattagcactggtgaattggtgatagtataatacactatcctacttactgctttgtacatgctgacgactggtgagtaaaattcatctgaaaaaaaaatcggagtaacgcgatgtatagctgtaaatattttgcattgaagcatcatgatttttgagatcagctctctgcttgaatatccaatcaccgaagctttctgcactggaactctggaagagccttccacgtgggatagtacaagattccatgacaggtcatcatctgtgccgtggcgccatgattgggacagcgatcttttgaaccgtagcaaaacactgcagctcgtgatgggctgatgaatagtttactgcatggcgcagttggacacttgggagtaccactaccacagtacagctcgtgaatgaagtttactgtatccccctcttcgctttctgttgttgcgttgcaaatacccaagtgggccttcgtggaccacgcacggtcttcctctttccattttgcccagggagccagcgactgacttgactggga

SEQ ID NO: 41480 - DNA, 2102 bp, Zea Mays
cccgccatttctcccaaaccccaacccccctttcccgccacaccatctcctcgccgcttcccgccacctctctcccatggcggcgccgtcggcggccacgcgcaggaaactgcagcgcaagttccgcctgcgaggcttcaccctcaaggtggacgccctcgaggaggccgccgccttcctcgaccgcttccccgacgccgaggacgacgcgctcgatctcctcctcgacgagctcgacaaggaaccgctgcagtcgtcgatactggaccgggacgcggtcaggcgcgtggtggcgctgcttgtcgaggccgaggaggcgctcgatgtggcgtcgccagcggccacaagcgcaaggtctgcgctgcgggtggtggacgcgttcctcgtgccgcggttccactacgatccaatcaagaaagtattttacgagcacacaggcagattagctgtccatggagaagctggagataaagcttccctttatagggataggtatcaagtgctgctgcagagactgtctcgtgataaatatttctctaagccggcttttgacacagttgcgaccgaacactgtagttgcgagataacttctgtacagtcgctaattgggtgcactgggcggagatggattatgggggtcatttcgcagttggaggagcgacagttctacttggaggatcttactggagcagttccaattgacttatctaatgccaaaatcacgtcaggtttttttgttgaaaatactgtaatcgtagccgaaggtgagctgctttcaaatggcattttccaggtaaatacatgtggatttcctcccctggaggacagagaagcgtcagtctcattgctcatgggttttgatttctttgggggaggtgtaataccaactgaagaaacactaaggttatcatcactggaaaaaaaggctgtgaatgatatgtttgtcattctttcggatgtgtggctggacaatcctgagagaagactatggagaagttggctgttgttcttgacgggtatgatagtgtggaagttgtgccttccctctttgttttaatgggcaatttctgctcccggccttgcaatctagcgttcaattcatttgaagaactcagatttcagttcggaaagcttggcgagatgattgcagctcgatctagattaaaggaacatagtcgtttcttattcattcctggacctgatgatgcaggtccttctaaagccctcccaagatgtgcacttccaaaatatctaattgaagaacttcagaagcacataccaaattcaatcttcgtaagcaacccctgcagggtgaagttttacacacaagaaattgtgtttttccggcaagatctcctttacaggatgcggcggtcatgtctcattccaccaacaacggaagaaacaagtgacccttttgaacacctggtagcaactatcacccatcagagccatctttgtccattgcctcttactgttcaacctatcatatggaattatgatcattgccttcggttgtatccaactcctcacacgattgtattgggtgacaaaagcgagcagaaagccttcaaatatactgggatcacttgctttaatccaggttcgtttgcgaatgacagcaccttcgcagcatatcgtccttgcaccaaagaggttgagctttctgcgttggaaggctaataaagggagaataaactgaagttctccaatttgatgaagtgtaaagtcttcgacaaattaaagaactgccacttccacacaaggagccgtgaaaatagcatgactttcatgacgatgtggtgtttctgtgaagagaactgatgctgatatctcatcataggctcagcaaagcagtaggagcagcacattggtgtttgtgcagcatctctagctgtttgtaacaatctttaaatactgcacgttagaccagactattttacttgtactgtttagtttttcattgaatcatggtaacaactaacaagattactttctgacagtgctcataactgctctatcttaatattttgatcacccacctttccaattgttatatttggtagtctagatattgtaccttgtcatgtgttctatatttg

SEQ ID NO: 41481 - DNA, 479 bp, Zea Mays
cagctcttttcgttcaagctcgtgcaataggacgtttgatccttctacaatttgctagcgaggatgaagcacacccaagttgacaaagtcctagattctacaattctagaaaaatgaagcttgttacatcctcatgacatgcatgaaggtataacactatctatactcctttgtgatacaaaacatattacccccacgtattatctttcactcgctttagtacccattaaacaacaacaaataattaggcaaacactgttagcacaactaatcctatcttcctctttatgtaaaggaatttgcttttgtgtatctgtggagggcttcatcacttttgaatgaaaaaacatttatgtacatataaatcacttggcgaagcctttctcgggccatgtgtgttgatgcaacctctaggaaaaacaatactattagctgttgacatatgctacttcaatactgcttgatatgtattgcactct

SEQ ID NO: 41482 - DNA, 1131 bp, Zea Mays
gaaagggctacatttcaatctctcagacactagacacaacctatctactccaagatccacggcggcgtgctggcctactctaagatccgccggcgcgtcgtggcggctcctccgcgtcccgcctccgaggccgcgggcggcgtcaggctgatctgggtggcgcgcggcgccggggagcgccccatcgtattcgtgcctctcaagcctaggccatggagggggtatcatcagctccagaaatggacgaggctatctcaactgaccaatcaagcagatcaacaaaaagaagggctaaagtgtgggatcatgttgattcagagctaatagatgggaaagagaaggcggtttgcaaatactgtaaggcccacttatcttctgctgcgggtaaagcacatttcattagtgaagattttgagttgcacaaaaagattattgcattcaagaagatttccttcccacatacatcttatgctgtgcaagatggtattacctcttgtttgctagagtggggattggttggtgatttgtttaccctgactttggataatgctagtgtaaacaatagagcaatgaaagatatgcgagatgctttgggcagccagatgtttttcagtggtgaacacctccatgtgaggtgttcttctcatgtgctcaacatcatggttcaagctggactaaaggtcgttccaaatgcagtcgggaaggtgagggacattatcaaggtcgtaatatctacaccatctcgtttacagatcttcaattctattgttcaaacgttgggtcttagaagtaaatcggggctgattcttgatgttccacatcgttggaatgcaacctatgatatgctaaatgaagccctaaaatataaggctgctctgaacagatatgcagtagagcaacaccatgaatgtcccactgaagaagattggtcgaaggcagaagctcttcatggttttctacaagagtttagtgatgcaaccaaagcattctcagcggataggcatcccacagctcatctttttctcaagatgttgctcgttatccgagttggtgacaatgttgatatgaagatgagggagctcaaaagggatttcatggctattcctgtgagtacggtgtcctcagaatctg

SEQ ID NO: 41483 - DNA, 305 bp, Zea Mays
ggcagtccgagctgagcgccatgggagatggtggtcggtgtcggtgttcctatccagcgaccggtggagctcagcgccttagaggagagaggaaaacagagatgccggtggccggacagagagagccgccatgggagatgggcgtagggaggagcagagccgaatcaggggctggggcgtggcacaggaggagcgagctgagggagaagaagcgcgcgcacggagccaagctcgacaggacgcggctgggaaggggaagatgcgtgaaagggagatggagcagagggagcggcgcgccaggaaac

SEQ ID NO: 41484 - DNA, 2769 bp, Zea Mays
caattctccacggccagagggagtccaactccgcctccagcactcacgcttcgtctgctgaccctacccatcgcggccgccgccggctcgccgctgctgccaggcgctatgcggccttgctcccgcatactcgcggcgcgtcacttcgtccgcagcttccggttcgatccctcccaaactacctcccccgctgccggatttcgtcggctgaccggagccaacaggccgttcgtgccgaaacctctctttggcattctcctcggaggcttcagatcgaactgtggcgtactgcctgggaaaggggtccccttgggcagcctcggcagcttcctgccggactctgcctaccagctgcacggcgcgcggcttcaacgagatacgagaggtaatgcattctccacatccgccaatgctgtgacagttaagaagccagttggtgacaaggtccagaaagatgcatcaaaaaaggatattgatgaggagattgctgattctcagatattgaaaaaccttgggaagtacttattgttgaatgacagccctgacttccgctttagggttgccttgtcgttggtcctgttagttggtgcaaaggttataaatgttcaagtgcctttcttgtttaagctagctatcgactggcttgcagcccttggtggtgctgaagcttccctggcatcattcactgaaactaatgccaccctattggctctatttgcaagcccagcagctgttctgataggatatggaatcgcacgatcaggagtatcagcctgtacagaactgcgaaacgctgtattttctaaagtgactttgagagcaatccgttcagtatccagaaaggtattttctcacttgcatgagcttgatcttcgatatcatctaagccggcaaactggtgctataaatcgcgtaattgatcgaggaagccgtgcaataaattacatcctcacagtcatggtgtttaatgtcgtgcccacgatactagagattggtatggtgtcaagcatacttgcctacaaatttggttcaacttttgcttggatcacttcagtttcagttgctacttatattgctttcactttggctgtcacacagtggcggactaagttcaggatggccatgaataaagctgataatgcttctagtacggtggcagttgactctcttctcaattatgagactgtgaaatacttcaacaatgaacaatttgaagttgagaagtacgacaaatatttaaggaattatgaggatgctgcattgaagacccaaagtagtcttgcctacctgaactttggccaaaatgttatctttagctcagctttatctacagcaatggttttgagctcatatggaataatgagtggtgctctgactgtgggtgatttggtcatggttaatgggcttttattccagctttcattacctctgaacttccttgggagtgtgtatcgagaatctagacaaagcctcattgacatgaagtcaatgtttcagttgcttgaggaaaaacctgcaataaaggatgagcctcatgcacaacctttgcagttcaagggagggtgcattgaattcgagaatgttcattttggaaaggaagattcttgatggtgccactttcaccgtacctgcaggaaagagtgtggccattgttggaactagcggaagcgggaaatcaactattcttagacttcttttcagattctttgattcgacttcaggatctatacgaattgacgggcaagatatccgaggagtgacactggggagccttcgaaaatgtctaggtgtggtacctcaggacacagtactttttaatgacacgattaagcataatatacagtatgggcggttatcagcaaaagatgaggaggtctttgatgctgcccgacgtgctgctattcatgatacaattatgaacttcccagacaagtatgacaccgtagtaggagaacgaggattgaagttaagcggcggggagaaacaacgagtgtcaatagcccgtgtattcttgaaggagccttccattctgttatgtgatgaagcaactagtgctcttgacagcactactgaagcatcaattttgaattctctgaaatccttatcttccgatcgaacatcaatctttattgctcatcgactcacaactgcaatgcagtgtgatcagataattgttttggaggatgggaaggtagtagaacaaggaccacatgattttcttctgtcacagggtgggcgatacgcagaattgtggtatcagcagaacagcactgacgccatggattctgctgcagctagcgtagaggtttgattgaccatgtttaccttttccttctgcaaggggaaaagaagggaaaacacaatcataaccgtgagagagagggatggagccaacttgtctgccttgtaattagaggtaggttttttggttcgggggggaggggggggggggggggggcataaacgtacagttccattttcaagatagccgggaggattttccccccttttgagattgtatagacgatccctgcatgttatgataaccgtaacgtttctgtagcataagggataaagcccagtaagggcctgtttgtttcgcatggaataaagggtagaataaatctggcttggattcctttaataattactataatttttggagatttagaattaattctggtctgttccagtagaaacgaacgggccctaaatattcagttgcctcaggcgtactaccgtttcaatataaatgctcccatgattgct

SEQ ID NO: 41485 - DNA, 426 bp, Zea Mays
gccatttctgcccggtcagttactctgtcatatcacaaagatgacctataaaatgaacataccctctatatgagtagccgttagcccgcgctacatacgcacgtctatttggtctttgttttacgtctgcgcagtcgaactcgaggtgacaccacttgtcgttttcagccgccacacagacgatgttgcagtgatgttttttttattttatcccctttttctattagaattttagttttatatcttgacaaagttgttattctatactattttatagtaattttagcatagtcatgggaagaaagctccataattactgatgcatggtaacaagctacaggttcatgtaattcgcgtatcctctccacagcggttccgttaattcacattgcggggctatgtttagtctcttcaatacataattca

SEQ ID NO: 41486 - DNA, 2640 bp, Zea Mays
acacacactcactcactcgtacgccgtcgcttcctgcggtacgcactctctgtccgctgcgttcctccagctagcaactggccatcggggctgctatagcagagtaagtggcgatggctccagctcatgataggctccgccgcctggtgctgctcctcgtcgttgccaccgcggcggcggctttgcttctggcgccgacgacggcggatgctgcgctgccgcgggtgcagcacacgcccaccaaggccgacgggtcgctcgccatcctcgtcgtcggcgactggggccgccgtggtggggcagaagctggacatcgacttcgtcatctccaccggcgacaacatctacgacgacggcatcgccaacaccagcgaccccctcttcaaggaatcgttctccaatatctacactgccaacagccttcagaagccttggtacctggtccttggtaaccatgactacacgggaaacgcgctcgcgcagctcgaccctgccattcgcaaagtggatagccggtacaccgccattgccaagtccttcattgtcaactcaggtcagcaaatgataatatggaacctcaaagtgtgcaagcatttcaaacgatatatatatttattctaaattaagaagaagaaaattaaagggttgtttggttcgctgtctaaattgccacactttgtctaacttttttttttgggtaaggttagttttcaattcgaactaataaccttagacaaagtgtggtaaaattagtcacgagccaaacaggctctaaatgtgtgcgtggatggtacttttgttttgaacaaattaaagggattgcggattttttcctcgtcgacacaacgccgttcattgtccactactggaacaacaccaagttcgattggagaggcgtcgctcctcgagacacctacatcgcgaatctcctcaaggacttgaagtgtgcactgacagcgtccaaggctccctggaagatcgtcgtgggtcaccaccccatcagcagcgcctgcgggcatgggaacaacactgagctggaggagttgcttctcccggtcctcagggtatatatatgcatgctgttcgatctaacatgaagttaattgtcttctctcaagtcattaacatgatcgatcgatctatatatgaaactgaatgttcctgctgctttgcaacgcaattaacactactgcgcatgcagacacacgggtagtgctgcaacttggaccgtgccgtgccggcccggcacgagcccatcgtgcttcgggcctcagttagtcgggcctatctagcacgaaatagaatcgggccgtgccttactgggcctcgtgagtagaaataaggcccagcacggccctaaagcacggcgggcttccgttgggccgtgctggcccaggcacggcacgcaattaagtttgtatctcggtcgccgtggggagatcaggagatggccgctgggctggcgcctcgggagatccggagatggcgcttggggagatggattggccgctgggcgcctgtctggccgctggcatgcatggcatcgtggccgcaggaccgctggatggccgctgggcgtgggcgcgtggccgctggccgctgggcgtcacgcctaaggagatggccgcatggcgcgtggccgcaggaccgctggagtctggacgccacgccggggagatggccgcatggcgcgtggccgcaggaccgctggagtctggacgccgcgcctggggagctggacgccgcgcctggggagaagacgaatggatgggctggcggcggccgacgcctggggagtcgaggagagaatcggagacgggcggacgtctggggaaacgactaaacctaattaaatggcggccgacgctggaccgggatgttttcgtgccgggccagcacgagcacggcccacaacaacgtgtcgggcctggtagcacgacgggctcaaatttagagcacggcccagcccgcgattcgtgccgtgctagcccgaatttaaaccagtcgtgtcgggccgggcctttttccatttttcacgggccgtgctcgggccggccctttaggcacggcccaaactttcaggactacacacggggttgacatgtacttgaatggccatgaccactgcctgcagcgcgtcagcagcagagacagtcgtcttcagctattaaccagcggcggcgggtccaaggcatgggctggcaagttcaagcccaccctcgacaaggtggagttcctctacgacggccaggggttcatgtcgatgcgcctgagcaggacggaggcccgcctcgcgttcttcgacgtcgctggcagcgtcctgcactgctggaccatgcatgcccaaaaattaacgacgacgacgactgctgctgcagctaggcactaaagctttgctgggtacgatgagttgatgatgcaattaattatttggttttgtcgtcttttcgtgcgtgagagggaagcaataataattaattgctgctgcttctgttgttgtgtgcacatgcatgtgagggtgtcaagtatgttcagcctcttgcaagataaaatctctcgtcttctgtggaataaactgggaaaaaagtttttttttgtaaagtatgcaggagtttcgcgtgtgctgatatttcatagtga

SEQ ID NO: 41487 - DNA, 1718 bp, Zea Mays
ccgccgccgcctcaaaaccctagctcgatggagacattgagggaggccacagcctgcaggtaggttcgttcgactagtcatgggccgcgaaccatctactgcaatttgcagcccatgagagacgatcgggctctccaagtgggcatggtgcagggtagctgggctccctgggctccaacaaggaacgaggcccatctataatgacggttagacaaagaagtggcgcagcggcactaggccatccgttgaagcgttatcccgcagcgggcaaccacggtcacgtacgcgaaatctctctctctcgtggtcgtgcgcttccttcccgagactccaatgcccctgcctcccctgctcccgcgcctttaccccacgccgcctccacttcgcgccggggacaggggtaacgccgtccctctctctcctggaagaagaaggccggcgcttctcgctgtcgtccgcgcaaagagaaaggacgaggcaagcttcaccgaccgcatccttgactacatcgagggagggccaaagttaaggagatggtatggagcacccgatttgcttcccaaggatggggctgcggaggatgaggaggacgagtctcaagatggtgatattagcactaattctgaaaagggctagaacaaaagcacttgttaaggataaacgaaccactgaagaagcttttggaacttatgtggaggatggttttttctctgaaccgatcgacctcaagggtgttcaacacattgttctgctatcacagaaatagtggtggtttgcaagctattatgaacagcaagctgaagacgctagcagagaaggatgaagaagtggttcttgcatctggcatcccatgtacaataatcagaacaggttctctgcaaagcactcctggtcgcgagagaggttttgattttactgagggcatagcaagcaagggaagaataagcaaagaggatgctgctaccatatgtgtggaagctctgaatagcattcccctaaagacacacatttttgaggttgcaaatggtaaggagaaggtgatagactggaaagcatggtttgaagagcagaccaaaagagaagaagaaatacagtaaaaaacaaattggaagtgtttttcgcttgttggtccatgagaaaggaaaatagaaaagagcaaaaaaaggagaggatttataaaaacttgatggctagtttggaaactcaaatgctcttcggaattgaaggggatgggagaggaaattagttcatttctacctcaatcctctccaattccgaacgagatttgaggttcccaaatagcctaaaggaaatgagctgaaggttacgtttgatcctctagccttgctggcaattgaatcatactagtatatccgatgaagaaacaaaagtgcgtggagaagtggaggcacgtctatgaactctacactctgcagttgggctgaagcccctgatccctcattgtttatcaactcattcattatcttatataaaatgcagttcaaattatttgattaaagactttaaccatccacgagtatttctgtacacatgtatctagcgtttctgccagtattgtttgttgttcaatttgaagattaggccatcaagttattacttcagggcaacagaagcctcaagtcaatgtcacatggtactggatttctgcagcaaacatgttaacatgctgccgtctttaagggtttgttcgctttcct

SEQ ID NO: 41488 - DNA, 1709 bp, Zea Mays
cccctgcagggaagcatttcaactgaactcatcaattccttcatcatccatggaggccatgcccaggccaagtgtagctccctcgttgcagttgcaggcccgtccgtgcccgaggtggccgcgccggaagcactgcccaccgtcctccgtggcaagccggagggttgcttgctcggcctcggcggccgacgccgacgtggtcgacctcttcgacgccgctaagctaactgtggacaagttcgtgacgagcggcatggtggtggggctcggctccggccctgcgtccgccctggccatccagtacctcggcacgcgcctccggcggggctctctcgcgggcatcaccgcagtgacctcctagcttcctgggattgaccagccaggtccgtgctcagtgcgagcgaggcagacaaggcagggatacgggctaacagctaccaggaaggcacccagattgattttgctttcactgatgctgaagcgatcgaggagggcacgctggccgcagtcatcgggcggcggaagaccgagagcggagagccctctttcatggcggagaaggtaagcagacattgattgaagacacggcacgaacgagcacatgagtaaacgctctctcttagccagcaaccatggcgtctgtctgtacaggcgatggctaaatcagctcacaagcttgccttcatcactggaaacgacaagtacgtgacgacgggcgtcgagggttctattccggtcctgattaaaagtgtaagcagccatgcgttgcttcagcgcgtatacgtatcgtttcctttccatgcaaataaatattcagaggagcaggccattttcaggggaactggatagacactgctgaagagatcgacgatttgtttctaggagacgcagaggtttggaggaggccgtcgtttggaactgctggtccacttgggggtgaccacccactggttaccaaggagggccatcacgtgctcgatgttatcttcacaacaccaatccaagatcttggtcaggttgcagagaagttggacaaagttgatggcgttgtggatcacgggattatttgcagcaaccaaccatacgctgtcattgcatccaagggggaagtgcaggtcctggacgagaaatcttcggtgatacagtagcggtgaaacctttttggctgctctgcagattgttgcgcttttcggaacaggagtctactaccagctagctggaaaaaaaatgccatgagttaatcatgtacaaccagagctcttgttcaccactggacaattcagccggcatcagttgaagtctgtgtttcgcataaacttttttgaactggtactcagttaaccagattcgatgaatgtgaggcagagctacagcttcaactactcttctagtgtttcaggagttcgtctcttttcatatgattggttgcccgcggcatctcatctcctatatgtttggttgcttgtgtttggcgggtgattaaattagcacatgccttcataacgtttattagtgtttggaaagataaaagtaaccgcgcataggcgctggaatatatggattagatatgggccgtcggatgaaagatcgaggttgcctcgagagccaatgaaccgttagccgttgcataggaattttgtaggatttgtaagctgtagccttagcaaaatttactgcatgtccatttcgaacaatgaattaaaccctat

SEQ ID NO: 41489 - DNA, 495 bp, Zea Mays
caccttgacaaacaatatcaagagatggcaatacatacattaagttgaccaaagatcaatttgaacacacttggtggacatcacaaggttatgacaaattccttttgtcttgaattcattgagatgaggaggagcaacccgtaatagtcttggtggtttaggcacctcatcactgaaacacaactgatcttcttgaaccagtgtatcctctgatagcacaacattttcatcagaattagcacaagtatcacgaggcatgccaacactctcacagtgcaactggtcagccggacacaccaaggaagtggtcagctgagccagactgggttctagttgcggcaccaacttcttaagcggaaagtcaggggggcatctcccccctggtcgagaaaaaaagtatcacctggcatctccaaatcctctccatgctcttcctgtacaaccagattaataggaccaacatctctacaacagtaagatctacagtaaagcatg

SEQ ID NO: 41490 - DNA, 1563 bp, Zea Mays
atgcacatgaatgcatatagaccggaatatttcaaacctaaataggactacgcgatagtgaattaaacacctagcggcgagacgttgtacaattttgtacggaaacacttgttatcgacgtatgactaagtgcgatagtcatgccttttttagcttaaccaaatttcattcaaacattatagagttctacaaacgaccttctaaacaaacacagatctaacccgtgtatgtgcactctccactaatcgtcctcgggttttcacaggaatagacttaatgatattacttgtttcctaattaatttggtaagaacaattatttatctatcctattcactaataacccggtgagtagtagtaaaccagagtactattattaacctgccacgaatcccacaaaaataacgacgacttaggcttcgaaattctaccagacatattatttaacttggctgaattcagttctaatggaaacaaacttatcgatggcattctaattttaatcggatttaattctaatattttggctaacaaaaacgcgtgccaataataaatttagctcaagtccactatactgattaatgaatactaattcgggattacgttaaatatcgcactaatttttggttctgcgccagcttaccccaactaaacccgcaaatcactatcaggagtctacgtcaatgaataatcgaaccactgccacaaacactaaccataccacaatgcatgctaagacattttatcttacgacaaatataactacgacacgtaagctcacaataggataatcattgcgacaactatatttatccaatccaactattccttatactcacgggaaataaatggatccgcttaccatgtccgaatcgactaggagctatgatttcgacaaggctatccggtttgagccattcatcgaacaccatgcgtgcgtcgatctccccaaaatcaaacaatcaatattcggcaagaacatcggtgccgatcttcccaacacgcgacgagcactggtccacacattttgccgaacagggagctgcaggggcgcacgaccagcggggcacgaggaaacgacgatagcggggagcgagcaatttcgcgcgcacgacaacacgatggaggcgaactgaacagagagcttcgcggcagcacgcgtaggaacaacggaacgctacgcgcgcgacgcaaaggcgagcaggaatttgggcgccgagcaggaagacaggggcgagctcgaggagatgtcgagctgatgacgagcgcgctagagcctgggcaccagagcagcgcaaccgccaggcccggacagggatcgaggcaggggcttggctgggacgtgacatgggagggctccggccatggatgaaagctgggcaagcaggacgccgtggggatggagagggactcggcaggacgcgtcggctgaagaacgcagcagccatggagctcgggcgccgtagggaggagatcggagctagaagaaactccgaccagggaacggcggccatggcagggactaggggagagagagagctgtgagcgccgagggagagaagct

SEQ ID NO: 41491 - DNA, 570 bp, Zea Mays
gtagatatgatcactgcatgatttacgtgtatgtgtgtgtcgcgatcgatcatatagcgcggaagcatatcgtagcacggcgtacgtatacagaagaggctttatcgccatcacagcggtgcttagcgcaagatcgacgggcacgcacgaggccggccggcaagtgcgcgcgcacgcgtcgacgtccccgatgacccgtcaggtcctcggatccgaccagtcggccggtcacttctcggtggccggagattggtctactcgtcctgcccggccgagagacgagcgcggcaattaaaggcgagtacacgttatcatcggagcactcgatggatccgatccggccgccccgccagcatgtcgatcgtgcgtgcaacgtgcatgcgcgtgcggcggcgtgccgctagcacctagcgctggccgtcgtccgcggtccgcgctgctcgttcggcgagcggcgacaaggcaccttcggcgccacgtacggcacaccgcacaccggacgccgcgcgcggaaacagcagccactgatcgatcgacgccccacgcggggcgtacgcccgtacgtacgta

SEQ ID NO: 41492 - DNA, 402 bp, Zea Mays
aagaactcgagaacacacaaggatttagagtggttcgggccgccggagcgtaataccctactccactgtgagatgtattgcttgtgagcttgtatgagtttacgagtctaaggtgtgacctgagattgcgtgtgtgtgtaactagggatgaaaacggttgcggaatttttcagaattccgaaaaccgttttcgattttttcgatcgatttcaacggtaacagtattattcggaaacggaatcggtatcgaaatttttgtatcggaaacgatattgaaattggtatgtcattttaccgaccgttttgtccggttaccgattttaatcggattttaccgatttttttctcggaattttaccgaaataaaaagtccatcagcccatgaagccaactaggtcaagc

SEQ ID NO: 41493 - DNA, 1591 bp, Zea Mays
aacagctaccgactgggctattatttctccccgcgtgctctctctcgccgactaggctattgccgccgccgccctacaccagatgcccagttcttcgtcagccccttctccggcaacgagcacctaacagcattccagactcaccaattgagcactcatgttccccaagatggagtgtttattaggagattcggctctgaggtgtcttcttcagagcaaatgaaccttattaagcaactcagacaaagaacgagtgctccaatcaaagatgtcaaggcctctctagttacctgcaactgggatattgaggctgcacagaaggacctaaggaagagaggtgttgctcttgctgccaaaaagtcttcacgcactgctgctgaaggtttgctagctatcgcacaagatgacaaaagggctgctgtagttgagcttaactgtgaaactgatttcgtagcaagaaatgatgttttccagtacctggcttcatcattggcaaagatggctttatctgctcagggtcctggtgaattgttcatgccttttggtcctgagcttttagagaacatgcctatcaatctagatcaccctaagctcagtgtggaaacaactgtccaaagtgccgttacagaagttgctgcaatggttggggagaatgtgaaactcagaagaggcttcatgctttccacaactgcacatggtgttgtttcatcttatatgcatacctgccctcagccaggtatgggtcgtatagctggattggtcacactagaaacagaagacagcagtactcttcttgattctgtcaaaagtgttgggtcatctattgcgatgcatattgttgcggcaaagccattattcttatcaaaagaactggtttctgcttcggctttagaaaatgagcgtgaaatacttcgaactcaggcccaaagttcagggaaatcccaaatggctatggataagatggtggaaggacgattgaggaagtactttgaggaagttgtgctcatggagcaaaaatatgttttaaatgacagcactaacattaagaccgtgctgaatgacttgtcgaaagaggttggttctaaggtaacaatcggtaacttcatcagaatggaggttggcgaagggattgagagaactgaagccgctgatggtttagaggttgctggtggcgctatgtagattccaggcagagatggtgtgggctaggacggagataatgtttaggcaggcactagcgttctgggacctgcgaggctgcctagttgatttgtcagttcctagcttgtttggttacagttttggttgaaccctctctgattgaattacagttcgtgtggacgtataaaaaatcgaaatagagtgggaattgccccttgaactttttgcactgagtctggagtgaattagtgttagtgcaaagtagttgttttagctgtcatttttgtattaattaaactttgctagaatgacttgtgagtttgtaggataccttttgcaggctattcacccatcttttgccatctaggtactatcgccatgctaagggtatttggtttctagggactaatatttaatttctttattttat

SEQ ID NO: 41494 - DNA, 1290 bp, Zea Mays
ttttagtgcttcctaccacaccgctccagacgctggtaagggaagaggatgacgcaaaaataatgaagtgcctgcagcgccgtttgaaaggaaaaaggatgagagactggtgtaaggagaactttggtttggtctcatcatgtgacgagaagcctcctctaccagaaaatggcgttttaggtgctaaaagtgactgtccttcatctaaaaaactcaaaactgatgaaaacaaagtttctattgagatatgaagcatacatgtgaagatgatgataatgagaagagattgaaaactgtgatagttgaaagcgatgatgatatgcagatagatagcaaacaagctttacaaaaggatggtgaaggtagttcaacagaatttgaaaaagtggttgatatcattgatcttgatctcttcccaagccctaagctccctaataaaagtttgcataaaactttcaaatgtactatttgctctgaaatgctgaatgcctctgatgtgcatcgccaccctgtcttggatgttgttgtttgtggatcatgcagatttcttgtgatagagaagaatcgccttgaggatcctgtatctggtagttattgcacttggtgtgcacaaagtgaactgattcaaagttgtagttctttgttgctgctgtgtacccagtcaactagagctcttaatttctgaatgtgacaaggccctcagtggtgtggaatcttccgattcagagactagcaatgcagagctttctggatcagagaataatggtcctgttagcaagcaaaaaatgaagaagagtattagaagaattatggatgatacagaacttggtgaagaaacaaagcgtaaaattgcaatggagaaggcaaggcaagaccatttgaagtcaatgcaagagcaatctgccaccaagttaaggagcaagaatgttggaaatccctttgaaactccactggaaatctgtttacaggatgctggggatggacatgtagtcaaccttgccagggaggaggatgaggaacctgttaggattccaagcagcatgtcttctaaactgaagcctcatcaggttgaaggaataaggtttatgtgggaaaatgttattcaatctgttaaaaaggtcaaatccagggataaaggtcttgggtgcattttggcgcataacatgggccttgggaaaacttttcaggtctgtgttgggctgttggcttatagcttggatatatatttacattttcttcaagagttattcgttcattgtatgctgcacctattgtacccatgacaatcaa

SEQ ID NO: 41495 - DNA, 1152 bp, Zea Mays
cgcactgcacgggcgtggctttgccacaatcggatcccaccgtcggacttcgctagaaccggatggagacagctatacgctcgctcgtatcgaactgtttacatgtgaggcaacaaacgcggacgctgctcacggcacatgacttttctacccctgctcatcattctcacttttctgtcctgctcctagcgacagggcctgtctgttctccttccgccgcgccacaaaacctccatggatgagccgtctcccctagagttggccgacggagatgcagtcctatggctcccagagccggccgccgtagatctagctccgcagctcccagatgaggtggatgtggaaccagacggagtggatccggcatccccgctgctcgtcgtcagccccagcctcgtcgtggatccttccccaccactccctctcgattgcaaggtggatcgacacagagatgacccctttcagcccgccgtggagacgatgcttgccttccagtctgacacggagaggatcctgctactgcgttctctgtccatccccaggacacaagatgatgaatcagccttagcggttttggaaccatcacgaatcgattgggatgcaattgaaatcgaacctagatgggatgaggaaggaacagagggagttgctagtgaacatgggttgtatgttaaactaggactgcaaaaggaggatgaaaaggggaaaaaggttagagaatctagagctaaaaagagaggtgtcagcacctttgaaaatgaatatattgacgatcatgaagggatggcttatcttgagcatataccagaagacagggctatcgtgtatgactggacgaatccagtgatgaaagttggtgccttgtatccaaatatgtcagtgtttcgacttgctgtgcgacactatgcaattatgaaagagtttgagctaggcatcgagactacttctacctctcgatatagagggttatgtatgggtgatgattgtccctggagacttcatgcagtgttggaagtgccaggatcagcaactatcattgtaacagcgatgacagatcggcatacttgtacttcaagtgccaggagaaggaccaccactcccactagctcgtgggttgctggactagctcttccaatcttgatgaagaaacca

SEQ ID NO: 41496 - DNA, 1765 bp, Zea Mays
cctcgtctcgcgtcttcttccactgctccctcccacctccgctcccagcttttcccattctcgttgatacgagcgagagtcgagacaggtcaaaaggagattgagtaaggaaaagaaaaaaaaaatcgctgctcccgaggcacggcggcggcgagcgtgcgacacctccggcggctccacagatccggcgaccgatctccggccgcctgcggatgctccggggccggcgcggaaagatgatggtgtaaaggtggtctctgtggagaatttgaaaaatccatacgagagacaagagaatttcaacatgcgattcaagttgaccttaaacaagctgtatgcatggagcttggtttcgtatgagcgagttgttatgcttgactccgacaacattttcctccaaaatactgatgagttatttcagtgtggtcagttctgtgctgtcttcatcaatccctgtatcttccatacaggtctctttgtgcttcagccctcaatgaacgtttttaagaatatgctacatgagctatcggttggacgtgaaaacccagatggtgcagaccaaggctttcttgctagttatttcccggacttacttgatcagccaatgttccatccaccagctaatggtacaaaacttcagggtacttaccgcctccctctaggctaccagatggatgcgtcttactattatctgaagcttcgctggagtattccatgtggaccgaacagtgtgattacatttccaagtgctccatggtttaagccatggtactggtggtcttggccagttttacctttggggctctcttggcatgaacaacgtcgtgaaaacctagggtattcatctgagataccagtagtattaattcaggctgtactgtacattggagtcatagcagtgacccgactggcgaggcctaccttgaacaagatgtgctacaacagaagaatggagaaaaacactatgttcttgctctctgttctcagagtcgtggctgcttggtccatacttgctgcctacaccatacccttcttcatcatcccaaggaccgtgcatccactgcttggctggcctctctacttgctcggttcttttgctctttcttccattgttatcaacattttcctcttccacccgatcaccgtcctcacaacatggtttggattcataggcgcactcctggtgatggccttcccttggtatctaaatggttttgtcagggccttggcagtgtttgcgtatgctttctgctgcgcgcccttgatctgggcatctttggtcaagacaatgagctccttgcaggtcctgattgagagggatgcattcaggctcggagaacctagccagaatgcggagttcacaaagctatactgagcctgggagcaagagtggttgtacacaatggaactatctggaaacctctagaatccatgaatgttgttatcttagacatgtaggtgacatatacagtggaaaaggggggagggctgtagaattggtgctgaactgaagaggaactgactggggtcagttgttagttattttgatttattgttcctctgaaaagccaaggcatttttggctttgtttgtaattgatatgatatgttccttcacaaatgaagaaaagggttgaaagttcaaacggtgtagtgttcgaaacagtactttgattttaccgtggtaaaattgtgtggcttgtgctgaacagttttcctttttataactgcttcgcctgaacgttgagttcagctcgtgtcgctgc

SEQ ID NO: 41497 - DNA, 1962 bp, Zea Mays
cctcagttcctcaaccagcggccgaccgtcgaccgagaagcccgagcagcggtccgatcaggtgagcagcggcgcggctgctgcctgcccgcgcctgcctccgcggctccgccggccgtcgaccgagcagccgagcagaggcgcggcggctgcctgcccgcgctcgcctccgcggctccgctggccgtcgttcgccgacccgaacgccgagtcgcgcgagcgtgccggcgtgccccgcctctcgtcggctcgcgactgcgccagcgcggtcgcgccgccccaccccccggtgaccggcgtccggatccatccgtctggcaacccaaccggccaagggccaaccccgtccccggaccccgactccccgagggccaaccggccaaggcacaaccgctgaaccgcacaatgcagtgagagaccgaggtatttagtcgcctactcgcctaggcctattatttccctctcaaactcaaattcttcctggaatccaccaaagccctgcctcccctctactgattctgaaagtggagttccatctgcgcgtcggttgatttattctatttgctgagttggactacattacctccatgtcgagactgcgagctctgtggcaggcttcctttaacgccacaaagagagctcttgtatggagttcagatgatctaattccgccaagtgaaagatgtatcttcaatttcaactcaaaagatgagctgaaaaggtggcatttgtactcagattcagagtttgtcttctgcatccttagaaataactgatggcgcttcagttggagatactccattaactggtaatagttgttctatgttcttagcttttccatcttgtgccaatcatttgaagtatagtttgaattgagtactttctggtacaagagaaaacaatgatgtatctgtagcttcttacatttagcatgatagacctcattaaccatgaaatgtttgtggttttcttggaaaatgtctgaggtgagtccaaattatcagtgggtaccggctgctgtattttctttagtaattgaatcgaaacatgcagttttttacttatgattttcttagactggtttgtaaggtaacttttattaacatgtgtattcttgaaggtgtgttttctggtaacctttctttggatatgtctgaagagtcaacatggaggatcaggcgctatggattctgtgggatgcgatcaaagaagtttgatgggttcattgaccttgatgcatatgatacaatagcaatgaagatcaaaggggatggaagatgctacatatctacaatatacacggagaattgggtgaattcacccgggcaacaagaagacaactcgtggcaggcttttgtgtacatacctcctcaagacagatgggaagtcttgaagatccctcttgatcgctatttacccacatggagaggaaatgtgatccaggcaaagttggaaatgaaccctgctcggatcgtggggatgtctctctctgtaaacgcagaaggcggtgttcctggcgccaagactgggcctggtgattttaggcttgatgttgcttggatcaaagcgttgagagctttgtgaactccacaagtcatagttttatttcacatcggccctttccttctttatcaccctgccccagtggcgccgctgaactcatcacccgaccacaaccacaggagtaaccatagcacagattgccaactcctttatgcacttaataatggattttgttttgcttctgaggtttatgaataagtggtagaaaaatggagcatttagttaaggtgccccctttggacagatgttgctttttctctctctctagtatctgatcggccgataaaacgagtgcattccacccggacgataatgcgagagtaggattcagtttaattctttgactgttaagagtactactgtttgatcgtttgaattatacacgttcatttgagtaat

SEQ ID NO: 41498 - DNA, 1545 bp, Zea Mays
cgtttctgttagtagcatccttttctgttctatttcactctagaagtctagaaccatagcatccttttctattctatttcactccagaagtctagaaccaaacacaaaatagagccatttcgttgtagaaaaaaaaatatagagtggctgctgttctccgtccaactagcaggtctcaacctcgaggcactctcacgcccaacggccacaccaccgtcctctccgcgtgcccccgaaaccaccacacgcggccacgccacgccgcccactacgggcgggcctccttgcgcttggagtattggtcgacgtgctcctctcaccgcaccctctactgatactgggttggcgcgagaacggcgagcccacctgaacgcgagaaagttaaagctggcacaactttattcttatatgatgttgatcagtgtaagctccatggtgttttcgaagcaacttcagatggggctgtgaacattattcctgatgcatatgtcgcatcaggaaaggggtatccttctcagatacgtttcaagaggatttggttttgcaagcctttgacgcttactgaatttcaagatgctgtccacaattattctgttaaaaacaagtttagttatggtttgtcacaccaacaggttgcaaagcttctccatttgttttcttcacggaacaggttgcagcttcctcaaaacccaatattacaagatgatgtcccaggggaccttgagacttcttcttctctggctagagtaactgacgtgcagtgcagtccatgtggttcattcaggagcacctgtcaaacatgttcctccacctctcttggggaacatatggcaccgatgggtgcaaaattaatcgatcccggggcattaatgcacagaggtctacaatcagacatctcaaaatctcccctgcaatctggagcggagatggccactatcaccatacctggcaaccaagaagcaatgcatgaccaacctactgatgactatatacctcttctccaggaggaaaatacttttgaaggtgttgatggtctatttgcgttgctaaaagatgtgtgccactcttctgaattatctaaacgtagcagtgactctgaaaaccataatacattccaccaagtttgtattaggaaggaagatgaatgctgcccacccatcttaggtcgttccaaactccgtgctgacagtgaagggcgaacaagtgtgttttctcggttagtgagaaagcacgatcgtggtcgtggggaggcaatgaaacagctgtgatgctgtgctcatcaccggatgcacaacctgcaaggacacactatccttgagctgccctcggtttgtgtttgagtgcctttcgttcgtttgttgttagggtaagaacggagtacgtgtcgtgaacctggatgtgttgtagttgcatgttgtattactatttcgggcctatgtttgctgtgtagacgagttatcacgtaattgctacatgtgtgtctgttgttcttgtgcttgttgttcttgtgcttgttgttcttgtgcttggaattatacaggcatg

SEQ ID NO: 41499 - DNA, 455 bp, Zea Mays
cccctggtcatctcagaatatctcatgacctctgaaagcatcttggcccctggttggttttagtgattaatgacaacataagattatatgtgactaacatgtgttttgtagagcaaatggtaagttaggtcacattacaggaggttgcattgcaacattgaaaacaatccctcagatgagaacttgaagcgacgactgaaaaaggcgaatcaaaagatgaagatcttcatattccaagtgtcgaaggagttgtggacacttggtatagaattaggtcttctattttgttttagtcatactataaagaggggttgtggatgagtagtttgaccaagagaattctagtgtagtgttggtgcacgttcacactcacaactagtactaggtgtcactttataacacacttacaagttagaacgaaatcgggttagaaaaaccaaaggaaaagaagttgg

SEQ ID NO: 41500 - DNA, 762 bp, Zea Mays
gaggtgattatagaataaataaagaaattatctcctgatatgcctctccagctggcatcagacacaattttacggacactgagggcccgagtgcaccatcatcgtcaaggacagatagtccataatctatcacgtgcgacaaacctggacgtgcggttgacaagactggaggagagatcgaggcatgtgcagctaaccgatgagagtatctgcgactcctgtcgagctcgcctcggcaccaagctatttgctatgtacccaaatgactcggttgtttgctacaggtgctatcgatcccagcaaggtgaatcttcatcagggcatggtcgtagcatgaggaaagatgttatattcaaacagagctggcttgtaagtagatagatagcgaggaaggaatgaagagtggtgatcttgaggccagcatttggctgtggctgctctgaaatgggcaccaagtttttttgtctggatgggctctctggaaacttgaacagggtgttgtatattctttttgaggccaatgaatgaatatatacaaatacaagcatacagcataccggaggatgtctagtctgttcttccgtttttttttgtactttagtttttttgtcaaaattttatattcacacctgtagtgggactattaccgtatgcgtcaaggttatacggctcggtgctgtaagtcatggcactgaagtagtattatgtggtgtggacgatacaagtcatggcaccgaagtattatgtcataaatggtgtgga

SEQ ID NO: 41501 - DNA, 1646 bp, Zea Mays
tttgacttggcctgcctctccgcctcgcttcgtcttcacttcccgcccggcgaaagagcacaagcagccgccaccaatggctgcctgagaccttgcgggcgagagcggcggagaaagcagttccagccttccaaagctgccgccgatgcaagctccgcgtgagggctacgggctggccacgatggacttcgagtacgtccccgcgtcccccggcagcagcaggtgggcgggcgagtcagcggcgcggcggcggcagcgccgactctcttcgccgtcattgaggacctacctcacgccggccttcgacgccgtggccggcggggagggcggcgtgtctgggtactcttcatcgtcgtcctccggcggtctggaactcgggttcgacgcctcgctcctccgctaccgccgctcctgcttggcggcctccgcggacctggatagccgtgtcctcctctactccccgcagtcgttgccaccgccgccgccgcagatgagggcggcgtatatgccagcggatgacgaggtttgggcacctggcgtcagccactacggctccaagcatgagacggttaccgccttaacggttttctgtgccctggacccctggtggacaacacctcaactagcttttgctgtggcatttccgcttaacggcatgtacaatgctgcttgcaggcggttactgctttgccggttttatgtgccctggtggacaatgctgcctcaactagcttttgctgtggcattgctgcttaagggcatgtataagtacaacgacgatgcttgcttgggcgcttgcaggcagctaatgccttactggtttccatcactgcttgttcaagcaccatgcctgaggtcatttttcagcaaaacgactaacagtttgaggcttgaaaaagttggagattggcgtgaaaatttagatgttgccatcgtcaaattaggactcatatgcaggctggccggcttactggcgcaccaggttttcaggattcagaaaaccgcattgctttcgtctccccgtcacggacaagtagcaatcttcatactacagttctcggcgcctccacacccgtcaagctccctgctgaactccagttgcccgagggcagtgcagagctcccaacgccaaagccagaagctacgccttcagctctcaagttatctgctgatccagaaccagacgtggatgccgatgaaatcactgaagccctgtacggtggcagtggtcatcgcaggctccccattttcagggagatctgtccagaatgagtgtcagcctcagcattctcctcaacgtcgctgatggatgcatttcggctttagatgtatattctgtttatctatctcgtacccatagtcttggtagcagttactctggagggtcatttctagcttcctaaaggagaatctcttctattgatgtcttcattaagcgagaaagctatgatatacatgacttgattaagcaggcaattgacccgttttgcttggcgttggttggaggtgcacgtgcaccttcgaatatatatgaatttagcccctctcttttttttggccctatgtaattgagttgcagtgttttgcatacattcgatgacccgtgtaattaatcatattggtaatggtaaaaacatgcaatcaag

SEQ ID NO: 41502 - DNA, 2519 bp, Zea Mays
tgaacctcttctcccagactggacgtctgcagtctgcactctgcacccccgtgccaatcccgtttctattcagtcggttcccctctcccccaagccaaacaccaccatccttccctccctccctacgcatcctctccccctcgacgctttccccacccaatccgaccgccggggcgggcgattccctggagattcggcgcggattcggggctcctctcggggtttctcggcgaatcagcggggatcgggactcccggctgaagaatcctctatctgtttcggtaactgtttgcaacagtttgtgtggagattgcataccatcaccttccctgaagtgaaaaatatatgggctgatcttggcatttcatgggaggttctgaagatgacgagccaccctcaaaacgcgcaagaacatcctcagtagaatctgcaagtttaccagactgtttctcgttttcgaaattttccaatcctttgggaagtacaatggctagacctttgccttcccaagggaaagaagttatggttggttccaagggtgttattaagaaggaggaatttgttaggataatcaccaaaactctgtatagtcttggatatgaaaaaagtggagcagttctggaggaggaatcagggattattttacataaccctatggtgaaacttttcagagaacaggtgattgatggaaattgggataatgcggtggttaccatgaatacaattggccttcaagatgaaaacatcttgaaatctgcggcatttttgatattggagcaaaaattctttgaacttctaaaaaatgacaatgtcatgggtgctatgaagactttacgatgtgagatcacaccccttggtgttaatagaaaaagagtgcatgaactgtcgacttgtatgatttcttgttcttcacagcagttgttccttggtttttcaaagcttggaattgattcttctagttcacggttgaagcttctagaggaattgcagaaggtgcttcctccagctgttatggtgccagagaggaggttagaaaatttagttgagcaagcacttactgtgcaaagagatgcttgctatttccataattctgttgatgggttgtcactttacattgatcatcactgtgggaaagatcagataccatcttgcacgctacaggttgatgaggatggagagctattactgaggcatacattgagtggccatcaaaagtcagtgatgatggttgcatggagccctgatgattgtcagctcctcacatgtgggcaggaagaaaccatccgacgctgggatgttaaatctggcaaatgtcttcatgtttacgagaagtctgccactggtttgatatcatgtgcttggttcccagatggaaagcaattatctggtttagctgatcaaaacttttgcatttgggatttagatggtaaggaagtagattgctggaaagggcagggatcaacaggaacatctgattttgctgtagcaaaagatggaaaccttataataagcatgagcaagcagaacacaattcttctatttgatagggagacaaaacaggagagaataattgaagagggtagtacaattacttcattttgtctatcagaagacggtgatttcctgcttgtaaatcttgtaagcgaagagattcatttgtggaacataagaaatgatcctgttcgtgtcaaccggtacaatggtcataagcgcacccggtttgtgataaggtcttgttttggcggatttgagcaggcgttcattgctagtgggagtgaagattcacaggtctacatatggcatagagccactggcgatctcattgagactcttgctggtcactcgggcacagtcaactgcgtcagttggaatcctgcgaatccccacatgctcgcctcagcgagcgacgatcacacagttcgtatatggggggcaaagaagtccagtcttaagcgcaaggatgttgggagcagcaattgcaacagtaacggttctcgctcgaatggcaatgcacataacaacgttttcgttcaaaagtgcaacgggaacaacaccaaatgatttgccagggcaatgtatccccatggatggttgactggcgtctgtaaatccccctgtcctttacttccctcgtggaagaagaatcgccaccgccatagttaagacaacaacaacaaagctgcagcacaaagtgtggggaacctgctaggtttcgtgcgctatctttcccttgttccttcatgactgtcatcacatgtatttcttaattcaagctgggatggaattatggtattactttgcatctttgatatcttgatttgccctctctgattgattgtaactgcattttggtggtgatggttgttaactcctcttattgcattttgccttgagaagaaacaaatgttggcctaggatgctccgtctaaagaacgggacggaacatcttatcacaaatttaagtagattcatggatcatttatttccaatgaattaagtggtctgtttgattgtcatat

SEQ ID NO: 41503 - DNA, 1710 bp, Zea Mays
cagcgaagtacagttgagagatagaaagataaaattctttgagaggcggaagattgagaggatgataaggcgccttgagaagcagcaacgttcaaatggtgatggtttcagcaataatttgtcaaaattgtgagaaaatcttgaatatgtcagattcttcccaaagaatgaaaaatatgtctcgcttttcactggagggaatagctcagatattattcaagagaggaataaatggtgtaaacatatcaaggagaatctcatggctactgcagcaaactaaaaagatttagaagagctaacaagcgatgatgataccttggatgtgagtgatgatgactttatgtctggaagttcaagcaatgaagaggctgatgatgagtggactgacaaaagtgctaaggaaccagcttccagtgcttcaggtagggcagcatctggcatgtcaagcgatgaaaagaaccagcgttagagagatgctcgagttcttatgccaccaccacgctcattagcaccaaatagagctagacatgcagataaacgtgtgatatccagctcaagcaatacttcaaacagcacaagcggtgaatcatttaaaaatagaagagtaccaaatcgacctggggataataacagtaatctgagttcaaattctgatgcaattaaaccacgctgcaaaaggaggcataaaaagaaaaggaagccggtataactttgcatccacatttcacaacatagaccttttttgtgcatcttttttgaggtcatattttagaaaacataggatgaaccacgtctagtactttttttgtgtatcctagtttttcaaacttcactatgggtttcaagtttattagtcatgatatggctacttccacttaaattatagatcctcttgcggcaccttggatgctgctgtgaaacctatattttgctgccatcaaacgggcgatctatcagagtttattcattgggtattataaatcataagttcataaccatcaacaggagaaacatatcggttgcagactaacctatcggtgcaaagtgtgcaaatcaatgtaaagagggtggtggggagtgttgttttaaaacatgatatttttagaaagttcctcccacctgcatccttagtttgcacctgatatgttgtccgtatatcataagtggagatctgcacaaacagtagctataaaaaaattatgaagggaaatccggccaccatgtttgtgtggcttgaagttagttatgcttgacctattttgaggcaagttggtgatggtatctgtattggttttgcctggcctgtaccgttttgtctcccatagacaaaaacagtgttagtggttaactgtctcttgtaatataatactccgtagatatataaatgcagtctcacaatatgctgcttctgtatctcaacaggcatggtgaatattcccaaagcgcgtgaatcgtggtgcgtggaacgaacctgagattcccagcaaagtttgactttccagcatggtcaattcggagagaagaaaaaaaaaacacagcatgtgcgatgtgcctgagcaagttgattgatctgtaccctcactcctaatgtaaaaaaaaaaacccgactctgcatccatttgttcacggatatcagtatatcactttacggtggaccagatattgccggtctaccgaatgcgtgttccattttcgccgtgtagccgtggt

SEQ ID NO: 41504 - DNA, 1064 bp, Zea Mays
cagcaacgctgtttgttaattttgtatctttaaaattaaaacagcggtgatatcaaacaaatactttaggagtatctacacaaaatactctacaactttagtattcaatagataattaaattctgccatctacaagttctaaaacatcttacaagataactgactgaatctgttttagacagcagtatggttaactttaaaatttgatatctccaaaactgctgaaccaaaaattatgaaattctgctggaagtaagaacttttatccctctacaaaagtctccatagttggaagagccaattcggccatttactagatgaaacccaccagtgaacagacccactcatttttgtcaggtaaacaggaacagccacagtaaaacaaacataactggagtttcacaaatcatatgaatgcactctttaacaatctggaaagcttataaaattatctacaacttcttttaccaacccacagtttaattctgttgataaaattgcctaaatcttaagagaacagattctgcacagaattatgagactgaaaaaactgctctagtaaaactgcaataactttctggtcggatgtccgattgaggtgttcttcgcggccacggaaagatctacaaattatctacgactcatacatagactttttatttttttgaggccactaagaccacggaaaactggcaggaacagaaactgtcgaatctgccattctgcagaaaactaaattcgagatcaaaacctaaccccacatcaaatccaacctctaatcctttaattcccatgatccacaacctccaaaagcctataattacagggaggaacaaggatctcatccatacctagggtttccccaagaaatcttcaagaggagatggggaagaacatctccttgatcctctcttcctcttcaattcaacgagcccctccttttctcgatccttgctgcgtagggggagatcttgggggaggaagcaatggaggatggctgccatagggggagggggcgtccagccaagggggagaaaaaagggggtggcggccaagaggggggg

SEQ ID NO: 41505 - DNA, 2992 bp, Zea Mays
ggggaagggttttggaattaggccgccggacgccgttgcgtgggagagagcaaagtgaaccaggccgaaaccgaagctaccgccacgaccaccacccgcgcccactgcagcaacgccggaccctcgtctccctgtccccgactaccaggaggagatcccggcggcgaggatgagcggcggcggtgccggagggaagggggcggcggcgcccgtcccggccgggtcgaggaaactggtgcagtgtctcaaggagatcgtgaaccgacccgaggcggagatctactccgcactgcgcgagtgcggcatggaccccgacgaggcggtcagccgcctcctctcccaagatactttccaagaggtaaagagcaagcgcgacaagaagaaagagattaaagaggttcctgagacaagatatcgatcggcaaatagttctactaatcgaagccttagaagtggtgcagatcgtggtggacgtagcaattctgtgcactccagctctactgataacatgacctcaaggccaccagtctcagggtcttgtacggcatcagttaattccaatcaaatgcagacaattgcaagttcctctgcaaacaaacatatggttactgatggactagctgtatcattgcaatcatcgtgtgggtttcagcatggtggttggtctgggacacctggtcagttgtcgatggttgacattgtgaaaatgggccgccctcagggaaaggcttctagcaaacctgtggtcacagctgacagaggttatgctggacagtacccatctttgccaagcacaaaccagaacctcaaacaatctggaagcatggtttccccagcagagcttgacaaggggttacaacctgcccacaatttggttcaggttaagaatcatggtcattttactgctgatagcaagctcccatatggtactgattggtctccacaagacgacccaacatctgagaaccaatcttcccagcctgagacgtctggtgatccatctttgtatgaatcatcatttcagtcatctacattggttactgatgtagttaattcacatgaaaattcacacttggagttggatgaaaacagcacctttgcaatgagatcaacacctgcctctgagagacacttggaacctagtgacagtattcctgaatacaatgatggaatattaaacaactcaagttcatatcagcctcataattactcttacacagaacaagatgttgaggattccagtgctgatgtatcagcagcagcagaaaatttccagagtttaagcctacataatgatgagttagctgcaaaaaagactgctgaagataaccctgcagtgataattcctgatcatttgcaagttaccaatacagaatgtgttagtttgagctttggcagttttggatctggtgcattttctgggctactcccacaaaagaccactgatagcaatgtggaattccttgttcaagaggattctgcaacagtagatccaatagatgccaggaatcaagattactatgaaagtggtgcagtaacttcaccagcagaagaaaatcttgaggccatgctaggaactaacatggagaatgtcgatgcaccttctgtttcacaggctaatgagctcagtcaggacgtacttgatccttctgtacttaaatatgacgtgtcatcagtttcaagtcatgcttattcgaacatgaacactccacaacctagcacaatagaggacccacaaggaaacaaccaagcacatacgctttcccatttgtcaaacatgatggccctgaaagcaggggttttctccaacgctcggtctacgcagtctcttccaagtactagcattccgacggggcatcctctccctcagcaattagcacatcacccttactctcagccgactttagcacccatcacacatttcccaaatatcgttggctatccgccgtatttgccacaaaactatgctgcttacctatcttcgggcaccttccagcaagcatacccgagcaatggagcattccatcagtctgctgccgctttgctcggatctggtatgaagtactcggcccccgagtataagaacaacctgtctgccacaggcttacaacagcaacatcagccacaaccgcaaccaccttcatcagtcatctctggttatggaggccttggaagctcaagcaatatacaaggaaattttacccttaatcagagtactggcactggatcaactcttgtgtttgatgatgcattgggcagacagtacaaagacaccagtcaacacatagctctccagcagcccgacaactctggaatgtggcttcatggctctggttcaagagcggcggcgcttccgcctaaccacttttatggttaccagggacagagtcagctgggtggctttggtcaggcgcagcagcaacagccttcccaattcggaggccacgggtacccgactttctaccagtctcagggtgggctgacacaggagcaccacccccagaaccttgctgagggcagcctgaatggcttccaggtcgcaccgtctcagccgtctcatccgagctggcagcatcagcacacctactgagcattgttctcccttgttatggtctgtctctttcgccgtcacaagccaagtttcgcgtgcttgtgcccttactcgatgcagagtaagctgctcggattttagctgagcttgtaccttcagcgctgagaagggtcccaggacccaggcatacaacagttagagcgttttaacatgctgcgtgcgtgcgtgtgtgtgtgttgccagaccgatgccttgtggtttttcgatagcgagttatatgtgcggaggcgcagtcatgtataactgagacatgataacataacaaccaatcgtttcgcttgcatttttttggtcatgcacacatgcggttatcgcttcaggaagaaaaaaaggagcacctctgactcagcttatggattataaatattttcaatctcacca

SEQ ID NO: 41506 - DNA, 1197 bp, Zea Mays
gcggagccatgtggacaaacaatataatagcatagcatagggacatgacgacgagctgtgcggcatcttcgatcgtgtcaccactggcgatggacatggcggcgagcggcgcgctccccgtggtggacctggcgccgttcttcacggacggcgacgagggcggcgcttcccgcgccagagccaccgaagccgtgcgccaggcgtgccggacgcatggcttcttccgcgtcgtcaaccacggcgtgccggcacacctcatggcgcgcgcgctcgagctgtcgtccgctttcttcgcgctgccggacgacgacaaggccagggctcgggcgcccgagggctccgaagcaccgctccccgcgggctacgcgcggcagccggcgcactcggcggacaagaacgagtacctcctggtgtttggtcccaagcttgggttcaacgtgtaccccgccgagccatcaggattcagtggaggagtgctacaccaagctcaccgagctggggctgctcgtgcaggaggtcctgaacgagtgcatggacctcccgccgggcttcctcacggactacaacagcgaccgcagcttcgacttcttggcggcgttgcgctacttcccggcgacggaggaggaggacaacggcatcagcgcgcacgaggacgggaactgcatcaccttcgtcatccaggacggcgtcgggggcctcgaggtcctcaacgacgacggcgactgggtcccggcggagcccgtcgagggcagcatcatcgtcaacctaggcgacgtcatacaggtgctgagtaacaacaagctcaagagcgcgacgcaccgggtggtgaggaagcccgtgcacaggcactcgttcgtgttcttcttcaacatccacggggccaagtggatcgagccgctgccggagttcacggccaagatcggcgaagcggcgcggtacagagggttcgtgtacaacgagtacatgcagctgcggatgaggaacaagacccatccaccggcgaggcccgaggacgtcgtccacataacccactacgccatctagcttgctaggcgcagaaactgcataaacaagcaacctgcacacaaatggctgtgtctactcttgttaagattgttgtagtctggccatcgcacgcaccatgcttgctatcattaaaatcgagattaaataaacaacaaatccagctacgcactg

SEQ ID NO: 41507 - DNA, 1738 bp, Zea Mays
tctcctcctacgccagtaccagtacacacgaccaccccaaaattagattcaaaatctctctcttcctgccattctgggtcctcagaaacgggcgcgtctcctcccctctcgcacctgctcctcccgtgacagcgacggcgacgagggttcaagggatgactaggggcgcaggtctatggaggtaacttcaagtgaaggatctcaattggagttgacaaaacttgcagcaatatttttcttcttggtggcggcggcgggcgcctccctccatggctccagctggtgatcggagcgccgccgcccggaaccccacaaaataaaacagctcgtcggtgccccaccccacccaccatctcctcctcaccggctttatatatgcacgcgccgcgcaccccggcgccagctacccatgccatgtcacacgacacggcatcgcacgtccaccaccaccccgccgcagcagaagaccccggcggcagcgagtgccggttctgcgagatgacgcggcagcaccatcctcagtgcgcgcggcggctgccgaagcgcatcatcctggtgcggcacggcgagagccaggggaacctggacatgtcggcctacaccaccacgcccgactaccgcatcccgctgacagcgctgggagtcgagcaggcgcgcgccgcggggcaccgcatccgcgacgtggtggcggctggcggcggcaactggaaggtctacttctacgtgtccccctacgcgcgcacccgggccacgctgcgcgaggtgggccgcgccttcccgcgggaccgcgtcatcggcgcccgcgaggagtgccgcgtccgggagcaggacttcggcaacttccaggtggaggagcgcatgcgcgccgtcaaggagacgcgccagcgcttcggccgcttcttcttcagattccccgagggcgagtccgccgccgacgtcttcgaccgcgtcgccagcttcctggagtcgctgtggcgggacatcgacatggggcggctggaccaggaccccagctgcgagaccaacctggtgatcgtctcccacggcctcacctcgcgggtgttcctcatgaagtggttcaagtggacggtggcccagttcgaccgcctcaacaacttcgacaactgcgagttcagggtcatgcagctgggccccggcggggagtactccctcctcgtgcaccacaccaaggaggagctgcagcagtggggcatgtcgccggagatgatcgccgaccagcagtggcgagccacagccagccgccgcaactgggccgaggagttctcctccttcgtcgacaccttcttccaggaccccaacgactcgtcggacgaggaacaagaagcacaagacaaggagacgaacctgctgctggacctggagtaactacaactattcatccgcccacaccctgtttatttctttctttcaatgcctctttgaaattgtttccattggatttggatgacgctttctgttgctgctagtaggggggaagagcagagcagggaggtatggtgtattcatcagtcattgctgatctctttcttcctcagcagagtcattgctagctggaaaactgacaaagctcgcagtgcttggctgtctttaacagttaactagtagaataaagatgacttttttttaatttgcggctttcttcattaattatttatataatcaagatcctttcatacttcatacagcacagggtacgttggcattctaataacaacat

SEQ ID NO: 41508 - DNA, 1459 bp, Zea Mays
atggaagtcaactcacatgcgaattcggaggtcatatgattgcaatgaatcctgacatggtactactgtcttggaaacaaatggagaatggaagtggtgcggttgtaccttctaattcttcagataggtccgacaggtctgataaacctttggaccaaaagacaatgcgacggcttgcccaaaatcgtgaggcagcaagaaaaagtcggctgaggaaaaaggcatatgtgcagcagctggagagcagtaagctgaaacttgcacaactggaacaggaactccagaaagctcgccagcagggaatcttcatttctagctctggagaccaaacccatgccatgagtggaaatggagctttgacttttgacatagaatatgctagatggctagaggaccaaaataagcagataaatgagttgaggactgcagtgaatgctcatgcatgtggaagacacctgctgaaaggtgcttcctatggcttgggggttttcgtccatctgagcttttaaagctcctagcgaatcacctcgagcctctaactgagcagcaaatgctgggtttgaccaacctccagcaatcttcccaacaagcagaggatgcgttgtcacagggcatggaagcactgcagcaatctttggcagagactttggctggatctctcggtccagcaggttcttcaggaaatgtggcaaactacatgggtcagatggccatggccatgggcaaactcgggacgctagagaattttcttcgccaagccgacaacctgcgacagcagacgttgcatcaaatgcaacgtatcctaacgatccgacaggcttctcgtgctcttcttgcaatccacgactatttttcacgattgcgcgctttaagttctctgtggcttgctaggccacgtgaataacgaagggccgtcagtattttgagttccctctgccttacggtgctgctgcgtcgttcgcagcgatgcatcacagatctttggtggtactgtttttgttgtacaattacttttggccgctgcttggtccaaattgtactcaggtgggtgtacaagtaggtcaatataatcctgtaagttatggtgatttatgggtgtgttagcaatgcaataataattagagagggcaggatcagggtttctgttgtttgtactggttagagatttagtcctaatgtaacttcctgggacatggggggcggaatgggaagagagtaacaagaatcttcctttggttactgtagtatatgttggtattgttgcatcccattttctcattttgctgttaggagaatgattattctgtccatttgtgtactttttgattaatgttgtttgtagccccaacatgattatggatatgactgctagttcattcccattcataccactgcagtagctggccttattattaatatcatcatccatacaagagcagtggttgaagttgaaggcggc

SEQ ID NO: 41509 - DNA, 2158 bp, Zea Mays
gtgtgcaaggtcttattgggcaatatgctgttcctatactagaagagaagtccgtctggggaactgatgctccaactcggattgcttacatggatacccaggtttatatttttttccttgtccatttgaaaatgggatcaccgatctctttttgaacctctgcttcagctttcctttggcacattctggttaaataggacgtagctcgactaacgtttatagctatgcggaatgagaaggccaacaagaaactcatgacctttgctggcccacgagcttggacaactcaagaggtgattactttgtgtgagaggttagctgggcaagatgccaatgtaaccactgtacctgttgcagtcttgagatttactcgtcagttgacacggtgcttccaatggacaaatgatgtggctgacagactggcattttcagaggtgctctcaagtgacacagttttctctgctccaatgaatgagacctaccagcttcttggggtggatgggaatgacatcctcagcttagagaagtatttacaagattattttaccaacattttgaagaagttaaaggatctcaaggcacaatccaagcaaactgatatattcttttgatataggaaggatttctgtgacctagggacataattacaaatctgtgtctcaaatgacagatgagtgagcacaagttttcctgtatatttgcatttttgcatgtgcaagaatgctctgtgctattagtgatgtgtatataatcttaacattttgagctatcaaagttccgaaatttgtgcaaaacagcataaagtctatggtttcacgacgtcaacttaaattatgctcaactcatggcctcatgggttctagcataactgatcaaaaagtaaagaaaagaaaagaaaaaagattagttttaaattgaatgaaacaagaataaaatttgttattaatgattcgttctataccataagaaataagcaacttttgttgattgttgatccattgaagaaggccttcccatgaactggaagagactggaacaatagcatgtttcaaatggcaaacacagaaccttactatttgatctcccctattttgcttcgttgtgattacttaagtgaagtgtaaaaaaagctatggggtccacattttcttttttctgttacctgtttgatgaattcatgtttgttaattgctcttgcgatggtccaatttgttcatagcaagaatcctaataatcattttgctcatcatttagagagattttgattgaatcttctcctttttgatacatgcgatataacctgttctcatggaattatttacaagaaacaaggtttctgttaggatctgtgatgtgttaactataagtttataccttgtggcatggttctgttgtatatttagaccagatctgcttcacaagtgccaactacatttttcaatagacaacaactcaccaaggtaacatgtctgttgggaaaaagatcaaataattatgcttcttctttttctcgaaaaccaaataattatgcttaacttgatttatgtttggaaagaatctgtatacttaagacatgcctggagaaaatcaaacaattgatgaagaaggttaattctgactgaaatatatgcatcattttcaaaaatccaaacacacaggggaactgcttgtcattgcattacgaaggagagcagtttgttactttacaaggaacatcacatgtttttttagttacattcgctcctgttacaaaagaacacacgaccagatcatatgcactgccccgcagatgcagtcagaaggcgctctactgagggcaaaacattgttgaagacgcaattattcctctgcttccaaattgaccaggatcccaataccatcagagagttgaggcctttgcatttctccttgcatatctgcaactctgctttgcaccaccactcaacaaaagtatctataggctctggtggatgaatatatccattcttttcatgactgtacattagtatgttcaaatttatgcacatttattgtttgttcaatgaaaatatagaaccacatttttttagaaaatggaagagaactttccgcctctgcatgttcacacacagcgtgatatagaaccaaattgatattataagtatgccataagtacgag

SEQ ID NO: 41510 - DNA, 418 bp, Zea Mays
ctcatcggacgtacctgaactcgcattttcactggtgatagatcgggaccggggggcctccccacaacttgtactctaggatcacataagcaatcccttgaccctcccccatccgcgctcatatcatgccataccgagtagccggccaccttaggagccccatcattgtgtgcgtagtgagaaccaccgccaccgccgccatgggaacccgcatctggggttgctcgggtcaaaagggttggccggaggggcttcacagagatctagggagttggtcgtcatcacgaagaaggcattcctcggcgggtgaacccggaattcctcgacggatttcattcaccgccgcgaagacgcccccttgtcgtggcacggctcctccatatcgccattgccggtaataagccctcccatgtgtccg

SEQ ID NO: 41511 - DNA, 7045 bp, Zea Mays
cctcgtcttcctcgctccgccaccgccacgctgaaaacccacgcgctaagcgcaccccgccaagtctaccagacgctctccggagcggcacgcgcgcgccaatggcggggccttgaggtgctcgtggggtgagggagggaggacggcgctggttagtgagggcgttaagcggcggctcggcgcggcgggcggggaggatgatacggcaccagatacggaacgagtatgggctggcggatccggaggtgtacgcggccccgggggaggaggatgacccggaggcgctcctcgagggcgtcgccatggccggcctcgtcggcgtgctccgccagctcggggatctcgccgaaatttttgtcggtcacggctcgcctagcagcttatcttggcttctcattcatactgaattgtacatgtgcatcaggtttgcagctgaaatttttcatgaccttcacgaagaggctatggctactgcttctagaggacatggtttaatgctccggttgcagcagttggaggcagaatttccagcagttgaaaaggctattatatctcagacggagcactcaaattatccacatgatgatgaagaaggccatgcgttggaggaaaggggcaactcttgaatcattactcactgcaaactcagagtctcaaattacccccaaggatcgaacttctagaaaagttccacctaggacaacaaagttgaaatccaggcaaccacggagtcctgatcataaaaccactagcagaatcttgagggagcatctgcaagaagtgattttatcgcagaaaaaaatcatctccagatattcggtgaggcattactatgtgaaatttggatcgcctgactcaagtgaaactgcacctccttttggagaaatggacagttttggcgcccttgttcaatcttctggtaaattggatctgacaaaagttgttccagtaaacgaatctgatgctgtggatactaaatctgaacccattgatggatcggcttatttggagctaggtgataaacggaatctggggaaacaacatgaaccttttcaacaaaatggcatggtccatagctcagaaaagctgccggattgtccatacttggatattggagaaagtaataacagatcacatttgacatgtgaagagaaaccccgattggctgaggttcctgctgatcagaaagatgttgatggccgcaggcctgatgacatcgtgagtgatcaagacaacttcattggtgcttctaatgacacggacatggaaaacaaagaaggtcttcaaatgaaaactgaatgtgatcccagtgccagtgttgaactggttgaattgaaccgtcacaacaaggaaggtgacaaagtattgtatgccgaacctccagaagtaggtcctgcaatagactcgtcattgggattggataatgcaagcagtggtgaagaaccaacctgtgtggacttgccactgtcaagtgattctgctcccacagtgtcagccaccaatggtccaaactctggttcacaatctggcagacaaatgaatggtgttgactggtccacagacgaagagtcttctaacgatgtggatctaattgacgtgagctcatcttctagtgtagtttctgaaaatggtgacgtacaaaacaatgattgtctcgttagttgtctacaacacgaggaagcgattcactctctgagtgatgatcatgctggtgctatccataattctgatgaacagtcaccgaatacgtctagcaactgggatgatatggctattggctgcaacaattacaccgagaaagtacatcatccagtggagcatgtccaggatgttgtactagatgatatttctatgatactgagcaaacctaatgatgtttcagaagacgaagataaaatcagttcagggaatgctgatgatttgtctctccaccctaccaaattgaaccaagaggaaatacaggagttgaagacagaatcggaagaaggcagatctctagaatcaggaagttcacctagcaaagcatcattgccaaataaggatcatgtgtcgatgaatgatgtagaagccgacactgttacaattcctaaagaaactgttgcagatactgcaccaacaggtttggatcctgatggcatcgacgagcgtcaagatggagttgcaccgaaatattcaagcatccacaatagtgtactgtatgaatcatatgatgacaagattgctgaagacacacactctttactagatgatggcctatcaactactttcgatgacgataagcatgttgcagaggatcatcaatttgttgttcttgaacaaaggacttgtccaactagcctcaacacatgcaaggatgattctatgcaaggatgtgccgtggccagggatttcactgatgctgaaaagcttccgggagtcgtttcaggtgtattagcttctcaactggagacagaatctcatgtaggagagacacttgcatccacgtcctatgcattcagtgatgatactgaagcactagagattggtgtccctctagcccctggtacttcctttctacctaacaccagtagttccttggtagaaaaacatgaattgactgaaacagaagaaattgcagaggttggtgaatttgtggttgcaaaagaatcaactactagcgtatttgcagttgatgtggtacctcccaaagagttcattgatgctaacatacatcctgaaaaggtagaggttctggctacaagtttgactgaagaagccactaggctggatttacaactacagtctccttccagggaagttttggaaacaacggaagctattcacagaaattttggggcagtagatgaatcaagagaagatatctctaagaagagtatgttgcagacagacaatagtcctcttattgtagagactacaagtgaaaaatgtagtgacagggatggtgatacacaatttctagtaaaatctgattatcaagaggaattactaaaagagggcagtcataatgctgaagatcgatctctctgcgatttgaacaaggatggtgcagtaaccttgaaaagtaatgcagttgagaaacaaccagtgaatgctggtcaagatttggcgtgggggatgcacgctcaagattctagtagtacaaacccgttcctggatcctgcctacttgatgagccacactcaaatttattcatcttccagtatgagtagccaaccatgtttccctgaagaagaggatttcctttcagagcttgtaatacaacatgacaatatgggagtaactgctgatgccctttgggaacctgcaactccacctgatgatgcgccattaccatcagaaattatgactgaagatgatttcagatccttctgccaagaatatcatgagatagatttttcatctgtcactaactgttctcacagtgaaccagcctcagattctaacaaaattccaaatgcttttctgatcagagagtcagattttccatgttataactctgccttgccagtgaagttagatcaggaagcctgtattcattctaagttctgttctgagtgtgtcgaatattcatgtgctgtggaaagacaaggcactacatcaatggttgtttctggtaaagaagatcgcgtgggcaaggacgagacaccaggagtagatttccatttaaattttctcgagttttccaatgataacagaagtcctgaattaaatatgctctccgttccagtggatttacggcaggaactgcatggcttgcctgaagttgattctcgtgatagttcccctttgctgcataaggagaagactagtgaagaatgctgcttttctttaagcaacaacgttgttgaagtgaaacaagagctggaaatccgtgctgaccttgttccacattcttctattaatgaaaaagtagatggattagatgaggctgtaccggtggaaccagaggcccatgcctgtgccttggatgaatatgacaaccaagatgtcccacacatttcaactagtgagaagaatgaaacccttactttgggcaaacctgttttagtccaggggccagaagtttgtgcctttggtggatttgaatgtgatcctccaatcattccatcaccttcagttgatgagactaaggacaatctagaagtcagaatgaatatgatcctccaatcattccatcattctttgaggacttcttttcaagcagaacagaagtcagaatgctacacctcaggtgaacatgattctcaaaccgttccatttcctttgcatgatgagaatatcaatgaactggatgatcctcctttgagcaatgctgacgaactggaccgggaatcaaaagcttgtgttccacatgaatgtgatgctcaaatcgctccatgttcaactgatgaggatatacatgaattggatcaccctcctttgagcagtcccgctttagtggatcttgaatcagaagaccatgtctcggatgaccgtgattccgaagtcaccccatgtttggttaaagataagattgatgaatctgtagatgctcaaccaaacctgcttcctggggagctagagcaggaaactcatgcaccccctgaattagactttcgagttgctccacaatcagcgaaagaatctgattgctcaactgaatttgattcccaggccgcaccatgttcttcaaatataccagtactagctaacacaacagtgtcgacttgtatttctgccatgcctagcagtgaggaaacgtatcagttgtctcctgttccaccacctactgtacaatttcaaaatgattcctacaaagatcctcaagctctactcgctgattcctacaaagatcctcaagcgccaccccctctccctcctctccagtggaggcttggaaagcctcggctaggacttctgagtagaaaaggctgtatgactgaacctgcaagggtaatagatcctgttttgcagatatcaagccaagagatggatattaggccaggtttgcttgatccaacggatagatctatagaaccagtatcctgtcaagaaatcaaagaagatagatgtgagagttctttgatagatcataatgatcaaaatgtggattttgatagattatcgaccagggttgcagtaactgatgttgcaaggactgaacacaggctatccttagagacttcagaggacattaagcaacaggggcatatttcttcatcggcaacaggagttggggaacacctggatgctgggttcacatcaacaatggcagatgaggaacatctggatgattctgggatgacacatggaacagctctatacttatcagaccctctgtttccattacctacatatgaactgcaggaccctcaaccagatactcgagaaaatagcgagcatcccagtcaaacacatggagctgcatctggggatgataagtcaatggatgctgttggcagcatggaaagcaccctaacaaaaggacatgtttctggaaataggtgctaccagcaacctcagcatggtgaatcgtcctcagagacttcagaccataaagagcatattacaaatgcatcagaggatggtgttaagcatcagtcaggtacaagtgaggcaccttcagacacagcaaagcattctgcaccaggcacgctgttgaaagggaatgtccaagagagtcaaattttacaggaacataatgtggggagttccgaggacgatcaaccaggaggcctgttgtacagcttagaaccagtggcacctcaaggggaaaacaaaaaccaggttaacaacccaggcctgttactggaatggcctggagatacaagtgagttggtcactggccttgaaaaaagttgctatgcgcatgctgagcagccacctgtgatgggatggactgttggacctcagatgcttcatcctaaatatggtattttagaagaagagagccaatttgagcctaatatcgccgacaatcatttaatcaggaagcctatttcgataaaaaacatcccaaggaatccactggttgatgctgttgctgctcatgatagaagctcgatgagaaaggtttcagagcttgcaccaccgactgacaagccgaagcctaacgagagaaacatgttgctagaacagataagaaacaagaccttcagcttgaaacctgttgctccagctcagcaaacagcaatgagatcccctgctagaaccagtactagaaacttgaaggttgccgctatcatagaaaaggcaaatgccatacgacaggcagtgggaagtgacgacgaagacgcagatagttggagtgatacataaatcccccaccgtttgccctaccctcttggtgcttctttccatggcagaaaggtaccgattcatcaagagcattggggacaggatggggatgcacaaccatgtcatcgtttttgtttgccctaccctcttggtgcttctttccatggcagaaaggtaccgattcatcaagagcattggggacaggatggggatgcacaaccatgtcatcgtttttgttagtaatataatgctagtcttgtgtatagtatacgcccataatccttttcattttttgtatgtgtattctttcgaccgattgtttgtatacctgcctctctctcccacagcagcaaaggctgttgcggttggcatgatcctaggatagcatgcatggtctatgtaaattaaacagtagtagttaagtaaagaattgttccatcttttctggaaaaaaaggtgagataatggcatcatcgattccacacagcaagcatagcagaccttgaattgcaaaaatatgaaaaccaatacacccgcttagacgaatttgttgatccatggcaggtcaaactaacaaactaactattggaggcaataactaaacttaacaccaagatttagtttcaacagtagccgccgcggcggaggcggccgacgagggtcgagcagatgaagccggttgcgcccgtctcccccgccatctcctcgcgtccttcccgtgagctgactagctgagctgggtctcgcgtcactccgagtgtgctgcggc

SEQ ID NO: 41512 - DNA, 2735 bp, Zea Mays
cgcgtgccgacgcgtgtgagctggccggacccaagcttttcgtttgattcagcagaaccgttcgtgttgacatccgcccccttcccctcttcgactcacggcccacccactgcacgcgcaagcgagaggacggctccgcctccgtcccatggatggccgccggcgccacctcatggtgttcacggtcgcggtcactgctaggtggtggtccggcgtgctagatctcacgcctccagggcaggctccctcgcatgggtcgccgtttcctcatggtgttcacggtcgcgctcatcgctcgcagcgcggaggcgtcgatctgcatctatgatcaggagcccttctgcgaggtggacaatgcctcctcctctctggccaatacttctctgccagtcgcctgctcccaaggggaggggcgctggaatacgggcccgcagatggcgtcggctgtgcaggcggccatgatcgacgaagcctcctcagatctgtgctcatcgccaccagggtgataacctttgtatctcgatcctgctcagcatctcggtggtcgtgcggtgccagctggttcggtcggggcagcaggcgctcctggcacccgcctatccccgagggcgcgaccaaagggagtccacgacgaggaagcgacagggccgaaatcagatatgaatgccattggagggttagtactaaattcttgttgatatttatagttttctctatttacataggtacaataagccggcgaagtttcgtggtggaatcagcagggtgcccaccggccggcgaggccccggctgcccgaccggccagccagtcggagtcgggccgggtggtctccgtcgcagggctatcaactttagatcttgaacatgggacccaaatcactggcctggagcacaatacgaagaaaactagcttatgattgcagatctcacccatgggttcaatgagtcaaaaaatcgaaattttcacggaagatgagatcgcaagtcgatgatgaggtatatgatgctttagccgtcaccttctttctatcttggaggatattgaaaatttgattcaaagtcggcgtcgtcctcgtcgctggcgccggcggacgtgtcgtcggcgtcgggtccggtgccctcgctgtcggagaggcgcgcgagccagcagctgccgtggaggtggccgctgacgcagacgaagtactcgagccggccctcgtaggcgccgagcctgcgggacgcgctgcgcggggcgagacccgcggcggccatgctccagacgcgcgcgccgcagtaggggcatcgcgcgcgggggtccagcgcggcgcggtggcccaccagccacgcccgcgtccgggaccgcatgaagccgcggaacacgccgcggtagacgccgacgtcgtcggcgcccgccacggcgtgctcgcaggggtccgacacgtacagcaggtcccccgcgcagcggcgcggcaggaagctccgcccggacgtcttggagaagcgggagaccggggcgaagtggcccgtcacgcccgcgcccgcggcgccgcagcagaagagcagcagcttcgccagcgccggccacccgccgccgacgcgcccggccgccggcgccgagcccgcggggcctcccgtcagcgccgccaccatccgcggcgcccgcgagacgcagagctcccgccacagcacccgctccgccacggcgcgcaggcgccggctcacccgcgccaccgcgcacagcgactgcgggtcccagttgagcgccaggaacacgagctgcagcaccttctcgtccatgagccccacgttgacgccccggatgcgcgccgcattgccgccgccgccgcctcctcctccccaggtgccgaccgcgcaagagctagctcccgcattgccgccgccgttcgacggcccgctcagccgccttatggtcaaggcgctctcgctcatccctccgcgcccatcaacctcacctcacgcaccggcaccgcgagcgaagcgctgagcgcaggaggccgcgaccgacaactggcgagctgctcacttgcctaaactggtgctcgcagctcgctcattcggtgtccaatatcggcgtgccgcaattttcacaggccgtagccggttatatacgcccgtccgctgccggcggtcaggtgcagtgcgctgtgcgcggacacggacacggacacggacccgattcgcgtcgtgtttgtgtctttatggacgcgcgacaaggggaccaatccctcccaggcatcgaacgcactccacccctctaaatatctcgactattacgcgctaatccctccctgtgcgagcgccgcgctgagcactgacggtgggcgttggccgactgccccccgtgctgttgttccctggacgagacgaaacgcaagcggaaaaaacaaagggtgtttgtttggttgcggtggtgcaccattgatccaaacagcctaaaagcttctggaacagtctcgcggcgtcgcgatcccgaaccagcctagccgtactactgtgtcctgttcctgctgccctggtcggcgcagcgacagcgaacgtgaaccaaccatgcctgcgtttgcgttgcgtgcgaacggcacaggacactgcaaatcacccagaccgtgctttatccgccggccatggttcacgttcactgtcgcgtcatcgcaccaccagcctcacgcactcgccggacgatttcaacgcgctgacacgccacgccacgctaaaaccggacgtgccgacggg

SEQ ID NO: 41513 - DNA, 1673 bp, Zea Mays
ttcactgcaactgtgttccctcgctctcctccctcctccctcttcacctcagcacgggctctcttccctccgcttcctcccgtctcctctcctctctcgcacaatgccattgcgcggtgcgtgagagggagtcagacacacagacgaggaggaagagggggtagccagccagccaaaggcgaaagcgagaagaagaagaaaaaaggacattgcgcccgtgcaaggcgtgcgggcaggccggcgatgctgcggaggactgtgcccgaccgggccgcggactcgtccggctccgccgggggcggggacgcccggccccgcgccgacggctccggagccgcgctcttcgccgtgccgcgcctcttcgtcggattcgccgccaagcgcgcgccggacgcggagtcgtcgaggagcccgacgtcgccgctagaccccaaggcgctgctgctccggtcgccgaggagggcctggggcgcgccgggactagtcgacgccctcgccgccgacaccgctgccgccaactgcctgctcagcccgcgcctgcggctcgtcaggcagcacagctccccgcccaaggaatgcggcggcggcggaggaggacactcgcagccggagctcggcaagacgatgtcctgccccgcgccggacaccgcggccgccgccgccgccaccgccatgtcggtgccgtgcagcaggttccagttccgccgcggggatctgaagtctggtcctgaggaggccactaggtcggacaccggcgcgtacctcgtcagcaacggcaacgccaagcgcaactcgttcgacttcggtaagctcccgggcccgggctcgctgccagtgccagcgtcccggcgcttcgtgggctcggtctccgcgagcgagatcgagcagtcggaggactacacccgcgtcatcgcgcgtggccccaaccccaagacgacgcacatcttcggcgactgcatcctggagccccacacggccggggccagcgacgacgaggccgccgccgtggaatcggaggatggagccgccgccgggcgctacttcgtggtcaagtgcgccgcggaggccgatggtttcctcagctcctgcttcgcctgcaacaagaagctcgacggcaacgacatttacatctaccgcggcgagaaggcattctgcagcgccgactgccgggaccaggagatgcagctggaggaagaggaagccgagaacagcacgagcggcgcgtccccgctgtcctcctgctcctcctcctcctccttccacgacgacgacatcttcatggccggcatggtggtcgcgacgtgatctccacccggccggccggccggcgcaccgcgggcgttcccccctctctccccacttctccttgcacggcaacgccaacggggcaggcgatcgtagccgatcgttcactcacccaacccaccggtgcacgtcgccgccgtcagtctgttccttcggtgcagcaaactgtacgtgacggaggagccgagaagaaacggcgctgtgctctgctgctctgctcatgccagccgacctggagtgaactgaaagggacatacagagagagcacatgcaatgatcccatgcatggtggttttgagggcacttgatttccactcgagaccaactgaatgactccgcacagtaaataaaaacataaagagttgcag

SEQ ID NO: 41514 - DNA, 272 bp, Zea Mays
ccatgacgaggcatgtgaccagttaaagggtccgcagtcagcacacctacatacacgttaatccttaaccaacctgggtagaacatcacctgttcctaacccaagtctcaatttaagtatttccatccttaggattgtgtctgttccttaggatgaaagagcatcacagggaactttgcagtaagatcccactattgctccaaataaaaatattcttgcaggtagaagccatcctctcccgggttaaattgaggacaacctctatccacaag

SEQ ID NO: 41515 - DNA, 2064 bp, Zea Mays
ttcggctgcttctatcttgcagctcagaaacatgtggtcagtttccctccactccgtcggtttttttttttccttccattatctgcatgagcagataactccaaacgacgggctgagaggtgctgtgacactgcaggcgataaaggtatataagccaaacgcttttgcaaactgggagcctgggatcaccaaatggaccgtgttcttctgagctcccacttgccatctcacgctcatgcaaacacgaggttgcagcagggtcctggtggcctcaacagtataggatttgcagtcataaaaaagggatgcttgaagttaagatgttacgcgatcggcgatgaactcggtggtccagggcgctttagtaagcatttcatcgagaacagtaatggacctgttttccagggactcgatgcgtctgctggttcttttagaactgtcggtgctgaaatcactcaggacactggagatttctttgtcagtgacgcagagggtgatccagacaaacctaccgatgggttctcctcgatcgaccaggctataggtgctttgcgtgaagggaagatgatgagaacggcgacaacgaaggcgaccttgtgatggcggccactctagtggaccagaagtcagtcgcattcatgatcaggaatggctctgggattatctcggtaggcatggaggaggaggacctgactagactgatgattccgatgatgtcccctatcacagaaatcgaagatatcacggctgctgcttccacggtgacagtggatgccagggttggcatatctacgggtgtgtcggctgcagacagggcgaagaccatcctcactctagcctcctctgactccaagcccagtgatctgaggagaccaggccacatattccccctcaagtaccggaacgggggcgtgctgaagagagctggccacacagaagcgtcggtggatctggttgcgttggcaggtctccgtcctgtgtccgttctctccaccgtcatggaccccagggacggttcgatggcaggcgtaacggttctccagcagatggctatggagcatgacatacccatcgtttcgattgctgatctcatccggtataggagaaagcgggagaagctggtggagctgattgctgtgtctcgcttgccgacgaaatggggcctcttccgagcctactgctaccagtccaggctcgatggaaccgagcacatcgctgttgtgaagggcgatatcggcgacggcgaagaggtcctggtgagggtgcactcggagtgcctgacgggggacatcctcggctcagcccgctgcgactgcggcaaccagctggagctggcgatgcagctgatcgagaaggccggccgtggcgtgctcgtgtacctccgcggccacgagggccgcggcattggcctgggccagaagctccgcgcctacaacctccaggacgagggccacgacaccgtcgaggccaacgtcgagctcggcctcgccgtggacgcccgcgagtacggcatcggcgcccagatactccgtgacatcggcgtgcgcacgatgcggctgatgaccaacaaccccgccaagttcatcgggctcaagggctacgggctcgccgtggtggggagggtgccggtgatctctcccatcaccaaggagaaccagaagtacctcgagaccaagcgcaccaagatgggccacgtctacggctccgatctcccgggaagcctgccggagttcgccaacccacaagaggcccccacagaacaagacgacgacgataaccaaaactgataaaaaaactatacggtgtcgtttttttaggaaaagataccaatataaccacaaattcttgtattccactgagaacgagtattgcagagtatttatttatcaactgcaaaattattaagtataatagagatacaaacttttatcaacgcctcttttacggaggtaaagcatgtttctccctaatatttattagagcctcatgtaagagaagcggatcaagctctcggccaggtactttccgtctgattggatgaccgcgcccatgcgtacaatctcg

SEQ ID NO: 41516 - DNA, 1356 bp, Zea Mays
aaaaaagacgcggcgatttttcgctcctctaatccggtttgcctttatccgtgggacttctttttaaaaggagctactttccttcgccgcttccgcaatcttccattcctcctctctccttccctgtgtctctctcctcgcgagctcttcatcccttcttccagcgcggtttggcgatggcggcagcgcaggcgatctcgaaggggagcgtggtgtctccatgcggcaatcgagcggcgccgggcttccttgccaggcggaggggtgccgtggcggcgcggatggcaccgtcagcggcgcggatcgggggcttctggaggaagaacgcgtttcctggcgggaggctaaccctgaggacgaggagatccagggccgcgtcaccgacgcagatttgtcaatttgcggagcagaatccagatgtgctgttcttgcaagtgaactacgaggagcacaagtctatgtgccacagccttcatgtccatgtcctacccttgttcagattctacaggggagcacagggacgactctgtagcttcagttgtaccaacgcaactattaagaagttcagggatgcacttgcgaagcacaagccagatagatgtagccttggcccaaccagggggctagaggaatctgagttattagccttggcggcaaacaaggacctgcagttcacctacgcgaagcaggaaccagaactgatccccaggggagatgctcctggggaggtcgttgctcccgagcctgcaaagcttcctgcggctccaaagcctttggtcaggctggggtccgaggagaggtcaggctggtctcgtcaggaagatgaaatgcatatgaggttatcatgaggatgattagatgcttccgttctgtatagttccgcggttcttggtgtgtacaggttgtagcttcccatggtagcagagtgcaggctaagattttttacatgtgaagcctgcccgcctgtcgtccagtagtttagctcggttggattagcagtaccaatgagcggtgttgtggagctctgccttgaggaaatcgtgtggtagatgtatggatgattcgtctacatgctatttcgtcgaattctgtagatcaagtggatgtgtagctcttgtttcatttcccctgtagcgttgggatctgtccgtcgcagaacagaataatcgatcatgccttatgttgtgccagatattgtggtgcttagagatcattgtttgttgtgataatattcgagtccgtgactagtttccttatgttgtatcagacactgtggtgatcattgttgtgataacatttgagttttgtggctagttcctgccttgccttcggggcagggaacggccgattgagaaa

SEQ ID NO: 41517 - DNA, 6615 bp, Zea Mays
cgtgcgtcaacgataacagcaccggatggtcgtgtggagcaccggccgccctagccccaggtctctctcccttgggtcgtcgtcgtcgtcgtcgtctccacggctacacccacatcttgtcttggaggcgaagaaagaaatcggccaagtatcccgcgccgcccaagtctccccaactaaccccccaaacctaccaccacccatccattttcgccttggcttgacccgcggagctctgactcagagggcatccacggcggcggcagtgcgagggtccgagggaagattggaggatgcacctctacaacgcgtggctaccgccaccggtgtcgaccgcggcgcgtggggaggcagctgcctttgcgggcgctgtgcggaccgccgcggacgcgtggctgcccggggactccgactccgcctacgccacactcaagtggatctccgtgttcgacctttttattaaagcgaagagtgacattgcttctgaggatcttcaggctcttgtaaagcttggactggaggtatttcatgcgtcacataacaagtttgttgtccagattaagtggggaggtctgctcataaggcttttaagaaagcatgggaagaggctttcacttgttgtgcaatggagaccactttatgagacgttgataaggactcatttcaagagaaacatgggccctgagggctggaaagtaaggaagcaacactttgagactgtgacctctttagtgtgtgcatctaggaatttctttactgaaggtgtggctgctgaaatttggtcagagttcaggcccttgctggaaaatccatggcataactcagcatttgaaggtgttggatttctcaggctgtttcttccagcgaactcgaggaatcaggatcactttacaactgattggattagaaattgtctggacatatgggattctgtcacaaattgtaacttctgggacatccaatgggcttccatcatagcacgttgtataaaaaattcaagatctgtgaactgggatgcttttcttcccttgttattcacaagatacttgaacatgtttgaggttcctatatcaagtggcaatggttcatacccctttccagtggaggttcctgggaacacaagatttttattttccagtaagaccagaacactttccaaggcaattgcaaagtctgttgtataccttttgaagcctaaaagtttagcatttgagtattttgagaagctcattaattttttggaacagttctatcatccgtcaaatgggggtcgttggacctactcattggaacgcttcctgcgctatcttgttgtttactttgagaaacgccttcagcatgaacaatttgttatggcagttgaggaccatgatcaatcttatctgggaaaggaagaaaggtctgtttttgtcaaagctatcttgaaattattggatcgtggtcagtacagcaaggataattctcttgctgaaacagtttccgttgcaacttcgatcctgtcttatattgaaccaaccctcgtgcttcagtttgttgcaaaaaacttccaacgagccttagagacaactacagctacccatcagttaaagaacgctgtcacatctgttgcattttctggacgtgctcttcttctatgttctttatgttcatctcagaatgatgatagcagtgttgttgattcattcagtgatcttgttgtcgcttccctttcaaatgcgttacttggcatggatgccaatgatccacctaaaactattgctacaatgcagttaattgggtctatcttttcaaatctagctgcagttagtgatgatgtgcctatattgctccaatctactactctatcgaactggctagatgaattcttttcccgactgttttctgtgcttcataatctggaatcaagtagtcccattaatgagggttaccaaagctcattcatgtcagggacttttcttgttgacagtccatattacttttgtatgcttgaaattcttctagggaagttatcaaaacccttatttaatcagtccctgaagagaattgccaagttcgttaatgcaaatatcctccctggtgctacttcagaagttgggcttctttgttgtgcctgtgttcattcttatcctgaggaggcttcagtctaccttgtaaagccaatcttagagaccatcatgtcatcctttgaggggactccaaccactggttatgtaggaagagtagttgcagataaagcatctaccaaggctgcactttctcctgctctggaaacagcaatagattactatctgagggttttggccatatccatcagttatgccggtcctaccttactcaattataaggaggaactaaatcacataataacatctgcgttccagtccccttcttggaaggttaatggagctggggatcatctccttcgctctctgctaggaaatctggtttcttattacccaattgatcagtacaagccattcacttgtcagcctattggaaatattattgaaccatgggggtgttcgaaagctcatcaggatagggaggatgaaatgcttaatttccctccaaagtggcatgatccaagtcatgatgaactctcttttgcaaatgaattactacaacttcatttccagtcagctttagaagatcttttgactatttgtcagacaaaagttcattctgacacaggagatgagaaggagcacctaaaaataaccctgttacgcattcattctgcattgcatggtgtaatgtcttgtttaccagaaattcgcccgtcatataaagatgggaggtccctggaagtggagtcggctttcttcatagcaggatctgctggtagcactgttggaagctcagaaatgcgtgaaaaggctgcagaatttgtgcacatagcttgcaggtacttattaaaggaaagaactgatgacagtattcttctatcccttgttgtgcgtgtcattgatgctttggtaaactatggaagcttggaataccaagaatggtcaagccatgttcaagcttggaaactagaatctgcttccataattgagcctccatgcaacttcattgttccatttcatgctcaaggaaaaaagagacctagatgggcacttgttgacaaagcaaacttgcatagtacatggaggtgttcacaatcatcatatcacagatacagaatgaatgcagatgtttcgccatctgtccccatgattaatttgatgaatgatctcttagatctctcactacacaactatgaaactgttcgatcgtatgctggaagatcgcttacaaaattgttgaaacgttggccttctctaatttctaattgtgttctcacactcacgggaaatttgcgtgacccaaaagctcctgaacatgttgttcttggttcttgcagcattctgatctcacagactgttttaagacacttgaccactgattctgtttccctctcttcctttatcatgggaattctggaaagctctcatcatgaatcgttgaagtgtcagaaagctattactgagctctttgtaacatataatatacgtttctctggaatatcaaggagcttctttaaaactcctgaaaatcaagctgacaagccaggatttctcagtctaatttctcaaattaatgctttgggctttgagactaatggactacattggaggagaactgcgcatcattaaattaagaagaaagaaggtcccagagaccaaaacatcaagagttacaaggacccattaatgaggctgaaaacacagaaaaaattgtctaatatagatcgagctatctatcaacggagatcattgcctatttgagatcggtctatccatcctagccatataggcacgctatacagtgattctaacaatcacaacagagcaacacaccaccagaacagaggaagttgatctggtggcccttctccaagtctagatgcgcacatacctctactgaatcagttgcaggcgcatgaagatggacacccgcagcaaatgcgtccagctgtcttcctatattatagaagaacagtgtgatcctgatctgatatagtcgtagcctgatatacaagcacattctattctaattcttgcagctgtgtaatttcaggtacaatttgatggccaacagagtattactattactaattttggcatccagaagcgaatctggcatatattcacaaatgcttgcaaaaattgctggtcatttcttaagaaatttaaagagtcaactgccccactcaagaatgcttgctatatctgctttgaacacattattgcaaggatcacctcataagacatctgcacaaaattctaagcaaccaatagatcaccctgaagattgcaatatttcatcaacagaagagattttgaatgagataatccgggaggaaggattcatgaatgagacactgaacagtttatctcatgttcatattatttccgacaatgatggttcgtcaaaagcgagttatggggcatcatcttttcaaagcggatctgacaaagcaataacttacttctattttgatttctctgcctcatggccacgtactcctagttggatttctttactgcgtggtcacacattctattccagttttgctaggatattcaaaaggcttatacagcaatgtggaatgccagtaatctcttctcttcagagtacactagaagagtttttaatttcaaaagagagaccaaggcaatgtgtcgctgctgaagcgatggctgggatgctgcactctgatatcattgggaatctggaatgtgagaacaactggttgatggcccagttgcataagattatgttagcaccatctgtggagtcagctcctgaatgggcagcttgtattcgatatgctgttacaggaaaagaaagagctggaactcgtgctcctgttctcaggcaaaaagtattagaatgcttatgtactcctcttcctcattccatggcaactagcgtacttgcgaagagatattcttttctgtccgttgctctaatagaaatttctccacccaaaatgtccccagcagagaagcaataccatgttaaaattcttgatgaactacttgacagcatgaaccattcatctgctcaggtaagagaagcaattggtattgccatgtgtgttacaacctcaaatatgagactttctgggttatttggcactggatgttcaccgcaaggccttcatggggatgtaagcatgattgaacaaacaggaaataaatattggtctgaacgtttgacagatggagctaatgaattagccgtaagtatacaaaatagtactcaatctaagcaactagaatcaacatcagattcggctgaagatagcatggatgatagagagcaggctgatgctaaaaggatggaaacgatatttcattttatgatcgcatctttgaagtctgggcgatcttctgttctactggacactattattaggcttgtgtacccaattctctcactacaggaaacatcaaataaagatttatcattgcttgctaagtcagctttcgagttgctgaaatggaggattctacatcggccttttcttgaaactgctattacgtctattcttcctttagtcagtgatcctaactggcgtaccagatctgcactgttatcgtatctcaggacctttacctacaggcacacattcatactttctggctcagagaaatcacaaatctggcaaacaatagaaaaattacttgtggacaaccaagttgaggttagggagcatgctgctggtgttcttgcaagcttaatgaagggtatagatgaagatctatcaaaggatttccgtgaacggtcatatgcacaagcccagcatatttttgttgcacggagaagaaatttgaagttttctgttggtaccatccatggtgcagtccttgctttgacagcttcggtcctttctgttccatacgacatgcctagctggcttccttctaatgtctcgctacttgctcgcttcatccgggagcctccccctataagatcaacagtcacgaaagctgttgcagaatttaagcgcacccatgctgacacatggagcatccagaaggacgcattcactgaagacgaactggaggttctccgtgatacatcttcctcctcgtcgtacttcgcttagattaaaatttcaaaggccataggatattctctggtactggtgttgtgtatatgaatttataactgttgaagtgtcggtgtttttcataaagtatatccttgtacgtacctagttttatttcatcaacagatgccttcgtacaactgagatgaagttatgcagtctactgtataccgtctggacatagcggaagcattatggcatgtgggatccttgcgtgggctgagaaattgttaacatccaaatcttttgcccagtcaacgacgtgaataagatgctgcctagtttaaccgcataatgcatctctggcaactctaatagcagagtcaacgggctagatataaacttgcccatgttcattagaagcaagaaagaatcagccattgacattaagaagtacatgagcacccccgatgcaaacgtctatagccctaatcatacttgtttcttgcttcctc

SEQ ID NO: 41518 - DNA, 352 bp, Zea Mays
agcttggtgctgtactgctgtgagcagccgtggagacagggagaccgcggatggccggatgggcgagcgccgagcagtggaggtctggaggaccgcggatggcggatggtggatgggcggaccgcggatgggcggatgggcggaccgcggatgggcgagcagtggagtggaggtctggaggacgagcagtggagggatggcgttcggtggatggcggcgtctgcgtccggcgtgccgcgtcaccgcgtgtggtgcctggtgcggccggccggctgggagacagggagagtcggagagagcaggcgagagcgagacgcgtcgccggcgtcggcgtgcggctggcggcgtccgg

SEQ ID NO: 41519 - DNA, 3268 bp, Zea Mays
aaacagttttaccattttatagaaatgaataaaaaagctgagaagtttgacaatctgcaacagttttttatggcgagaagacgaaaaaaaggccaaataaacagggcccagtgggtggcccgtggctgaacccgccatcggatttcgaaggttcgaggcaaccccaaaatccaaacaaaggaacattccccgggaagcggaaacgaaccactccgggcctccagcttttctatttttcataactacccttatcctccaccggtgtttgcgcggagcgactaggggcacttccgtccgtttcgcacccccgaataaacaaggcgcaggagcagcagcagcagcaggttcttgtccccttccatccgtcccagtcccaccgccaccgtcgcaccgcatcccttctccccagctcgccgccgccgcgcccacgatcgacatggcgaagctggggcgttaaagcagttgaaaacatttccgatacagctggcaagctttacttccgataacatttgtgcttatcaggatgagcaccgccaaggtcatgataacatacaagaggaagcgtgctgccacacatgcccatacagaagacgacacagttcttgactcatctcctgctgcctcaagcaatgtggctgtcagcagtctacaacttaagcctgagggccctgctgagactgccgtgataaatgaatataatcatattactcctaaaatgcagcagtctttctccacgtttcaacaaaacatcaaagaagaacgtgaaccagagaaaggacatgatcagctatatgaatcatcaccgtggaaagaacaacctgagatttgttctgccactattgcctcaaccgcagaggcgcatagcaataaatcacaatgcattgatggcacaaatagtcaaacccctgtttcaagttctctgtgtggcaacatgcttgctgataggatgattaaccagacaaaagattcaaatatctctgcccctgtggaaataaattctcctacggggatggaaaatgctgtcgcccctggccaatgtaagagcaggtttagtcctctgctcacctttcgcaggcgagttaagaagaaaacaaatttggatgaaccagcagaagaaatttgttcacttgacaacgacaaacagtgttcaacactgacatgcagcccaccacgctcatcacaggatgctacatcattactaaaacatactgctccaaaccctttggatattgaggataaggtaggtagattgaaaaatactggaccttctacagaagctgaacactcacctgaacaagaaagattgctctagatgtaaaccaaaacataattctggaagatgatgttacaccaatgtcgaaccaaaagatgtccttggaagatgatgttacaccaatgtcgaagttcactggtgtgcaagaggtcagtgggcaagatacgccagtggaggacttcaacagaacatcaccaaatactattgaagtgccaaaagttattgatttgcaggggaagggacattgtactggggaaactacttctctgcagtctccaagacaaaaagttgatgccagttggttgaaacggaccaataaatctgtggcagaagatgttccagaatctcaaggttcaacaaaaaatattccaataattctcttggatgatgataatgatgataggggcaaggagctcgaaaattcagaggccctcgatcaagggctccatagtcaaaacaaaagaacttttgggaagattgacctgaactgtactgaattaagacaacagggacttctctgtttagatgactcaacaattcaaaggctgccagatctggatctagctgtcaatgctcgaaagcaaatgtctcgaccgattgaaaggctgtttttcacagaggagaaagataccatccgtggcaaacaagagcatcatgaagaaagctcaaccatgcacgccccatactcaaatttctttgatctgggtccaccgtggaacaccgggagtttgaagggaccaaaaggcttgccttcagaagtaaagtttggaataatggacagggctcctgagttcagtctagacctcaggctggatagtttcacagacaacaacagtgtggctgccctgaggagcgacaagttgtttctcggaagcacctccagcacatctcgtaagttaacagaaaagcttggcatgtactcctacaagaggcagtcggctccgtggtcagaagaagagctggactttctttggatcggggttaggaggtacggcgtgaataactggaatgcaatgctgagggacagtcggctgcggttttcaatctcaaggatgcccgaggaccttgctaagcaatgggacaaggagcagaagaaacttgtgggtcctgcgcaagctgttggttatcttggtagagcttcgtgctctggatgctcaaagtctgcatctgtcggggcccaagcccaaacggacctttcattgggcgaatattaccttggtagagcttcgtgctctggatgctccaagtcttcatttctcggggcccagacggacctttcattgggcgacgtctaccttcgcagtggccgtgctccagagagaggccaccagcatcatttaccaacaagcctgggcgtgggcggcttccctggggcttcttcatcgtatggaagaagtggcggcaggcgcagaagggcgtccaagtcgtactactacgagaacaagtcggcttggttccaggagccaccatcggacagggtgccccagcaacccggcggccgaatgggccctgagatgtggccgagcatcatggtggtgccaccgccaacggcagatccaccgagggacgacgacgtgaagccccatgtcctcctccctgatgctaccctgaagcgcgcgataaggaggagtgcggactgggggtcgttcagcaggaggctgttcctgtccggcgatctcaacgggggggctgcaggcgccccagtaccaagcgacaccggcgcgtcatccgaagagacagtgtctgacagctgagcttcagtttatttgacatgtcccattcccattcccattcttattggatgttgatgaagctgctggcatgttctctgtaatgtcatggttgcctagtactcactagtattgcatcttgtataaagtctctctctctctctctctctctctctgtcctctataacaggctacgagtccactcatgcatggtggttagatcgaacaaatactccgtaacaacatagcataccctaaacccccc

SEQ ID NO: 41520 - DNA, 2053 bp, Zea Mays
tttcgcgtaatcgggctataaattgtatactccacgccattttttccagatcaaaaaaagctacagccacggccaaagcagagcaggagcaggccgcgcggaacgagggaagcagcaggccgctagactagggagcggtcgccggcctcggcggcggagggatggggcgtgggggtgcggtgatggaggacggcgacagggaggagggaagctatccgacgctgctgcagcggtggtcctcgtcggtgtgggccgtcagcggcagcgggcgcctgctgtgggcgggcaacgaggcgtggcgggcgcacgtcgggatggccctcgtccaggtcgcctacggcggctaccacgtcctcaccaagtccgtcctcaacgtcggcatgaaccagatcgtcttctgcgtctaccgcgacctcgtcgcgctcgcgctcctcgcgcccatcgccttctttcgcgagaggatcttcgggaaccagctcctcttcctcctgggcctcggcttcaccaacgcctcctacgccgcggcgttccagccggccataccggtgttcacgttcctcctggccgcaatcgtcggcgtcgaggtgatcaacatcttcacgaaacacggggtcgtcaaagtcctcggcacagccgtgtgcgtctctggcgccgtcctgatggtcttctaccgaggcccatctctgatcgggaccggaggcgcggccgatgcaactgccctgtcagtggttattgaccacagccatgcctataactatgctcctcagtggctggccgcggccatgctccggaacggcgtggaggcatggcatctcggcgtcgtctgcctcatcggaaactgcttcctgatgggcgcttacctcgtcatccaggccccggtgctgatcaaataccccgcgagcttatccctgaccgcctactcctactccttcgcaaccttgttcatggtggtcaccggcgcgttcgccaccagtgggctccacgagtgggcgctgacagcgaccgagatcttagccatcttgtacgctggagtcgttgcgtcctgcctgaactacgcgatcatgacctgggcgaacaagatcctcgggccgtctctggtcgccctctacaacccactccaaccggcatgctctaccttgctctcgaccatgtttcttggaactccaatttacgttggaagtgtgattgggggactcttcatcatcgctggcctttacctggtcacttgggctcgctacaaagaggctcagagcgctctggtagccggttatctgcgacctcttcttctgccgaccaccaaggcagaaggaagctccttcagggggctccattgatccttttacaccccaggcagagaggcagatggatttttgcctcaagtgtttctctaggccagcggcgtcagcagatttagttttcatgtctttgttgtataccaatcttgcatatatttggtttgtactttgcacggcagtttacacggtagagatggccagtactagtaccattttttcaagcattcaagcaaggttccattgtcagggaagaacggcagggcactgaagaaaatatcgtatcctgaacattgtattctggtgtcccaatcggcatttttgaagatgcccttttggttgtcctttcgacttcaacacttgtgtctgtaaggctagctgcagctgggtttaacgtcaccaacgaaagaatatgaatatcattttcatgcctaagaagtgaagctgcagtgcgctagagctatcgtgctcgtggcaagatgaactattcttctgtgatgatggaacctaacccgttccctgtattcaagggagagtcaaaataatactccaaagttcacgtactcgtgtatcagattttggaacaattggacaaagtagtctcgtattgtgccctttttgttctactctttttgttctactatatgcgtttatatcttctctgttacctatgctgtctgtgcttctttgggcattatgctccaataaaaattcaactttgacagatgttttgccgtcacaatacattgattcaatttggg

SEQ ID NO: 41521 - DNA, 410 bp, Zea Mays
aaatatttcatcaacacacaggcctactaatattctactcggtccactaattcagctaagtgatcggaatagcgcaataactcgctataactgaacctggctcaataatcgcaagaactgcaaagtcgacgagagtttcgtgactcacgcaatttatcgagcaactaatgagtatcacactagtacattaatttatttaacgatcgaaccattctaaacaatttatcagcttatcgtttccacatcagacacgaatccacgagatcggtagcgattttccgatccaggcaatttatcgagcgcttagggaatatcacgctgctagcttcgtcttcacccgattcttgggttttcttgctgacgcgcggaacgacgatggtcctaattcaggcgttttgtcgagcaccaag

SEQ ID NO: 41522 - DNA, 2400 bp, Zea Mays
tggtgagggggctggggtcgaagcggagggtggcggaggaggagtcctcggaggaggagtacgaggtggaggtggtccgcgaccacatcgcctcctcccgcggcagccgcctcgcgctcttcggctccgagctccgcctcggccgcttccgcccgcgccgccgcaggcgcctcccgctcgccgggggaaggcgccgccgagggcttcttccacggcctcgtcatccaccccgacaacaagtcgccagctgttaattttttcccctcttcaggctacggggacatccatgccgtcaacatcagggagatgatattcatcatgatctacgtgtccttcgacatgattctaggagcctacctgatcggcaacatgaccgcgctcatcgtcaagggctccaggaccgagcggtttagggacaagatgaaggaggtgatcaggtacatgaacagaaacaaacttgggaaggaaataagggagcagatcaagggacacctgaggttgcagtatgagagcagctacaccgaagcatccgtccttcaggatatcccgatttctatccgtgcaaagatttctcaaacgctgtataagccatatatcgaaagcattccactgttcaagggatgttccgcagagttcattcaacagattgtaagtgtcatctctttcatcccaactagctatgtgtgctgaatgaactacaaggtaggaagaactccagcagggtaccttgttgtgatattgttctcaatcccaagatttatcgtctgacatgttctgctgtaaaggtgatcaggttgcaagaggagttcttcctaccaggagaagttatattggagcagggaagtgcagtcgatcagctgtacttcgtctgccacggtgcactggaaggtgtaggcatcggtgaagacgggcaagaggagactctgctaatgctggagccagagagctccttcggcgagatctcaatcctctgcaacatcccgcagccctacacggtccgcgtctgcgagctctgccggctcctgcgtctcgacaagcagtccttcaccaatatcctggagatctacttcgtcgacgggaggaggatcctgagcaatctctccgagagcgagtatggcggacgggtgaagcagctggaatcggacatcacgttccacatcgggaagcaggaggcggagctcacactgcgggtcaacagcgccgccttctatggcgacctgcaccagctgaaaagcctgatccgggcaggggctgatcccaagaacaccgactacgacggccgctcccctctgcatctcgcggcttccagagggtacgaggacgtcgtgcagttcctcatcaacgaaggcgtcgacatcgaccttaccgaccagttcgggaacacgccgttgctggaggcggtgaagcaggggcacgaacgggtggcagcgctgctgttcgccaagggtgcgaagctgagcctcaagaacgccggcagccacctgtgcacggcagttgccaagggggactcggacttcatccggcgcgccctggcctacggcgccgacccaaactgcagggactacgaccaccgcacgccgctccacatcgccgccgccgagggcctctacctcatcgccaagatgctcgtcgaggccggcgccagcgtgttcaccacggacagatggggcaccactccgctcgacgaagcgcgcaagtgcggcggccgcacgctgggggcgctgctggaggaggcgcgggccagcgagctgtccatgttcccggagcgcggcgaggaagtcagggacaaggtgcacccgcgacggtgctcggtgttcccgtaccacccgtggcgggcgagcgcaggcgaagagcggcgcgcggagggggtggtgctgtggatcccgcacaccatcgagagcctggtcgcgtcggcgcaggagaagctcggcttgcctggcccggcggcgtcgcggctgcggctgctgtgcgaggacggggccagggtgctcgacgtcgacatggtcaatgacggccagaagctctacctggtcggaggcgaggacggcgatcaggaaggtggtcagtagattgggcatccctgtgtggcatttgcatgctgcttttttttcaaccttgtatgccggttgttgtttttttggctatatatacgtgtgcagtagaagaaaatgtaatcaagtccatcatccgtgctggacactgtacagaactacaaattgggaataatgtaagatgtgaaatgaaaatgcaatgttaagtcgccccaggtcgggcggctctagccgccgccacctcctctctgcctcactgccgtcggagctagccagtgggatgttcgcgcggctcgcggtgaaggcgggacgattcggccggctctgggctcctgcgcggcgtcttcgc

SEQ ID NO: 41523 - DNA, 254 bp, Zea Mays
ccgccccctctctcttcctctcttccactcttgctgccgccccaatccctctccttcttccccaagtgattgcagcgccgcccctcaaccctagccgcccccacctcttcctcttcaaggtggagcctccccgcttggtgtccgtcatgtgggtgcgagtcttccatgggagtttggagggaggaagaaggaataaaagaaggaggaaaggaggaacccaaggtgattttcgtgatcattttgttgtatttgtg

SEQ ID NO: 41524 - DNA, 3805 bp, Zea Mays
ttctctcgcgtcgttctcccgtagtcccgtgccctcgcgtgcgctctatctgtttctggtggcgacgacttggcggtccccgctgccgccgtgcccaggcctctacttcgggaccttcaccggcgacgagcacccatcgggttgcttcgcaaaacttccaacatccaggatacaattaattacgattccttcaactttatctcgatttataggaggttgcacagagcccatccaacagggtgtctcagacatactgatggatggggtgcccaatatccttgagaaatcatcacatgaatgcatgtactcttggtacttcaccagggaagaactagagaaattttctccatcaaggaaagatggtattactgaaaacaaggaatcagaaattcggcatttatattgttcatttatccgggatgttggcatcaggctgaagctacctcagatgacactagcaacagcagtcatgctttgccatcgcttctatttacaccagtcccttgccaaaaatggatggcaggtgagagattatattgttgtgccagtgatggttgctgatgtctatgaaaagcgacaagagtgcagagtttcattgccaagcatttgttggaaatatgttctccaccatgtctaacttaacattacagaatatccttcaaaccatttgaagtattttatcttgtaataatattactgtattagttttctgattacatgctaattgctgattcatcttgatgctactctacctcaagagtcatgatcacttcgtgattggacatttcaaagggatcatttacctgctacaatgtgtcaagggcaccagggctcagagtagctggaccttgactactggacctcgactacatagttcgtagtcatggccgggaatggggtgaaggtttctcccctctgcaccctatgttgagggaggagattagcagtagaaagtttaatcattgcttaatcgtcaagtgttccaatacaagatgtaaataggcacgtagcctctaacgaacaatagatggaaaagctcctcaaattgaggcaccgtagtttcctaccaactaaactatgcaggcctgacactagctgcagtgatcatgcctacagcgcgtttgacacgcgctgcgtgttcttggcggcatctctggcatgggtctggtgcgtgtaccagggattaccttcccggtcggtaaccagcaaatttcggtagtttttctcgttttcgatgtctaccgagaaatgaaaaccggtgtgattttttatgtatttcgatttcaaatttgaaaatataatagtcaaattttggtcaacaaaacggtttttgaaatcacgaaacgagaatgtaatccctggcgtgtactggtggccccacatgacacatgttattggaaaacttctttttagaacttttaagtcctgattgacttctcctagtatactaaaaagttttgaggtagttaagagttattttcagtttacctaggaagtttgtgtttgtcagatatgatactattgtgattaagtacaatacttcgtcataactgggcaaatgcattcagaactttcctattgaagttacttaaccccgaccagccaactgggttgcaacttactgttacaacttaagcaagtttgacatactttgacggatcatcttgtaaattacatattcaccaacagttgcaacagtatgtgtatttctggcgtcgaaagttgaagatactccttgtcccctggaccatgtagttagagtggcctatgaaacaatgtataggcgggacactgctgcggctcaaaggatccgtcagaagaaagcgctcattttgatcggagagagattgcttcttacaactattcgatttgatttcaacattcagcatccttatagaccacttcttgatgccatgcaaaatcttggcatcaatcaaaaagaagtgaaacaagtagcatggaactttgtgaatgactggcttaaaacaacattgtgtctacagtataaaccccagtacatagctgctggttccctttatctggctgcaaagcttcacaatatcaagcttcccttgcatggagcgcatgtttggtggcaccaatttgatgttgcaccaaagcctctggaagccgtcattcatcaaatgatggagcttgcggctttgaaaaagttgatgcctgctcgacccaatccggttaagctgaaggaaactttatgtgaagctaaactgagcttatctaatagcccagactctgtgttgaatcaatcaaacttgttaataagcagctcaagtcctgatattggcgagcccagtgacaaagtgcaggtggattcctgccaatacttgataagcagtcacatgggtgattgtagggtctcaggtcctgacagcagttcgttgaatacttgtgctaatagaaatgtctcttgtaaagcacatgatgaagagagcttggatcaggccttaataatcaaacatgacagtgggatgatgccttctagtaatcagacatcattatatgctactgtaggcactgagggcagtgctgaactgaagcaggatgtaagccattgtaatgacttcaatatcagagtcaatgacgaaagcttgaaccaggtgttaagaaatcagcatggtgatgctatcccattacctgacgtggtatcgctggatgccaaggtggacaaggaaaggagttggtgtgtggaaccattaattgcaaactctgattgctgtactgacagtgttaatgtggatagcttgtgcactgatcagagattggctgatgctccttcaggccccacagctgatgcaccatccatgctggccgaggaggaatcttatccttttagtgcaaagcttgaaaatattgatgttgccaggatcaaaggtttattgatgaagaggaagagccggagagagatccaagaccgagccattgcttcagatggtctaagtgaagaagactggatcgagagggagcttgaatctgggattgttacaaaccaagaagccaattgtgctgccatctcagacgagctaagtgacgaagcctggattgagagagaactcgagtcagggattgtggtcggaccaagaaatgagcaagcgatcacttttgatggtttgagtgaagatgattggatcgagagagagctggagtctgggatcatcgttgagccagcacctgctaccaagaagcggaagctggagtcaagctgttagctctgcattcgaaggccagattccaagcaggtgaataataacagatggttgcgagtaggaccacatcgaagccaagagatacatgtcgcacagatgggaggatcaatattatcctttttttatttctttataaccaaacaccttggagtactttgacacaaggggtgtgttcacagtgggatctccccagtttcttgaatgcagaaccgtatccgttgtatttgttccttcttgtcgtgagtgtaaatctagcgtgtccgaagttcggttttagattgtaggtgtaactgtagcagggattatctggtgttaagcccaacgagaaaatgattcagtgtaactgttactgtaaggaaagaagttattcagtgtagatttatggttaacacaagaagaggcaattactggtgtatgatgtttataaattgatgatgaatgttactggcagctcaaaagaaaagacagttactggtaactaaagaaaagtacgtttaacggagctgatcacattcaatcccctattgagctgcccttggtcgtcaattgtataacaactttctgcgtgaccatcaaaaaat

SEQ ID NO: 41525 - DNA, 402 bp, Zea Mays
tttatcaaggcaaccttcgactgcccgatgaagacctatggcttcctcacgcctgaattctggagccataccaagttttccatgactctgttccagcaatacacggacctgctggcgaaggctaccaagggtcttgtgctttaggcctgaactgagacagtagagccttatgatggtttgatgtgtctaaatgcactttcttatatattaagaactgtgggagtcaactttggaccctgtttgctggccgcttcgatgattttgccttttggtaagcaacatccactagagaatggccttttttgttttcttccctctatctctttcttgcaagggaatcttctatgcttagaactgaatgcagtgatcagtacatgtatttgttttgaagcttgtatttac

SEQ ID NO: 41526 - DNA, 282 bp, Zea Mays
cgaataacacgaactggagcgggacaccgaagctagagcggacgccggagttggagctggacctgggcgggcgggggaagctggagcagtagcagtaagccggacgccggagttggagctggagcgcaaccgcgcccacggacctgggcgggcgggggaagctggagcagtagcagtaagccggacgccggagttggagctggagcgcagccgcgcccacgcaggagcagctcgccgatcgccgggattagtagagccgacgccgggagcagtggacggcgg

SEQ ID NO: 41527 - DNA, 2214 bp, Zea Mays
atcctttttatatcttgcctttcccctcccgttccgttcccgtctcgctctcgcatcggccaacaacgcttcacggcaaaatccttccacaggcgggggagtcgcctcacctcacttcaccccgttcatccccagcgaagaagcaaaatacttagcacaccagtgatggcggctacttaccaaactggccttgtggccgagccacagttgctgaacactgaaattatcactcggagggccaccaactctgttgctgacactaacagaaaagacaaatgcgtcggctacttggatgtgtttgtacaccaagcacgcgacatccacaatgtttgtatctatcacaagcaggatgtgtatgcaaagctgtgcctcacgagcagccctgatgtttcgtgctcaaccaaggtgatcaacagtgctgggcgcaacccagtatttgaggaaagcctacgccttgatgtgcaaactgtggatgcttctctcaagtgcgagatatggatgttaagcagagtgaggaactacctggaggatcagctccttggctttgcccttgttcctctggtagacattgtaattggtaatggaaagctggtccaggagttctccttgacatctactgacctattccacacaccagctggatttgtgcacttgtccttgtcatatgctggttgttccccagatgttgtcctcatctcatcacccaataagtccccatcaacagtggatgattctggaaatgatcatgtggttcctgctcagcttgagaagattgtgttcccagacctaaatgtggagaaggaagacgagattatggtctcaaagtatctcgagatgacttcagactctgaaacccctataaaagttgagaacgtcatgtcactgcattctgcaaatgatgatgatgttccttctaaacttgaaaagatcaagttcatagattctgagagccgtgcgaaagctgaaaatggcaagatgctactatttggtgtagctgtgcctagtactgcaatttgtgcagataaggttgaggaacaccgcgatgaaagccctctaagttgtgtctcaaccacaggctcctccactaccctttctgcaacaacacaatcagtttctgagccttcggagaccagtgtcgaggcatcccctagacaatgccatagggagaaaagccaagatgttacaggtggtgaggctaattcttctgaaacaccagcaaaggatgaagttatcaagcctgtgatctgcgttaaccttcagccagagcagtcagttgtccaacaggacatagttgacatgtacatgaagagcatgcaacagttcacagaatctcttgcaaaaatgaaacttccattggacgttgagaatactagtccctcaaacgatgattcatactccagtacaattgagaagacatccccatccccatcttcatctgcagcaaagggttctagggtcttttatggaagcagggccttcttttaagtttctaatgcaaagtagtacactagctcgttactatctcctacatacatatacatggttccaggtttatcagatatcttctggcatgtaatcacatactttctgtctccataatatgcttctaggactcactcctggtattgctattagtgttatgctttgttagaagataataatttcatctcatagtaatcccatgtactaatacatacccatgaaatataatgtcatgaaatcagttctgactcgagattaattcctgcactgtattgtgaccaggtggggactcttcgtcccccccgttgccctgtcaaaaagaagtattgtgtttatctgaaggtctgggtgacaggtgaatcatattctgcttctcagaaataggtagaggcacgaccatgacagagcactagagcagcaatggctgctgggtgaaacattttattttcatcaagaaaagcaggaactggaagctgcgattgtttccttgtcataatttacattgcaactttaaaaagatggtgctaagtgataacgtgatatcacgggcacttgtttctagtgaagtagcatttgaggaaaaaccatgtgacttctgtagttctgttcttgaataatgtaggagagctgcctaccttgtattgtgatttgtgaaaggaagagaatatttgtacagagctccttaggagaagaaaagggggaggggcacggaatgtgcactttatttgcctt

SEQ ID NO: 41528 - DNA, 609 bp, Zea Mays
tgtttaggttggtagtcaaattatcagctctgctgtgctcacctcttcaaataatggagattcctttagtttctgttggtgatgatggtagattatttactgttggaggcaatgatggaaaaaacaaatttgaattagtaaacagagaaaagaggaaactgacacttgattcttcagaccgcctagtgtcattacaaaaacttggaggtgcagtgacatgcatggcgactattaaggagtgcattagcttggcgaaagaaaggagacggagcctaagagaaattctgttagactctatcaaagccatggaagtcgaccaaactgaataattctacaaatagattcagttaatctaaccggactacatcttgatggtttctctctgcctcggctgtactggttgtaacagcagttttgttgatttaggcaaagtatgtagctatttgtactctacagtctacacataattcttcacttaagtagcctggcgattttgtttgacgagcatgtctgcaatgcatctttttcgcgacttggcatctttgtaacaccctaattcacattttgcaatattttattttattttttataatcaattagaactactgc

SEQ ID NO: 41529 - DNA, 925 bp, Zea Mays
gacgcctttcagctcagcatttcaccgaaaatagggtgagtgatgcgtcgaatcgcgcttcgtcttcatccacatcgagaattctccgaccgcgtactgatttatttccttctgcgcccaatcttttcggatttttggcgtagacgaggataacgatctacgacttgttcgagctttttgtcgagcgcttggtaaatatcacgatgctagcttcgtcttcactcgactcttggaatttcttgatgacgcacggaacgacgacgagatcgagtctggagcgagctggcgaggacacgaatccagtgagggctctggcgacgacgaagtcacgagtaagggaggacgagttcaatagctcgacggaaacgcgagcacgcgcgaagcccgatggacgaagagcaagtgcgccgcagtgacaacgagcaagcgcgcgagcgctaacgtgagccatgggcaagcacgggtacatcagacgacacccggcgagcacgcagcgaggcacgtagcagcgaccacaatcgaatcggcaaccgaacgttggtgaactcgatgaacacgaccacggacgcgggctggcgtagataggacaacggcggctggcgagctcgcgcgcgcacaaggaaaaactcacgaccacaaaatgagctgggatattcagactcggcgagggaactcgatggcggcgaccaggacgagggcagcagggagccggccacggcgagcagcaaggagtgagggagctagacgctaggccatgggagacaggggagttcacggctgcgcgcacagggaggcgcgcgctggagcagagcgcagagaggtgcgaccggcgctgggagtcgagcgcaatccgagctgggcgagctgcaccggggagcagaagccgaccatgggaggtggcgactaagcaagctggggattgccg

SEQ ID NO: 41530 - DNA, 1087 bp, Zea Mays
ctggcggtttttaaagccgggcccacctatttctttcactgacgtttgataacggaaaccgcccgtgaaaagttgaacgtgccgcaggctttgagcttatttgtactagtgagggccgagcagcgaattccatgccggggagggattcactatggccgagcaggcagagagggtctaagcgagctccatggtcgggagagtgagcagagggagttgggaagggagcaggcgcgcgcaggggcacacgacggctggcccccgaccatggcggccacggccagaaattgagctcggcacgaacaaaatccgagcagggagcaccagggacggccagcagaggaggttgcacgcgcggggagggatctcggcatggcagccatggccgagcagagagggagctgggcgccgagttggagggagagcgagctagacgcacagggagcttggtgtccggtcagcaagtgcgatgaagagcggccaagcacccggggcttgctcacggtggggtcgaactcggcggccatgaggagtgaccaagctggagaagcgacgcgagggagaactccaggacgcgcagccacgaaagaagcagaggctgggcacggtgagctcaagggagcagtgcgcgcggcggccatggcgagcaggttgagcacgtgcgcatggagcagacgcggcttggcagggcgactccatgggcggacagagagatgggcgccgagcagggacggagaggatttgggcgcacgccagggagccgccatgggtacgagcctgaccaggggctagcgtgagggagtccaggacgcgcggcacagttaccagagagagagggggcgcggcttgggaaagcagagaagagaagggtccgcgtggaggagaagccggggaggagctccgagctccgagctgcggccggaaccagaggcaaggcgagcaggcagccgtgggagcttggaggaggtagccacggtgtgcagggaagtcggcgcgcagaggaggaagagagccgagctgagggagagagagcatggagaagcgaggagcaggggaatgggcggcagggcgctcgcccatgggagccgcg

SEQ ID NO: 41531 - DNA, 3250 bp, Zea Mays
tcacaattcacaggctgcacagcacacaaaccccgcgtaggggtagagatcacctcacccctcccgactccggcgcatccattcggtcgctgccggatgcgtgcttgacccggccatggatgactctgtccctttcaatgacctcggtccctccaagcccccgtcggcctctttctacgacgatatgttcgagtcctacttcaatcgcgcggccgaggcccccgagcccgcgcctaaggcttcttcctcgccgtcgacgccgccgcccgtgttcgacaagccagtcttcgacgacgatccttacacggccgatccattcgacgcgatccccttgtttggaggcggtggtggaggggaagaggaagacttgcacggtggcgtccggagtgcggcaaagccggagaggacggagttggaggtggtgggttttgatgaagatttgttccctgggttggctgggagcaccaattttcccatggagaagccggccagggaggtggagcgggaccgtcaaccagtggggttcgacgacgagttgatccctggattcgatggaagcatgaagccagcgccgcaaatggagcctgagacagtggcgtttgatgatgatgtgatccctgactgcagtggaggcacgagctatccctcttcggcaagggaggaacctataacgagacaagaaagtgaatcaatttcctctagcaaaattagcatgagcatgccagaagatcctttcgttactttaggtggtacacacaaatcgggatattcatctttagggttgttttcaaatcttctgaataacattggcatgcctagaaaggaagcggacacaacgcctgataataccagtgggatatttcagggttctgatatctttactgagtttccaaaagccatgccacccttttcgtttacatctgaaaaccagagtgatagaactgaaaggagatatactgaaaacataatcagcacgagtcactccgatcggctgcctcaggagaagacagtccaacaagcatcaacagaagcacctgccaatacattgactgagatgaacttccctgaagcatctgttgtccatgaagtacctgttaccactagttttcagacattgaacccatttgttgaggaagacgatttgttagaggtgaatcaatcttcacaaacgactaatgatgtgtggctaactgttttagatattgctttagtgacactacctacaagtgcgccacctccttcaaggcctccacctccacttgctgctaagaaaccacctactgaatctgtaactagtgaagcatatgcccatcattgtaatcaacgctaccatcactccatatgttcttcaaacacctctaaaacatcccaaattgatgaattggaagattttttcttgacaaagcctgcaaattctgccattggtcatccacaagttctaaagcatgaaggaaatgggcattatccatctgcagctactgcaagtttcatggactggactgagatgggacactgtaaaagggggaaccaaggggcatttgattctatgttcactagcagtcaatatcgacagccagaaatagatgagaaagcagaggtatgtgctcatgaaacagaaagtacagatgaagaaaagagattagagaatgaacaaatacaaagagaacataaagaagagcaaataagagcagaaagggagatggaagaagagcttgagagggaaagagaaaatgtgagacaaagggaacaagaggagcagaggaggcgtgaaaaagaaagagtggccaggcaggctgtagataaggctatacgggaggcacgcgaaagatcagctgctgaagcacgcatgcaagctgagaaggaggctcgtcaaagagcagagcgagctgcagtatggaaagcagcaacagaagctcgtgagagagctgcagtggaggcaaaggaaagagctgcgaaggctgctgcagaagctaaggaaagagaagcagcagaggctagagaaagggctgcaacagaatcaagggaaagggatgccaaagttgccgcagatgcaagggaaagagctgctagggctgctgctgaagctagggaaaaggaaacagcagaatttcaggagaaagctactgcagaagctcgggcaaaggctgagcgagctgctgttgagaaagctgcagcagaagcacggtggagggctgaaagagcagctttcgagagggttgctactgaagttaagcaaagggcttttaatgatgctagagaaagggctgccgctgcagctgcagctgaagcactggcaagagaaaatcagcaaaggagagcaacaacagaacctgaccttgagtcattctttggcatgccttctcgatcaagtagtctaccgagatcatacaacaacacaacaacgaatcctttcgatgttcaacctggcaatgctggttctggtggtgtaaggaggacaccttctggttcaggttttccctttactcagccttcatcaagcaatcttatggatggcctatcttctatatttggagcacctttaccatctgctgtatttcaagaagtggatggagagagtgaagagagaaggaaggcaagattggaacgacaccaaagaacaatggagcgtgcggcaaaagctcttgctgagaagaatgagcgtgacttgcaagctcagcaggagcaagaagagcgacatagaattggtgaatcacttgattttgagataaagaggtgggctgctggcaaagaaggcaacctacgggccttgctaacaacgttgcaatatattctttggcctgaatgtggctggcgacctgtatcattgactgatctgattacagcagcatctgtcaagaaagaatacaggaaagcaacattgtgtatccatcctgataaggtgcagcagaagggtgcaaatcttcaacagaaatacattgcagaaaaggtatttgaccttctgaaggaagcctggaaaaaattcaactcagaagaactcttctaacaacttgtttaggaaaatgttgatcgcaaaacaagtattgggaaggacagggacatactggtccctgtagtaatgaagaaagggagagtagcaggggccctgtttggtaaggcaccagctcgaggggcgattccggttagctcaaggccagatatgcaggctagtcgctcgtccaatctggagaagcagccgccagctcaaggacgtttcttgctagctctaggctagggaaaatttaactatttg

SEQ ID NO: 41532 - DNA, 3668 bp, Zea Mays
cttggaggagccgtgcgatatcagcaggagtaggtgtcctgagatagtacccccaaatgcggtttggatggtagtgcaaaagtgtttcagagcctcatgtgtcgtggattcaccaatgcgtacgtattcatcaacgacattggcaggaacaccgtatgcaaggatacgaacaacaacaacaactttctgcagagcagacaggcctagctcaccggcacagtttggtcgctgaatgaagtagggatcgacttgttgcacagcatcaacgaggcgctcaaacacatggcgacgcatgcgaaacctaaaatggaaaatacagtgagtacaagtctcaagcacgttttatgaacgtaagaatagatgtgcgtacgaaaagagatacctcctccggaattgaacatccgtgtacactggttgggcgcaaaagtagtctgctcggattcttgcatcgccactcatatggtcacggtggatccaaacatgaccgggaatggaaccagcataccgacgctcgttatgtgcacgacgcctcctaagatgcagcatctggagaagtatggaattcctgtgcccagttatgctcttgtcaatagagaatatccggaccaagagctagactacttcatcgagcaagaagattttgttgaggtccatgggaagcggtttttgaagccttttgtggagaaacctgtcaatggggatgatcaccgaataatgatatattatcctagttctgctggtggtggaatgaaggaattattcagaaaggtgggtaaccgatctagtgaatttcatcctgatgttaggagagtgagacgtgaaggatcctacatatacgaggaattcatgcctactggtggcactgatgttaaagtttacactgttggcccaggatatgcacatgctgaggcacgtaaatcgcctgttgttgatggtgttgttatgaggaaccctgacggcaaggaagtacgataccctgtacttttgacccctactgagaaacaaatggcaagagatgtctgcaatgcttttagacagatggtttgtggttttgatctcttaagatgtgatgggagatcatatgtctgtgacgttaatggatggagctttgtgaagaactcatataagtattatgatgatgctgcttgcatcttgagaaaaatatttcttgatgcaaaagctcctcatctttcatcaaccatccctccaactcttccttggaagtctgaaccagttcagcccactgaaggtcttacacgacagggaagtggaattattggtacatttgggcagtcagaagaactgcgctgtgtaattgttgtaatacgccatggcgatcggacaccaaagcagaaggtgaaattgaaagtgacagaagaaaagcttctgaatttgatgttgaagtacaatggtggaaaaccaagagttgagacgaaactaaaaagtgctgtacagttacaagacttgctggatgctacaagacaacttgtaccaccaactaggtctggtcgggagagtgatagtgatgctgatgatattgagcatatcgagaaacttcgtcaagtcaaagcagtcctagaggagggtggacatttctctggcatttataggaaagtgcagctaaagccattgaaatggataaaagttccaaagcgtaatggtgatggtgaagaggaacgaccgattgaagccctgatgattctgaaatatggtggtgtgctcacccatgctgggagaaaacaggcagaggagctgggaagatttttcagaaataacatatatccaggtgaaggaactggtttgcttcgtctgcatagcacttatagacatgatttaaaaatatacagctcggacgaaggtcgtgtacagatgtctgcagcagcatttgcaaaaggccttcttgatttggaagggcagttgactccgatactggtatctttagtaagtaaagactcatctatgctagatggactagaagatgcaagcaccgagatggatgaagctaaggctagattgcatgagattattatttcaagtgagaaagcaaagaacacagaagggccagtggaatttccatggatggttgatggtgcaggattgcctgcaaatgcttcccagctcctgcctaagatggccaagttgacgaaagaagtgacttcacaagtaaagctgcttgctgaaggtgaagatgaaagacttgcgttgacgagcacattttcaaaatatgaccaggcaaaagctcttggaaagacaactattgatgtggctcgtattgctgccgggttgccatgtggtagtgaaagcttcctcttgatgtttgccagatggagaaaacttgagagggatttatacaatgaaagaaaggaccgttttgacattacacagatcccagatgtatatgattcctgcaagtatgaccttttgcataatgctcatctcaatcttaagggtttggaagagctattcaaagttgctcaaatactcgctgatggtgttattccaaatgagtatgggatcaacccaaagcaaaaactgaaaatcggctcaaagatagcgcgccgtttattgggaaaaatcctaatcgatctacgcaacactcgtgaagaagctatcagtgttgccgaaccaaaatttattgaagacgaagctctattcctaccaacaaaagaagcagagcaccagcagaaggttcatgttagaaatgaggatggaagaagatctagctctacgagtgagaagtcattggaccaagaagatgaagatgatagagaaactaaataccgattagatcccaagtatgccaatgtaaggacacctgagcgccatgtccgcactaggctttacttcacatcggaatctcatatacactcattgatgaatgtccttcgttactgcaatttggacgaaagtctacaaggagaggaaagccttgtctgccagagtgctttggaccgtctacatagaactagggagcttgattacatgagtaatattgtgcttagaatgtttgaaaacatagaggttcctttggaagatgagaagaggttcaggattgaaatgacgttcagtcgtggcgccgatctcagtcccctagaggacaaaaccagtgaaagttcttccttgctccaggagcacaccttgcccataatggggcccgagagactgcaggaagttgggtcctgcctgaccatggacaagttcgagaaaatggtgcggccattcgccatgccgccggaggacttccctcctgccgctccgccacaagccttgggctacttctccaaaggggcaggggtgcttgaaaggttggctagcctctggcctttccacaagagcgctaacgggaagtagctggaagctaacaaatccctgaaaccagttcatgtggttattcttgttctgtaacactttctgcacgccagcccaattttgacgatctgaatcatagtgaaaattttgctggttctttttcatgagcgcgagacataattgtgctatcatgttgcttgcatggatctgagatttaagggtgcgtttggttgctggatagccaaaacaggaatgtcccctggtatcctctcttgtccctccaattttaaggaacaactggggacaatactagaataattctgtctcaatccttgatcctgaactaaacaaacttattt

SEQ ID NO: 41533 - DNA, 1248 bp, Zea Mays
aaagtcttagtcgacaatggcagccaggcggatatcattttcctccatgctttcgatcgcatgggcataagccacagcctgctcaagccttcagacaaccccctgtacgacttcggcggcaagggcaccttttctgtcggcaaaatagagttacctctctccttcggtgtagcacccaatgcccgaagtgagcaagtcacgttcgacatcgtcgacatggtgtacccgtacaacgccataatgggccggggctccatcaacaagtttgaggcagctatccacggactttacatgtgcatgaagatcccaggtccgcaaggcgccatcacagtctacggcaaccagcaggttgcgcgtaacatagaaagagacttcgttcctggactttggtatcggagccattttatgcccaagatcctgcgctactacctcgagtccgaagctatggcgatggttccgcacggcgccggggggagttcagtctccatgtcatacccggtgctgtcgccggcgagctacacggcgtgggcgatcaaggtggagtcgattctcgacgcgcaaggtctctgggaggctgtgtctccaccagatgatggcgaggtgaacgcagtgaagaacaagacggcgcgggcacaacttctccaagctctgcccgatgacatcttgatgcaggtctccaccaagaaaacggcagcggaggtgtgggcgagcctcaagactcgtttcgtcggggcggatcgggtcaagacgacgcgcctcgccacgctcaagggcgagttcgacaagctgtacatggaggacggggaggcattggacgactacgccggcaaaatcagcggtatggcggcgcgttatgccgggcttggcgcgacgctcgacgacgctgccatggtgaaaaagctcctcgacaccgtcccggatcggctcttccccgccgtcgcgggcatcgagcagttctgcgacgtcgagacgatggcgttcgaggaggcgctcggcagactgaaggcgttcgacgagcgttcccggcggcgcactcgtgctggcggcgaacggcgcgacgaccagcttcttctcacggaggccgagtggaaggctcgacaaaagaaaaagtcgtcgatcgggaagtgtttcaactgcggcaaccgcggtcacttcgcacgggactgccccaagccgaagaaagaggaggcactattcgccgatgccgaagaggaggcgacgctcctgtgagtgcaggaagcagtgccg

SEQ ID NO: 41534 - DNA, 1953 bp, Zea Mays
cagttatcaaaataattcaatgctttacttgatgacttcagttctccttgtacctcccactcagaactctgagcttctgaacatggaacttgactaataaagtaataatactgctgatgacttgagacttggcaatggtctctttcttgtcgtctatctgaggctcaaggcctaaacttcaaaggtgggattgtgggaagcacaaatctaatctatcgaatgtcctagtggaacgccatcttgacttgaatgatgacttcagttctccttcgttgctatatatcccttgaacctatacatacgcgtatctctcactcagaactttgaacctcttcatgctgcaaacccttcgcccaggatcgcaatcccacactacaaagtgatccatctctgggccttgccgacaacaaaagcaactacagcgcttttttctgcggattgttgatggcggcgatggtgtgctctgctgtcgttagcgaaacagtgagtaagatcgtctcaagcctcctcgctaaggatgatggcaagtccagtgcagcagaaaacatagaaaggctggagatggcacacatcaagatggagtccgcgctgcacatggctgaaaaatggcaggtcactgatgtgccgctgctaaggtggcggagcaagctgaagcgcgccgcagaggagtgtgacggcgctctgcggaggtgcaagcagcgcgccctggaagaggaagagatccggcagtcctcgtttcccaaacggattgctcatgctaccaagtcatttatctcgtctttccccgccgccggcgctagcagagatgagacaagctcaggcagtagcgatgtccggagattcgagagggaaatctatgaagtaccacgcagttcacatgaattcctcaaggggtttatatcttggcttcatgctgcggctctctgaaagcactgacatactcggcgtcatcatcaggtgcttgcagtcagtcacgccgcggttgaagcctaccgcagaatgtgtcaagagagagctcattcagctgcctacgcaagatttctcctggttgccgtatggtctccataccaaaaatgagtactggaacaacgtccactgcagtttgactcagtggtatcgtccaaaccctctttgttgcaacgagcacaagaacaacaacaacttgatcacctcctctgttattggtagcacatttccggaggaggacaaaactaatctgagttctgcagctcaacatggaggaactggttttcaggattcagattttccgccagtgaaagtaggagttttgatcatacctcacgactctccagaggacatggagcctggagctgagacctatgctctagaggtgattgctgaaaaggagaagggaatggtggtacacaccaatgcatgcctgcaagacctagatgagaagttactacccaaggcgataaattacctgaatcagaatcctgaatcgaaggaataccaaatgtgtttcaagtctagacatggcacggcgcacctttacctggagaagacgagtgcacaaatgcaaaaaggacgtacaagtaaaagcaaaaccacaaagctgcaggctcggaagaaaagggtaattccattcgacagcgtagagatatggaagcaggcctcccgggactatctcaagttatgggttgttcgtgcatcgagcacactacgaagtttattcaggtcttgggctggccatacttagcttcgcacaagggctggtacaccagaatgtattgaaaaaaaaaaatgctatgtgctgctagttccatccaccagggatactgaaatgtgtttagccagtgaagtatctgttgtgtataaattaaatccatgaaaattcattctttgtggtaggtccttaatcaaatatagattggttatatactcttttttttttaagtatttgaaaaatcatatgctgtgtcattatttgag

SEQ ID NO: 41535 - DNA, 891 bp, Zea Mays
aaattcacggtgccctcacttcctcgtcccaaattggtagtgcacggtgaacttgttgtctcttttggtcgtatagctcctgcgtgactgcctatttacgccggagttcaccacgacgtccatcgctcccgtcggaccccgcagtgcgtgttcatctccgcgtccccgtggccaggcaaacccgatatggcgcgaaccaagaccactcaacacaaatcaaccggaccacatggtgtacctaggcaccagctggcctctaggcatgaaggaagtagcagtggaagcaacgaccctatcggggatttggaggctagagtggagcgactcaggtctgagctatgccatggatgcagggagcatgcgcacgatagccgctgcattgctgaattatcagcagaagttattcgcctggaacaggaaatttcgaaacgcaatacgaccattgattgggccataaactcgtgctctttcgcttgggattgtgaagccaaagctctagctcaagtagcagaacttagcgcatccctcgaaaacctgcaagcgtactgcaacaccttgcatgaagaagcgcacgtattgtatgatcggctgcacccgaacgtgccaccagaagttgcagcaatgggagctggaccatctagaacagctgatggggagttggacctttttggggcccctcctgccatgaaccttgcagatgaacggtctcctgaagcgggcagtggagcagttaaggatgaagaaaattagaatagtatagtttaagtaatgtacttatgtaaaataagtaaggaagtcgagttgtataatggagtatgtataattattacagttcaacaatgtaataaagatggtgtatgtttggtatgttatattttcaaatgtttcttt

SEQ ID NO: 41536 - DNA, 1812 bp, Zea Mays
gaaaagaaaagccgttctccctccgtttccccaaaccccaaggtccccaaccatggcagccgccgccgattctgcctccgaccaaaaccctaaggacgccgagcggcacgtgctcaccgccgaatccgacgccgatttctccgaggaggactacgacgaggatggggaggaggaatacgaggaggaggaggagctggacgggccggcggcggcggcggcggagcgggagcggatgcagtccgtgttacggaggctgtcatccgaccccgtgggcatccgcgtccacgacgtgatcatcaagggcaacaccaagacgcaggacgagctcatcgaggcggaggtcgccgagctgctccgcgccgcccccaccgtgcaggacctgctccgcgccgccagtgtcgccactgcgcggctgcacgatctcgacatcttcgacgccgtcaagatcacgctcgacgccgggccgcccgagctgcctggcaccaccaacgtcgtcatcgaggtcgtcgaggtggccaaccccctcactggcaccgccggcgtctattcgaagcccgaagcaagatcttggtcgctggaagggtcacttaagttgaagaacttgtttggctatggtgacatctgggatgcatcaggatcctttggttgggaccaaacaacagaggttggtgttggagtctgcctaccgaggtttaaatcaataccaacaccattgatggctcgggcatctttgtcatcacaagattggctgaagttttcatcatacaaggagcgcctacttggcctttcatttggtttgctgtcaacaaggaaccatgacttgtcatacaaccttgcgtggcgtaccttaactgatccatcacgtgtctcatcaaaggccataaggaggcagttagggcataaccttctttctgcattgaagtacacatacaagattgataagagggattcacatcttaggccaacgaaaggatatgcgtttcagtcaacttctcaagttggtggtctatggaatagcaaaggattgagatatttccggcagcttgggcggaccgtcatctctgctgggtttcagattaaggggagttggcccaacagaggcgcggaggcatgtccttaataactcggagagtggctcggctgaccctggaagggattacttgggaggtgatctggccgtgtctgccttcgctgacctttcttttgatctgcccctcaagatattcagagacgctggaatccatggccacgcattccttactgctggaaaccttgcgaaactgtcggagggtgagtacaagaacttttcggcttctgaatttcggcaaacgttccggagctctgctggcgttgggattattttgcctaccaaacttttccgggtagaggtgaactattgccgcatcctaaagcaagctgagcatgacagcgcgaagactggaatccagttcagcttttcctcgcccatgtaggaacttgccatggcagccgaaacagctgcactttcctctgtagacttgcatttcttcccgttcttttcatgctgaagcaattgaagaggttatttacgtgctcccttttcttgtgacgcttgttcattgacacgaggagctgctccttttttttggtgtcttcaggagatgggtttattatttgctgtttttgacctcacgagggatttgtcctcgcacaactcaaataccgatgctgtggctacacaatggtggatagaataatattttggcccataatgttgtataattcataccacatcagctttccgtgtcattcgctcgtttattcgcgtgtgtt

SEQ ID NO: 41537 - DNA, 3082 bp, Zea Mays
tttcagtcctcggcgaactcgactcaaaccctaagcccctctccttgccatcccgacccatggatcgcgagcgctcctcacggcgccctcgcgacgacgatgtgcaccaccggtctcgcgaacgggacgacgaccgacaccgccgccgcagtcgccacgacaccgacggtcaccacaggtatgagggcggagacgaggatcgccgccgccgccaccgccaccgcgacaaggacggtagcggaggcggcgaggatgaccgccgtcaccgcaaccatcatgacaatgacgacagccgtagccacagctaccgcgacggcggtgacgacgatcgccgccgcgggaaacggcggtccgtttccccgtccgagtccccgccaccttcggtgaagcgggatcgctcgtctagccgcccgcgggagtccgttgagcgtcgcgactccaccgaccgcgagccgcggtcgtcgtcgcggaagcggaaggaccacgagggcggtggcgacggggatgagcccgttcgcgaagggggcaagcgggccagggcctccgtggacctgcctccgtccaaggaggagaggcctagacgggagcgcaggaggtttgaggatgtcgatgagaacgggaagaatggtgatatgggtaaatggggcaaggaaatctcatctcatgagctgcagaaggaggagttatcaattaatggtggtttacagagctacgatgcacctaatgctggttctcagcaaccactcagtgctgtttctgtgccatcttctgttcccattccttcaaaggtatcttcaatttctaccaacaatgcaaatgagggagttagtattagatctgatgaggttaccgtaaaatctagtacagatggaagtgcaatgtctgctgctagcaaaagtagtaacctatctcttgatgctttagccaaagcaaaaaaagctttgcaactgaagaaggaactgtcagaaaaactcaagaaattacctatgcttaataataaactcgctacagctgttactgctacacaagtttctaaagaagcagcaaaaacttctgtatcagctgtagatgcacaacacttttctaaaggagaagcaaaacttactgatgtttctagtctgccaactagtagcatctccggaacgccagccattggtggtgtgattggtattccaggtcttacacacatacccaatctcgattctgtgaagagagcccaagagcttgctgctaagatggggttccgccaagatccacaatttgctcctgttatcaacttcttccctggtacatccactgaagttactgtggcacaaagacctgcaaaggctcctgttcttcgccttgattctcatggtagggaaattgatgagcagggaaatgttatcagcatgacaaagccaacgaatctgagtactctgaaggtcaatataaacaagcagaagaaagaagcttttcaaataatcaagccggacttggattctcttgcaaaatcaagtgttcattttgatgaaaggatgggcataaaccaaaagaagctcctccgtcctaaaaggccaggatttcagtttgttgaagaggagtcaatttggtgaagcacaagctaaagagcttaaagtaaagcaagcccagcttgctaaggcaaaggcagaagtagacattaatccaaactttattgaggttgctcctggtgtgagagctccaaaacaaaagcagaatgaagatatccctgaaattgagccatgggatgcaaaaattttactttctgccacatatgaggatatctctgtggaggagattaatatggacaagatcaccatatatgttgaacatccagaaccatatgatccacctgctgaacctgcaccaccaccgccccagccactgaagttgactaagaaggagcagaagaagttgagaacacaaaggcgtcttgctaaggaaaaagataggcaagaaatgattaggcaaggcctcttggagccacccaagcccaaggtcaaaatgagcaatcttatgaaagtactaggctctgaagctgtgcaagatcccacacggttggagatggaaataagaactgctgctgcagagcgtgagcaggctcacgttgaccgtaacattgcccgcaagctcacaccatctgagcgccgcgagaagaaagaacggaagctttttgatgatcctactaacacaatagagactatagtttgtgtttacaagataagagacctgtcccatccacaaacacgcttcaaagtcgatgtgaatgctcaagagaataaactaacaggtgctgtggtcatcactgatagtatcagtgttgtggttgttgaaggggggaagaagtcaatcaaaagatataataagctcatgctaaaccgtatagactggcctgctgctgttggtggtgatgaagacacagaaatggaagctgacaagccagtgaatagctgtgtattggtctggcagggtagtgtggcaaaacccaccttccacaggttcactgtacataactgccggagtgaggctgcagctaagaaggttttcgttgatgtttctgttcctcactactgggaccttgctgtcaatttctcagaagattcttcctgagcaaagcacctgttcagaaccttggtagcttctgctgacctttgctggctacatgctagagatgtgtggccagtgttatagcacttgtcatgatggtaagtcctgttatcacgagtttctacaccaatgggcacatctgctgaaccgaggaatgcctgctgttggcctgttgtcaatctgttgtgaagatgtcatttcagtgatgtttattgctggattttcctatggtctagaaatgtgttgtgagcaactgttgaattttgcagcgtacatttggaataaatccattgcaacaaatgtctatgcgtgttttagtattgttgcggagcgaattgttgtgaaacaagtgtcttcttaaatagataccccttcgtgtgtgtgcgcgtgagtggcattatgaagactataatagccactagtaaatgttttaggtggttaccgtagccactaaaagtgcaatttctatgatcag

SEQ ID NO: 41538 - DNA, 692 bp, Zea Mays
tggaaccatcggtctccgagaggaaaagctattattggccggcctagccagcgcgcggcgtcgcgtcaccgccggcgcgctcaggaatgaaaccgacgagcaggatgctgtggtcatcgagtgacgacgatgagtacgtacaaatataatgtgacagggcgaccgctgcgaacgagtgagtgctgcagcagcagcagagacgaccacgacgagcagagacgaccatatggcacggacgaccatggaccatgatgatcggtgtcgtcgctacgtctcgtcgtccttccgccatgcatgctgaacacatgcgcgtatatatgcgcgcggagttgcggtggtcccctcgctagctggtgtgaccgtgtgagtgatccatgcatgggtggggtagtagccagggaggacgacgacgcaacgcaacgacacggcggcacgcatgtcatgtatgggaaagctgaaaggaaacagagagagagagagagagggggggaggtagcagctagaaaagagcacgcgcgcattttgtgagtggctgtgtggcgactccggcaaccaaacggggttatctcgtattattgcagatctgctggttttttttcacagtagaattttgccaacacttgtcagtggcagtgtactgtcgcaacgtacgggattctcacatcagccgacaatattgctgatacccatac

SEQ ID NO: 41539 - DNA, 1456 bp, Zea Mays
atgacccactttgccccctcccttgcatccacccctggtctagacatgaaggttggcgatgaagaagcacttatagaagcagaaggcaattgtttttccaattttcacgttgctggaagctccagtagggtagcatttgctttagtcaagaggaaagcaatgaaggcgaggcacatcaatgattacacctaccctgtcagggactggtttccctcggaacctacgcgggaacttactgatgcagagactgctgcacgtgttgttttcagacagatactctccacgcctcctttcatatcaaggaacccaaagattgcctttatgttcctgaccccgggcaagcttccattcgaaaaattgtgggagttgttctttaagggtcatgatgggagatacactatatatgtgcatgcttcacgggagaagcacgaacatgtcagtcccatatttattggtcgagacatacacagtgagaaggtagggtggggtatgattacaatggttgatgcagagaggaggctgttggcaaaagctctagaagatatagacaaccagcattttgtattgctttcagacagctgcgttcctcttcacaattttgactatgtgtacgactttctcatgggatcaagacacagttttctggactgttttcacgaccctgggccacatggagtttacagatactcaaagaatatgttacctgaggttcgagagtcggagttcaggaaaggttctcagtggttctcaatgaagcgacaacatgcaatggtggtgattgcagacagtctttattactcaaaattcaggctttactgcaggcccggaatggaagaaggtcgcaattgctatgcagatgagcattatctgccgaccctattccacatgatggaccctgctggcattgcaaactggtcagtcacctacgttgactggtctgaaggaaagtggcatcccagatcttttcgtgctaaggatgtcacttatgaacgcctgaagaatatgacttcgattgatgtgagctaccacatcaccagtgatgacaagaaagatctattgcagaggccttgcatgtggaatggactgaagagaccatgctacttgtttgcaaggaaattttaccctgaagcattagacaatcttgtgaacttattctcaaactacacaattttctgagttctacagctggaagcataaacatttttggaagcattggtgttcatgttaattctttgtagattgctggaggggcagatatattgacactaactcagtatatgcatgatagtgaacaagtattagacaactgtgtcaccgataaactgttttaggattatattattttatataggttttcagtgttactctttttttttgtgtctcctggcaatagctaattatgtcaaaactgtcatttataccaccttttccattaatcattcctcaaaagaatgtg

SEQ ID NO: 41540 - DNA, 319 bp, Zea Mays
agattcggggaagttagttgggattcagtctgatccgagcttcaccatggtataaaacggtggtcggggcccttgcctcattagcatagcctgctatagggagccagaagccaacaaaatatgaagccagagcgcgcgagagagaagcatcgaggaaaattgacggattatattttgtggggcgtgctcgaggtctatcttgggatgagggagtatcagaccacctgggtgttgctcgtcggctcctgtcatcgaagaccagcctcttcacggcatctttgccggtaagacatatgctcagtaaatcgatgtatactcc

SEQ ID NO: 41541 - DNA, 2087 bp, Zea Mays
tacgctttaccataatctaatttatataatataggatagaaataagtaccgtaagttgataaaacgaattttaattgggaaatttggatccataccattaaaagatcactattttggatccataccattactatctcacctacatgtgggtccacatgagtcaatgacatgtggggtctatggtatatatctaaagtttagattttttaatggtatagatccaattgttccattttaatttgggacactatagatgcatttttggcactattggagatgtcttaggtcctgggcatcctagctcgtgcgtctctcacccggtacctgctcctcggcgcctccccaaccaagcctccgcaccttcctcccgacgcgcccctcatggcgaggaggcgctgctgatgcctcccggcgtcggattggacgcggcggccacgacacctagccgcttgcggtggtgctcgccgagctctaggcgcctaatccgccgacgctgctcctcggatcctccccgagagattcaggcctcgtctcgtctcgtcctgcctagttcaatcgacttccccaagtgcccgacccctacaaggagacggagtggcgcgccagcggccacgccggcgaagagaggacgacagcgtgcaagaagagaaggcctgtgtcaggggcagctataggtggcaggtgcaaagataggcaacaagtgttcaacaacacgactgtggatcaattgacctgcatttcagcttttcagttgaggattaaagtggagctttaagaagcttgaaaattgacattatctcaataatacattgaagtgcaagatgccaaaaataaagaatctctctaatgcatgcaaagtatcattttctccggaaggtcccatatctgaagaggtgcttgagagagtccgtgcactgttagatgagataagacctctagatgttggcctagataatgaagcacaaattgcacgcaattggagtagtactacgcgtccatcaaatgggagacgaggacgtaatggggctaaccagttcactgctccaatcaaatatttgcacattcatgaatgtgaaagtttctctatgggtatattttgtatgccaccttcttcagttattccacttcataatcatcctggaatgacagtacttagcaagcttctttatggaagactgcatgctgagtcttatgactgggttgatgtacctgatcatcctattgatcaattgcaaccaaggccagccaagcttgttaaagattgtgaaatgacggctccagagacaactattctataccctaatgcaggtggtaacatccacacattcagagccatcacaccttgtgctctcttcgacgtcctttctccgccatactccgctgaggatgggcggcactgttcatacttccgcaagtctcaaatgaatcaaccatctgttgttttgcctgctgagatagatagcacacaagtagtttggttggaggagttggaggaccatcagcccccagaaggctttgttgttgcgagaggtatgtataaaggccctgtaattaggagataatttgctttggggcacagaatccaccaaactgcaaatcagctgaaagacgatattgcaagcatcctcaggtcatgtgcagcctacggtttactttgtacatgtcaaagtgacctgtgataattcaacagcagttttacaggacaagaatggatgtttttttgtttggttgcttttttaattgtgtcccactgctgtagtatctctgacctagttatggagctcttatcagaccaagaccgtggagcacctacttttgagcatagtctagcatattgtcatgatgtattgatgtactagggacatcaatggacaaccttttccatttggtgatttcagaaagagtttggttggggctaccattttgtctgtgtaatagcaccattactatttttgggcaagactgtaaattacgggggaggaactgtaataatatcgttagatttatcatgaaatatattttcacgatatacctatcatttttaataaaatcttaaacatcaatgttttttcataaactaagtcaaa

SEQ ID NO: 41542 - DNA, 2214 bp, Zea Mays
tgatctagcccgtccgaaggaaccacttcacactactctccgcggctctgccgtccgttctcctctcgccgccgccggccgcgcctccaccctcgcggcactcgcatggcggcgccggctctccgtatcactgcgcggctgggacttgcacttgacggtgccaccgccgcgagacggcgcgaggcctcggcgcctgtggcggtgccggccgcgccgtggctgaagaaggcggcggtccggtgtcagcgagccgtcggtgccgctgttgccgagaagaaggatgcgccggtatcggttgcgcaggatagaagcggcgacgggggcgcggcgccggagctcaccgtcgtgatgaagttcggcgggtcgtcagtggcctcggccgagcggatgcgggaggtggcagacctcatcctcagcttccccgaggagcacccggtcgtcgtgctctcagcgatgggaaagaccaccaacaaactcctcatggctggggaaaaggcagtgggctgtggtgcgaccaacgtctcggagcttgatgagctctcctttgtaaaggaattgcatcttgggacgcttgatcagcttgggctagatagatcaattgtttgtggtttgttggatgaacttgaacaacttcttaagggaattgctatgatgaaagagctgactcttaggacacgagattatctagtttcatttggtgaatgcatgtctacaagaatatttgctgcacttttaaacaaaattggagtaaaagctcggcagtatgatgcatttgatcttggctttataactaccgatgatttcacaaatgcggatattctggaagcaacttatcctgctgttgcaaggaggctacatgtggaatggattaatgatcctgctatacctatagtcactggctttcttggcaagggatggagatctggtgcaataactaccttgggcaggggtggtagtgacttgacagctacaaccattggcaaagccttgggattaagagaaatccaggtttggaaagatgttgatggtgttttaacatgtgacccaaatatccatcctaaggcaaaacctgtgccatacttgacatttgatgaggcagctgaacttgcctattttggagcgcaggttttgcatccacaatcaatgcggccagctagagaaggcgatgtacctgtgagggttaagaattcttataaccgtcgagcccctggtacccttatcactaaagcaagagatatgaactgttttgactagcattgttttgaaatcaaatattacaatgcttgatatagtcagcacacgcatgcttggccagtacgggtttctagctaaggttttttcgatatttgaagacttgggcatctctgttgattgtgtggctaccagtgaagtcagcatatctttgacactggatccatcgaaactatggagttgtgaattggttcagcacaaaaatgaacttgatgatgtcattgaagagcttgagaagatagcagttgttcatctactgcagaacaggtcaataatatctttaattggaaatgtgcagaggtcgtctttgattcttgaaaaggctttcaatgttctacgaagaaacggtgtcaatgtccagatgatatcgcaaggggcgtccaaggtgaacatttccttggtggtccatgacagtgaggcaaaacagtgtgttcaagccctccactccgcgttctttgagaatggtttcttgttggaagctgatgagttggatgttctgcatgatggctttacatcgcattccaatggcacaatccacagccattagccgaggatttgatattcatctgtttggctactgtagtgccacttgtgatcaaatcctgatctttggtcgatatctaatgtttttatgaggctacgaaggattcggctttagagctactacccatcagaagtctaggaatttgttcagagccactacttaggattttggttagagattaatgatactgtttggttttctgtacaattgattgaaagtatatacttagttatcttggccaacctatcaaaccacggaggatgcaagcggatttgtccgtaaacctttaaggttagtttggaaacctcatttttgcaagggaaattagttcatttttttttgtgaaaataggaatcccaaaatggagtttctaaactagccataattgttacatgttactacataagccacaaaaaaaa

SEQ ID NO: 41543 - DNA, 1385 bp, Zea Mays
taaccaatgagaaatctcgcgccacacaactagactgggcaaggatgacaatataaaaaagagactccacctgtaagaatggttacaagtagagagacaaatagatcatggcccaatgaaatgaataagacatggccataacctaaactggttgatgaagggagtatgatgggagactgttaatctagccccaagcatatttctatgtccatcatagagattacaaggtcaaggattagtatctaactagatgcggagtaaaaataatcatgagattaagttgatatgccttcgatagaaatgaggaaatcaaaggcatcaaactcatgaaaatgacgagacatgcctttcctaggttgggtcgataaaacaatgatgtgattatcaagaacaggcaagctggaattagggatatcagcttgcgccaatcgaataagggcatggtctaagatgaaaatatgagtcgagattcttattttaagattaagtaccctttttgtccaacgaagaaattatctaaacatttatttgtataagtttggatcaaagaggggtaacggaaaaatcaactttggtcatggttcaccaactaagaacatggcctagatttgggtttaggcaaacaagtcactaaccttctatcgacacattaagcacaagagcacacatatagcatctaaacataatacctaaggaacggagaacaactattttatcgaagttcataattcaacattacaccagattatctacaatcactggtttctggaataaggatgagagaagcattgggtgtataggtgacaaacataatacaacaatcaggatgcatgctcgtcttattcgtcctcactgattttgccaacataatgtggcgatagcgttctatatcggtggcatacttgcgactctcacggtattttgctagtcgtcaactacacatacgttttcgaggttagtgtacctgcagaaaattccatcacagcccaatttcccaatgatgcaattcacacatgacagtttatcacagtttatactccatatattgctatatggaggccagctcatcattaagcgctgagccacgcataggcgtcgttgccacacttttaccatagggtaactcattatggtaactcaccttcttacctgggcgtaggtgcgtcgttacaagtacattaaacttctcagtattcccatgtctgtatacccatacacatccatggggtactgaattcccagaaaagtaattactccacatcgcagccttcatatatacatatgtaaaacatgtatataatcaagcgccacaattaagcacttccctagaccgacgtttgttcggtcatgctctcacatctcaccttacctgatcgtcgatccat

SEQ ID NO: 41544 - DNA, 2010 bp, Zea Mays
gtaacacatatggctctgtatctccaccccagaacaaccttgggttataacgttatctctttcatcctttctcactctgcctatccgtcccaagtatagtatatacgaggagtatattttcttagagatcgttaacctcatagtaatcgctccttttgcccaaaacctaaagggaagccaaagtgggagcaccaaaatactcgccgcgggtgcatagttgtttgtttagaaggagaagacgaggttaaggggagatgagcgagctggtgcgggcggcggctccggcagctgcggaggaggagaagaaggccgtcgcggctgtgactgtggtggcgaaaggaaaagagaaggcggaggtgacgccgaccgtggaggcctcatcggtcggcgacagggggaggttcgtggcctacccgtcgcgggtggcggagcacacggacgtggtggcggacgccgcgcgcttcagggcggcgctcgaggggctgcacacgcacatgggcaccaggctcaaggtgccgatcattggagggaaagatttggatcttcatcagctatataaggaggtcacatcacggggcggtattgacaaggtgaaggcagagaatagatggagagaagtgactgcatcatttattttccctgccactgcgacaaatgcttcttttatgctgaagaaatactatatgtcactcttatatcattttgagcagctatacttctttagagtgcaaggctggcatcaacaagaaatagattccagaatgaattcttccattgaaattaaaaccgaaggccaagcttaccacaaaagaaaaaggggcatcaacacatcttcagatccagcttcgtcttcagataatgttgacgtagatgtgatagttgatggcaaatttgaacatggctacatagtgactgttattatgggatcgaaatccactaaagcaatcctctataattgcactgaagaacctgctttgccaactccggagccacctgttgcaaataacagcactggtttgaagggtgtacgtcgccgaagacgacgtaggaagaagctaagtacaacggatcccaggcaccccaaaccaaacaggagtggctataatttcttcttccaggatcaacatagaattcttaagccacaatatcctgcacaagacagactgatcagtaaaatgattggtgaacgatggaacaatctaagtcctgaagataaagctgtatatcagcaaagaggtgtagaggataaggagcgataccggacccagttggctgcttataaagaactgaggacaggccaacctatcagcaatgctgtgcctatccaacagaggctccctctgacagaagtgacgattgatgaagtagactccaaggtgagccaagatgatatgctgctgtcaaaccaagggtacagcagtagtgatgaaagtgaccattcaggagagaaaaatgtagaagacgagctcaacactgaaacatcccctgaggtgagcatggaaacaactggttctcctggacaccctgatccctctcgagatggggaccactttgagttgcggcggagagaaaaccccaaggcagatgagaaagataatgcaccacctgattcatgacttttcgctttgaatggtatgtattcgaagatccgaaagagaggaatttccaagaggtgacaagctacactacacatacatacctgttgtcgtaggaacataggctatatgctgatgtcaatcagagttctattagcagttggaatacacttcattttggtagttctgaatttgtattgctaaatttctttcgaattaaaagagagagggggggggggggagggggtactgggtaaattttccatccagggatgggtacttggtatattctttcgttcaatatttatcattacgttgatctatatgttgagtatgtgtaatgtcatgtcagcgaaaatccaaatctgcatatctaattgtagctatacatgcttagtttcatatattataaaag

SEQ ID NO: 41545 - DNA, 630 bp, Zea Mays
cacgggttgtgaacgtctacactacactcttatagagtagtaaagatattgtgaccaacaattctatttatagacctagttgactggaatacgaatcagcttacccttatgacatccgacttgaaaccacgaagtcgatgacgcctttcagctcagcatttcaccgaaaatagggtgagtgctgcgtcgaatcttttcagagcattctccggccgcatactgatttattttcttctgcgcctaatcttttcagagcttggcgtagacgaggatgacgatcgacgacttgttcgagcttttgtcgagcacttggtgaatatcacccggctagcttcgtcttcacctgattcttaggatttcttggggatgcacaaacgacgacaagatcgataatgcatacgcgtgatgagacagggtctggggagatgtgcacaagggaaaatgagcttgtggtgccgagagtcgacggcgaggagccagcggacgagtagcacgctgacgaatccactatagagctttgggtaaggtcgagagcgctggtgctgcagtcaggacatcccgacgacaatgctacggatggtgaaaacagggtgagggtgtgaagcggtgtccgtgaggacaacaccgcgt

SEQ ID NO: 41546 - DNA, 1795 bp, Zea Mays
cgttatccacctcagcggcaagaccaccaatcctagctcgccaccggcgccccctcttatcacctcaccgacccaccaccgcacggaccaactcgttctcgtcctccaccaccggcgcctcgtctcttcccgtctccccagtccccactctcgtccccgctccctccaaagtccaaaccctaccaccccacttccccaccaccactacatggcggcggcgctcgcctcctcccgctactgctggagccgcccgtcgctgccgccccaaccgacccgcggccgccgctccgtcactagctgcgcgctctccggacgagagaaaagaaactcctttagctggagagagtgtgcaatttctgttgcattgtcagttggactaatcactggtgcaccaacgtttggaccaccggcctatgcttcttctcttgaacctgttcttccagatgtgtctgttcttatctctggacctcccattaaagatccaggtgctttattgagatatgctttaccaatagataataaagctattcgtgaagttcaaaagccgctggaggatatcactgacagcctcaaggttgctggtgttagagccttggattcagttgaaagaaatgtcagacaagcatcgaaagcactgaacaatgggagaagcttaattcttgctggccttgctgaaccaaaaagagcaaatggagaagagttgttgaataagttggctgttggatttgaggagcttcaaagaattgtggaagacagaaatagggatgcagtagctccaaagcagaaagagcttctccagtatgttggaacctgagatcttcctgggacattgcatttctgcagtgtagaagaagacatggtcgatggctttccctttgaaataccagaagagtacagcaacatgcctcttctcaaaggaagagctactgtggatatgaaggttaagattaaggacaatcccaacatggaagactgtgtatttaggatagttctggatggatataatgctcctgtgactgctgggaacttcgtagatcttgtcaaacggaaattctatgatggcatggaaatccaaagagctgatggctttgttgttcaaactggagatccagaggggccagctgagggctttatcgatcccagcaccggcaaaatccgtacggtacctcttgaaattatggttgatggtgataaggcgcctgtatatggtgaaacacttgaagaacttggtcgctacaaggctcaaacaaaactccctttcaacgcttttggaacaatggctatggcaagagaagaatttgatgacaattctgcttctagccaagtattttggctcttgaaagagagtgagctaacaccaagcaatgccaatatattggacgggcggtacgcagtatttggatatgtaactgagaatgaggactacctggctgacgtcaaagttggagatgtcatcgaatcaatccaagtcgtctcaggcttggacaaccttgtcaacccaagctacaagattgtaggataacgtgttttgtatcagagtttcttgtctgtgggtctctgtcctcaagtcgatgtaaagtgctatatagtatcttactcccatatccttctcgctcgttaacgagggtttgtgtcacgcggaattcgatagtaattgaaagtacagagtcattgattggttgtcccatacttagaaaaacctgaaacgaggaacatggccgtgtttctctgttctggaaactttgtccagaaacaaggaacgggaatggtcataaacgacgacgaaacttcaact

SEQ ID NO: 41547 - DNA, 2315 bp, Zea Mays
cacatcacaaaatttcccctcgctcctagcactcgagcactcaactgtcgcaccatcgggacgccgcggcggcggccagcacgttcgaggctgcggcggcaaggtgggctgtcgtgcgaggtcagcgaggacaggtcgtctgggagcacctgaggctgtgcgaggtgccggcaggctatgacatttctagagtaagtaatactctgggggcatctcccgctcgcttagctgtgcccgccaggccatggagcgtgaggacgccgacggcgctctcgattcgtgggctcaattctgcactctttccaacgagcttctcgccggagacggtgatctcgccgtcggcccacgcctagctcccgtcgttggtgacctctgcacacgcggcctcgccacgctcgtccgcgactacttcctccactccctcgaggaaacatttcgaaaccatgcagtcaagaagttctggcagcactttcatccttattgcagtgcctcaaccgtagacagaattaagttctgtctctcccgctattgaagacctaaagctgtgtttagagtacacgggccaacactctaagcttgttgactcatttatctcatcgcttcgatatcgtctacttactgctggtgcatcaacaaatgatatattgcaccaatatgtgtccactataaaggcattgcggacaattgaccccaccggggtgttcttggaagcagttggtgaaccaattagggattatctgagaggtagaaaagacactatcaaatgcatagtgacaatgctaactgatgggtcaggaggaagtggaagtggaacaggcaatgcaggtgacaatcttctggaagagttgaacagagatgctgaaaaccaggaaaatgctgattacgacgatcatgcaaacattgatgagaaacaagcatggctcaattctgaaagctgggaacccgatcctgtagaagcagacccattgaaaggcaacaggaacagaaggaaggtcgatatacttggactaatggttagtataattggctcaaaggaccaactagtcaatgaataccgtgtaatgctggcagaaaagctgctcaacaaatctgactttgaaattgattcagacattcgcacattggaactcctgaagattcattttggtgagagcagcatgcagaagtgtgagattatgcttaatgacttgattgactcgaagagaaccaattcgaacattaaaacatctttgctgaagtcatctcaaactgttcctgggcaagaggaggcagaagtgtctcatgatgttttggatgccactataatatcatctaatttttggccaccaattcagatagaagaccttgttgttcctgcttcagttgatcagttgctatcggattacgcaaaacgatttcaccagataaaaactccacgaaagctattatggaagaaaaatcttggaacagttaagttagaactgcaatttgacggaagaagcgtgcaatttactgtagctcctgtgcatgctgcaatcataatgcggtttcaagagaaatctagttggacttcaaaggcacttgctacagaaattggcatacctatggattctcttaacagaagaataagtttctggacaagcaagggggtcctgactgaatcagcaggaccagatgccgatgatcgcaccttcactgttgtcgatagcatgtctgatgtcaacaaggacagtattgtgaatgaacgcatggcagagtatcagatgactgaggaggaaggtgaaagctctgtggcttcagtggaggaacagcttaagaaagaaatgacagtctacgagaaatacatcgtcggaatgctaacaaattttgggagtatgtcgctggacaggatacataacactctaaagatgttttgtattgccgagccatcgtatgacaagtcgctgcagcagctgcaaagttttctttctggtctagtagcagatgaaaagctagaaacgagggatgggctgtacttgctaaagaggtagcagccgtttctatactaggatagtgggttgttagactagggttgtacacttgtactatttgctaatgagttgtttagactagagatgtcaggtaatcagatataacacacttcattatcaaagctatgttatcgggttcagaggcagcttacatatcctatctcacatcctcctttattttaaacttcattatgtaaacaatgactatgaaggtgttactatggaggtatttgagatggctctaggttctagatccagtatggagctgtagtttatgtcagtttatttaaatagttttaaagtatt

SEQ ID NO: 41548 - DNA, 788 bp, Zea Mays
cctccctgcgttcccccaccaccacggcggcagccactggttggcagcggttgtccttctccggtgtccatggcgccgccgctcgcgacacgcggcctccccctcgcctcccgcggcccgccttcttgcgcggcctcctgctcctcgtgcctgccctcgtatctccagctcggtcgccggccaagccgccggttccgctgctcctcgccacaggtcgatgcagcggcggtgccgccggggaagggcggggagtaccggccctctttcgcggacgacctcctcctcgccttcttccggagcaagatggtgaaggaggttggatgggattctgaaaagcctgggtatgctggactaatggaggtagcaaaccgtctcatggtcaagggaaagagtgctttggagactgagcaggctgctgtccgagtactacagtcactgtttccacctctcttgcttgttctttacaaagctcttttagcgccaattgctaatggccaactagccgctatgatgcttgctagggcgacagcaatttcatgtcaatggttgatgggctcatgctcagttaattcagtcactctgcctgatggaaaatcatggtcaagtggggtgttcgttgagaaatgcaagtacctggaagagagcaagtgccttggcatttgcatcaacacatgcaaactgccaactcagactttcttcaaagatcacatgggtgttgatttgtacatggagccaaattttgaagactatagctgccagtatacggccaaaattcaaaaataaacgca

SEQ ID NO: 41549 - DNA, 505 bp, Zea Mays
gagatgtgttgctgatgaaaagcaagcatattcttgcatgcagtctagtttctagagcacccttggcacgcagtataatttctggagcacccttgattcatttcgattggttgaacctacgatctcccttgacccttggtgtccacacgggcctaccccgtgtctgtccgaccaatggccatgcagatccactctaaccatgcagcgataagcccgatcatcggttctagaaagacagagacagaggaggaggagctagcttgccggccaccgccagcgccgtggctccatcgcttgtcgcgttcgttcatctcctcgatggagaaggtgggagtccctcggcgccagcattttcgtcggcttcatcggcgacccgtcccccacggaccaagcgaccagctcgtggtggccctgccttcatagagaggcaaagtctggcttgcccgctggaaagcgtgaggacgcaggataggtcaggtggagccctcccccccgcgccgcacgc

SEQ ID NO: 41550 - DNA, 1359 bp, Zea Mays
atcaatgaattatattgggatcacagaacttcagagaggaaactaggttgattgttcaatattttttaagaacacttagtatcatggataatatgtgaaacaaataagtatttaaccagccacatagaagcatgtttgctttgtgaccctagaaaccagccaggcacaagcagcaccttgaccccatcctcggccagatgactattgtctcgaggcgtacaatggccactcacctggcgggtgtgtctagctcgtcatcggtctccaatgccatgttcgcgctactactccaatcgttgctgacccatatgatctccactgacttccgcaaggagtgcggccaccttcggtcccatccgctgttaagatgacgattatcttgttgctagcaccgatggggtggggacaaagctgaagcttgctttcgaaactggtattcaagatacaatcggcattgacctggtggcaatgagcgtcaatgacattgtaactctaggtgcaaaaccattgttcttcctagattactatgcaacgagcaagcttgatgttgatcttgcagagaaggttatcaaggtgattagggatggctgcgaacaatcagattgtgctctcctaggaggggagacagcagaaatgcctggtttctatgtagagggtgaatatgatctaagtggttttgctgtgggtgttgtgaagaaggataaaatcattgatggaaaaaacattgttaagggagatgtgcttataggtcttccttccagtggtgttcattctaacgggttctctcttgttagaagagtactggagaaaagtggactttctttggatgatcagctcccaagaaatgatggcataacaactacggttggtgaagctctaatggcaccaaccttcatctatgttaagcaggttaggtttgtttatgtgtttctatgcctcatatttccttcataattttacagaaattttaatttattgttttgtgaaataaaaacaggtgcttgagattattagcaaaggtggtgtgaaaggactagcccacactttaaaagctgtgaaggacggtgtctgaggtcatttcatgcaactaacaattctggtgaagactatccaatcttaggacacaacatgcagcaattagacgtaactatcacgatccttctatagtttaacgagtattatgtttttctgtaaagcatagaaatacttattttgttaacgcatagaaaatcaatgacaaaaatgtagagtttttatgaaagtcaaaatagagatcgatgatttacgctaaaatttgtactcatttacgttgttttagttctcgttttatgttgaaatccgttctgagacagaacttgt

SEQ ID NO: 41551 - DNA, 843 bp, Zea Mays
gtgcacgtacccgaaggacagtgtccgtgtccgtgtggtggcgccgtggcagcaacaacactagctggggttggagaccggccggccgataatcgaggcggggacgcggctcccacttggtaacgtgactacgtgagtgaccgatggtgcgcggcacgagtgcgcgcgcgcgtcgcgtcgagtggacgcccgggcaatcgcgcgcgggacgtggtggccgcgcgaatattgtttcttgtcagcgcggctcgatcggagccatgcatgcatgggccgcgcccccgccttgacctgatctgcagctgcaggggggggccgcccggtggtgcgtcgtcgtctgcttcctcacggcgaccgccgcacagctagcgcgccgtgctggctcgggccccacggcggttcgccattcgggcgcgcgccggcgtcgcgtccagggggattccctgctgcggagcaggatctcatgatctcgcctccctccgcgacgcgctggctaggcatctctaatacgccaaatacgcgtcgcatgtttcaaagggcgattggttgaactctggttgcgtgtccatgtcgtggcctcgtgggcgttcaccgagtgtgttgagaaggctgtgctgtgaaatgtgagccagggtttttagttatacttctttaatgaaggtaagatgggaggtttgatttaagtttgatgaatccaccattagcctaaaacgaattgtatttactggttacaaccttgaacttctcatatatccgacgggcgcttttttgatacgaaaaaggatacccttacaataaggaaaaggacgaaactgtaattattctggataccactcggcccac

SEQ ID NO: 41552 - DNA, 1998 bp, Zea Mays
cacgggtctctaagtctagatacggttatactcatacaagccacataaataaatcgtatattgaggggttatagtgaataagatgcaagacttggacaaattagatcgtatgaatggtctttttatatatctagtgcctggagagcaacaacgaaatatctaggttgtacatactcttactacctatcttttccactattcaaaaattcactccataaaagtgcaatctataatataaaacagagttttactttatgggtgtttgatttctagggactaattttagccccttcattttattctattttactccctaaattaccaaatatagatagtaaaactatattttaatttccgttttagcgatttagaaactaaaatagaataaaatagaagggattagaaattagtccctagaaaccaaacaccccttaagatgtgtttaggagggctcctcccaaagggctccttctgtggctcctataaaacagctccacttcatcgttttttcacaaaaaaaaatggctcctccaactaaactttttggtagagctccttccatgaagctggagccggagaggagcactaccatatagggcctgatagacaattctcctaggtacaaatatactgaaacaataactgatgattcaagcaaacaactaggatatgcatgtttcatcacacaaaagaaaaagataccttgtcagaaacagatcacagacatatcagagaaggagaaaagtggtatgcgtggtcatgaactagaattgtactatacttgcattgcatagacagcctgaatatctacacactgcaataacaaataaggcactcactcaagggtgatcgatccaatccatcattttctcagctagtatacacctgcaggtcggagagaaggctgtggcgatcatccactccatgagattgtaggaagaactgaggatgatctcgaatccgcaagtcctcacagcaagagaggcctccgttgagtttggataccacacgagaaaaaaatgaacacaaaaatccatcagaactcgaccaacaacagtccaagagtagcagaagcatcccgtggctgcacgcatacacttttctctccttccaacttgagggaagattcagcaacgcaaaaggttgaacggttacactactactgcccagactcgtcatcggactcgccgtcctcgcggtcgtcctccccgtcctcctgctgctggtgatggtgatgatggtgcccgtgcgcgtgatgcatctggccgccgccgccggcggcagcacccacctggtggtagaactggctgatcgactgcgcggcgagcacgccgatgtggccgtcctgcgatagcccgagctcgagccccggcatggcggcggcgtgtccagcgaacatgggcgcaaagccgatgtggccgccggcgccgagggtggctccggcggcggaggctcccggcagctcgaagcccgcggggatccccatccgctgcatgataccggcggcatcgcccgtgcccgcggcggcagagttcaggaaggagggcgaggagaagccggcggacggcgcccacatgtggtggtgcggcctggcgagcccggaggtgggcgacgggagcgagggcgcgacggaggcgagcgcggacgccggtatggtgcccgtgccggtggcggcgacgatggccggctcggcctgctgcagcagccactggacggtctcgccgtcggacttgtggccgagttcccgcgtgagctggaagatccgcgcggcgcagagcgcgggcatccggatccgccggcccctgccgtcgaccttggtgtgtcggtccttgttggagctccgcttgggcgcgagcgcctgctgcctcctctccccgggctgcgccaccacctgcagctgctgctgctccttccctccgccgcctccgtcctgctgcgactggtggatttggatttgcaggtgctgcgccggctgctgctgctgctgctgaagaaaac

SEQ ID NO: 41553 - DNA, 4328 bp, Zea Mays
ggcctctcctactgttgtgactggtgccacctctcctttcccttcttcctccgtgccccaatccctcttctcccctcgaccagccgagagagcgcccctaccgcagcagctgcagtgctgctctgctctgctctgttctgcccccacttcaccctctcgtctcaccccgcctgcagcttggtcgcttttctccccagtctcctcccctccaccctctcgtctcgtcgcacctcacctgcttggtcgcttttctcccccaatctcctcgtctcccgccggcaccaataccatcctctgtccgctcgctgttgctgttgctattcccgtccgtcccgtgcttctactcgctagtcgtttcgtattcgtatcctctctcctcagccgccctgctcccctcccgtcctctggtgtctggtcaaaccagcggctcccaagatttgccgctgcttccttcctggagaaatcaagcctgtgcggcgagaaatcaagaggaagggggaagagagggagaaagagagaggggcgggggtggaggaaagaaagcctgccccttgcggacgtgcctgctccctcgggggcattcaattggagccaacagtgggcgggtgggcggctgctacagcacggcggcctccataaattagctccccgcgttccggccccttccgccccctgtcgtcgcacccgccccgtgtctcccccgatcggtccgtcgatcacgcggacgcccgccggagcatgcgcgccgcgggcctcggccgccggagaagcagcatcagccgccgcgccgccgccggcgtccggaaggagatgtagcgctagctccccgacccgcgaggaaagggaaaggggaatgaccgttacggcgcgcgggaggagcggtggagccgggatgggggagaagggcggcgctcccgggctcggcttcctgagcctcgatcggatgcgcgtcctcctgccgccgctccgcctgccggagaagctgtcggccaggacgctgcggacgcacctcttcactaactaccggatgcgcaaggtgcgggacagctccagctggctcatcccgctctgggtcagctcttgggtcctcgtcgcctccctcatctacctttgcatgagctaccaggccgtcggcaagcgccgggagtctctcgccagcatgtgcgacgagcgcgcgcgcatgctccaggaccaatttaacgtcagcatgaaccacctccaggcgctcgccatcctcgtctccaccttccaccactccaagacaccctccgccatcgaccagaaaacgttcgcgaggtatgcggagaggacggcgttcgagcggccgctgacgagcggggtcgcgtacggggtgcgggtcacgcacgccgagcgggagcagtttgagcgccagcagggatggagcatcaagaagatgtactcctccaagaccaagaatcagtcgcagggacccgggaacgccgaggacgccgaggtgcgggagccggcggaggagtatgctcccgtaatcttcgcgcaggacgcctacaagcacgtcatctccttcgacttgctatccggcgccgatgaccgggacaacgtactccgagctagagaatctgggaagggtgttcttactgctcctttcaagctgctcaataatcgccttggagtgatcttcacctatgctgtgtacaagtatgagcttcctgcaaatgccaggccacaggagcgcattcaggctgctataggctatttaggtggcatatttgatattgaagctcttgttgataagttgcttcaccagctcgcgggcaagcaatccatcatggtgaacgtttacgatactactaatgagagaccaatcagtatgtatggttcgaatgatacaggcagtggcatgtgccaggtcagcacactgaacttcggtgacccttcaaggaagcatgtgatgcactgcaggttcattcagagcccaccttggccttggatggcaataacgacatcaattggaactctagtgattgctttactgattggatacatagttcatgctaccgcaaaacggattgccagagttgaagatgactttcaggagatgagtttgctcaagaagcgcgcagaggatgcagatattgccaagtcacagttcttggctactgtttctcatgagatcagaactccaatgaatggtgtcctagggatgctccaaatgctcatggatactgatttggacacaacacaacaagactatgttagaaccgcacaagccagtggcaaaactctggtatccctcatcaatgaggttcttgatcaggcaaagatcgagtctggtaaacttgagcttgaggtggtaccctttgatcttagaacagtttgtgatgacattttgtctctcttctgtgggaaagcacaggagaaaggactggagttggcagtgtttgtttctgatcaagttccacaaacactaattggcgatcctggaagaataaggcaaatcattacaaatcttgttggaaactctataaaattcacagagaagggtcatatctacttgacggttcatgtcgttgaagagattatgcattgtctggaggttgagacgggaactcagtatacaaataccttaagtggctacccagtggcgaacaggaagcgcagttgggaaaactttcgactttttagtagggaactgaactcatccgagatgccttttgcacccattgcatcagactcaataagcttgatgatatcagttgaagatacgggtgctggaatcccgttcgatgctcaatcccgtgtcttcacccctttcatgcaagtaggtccatccatcgctcgcatacacgggggcactggcattggattaagcatcagcaaatgcttggttggcctcatgaagggagagatcggattttcaagtaaaccccaagttggttctactttcaccttcactgcagtgcttacgagggtccattccagcagaaatgagaataaatcatcagaatttaaagagatcaatgcattggtggtagatcatagaccggtccgtgccaaggttactaagtatcatttgcaaagactgggagttcagactgaattgacaactgacctagatcagtatatttctaaaaataattgtggatcacagattgcaaagcttgtgctcattgacaaagaaacctggctgaaagaatcccactccatgcctcttttggttactaaattgaggaacaaagatcagccagactctacaaagttatttcttttggagaaccctaaaagttctgtcaagagcaattcacatatattcagggaatataacttgaatgtaattatgaagccacttcgtgcaagcatgcttcaggtttcgctacaaagagcattgggtgggatagataaactgcattgcaggaatggagtagtcggcaattcaacactgggcagccttcttcacaagaagcgaatcatagtggttgatgataatattgtaaatctcaaggttgctgcaggcgctctaaagaaatatggcgcggaagtaacttgtgctgacagtgggaaggaagcaatcacactgctgaaacctcctcacaattttgatgcttgtttcatggacatacagatgcctgaaatggatggatttgaagccacaaaaaggattagagtgatggaaagagatctaaatgagcaaatagaacgtggagaagccccaccagaatgcgtaggggttcggcagtggcgaactccaatattagccatgacagcagatgttatccaggcgacacatgaacaatgcttgaaatctgaaatggacggttatgtttccaagccattcgagggcgagcaattgtacagagaagtagctcgctttttcctaaatcaagaccaagttcagtaggtaggcttatatggagtgtaaaatagtggaggatatcagggttcacccatcgaggctgaaagaattttgtcagagatcccatgttcttgagagtgggcatcaatccccagagttaggggccctattaaaacgctagcaacgctgggatgtggcctccagttaggtggaaaacactttaggctggagatggaaccacctatgttcggttccttggtacatctgaccaagctgcaaaactaaatgtgcaatgtcttgaaatcaaggtgcatgtggagctatttactcgacaatctgaggtcaaggcgtgtgaaaaaaaagcccagctgcattcactaaccgcagatgtcctctgccactacaatatagagtagggagagaaattttccttccccagaaggggttcgtgtttccatcaatcatgcatttggtaggcttttcaaggaattcaaat

SEQ ID NO: 41554 - DNA, 446 bp, Zea Mays
caagatcgttgggcattagctcaagtgatggaggtgggcgcagtgctgtcctccaccggcctctactcggtgacatagacctggtgttccagctgctgtgcatggcagatctatgtttgctctcatgctcttcgtggcgtgtgccccatcttccgcatgcactgcttcaaatgccaaagggcagctcaggatcatgccacaattatcttctgagctactgcacagatagactagatgtcatcttcaaagattgctttctttttgagattgtacctgcatttgattctcttttgtagctttgtaccatcagccaccataagaattggactttaggtcatgttattctgattgtgcaacagactttagagttccaacaaagcatttgcaaaccgatgctttatagtagagattggttttgacataatttgtgagatatcgaattcgat

SEQ ID NO: 41555 - DNA, 1808 bp, Zea Mays
tttttcttccagccatccgtccgtccgccgacaacacgagacgtcgcgacactcacccgtccggccgtccgccgaccgccgtccaggccatcctgctgttcgccgaccgccgtccaggttgtcctgctgttcgccgaccgccgtcgaggccgtcctgctatcgccaacactgctgtccaggcgtccaggcgtcgttctccagccgtcgaagccgtcccgtcggtccagccgtccaggcgtcgaagacacggccgtcgaagtcgtcggtccagccgtccaggcgtcgttctccagcctccaggctccatctgccgtctgccgagccgagtgccgaagacacggccagtaccgcagccgcagtacgtacgttagttgagactcgatatgtctcactctggaacaggacccggaggaggaggagcacgccattcagactcaatgcctgcggagtcagagactgggaacaacaacctaggtttggaaagcatattgccactgcctccacagccgcagcgaccaccactacctccttctgtgagaggcagcagcagcagctctgtttcagcaggaaacaagagaaaaacaagtggaagctctatgggtgcaccaattgttcagtcgtcatcttcagcacaagcagctgaaaataaagatgcaaataaattggttgtcgcagacacaagtaatactggtactagagctgtagcttctgttgatatagcgggccttgatgatgatgaggaggacataccagaggatatgactggaacaggaaagagacaaaagaggcgcacatctattgtatggaagtattttaccaaagaaactgtggaagtggaggtgaatggcaagaagtttgagcagctttgggcctactgtaactttccaaaatgtaagcagagatatagagctgagtctaatcatggaacaaatgcattccgcaaccatctgaggtcacatcatagtattgtcaaaggacagctagaactaaaggcagaaaaggataatggaaaagatgtcaccactattcagccttttagaaggaaggcatactggtattaagttggcacagtgctttactgaagtgatggtaaaatggtttgctgagaagaaattgttttcattgaccttggataatgcatcaaataatttagtggcagtcaaagacattattcaagatcttagagtgaatgcttcttcttgtttgatttgtgatggaatattctttcatattagatgtgcatgccacatactcaacttggttgctagagatgggcttgctgttatttcaaaagcactggaaaagataaaagatttggtactaactgtgaagggctctcccttgcaatgggaggaacttatgaagcgtgctactgagtgtggattggatacatcaaagggaattcaactagatgtttccacaaggtggaattcaacttacatgatgctaagggatgcattgcactatgtgtgtttgatgtccgagatagtgattcccaattcatgaatgaagatggcgagctgtgaagaaatcttgcaaatgtgtgtttgatgtcatggactcatgaagacattgaagaacttatattgtgtccatatgtgtgtgtccgtgtgtgactgagactattattttgttaactattattgtgtctggactgaatttatgtaagtttacttgttggatttggatttgtgctatgtgctcatgtactattgtggacttattttcttgttgttcaatggctatgtcggtggacttattttcctgttgttcaattgctatgtggttaacttgtcatgtaatcatg

SEQ ID NO: 41556 - DNA, 687 bp, Zea Mays
taccatgactaaactcgaagcgacgtccgcgaacacaacgaaggttttgggttcggtccttctaccgaacacttactaatcgtcacacgggcttcggttcttcaccgtcggaacctaggggtttctctcctcacaagcatacacaaacatacacatggttagcctctacttaatctacgccgagaaacaaaacacccaagtaagaacataacctcatggtcgtgcaaaaacttgcggtgtcacggatgaagaacgaggatgaactctggtcaatcctcccgtcgaacacatggcgtgcgtcgtggacattggactgctccggcgtgctgctgctcgcatagagacaagaaggggtgctgctggggaagaaatagaagcagtgaaggcgaagtcgccatggggagaggagtagagacgactgccttcaaagttcggacatggggcgagctttgcatggggtctgccaccacggggaagagacctgggcgcccatggagaggagcgtgaccagcagagaaccaagagggagagggctagggcaaactcgactgggacaccatgggaggaacaggagcagggagtaggggcgactggtgcctagaggttgaggaccgacgccatgggaaactggagcacgccacaaacagagaggggctgggcgagctggagttgaggataagtgttggc

SEQ ID NO: 41557 - DNA, 1500 bp, Zea Mays
gttcgatttgttattcatcacagccttagcaagtctatggagacatactaccaggagagtggtcgggccggacgggatggattaccttcagaatgtattttgtattatcggcctggtgatgttccacggcaggcaagtctatatttattgcttctcttttaatgtaattttttttctgtttttttaccactatatatgtcatatatatttttggaacagagttcaatggtgttctatgaaaactgtggcctgcaaaatctttatgacatcgtgcggtattgtcagtctaagaggagttgtcgtcatggtgcattctttcgccattttggagaggtccctcaggactgcaacggaatgtgcgacaattgtgcttccactattgagcagaaggatattgatgtcacctgtatgatttattttgcgtcagtttaaaaattacaacaaatgaccaacatttattcactttatttcagggggaaaatgttttttatttcatgatattctcacagtaattttttctacttcctgtttagaccatacaaaaattatagtttcacttcttcacgatatgcaactttaatgatcaaagagctacactactacagctggtggataagttcaagtcaaagtggaaaggtttaggtagtttcaatgaagctgttgatcttagaaaagaagaagttgagcagttgatagttaaccttatactcgacaatgttttgaagaatttcagcacacagcatattcaaccaacgcttatgttaccttaggagcattgtggaagccagcactacaaggaaacagagtagtcaagcttgagattgctattgcttctaaagatagagatgttagatccaagggcgcaaaacgaggtcgcatgagtgatttggaagccaaactagatgaactgcgtagggatctgtcatccacgggtagcgatgccatatttccccatgcagttcttactgcgcaacaaatttcactactgagcagccagaagccaaccactccagctgagctagaaaaggttatagggaaggtgaagacaaggaagtacggcagcaagatcattgagctgatgaggtcacatgacaattcaggaagtggccgaggcaaggaggctggcgatgaacacagagctaagaagatcaaaacgaaggatgaggatgttgtttgtgttgagagtagcgaggaagaatagaatatgcccttcacatacttggctttttagtctatcatctcatggttaattattttgccaatcatttcctccgacgtcatctttctgtaatttagactttcacggattaatgcacagtcatatttcttacagagaaagcctcgagcatccttttgaccggttcatagtcttttgcttcggtagctttgtatcttgttgatgatcggattaatgtgcgaatacttgggattaatgtgcgaaaactttgtgccaagtgtttgaatgtactatacacatgctgaggaatatggtaatcggta

SEQ ID NO: 41558 - DNA, 1363 bp, Zea Mays
gaccttatccaccaacctccggtccacggtgactggccgcaagctcctcctctcccgcaaacacccacgcccactccattgctcctctcctccaacatcgctcacgcggtctcctctccccgctcagctccgctccgctcccggagacacgcaagcttcccgttcccgggaacgcgcactaaagatgcctccagccttcgccgccgcaccttcctcctcgatatgtggcgttcgcatcccaactgtgcgccgtttcgaagcgcaaagcacggtttccacgcccagatttatgcgtaatcgggtggcagcaaaaacacggtctacatcagcttggtccttgaaggctggcttgtgggattctctcagatctggccttttgaagaataatagcagtacagagacagtagagccaccaccagcaccacttgaagtggaagagcctttgcctgtggaaatagtactcctagaaagaacactacctgatggaagcacagaacaaattttattttcttcagccggagatgttgatgtatatgatctccaagccttatgcaataaggtaggatggccacgcaggcctctttcaaagatagcagcctcattaagaaatagctacttggttgctacactatattcaataattagatcttcagaaacagagggagaagagaagaaacagctcattgggatggcacgagcaacctcagaccatgccttcaatgcaacgatttgggatgtccttgttgatccttcataccagggtcttggtaaagcactcatggagaaagtaattcgtactttgctccagcgagacatcaacaacattacactgtttgcggataacaaagttatagatttctacaagaacctggggttcgaagttgatcctcaaggcatcaagggcatgttctggtaccccagattttagcaccagcagccagatatatcgttcgaggggttgttgtacttgaagcatctccccgttctgaaagggtaattgacaggtcagggctccacgccctgatggatctcgcacttaatatttcatccttggtgagaagctgtaattttcttcaatgctaaaacgaccatgtgatcggctcaactctccgcacccctgttgtaaccataaccccaacaaaacacgctatttgtaatacccgtgtttcatacatgcgctctagactcttgccatctgtatgtaacgtacgctttcaaatttctacattcgaaatggaaaaaaaaactgtatccatcagttatccatatgcgcacaccatcagtttttactgtctcttggaaagaatttgctttccatcaacatccacttgctgttgctggaactgtaacttaagttgagtcg

SEQ ID NO: 41559 - DNA, 510 bp, Zea Mays
gacgacaacggagatggatccatggtgagcaattggttgtgttccggttgatgccttagcccgcgaaggccacggataggtgcggtgtgtatcggcgatggaccctcatccccccacgaaccccgaacagcggcataggcgatttccccagcggcggcggtcttcttcaacttcacggcaacggcgcccaaagcattgctggagtatggcccaagggggcacaattatatagctgcggggaaacgcaattggccgagaatcccgatgatttggttagggagccccggattccgcgtggcatggaccggtagtagcatcgctccaaacatgacgtgagatggaaggagctcctgacatggggacaccacaagccaacgtcgggatcatgagaatgacgcgatgggcccacatgtcggcatcaaggcaggcttggtcatgctggcaggctgagcaagggagagtgggccgaggacacaggagattcagcccaggtaagggcttcactttttc

SEQ ID NO: 41560 - DNA, 1742 bp, Zea Mays
acttctttctcgtcttcctctcctgtctcctcgcagttgcgcagcagggtgctggaagaagtttctggttggaagaatccggttgaggttgccatttcccaacttcttccagcggttcggctcggaggcaaactgagatgtcctgttcgtgatcggtttattcttgcagctgtagacagcttgtcgattcgttgcttgaggagcagccatggacagaagaaaccgaccagctccgttgagaaaaggtattgacggttgctaatgcccttcacggtgaaacttgcatgggatgccatcaaatttggtcccccacaaggttgacagctctgcatgcttttgccgagtggacagatcatccgccgcggcggcggcgaggcgaatcccagtgtcgaaggcgtgcgtgcaaccgagcctcagggcgtccatccacccgctgaagccacggccgggcgcagagcggagccgcggaggggcgtgcccgctgctcccaggccttccggacgacctcgccattgcctgtctcatccgggtgcccagagccgaccactggaagctgaggctggtgtgccggaagtggtgccgcctgctcgccggcaactacttctacggcctacgccggcggctcgggctcgcggagcagtggctgtacgccgtgaagcgcgacggcagggacgggcgcgtgtcgtgggacgtgctcgacccgtcgcgcggcgagtggcgcgcgctgccgcccgtgccgggcgagtacgcggaggccgacgggttcggctgcgccgtgctcggcggctgccacctgtacctgctcggcggcagggacccgcgcaggggcagcgccatgcggcgggtggtgttctacagcgcccggagcaaccggtggcaccgcgcgccggacatgctgcgccgccggcagttcttcgacgtgtgcgtcatgggcaaccgcctgtacgtcgcgggcggtgagggtggcggcggcgggctcaggtccgctgaggtgttcgacccggccaagaaccgctggtccttcgtggccgagatggccgcgccgatggcgccgttcgtcagcgcggtgcatggcgggcggtggttcgtgaagggtattggcgcgcagcagcaggtgctaagccaggcatactccccggagtctgactcgtggtccatcgtcctcgacggcatggtcaccggctggcggagcgccagcgcgtgcctcaacggccggctctatgctgcagagtgcatggacggatgccggttgagggcctacgacgaggccgtggacgcgtggagcacctgcgccgacagcaagcagcaccgagggagctcccaggcggctgccattgtcgccctccacggaaggctcttcgtcgtccgcaacgacatgagcgtctcggccgtccaggtggcggccgaggcgggaaagcagaggtggcagaccctcgccggcaaagcgcataccaagagctttgtcacgggcctgttgtccaacctcgctggtcgcagccgcgccaagaacaacatcctccattgccaagttcttgaggtctagctgtcttgctccctgatgagttatgcttataagttactagaatcacgcaatgaaaaagtacgtgagaaatctccatgtctgctcaagagtgctaattaaataagcgagaattacaggcatctgaagaacgcgcgtgatcgttgtataaaactacaaatacagtttatatggtatacagtatacagatttattatgatca

SEQ ID NO: 41561 - DNA, 502 bp, Zea Mays
cgcgggcgcatccactgccgagatagagagcgcgggcgcatccacaatccactgccgagatagagatcaccttccatccatccatgaacgccagcgggatttgcgggagcggcggatgcacgatttggggagaggaggaggaggtggtggaccttccatccgcgcgatttggtggcgcaaccttccatccgcgggcgttgctggcgcggggtccgggggcgatgcggccgcgaggacggcggctgggaatgcgggtcgagctggacctgcacggcggatttgcgggagcggcgcggcagatttgcggagctggcacggcgaatttgcgcgcggcagcagccgatcgcggggaggcagaacaaagtcctgtgcacgcctacactgataacatatagagtagtagagatatatatatagggtgaggatattaggagccctgagcttccaatagagtacaggaagccccagccactccccacatcccgcatgtgtcccattcttt

SEQ ID NO: 41562 - DNA, 1782 bp, Zea Mays
agaaattagaatgtcaattgtgcaaagccagttatttagggtgtcaaaaatacaaatttctcctcccgaacaccctactcgttctcccccatcggcgccgctacgaccagcgtttgagccactcgccgccgcgcacgatcctccacgccttgctccagtcctcgtcggcacgcctccttcccaaccctaaccctagcactagcagtcagtcgagcggcggcaagtcaagggtctgtcgagcgggccggcggcgaagaagtgtctagcgaggcgagtcaggtgcagggggacccacccgcagcggtggcgtgaagcgcgtttgactggatcgaccaggttggcggctaaacagaggaggttgcttgtttgttttctccgtccggctgcggttttcctttgactggatcgatcagatttgccggcggcggcagcggtcccccggcaaaggcgtggggatccctgccgggatggaggtgccgtggctgctgctggtgcacgggtcagtgacggcgctggtggtggtgtcgttcctctgcgggcaatggcccatcttcgagggcaccttcatccagagcatcaaccacttcctcacctttggggcctaccactacctcctgcggtttgtgcagtctgtgtgcggcactggggctagggatctcgtcctcggtgtcgagggatactgctgcgaccgacccaacccgatattgcaggtattttatgttgccataattggagtgacatattttataatagtgcagacatctttccagtatattcctgggtattatgtgagtggattgcacagatatctgagtgttgtggctgtttctgttggtgctatactcttcgtgcttactagcttttctgatcctgggactgttactgctgaaaatgtttctcaatacgtatcttcctacccatatgacaacattatttttgtggagaaagaatgttcaacttgcaagattactaggcatttccttatatgtctgtacggggctttaatccttggcttcattcttgctggtgaaataaaagagcggaaaattatatacattctgacagtttattatggcatcgataattcattctcgggcttgtttccacatgttgcacagtggttgcttgctgtgcataacactcagatactcttgagtgtatttttggctatattagcactgctccttggtggcttttgtgcttaccatgcacatctttgtttgacaaatacaacaaccaacgagacattcaaatggcaagactacatcatgtggatgaaaaaggaaaatgaagcaaaggcggacgctgccacgctcagatccagcataggctcggccaatagtgatgcacagaaagctcctccaagcaaatggaggacgttcttcatgagatcccgcacaccaagcatggaaccagttgtgagaaacaacatatatgacagaggcatgattacaaacctgtgcgaggtggtcgtccctttatcagaacggaaggcattttcccgcatgaaatcagattgatgtcttttgttgcagttgctttgtcaccaaactgttgttgtatatcagtgtagaatttgcgacacattttttttggtcataccatagaggcataggggaaaatattcaggataatcgtgttcagtacctacgacctatttattataggtgaaaggttttgaagttgcatttgcctttgcaatacgccgatgtcactattctgtttttagaacatgattctgaaatggcactaaatatgaaactcatactatatgtcttcgag

SEQ ID NO: 41563 - DNA, 1490 bp, Zea Mays
tggtatattgttggaaagaaatgtgaagaagactatattgttgctagaaccgaagaggaggcgattgcagaagctcatgaaaaatatggaaaatcagttgaaatatatcaagaccctgatgttcttgatacttggttctcaagtgctctgtggcctttcagcacgcttggttggcctgatctttccaaggaggattataagcatttttatccttcaactgttctggagacaggccacgatattttgttcttctgggttgcacgaatggtcatgatgggaattgagttcacaggatcagtaccattttcttatgtctatctacatggtcttatccgggatgctgagggtcgaaaaatgtcgaagacattagggaatgtcattgatcccctagataccatcaaagagtacgggacagatgctttgagatttacactatctttgggcactgcaggccagaaaggttgacgtcaaataaggctttcacaaacaagctgtggaacgcagggaaatttttgttacagaacttgcctgataaaaatgatgtctctgcatgggatgtcttgttgtctaataagttcgactcagaagcatcactccagaaactgccattgccagaatgctgggtggttacaggactacatgaactcatcgataaggtcagcagaagctatgataagtttttcttcggagatgctgctagagaaatatatgattacttctggggggattttgctgattggtatattgaagctagcaaaacacggctttaccactcgagtgacaagatcgctgctgctacagcccagagtgttctggtgtatgtgtttgaaaacatactgaagttattgcatcccttcatgccattcgtcactgaagaattatggcagaaaacaagcacttatggttactccctggcctaccactgaccttcctaaagatttgaggtccatcaaacggttccagaatttgcaatcattgataagaggaatcagaaatgttcgagcagaatattctgttgagccagctaaacggatatcagcttctgttgttgctactgcggatgtcctggaatacgtatcagtaagtgtgcagatccattttgttagtgacactttttttctcgaatgcgcaggagaactgcgcatcttatataaaagagaggaagaaaagccatacaaaagatggcatcttgctgagcaagttccccaaggatcctacacacaaccgtaggacattacaaaccggaaccaagacttgaccctacctcgctaagagctgcaactaagcctaggtgctttagctcttcagctcctgccatagcccagctagtacattcatccaggaaccttcgaagaattctagataatgagggggactccccttcaaacactgttctgtttctctggatccatagacaccaagctcccaggaggccaggatgatcaaggagttaagcccctttttcatgttcttggaaaccctgaggctca

SEQ ID NO: 41564 - DNA, 822 bp, Zea Mays
cgcctaaccctagcgcgcgccactctccctggcagccgccgccaggaagcctccactccttctccccttctctcctccccttgctcttctctggccgacgccacttgcgtgtgcaggcaggcaggccctggcgtccgcgcatcctcttctggccaggagctcccccacgcagccgctgctctctccacgtcctctattccttcccatccccgatctcccccaatccgagcagaccggcagagccggggggcggcgatggcgctgcgacgggcgctcctcagatcagcagagacctctttcgaacgcaagggcggaggcggcgagtgctgcgacgacggcagcgacacccggtggtggccgccgtggctgaggccgctgctgtccgtgtgcttcttcgtccaatgcagggtccacaccgacgcgcacaagagcgagtgcaacatgtactgcctcgactgcatgggcgacgctctctgcgcgctctgcctcgccgcgcgccaccgcgaccaccactccatccaggtcagtggagagcctagcgctgtgcgcagactagtgcagttcggcagttcaggcggctgcgtcctcgttccccagtgcctctgcctccagcacatttcattcccctccaatccatcgcctgttccatccgtctctttgatgggtatcagtggagaaagtacgggcagaagtggatctccaaagcaaagcattctaggctgcaattgagtacattcattctttatcaagggcacagcctgctcgttctctcaattgtgctggcctttgtcctgctagtagatcacttagcactcaggccgc

SEQ ID NO: 41565 - DNA, 2336 bp, Zea Mays
aaaaacttaaaatttcaggctcgcctaatagagaggactccatccatgagtgacctgaatgaagtgatatttgggcaggaacatctgtctcgagatgatctgtcttttatcttctccctcaaggtatcagacaatgcgccactatatggtgtttgtctgcatgttcaggaaatagttcaaaaggcacctggtatactaggtgctgtctcacccttaaaccctacttcctataagcccagtcgtttcttggtttctgcaccacgttgttactgtctacttacaaaggtacctttttttgagctacactatgagatgctaaacagcattattgcacaggagaggcttgacagaataacacagtttgctagtgaaattactctagctgagccagttcctcgtcctattaaagaacaagatggagtagacggtgattttgattcctcaaatgggattccatatattgactggacagaatatgctgtacctgtcaacagtatatcaggtctcatttcttcatccagtattccatcagaaagggacatgtcttcatatttgttcaggagctgggagcctaattcttctcaaagtatatctggtagtgagatttcagattctagttatgtaagagaagttgaggaggcaaggcatagtttccagcattatgaagattgtatagtagagaacttggaaccacgttgtgatagctttgggagagcaagttacatgtatgataatgggcatacttccccagatcttctgtccatgcattctcctgcctctagcagattagagcgtgcacaaagtgtggagtctttagaaagttcagtcaaaggtgcaacatcagatgaagaatatgaagtaaatgtgaagcatgaagtgattgttgatgatgaaaaagttgtaggatgggctaaggcacacaataacgaacctctacagattgtgtgtggttaccatgctcttcatctgccacctcgtggtggtgaacttgtattccgcccccttgaacatctccaacctgtgaaatactcccggcctggattacccttgttgggttttggagaggagattttggacaatgctttgactagggcagaaaaaaataagatcaatttacatttggtggctgcagaagaagctcttgcattgtcgatatggactatggctacagtttgtcgttctctgtctttggaaagtgtgctaggcttattcactggagttttgctggagaagcaaattgtggtaatatgcccaaatctgggtgttctgtcagcaattcttttgtctattataccgatgataaggccgttccagtggcaaagtctgttgcttccgattcttccgaggaaattgattgattttcttgatgcccctgtacctttcattgctggtgtacaacataaaccccctgatatcaagatgaaaggatctagtcttgtcagggtcaatgtccagaaagatcaggtccaaggcatgttcactgcctcgacttccacattacaaggagctcgtttctaatctcggtccacttcatgccagactatcgtgtgagaattctttggctaagagacatcccatctataaatgcaatgaagttcaggtttctttgcttctgaaagacagtttcattgattcgttcccctcaaatgatagaccatttataaagctctttgtggagacgcagatgttttctgttctatcagattctcgactgtccagtttcgaaaatgaacggacataaaggcattgttccagtggagatcaaacacagtgatactctctgctttggttttggcgtctgcttcctggtgctacctttacatgtcatttccaatgcgcaggggattgggaagataaaaacaaggcacgtcgcgtggagtgcggaggatttcgattttgccgaagccacatcactaattagaagtgttctgaaaagtatctaggctcgtctgcaatgtaagaagaatacgacggactctcaggttataggaaatagatgcaacccgatcttctaaatgggaccgagctacatgtggcgcacaaggaaaacaaatgatgatgaatatagttgggtttctgcttgcgatcttgttttgctatgtaacactagtgtgtagtgacttagctatatttcatatagggaaaagaagaaccctgtatataggtgaagttattcattggagttacgcgtccccggtttgatcatgtaaatcatgacctggtgcgcaagaaaccggcatcagttttgaatagggaacgttttgcaatttagtgcatttaaggccatggagtggaacaacttcgacgtatgttcgattggacctgctatatcatca

SEQ ID NO: 41566 - DNA, 981 bp, Zea Mays
atcgtctccccggaaaccttgtcgtcaccctctcccgcgaactccgtgtcgatagttccgctcttcggctcgggcgctcggtcgttccgttccccattcttctcgtacgcggccgattgtgaccctcgccctcgcctccccacaccacctaaaatgccctgcctccgcgcccgctcgtcatccccgcgccgcctcgtggacgccccggtcggcgatgtggcgggagcatgcggcccgctcctcaggctcctctcggcgtgcggcggggtctggcccacctcgccggtccccggcgccgcggcctcctcctccaccttctctagggacgactcagaaggcagtgacggcctcctccggggatgactcggaatcgaggccggcccgtgctcgtgaatcctccgtcgggcgcggcgccatcggcgttcctctgctgtgtgatccctaaaaccccgcggtgctctagcgaccccgcgatatgggacgacgacgacgacgggaggcgtttcggccgtgcttcgtggatttatatccttgatttttgtttttgatctcaagtgggttgctgttccagttgcagttctgtggtttgctgttctccagtgtgggttgccgttggtgtggttctgacttctgaggtctccttaaaacttgtacggtgcagggattagctgggaatacgatcgtcgcagttgctgcactcgggctcttcctcgccaagaggaacataaacacacctcaggatggccagttgagcgatggcttatgccttccttgtggttagtccacctgacatgagtcaatgctttgaggagatggctgctgctaaatctaataaaacttcatccaaacctggattgaattatcctggcctggaagaacagacccttcagtttatcttggactgctgtgaatctaatatagaaaatatacaaagtacttagagggtggcgctggctctccagaagtttcaatgaatgcaaa

SEQ ID NO: 41567 - DNA, 1699 bp, Zea Mays
aggtatgccagccgcgacgtcgtgccgggcggagggttttgccgagattttcccaaaaaagggcattgccacccgcaccgagaaaagaaaacgatacacgccgcgatagaaacactcagacacaccctctccatccgcccctcctcttcctcctcccggtcgcggcttcccccgattggcatccggggcgggcccatcccccacccggccgccgcgcgcgtccatggacggcctgcacggtacggacgcctgcttctcccccgcgagggccgtctcgccgcagtcagtacctggcggagctactgcaggagcaccagaagctgggacccttcatgcaggtgctcccaatctgcagcaggctgctgaatcaagaaataatgcgggtgttgaatatacggcgccagcatggtgctgctgtggactttgagaagtttgcagccgcaagccccaaccagatacatccgtcaccccccatgccgaacttttgtggaaacggttttagtccatggaatgggatgcattcagagagagtaggtgttccgcaaggagctatgggttggcaaggacccccacagagccctgcttcttatatcgtcaagaagattttgcggttggaagtaccgacagaaacataccctaatttcaattttatcggtcgtcttcttggaccaaggggaaattctttaaagaggattgaagcctgtacaggctgtcgtgtattcatcagagggaaaggctcaattaaagattctggcaaggaggaacaactcaagggaagacctggctatgaacacttgagtgaacccctccatatcttgattgaagctgagttacctgctaatgtgattgatgcaagacttgcaaaggcacaagagatccttgaagagttgttgaaaccagtggacgagtcacaagactactacaagagacagcaactccgagaacttgccatgttgaattcgccactccgagaggagagtccacgttcaggcggtgctcctccaagtcccttcagtaagactgtctccggtaggccgaataaaacaggggacacagaattgtagatgacactgtttaccactgtttgaagagagaagtttgaaataggatctactggagatagcctaacggcggcatgaaaagagtgaaacaatgacacccattcctccatcttgatcctccggcaaccccacttagtccatgccttcacatcctattttccatgagcaaagctttcatgatggtgttggtagtgtgtgacatcctttaatgtactagcagttcaacatatttgcactgaggacaagggttgttggcacgacgatcatcgtgggaggaagggagctttgccataggagcgactaccgtggccatgaccatgggaggaaggaccatgacgacccatgtagttggtagagacattgtattgtaaatacaatttggccacgtgttggagttggtaagcctcaagcacaactaggtttgcgaatatgtagtcgaggggagtggctcggtcttagtcgtcgtggaggtgatgaatgggtcatagtcaatcgagagccttgctaggagataggcgagaacctcgtcatcacggagagggcattggtgtcgacaagctccgtaaccttgcgaaagatgtcgatgagtcccatgaccttgcgaaatatgacagacatatcatgtttctttgatgcag

SEQ ID NO: 41568 - DNA, 1450 bp, Zea Mays
cgtcgtatgaagcttagtattaagatttaagttttacaaggagtattttgataggtgaatatgtcatgtgttactaggacaagtaaattagtaacacaaagaataaatttagcatttaaatcgttctgtcatttagtgttgtcagtagtgatttttgataaatcttgtttgcatagtgaagtcgatgaattgctctggtaatcattatattcaatatttagaaatcgattatgtgtcagatgaatgttgtttgccactccaagtagtggggagcaaatagcatcatctggtaaccgtcaatttcttgttctgaatgttttggtggtagtcattttcagaatttcttgtgtcaaatgatagttgtttaaagaagtcgatactttgctctagtagtcgtattctatattgggtgctcggttaaatcccataaatgaatatcgatcgtttagattaataatcttgaatagctatttatcgtggtccaaatcagttgaaggtaagcagcatcggttggtctgctttagttaaaatccaaaagctacttagtggtcatcatccattagtgttttaggcctttagatttaaaaattgtggacttgtcaaaactctatgttgtttgataaggttgtacttgttagatgaagtggtgtggtgcttgggttagttgatgtgctatgcctgataatctagactagtagttctaaaatctagttaaagtatttctattcgtcaccttaagttataggtacccgtggttgttgcgtctaagtatttttagccttcggtgttatgttttagctaagtaaagcatagatcttgtgataaattattgtttcgtgttgttgagttagatccggatgagctagaaaagtgagattatggtgtttagtcatttatcgatgtctagcgtttacttatgggtgttgttttgcacctcgccattaagtgtttagttttctactatgtagcattatttatcttgtgctattcctgctcatattcaatcatgtgcatcatgcatttcaattaggtgtgctagttgatcacgtgatgtagaagacgagctgagtcaaccacaagatgttgttaagcgtgggcttcttcgcaaggcgatgctgatggacgaacttaaggatggatgacccggacaagtgttagaccaaaagctgatcgccaagtggacgtcatctaacaaacactaacctagtgttattctaggcaagccccggtgcatgcaaccccttccttgtgtttttaaatgatttttacacacattaagtctagtgaaaggtgcattaggtttataggagttacttggaaacccattgatgcattggctaccttgaaatccgttccttttatagatacttctggtgaagtatcaaatatgatttacaaaatgcttagatcttgcggatagaggttgtcctttgcaataatgcttagctca

SEQ ID NO: 41569 - DNA, 448 bp, Zea Mays
tctgggtgaaggggacactgcaaagcttgagattcaggtagatttcaatgttgagagctgttttttttctgttgggcaacgctttagaatcagacctcaaggcatctggtctatgcttatgcagattaagttggacaaagagaagaaaatcctctccattcgggataggggtattggtatgacaaaggaagatcttattaagaaccttggaacgattgctaaatctggcacttcaggaacaggagctgctcgagtctcttgtcgaagctgatacggaactgccaggccaatgctcgttgtggtttgaaacctttgttcgatatatagtctgaactctgaattgatgcagagaaggcaggaaagagctaagaagatggaagaaaagaaagtgtatctgcaactatacgaagcaatggaggcgttggtcaagatcaatctggagaccaac

SEQ ID NO: 41570 - DNA, 2391 bp, Zea Mays
cccgtctcacgaacccgtcccctcacatccctcgcgttgccattgcttggtcctctccgcgcccgccgcccctgctcggctgctccccatgtcccgcgccgcggtgacaaggatccgagaacacccctgcggacgcatccgggattcaaggcctcccctcccttcccctgcccccaccccctcggtgatgcccggatccacgactgctaccgtccagcctcgttctccgtccgcgaccgcttcacggtggcgcagacgctggaggtgtccacagggggcgacaccgtgaccctgcctccgttcgacatcagcgcccctccccccaccaccgtcgatttgtagaagctcctcgcccgttcttgcttcaccagcgattcggggaggccatgcccccctcggccgcaccccttctcctcctcgccgcatcccgcctctgggcagccgcgccacccctccctccacctcgccgtctcctacctcctccccctcgaccgcatctgcctccctctgtggcctcgctaccaaggaggcctcgagctcccagtgctcccctcctcaaccaccctgggtaagtggctcccagattgatagggaaagagttcggactgtaggggctattgaatacttgattgatgccacaagatctggaaatgtgtcccgctatatcaatcacagaagttgttccccaaatctcagcacccgattggttttggtagagagcaaagattgccagcttgctcacattagcttgtttgctaatcaaaacattgccgtaggagaagaactcgcctatgattaccgacaaaagcttgtagcaggcgatggctgcttctgccattgtgggggccttagtgtaggcgtacaatctacgtcgacgccaaaattaaatcaccttcctacatccatagttgatatgaactggacatgcttaatccagggtacatggctgatgtgttcatcttctagaggatatcttgcaccagagtacaccattcaagggcagctgaacaaaaagagcgacgtctacagctttggtgtgctgctgttggagattgtcagtggcagatgccacactgatcctagattacccgttgacgagcagttcctcctagaaaaggtctggacactctatgagttcgatgatctcgagagcatcattgataggacactaaagcgcgattttgacaccgaggaagcactctggttgcttaaggtaagtcttgtgtgcatcccggatagccctaagatcaagtcctccatgtcaatggttgccaagatgctgcaagggtcctcaattaaggtcgaatggatgcaatcaaaactagaagggtgtgcgccatcgaggatcactgcagctaaggcaatcgtgaaggctggaatcgttgttatggcaccgcaagctattagtgtgctaggtggatttaggcctcaagggaaaacgattgacaatgttgtaaaggtcttcttcccatgggcggatcattgtcgactggtggtgtcaggtcttcttcccatgggcggtgccctggagcgcctgattgtctcacgtatttgaccagcaacaagggacgaagattggagctgtgtggattgtgtggaggcgacacgggtcaggagcatttcatctgatttacagagaagtaaagagaagttgtttacatttagtcatcctctgtatctgaaacaagactatgtttctaccttgtctttctcatggttcttagcctatggccgaagcttccatgcttgattcttcaaacatccaatgcagatcccttttctctgatggatatgctgatattcaaggctgtggaagagcaggtcaagaagagagtagagaataaggcaatgatcttcgagcagaatgccactgatagtgagtgcaaggtcgatcctaaagtgctctccaagctatatgatcattgggtggatgccacacaccaaggatgtctgccttgactaatcaccgattagctgtagctgtaaattttatgtatacatggtttcagttgcgctcgatccaattgtcttaaccttgaatggacattttgatgtttctttcatgaatgttcaggtcaacggcaagataaaccaattgcgttgtatgagttttagatcataactcaagttttttgtagatcttggtgctatttcatatgatgtgtcatgtttcagtgattgctttatagtgaacccgtaagatgtaaaatgacctttatgacagaaccatatgtaataacagagtattctgaggaacctttgttgaagtaaatgtaatcgagtttcctagcaatcttgttcctgcagacgagcattggaaaataacagagtattctgaggaaccttagtcgtattaagtttgtgtagaaagaaactgatcataatataatg

SEQ ID NO: 41571 - DNA, 532 bp, Zea Mays
ggcaacactggtgtgaaacttatttgtctatgtgtgggaacctctgtatttagagagatctcaaggttgctgtcatctatgcggtcctgttttgttttctcatggtgtcctgctatgccgccctttacttgaaatggttcagactttcagccatgtttgtaaccttcgggatcctccttccagtgagtctcaaaatctctaggcatagaaggctgaagaggaaaagagaaaggagactgttgttgccactgtccatgtgaatacattttttttgatacaccctgtaacattctagtggagttggccagctacagaagatagggaaatcctcggcagacgaactcaactttacggccccagcctacgctttggaaaatgttgtatgcatcacctgttgtgcttctgtcctccacatgtgtacacacacacatacgtgccgaacactttgcgttgttttgccccccgcccctgtgtttgcatcaaacttcgtccgttgaaagttgatgcatgttgctggagtttctgacggcaa

SEQ ID NO: 41572 - DNA, 3950 bp, Zea Mays
gccagcgcgttcttcgtgctctgtcaatctcgcagcagcgccactctcttccccacttccccaccgtggtccccccttccccacccaccggagaccgcgccattccccccttccccaccgcgaccaccagaccggcatggcgcatacctgagattgcgctctccccaccggatccggcttggcgcacaccggagaccacgcccttcacccttccccaccgtggccaccggatcccgcacacgcgcgctccggcatggcgcatccacagcacgaacgcccggaatggagcagcgtgcgtccatgtacccaccggagaccaggccattcaccaccgcagtgcccccaccctcatcatcctcgcgtccccccgtcgctacagccgccaagttggtctgcagggaggtccccccctcaccgcgccacgctcgccgcgcccgccgctcggtcctcgccgcgacatgcgcctaccctcacctacacgatgctcactcctccgcacatcgcaaagccgaaggtccacgccccctccgtgctgtgaccccctcccttgtgtgcccatgatgctggaagggaagtcctaccttgtgccgcgctccctgctaagctcctgcgagatagagacacagtgggcgtacttcgcccacgaggtccacggcggcaagcgcctggcgccggaagactgcgaggtcgaagacctggacaaagctgacgtcggcggcaagcgcagcaagccgccgtctccacagccgcacacgccggacatctccgagggtcgcggctccagccgccatgcctccggttgcggagagcagcagggcactgggagcaaccccatgaattcaatcgaccgtgacctgaccctcaatagcctcctccggactattgaatagggcaaggaagatgtgtgttctggggttttcatggatggcaagttctatgtgatagatggtgtggctaacaacaacaaattgctgactttttgcaggtgacgaaaaggtaaggggtttcgatcggagatggcagcggcggcgaccgcacatagagccagcttcccgttgcgtctgcagtagatccttgctggaagctgcgccgtcgcacctgtggtcaaggtcgagtctgagccgattttgtggggtcctagatccagacgtcggtcgacaggtcgctggcgtcagtggaccacgtcgcctatcgcggttgtggagcggagctgtgagcagatcccaagtccaatgacgaagagggagtctcggtagggtgcgataaggcgcgatgaggtcagacacggagcacggacgtgtcctcagtcgctgttgtcatgtgtcagtggatgcagtcgtcgctatcgcccacaagaaacctcgcttcgtggaaaggtacctctagggctttgcagtctcagctttggttgtgtagatttgtgatttcgtggtctgattaaccacaacttcggttacatcgctgctaccatcttgtacaaattacttccaagctattttgcctgttcctgatgtcaatttgaggcactactaaacaggtacattgtccaattgtgataaatctggttggtatatatgcacattttgatgaatgcttgcagcactactaacaaacagtcccatattgatgtaaagagatatggagtagtggggtttgtgttcacaaatgcttatggttttgcagacaaatttgtagcacacctgttagttttactcctccaagtatatggaacaaggataaacaaattttatggtttgttcctagatgtagactacacagatgtagggattgcatggatttcttaaatgggttattgctttctgacttaataatgataacttctcaagcttgtaactactttgttcatttcattggcatggatgtaatacatgaatcctagcacaatttagtaacttcctatttcaggtgtggctcaatattatccaacatttacgtgttcacaagttaggtggtcttttctgttactaggtcagacaagtgcttaatatcctatcatataccaaaacagaaagtcgtcattggccaacaacattcgaactgactgttgtgcctcgagctctgattaacccttgaattttactaaccggttgcaaccattgcaatgattttgaagcctgctttctaactagatgtcaatgtataccagcttgttgtttctccacattcttccgatgtagtagctgttcccttgcctgtagtcatgcaattgtaaaattgtctttatatgtttacgatgatcagattagtatttaacatttggatgaggaagtcaaggacaccgacctcaagcgctctaccaggaagtccgaggaggccgtcctcgccgacctcgcttggctcggcctcgaatgggaggaaggtgctcataaaagaacacctgtgatgcctagaaggaaccctccaccacctccaagagagcaatctaatagtttttttaccgcatggaagctcaaaggcaggagatgcaccgttaggtgcattttgggtgacataacatgcacgaggtgctcaagctgtagttaacaggaaccctttgtttgatggggagtcaattaaggcatcactgtcatcaaagcagaaccaaagctgggtggacaccagcatcagtattcctggcaataggcatgatcattccggtcagatgtcactgacaagtaaagcacaaaataactctttgtccaataatgtttttagaggtctctctgacacggagatacaaaattcttggaaaagtagagcagaacaacctcaacccgagccaaaatgtgagaaagacccatttaacagctttgttgcagattttgacactcacaatctcaacattgccgttggtaaggcatccgaacttgaacttgaagtctccaatctaaaggagcagttgaagaaaatcacattagaaaaggctgagatgacaaccaagcatgaaaagttatctgcaatctgccgatcacagcgtcaggagatccaagagctgaagctcactcttgttgagccaacgcctccctcaaacaaagtcagctcaaggacacaagattctggatctcagcgaaaggaaaagatccaaggcactgtgtgggagcttgaacaagggatgcttgctattgctagcaactcctcatcagccagttctgatgccaaaacatggcaggctttccctgacacaaagactcaggcccgaccaaaggtcgatcatgcaactaatgggagccaaaacataaccaagaacacaacgtcaggtgcttcccccgatgcgtggggttttggtactgataatttcagaacaccagcaacaacattaagagctaccacacagatcaacagggcagctgcccaacggagctcatcccaaagatttaacgctggtgtggccaagagccagtctcggagctgcttccccagggtgaaagtcgtgcacacgtcgctgcagcgggacaacaggtactacgagcgcgaaaacttgctgatggtcatcaagaacaacctgttgtggcaccaccttagcatgggcctgggctatgatgactccaactccaacgatagcggcgtgtcacctagctcggaccgtgcgaacaacatagaggtcgccacagtgtcgccggtgccggcggtcgtcaagaagcaggcgaggttcctggtggcctcacctaggagccccgacgtgaatgagaccatgatggaggagctgcacgagctgtgcgaggcgcgggaggccggcaccgcgttcatcatggagcactcggcatgtggagaccaagcccgggtcgtcactgctcaagaggctgacatgtgaatttgatggacaacatgtatcctcaatgatcgctcgagtgctcagtgagccataatatcgtgaaaattctatgtgcttgtatgtttcgttttctttttataaatcatattgtaatgctatttctataggtggagggtga

SEQ ID NO: 41573 - DNA, 1284 bp, Zea Mays
cctttttttgcttccaacttcatggcagtttggttttctcttacagaggataccctcaatgctgcatggaagatgcctttatatcattgaggaactaattgctaagaggcagcagcttgatgctgtgaattttgcttacgaggctgggcttcaggagaagttccctccagttcctcttctgaagtcctacctggaggactctaagaagacgtcgaccgccgcttcagataattcaagcactagcagcagtgggcaatcagggagcaacgcgaacaagaaagagcagtctgcactgcgagctgtcatcaagtgtgtcgaggaccgtaatcttgaagccgagtttccactggagggtctccggaagcaactcgaagagctggagaaagccaagaccgagaagaagaaggcggcatcaagcgctaccagtggcggcagcagcagcggccctgcaaccaagcgcatccgcgcgagcaacggaggcccaatgcctcccgccaagccggagcccgccggtgatcaggggggagccatacgcttacccaccagccgaggaggtagtcggtttcaacgtcggcatcaccatgccatactccaccccacccatgagctacccccctgccccctatggcgggtacggcagcgggatggcagcttacgccaacggaatggcccctgctttccaccaggcttactaccggtaggttcagtcatgaaacaaaccaaaaacaaagtaaaacaacaaaaaaagtcgctgatgaatgacatgacaacaactgataatcgcgcaatggccctgttttgtagcgactgactacaacggtaggttgggtatgtcatcttctatgtcctttccatcaccaccactaggtttgtgtgttgtgtctagctcgtctcatcttagaccactgcctttcttttttcactggtaaggaacctggaacctgggtgtaaattatgtatggtatcagcgagactgtcgtcgcagccttgtgtaactctgttcggaactttgatctttttttttgttgttgttgaaaagatcagcatgtgatcgttaagtaccggatgtaccatgaactttaaccaaaagttttctcagtttagttgtgtgatttggtgtgtggcatggcctcggtgcctctcatttctcgtatgtgttttgtgtttggtgcctctcatcatcatgcatgttttattttgctcgtaaacatatttacgtttaacagatttgcctatggtgcctctcttcatcatgcatgtcctcatttatgatgaaaaaaaaaa

SEQ ID NO: 41574 - DNA, 682 bp, Zea Mays
gccggcgcagctccgcatgaaaggatcaccgggccagatcggcccagtgctacgtttccgcaccggcgcaccgcgtcacgccgtggtcgcgcgcggccacgcgcgcaggcggaggcgggcgccgtcgcgccgacgtgccaccggtgccgcgtcgccatcaaacgccgatccctggccaaaaccggcacgctacgtattgcccctggcccgacgtcgagcccaaaaaccaaaaaagctcaatcggtctcgccgtggcgtgccggcgtcagcgtgggagccgaccccgtcaatcaatcatggacgtgttagttttgcgccaacttgttaatgaccaatcgtagatggcggtgttttcttaatcttacactacgtgtagtcgcatggacctggacgcgacgccacgagatgcgacgtttgagccttgagggaggattagattagggcgtcgttggctctcgtaagtggttttggtatttttattcgtcgccggattttggccgggtctattggttctggctgccgccacgccgacgaagtagaatgaaccaggctgttgtttcttgtcttatctgaaccactctctactgtgacggtctgacgggcacaatattaattctttgcccagtggcctaagagtatgcaattgtaagctgttttccctcacagatatactaagttctcc

SEQ ID NO: 41575 - DNA, 810 bp, Zea Mays
cactgcttcccatggcgcgccctcacttgcttctttgtgtgacgcctggaggcaggagcgagacgagtttggtttggatacgctgttcggtttgcagtttgggtccgattggtgctgagagttcgtcgtggcgtggcaacgtcgtgcgcgtcgtggtagccgtccaggccacggagcaatctgcgccatagagttcacccgactgtgacctcgccttgctccctgccgcgctcacatcgtccccatcgttgtcttccaatttcagcagttctgccccagtcctatgtcgacctcgctaaccacccatggttgatcctgtgtttcgtgagggtgactcacagtttgagattgaaaaaggagcttagaaggtgtagataatgaagccccagattgacgtttgccagatgttcggtggaacgcctgaatcaaagttcgtcgttgttcttgtggattttggatcgatttggcttggtacgtgaattaaccacgtgatgcggagaaccagaactgagtcgaccacaagatgatggaaagcgtgagcatctccgcaagatgacgtcgtcagtcggacgaacctgaagatggataatctgacgaatgtcaaggcaaaagatgatagtcaagtggacgtcgtctaacaacactaacctagtgttacccaggcaagccccggtgcatttgccacctccttgctgttttaaaaactttatcaccttgtttgatgcattaggtgataggagttgtgtgccaaaccatcgatgcatttccttccttgaaaattgattacccttccttgatacccattttgaa

SEQ ID NO: 41576 - DNA, 266 bp, Zea Mays
ctctgacagcgctgtagcggtcactcgctcgctttatgcatctaggctcggcgcggacgaacctaccgtggaagagggaggtggacgacagcgagagtggctgtcacatttggcatcgcgctgtccagcaccgacagaagcccaacccccttgcttccgcctctacggccgtgctggtggcggtggaggactccagatctagaaccgagagccacggacagatgtgctggagataacacgaagcgacacatgggaggagagtgggg

SEQ ID NO: 41577 - DNA, 2566 bp, Zea Mays
tttttttttttttctcgcaaagtgcctgacctatgaaatgtcgaaatacaagaaacaaccaggagaggctattgcccaccggattatgggacctcgtcaccactctcaggattttattgatggtcttaatgcatgcatggatcgtaaggatgaccaatctttttcaacatttaaagagcgacttcggtatttacagaaaactgaaaatttgagggtctcgtgtggtcgatctggaattcatggatgggggctcttcgccgcaaggaatattcaggagggtcaaatggttattgagtaccgtggcgaacaagttagacggtgtgttgctgacttgagggaagcacagtaccatagagaaaaaaaggattgctatttgttcaagataagcgaagatgttgtcatcgatgctaccgacaaaggaaacatagcgcgcctaattaatcactcgtgtatgccgaactgctatgctaggatcatgaccgtcagcgatgacaggagcgagatcattctgattgccaagagagacgtctctgccggagaagagctgacgtacgactacttgtttgaccctgatgagtccgaagactgcagggttccatgcctgtgcaaggctcctaactgccgtgggtacatgaactagaagactaaccaacctcagaaacagggactaaagactaacgtgaccccccttacagttacagaggccaaaggctggccatttttcccggaattcttccgttggcttctcggtttatatttactggaaagtttattagttctcgtggctgcccaagttttgaaccattttgtttagatattgcgattgagggcagccaccccattgtatattctttcattgttgtaataagataccagtataatcaagaatgctgactttgaaatggaaagaagaaaaaactcaacttgatgccgtcgtctgcctgtgacatcaatgtattaaccactcgctttggcctgtccatgtctggacttcgaaccagatgacctgatcaaaccgtggaactggcagtaatcttgctcttcaatccatctatcatcattaacaacatccgtgttgagccggcaggccgtgtgcccgtccgacgaccgggtcccgacaggagagtttaagcaggcagggcagggccgccgtggacgcgggaccgaagcagggccaccgccgctgcaccatgacgcgtctgctgctggcgtgcctggctctgctgctggcgcgggcggccgtggcgcgggagtacgcggccgtcttcagcttcggcgactccctgtcggacaccggcaacctgtgcgtggacggcatcccggactacttggccacggcgcacgcgccgtacggcatgacctacttcggctatcccacggggcgcgtctccgacggccgcgtcgtcatcgacttcatcgcgcaggagctggggctgccgctgctgccaccgtccaaggcgaagaacgcgacgttccgccgcggcgccaacttcgccatcacgggcgccacggcgctggacatggccttcttcgaggagcacgggctggcgcgcgccgtgtggagctccggctcgctccacacccagatcgggtggttccgggacatgaagcccaacatctgcagctccccgcaagagtgccgtgagctgttccggcggtcgctgttcgtggtgggcgagttcgggggcaacgactacgggtcgaccatcttctcgttccggccgctggaggaggtgcacgcgctggtgccgcatgtggtggacgtcatcgcgcggggcgtggaggagctgatcgcggagggggccgcggacctggtggtgccggggttgctccccaccggctgcttccccatgttcctgtccaccttcgtcggcaagccggccgcggcgtacgggccccgcagcgggtgcaacagggagctcaacacgctgtcgtgggtgcacaacgcggcgctgcagcgcaaggtggaggagctccgcgccaggcaccccgacgtgcgcatcgtctacgccgactactacacgcccgccatccggttcgtcctccacgctgaggagtacggcatgctgaggcagacgccgcgggcctgctgcggggcgccgggagtgggggagtacaacttcaacctgacgtccaagtgcggcgagccgggggcgtacgcgtgccaggacccctccaaccactggagctgggacggcgcccacctcacggaggccgcctacggccacatcgccaagggctggctctacgggccctacgccgacccgcccatccttcacccctgaatccttctccctccgatccgcccgccggcgccgggtaccgacatacgaataggcatacggatacacagcatgctagttaatctagtttgatttgcataagaagtttttactattgtactcgtagtgttttttaatacagtataaaattataaactgtacatgtaagtttgcgctatgttaacttctgtacataacttgggatcggagtatatataaacttgtactattacatgttgagtaataatatacagatcgatctctttcgacttttttaaaaaaga

SEQ ID NO: 41578 - DNA, 1224 bp, Zea Mays
atgattacaggtgatcaacatgctattgggaaggaaacaacacgtcgtttgggaatgagtactaaatgtacccttcctcttctttactctgaacaaaataaggatgagtcacttgcttccttgccaattgatgaattgaccgagaaggctgatggcttatctagagtctttccagaacacagtgtaattaatagagttgtgttgacgggtcgagcaattttccaaaagatgaaggattacacaatctatgttgtatcaattaccatccgtattgtgcttggttttatgcttcttgcactgatatggaagtttgacttcccaccatttatggtacagatcattgccatcctcaatgatgcttcccgtaaagacgatgatgcatctcgcatatatgcccgcgcacgcagttttgttcgaggaaaggagggcaagagcgggagacacaccatcgtcgttggaggagccagccgaggcgttggagtgtgagatgatacattcgggatatgaaccagtcgggcgcgacgatctgaacctatcgagccaagcacgtcgggataacaacgtcggcttgcaccgtccttcggcgagggccattcatcctttgacctcccggcaaatggttctattttgtcaccgaaggttcagtctttcctaagttcctgatgcactaggaaactgttctatgtccaaagccttgagaagactgtccaggatgattttcagaagctttcttccctgtaccttcaagtcagcacaatcagtcaggcccttaactctatgacgcggtctcgaaacctcgcaggctcgtagctggtcatttgtgtaccgtcctaggttcttgctgacctttgccttcttggtggcgcagctgctgagtgatctgagtctagtcccataccttactgtcgtatgtggtctttcctcatctcctcacattttgtggtgtttgcattaaccttaatctgtttttgtgatcttggggatttcgggttttagattggcgattggtcagtggtgtgctgtgtgcatggtgcatttgagctctctatgcatcagattgagcttttatatacaagtcatgatttgtgttttaggcttaaccctatgggataaagctaacgaagaatcactgctaaaatatgtttccattattgattgtagcatgattgtgtttaagaaatatgttcaaacttttgtgtcttcattatcaaatattttctcata

SEQ ID NO: 41579 - DNA, 3049 bp, Zea Mays
cgaaattccattttccaattatcgcaggcccgcttctcaccaattcaccaaccgtccactccctcgccctcgccggtgcatctcgtcggcgtcgtgctctaccaccaccagtgcacggcacccctatgttcgtctccttctgctcccccatccttcgttctgcgcttggaacgttggatgtgggttccaccaaatcacgcgggagggcaaataaaccctagttaggccctcccgggatggaggcggccgcctccagcctctcgacgctgctttccaccttgcgcgtgaacgggccctggacgccgccgggaacctgggagtcagtcatacctgagagcggtgctgctcgcgtctctcaccttggaggacgccctcgcctgcagccgatctacgagctcgcatcggttactgatgatgctttgattcatctggccttgcatgcgctgtatggtgtcaaaacatcgttagatgagattgaggagctttcagcactgtcttcctcaaatccggctgacaggacctctaaccgtgtcccaaatgtgtggttacgttcctcgagcaccacatccatggggagtattctcaaatctttccgctcgacaggtcttgcggtcttcttcctttgcaagtttgtgcacttttatcttttccaaagtcgagaaatgaactgtgcaagtagagaagttcacgaacatgaagattctggagataaagacactaagcagcatcagccttacactctagtaaaccaagcatttgcagcagcagttaataaggtcctcgaaggctatttctgttcattgaatactttactagcatcaattaggcttaggcgttcagtgggccaatctggtatagcttccaagatttcaaatggaatgagttgtgatcccacttcagaggtcactcttctggaagtttatctacacaccgaggagttaagaaggatgctgatccagttcactatggtcttttgaagtatcttttcattcgttcctgtgagccatactttaacttcattaagtcatggatttaccgagcttctgttgatgacccttatgaggaatttctcattacacaaactgaaaataagggtgctcaaggaatctcttcagacataacagatgatttcatcctcttccccttaaagggaagaaaccatgtatctgctccatgttttctaaaggagatatgtcatcctcttttgcgtactgggcagcagcttcaagtgctcatgaaccttctaaagtattgcaatctggctgctactgaaggagatgtttatccctctcgtaatatcattcatatggagggggttctcccgtggtttgatacaccaattgagtcttcaatgaattcatttacattttcaaaaagtgctatagaggcattaacatgcaaaagggatgctatgtacaagttgatgatggagaagctccaacattttttctctaatgttgaggtgattgcttttgatactgcatcaaatttcctacataaaaggaccgaccttgtagatgcatctgtttcagatgctgagttattctatggggacagcgacgctgtactaccttgcaatatggctgcagatgaaaaagatgattcttcttcgaattcccaagaatcttcagataaagaagatcccttggaatcttcagaatgttcttcttatacttctatggatgacacagaagttgagagttctacagcatgtgaaaacttgtctagttccatgttctcattatactgtacaagcacaggtgaagcaaaaggctccttggtaaccagtaagctgctttcttcccaatccagttcagttgaccatggaataaattgtgcaatccctattgagtgtgagaaagatgacaggttgagttgcaaacatgtccttgtgcacccacagaatactaagcatactgcggtgcctgatggttcagaactggattatcagtatagccagttttcaccatttgacaggtttatgaagagagccagttgctcatttgaaagcatgaattcagttggggagtttttgtattctgatcataaaagagagtgacatgcaacagaaaagcaagaaccaatcacttgccagttttgattttgagtcagtcatggatccatgtgaagtatattgtgcaaggagcccatcccttcttgttgagtctgtaaatggagcagcaacagctggacagcccagtactcagccttatgaacagcctgattgttctaccaagcttcttcaagctcagacaagaagtcagtcatcccttacttcctcaggagaaatgtcaacaggagatagtcttcagaaaaatgcttctggtggggcattctgggagatatcattactatataatgataaatcaaaagaaaaaccagctatggactttagttcacaatttgatatgccccttgatatagttatcgataagtgcattattcaagaaattttgcttcacttcacgatgaagttgcttgaggagggttttgatctttgtgcacatctactggctctgcggcggtaccatttcatggaaatagctgactgggcagactcctttattgcttcaatttatcagaagaaatggtcatttgttaaatctgagcagaaaagatcggagatccaaggacttatggacttggcattgcagagatcttcatgcgattctgatccttataaggaaagattatttatatacatgagggagtcacctgtggattctgttgatgcctctccatgtggtcttgatttgctggatgatatcttgttgggttataaagctgaatggccaatgaatattgtcattacagtagatgcactgaaaatatatgctgaaatattctgttatcttcttcaagtcaggtttgcagtgttttccctgactgaagtttggagatttttaaaggagttgacacagttcatcggtcgttccagccatagcagatctgatgtgttgaagaaattgaattttgtaatgaaattgagttttatgcagccctgtgtggtcgattggtcgtttcttatctaatggtagccggtgatcta

SEQ ID NO: 41580 - DNA, 526 bp, Zea Mays
cccagtagtgtccattcggtgtctgtctgtccactctcgtgtcctcaagctaggtccagtgaacctgccccagcgccatcccttatttaagtgcttgtccagggagccctgctggatccttgggcatctctgtggtggtgtgtgcaagcctgagttcatctccttagcctctgcgtcggctttgttcagttcatcaagtgccattccattgtctggtactctggtgccacaacaaccatccttccacctccccgtggtcagagtatctcaagaagtttgttgcccagagttgttccaccgcagaccggagccgtgagcagcctctgtgttgaccgaacaactcacgctttctccggtcgattccttgtgagcaccaaagtttagaactcctaccagaaggagtgaagattcaagctgaagaggtgactgaagaagagtttgctccagtgcctattcatcaagtggatggagctatctaactagttattgggtagaaaggtcttgaacctcttcactgcaacaaagg

SEQ ID NO: 41581 - DNA, 326 bp, Zea Mays
gtccaattttgtgaaaggcatgttgaactactgatgagtgacgagaggcgatgatgctcaaccttttccaaaatgcatggcactgggcaatgaaggatgctacaagtgtctactttgagctaaccctctccccacatgaagcctattttaatcacccctttttggtttatggttgtgcctaggatggtcattcggatgtgacaaccaacacatttccacttacattgaggtgattaggtggtgctgcaagaaaagtgagaagtcggtttgcatggtagaataagggtgatgatgagccctttttgtgttttagagacttatcactt

SEQ ID NO: 41582 - DNA, 294 bp, Zea Mays
atggagatgaatgaagaaaggaaggtcagcttactaggactagcagatatattatcagcctcaattggaggattctcatgggctcccttgatttcaaagatctgcaagaataaagtcaaggcggaggcttggtttactggtcttagtgccttgatatgtcgaggacagcatggatcccaggtccaacatatagatggaatccgaatcgctggacttccttttgatctatatacgacattcaataattagaaccagaatgaaagctttatccatgttggagcatttggttgagcc

SEQ ID NO: 41583 - DNA, 448 bp, Zea Mays
tgacaaacataatgcaacaatcaggatgcatgctcgtcttatgcgtcctcacgagttttgccaacataatgtggcgatagcgttctatatcggtggcatacttacgaatctcacggtaatttgctagtcgttaactacacatacgttttcgaggttagtgtacctgcagaaaatttcatcacagcccaattcccaatgatgcagttcacacatgacagcttatcacagtttatactccatatatttctatatggaggccagctcatcattaagcgccgagccacgcataggcgccgttgccacactttaaccatagggcaactcattatggtaactcaccttcttaccttagcgtaggtgcgtcgttacaagtacattacatttctcagtattcccatgtttgtagagccattggcaattttgccactatcatttgtgggcttcgcca

SEQ ID NO: 41584 - DNA, 2649 bp, Zea Mays
tgtccgtctgtctccaccagctaccgagccagccagcaaacaagcaagcaaccgactgcccccttgcccgtacgcagtacacctcgcgccggtgagcgagcgaatgccgcgggagctctagccctcggctcctcgcccgggccggcgtgtcgttccgatccatgaggaagctgccgccagcgcaccgcctccggtggatgcgcgcgctgctcctcgcgctcccgctcgtctcgctccccatcctctacgcggcgctcggcgcggcgcgctcgtcggcctcggcggcgcggccgccgccgccgccgccgcagcagcagcagcagcggaggccgccgccgaggctggcgtacctcataacgggcgcaggccccggggacggcccgcggatccggaggctgatgcgggcgctctaccacccctggaactactacctcgtcggagtggcgggggaggacgagcggacggatctcgaagccttcgtgcgcgcccaggaggcgccgcgccggtacggcaatgtccgggtgtcggccgcgggggagtggggctccgtctcgcggaggggccccaccgaattggcctccacgctccacgccgccgcggtgctgctccgggagttcgacggctggagctggttcatcaatcttagcgcctccgattacccgctcatgccccaagatgacatccttcatatcttctcatacatgccaagagacctcaatttcattgagcacacaagcaatattggttggaaagagtatcaaagagcccgaccaatcattgtagacccagcattgcaggtcccaaataaaactgaggttgtaacaacaaaggagaaaaggagtatgccctcagctttcaaaatatttgtaggttcgtcttgggtgatgcttagtagatcattcctggagttttgcttactgggatgggataaccttcctcgcacactactcatgtatttcaccaacttcctctcgtcctcagaaggctacttccacacagtgatctgcaactcagagtactaccagaacaccactgtgaacagtgatctgcgcttcatggcatgggataacccacctcggacgcaccctgctaacctcacaacagagcattttgatgcaatggcagacagcggggcgccgtttgcacactcatttgccaatgataactcagtcctggatatgatcgacgccaagttgttggggcgagcacctgaccgcttcacgccgggtggatggtgcctgggtagctcagtaggcgggaaagatccgtgtaccttcttgggaaggtcctttattctcaggccgaccaaaggctcggccaagctagagaagttgctgttgaaacttttggaacctgataacttcaggcctaaacagtgtaaataacactcattttacatggtagccagttctttttttttttgtggtagtgttcagaagccgaagtttgatgacatgtttcttgttgttgcggcagtaggcattacatacagatgttttatacttgcaaccggaaagctcaactcacaagtgatttgagatcatacacgatacatgtactcttgctgtttcatcacttctacggctgtacaacaaccgatgataatgagaggttcgctggaagtcagtctgatatgagaggttgccctaggtttcggccccaccctgttccatccgggaattaaccggttcggttcgtgtgggagtttatcatacattttgttttggcaacattggtaaagtaaaattcctgagcgctgcagcagtttttgaacacgaaagtgaagacgctttggtcgttaaagatcgcaaatcccactcacctcaagtcacttcccaacttggacatggcggtccactcccaccttcccgaaactgctcgtacgatctcaagcacggctcctccctagttgtcggctctcggccgcatcaccatccccgtcgccccgagcagtctcgttctccaggtacttctctgattctctctttcttcgtcatggcttacccttccggatcggtgctttctccccgccgcagtaagaatccccccacccacgggttccggttaccactcggcggtagacctgacggtgttgaggtgtttccgcttgctggaacaacttcgctggcgcctgcaagctgttcgaccgaatgcttctgcgaatgaagtgaaggtgagggtgaagcagcagaatgggtcggtaggctggtgctttgcacataaacccaaagaagtttggtgctgttgcgaagccttgcatgccagaaatggtggcctggccttaaacaaacagaatgatgacaagtgcatcaggcagaagtatcttttggttgcatgcacccaaactcagaaggggaggccaaagaacgcagcgaagaccatcaattaccatctccagcgacttgggcacatcaagttcctctaggtgcatgattttgatatcatttccgcattaggctttactgccctgtgtagaagttcaggaagagaattttttttccaaaatagatttgctgaaacgaggaattaatgtgtttgcttagattgggcaatgctcagcaaataactctgtcaaacaataatatatcagcagtatattgatactgtttttttctcctttttcctaaaataaggatcgggtttaggatt

SEQ ID NO: 41585 - DNA, 327 bp, Zea Mays
taagtggaggaccgagtcctcccgcacttcagtcttgtttttcttcatttggtaccaccttggagcaaaagcaacaaaaatttgtcgcttcctcacctaaaaacaacaaagggataaaccctgagtatggaattactcagcaagtcttacccgactaaggaaaagaccctcaagggtatgctggataaataggagtcaaggagaggctttagcaaaaatcaacttatacttttgcagaagtagcttactaaagtgagtccttactttcaatcttttaacgccatattaagtattaatagactctatttgcatctagtctaatttcac

SEQ ID NO: 41586 - DNA, 3015 bp, Zea Mays
atggcggcggcggcgtacttgggcggccgcggccagggagcagacggcgggtggttcgtgccaggcgccggcgacgggtgggcgcccccgtgggggaggcgcggtgggggaggagcggcggcggcggcagctgcagcagcaggcgagagggagacgctggcggtggtgatggcgaggagggcgcctccgccgtcggcgatccgccgggacgcggtgcgcgttgcggaggcggccgccggcgaggtgctgctgcgcgtccaccccaccagggaggcggagcgccgccgccaggacgtcatcgcctacctcacacgactcatcggatcctccctcggctgcgaggtctttgcgtttgggtcagtgccgctgaggacgtatctccccgacggcgacgttgatataactgtactggggaacacatggttaaacagtacactcattgacgatgttcgcagcatgctccagtcggaacaggaaaactgtgacgctgagttgaaactaacaggcctgcacttcatcgacgctgaggttaagctcataaaatgtgtgattgagaatattatcgtggatgtctctttcaaccagattggcggtgtgtccacgttctgcttccttgagctggttgaccgtcaggttgggaaaaaccatttgttcaaaaggagcattatgttaaccaaggcttggtgctaccacgaaagtcgcatattaggagcccatcatggactgatatctacttatgccttggaaacacttgttctttacatattcaatatgttccacaagtctctgcatggacctctggaggtcctttataagtttttggaatattttagcaagtttgactgggatcgatatggcattagcttaaatggtcctgttgatttgtcatcattgccgagcttaactgtggaacccacagaagtacaaggtgagttattgcttggcaaggacttccatcaaggctctctggatagactcgttgtaattccaaatgagtttgacggatgcgacacacaatttcgccagaagtttttaaatatagtcgatccactcaaggcgaataataatctcggcagaagtgtcagcaaagcaaacttttatcgtattcggagtgctttctcattcggagcacaaaagcttggtcaaattctcttgttaccatccgagtacatttgtgatgaaatttacggatttttctcaaatacactgaagagacacggaaagggtgaaagactagacattgacgctagtagtgcattccaacccttgcttggtcccgagagtacacttagtgaagatggatcgatgtttaaatcttcttgcataaatgagggtgaaaacggaagttcatgtcattcatcagaactgcctgacatgggctcgagtgtgacagatgtgcataagaattcaggtaagtatttgcctggtctttttcaggatcttccttggaataaaatctggttcatggaatatgcatctgatttgaaagaaaatccacaaacttcagcaagttcaaggagccactcatccttttctcaagataatggtaatggcaacagtaaagagtgcttcgagaattatgcagcagaggaaggtttacaccagatcagtagattaaatgtgccgcaacagatttatgcagggcatccatcgcatagattggctaactcgactagtgcaaatatcttggatttctccagttcttgttttgttgatgagtcagattggactgctccccttgcaggaaaaaagctactcccacccttgttgctgtcaaatatgctggatctctcaggtgatctggagttgtacttgggatgccttcgcaaagttcagtaccacctggagtcattgtttgatgaactcctacaggctgttgaagaagcatgttttgctgatgtgctagatgaggattccttcaatatgccagacatgatcttgaagttaaaaactagcactagatcctcaagcctgccattagattcatctactgatagcgagagaaggaaattatctcctgtgtattgttctcatagcataggagatgattcacaacaatcacatggcgaggcacaagtggatatgttttggcagcagaacgtgccattgtcccccaatggatcaacatttccttcatctccttcaaccaattcagataattatcctgtttcttggttttgtttctctcctaagacgcatggaaccggcacatacattcccaatgtgagttatcaaacatacagggagcgtatcatgcttgaaagagataccatacgagcaagaaaacaaagacagaggttacctggtcgccggtattactcagccgagcaaggattttccggttcacaaaccgaagaagacaccatagctcaaagtgcaacgaaccaatcgcccaagaagcaaaacagtgtgcagcagagtggctattcaggcaagagcacagttccggatgcagatttcgtttgtttcagggagcatgtggcaacagaaggtggaaccaaacagctggcagtaggaagagagacaatgcctccatcatcgtcatcagggatagcacttgctcaaaacggccaaggaaatcgtatctgcgagccttcctcacccgccacagcagatttgttacatgcggcagaaagtttggagtttggatccttggggcctttctcgttgggacttgtctcaacttcaacacagtttgaggaagcattcccagcgctccccactagaaagagagctgaaggagccgagaaccactaaggctgcagaagcaagaaaacgtgcaggttagaagaagcaactgagaaagagatgaagctggttgccgttgagagttgagactgacaggacagtgtaatcgtagtggtagaagttggatgtcaggtagacagcactgtaacaatttatctaaattttactttaaaatattattttgtactattctatactgtagacagcactgttcgtaaagtaaaatttatatataagtataagaatgaataagctgttggagataat

SEQ ID NO: 41587 - DNA, 488 bp, Zea Mays
cagaattatgagactgaaaaactgctatagtaaaactgcaataactttctggtcggatgtccgattgaggtgttcttcgcggccacggaaagatctacaaatcatctacgactcatacatagacttttcatttttttgaggccactaagaccacggaaaactggcatgaacagaaactgtcgaatctgccattctgcagaaaactaaattcgggatcaaaacctaaccccacatcaaatccaacctctaatcctttaattcccatgatccacaacctccaaaagcctataattacagggaggaacaaggatctcatccatacctagggtttccccaagaaatcatcaagaagagatagggaagaacatctccttgatcctctcttcctcttcaattcaacgtgcccctccttttctcgatccttgctgcgtagggggagatcttgggggatgaagcaatggatgatggctgccataggaggagggggc

SEQ ID NO: 41588 - DNA, 1316 bp, Zea Mays
aaatcccatccagagattatcgaagcaacgagcgccgctccccttcacccctccgcctccctccaaaactcaaattgacctagcgagaagcagaagaggcgaagagtgataacgaacctctcccacatcgatttccccaaatcgcctggcgcgatgaccacggcaggagaggtggattcggcagcaggaggtgaggacctggagccgctcttcgactacaagcgagtgcagcccaggatgacgttctgctttgacgacagcgacttggaggtggccgacatcttcaaatactgcaacaagcgcccaaaggtccacacctccacggaggaggagggtaagcctgacgaggaggtcgccgctgccaaggtggtggtcctcgatgaggaggattggttgcagccaccgccacccaaggccgcattcagggcaacggcagaggaagatagtgcgtttcgggaactgaggttgaagaaacaagagtgggcaaaattcgctgaatcagctgaggatatattgcaaaagctggatgaaatcacgaacaaagaagttggtcccaaggaaccacctgaacagataattctagatgaggagtctgaacctcaagtcgagaaagccagggaaaagatagtcatatcaatccaggacaaggatgggcagcaacagatgcgtgtatacaaggacgaaaagttcgacaagcttctcaaggtgtacgccaagaaggcaaagctcaacccatctgatctgtcttttgtgtttgatggtgagaagattaatccatcatctacacctcaggaccttgatctggaggacgaagacatgattgagctgtaccgtgtacgtgggggtttggttggcaaaagccatctgcagaaatgccagagcagcctctgttattggatgtcagtatacaagacgccagtcagctagcaatgccaacagaagtgactaaggatggcgccaactgtagctaataatcttcttagttttggttactttctaaaaataacatattgattttcaaagttacgtgctggtttctaggcctcaagtcgtctcgcaagacatagtttgtattaaaattattaaagcatgtccaatagttcctcaaaaactctttaaatagggtgttagtaataaaaaccattctataacagttctttaaatgaggtttctaaataaactaaattcttaaatatccctatttagttctcaaactttaggagttgttttgcactttcaataacttgttttgcttatcaatcataccataaaatcacttgtctgctattgagtttgcacatgtgtacagtgatgta

SEQ ID NO: 41589 - DNA, 4749 bp, Zea Mays
cttcaacgatccgacacgaggcaaatcgacatccatgaatccatccctgccatatattcccacagatttccaacacgaacacacacttccagctgcatcccacccgaaacgaggagccggagccacaggcacaaggcagcgccgccggccgctgccaattctcttcccgctgtcatgtacagctcctactccgccgcggcctttgcgctgagggccgcgaagccatccttgcacgcccattcctcctactcctatttctaccacccccctccccacctctgccattgcgacgacgccgacgagcaccgccaccataataaggtcgtcccgcggagcccgtacctcgccccacgcttcttgttcgacggctgcctgctccgccactcggcctacctgcttctttccgcgcagctccggctcctgccgccgccgccgcgcccgtatgcatcccgatgctgccgccggcgagcacccataggctgttgccgcgacggcggtggtgggagacagctggctggacaactctgttgtcatgttgaggcgcacaagtgccggtgctgtgggagtggcgctgggaggccggatcttggggcgatccgccggcgattgaaagcgcctgagtgccgctgcggcagttccggggatgggaccttgcttggagctggatgcgtacggcgggatgtgccgagattggtggggagggcgatgcggcaggaggtgtgggagtatgagggcggccagtggctgtacggaaggtcttcgacggaatgccttgattcggaggaggaagaagaggattgcggttatggtcaattggaggtaggtgggatgcatttcagtaggagatgggaagatggtaatgttgatgatggggatggtcattgtatggattgctgtcggaggaagggcatagaaaactattacagtggtgaggatgtgtacagtagccggcgtagagagaggagagatctgaatgagggccgtcatagtttcagagattctgaccggcgccagcgaagtgagtactatgatgatgaggatgatcttgacttggggcagcgaaagcagggatgggaagggagagatacgaggaattttgtacccaatgatgcagttgacacaaggagtgttgaaactagaaggtactgtgatgatggcagggaatataactgcataagagacaggaggaattttaactctgatgatgtggccaatgtcaggagggctggtcggtatgcagaggatataggaggatttgatcgtagaagagagagtagggattttgagatcgatgataaggttattgtgaggagagaaggcaggcgccatagaaatgaccacagatatgtttcacggcacccaagaagaagtgaagatacagatggagaggatgtttcactcttgagatcacgtcattggaatgacaaagagattggttacaatgagcaagatcttgctgacagaaggtactactctatggtgagatctcaaaagtctgcgggagcatcttcattgcatgaggatgattcaaagagggcttcaaattttaggagcacatttgatgctagacatacagggcagaaggagaattcagcctcaagtgtgaggtggcatgacaatgtaggtggacgaactgagcagatatctgaggagagggaccggcgacgttcagctggttggtcaaatgatgagagagagagatatgattacgatgatgcgcagtttgtgagagtaagaaattctaggataggaagacaagatgacaagtttataactgaggatgaaactagggttacatccagttcaaagaacacatccattttaaaacacggtagcaatgctgatcagcaggctgcagtacataaggatggttcaacgaagagctcacagaagataacggagatatcagaagtccacgataattccactgaacaagattcaagagcacagcgctatcatcaggaagatagagaaaactacactaagaatacgccatcttctgttcaaaattctgtgaagatggctagtgacagtagaagacaagttgatcagcataatgaggtgaatcagaacttggtctcagtcactgattcaaggaaaaactcagggaacctcaatgtaacaattgatagcagtcacaatgtcagcagggtctcacactcaatgagaaatcataatgaaataaaccagatggatattgatgacagttctacttccttacagaatataactcatgttataagagataagaagagcattgtaaaccaacaagtgatacatgaaacggatatagacgcgcagaatattacacatgtcgatatttcaaagatccatgctagtgatacttccacgtctaggagttcacaaagtcatttggaaactagatcagacatgaactcatcttccagtatgggtttcatcaatagaacaagaagccaggaaaaagaagggtatggaaatatgatctctgctaatgatagtggcatggttaggggttcacaaagtcatcttgagactggattgtatgatccatttcactcaaagccatcggctaatattactgacaacaaaagggaaagtcatgaacaagctgaacttaatattgccaatgctagtaatgctgctgcagccaacacttcaggcagtcatctccaaaccaaaacagattaccaatttcaatcgccttcagctgtagcaattgacagtatgaatgaacaaattgattttgctaagatccatgctattgatgctacagttagcagttcacaaggtcctgtgattagaaatgacaatcaagttcataaggcatcaactgtacattggtcaagtgagagacaaggcatgaatggtcggcaaattacacaagtttccaatacagaacgagatgatgaagcaagaagtatttttcctgaatcctctcaggatacacatcataacatggatttgatctggcagcaggcagacaccagtgggatctctgatgacaaaaatattactggtttgctcgtggagagcaccaaaaagggatttatgactaatgtggatatgggaaaacaagaagcaacaatgggtagctatgaccaagaagtaaggagtgaaattactgcaggaagtagtttaccaagtgattcaagtgccagacagtctgtcaaggaaagcatgctagaatcagctgctcgattagagaaatcatctacctttcttgttggacggtttgttgatgagctccaacagggagtctcagatccagatgctactttaacaaagaaaaatgggaaatccataatggaaggtataacaagctcttcatcaaggtctagaacaaaaggaccagcagatgaaatgtgggatgtccagagtactacttctgaagagaccttcaagacggccgacaaggaggaaggttcctcagctgatggagctactaattctgcctctcagacaccaaaaaatgaatctgttgttgctaggaaagttcacaagtcactctgggcttatgttgctgatataatccgtcttggatttattcaacatggtgactcccatgattctagtcacaaatcagttaagaaaagttcatctaataattctcagagcacagagggttggctttctagtcaggaacgtgataatgatggcacaaagaagaaaaatggaagtaccaacactctgggtggtggtgaacaagaatctggagtggcttcaatgtcaaatgaggaatatttgcacactgatacccatggtttgcagatatcagaaactgttgttgaacctcaagtaggtagatctgagggagacttgttgcctacaagttctacagatgatctacatatatcaggggggagaacaaagcaatctgatgcaggtgaattacgcaaaggaaatagcatagatgatagcactccaacttatctagatatcacgataggacatttacctgaacgcaaaactgcatccaggatcacaacagagggttctggtgagtttattactgggaaaggaatgttagctggcacatcttctgtgaccatcagtgcaatggaagctggtcgcagtgaagatggagctgattcgatatatgatccttcaggtgctataactccttatcatgattctcaaacgcaaacagtaatgccacatgagaatacctcaactggtatccttggaccaccagcgttacctgtgggagtttctacaaggtttgaagaaaagaatatcatgcaagaggccccagaaattattaaaacaggagggaaggatacagaattgaaaaggagaaattttcaaagaaataaacaagtattgaaggatacatttgatgaatgggaggaagcataccagcgggatgctgagcagagaaaagctgatgagttattcatgagagaagctttacttgaggcccagagagctgcagatatttgggaggtacccgttggtgcagtgttagtacagaatggcgaaattattgctcgtggttgtaatcttgtcgaagatcatagggattcaactgcgcatgctgaaattgtttgtataagagaagcttctaacaaactcaagacatggcgcctagcggacacaacgctttatgtgacattggaaccttgtgccatgtgtgctggtgctattcttcaagctagaatcgatactgtggtatggggtgccccaaacaagcttctgggagccgatggcagctgggttagattgtggatcgtcggttggtgaagaaaggcaacaaaccggtgatacagg

SEQ ID NO: 41590 - DNA, 3086 bp, Zea Mays
attttggattctgtgccaaaagaggggttaaaggaacgaattctgattcccgtggaccgacaaggagcagctgggaaacggagcgccacaagcccacaactctcgcgcaggcttctctcccatctccgcccttcccgaagcagcacggtgcaggccgcggacccgcggtttctccacagaatcccgctccacgcacgtcgcccccgtcgccggcgaggcggctgtgctgctgcgtactcccctggttccaactctgaaccggccaccctctcctgctccgcgacctcgagtaactttttgagtaccagtgatgcaaagggacacaagctctagcgatgtttctgcttctcatgtaggacgtgtaagacgtcgcaaacatccaactgaggctaccacagatgggaatagagctaatggacagccattgcttgtcaatgatcagaacaaatataaatcaatgcttacccgtacgtattctacagtatggatgattggaggctttgcctttattatttatatgggtcatctatatatctgggctatggtggttgtgattcaaatatacatggcaagagaacttttcaatttactcagaaaatccagtgaagagaaacaactgccagggttcagggtcctgaattggcacttctttttcacggcaatgctgtacacttatgggcgctttcttagtcgtcagctggtgaatacagtgacttcagatcacttgctttataaggtcgtcagtggcctaattaagtatcagatgtttatctgctatttcctttatattgcagggtttgtatggtttattttgactctcaagaaaaagacatacaagtatcagttcaaacagtatgcctggacacacatgatacttttaacagtttttgcacagtctgctttcactgtggcaaacatatttgaagggatattctggtttcttttgcctgcttcacttattgtgatcaacgatatttttgcttatttatttgggttctttcttgggagaacaccattaatcaagttgtctccaaagaaaacttgggaaggttttattggtgcatcagtgacaactatcatctctgcgtttctgttagcaaatgtaatgggccattcgcaatggttgacatgcccaagaaaggatctgttgactgggtggctttattgtgatcctggtccaatgtttaagccagagcattactcattgggagagtgggtgccgcattggcaagggaaagcagccaactcacaaggcagtatattctgcagcacaacaaggtcttgatctacacactgctcttctggacattcgtacgtaatcccgaagcctctccaaaaagctgaagaatatccaaaataatattgatatccatggctgccgctcgaaggaagatcacatcatcagcatagagttgagacctggtgctgcagtgcacgtggagcaaggggctgcagcagtccatcctgttcggccttattaatcaagaagcccaaagtatccaattatcgatgaccaagatgaacagaaaaggagacaaaggatctctctgtcggaggccacgacgatgaagaatagactgtcataggcaaactgatgtggtacattaaatataaaaaaatgtgatatatatatatatatatatatatatatatatatcacatttttttatatttaatgtaccacatcatcattggttttgcattatctttctagagtttctagatgtttgattttgtactctgtttgaatacatcgtttcttaacagttcccatggaaagaactagctattatgcctgtgcagtggcatgctttagccctaggtttatttgcatcaataatagcaccatttggaggattttttgcgagtggcttcaagagggcttttaaaattaaggattttggtgacagcatacctgggcatggtggaattactgacagaatggattgtcaaatggttatggcagtgtttgcatacatataccaccaatcattcattgcacctcagaacttctctgttgagataatcttggatcagattataagaaacctaacctatgaggagcaaaaatatgtatatgaacaacttggggaaatgttccgtgagaggcaattggctcattggctgaaagctgagagttagcgtgcttatgaaatgcatgatatgttgtgcatttagttcatgtatggcagcatgccagcatgttatgaatgtatacggagcccttgcccaaaccattgtatagaatggtagaatggagagaatgaatgggttgtaggtgctttattcactctctagtctccactgacgctgcctataattcactccccctgtcatcgtttctgcagtctgtgtaaaagggaacctggaaagttttattctttccacttcgtggtgctgggctcagatcaaatattcgaggattcacaatatatccccgatgttttaccacttcatgaaaattcaactaccccaactagccctatttacatctagacaacttcaagctaaatacatcctatcagttccttggatatggatccttattggataacagatagacgacatgtgtcatctagagagagacaatcactacaagcatggtaaaaccaacatttgaagcaatcattacaaggaaaatactcactttaactaacaatttgaagcaatcactgcaggaaaataatcgctttagtccaaacaatccatgcttgaccgatgaagatgatggagatgactgagaggtactcatgctaaataatacaaaatgtacttgcattcactatccaaggtaccgaaggatcgaaaaggctaccaaagccaattaaattctgttgttcaaaactgaaatttgagcagttagcttcaatggagatgaagaagtcgctcaaaacaaaagcacattaatcaactagtgatttcatgtttcaaaaatattcctagaatcacatgataccaacaaaatgaacgggtcacaaattggacgctgaaaagtctgaatcggcccaaaaccgtgtcgttatctagtgttgttttcaacggctcaaaatgcagttttcaaatgtcaaactgattcaaacggactc

SEQ ID NO: 41591 - DNA, 656 bp, Zea Mays
tgaatctgcaagataagcaccatgtgtacatattaaactacaaaaagatgaagctacaaatgaaatgttaaaatgaaacctttcccgtattatctctcataatgtcatttgccaccttcctcccaccctcatgacaaattttttaataaaaccttctcccatctttgatggctttggctgaaggttctttaatatcatcatcagacatattaaactcaggctcaacgatggccttaacatgatggcacctagctttcttaaatagcaaaattgttcctcgatctccaacacatgcatagaagtcatcgcggtcagttaaaacttcgtcaaaggcttctacttcgcctttgatccacttcatcgcttcaacaatgtcaccacgagtgcattttgtctcattggagaaggccccaatagtgataaacatgttctttagcttttcacagcattgggccgcggtggagaagcattcttccttagactcccaaagctcttcaataattttctccactctctccctttcagtttcagcaattgctcatttactttttataattcaaatctcattagcttcttcaattttctcctttaacttagccatctcaactttatgtggttcaccttacgcttctatctgtgctttgaggttggcgata

SEQ ID NO: 41592 - DNA, 1022 bp, Zea Mays
caaggcctcacccttcccctcctctcctctccacctcatccgtatctccctccctcttctcggcggccgtggcggcgccggaggactatgcgcggcctccaccgctgcccgcaccagctcctcctggtctctccaccgccgcggtccgcccccgcgtgccgccagtcggccaccgcctcatcgcggggcctcaggagctccctcgccgtcttctccgcacccggggctcgggtagcggcggcggcgcgcgagcagaagtggggccacgtggagggtgatgaagacggtggagaggagggcctaggggaggcgctccacaggacgcgggagctcgtggagtgcgccatgttcgcggccgtcgctgggctggcctacttcctcagcaattccctcgccattgagaattatttcagttgctttttcccattgccgatagtcatttcctcattaagatggggactagaagccagcaggaaaaccgtggtggctactgttttactgctattcacattatctggccctgtaaaagcgtcaacttatctgctaatgcatggagtagttggtctcatcatgggtactgtttggagattggagaccaactggattgtctccatcatcctctgctccattcttctacttaattgtgggttcttcgtcttcctcctgcatgtgatgtatacggtattcctggcgaagcttgggataaagccgtcgctgaggtcaccaagatggctggacagagtgatgtgaaaattttaggagtagggcatcgtacgtagtgactgttcttcctgttctgctgttttagccttgctgtttgtcgcccctacctatactgggacctgtaaccatggggtgcatctgtgcatgcaaacgcgacaagcaaaattcgggattatcaatcaatcatctgtgctactcgtgctctgttgatgatcttcttgttaaggcaaatgcgagaggaagttctggagtgccaataatctacggtgagcctgaaactaatactggcaccgttccat

SEQ ID NO: 41593 - DNA, 1390 bp, Zea Mays
agcaccaaccgccatccccgcccgccatctgcgcgcgtctggccgtctctctcgcccccgttctcctctctgctatccgcgcccaaatctcaccgtatgtgcgcgtctccatctgcgcgcatctccccagatccactctactcgctccaccacgccgaccccgacccgacaccggcaaccacacggatccactgtgctctccatggccatgaaagggaacgatcttgcgccgacctcaaccaggctctccatggaaggtccgcgtggttccctctcctgcatcccatgatccggatgccgccacaccatggtcgatggtcggggccgtcgaatccggatgcccgcgctctgcgtcgcgtggatcttctagatcacgcgggagctcgaccacaagtccgacggcgagaccatgaagtggctgctagtacatgcttgtcatgctctcccctccacaccccacctcgttagaggcagatcgtgcgggtacagcgccttggctgccgagatcaatgggggcatcctcgccgtcggcaggcccaggcagcactgagttgtgctctgctgcggccgctacttccagatggatggatttgatcaaatagtgaatgtgaaggttgtaatggcaactaatagggcagatactctagatcctgctttgctgtgaccaggtagacttgacaggaaagttgagttcccttgtcccgattggcggcaaaagaggcttgtgttccaagtctatactgctaagatggatttgagtgatgaggctgatttggaagattatgtttgcagaccggataagatcagtgctactgatgttgagttggtttcatggcacataccaagatttttatgcatttgttgttttctaagtattgtattgctagggtacttatgtcctgtgctggccaaagctgtcaaaaccatgagaaaggcagagaaggtgcttcttatagcaaagccacattaccaacagttggagaggaaggtgttgtgatgagcatcatcttgttctacatcatcactaatgaactggttgaacttttggttgctttggtgaatggaggcgacagcatgcagattgccatgtccggatgttatgcgggacctatgtttaatacacttgctggtttgggtacattgttgctagattgatctgggctcttgttatgctgccgagaggtgacatgtagcctaacaagatacttggagttggcctcattgctctttactcaaattttctttttattagagtaagcaatgttggtggaatattgctactacctagagttagataattatttgcttgtaaagttgggatttacatcaaagtacttgcccatggcttccatttttataaatgaaatgaagttatacagtgttgctctgt

SEQ ID NO: 41594 - DNA, 2187 bp, Zea Mays
atggccgccgtgcatggccgggtgctgctgctgctgctctccaccctaacgttcctcgcagttcacgcggtgacagcagcggctgccaccgcgacaagctgcgcgccgaggacctgcggcaacctgaccatcgcctacccgttctggctcccggtcccggaccagcaggcttcctcctcgtcgttgccgccgtgcggcccgagcgcgttccaggtggactgccgcggcgggcgcgcgtcgctggcgcgctcgttccgcggcgcctacaagatcctccgcgtgtcctacgcggaccgcaccgtggtggtggccaacgacaacgtgcagaccgacgccagcggctgccccgtgccgcgcatcgacgtgtccgccagcctcagcctcgcgccgttcacggccagcggcgccaacgcgcagctcgtcttcctcttcaactgcagcaagccgccgccggccgggttcgtcaacgtgacgtgcccgggggcgcaggccgtggtgcggctcgacccgaggtacaacaccaccgacgcgagggcggtggccggggcctgcgactactcggtcgtgccggtgctggtgtcccccggcggcggcgcgagcgccggggactacccgcggctgctgaggggcgggtacctgctggagtggcgggcgtcgcctgggaactgcacggcgtgcaatgccagcggcggccagtgcgggtacgactccgacacggatgcgttcgcctgcctctgcgacgacgggtcttcacatccggcaagatgcggcgcaaagaagtccgaccggaaggtgatcctgatagtgtctgtgtcgatcgcattcggcctgctgctggcgcttctcgtcctaatcctcaagttccatcgacaaataacacgcagtttcagcttcctgctggacagaagcagcagcggagacaccgcggacgtggaaaaactgctgcagaagtacgggtcactcgctcccaagcgctacaggtacgccgagctgaagaggataaccaagtccttccagcgcaagctcggggaaggcggctacggggcggtgtacagcggcgtcctggccgccggcgccggcggcacccgcgcgcgcgaggtcgccgtcaaggtcctgcaccacgcccgccccaacggcgaggagttcctgaacgaggtggtcagcatcggccggacgtcgcacgtgaacatcgtcacgctcctgggcttctgcctcgagggctccaagcgcgcgctggtgtacgagtacatgcccaacggctcgctggacaggtacatccgctccgagtccgacccggccggcacggcggcgctggggtgggaggcgctgcaggagatcgcggcgggcatcgcgcgggggctcgagtacctgcacgaggggtgcaacacgcggatcatccacttcgacatcaagccccagaacgtgctcctggacgccgacttccgccccaagatcgccgacttcgggatggccaagctgtgcaacccaaaggagagcatcctgtcgatggcggacgcgcggggcaccatcggcttcatcgcgcctgaggtcttctcccgcggcttcggggtcatctccaccaagtccgacgtgtacagctacgggatgctgctgctggagatggtcggcgggaggagcaacgccaaggcctgcgccgccgacaagtccagcggcggcgagctcttcttcccgctctgggtgtacgaccacctgctgcttgaggacggcgtcggcgtgcttcggggcggtggcggtggcggcgcgggaggctccggagaagcagcggcaggcgaggagatcgcgaggaagatggcgctcatcgggctctggtgcatccagaccgtgcccgccagcaggccgtccatgagcagggtgctggagatgctggagaggagcgtccacgacctggccataccgccccgcccgtaccacacttctccgtccaactccccgtcgccgtcgcacccgtcgagctatccgtcttccacctcggatttcacccaacgctctaggttgcgcacaccggagagcacagggtgacaagggattgtagaagaaacgaagaatcaagataggttggcaacgttggattgtgcagtttgggtagaggagcaaatatggagcatgaacagaatgtaccacaaacattttgtgcaggttaacgatttaacatactagaacgactga

SEQ ID NO: 41595 - DNA, 251 bp, Zea Mays
cgaggacctccctatacttgcactccaccccgcttgtccttttggaaaaggattaactcacactagctttcttaattagtcagccaagggcgtcccattccacccttgtggtagcacaagttaagctccatgttccaattaacacagtagtcttatcatcaacaataattaaataaactataatagtggaacatgatcatagtttagtataacattaatcctaaaaccagatagagcaatagcaagtctac

SEQ ID NO: 41596 - DNA, 334 bp, Zea Mays
gtcgacatgccctcgtcctgctcgagggcatagtaccatgtctaggcggctagtgaggtggtacgacaccaacctggttcggtctgaggtcggggtgtgttggccccggaagaactgctcacattggttcatccaattgagcaggtcgacggtgccatcgtaatgtttgtagaaacggggagtatggggcccaaggctcggtccttgtcctagcggaggtggcgcagtgtcttgtgacatggccccctcatacggaacccgaccacccttgaggtgtcgtcatcgtatattgcggcgcacccatcgacgccagcgcatatgatggaattgggga

SEQ ID NO: 41597 - DNA, 317 bp, Zea Mays
ttttagctttttatctttcaaatatggaggagcacgacaatgatggaaatcgtggaaacggtggaaaccctggctaataatgctctactagtacaatgcacatatgttgccatgacacatcaattatatttgatggtatggtgcaacgattatacgatacacaatggtctaatggcaagccagtgtgatggaccctcccacaaaaaataaagttaaaattaaagtggaccctcaccaaaaaaatataaattttaaattaaagtggacatgatccatatactagatattaaattgtagatagtgcactttatcttagc

SEQ ID NO: 41598 - DNA, 2036 bp, Zea Mays
gtgcacagcccaagcctagccttgggtcagaaacaaatgcgacacagaccacgcgcatagctagctagatccaccgtaccgtcgcataagctaggccaggcctctgatccatcggccgatcaaagataaggagaccagcgaaggatgggtgccgactcgccgccgtcgtcgtcgtcaacggcgccggtggccggcgttggcgcgaagaacacggtgaaacagtaccaccggatcgtggttggcttcctcctcggcttcttcgtcgtcctcgtgctctacaccactctttcttcccagttcggttcacgaactgccattgttctttcttggtacacgcatgcaggtgtcctgcagtctttgtctgccgtgcgtactgatcaggctaccggggctgccccaccgttgccgtcgtcgaatacgccgagtaatttggcacaagaggaagatggcgggcacaaaaatgataaacctaacaagacggaggaggaacatatccaagacgatgctcatcgaatcgggaagaacaatcaatctgaagccaaattagagaagacaggtcaaccagcagcgaacgatgcaagtgacaggatggaggaagagcttatccggcaagaaatcgatcaaggcagcaacaagaacgataccatcatggagcctgcagctacggcgccacgcaagcctatctgcgacctttccgaccccaggtacgacatctgcgagatctccggcgacgcacggaccatgggagccaaccgcaccgttctgtacgtgccaccggtcggcgagctcggctcggacggccaggaatggagcatccgtgaccagtctcgcaagcacctcgagttcgtgaacaaggtcaccgtcaagtcgctgaacgcctcccagtcgctggcggcgccagagtgcacctcccggcacgccgtccgcgcgctggtgttcgcgatgaacgggctgacgtccaacccgtggcacgacttcagcgacgtgctcatcccgctcttcatcaccacgcgtgccttggagggcgaggtgcagttcctcgtctccgatctccagccgtggttcgtggacaagtacaggctcgtcctcaagaacctctcccgctacgacatcatcgacttcaaccaggacggcggcgtccggtgctacccgcacgtcaccgtcggcctccgcagccaccgcgacctgggcatcgaccctgcgcgcgccccgcggaactacaccatgctcgacttccgcctctacatccgcgagatctaccgcctgccgtccgcaggcgtcagcatcccatacaaggaggcgaacagcaacgctgcggcagctgcgcccggcgccccagctgagcagctgcagcggaagccacgactgatgcttatcaaccgtggccgcacgaggaagttcgtcaacttcccggagatcgtcggagcggtccagaaggctgggttcgaggtcatcccgatcgagccgcgtagagacctcagcgtggaggacttcgcccggaccgtcgactcgtgcgacgtgctcatgggcgcgcacggggccggcctcaccaacttcttcttcctccgtaccaacgcggtgatgctgcaggtggtgccgtgggggcacatggagcacccttccatggcgttctacggcgggccggccaaggagatgaggctgcgagatgtcgagtacagcatagcggacgtggagagcacgctctacgacaagtacggcaaggacaacccggtggttagcgacccagagtccatacacaagcaagggtggcagcttgggatgaggtattactggatagagcaggacatcaggctcaacgtcacaaggtttgctcccacgctgcagaaggtgcttcagatgatcagggaatagaggaaaatgagatcaatggaacatatgttacattacatttattattcatgcttagagatgaataggattaatcttgtttttttacatttggtatattggcctatacatggaacaattatccatatgcgtcaatcttaatccgtggtttctgttggatttaaatc

SEQ ID NO: 41599 - DNA, 1746 bp, Zea Mays
gagcgaagggttttctagggttttggtacgaaaccccccttcgtcccgtcgcatttcgttcaaaatcgcgcggtcaaatccgagctcggggccatcgccgtcgccgcgcctcccatcccgcgaagatgagctacgcggcgtacaagatgatgcatttgcccaccggaatcgaccattgcgctgccggcttcatcacccactcccccgccgacgctgccgccttctccacgcccgcgcccgcgcccaccgccgccgctggacccgacggcgatattgactccactgcggctagggcaccccggcgagtgggtcctacccccaacctggttgtgtcggcggctaacgtgctcgaggtgtatgccgtgagggccgaggtcgcgactggggccgaggatgcgggtaattcttcgtctaccggcaccatcctggatggtatctccggggctcgactggaacttgtgtgccattacagagaataggcgagactccattgcagttacgtttaacgatgcaaaaataacatgtctggagtttgatgacagcatcaatggcctgcggacaagctcaatgcattgttttgaaggccctgaatggttccatctgaaaaggggcagggaatcatttgcctggggtcctatcataaaaggggatcctcaaggcagatgtggtgctgtacttgtttatggattacagataataattttgaaagcagctcaggttgggcagagcttagtaggagaggatgaacctacacgcgtgttgagttccactgctgttcggattgaatcttcgtatgtgattgatttacgtgatctagaaatgaatcacatcaaagactttacatttgtgcatggttatattgagcctgtgttggtcatacttcatgagcgagagcctacatgggctgggcgtatctcatcgaagagccaaacatgcatgctatctgcgtttagtataagcatgggtttaaagcaacatccgatgatatggtctgctgctaaacttccacatgatgcatatcaacttcttgcagtgccccctcctataagtggcattcttgtgatctgtgcaaattcaatccattatcatagtcagtccacttcttgttcacttgccttgaacagtttctcatcacagcctgacggaagcccagagattcttaaaacaagttttcatgttgagcttgatgtagctaaagcaacatggttatcccatgacattgtgatgttttcatcaaagaatggagaaatactattactaacagtggtttatgatgggcgagctgtgcaaagattagatcttatgaaatccaaagcatctgttcttagttcgggtgctacaactcttggaagttcgttcatatttcttggcagtcgtcttgcagatagccttcttgtgcaattttcatgtggcatgccaacatcggttctgcctgatctaacagatgagcctgctgatattgaaagtgatctgcctttctcaaagcgcctaaagaggattccctctgatgttctacaagatgttactagtgttgaggaactttcttttcataataaggcagtgccaaatattgtagattcagcagagaagatctcatttgttgtgagagatgctctgatcaatgttggtcctctgaaagattttgcatatggtttaagaactaattctgatcccaacgcagcaggcattgcgaagcaaagcaattatgagctgtttctgaaatcaagggaagctattgaaaaataa

SEQ ID NO: 41600 - DNA, 4078 bp, Zea Mays
gtaggtagttgctgctgtgctgttcccccccgtctgtccctgagaggcccgcggcgtctccgcttcgcctcaccacccaccacctcctcctcgccggtacccctcgccggagccagcgagcttccggcgaagaaatccggcgggcacaccacacgggggcggagcaggggggaaggggtccggcgccggaatgggggcaagcggccgggtgctcaacgccgtcgtcgctggtgtcgcgtcgctctagggttaggtaggtgtccgtagctttctccttcgctccccctccctcccctttgccgcccggcgtcgcattggggtcccgtgccgaccgccaggccgcgtgatccacccgtgctcgagctcggagaggctcccggttgcgtggcatggggccatctcttccgcctgctgccgctgactgggaattcggcaccatttcttcgctctgaggagtagtaggtggcagcagtcgccgatctggatgccatctcaagtcatggatccgaggcgccacctctcccagttcagcaatccaaccgtggctgcgtcctccttctctgaggagcagtttcgccttcccacagagaggcaggtcggattttggaagcaggagtcgctgcatcacattggaagcaagtcagttgcatcttctccaattgaaaagccccaacccattgggacaaaaactgtgggtcgggtagaaccacaaccatacaagctgagagaccagaagactgcatttagccttgagcacaagacttttggtcaagagagacatgttaacctaccaccatctctgtggagagctgatcaagaccctaacctccaatctgatccatctttatttcccgatggaaggaggactagtccaaatgaggcctacaacgagaatgggcttttctcaagctccctatcagaaatttttgacagaaaattgggactgagatccatggatgtgcgtctacgccagccagttcaaaaggttgatctaactcatgtagatgatgagccctttgagttaacagaggaaatcgaggcgcaaataataggaaacatacttcctgatgatgatgacctactatcagatgttcttgatgttgggtacacagcccatgctaacatgggtgatgatgtcgatgatgatatattctacactggaggcgggatggaactggaaaccgatgaaaataaaaaaaatacagaacttaatggagctaatgatggtcttgggttgctaaatggcacaatgaatggtgaacatccatatggggaacacccttcaagaactctttttgtccgaaacattaatagcagcgttgaggattctgaattaaaactcctatttgaaaattatggagaaatcagcaacctttacactgcctgcaaacatcgtggttttgtgatgatatcttactatgacataagatcagcatggaatgccatgagggcacttcaaaacaagccactcagacgtagaaaacttgacatacattactccattccgaagattcgcgatgcaccgcaaaagggccatcacaaaattatagaattttatgatgtcagagcagccgaaggtgcagctcgtgctttaaacaggagtgatcttgctggcaagaaaataaaactggagactggccgtctgagtggtgctagacgttcaacacagcacatgtccaaggagttggggcaggaagaatttggtgtatgcaaactgggcagtccaagcacaaatagcccttcattgccttcattgggttcatctaatatagcagcaatgacatcttgtggacgtgaaaatgggagtatgcatggtttgcattctggacttctcacatcaatgagcccgttcagagaggcttcatttctgggtctatcatctaccctaccacagagcctgtcctctcccattggaattgcttctgctgcaactcatagtaaccaggctccccttggtgagctcagccactctcttagtcggatgaatgggcatgtgaattatggttttcaaggcttgggtgctattcatccccattctcttcctgatgttcacaatggagcaaataatggcaccccttacaatctgaacaccatcacacctgttggtgtcaataagaactcaagaacagctgaagcagttgacagcagacatcttcataaagtgggttctggcaatctcaatgggcactcatttgatcgtgccggtgaaggagccatgggattttcaagaagtggaagcggtcataactgtggtcaccagttaatgtggaataattcaaataacttccacggtcatcccaattctcctgtgctgtggcaaaatcccggatcatttgtaaataatgtaccgtctcgccccccagcacaaatgcatggagttccaagagcaccatcacacatgattgagaatgttcttccaatgcatcatcatcatgtgggctctgcgccagcaatcaatccgtcactttgggacaggcggcatggctatgcaggggacttgacagaagcatcaagttttcatcctggcagtgttgggagcatgggatttcctggtagccctcagcttcatggtctggagctaaatagcatattttctcacactggtgggagtcgcatggatccaactgtgtcttcagctcagatcagcgcaccatctcaacagagaggtcctatgttccatggaaggaatcctatggtcccccttccttcatttgattcacctggtgagcggatgagaagccggagaaatgattcaggtgttaaccagtctgataataagcggcagtatgagcttgatgttgaccgcataatgcggggggaagactcacgaactacactgatgataaagaatatcccaaataagtatacctccaagatgctcttggctgctattgatgaaagtcataagggcacttatgattttatttacttgccaattgattttaagaataaatgtaatgtcggctatgctttcatcaacatgaccaatcctcagcatatcattccgttttatcagagttttaatggtaaaaagtgggagaagtttaacagtgagaaggtggcatcacttgcttatgccagaatccaagggaaaacagccctgattgctcatttccagaactctagtttgatgaatgaggacaaacgctgccgccccatacttttccactcagatggtcctaatgcaggagatcaggaacctttccccatgggttcaaacatccgagccaggtctgggagatcccggacttcttcgggtgaagaaaatcaccatgacatccagacagtcttgaccaacggtgacacttcttccaatggagctgacaattcaggtcccaccaaggatactgagtagctgaactgcagcttgctgcatcgctaaccacaaaggcccaaacttaggctgctgcagaagttttgtctctggcgggaagctatatgcaagagggtggtaccggttcgttccccagaatctatgtgcttgttaacctgaaggccgagaaaggcgaaaaggcgcagggagagcctccagattttggtcgctgtaagaattaaccccatgttgtacagctggtcccagtaatttgtgctgaggggagagtgaaggagtcatttgatcagtttttagtggtggtgtgtggagaggaagagtcttgcctgcttttcctttttgaactttcttttgtgccttcacctgtgttacattttgagtcgagggctcctcttaaattgtgtgcagaggggctcgattttgttaccccagaacaaggcgcatgtgcgtcggcgtcgtcttctgccaccgtatctatcgaccttatgtacatcttcatctatatatagtatgagttttgatgtcatctatttcttggatgtctcacaaggttatttatttgtatctacgtgtctgttatgcttgtggtgtgtaaagcctctgtgaatcttatgcttggttgcttactatgtgagcatgaatgcaagctgtgagcgtgtaatccttgttcaaatccagagtataccaacaatagctaattgtttgtacattgctatggtttctatatgtagatcttgcttaaatggg

SEQ ID NO: 41601 - DNA, 96 bp, Zea Mays
ttcaactttatcttactttaaaataaaggtaagtttatgtaattgcttccacattctcgtaactccgatgcttgtaatgtctgcgtgacgggtgaa

SEQ ID NO: 41602 - DNA, 2396 bp, Zea Mays
cactccgtcagtctcccctccggcctcacgccgcgctcgcggtgctgcctcccgggctcccgttccagcattccaggctcgcatcgcacggcctggccccgcccgctccgacccttctcggcgacactcctcgtaggctcgtactggcacgtccccgctctgtcttctgcccaccaggcactagcgggtgcgggtccacgcttccaagggttccaaactctcggcggcgcaagcaatggcggcgcggggccgggagcactggtagtttcgcatatcgcggcggcttgttgccacctcgccatcgcagattatggggatcaacggcgaggagtgggaggagacggtactgggcgacggcgttgggaggcggaagggtggtgctgaggcttccggtttggtcgcatcctcctcctttgctgaggggatgggggaattcgtgctgaggtctatggacgccaggttctccggatcggtcgacgacgatgaatatgtctcgtctcggcagccagtatttggccatagtaaatcgacagctactacttctggtaccattaaagggcaagataacgtttttgtaaggtcatactctgataggttgctgaagtgtgacctcactttggatatgctatcagaaaatgagaagataaagataaccgagagattggtaaagatccagaatgatggtacagtggaggtagatgtgacgcgcagtgctcttgttgcctcagaactctcggagattgatgcttttggttgtgtaccacacgatattgaagaagttacacctggaatcaccaaatcagtcccaaagctgaagattgctatacttgtagttggaacccgaggggatgtacagccttttatagcattagctaaacgactgcaggaattcggtcattatgttagattggcaactcatgtcaattttcgtacttttgtgaagtcagctggcattgatttttacccattgggtggtgatcctcgggttatggctcagtatatgacaaaaaacaaagggtttttcctggcggcaccgacagagattgccattcaaagaaagcagcttaaggaaatcatcttctcacttctacctgcatgcacagaacctgatttggatactggaacacctttcagagctcaggtcatctacacatagcagaagcacttggagcacctctgcatatcttcttcacttttccatggacgccaactaatgaattcccacatccattggcacgaatgcctcaaagtgcaacttataggctatcgtatcttattctggatttaatagtttggtggggctccaggggattcataaatgatttcaggaagaaattaaatttgccccctattgcttacttcagcacataccatggatctatatcacacttacctactggatacatgtggagcccgcaacttatgccaaagccaaaagattggggtcctctagtggatgttgtgggatattgcttcttaaatcttggaacaaagtatcaaccgccaccacaactgtcacagtggcttcaacaggggcccaagccaatatacattggttttggtagcatgcctcttgatgatgagaaaaaagtcactgctatcattttagatgcacttagagaaacaggacaaaggggaatcattagccgtggttggggagctcttggaagtttttcagaagttccagttgatgtcttcatcttggaggattgccctcacgattggctcttccctcggtgtgctgcagtggtgcatcatggtggagcaggtactacagcagcagggctgatagctgggtgtcctactactgtagtgccgttttttggagaccagttcttctggggcgagagagttcatgcacgaggagtgggtcctgcacctatatctatcgcagaacttactgtagaagcactatcaaatgcaataatattcatgcttgatccagaggtaaaatcacgaacaatggaactggcgatagcaataggcaatgaggatggtgtggcagcagctgtagatgcatttcatcgtcacctgccttcagaattgccgctgtcgccgcccgcacatgtggaggaagaacgcacagacttcttccaatggttttctcgaggcctggagaagtgttgtttcccattcagtttttaggtacggcagtccgtacgctaggtatatgtatgatttattcatttatgagttgaaaaggtatatcacagtaattttctaaaattggaataaatgctggtataagccaatggtgaggatgcaataaaaaagatcgacgcaattgtaaatgtttgggcagctacaattgtattcagaatttgctggtaggcctgaaatttgtgccccgatgtgccttccagtatgagtgtagtagctacagaactgagcgatca

SEQ ID NO: 41603 - DNA, 4591 bp, Zea Mays
ccagttcccacctcgcgccccaaatccgtatccaccgccaccgccaccgcccaccaccccgccgccaacgctgacgccgcctcctccggctgcacccgtcacgccaggtgcttggacttcgggaatctgcaggttcagtagagtagacaagtgtttgagcaaggactggatagaggaatgcgctgcttgttcctagagtagcacccgcaagatccaagtcttcccgcgatggaaagcggcgccatggtactcggtgttgttcgtcccgaggagtcccctgaccgcaacggcggtgggccacgggacgatttgggcccatcgcagatgcaggtcgatggtcccgttgttctcaaccaatccgctgagctcgtctcggatgattcgatggccgtcgatgacgtcccagttcaacaaccatcaggccagccggtggaggcaacacaacagtctcctgcgacgctgattgatactatcatggaggtgcagaagcagctgaagcggaagagggcttctaatagcccagtgattgatgccgccgataaggacgctcttgttgctgggtgccggcaggagctcgaggggctcttccagtattacaaggaggtttctgaccgcaagatgcagcttgacggcgggaacctgtccttcaacgggatggttggctgtttgcttgaggagagcagtctcgggctgactaggttggtggacgaaatatatcaacagctgaagggattggagggtgtgtctgtggcttcagtccgcagctctgtgctgctcgctggccagaggatgatgtacgggaattcttcactggacgctgatgtgttagaagatgaatcggagtcggctctttggtgctgggagataagagatctgcgattgttgcctgtgaaagtacgcagcattctgagtacacggagatctgtcagaaagaaaatccatgagagaatcactgccatatattcgactttgtcggttcttgaaaattcaggagcttacatccaagtaaatgatctaaaaaaagcatcattgaaattaaacaaatcactgaacctggaagggatcagatcaatggtggaaagagcgacacaaaagaacacagaacggggtgtgaaagatgctgtatcagcagttaaggaattgatgcaagagacagataaaaatgaccaaaatgttagaaggcttgaggatactagtgtctctgagccgcagaatgggaactcacttggtaatgagaaagagattcagaaagcacaaaaacaagtggagaaggaaataaagcgccaggagaaagaagaagctcagatgagaaaacttcaaaagaaacagcaagaagaggccctaagagaacagaagagacatgaaaaggaggaggctgaagccaagaagcaacaaaagaagcaggaagatgaagctctgaaagaacagaagagacgtgaaaaggaggaggctgaagctaagaaacaacaaaagaagcaggaagaggaagttctgaaagaacagaagcgtcgtgaaaaggaagaagctgaaatgaagaaacaacagaaaaaacagcaagatgaagctgagaaagaacagaagcgccttgagaaggaagctgcacaactcaagaagcaactggtcattcaaaaacaagcttctatgatggaacgctttttcaaaagtaagaaagacaatggaaaacatcaaaaacctggagagaacaactcagctgaagatccatgcaatgacaacaaagagacaataccagcaaccacatcaaaaattgattcttcattgtatcaacaagagggatgggttttagatgatcttcggaggttgcaggtcactggttggaagaagctatctagctacaataggtcctccagatggggtacaagatgcaagcccaagatggaggcatttaaagagctgaagcttcagaaatcctcagatgatatggttgatgaaatactttccactccaaatgaagatggtggccgcaatccaattcaggagaacgaacatgataagcttgaaagtgatattgacatgatacaggctagtgaaatgcaatgccatggtgctagtaaccctaaacctctgcaaacgagattaattagaatgaagcttctgcaatttgacaaaagtaacaggccagcatattatggatcctggaggaagaaaagtccaaggtgtccatttaagatggatcctgatcttgactacgaggttgatagtgatgatgaatgggaagaggaggatcctggtgagagtctttctgactgtgagaaggataatgatgaatttatggaggaagattccaaaattacagatgaagaggatgaagatagctttgttgtgcctgatggctatctctcagacaacgaggggatacaaattgaaagcctattggacgataaagaagaggaggccaatagctccccaaatggtcagtgtacagaagttgaagagttcaggtctctgctccgccaacaaagagtcctgaacactttgactgagcaagctctccggaagagccaacctcttattatatgcaacctaaatcacgaaaaagctgaattactgactgctgaagacctcaagggaacggaaaagattgagcagctatgcttgcaagttctttcaatgcgcatctgtccaggaggtgcaattgttgatgtgcctctaactgacagctcatctgcaactgttgaggaaattaaccaacccaatgtgaagaatggctctcctgaggctgcatctgctataccagaaacagacctgccagaatttgtacaggtgataagatcatgtcgagatggtatccacaaggtggtggaattactgcagcacaagtttccaaatgttccaaagactcaactgaatcgtaaagtgagggagatatctgacttcattgacaatcattggaaggtaaagaaagagattcttgacaagctagggttggattcgtcaccagtgaaacccaagaagaataaaagcatagctatgtacttctcgaagagatgtttacctccggaagaggctgtcaatgctctggctgcttctcctgagttgcggttgaaatctagaaatggtggccgcgaagctccccagatcaatctgttcccctcagagcagtaaagtttctaataaaggtcccctgaaagttggattaggggtcaatgaagctacgaacccagatgagcagaaagctcagctatccatgtaaaggctaggaagtgcaactcggttttgcatcgtcaccaatggaagatggtcttagtgcaacatgggtttttgtcaacatctggattatgttttcagtgctggacatgtaattttagcctgaaagtaggtttttattcaattatttggccttgatgtgattaacatgtatgtgtcctgttgttagcgcaaggaattgctacaaagttggccatctgccgcttgtgtgttgttaacattattctgattctggcaaggcaaataagcaaacatgtcttgtgactgctcaattgacagctttgggcagaaattaatttttgcaacctgtttgcatcaaatctgatgaatgcacatgttaatagtagcaaaggtaacaaaagcaataatatatatttgctttggtatttatttattttggttgaacagtcataacagtacaccgtagtacaaaagaatgacagcaatagtacaataatagaatagacatcaaagaatctcattttgaaggagcccaggccagcagtggatgggatcagacatggtacgattgccagttcttggcctggaggtcgtcgtcgtcgtcatcctcgtcgaggcggagggagaaggcaagcgcgagcgcggcccactcgaggacgaagatggcggtgccgagccctccgaccatcttgaggatgacggcgccgtcctcgtcgcggacgtaggactggagctcggcgaggaagtcggaggtgcgggtgaacgcgagcagcgcgatggcgccctggaagatggcggtgagcgcggctcccgcggtgtgcgcgttgtgccactgcgcgggcgtggcgggcgccgtgaaggagcccgagcagccggccgcggagaagacggcggtgagggcgtggaggaagagcaggagcaggccgcacggggacggcagcaggcgcagcgacagcgtgaggaagatgcagctggaggaggcgcccaggaggacgtagttgcagaggaggaacgccttgcgtgtgtgcgacttggccgccatcgtcgccgccgccgtactcgctcggaagctgttgggttgggtcttggaagcctgccgaggaagcgggatgccgctggcttgcggggctttgcgggcgaggggtcgaggtcgagagagggaggtttggagtggggtgggagcggcggagtggcgggtacttatgcggggtggcgcggaggatttggccgttgaggctgggggcgcggcggtggcgcggcggtggtgaggactgaggagtgaccgagtgagtccgacagggcaacgggcaacggctagtctggtggtggggctcgtgggggcccgcccgctcgctcgcatgagaattgagaagagagacgttgctgcatgaagggagtagttgac

SEQ ID NO: 41604 - DNA, 2142 bp, Zea Mays
gagtggcgaatcaactagggacgcgcgttgccgccacgcacctcccttccttcacttgcctgccccccacttctccgatctccgccccatcggacttcccaagggtcggctaggtctaggtggtctccaagctttccgcctttccacgccaccattctccccacccgcgcgcctcagcaatccccatccagcatcgccgtttcgccgcggcaccgacacctcgccggccatgggcgcgtcctcctcgactggcaacccgtccccagaggcgcacgagcagcgggagcaggagactctcgcctccgccgccctctccctcccgctcctccgcgccgccttctcccgctccgccgccaacgcgctgccggatgccctcgcgccgccgcccgcctcctttcgtctgcccggatccccggcgccgccgccgccgcacttccacggcatcctcggggggctcggccccgccatcgcctcccaattcttcggccacggagctgccgcggtgacggacgggggcgccgggtgggtccagttcctcagggggttcaaccgctgctgcgcgcgcgtgacggcctcccgctcgctcgcactgctcctccgcgtgtacgctgccgcctgcgccggcgcgggggcaccctgcggcgtccagctccagccggacgagggcggtggtgacgaggatgggaaggtcgtgggggagctcgcgccggaggagatcgcagtgttcctctgggtgtgctgggtcatggcgtggagcgcttcggcctcgagggtggtcagtgacggaggagataaatcggagcccgtcacggtgctcctcccggacgtgacgcacctggtgctgtcggcgctcgtctcggcgggcgtcgtcacggatgatgcaggcgtttggggctgggacgtctccagcggtgggaagggggtgaaggtccaggagttcatgtcgtgggtgctgtccacgcctttcggccttgggaactgcctctcgcggtatgtgcgggacaaattccggtccctggctgctgactctgtggaggagagctctgtttcaactgttagcacaacctttgacacttctgatgtttatctgctaacacgggggagagcatgggcaattgccctcagcctaagaaacaagttgagtgaaaagctgctgtcagcttctgttattggaatggacacagaagacctcctttataggtcatctgttcatggaaaaggactgagccggttctggtcttgtgttgaggggtacaaagggccaatgctgattctactttcagcattctcaaaaggtggtggtgagaatgttgattctgatcgaagatgggtgattggtgtattgaccgaggagggatttgagaacaaagataccttttatggtagctctgggttcctttgtgccgcacatccaatattccgcatgctaccaccatctggcaaggaaaagaacttcatgtactgccacctacatcctcagataagagcttatgaagcgaatccaaagcccgttggcttagcatttggtggaacaattggaaatgagaggatctttcttgatgaagacttctcgggagttttaggttatttgcctgttgaggcttcagtgcttgatgttgaggtatgggggctgggtggagaagcaacgaaacgacagcagaatatgtacaagaagagggaggacatcttctcagagcagcgaagaaaggttgatctcaaaacttttgctagctgggaagactctccagagaagatgatgatggacatgatgtcggacccaaacacggttcgacgggaagaccggtgattttggtttgcagcctccggggatgtacagacgacagcgtttgttgcacataggagtattttgcttgcgcatttggctgggtcacacgctttatttaggttgaagtactaaaagaagatttgtacagaacgtaattcccaataaatgaaatggagattctggacaggtctatggtgtccaagcttgctgacatgtcttacggtaccccttttgctggggaggttcatgttgatgttggtgttgtgtggcacaatggctgccagatactgtaattgttatggctgaacgaactgatgaaacaatgctggatttttcatgagcggagcttaattata

SEQ ID NO: 41605 - DNA, 2264 bp, Zea Mays
ggacatgaagagttaagttgatgttcgccttcccctgtcagcttcccgttaccacaatcctagtcttgtggtggtgtgctgtgctgtcgtctctctccgatcttcccgattcttcttaccccttcttcgtcaagccgcagccgtcgcctcccttgctcaccaccatggtgtcggacgccgccgccgccaagaggggagccaaggtcccgaccccttcatcttcgtcctctgccgacgctaaatccatcggtgccgtggccgcgctcaagctctccgatcgcacctgcaccggcgtcctcgcctcccacccgctctccagagatatccacatagagtctctttcattaacgtttcatggccatgacctcattgtagattctgagttggagctcaactatgggaggctgcagagaactccctatacctgaacacatggacatataccatctcacccatgagatcgaggcttcagacatgtctgcactacaagctgttgtctgttgtgatgaagaaagaatgaagttggaaaaggaagcagagattttggctgcacaggatgacggtggtggtgatgctttggatcgtgtatatgagcgtctagaagctattgatgcatcaactgctgaaaagcgtgctgctgagatattatatggtttaggttttaacaagcaaatgcaagctaagaaaactcgagatttttctggtggttggcgtatgaggattgctttggctagagcactcttcatgaatccaacaatccttttgcttgatgagcctacgaatcatcttgatcttgaggcatgtgtctggttggaagagacgctaaagaaatttgaccgcatactggttgtcatatcgcactcccaggactttctgaatggtgtgtgcactaacatcatccatatgcagaacaagaagctaaagttatatactgggaattatgaccaatacattcagacacgctccgagcttgaagaaaatcagatgaagcagttcaggtgggagcaggagcagattgcatcaatgaaggagtacattgcacggtttggccatgggtctgcaaagcttgcacgtcaggctcagagcaaggagaaaactctggcaaagatggagcgtggtgggctcaccgagaaggttgttagggacaaaatactggtcttccgcttcacaaatgttggcaaacttccaccaccagtgcttcagtttgttgaggtcacgtttgggtacacaccagataatctcttgtacaagaagcttgactttggtgttgacctggactctaggattgcattggttggtcccaatggcgcagggaagagcactcttctgaagctgatgacaggtgagctggttccattggacggtatggtgagacggcacaatcacctgcgcatcgcacagttccaccagcatctggcagagaagctggacctggacatgtcggccctgcaatacatgatgaaggaataccctgggaacgaagaagagcggatgagagccgcagttggtaagtttgggctgtcagggaaggctcaggtgatgccgatgaggaatctgtctgacgggcagaggagccgtgtcatctttgcgtggctggcatacaggcagccgcagctattgctgctggacgagccgacgaaccatcttgatatcgagaccatcgactccctagcggaggcgctgaacgagtgggacggcggtctggtcctggtgagccatgacttcaggctgatcaaccaggttgctcatgagatctgggtttgtgagaatcaggcagtgacaaggtgggaaggcgatatcatggatttcaaggagcacttgagaagcaaggcttgtctatcggattaagggaaggccttggctttccttaccttctctttggagatgtattatcccttgtataattatgtattattataggccctccaagttttactagtagctagctgatcatctgagcaagtacctctgtatctgtatcctgctgagtctcataataagaagcgaaagttttgtagtactaacgtaattgtcacggcaggaagtgccatggagagcaaggatgcgggagaagagaggctgggagactgaagaagcaggaagtgcgtggtgtgcgtgctgttgggctcaatgtgtgtgggcgtgagtttggtgggttcggcccatgtaagtgacctataattctgtagcgaactgagaataaggcagacaagaaatagaaccagagaaaagttcccaaccgtaacctggcagcgtacctggcg

SEQ ID NO: 41606 - DNA, 657 bp, Zea Mays
gtaggggcaatgaatgttgtggtaacttctcaccaactcatctgtttatatagctcgcaggtgaagaaggtgatccgcagagacgcgcgtactggctgatcggtggaccggtaagtgccataaattttatattcgtttttaataataagctcagggaatgtttttcggatcttcggcatctagaagccttcgtgtttttcgtggatcgagctcgttatgaaaaaacgacctagcaccacgaaggggctactgttgggggtcttcttctctgctgaaggttctcaaggcgaagatactgtttgtaggtgacaagaatgaatgctgaagctacaacgaacatgtgtggaaaagccgaaggtgaacagcttcggcttaaggtggtgacgaaggtcaagcataatgttgagtcgaagaggaaaagactagttaatccctgatgttttctattaggattataagtatatgttgaggtcataaatgtatttttacttggactgcgtctcatgcctataaataggtgaacattacccccatactgttcacgctggattgtaattgctctcgtgccatcaccttcaaacaagctgaaggtatcaatataatataaataatgataatgtttatacgattattatggaataaatatgtgaatgtata

SEQ ID NO: 41607 - DNA, 2885 bp, Zea Mays
ccgcagtggtgctcgtcgctgtcgcgcatttgaaccgcgtcaaattcaaagtttttttatgcgtctggttgcctaataaaaaaaagcgtcaaatccgaattttcttttccgtgtatgctctgccgcctaatccaagttcgtaagtttcggtgcgggtgaaccgaactccaagcccgcttcctccaacaagaacccccgagatcggaaccccgcaaaagggagctttatttaaaggggaaattccccgtttaattgcatattggacatgtcttgtggcgtttgattggagaatttaattcttcccaacgatttccgttcttcggaggcttccatcttggtttcagttctgcagatctgtgactgagaggggaggaattccagtcagtcgtttatgaatcctggggcctgtgcttactagagggagggcaaggcaagttaggatccgagatgagggggagaaatgactccgggaacagcaagccggttgtgctgtgctgtgtgatgatcgtgtgcctatgcctcctcttcttgtatttctcgggctccaatggacaggctgggagcaccgcatttgagtacgggaccaaattctcacggtcacttggatggggcagtgatgatggttctgaagagtccatttttggaaccggggatgcagatgatgtcaagcctaagagctttcttgtgtgtgatgaccggcactctgagctgatcccctgcttggatcggaacttgatatatcaaatgaggctgaagctggatttaaacctgatggagcactatgagaggcattgccctccacctgaaaggcgttttaattgcttgattcctccaccacatggctataaggtccctataaaatggccaaaaagtcgtgatgtagtatggaaagcaaacattccacacactcaccttgcaaaagagaagtcagaccagaactggatggttgaagctggtgaaaaaatcaagtttccaggtggtgggacccattttcaccatggagctgacaaatacatatcaaatattgcaaatatgctaaatttcaaagataacaatataaacaatgaggggatgcttcgtacagttcttgatgttggttgtggagttgctagtttcggaggataccttctttcttctaatgtgatagcaatgtctttggcaccaaacgacgtgcatcagaatcagattcagtttgcactcgaaagaggaatccctgcatatcttggtgttttgggaacaaaaaggcttccatacccgagtagatcatttgaactagcccattgttcacgttgtaggatcgactggcttcaaagagatgggattcttctgctcgaactagacagattgctacggcctggaggttattttgcttactcctctcctgaagcatatgcacaagatgaggaagatctccgaatctggaaagaaatgagtgcccttgtagaaaggatgtgctggaaaattgcagagaaaagaaaccaaactgttatttgggtgaaacccctgaacaatgattgttacaagagacgagcacatggtacaacgccacctctatgcaaaagtggcgatgatccagattcagtatggggagtgccaatggaagcttgcattactccgtatcctgaacaaatgcacagagatgggggaagtgggctagctccctggcctgctcgattaacaaccccgcctccccgtcttgctgatttgtatgttactgctgacacatttgaaaaggacacggaaatgtggcagcaacgagtagaaaaatattggagtttgttgggcccaaaggtaaaaccagacactattagaaacatcatggacatgaaagcaaattttgggtcatttgctgctgcactcaaggaaaaagacgtatgggtgatgaatgttgtgccacatgatggaccaagcaccctcaagataatctatgatagagggctgataggcagcaatcatgactggtgtgaagccttctcgacctatcctcgaacatatgatcttctccacgcatgggcagtcttctccgacctcgataaaagaggctgcagtgctgaagacctgctcctcgaaatggaccgtatcctcaggcctaccgggtttgccatcgtgagggacaagggcactgtcatcgaattcatcaagaagtacctccacgcgctccactgggaagcagtagcggctgcagatgccgagcccagctcggaatcagaggagaacgagatgatcttggtgatccggaagaagttgtggctaccagaagcaggctcgcacacgtgattcccttcccggcgtctgcagctcagaagcgaggcgccagctgcaccagccatgatttatttctagccctactgcacacatggagatagatttattatttacgaggatacggaaaatatgtggcaggcctggattaaaaaaaggctatttttttctcattctcgacagatatgggacttgatgtttgttctctagtttggttaggaaataaacattctttttcgtcttaatgttgaggctcatttaggtgtttgatgtccatcaatggaagtctgatgtagtctgtagctagtgtatttagtgtttacttgaaagaactactgtacgcggatacgtggtttgcactagagcctcaagcctgcgggtccctcagctcgagacccactcatgcagatctcaacagggataacactccaatataaacaggttacagcgcatccgacaaagttgctctgaaattacatggatttatgctatacggtcaaaattcagcagcttaactatctctatctctatatttaaactctgccctataaacattgcagtatatagtataaaggcatctccaacaacctgtcctataaaaataccatataatttaaaaataa

SEQ ID NO: 41608 - DNA, 5572 bp, Zea Mays
gccctcccggccttcccttccatcgcgacttgggttgcggactctctttccatcttcttcttcgcttccccccaaaagctcctcctctccatcgattccattccattcgaattagcgatcgcccactacccgcaacctcctaccttaggcagcgccaaaccctaaccttactcgggtacgccaccaatggctgagtcggaggacgccaccgccgccgagcccgggtccgggccgccccacgaggacgaggatgcgctgctcgcccgcgcccacaccgtcatctccaggatcatcgaccgcgagctcgaccccaacccccgcctcctccacaccctcgccaccatgtgcgagctccacgaagccagatatcttgagttacgttcagctgacacaatgttcaatagcacgaacacaaggactgcatttacaattgggaagctggccaatttgctccgggacaatgacgagttttacgagttggtgttttgtaaattcttgtctgacacctcctactctgttgctgtacgagctgccactgctaggttgctcttgagctgtcaccctgcctggacgcctccgtatcctcatgtctttgaagactctatcatagataatattaagaagtgggtaacggaggatcctgaagcgtctaatgaatgcaaatggaagtatctaggaaacaataaacccacagatgctgagatgctgagaacatatgggattggtttgcttgctatggcgttgtgcagcagtgggcaattgatagaggatgtcttgactttgggggtatcagcgaagctcatgcgctatttgcgcataagagtccttggggatgcctcatcttctcagagagatgctaatcatccacaggacaccaagcatccttggggcggagacgacagtaggggtaaatcacgtctgtcccaagatggttctcgattggacggaacaagggttgggtatggaatgttaaccaacccgacagcagagaagaacaacgaaccttgtgttggaatgatgcaagcatatggagcaaggtcattggatgacagttttgcttcattggatgattctgatgtccctgaggctgattggaccaatgatagatcttatagcacacgtgtttgtgacacaaagtcaaaacatggggaaaggaattctgtgacgaggttgcttaaagatgaagaggtcagcgaaaatggtgaactgttgaagagaaagctgaatcgagccccctcccgacttagagtgaagggaaaagcaggtgacagcttgccagaatgtgaaatgacacctttatcgccaacctctggattgagaataggaggtcaggctacaagagacaggaatgtggcgagggttgatgatccaaaggaggcaactgatgtgaacaatagattgtttaacaccatttccaaagaagaatacgaagatcgattcagggattgcattattggcttgaaggatatatctgacatcgttttgaaggcagtgagagccgctgaggctgaggccagatctgcaaatgcacctgatgaagctgtgaaagcagcaggtgacgctgctgccgagcttgtgaaatttgctgctttggaggtttggaaaagcgaaaataacagtgatgcggttgtagtagtggcggagaaagctgcatctgctgttgttgaggctgcattgtcaattagtgtctcacgaagtgcaaatcaagttggtgaagagcgtgcaatggaagaagctgtccaaaccagcgaagaccaggatttggaaaattttgttatcagtgacaaagcacagctattacaacttagagaaaattatagcatccagtgtctacagattttaggagagtatgttgaagctttgggtcctgtactccatgaaaaaggtgttgatgtttgcctcacattattgcaaaggagcatgaaaaaccaggagggatgtgaccactttgctcaactccttgatgtccttaaattggtttgtgcactggctgcccatcgaaaatttgctgcactctttgttgatcgtggtggtattcagaaaatcgtctctatgcctagagttacccagacatatatgggtctttctgcctgcttattcacttttgggtctcttcagtctaccattgaacgtgtttgtgcgctttcctcagacacacttgacagtgttgttgaattagcacttctacttcttgagtgcccacaagatttagctagaaaaaatgtggccatctttttcgctgctgcttttgtgttcaaagctgttctggatctatttgatgcccggaatgggatgcaaaagcttctcgatatcctttgtggatgcgcgtctggaaggtctggtagtaattctggaggagcaggatcctccaatgtaaatcaagggaatgatcggtcgcctgctgaagttttgactgcatcagagaagcaagttgcataccatacatgtgttgctctacggcaatactttagagctcatctccttcagcttgttgattccattcggccaagcaaaagtatccgtagtattgcccggaacacttctagtgcaagagctggctgcaaaccttttgacatcagcaatgaagctatggatgccatcttttgtcagatccaacgggacagaaagttaggccttgctcttgtgagagcttgctggcttgcgttggataaatttgttgcctcaaatggtcacatgactatgctggagttgtgtaagtttcaggcacatggtgatcggtatttgcgtgacttaactcaatatgcaattggagttcttcacatcataacacttatgccacagccacatgtccgcaaatcaatagtgcaggggacattaagcaacaatcgtgctggcatggctgtcttattagacacggtgaaaagtctcgactatattgatcatgaggtgatctgtccagcactgaatgtcctcgtcaatcttgtatgcccacctccttctatcagcaacaaaccattgtcaagttccaatcagcaacctgcagctgcacaagcgcttgcttcagaaagcagagaaaagaactttgaaaaaactatttcagataggaatctacttacaaacctgggtgaatctcgtgaaagatctggtgatggcaaccctgctgaaaagaacaataccttgcatcaaggaactcctagcacacctgttgtgccatctggagtagtcggtgatcgaagaataatgttaggagttggaggtggtggtcctggtcttgctgctcaattggaacaagggtaccgccaagctcgagaagttgtaagagccaataatggcataaagattcttttgcagcttcttggttctcggatggttacacatcctgtggctatagattctattcgagcccttgcctgccgtgttcttcttggcctggctagagacgatacaattgcacatatactgacaaagctccaggtggggaagaaattatcagaactgatccgtgatatcagtgctcagacatctgggggcgatagtggaagatggcaaactgagctgacccaagtggcaattgaactaattggggtattgacgaattctggaaaagaaacaacactagcggcaactgatgctgctgccccagcattgaggcgcattgagcgagctgggatagctgctgctgctcctatctcttaccattcgagggaactgatgcagttgatacatgaacatctccttgggtctggttttgctgccaccgctgctatgctccagaaggaggctggccttgcacctttaccattgacagcagcggtgcttcctgcccatcaagttgctgccctggaagcatcatctgttcagcaacagtggccctctggacatgttcagggatttctctcagataaaataaacacgtcgacatatcaatctgcccagagatcagatcctaagctgccttcatctaagaaaaaggcactggccttctcatccagtttctcacgaagagctcggtctccgcatccaagcaacatccttaaaagtcctgtacctattgcggctgatactggagatgcagaaatgttgaataaagcaccactgtcgctgccacttaagcggaactttgtggatgtgaaggatattagttttgcatcagcatcgaagcgccttgcaataactgatcaaatataccaatcctctgcattccaaactcctgctcctactcgcaaaggtctgtcggtatcagttgattctcctacttcatctcattgcggttggacaaacttcaacaatgcttttactgaaaacttggacaattctcaaggcacaccaggagcattgaccaccacagcacttcctggtgtaaatgaccaacaatcaggaaatttggagcgtatgacacttgactcactggttgtacaatacctgaaacatcaacaccgccaatgtcctgccccagttacaactttgccaccactttctcttttgcaccctcatgtttgccctgagcctagtcgcagccttagtgcaccggcaaacatagctgctcgagtgggaagccgtgagataagtaggcaatttagtgggatccagatacctcgtagggatcgtcattttatatacagtaggttcaagcagtgtcgtgtttgccgtgatgaggcatcactattgacttgcttgacatttcttggagatgcagctcgagttgtggctggtaaccacacaggtgaattaaggatatttgactgcaacacggcaaatctccttgagactcaaacgtgccaccaacatcttgttacaatgatggaatcgacatacactggtggaattgagatgattctcacatccagcctaaatgaggttaagatctgggatgccttctcggtatctgcagggcctttgcacacatttgacgactgcaaatctgctaggtttaaccactatggaacttcatttgctgccctttctactgatacagctcaacgggaggttcagttgtatgatgtacagacgtatactcttgctacacggcttcctgataacactagcagttcaggttcaggccgtggttatgtacaacccattatacatttcagtccttcagatacaatgttgctttggaatggagtcctgtgggatacaaggcaaccaaatcctgttcatcagtttgaccagttcacagattactgtggtggtggattccatccagcaggaaatgaggtgatcctgaattcggaggtgtgggatctgaggaagttcaagcttttgaggagtgtcccttccctggaccagacagtaataaagtttaacggaactggtgatgttatctatgccaccctgaggcgtaatcttgatgacgtgacatcatgcatcaatgctcgtagggtcaggcatcctcttttccctgcattcagcacgattgatgcgatgttcgtggcgtgggcgtggcagaagctgacgccgcaggccgcgcaccagctgctggaacaaattattaaaggatacaccggaaaaaagcacaaaggcctgaagaacgtaccgaaatagataaacacctcatttttcaaaaggactcttccacccctgatggatcgatcgacgatggccggaggtc

SEQ ID NO: 41609 - DNA, 394 bp, Zea Mays
atggaatggagttcacaagggaatactttactgcagctgtgcgtggaggtaactctcgggactcaatagcacaacgtggaggagggctggaggaccagcggctgcatgatcatgtgcacgtggactcacacccacaagcctacgcaggacccagcacaggggaaaactatgagtctacctgctgcatgtttgccagggagacagccagacagcagttagatgagatagagttcatcccctttcaatccaattcagggcagcaaagtatatcccaggttatttcccccaccgcaacaaatcttattcctatccacaacttacataaaagcagctggagtccatagtggatgcagatttttgccttagatatttttggacctaactctgaactgtg

SEQ ID NO: 41610 - DNA, 1286 bp, Zea Mays
aacctgggcatattcctctctctttcctcatcctcatccgagtggctctctccgtgtgctgtggcggcgcctggctctgctcggacggactccaccgaaggcgctcggctcccctcgggctccacctgcgacggccggccctctgcctgcaccgacggtgcccggccccctcggcatccaccagcggtgctcggctccaaggagcactgctgtgaggaaggccatccattttgtcaacctgtggacagctggaaggtctagtggaaacctggctatgaactccgtaccaaaacccgcccctgggtccgaaacatctgggagggaggattttgctgtgggggataaggatgctgtggtcattgttgatcatgggtcaagacgccaagaatccaatctcatgctaaatgactttgttgagatgttccgggcgaagactagctataggattgttgagcctgctcatatggccagcagggaggaaggagagctgcaggggagcgagaaggaggagagctgcggggagggaggagagctgctgacggctgagagggagatagatatttgtgctggagctagcggagcctactataaaggatgcttttggaaaatgtgtgcaacaaggagcatcccgagttattatcagtccatatttcctttcccctggacgacactggaagcaagacattcctgctttagcagcagtggcatcaaaggagcactcaaatataccctatattgtcactgcccctcttgggctgcatgagcttatggtggatatcatgaatgatcgcatcaagtactgcctgcgacatgttgcgggtgatgtcgatgagtgtacagtgtgtgccggaactggaaagtgccgcatgtactcctgatggagcatacctgggaattgtttctggagaatacgagatctgacgagtgtatatctaggtccgctgtgtaccgtgaaaccaaaagcttgtacagttcattctgaacagatcgtcagaattagacaagtgccaaattagttatgctgtgcatgcttgcgaacatcaataacgattcattagctaatcttgagtttatttacgtcacgaacaaactcagtcaagtgctctgatatttccattcacatgttatctatattcctgctaccttgtagttgaattagacttattgccttaacatggatcaaatgagaatataatgtacccttgtttgatttgccagttctttttgtcatatatctgttagggacttgttctcaaatgctatgaattaaaaacaagacaacacaa

SEQ ID NO: 41611 - DNA, 480 bp, Zea Mays
gccaagtcgttgttcatccgccgcgaggccgatgtctggggttcactgttgtggcagaacctcccaagttattgggcccacatgcacctgtccttgtctcaaagacctcagacagctatgcatgtgcactaaataacttaacaggatccgtccgattgccccaaggacatcggataaaccacttacaaccagaaccgcgggattaagtaacacaaatcacacacactaatattgttgcagcggaaatcttactaccaaattttacaggttacaaaaattttacattagtttatcggagtgattacaaaagtgtaagtttgaaatatatgctagctcaagggatcatcctcaataagaagtatagaagggttacttagacttataagaaggccgagcccaccggcacttaacaccatcaacaacagcacaaagttagaacctgaaaaacaacagggaataaaaccctgagtatggaattac

SEQ ID NO: 41612 - DNA, 530 bp, Zea Mays
ggtgtattgaccctgcagtgctggccccctgctagtttttcatcacagcgagcccctcccaagttggcactgtccaaagcttgcacgccgtgacctaccagtagtgaccatgccggtcagtttggccatctcgccgtggccaggacaactcagcaaagtacacgatcatgctatgtttgttctgtgatcaccttgtcatggccagaacggagtcacgtcatcgtggaactagcgctgcgggcagcctcaccgtggaccgatcgactggagtcatccctggtcaatctcgcgcacgcaccgagactttggaaggtgatgaggagtactctaggtgtttcggaggctggagggcgtttccagttctgggggaggattagttaggcttgtgtataagctttggagggttcctaccttcctgttattgtaaaaggttatgcactttgagtatatcaggacttgtaataaatgtaactcttcctatgtaataaccttcagttttagaaataaaaataatgttttgtaaagtcttc

SEQ ID NO: 41613 - DNA, 2123 bp, Zea Mays
ccacttctactgggagttttttgtccggtaaatgactggaggccttgccggcgtcgtcgtcgcggtacagggctgatggatgctaccactgttgattccaaatggatctctcccgccactgaagatgggtccatggacaggcgaggaaacccagctgtcaagacaaccaccggaagatggagatctgccatcctgctgctagctaactatgggctcgcgacgtgcgccttcttcggcgtcggcgtgaacctcgtggtgttcctgcgccgggtgctccaccagggcaacgccgaggcggccaacagcatcagcaagtggactgggaccgtctacatcttctcgctcatcggcgccttcctcagcgactcctactggggccgatacgtcacgtgcgccgtcttccagatcatctacgtgatggggctggtggtcctgtcgctcgcgtcatggctcttgctggtgaagccgtccggctgcggcggcgtcaaggcgcactgcgacgggccgtcggcgcccggcgtcgcgctgttctacctgtccacctacatgatcgcgttcggcaacggagggtaccagccttccatcgcgacgttcgggtcggaccagttcgacgagacggaccccgaggaggcgcgctccaaggtggccttcttcagctacttctacctggcgctcaacgtcggctccctgctctccaacacggtgctggtgtactacgaggactcggggcggtgggtcatggggttctgggtctcggcggccgccgcggcgctggcgctcgtgctcttcctgctcggcacgcccggctaccgccacttcaagccgagcggcaacccgctcacccgcgtcgcgcaggtgttcgtcgccgcgctgcgcaagtggcgcgccgaggtcccgcgtggcgagctcctccacgaggtggtggaagcaggagaggaccctaaggtctcgggcatccgcaagatccttcacagcgacgggctcaggttcctcgacaaggcggcgacgatcacggaggaggaggaggaggagggtccgtggcggctctgcacggtgacgcaggtggaggaggtgaagtgcatcctgaggatgctgcccatctggctgtgcacgatcgtgtactcggtggtgttcacccagatggcgtcgctgttcgtggagcagggcgccaccatggacaccaacatcgggtcgttccacttccccgccgcgagcatgtcgctgttcgacgtcctcagcgtgctggcgttcatcgccatctaccggcgggtgctggtgcccgtcatggcgcggctgtcaggcaacccgcagggcctgaccgagctgcagcgcatgggcgtcgggctcgtgatcggcatggcggcgatggtggtggcgggcgtggtggaggtggagcggctgaagcgcgtggcggccccggaccagccgagctccctgagcgtgctgtggcaggtgccgcagtacgcgctgatcggggcgtcggaggtgttcatgtacgtggggcagctggagttcttcaacgggcaggcgcccgacggcgtcaagagcttcggcagcgcgctgtgcatggcgtccatctcgctggggaactacgtgagcatcatgctggtgagcgtagtcacgagcctcaccgccggtgagaagcgtccggggtggatccctgggaaccttaactcaggacacctcgacaggttctacttcctcctcgccgctctctcgctcgtggacctcgccgtctacgtcgcctgtgccatgtggtacaagggcatcaagcttgacggcggcgacggcgataacaggagaaaggtctctgcgcacgtctagctagccactgcatactggacctcgggccttcagttttcaggttcagagacgtgccgggctggcccctggccgtatgcccgtatagtcttatagagagaggagagagagagagaggaaataaaatgtcaaagaatatgtaaccatccgctcggcgttggatggcccatgttgttatgtatctttggtcagatgatccaagtaacctcatgtgaagtactaatgcaataattatatatggatagtacactatctgtgccttaggacggcacgtaattatatttaatgatgagtgattttag

SEQ ID NO: 41614 - DNA, 476 bp, Zea Mays
gacccaggcccatggccgcctgggccacggcccggggcgcagacccatttatatttttagaagagtcagtctcagccgcaaacagtagagcgcgtgaagccgtgaaccctagccgccgcctctgcatgtgcatctgctgccgcctgccgtcgtgcactcgcgctcggccgcttgcccagtccgccgcgcgccgcgccccgtccgccgtcctgtcgcccgcacgccgtgcaaacactgagacacccactcgcccagcccaatccgccgagcgccgagccgacgccgcccaatctgccgagcgccgagccgacgccgcccagtccgccgcgccgccctggcgactgggcgccaccgccgagctcatctgtcaatctgtcatctcccctcggccctcacgtcgtccgttgagaacttgaaatagcaggttctggagcaagaagcactattgttgatgttgatatgatacttttgaaagg

SEQ ID NO: 41615 - DNA, 622 bp, Zea Mays
cgcgaacttccaataccctgttatcagtagccaggcagggtattcttagcatgtgcgccgcgaacttccaataccctgttatcagtagccaggcagggtattcttagcttgcttctagccatggagttgcgggaattgctcgccgaacagaaaacgccgtgatagctgctggcctgaaatcgcggactcggcagcgaacctaacagacaaagaaggagccgcccgtcgtgagggagataagcgaatcatcacggacggaatcatgcgttcgaagccgagatcttggcgtgcccgtagtgatgatgctgcaaccctcaaatcggagggagaagccatggagttgcgggaattgctcgccgtacttggaattgactgccgaaccgcagcgctgcgtggccgagctccttcacaaatcaacagctggtgagcgacctcctaaacacatcctcaatcccatcctctatgcctaggtccgttcggagtgctgaatggggtgcggttgcgcgcggtcatcgcgcaccggtgtggatgtcgccgtgaaaaccggcgccgccgctctgggttatcgggtggagaagaaaaaccgcgaccgttgatctggcctgggcggctacgatcaaaa

SEQ ID NO: 41616 - DNA, 410 bp, Zea Mays
gatgttattgggtttgtctactgtcacacctggatttaagggataaagtcgggtacgtctcatatgtgcgccaaggaagaacaacacatataataacagagtgtatagagacaaatgtcacaatatcatgaaagtgattattacatagcggaattgttacaaaaataaattataaatataaaacgaactaagagtccatccaaggcaccataaagctgactgagagacgccacctagatcaaatcatactcctcgttgtacggctcctaatggacgccttgttcttctcctatgggggttatatatcgcaagtgtgagctcacaaaagatcatagctcaacaagttatggggaataatgtgcaagaagtcaccaaaggtgggagttcatatgatgtgtaaggctgatcaa

SEQ ID NO: 41617 - DNA, 1702 bp, Zea Mays
aagaaatccaaacctaagctttctttcttgataacgaagcagcaggagattcctctctgttttccacccgcaagggaactttggtgaagtggtgaatgtggagctatcaatggaccgaatggttaaccttcctcgtggctatggatatattgaattcaagaagagagctgatgctgagaaggctctactttacatggatggtggtcaaattgatggaaatgttgttaagttgaggttcactcttcaaccacgccaaagggctgtatcacctatgaaagctccaccccctcctccaaaacgagatgttgctcagattgaaaaaggtcttagcagtgctgaaaaggatgcccagcagcgtcctagggaatcatctccacgaaggaagccagcttcaccaccgcggaaacgatctccaaatcgaagggctgaatcgcccaggcgtccacctgacccatcacctaggcgtcgtcctgattctccgcctattcgtcgccgaccagatccttctcctgtcaggcgtggtggcacacctcctcgcaggagaccactgtctccagttagaaggcgttctccttcaccacctaggaggcataggtcaccgatgcgtccttcacctaggaggggacgtggcagtccttcaccacgcaggcgctcccctgggcctcttaggcggcgctcgccacctccaaggcgtttgaggagcccaccaagaaggccaccacctccacgtcgctatagtcgatctcctcctcgccgaccccttcgctccagatcgatttctccaagaaggggacgagggcctctcttgaggcgtggtaggtcaggctcatcatattctcgatcacctactccaccgccaagaaaggggccaagaagggtatcaaggagtcgcagccctagaaggcctcccagaggaagaagcatctctagtgacagccgaagcagcagttctccttcccctagacgtggcaggtagaaggaacccgttgcattgtgtatccggcaggtgttgaaaggtttcatctactttgttggaaggagtttttcaacattcccattgtattatgattccgttgatcaagcaatttgtgtatgcgcaggcgcacgcacagcgtacaccttttctaatctgaaaagagttgtcattttgccaaaccccgccctgcttgttgccctgtcccatcagtcattggtttactgacgcgacgcaacgccgtttcctacaacatcctcatcgccgcctactctcgcgcgggcctacctggcgacattcgcgcgctaggaacggcaatgtagggtattgggcgtacccacgtgacggcagaaaaacatattgatgttcttctaagggctcagtccctttgggaccaagggtaatgaatggaattttgaggggatcaaaatcccttactatttaaaattgaatattgagggattatggtcctcttaatcccgttcattacacatacacttgctgtcgaagaagtggaatgttgggacttatgactcatctatttgtaaaattgtctcaaatagttaaatgacacaagattatatttgacatttctatgctcgtaattgaaggagagtaaaattggtgtaactggatatatgtactgccttgccttgtgaaaggatcacgatgtacaaatggaatggagggacaaattagactttaattttttttgtgacaattaaattc

SEQ ID NO: 41618 - DNA, 1971 bp, Zea Mays
agtgtgtcttaagtggtccagcaacgtttgccgcatgcagccgcttcaagtccgacgattttctcctttctctctctctctatttttcactctagaccgaaatcggagcgcccgataccataccaatagcagcagagcagtagcagcacagctccctcccccgtcctctccaaatctcgccggattccgtccaccgccaagccctcgcatctgccgcaggttcgcgtctgtgcccgagcgtgttgcactgccggtggtgttggtggtggttggcggagttgccgccgagggtcggtcatggactacgggccctctgacagcagcggaactgatgatgatcttccacaacttccacataggagtatcagaggcagcggacgtgttagtggtaatgggagaactattgttcctgccggttcatatgctagagcaccaactgacatggaagcacaaattcaacaacttgagcaagaagcatattgttcagtccttcgtgcattcaaagcccagtctgatgccattacatgggagaaggaaggtctcatgactgaacttaggaaggaactaagagtatctgacaaagcacacagggagctgttaaataaagtcaacaacgataatattatatgtagcataagggaatggagatcaacaggagggcttcaagcaagcatgtccaataacccacaaccgattcatgaccctgttccaagtcctaccacctctggccgtaagaggcaaaagacatctcaatctgttcctgctttacctgcacctcctgcaatgcattcacaacagctggctacaccaacacagccatcgtcttcaactgctaggaaagcagtacccccagtccctaaaggcaaaaagacgaaaccaggtcagaaggtaccaggtggctctgcagccaagcctatgccatcttcagcaggtcctagtggaagaggaccacacatgaataggaattttccaggtggttctgctcctgaagctcaagctcagaatgtcgatccattggttggtcgtaaagtgatgagccggtggcctgaagataatagtttttatgaagcagtcatatctgattataatgctgaaacgatgggacctgaagacataagatggaaagaggatgactctgggatagaccctgtggtgtatctgcgcagccgaggtgccccaagtagtggggtcaggaagccaacaggtcgcggtgggcccatgccaggttctggaagaggaagaggattaccgaagaacatgtctaggaaagattttccacctccacaaaatggtgttggcaagagaagttccgatgacattgatatccttcatactgagagcctaataaaagaggttgaatgtttattattacaatgaactgcagatcttgtgcacttcatttcacttctcttctgctatatctgctcatgtaggtggagaaagtttttagcgttagcaatcctgatccacaggaagtagaaaaggcaaagaaagcactgaaggagcaagaacagtcattgattgacgccatagcaaggcttgctgaggcatcagatggtgaaagtgatgggctcaatcgtgggcgaaggaacttgtatgctggtaaccagcatcaagcaaactatgttgatgacatgcccgttggtgaccaagctgatgccatgtaaacactgcatgaacatgtatacacaacataatataactgtctgttgtacaatccattgcaaatatttgttctggatttaggtctctgtaagctaagtatcgttcgtttcgggaaactaatttttttagaacagtaattcagaatgctgacaagtaaagcttgtagatgtttgtttctttctctagtttttttgttagtgtggtctcatgttctatatgcatgataaaaggaaaaaaatcacctttgtaaagcactaagtttgtcttcgaccatttttgacgcagcaatcattcctcatgaccatg

SEQ ID NO: 41619 - DNA, 943 bp, Zea Mays
tatctccctcttatcctctcacgttactctttcctgtttccagaatccactcgacacggttcctggtaccatgggatccctgtgggtgctccatccgtttcctttcgcctacaacaacatcgtcgtgccgcgttgtcgactgtgttcagccccgagccatcgaccaccgaccccaacagcgccgcgcttccctgaccctgaccccaaacatcacaaagacctgcgcacgtgctcctcatcgaagtgctcgacaaaccttgcctcgccaacgtctcgccaagttgtcagacccgtcctcgagtttggtggagtcccaagcttgcacgccgtcgactccctgctcgcctcgcttcgttgtcatcgttcactatcttcgtcctcgtcgtctacctcgccggttctcgcgcccaactggccatcgtgctcgacgtgttttcctccgtgcagattcgcatgtacctttcactccatccgctagtcgcgtggtagagaagatcacgttatcggtggatcaatcgccttgtggagtaatttcttggaggctggtcgtcaccctgaagatttgtggcaaattattttcttagtcattggctcttcactgcaacaaagatcacgttatcgatggatcaatcgtctactggagtaatttcttggaggctggtcatcaccctgaagacttgtggcaaattatttttgttggggacttgttctcaaatgctgagttaagaacaaggcaacacaaatgttaatggttaaagaccttcgtctttcgaagcattatctccctgcggatataatgatcttcagacgaaggttatgaaggacataccttcataatttcagtatgtaataatgaaagcagaaacatatgaaacatagaaaagaacatgttaatcacattaaaccatcagattatttgtgttctcattatataatcatgaac

SEQ ID NO: 41620 - DNA, 1713 bp, Zea Mays
ttcttatatgactataaatccaacgcaatatacacatttccgtaacactcatctgttaaacatgtagtatttttgtaggccaatattttgtaccatacaacatggtaggtctaattgctatcctaaaaacttgtcttttagcttctatggtaccctcttatcacatagaatggcatatgcttgacaccacttcgtccatcttgctttgattctatggctaacatcttcatcaatatccatgtctttgtgtaccattgatcctaagtaccaaaaggtatccttcatgagcactagttgatctttcttatcacaactctagttttctatttactttgcctgactttcatcaactagcactacaccatccgcaaaaaagcatacacagagtgatatcccctctcatgtcccttgtgacctcatccatctccgaggcaaaaagtgagggtgtcttctttgctgtcaaagaagtgaacttatttgataaagggagcaatgcgaagcagtgtatctttcagcttgagcaggaaattgcacttctgagccagtttgagcatgagaatatagtgcagtactatgggacagacaaagaagattcgaaactttacatcttccttgaattagtgacccaaggatcccttgcattactatatcagaagtatcgcctgcgtgatactcaagtctctgcatatacaagacagattcttaatggattgatttacctccatgaaagaaatattgttcacagagacattaaatgcgcaaatattctggtgcatgcaaatggatctgtgaagcttgcagattttggactcgctaaggagattaccaaattcaatgaacttaaatcatgcaaaggaactgtttattggatggcaccggaggttgttaatccgcagcagacatatggacctgcagctgatatatggagtcttggttgcactgtcctggagatgttgacacgccagataccctatcctgaccttgaatgggcacaagctctatacaggatcggtaagggggaatcaccagcaattccaaacactctttcgagggatgctcgcgattttataagccggtgtgtaaaaccgaatccggaagacagaccatcagcatccaaactgttggagcatccattcgtaaacaagtccataagatcagtacggtctatgaggacgacaccttcacgctcgaattcatctactcgtggcatcaattaattggccgtccgtcatcatctattgggcagcggcagaatgatattggtccgcgcaaatcatgcggagctggccgagagggagtttgttttgactggagctagtattgtcaacgctcaacagcattgtcgtcaacctcttattggtgtttcattagttgattctttggcatacgcccgcgaggaagatgtcctcgttgagccgccggctaatgtatgttcttctgcctggatagagaatagtgggtgtgcatttgagcgcatgggttgtagagtgagaacgggctgtgtaaatagcttgtcctgatgccaaggatatgttattagttgtcacgagaaaaaagaaagaaaggaaaaaaggttcaaagctttggaactgtcaacagcggttgttagattggaatttgctgtcagcttttgtggtagaacagaatcatacggctatgctatctttttcttcaaccaacggcaacggaacttcctagaaaactcttcggttg

SEQ ID NO: 41621 - DNA, 606 bp, Zea Mays
aggaaatacaagcagatctataattataaccataatcattaaatcatcgtcataaatgtatccagaatatctctaatcaaaggagctcctaaggctgttcataatcgtgagcacagcggatataccagtttctaaccctctgcagaggtcgtacactttacccacgagccgtgatccctttttgcctcgagttgtacagactctcaaacactcccacggtgagtcgacaaggtttcactacatagcttttacaaagattccctagaggtcatagtcgcccattaggtttctctagtttgataaacacagtatctctccctgcaggaggggtgactaacaaaagcaaaacgaaagaacctcggcacccagcctcagacgagcaagtactgtgcccataccccattgacggcacaacggcgaagcagactacacctcaagttcctcgaattaatcaactaatggcgtcccataccacccttatggttgtactgttttctcggatggtcatccaatgaacagatccttacgaggaggtactcgagaaatagctcgagtcccctttagtgccacaagttcattgtcacatctagaataacatcgtcgtat

SEQ ID NO: 41622 - DNA, 2838 bp, Zea Mays
ccggacgagacgacgaacgagagccccatcccatccggttccgcttcggcgcgtccctctgttgccttgcccttgccgccaaccaacacccccgaccccgagagccgagcccctcttgcttggccctcaagctttcggtgcgtcacccgccgccaaccctcgacgagactccgattctcttttcccctaggccaaggtctggccttccggtctttcttcacgccgtttgtgcggtgcggtggcgatcgtccgcgatgggcgccgcgcggggagaggaggacggggaggggcgctgcggcgagcggtgcccgtcgtggtacgtgagccgggaggagatcgagagcggctcgccgtcgcggcgggacggcgtcagcgcggccaaggaggccgagctccgggccacctactgctccttcatccgcgacgtgtgcatcagactccgactgccgcagattacaatggccacggcgatcatgctctgccaccgtttctacctccgccagtctcatgccaagaacgagtggcagttaaagcacaagcactctacccagaacctagattgcaatggtggacgaaggtgtcattcttttggagcaacttatcaaactgggcgcagcactttctaataatactcgtttcaactattgcaactgtctgcatatttcttgggtcaaagatagaagacacaccttgtcaattgaaacacgtggtcattgtgtcatatgaaacaatgtaccataaaaatccggatgctgctaagagaatccaccaggagcatgaagtgcttgcgaagcaaaaggcactgattttggtgggggagacactgctgctttcaacaataaggtttgatttcaatatacatcatccttatgaacctctaaagctcgcgctgaagaagctgggcattgccgagacggaactgagacaatctgctatgagtctcattaacgatacgcttccgtcaactctagtcatccagttcaaaccacagtatattgctgcggcatcactgtggtttgctgccaaatttcacaacgttaatctttcccagaatgggacaatatggtggcatgtgttcgatgttgctccagatccgttgagagttgttgtgcagcaaatgtctgagctctttgagaaaagagccccatgctccgtgggtcctgttaccaagccagtaccagcttcaagcgcgacggataaacaccagatcaagccggccccaactcatactccaatggataagcatcagatcaagcaggttccagctccaatgaatagacatcagatcaagccggtcccaactccaactccaatggataagcatcatatcaagcagatcccagctccagctccaacgtgtagacatcatatcaagccggttccaactcccatcccaactccgatggataagcagcagaacaagctagctccaactccgatggataagcagcagaacaagctagctccaactccgatggacaaacagcagaacaagccggctgcagctccagctccgacggacagatgtcagagagtaagcaccccggttcctgcaccgagggacacgcaatcttcaaggagaagctttagcagcagcagcaacacagaagctcctagacgtgtgcctgcaggccgttcatctaacgagaagcccagagacaggtcgccaaggcatgaagggcactggtgccgaggaaaggatggagagaaccagcattgtcaaaaacacagagaccataactctgagcagaggccagaagaacggtctaatcagagagctctgaagtctggtcttgcttaccttgttcgtagtggtgggccgaaggatacaggtgcagcaacagagatcaggaacctgaccagacggaagagaaggatccaggaggttggagggctcccaactcctgtttacacgtcggatacggatgcttggaggcaagttagcgctgtagttctttttggaacgaagggacagaaaaggccgagaggagatgaaccgtaggagttgccgccttttttatttggtattttgcagagaaggtcgagagaagatgaaccgcgtaggagttgccgttttcatttggtatttggcagagaccgacggctggtctttgctggactgatgatactttgagacaaaggtgtctaatgtggacggggtctgtgaattaagttcactcgtgcgcatcagatgcacccagcttgcactgaaaatgacacgctattgtctccatggaccaggctgttccggttctgtaggcacggatggacagtgatggagagaaagctggttttgggcaccacctggtgccagccatctttgttttggactgagctgtatggctcaaaacaaattttgtagtgtgtgtccatgtgtatattaggacggtgttctaattctgtctcagatcgtccagtgctatttagttatttacaccgtgcctgtctgtccttcgagttctcagtttttagtggcttattggtgaaaatttgttatccgtttgaaatttctcatgcgaacgaggaggagatttgacagtgccttggccgtcgacacaatccgccaacacatttgatcattaccagcttctgcaatatgctctagagagcctggtttgtacaaataaagggagaacagacagatttttgtacagcctgatggcatagcgttagccattgtatcatatacaaggactggcccgagcgaatacgctcctggagtccttttgcacaacgagagcaccacaggatgcattcgtttgtgattgtctgcaatagaaattgcgatgcttccaaattttccagaccgccggtgaaatgagcttagtacggtccttg

SEQ ID NO: 41623 - DNA, 2846 bp, Zea Mays
ggccagtcaaccaccgcgagctccatctccatggacgcctgctctctcgtccactgccatctgccacggccactgcagctcccgctccttgcgcctccaactcccagccggcaccggccccgcgtcgccagcgccttggtctgctgctgctgccccgccgccgcggcagaccaccaccaggaacggccctgggagtggtacgaccgcgccatccagtcccacgcggggtccgacctggcgcgctccctaggacttctcgccgacatgcaagcgtccggggggcgccctagcggcagcgcgtacgcgcgcctcatccgcgcgctgtcccgcgcagggcgcgcgctggaggccgaggcgctcctcctcgagatgcgccgcctcggcccgcgcccggaagccgcgcactacaacgcgctccttgagggcctgctcgccgccgcgcacctccgcctcgccgacctcctcctcctccagatggccgacgacggcgtcgcgaggaaccggcgcacctacacgctcttgctaggcgcgtacgcgcgcgccggccggctcgaggactcgtggtgggtgctcggtgagatgaggcgctggggcattcgcctcgacaccgccgggtatagcatgctcgtgcggctgtaccgggacaatggcatgtggaagaaggccaccgacctcgtcatggagatgcaggaggttggggtggaactggatgttaagatctacagcggcctgatcgatacgttcggcaagtatggacagctagcggacgcacgcaggatgtttgataaaatgcgcgccgaaggcgtcaggccagacatatcgacttggaatgctttgattcaatggcattgtcgggttgggaacatgaaacgcgctctgcggttcttcacatccatgcaggaggaagggatgtacccggacccaaagatatttgttatgatcatcagccggttgggggaacaagggaagtgggatgagattaagaagttgtttgatggcatgaacaatcgaggtttcaaggagagtggcgcagtgtacgcaatattggttgacatttacgggcagtatggccattttcgtgatgcacaggactgtatagctgctcttagagctgagaatacacagcttttgcctcgtgtattttgtgtcattgcaaacgcttatgctcaacagggactgtgtgaacaaactgtaaatgtacttcagttgatggaggaagaaggatttgagccaaaccttgttatgctgaattcgttaatcaatgcttttggcactgctggaaggcatttggaggcactagctgtatttcagcatatcaaggatagtggtatgagcccagatgttgtgacatacactacacttatgaagacattcatgagagcaaagaaatttgaaaaggtatctattgaattcggaatcattgctgttgtaattggtccattgtcaatgcatatgatcatgtactggttttcttcaaggttgaaacactatgcatgcgaagatttggatggttatggcatcaagccaataactctttccaaggctcctgaatgtctatatgttgatcagaagagtgaaaaaggataaccgagtatagttttcacccttgtacttagtcatggttatggtcaaagcaagactatcaggcataaacataaggatgaatcagaaaatatacataggccatgaacagcgagaagcatatagacactccgaaaatgaagcacatcaacttggtggaatttccttacaggtttctttctttccaagtcatatattatgaattttgtgtgagtgtgacaaggaattgctgaaaacatttggtgttgatcattgattgttatgtaaatgtatccaagtagctacatggtagcttatgcaatcaattgccaagtggtagagtgtaaacaatacaactacattttcactatttataatgtcagttgtaaatacttcaaattcaaagtagcgcaacacaattatgattcagtcctaataaacagactgtaaatacttgatggcttgatgtactattaaaattagaatagccaagtgtaaatatttgattttgttctggttactgaattaactttggcacccatttccacactgttattattgagtttatttattgtgggcttcatcgcttataatttatatacagaatgaaataaaacacatggtcaaaccttttcatcagaattgtaggctctccgttcctatattatcactgatggactccttacatacttgatcagatcatagattttgcttgatgctaacaataacataaaattaagagacaaaaaaaggagcagcgtcctctcgtgactctgctagaacgagaagcaagacaaacattttgatagatttgtggccatcaagacagtcaatggcgtgagctcatttgagctccttttgtcttgattcaaaatgctcttgttgcatgcaacattagaatttgttgtggtgggattttgcacatctagccagaatttggtaacctcatgtttcttttatcccaactgcataatagatgcaaaatctaatagctcacattcccaacaaaattaccctgtccttctcaaaagatacactaatgatgaaattacaatgtgggcaaataaaatcatcccacttactgcatgaagaatgggattacaaaactacctatctccttcctttcgagctcacccttgtcagtcattgagctgccagacacctgagaagaatcgatctcttgctttgtatttcacattctttgtaacctgaaaaggtgccagtaaaattaccagagttctttaggcctttagggacactcatcaccattggtttcttttttttct

SEQ ID NO: 41624 - DNA, 3317 bp, Zea Mays
tgacaactttactacccgtctcgcgcgagcggaacacattccgcttgtcctctctcgccgctgctccgacgagctcgccggcgccgactcccctcccgtcggaccagcccgccgaaagcggccggacgaacgagaggcttccctcccctcgcacttgcctgcctcgtcgccttcctgagcctctttctgcgcccggccacgggctcgcggccccacgcccgagcacgtgcagcaggcgccgaacccgcctcctgtgccaccccatcggagctcgccggccacgtggagggattccttttcctcgcagcattcctcgtcgccgacggcttcgtcgtgctccaggggttggattggcgtggagcggagagcagtgcaaacctgggattgaattctggtgtagatggattccacagctcttcaatatgaaaaccaaaaattggtgcaacaactggaggtacagaagtccgaaatgcatgcattggagcgcaagttcaaggagcttagtgatgatcaatgttcttatgacaagactctgatttctttgaataaactgtggaatcagctgattgatgatttggttctgcttggagtacgggctggtggggatttggataatttgcaagcacttgaccatgaagagttatcagaagaatctttggagtcgtgtccttccgaggagatatttctcttaaggctcttgaagacaaacaacatcagagataatagtgacactagcttgttgaaatttgttgaagaagctcttgcttttcggtcttcagcaactgttactttgatgaagtccctgcaagagactatttcttcgcagcaagctagaagtgagtctttgtctttagctttgaatggacaaaagtcaaatgaagatgttattgttgcccttcgaaatcataatgattgcttgaaagaggtggcagagaatgcgagtcaagccatctctattatcaacgagaagcacaaaaggtatcttgatgagattgaggcttttaaaagcaaccattcaagggagctacaggaaatcaagcgtatttcaggtgagctagaggaaagcattgcagagcttgaggaaagtcaaaggaagttggttgtgctccagttgcagaggcatggttctgtaatggatgcatctggggcaaatgctgtgaatggtggtatttctactcataaatcttcagataaaagtatgagctggcaagacctcaaagatgctgttgacgcagctaagaccctcgcaggaaaccgtctattagaactccatcagactcaagaggataatctgatactatccaaggagctgggagatcttgaggggcaattgaaagatgagaagtatgtcttggtatccaaaccgtacatgattcttaatgataaactacaacatttgaatgctgagatagagcgttatagagggttggttgaagttttacagaatgacaaggaccagctcatgcaaagggagaaagaaatttctgcaaaagcagaatcgctcgacagtgttaaacaaaccattatcacatatgagaaaaaaattgaagaactggaaactcaaattcagatactcttttctgaaaagaatgatctcgaaaccaaggttgaggagactttgcaagattcaggtaagaaagacttcaagaatgagattcatgttatggctgcagcactctccaatgaactgggtatgatggagaatcagttgagtcgatcaaaggatgcagcttctgaagcacttgcattgcgtgagcaagctgaatcattaagatcattggtagctaaaaagattgaggaacacaagaagatttcggataaatacaactcacaagtaattgagatcaagtccctcaaggcattggacaattgctgatattgaagaatcagaaacccgagctcgcaatcaggctgaatatttgaggagcaatctagaggagcatagtcttgagcttcgggttaaagcagcaaatgaagctgaagctgcatgccagcaaaggctttcctttgctgaagtggaactagaagagttaaggaccaaagtagatgcatctgaaagagatgttgtggaacttaaggaggcaataagaattaaagaggctgaaggagacgcctatatttctgatatcgagttggtcaagcatatgaagacatgcaaacgcaaaatcagcatcttcttcaacagcttactgatagagatgactttaacataaagctagtatcagatagtgtgaagatgaaacaagcttgtagttcccttctctctgacaagcttatgctagagaagcaactccagcaagttaacacttcactggagtcatctaaactgaaaattgcccgtggcgaagagcagatgaagacttgtgtagcgcaagctataaaaacttcagctgaaaacagacatcttactattagcctggaaaggattgcgctggagttatccaacacagataaggaactcaagtggcttcggtcctccgttggatcctctgagaaagaatacgagcaaactcagcaaaagatatctgagctgagagcgttactggagcacgagaggagtgagaggcggcggcttgaagaacaatatgaagaggtgaaaaatgaagttatggagctgacctctgagactgaagagactactgtccggaaacttgaggatgaaataaaagaatgcaagggtattctcaagtgtggtgtatgctttgaccggcctaaagaggttgtgatcaccaaatgtttccacctattctgctcgctatgcatccagagaaacctcgagattcgccaccgaaaatgtcctggctgtggaaccccattcggacaaaacgacgttagggaggtgaagatatgaacctcaccaaagtgacagtgacaaaaccgacttgcgtgtgaacagcagcaacaaactcccttgtgaatatcgtctgttatgttggcgaacatctagatctaacttgctttattactgggattaaaattaggataagaactggaagaagtgaagttcctaatttatttgctatcgtgtgtgctatgtatgattacccttggcagcgagtggtgtatctgctgggtgtcaatatgctcgaattctagctcctccctgctagcgggtgcatgccagttttattaaggctattccatgtacatggtgtcacactctttaatacataccacataggatgaaaatctgatgtgacatgtgattgaaacatagggagacaccactcatgcaccagattatagacattgaaatctgaaccatctaaatgaactgtaactcatactcttatatatatctaacattttgtcttgtg

SEQ ID NO: 41625 - DNA, 2717 bp, Zea Mays
ctctgtgttgtttccttctctatggcctgcactgtcgatgtgcggcgcaagcgctgctacctcctcctgaacccctccgtgtgcacaaggatgctctgccatgctgcccctaggtgctaactccctcacctgaatcgcttaatttttctctcgcctccacccaatctcagatcaagtccaagctgttgggcccactctgatgacccagccccaaaatccccaatcgagcttgatcaaagctcgtcgattccaccggatttgacctcccgccgcatttgaattcctcacaatttccacttctagtagcttctcgaaccttctggaggcattgcagctccaactctaccctttcccctagggtttcgtgtttgcctcggcgatgggggacaccccagccaccaccgcggcggcgtcacccgcttgttccatgcaaaaacagaaatgcgacgatgctagcgtgggctgtggctggtggcaaagatcgtgatggtgttgtcggcggtcggggaggtgcatggcaggatggagcccactgcggtggagcaggcgcttccggtcgaggcacgagagatgcttaccaccgacttcgaggggcttgtgcggcccaagatctgttctcgaggagggggtgcacgcggtcgtctaggatctcaggctcactatggggtttcgccatcccaaggcctccatcgctgacaggctcatgcttactaagcgcaaggttttgtaaactctctgtcatttacacccattcctgcgcagtttactagccattttggtatgaattttggagatcttaactgaggtgatcgttgcaatatgagaattcttgtatgaccattatactatattaatttatatgtcatggcaatgttgtttgcatagtgcatgctatcgcttctgaatgatacgttagcgaataatgattccacacttgtgatgattgctgcagagttaagcttaataaatttgttttgatgatcttgctctgtctgaaaatcccacattacagtaaccttttcatacaactaaccaatcataataattctgcattttgaatgcttaggactacactactggatatcggtaagcttcaacctcatcagaattttggccttccattttagcaaatactatcggtgtaccaattttatttgcagtttgtcttcaaattttatttcatgtaatataaacactgtctataatattttcaatccttttgcagttaatccaattaattttatgttgaatccggtagagagggcttctaagttagtagtacactctgtggctatttcactaaatttcttatgtgcttaagcttccgtcaaatccatggagtttttcttagtaagaccatattaaccttgtctatctatatcctctaagatcaacggtgttttcatacaagatttaccgatgtactgctaatgtcctatgccaatgaaatatgggaagcctgtagatatatggattttcattgctttgcagtcttttttgtgttttgtttctaatttttaaataggtcttgacctgccacctccaccttctaatatttaaataggtcatgacaatacacatgagtaagactataggatgatgacttggactactaatatttctgagatttatgtgagaacataataaacaacattaatatttctaggaatgtattatggactctgactgtatgactataccaatatctgtacagagagatcgcccctcgcgtaatagctgacgggcaggtatgcactcctttttgtattgattgaataacttgtagagtggtatattttcaaaaaagtaagttggtatgatgcttgatgtatatcaatgtatgactactctattttctctttgtatttcatttagataagaaacatcaatattcatgctacaacaacaaactaaataatgtacagaagcacaagattctcacttcagggcttgtttggttattcctatcccatgtccttaaagctattgattatgtgcatgaattgagtatgaggtaaatcaatgagcttaatttgcgtttagtattcaaggtcgtaatatgataccaatacaacttgtgtccccatttttacaggtgccctggccaaagcgagtgttctactgtacccaaaaactttagacctcctgaccttaactggatggagcgtagacactgaattttgatggcaatgatgcatgtctatattgtcaactttgagcctctgtaaacaacgtaattgaccaagagcggggatgagtagaagaggatgatcctggtgtgtatattactattcgagcattgcatggtagcattagagaactacgtcgcgtcggattcaggtgactggattctaagcgaggctactcatcgcccgtaactttggaagtgtcgatttataagaaggcagaaaatgatgcaaaatctaagtgttcttttggatctcaccaattgtcagcacgtctgcttatagcgaagttctagagaaggaaaagttggaatgaaactcaaattttggtggatgcataagtgtggagacttgaattcatatatacttaattaggctcaacgttagcgcaaacagttgatgaccaagttttttcattagtattttagtttggatttaaagtacacttatgtatgagttatttgacaatgcttatttatgatatattgaatgatacttatctatattatattaattataatgttattaaat

SEQ ID NO: 41626 - DNA, 1988 bp, Zea Mays
gcctgacttagtagagatatcaaccaaactaactatgttttaaagatccgcggctgcagcttctgcactcagccacccaaccaaacacacggcatggtggtccgccggtgcacggcgtctccaacaccgtcatcggggtcctggggggcggtcagctcgggaagatgctctgccatgcagcgagtcagatggggattagaattgtcatcctcgaccctcttcccggctgccccgcgagctcggtttgcgatgagcacgtcattgggagcttcaatgatgaggacacggtccgggagttcgccaagaggtgtggggtcctaacagtggagattgagcatgttgatgtcaccacactggagaaactggaaaaacagggcgttgactgcgagcctaacgcctccacaatcatgattattcaggacaagtacaggcagaaaaagcatttctcaagatgcgagatcccattgcctgacttcatggaagtagatactttacgcagtatagaggaggctggagaaaagtttggctatcccctaatggtcaaaagcaagagattagcatatgatggtcgaggaaatgctgtagccaagaacaaagaggagctaccttctgttgttgcttcactaggtgggtttgagcggggcttgtatgttgagagatggactcctttcgtaaaggagctttctgtaatcgtggcaaggagcagagacaactctactgtctgctatcctgttgtggaaacagttcacaaggtgaagcagggttctttctggctcatcagcttatcagtagggcactaaccattccaggcacatcggtccattggtacgcaaagccagagatgcggaagcaaaggaagatgggtcatattacaattgtggggccttctaagataagtgtaaaatcacgcttggacaacttgctgcaaagaaactcgtctgatcccaaggaagttagccctcgtgttgctattataatggggtcccaatctgatcttcctgtgatgaaagatgctgagagggttttgaaagagttcgacataccttgtgagctaactattgtttctgcacatcgtacaccagagcggatgtatgattatgcgaagtctgctaaagacaggggtttcgaggtcataattgcaggtgcaggcggagcagctcatttaccagggatggtggcttcattgactcctcttcctgtaatcggagttcccattaagacttcaacactatcaggatttgattccctcctatctattgtgcaaatgccaaaaggtattcctgttgcgactgttgctatcgggattgcagaaaatgcaggtttgctggcagctaggattctggctgcaagagatcctgagctccaggacagggtaactaagtaccaggatgatctgagggacatggttttggagacagcagaaaggctggaggaccaaggcccggaggaatttctgaagggaatggattgaccccttttgaagccctggctctggggcctgggaggaatacgaatatatgggtcggcgataactcagtccactcgattatggtttaagatcgggagtcatcaaaaagatactttaaggactagttccggagctacaaaacctgaggggattgggggctagaatctccgtgactcttagagctgttttgatgaccaagaatcacgaagggatccataggcttggctgccttattcagtgattttagcctctctaatcccatgcggttttgtggttttcaaactagcactaataggcttggctgcactcgattttccttacaattcttttttgataattgtgctatcttaacccatcgcaacatgtccttttccccttctaatatagggtatgaattgggtttagaggggaaaaaagaacgggagtaaacgttgtacgtacgaaaagtaaaacggttgcctggatttttcagccgcacaaggtgctttgagtcaagtagttttacatattccctccgtaa

SEQ ID NO: 41627 - DNA, 5091 bp, Zea Mays
ggaatttgagccagtccgtttgttggggcttcagctccttggaaaacttttgactgggattccatctgagaagaaagaaacgaaactatttgccctacccttagggcagtctagacccatctctgaaaacttaacaaaagaaataacagcggcacctcagtttttcttgaatacaatgtctgaaaggctattcaaatttccactatcagataacttatgtgcagcacttttcagtgttcttagtggaaccagtgcacaacaggttccccaggaaaattctgagcctgatccatcaagggatagaaattgcaatattttaagcttgccacccttttcccttcctcagattttgatatgcatctttagatttatgcattcttgtaaagattcctcagcacgcacaagaatcttaaatcttcttcttggtttgctggattcaaactcttcaaacatcgaggcattaatggagcacagttggaactcttggcttgaaacatccacaaaacttgaggtattcaaggactacaaatcagtttctaaaggcgaccctgacgatgtgaaggcagatgaaataagtcttgttaggaacttgtattctttggtcctttcatactacctgcgctttgttagaggtggctggcatcaacttgatgatactgctaattattttctcttaaaaactgaccagggacaactatcatgttctgatttgcttagggacatacttgatgatattgctgggagcctgcttcacaaatctgtggaagataatattttccttttacagccttgctgtgataatgttttacattttttgaaccttatacaggagctgcttatcagtcaaatgggaattaggctattgtttctctctcccagtatttcggaggaatcttcacatgataacatatggaaagaagatattaagtcaacagtaaatgatattttaaataccgagagccatggtcaatttacaagattttctgatgtaaatgaagtcagtgatgattggtggagtttctttgacaaggtgtggagtattatacgtaatttgaacggaaaaggaccaagcaaatttataccaaaggatccaaatgttgaggttgcatctttggggcaaagggcgcgtggactggtggagtctatgaatgtccctgctgccgaaaaggtagctgttgtatctggaggcggaggtattggtactgcattaggtataaaagtgaacagatttgctgagaaagcgacaacgtcgagggaagagataatcccaagaattttcttccaccttgtgattctgtacctctgcaaagctggattggagaatgcatccaagtgtgttatacagttcatgtcgttgcttccgattcttcttatttcagaagatgaccaaagcaaaaataagttgcactttttgatatggtctctactaattgtaagatctcagtatgggcaacttgacgatagcgctcgtttccatgttttctcgcacttgattcttgaaactattatatatgggaagtccatgttggtcactaatatcttagagagagatgattcggtggacgtcaacaacaaggagactggattcatccttagctttatacagaagaatcgtgttcttgctgcggctgctaatgaggttaagcacatgaaggctgttcaggctgatcgtttaaagaagctgcaggatcttcgcatgaagcttaacgagtgttctgctacggagataaagctagcgcaggccattgaagatgagatacatttaactattactgctgtgctttcagcggatgacaatagaaagacagcttgtcaacttgctttccgcgaggatcagcaaattatcagggataagtggatacatatttcccgtgctctgatggatgagagaggaccatggtctgctaacccttttccaaatgatgttgtgactcactggaaacttgacaagacagaggatagatggaggcggcggttcaagttcaaacgtaattacaaatttgatgaacgattatgtcagccttcacagtcaaggaatgaaagtacagcaactttagctgaccagctgtacattagtgccaaaattactcagaaaatgaagcaattccttgttaaaggagtgcggggaatcacagaggatagtagttacgaacaatttgaagacactaatgacgcgagtgaatcttcccagagtaatccttcagagagccaaaaccttaataatgctgcagatacctctgatcatcatgcttctgcacattataagaaagagccatcatctactaatggagataatgattatacaaaggtgctatgttcagttcgttgtgtttttgttaccccaaagcgaaaattagcaggacaactggatatcacacgaactgtcatgcatttttcttttgaatttttggttgaaggaactggaggatcatctgtttttagcaagtttaaagacaaaaaagattcagactgcaagaacgagctgggaggtgtggacagacttgacggatgccgagacagtatgattgaaaccaatggtgttttgatgcaaaaccagtctaacaagatcaaacgtcacaaaaggtggaacataactaaggcgagttggacttgaaatggctgagaatgccagggaaagatggaaaaggagggaaatcagtaactttgagtatcttgtgattttaaatacccttgctggaagatcttacaatgacttaactcagtatcctatatttccatgggtattggctgattacacctctgaaaagcttgatttcaacaagtcatcgactttcagggatctttcaaaaccagttggtgcgttggatgaaaaccgcttcaaggtttttgaagatagatatcttagtttctgtgaccctgatataccaagtttttattacggatctcactactctagcatgggaatcgttcttcattacatgcttaggcttgagccatttacaactctgcatctaaattttcagggtggcaagtttgaccatgcagatcgtttgttccaaagcattgagagcgcttacataaatagcttatcaaatacaagtgacgtcaaagagcttattccagaattcttttacatgcctgagtttcttgaaaattcaaattcatatcatcttggtgtcaagcaggatggggaacctataggcgatgttgctctccctccatgggcaaagggatcgcctgaagaattcatccacatcaacagagaagcccttgaaagtgaatatgtgagctctaatctgcataactggattgacctcatatttggttacaagcagcgtggacaaccagctgttgaggcagcaaacatattttactacgtgacatatgaaggtgcagttgatctggaaaatatggatgacatgttacataaatctgctattgaggatcagatagcaaattttggacagacaccaatccagattttccggacgaagcatccaagaagagggcctcccatcccaattgctcatccactgtattttgcaccacagtcgctaacattaacatcaagtgtttgtagtacggccagccacatgtgtgctatactatttataagtttgttggagaacactgttgtattgatgaatgagggactcatattgtcagtaaagctgtggttgacaacacacctgcagtcaggtggaaatttcacatattccggaccacaggaacattcctttggaattggttcagatgttatctctcctcgtaaaattggcactttccttgctgaaaacgttaagtttggaagacaattcttagcaacgatgcaaaatagtcgtgataattatttgattttatgtggaaactgggagaacagttttcaaataatttctcttagtgatggaagaattatgcagagcatcaggcaacacaaggatgttgttagctgtgttgcagtttcgtctgacgggaacgtggttgcaactggtagttatgacacaactgttatgatctggcatgcatttcgtggaagaccaattgataagaaaatcaggggtgccaattttgaactttcagaaaaggaacaagttatagtggaaaggcctgttcatatcttatgtgggcatgatgacatcataacatgcttatttgttagcacggaacttgacattgtaatcagtggttcaaaagatgggacttgtatttttcatacactgcgtgaagggagatatgttcggtccatccagcatccttctggtgttggtttatcaaaattggtagcatcgcagcatgggagggtggtattgtattctgagaatgacctctctttgcacatgtactccatcaatggacggcatattgcttcttcagctacccttggacgtctcaattgcatagaacttagttgttctggcgatttcattgtttgcgctggtgagcttggacagatagtcttacgctcaatgcattctcttggtattgtttggaggtacgatggaaatggcaagacaattacttccctagctgtgacccctgaggagtgcatcctagcaggaaccaagaatggcagcctcttggtgttttcaacagaaacttctcttcttcgaagggggagcatgcaacgaaataaaataaaaccctccacatctggttaagtcattggctgcaagatatccaacgaatgtaaaacaaatgactgcttcatgctgaggtcattaccagcttatagaactgttctcacgaccatgtagtctgtacataatgaaacacacttttgtcatttgttttcactaccaaaagtgaagctggcattcaggaatgagggttgtcaagatattcagctggtgataatccttgagcacccaatctgacgaaggaacactggttagccctagatccaagcatcttcacttagccttcacttggtaggcattgacatctatcacaatgttattgtagcatttgacttcgttggtgttctgtgcgacagtttgtgtttgtgtagtatttatattagattccagtgcttttgtaaatgtgccatttttgtgatctaaagtgttagaaagcatcttcatatatcatatgccctcatctatctattgataatggcgttctgtattttcc

SEQ ID NO: 41628 - DNA, 1973 bp, Zea Mays
atcctgttctcgaagccgtctgaccttgcccctaccccgctcattatcgttgcgacgttggcccgtccgacatgtccgatctcgctcgtcgtgacaacgcgacccatcctcgacggccagtgagcccatgcactcaaccaatgagatgatattggaaaaaaggaacctatcttgtgagattcagattcctgttgcatgttctgctgtcgatgccctcaaattactggatcacattattgaagctgctagagtagtgtacatggacgagctagaactttattttgcaggagatgatgtcggtccattctctgcgaggaatgaacttgaatctctaaatcttttgttgaaaacaatgaaaaaattgcttctaacttccaacacggctgccaaggaagtactgcagatactacatgatgagatagttgttaagctcaaatctgttggaaagtctgacaatgcttggatggttgttcaaacacagaaccatgatgctgaggattctcttctgaaatggggggagcatcttggtattaaatctagattgcagatagcctggagctggaagaggaatgatagcttctgaaagtataggtgtgggggatattgctcttgaaattccagagtccctcattatatctgatgaacttctttgtcaatctgaagtgtttctttcattaaaagattttaataacatcacatctgagactatgttattattgtggagcatgagagagcggtataatctaggttcaaagtttaaaccatattttgatacgctcccggcaaattttaatacaggtttgagttttggaatcgatgcacttgctgcattagaaggaacccttctttttgatgagataatacaggctaggcagcacttgcgccagcagtatgatgaattatttcccttgctatgcacaaatttccctgagatattccggaaggatgtgtgcacatgggacgattttctgtgggcatgtgaactatggtattcgaacagtatgatgattgttctaagcagtgggaaattatcgacttgcctggttcctgtcgctggacttctgaaccactcggtctgtagttctgcccccctggaagttttcttttattagtcttcaggggagcaatgctttctcagttatgggaaacatccagggtcgcatcttcttacgttctatggattcctaccaagaggagacaacccttatgatgttatacctttagatcttgacacatccgcggatgacgaggacatcacagctcagtcttcggcgactacaagccaaacaactcatatggttcgtgggacatggctgtcgacatccggaggattccccacgtatggcctgccccagcccttgctgacctatctccgtgctgctctaggctgtgagatgaaggaaagcgacaaggtggtgctggagacaatcctgtccatattcagtcccatgcttgaagcgttgttgcctgagcaagatgatcccaaccgggagagcgccagttgggatgtgaagcttgcatcggactacaaagacctgcagaggaagatagtatcgtccatcgtcacttcctgtacctcagccttggaaaatctgtagctcttgctggatggaagtgcttcactgatgaattgcaagagcacacgccctgggggccctgttggaatgcctctgctggcgtgtagatggccaagctattgcagcaactgcaatctgtgaccatctctacaaaccgaagctgctcgtcgtgagttgcttcatccgaggaatgcggagacacggggtcgtgctcccgaggctggcttgtgtgattttatccgcacctgattgttaccgcatactgtagttgcgtttggtgaaagaaagctacttttgagctagttcattgggagccaaacttgctttttggtgaacgaaagctactttggaactaatttcgtcgcaatgtggttgtggtccatgtgctcctgaaat

SEQ ID NO: 41629 - DNA, 2542 bp, Zea Mays
aaatagctaaacccaaatcgataccaaacccagcccggaacgcacgccccccgccgccatcgccggcggccagccactacaagcgcggtgtccggaacctgtactgtactaccaaccccaacagcctggactctgatgagccccagttcatggcctgccatctctcccccctcttcaatctccgactcttgctgctgctcggcgctgtcctcggaaacgccgtccttgtccgcgccggcggggcggaggcgtcagatcgggctgagccggacccgtactcgatcctgacgtggcacgactactcgccgccgtcgcccccactcccgcccccggacccggcgtcgtcgacggcgacctgtgagggagacctccacgggaagggggacttccgcacgcactgcgaggtcttcgaggaggtggaactgggcgacgatatctacatcacggggaacggcagcctcgtgctcctctctggcgcctccctgacctgcgagaaggtcgggtgcgttatatctgccaatctctccggcgaggtgcacctcagccgcggcgtgcgcgtcagagccggcagggtctcgttggttgccaccaacatcacagtcgccgacacggtcgttgtgaacaccaccgcgctcgctggcgccccccctgaccggaccagtggcgttcccacagggacgcacggcgacggtggcgggcacggtggccgtggcgccagctgcttcgtcaaggaagggcagactcaggaggattcatggggtggtgatgcctatgcatggtctgacctcgaacacccttggagctacgggagcaaagggggctcgaccagtgttgagaaggactacggtggtgccggtggtggcatcgtgtggctgtttgctgatgatctggtcatgaatggcacagtgctcgccgccggtggggatagcaatgagaagggtggaggtggttctgggggaagcatctttataagggctgcatcgatgtatggtggtggcaagatcagtgcctctgggggtgatggtttggctgggggaggtggagggcgagtttctattaacgtttttagtagacatgatgacacccagatttttgttcatgggggaaggagttcaggctgtccagataatgcaggagctgctggaactctttatgaagcagtaccaaagagtcttattgtcagcaacaacaatttgagtacacagacagatactcttcttttagagtttccaaatcaaccactgtggacaaatgtttttgtaagaaatcgtgccaaagttgctgtccccttgctctggagtcgcgttcaggtccaagggcaacttagccttctttctggtgctattctaacttttggtctcactggttatccatactcggagtttgaactgatggctgaggagcttcttatgagtgactcaataattaaggtgttcggtgctttgagaatgtctgtaaagatgctcctaatgtggaactccagaatggaaattgatggcggtggagattcgatagttgcaacttctttgttagatgctagcaacctgatagttctgaaggaatcatctgtgatacactctaatgctaatcttggagtccgtggccaaggtgtcctgaatttgtctggggacggagacacaattgaggcacaacgccttattctatcgctgttctacagcatacaagttggacctggttctgttttacggggcccacttgtaaacagaagtagcgatgatgtggccccaaagctgaattgtgaagcagatagctgtcctgtggaaataatacatccaccagaagattgcaatctaaattcttcattgtcgtttacccttcaggtatgccgtgttgaagatattgatgtatggggtgtcgtacaaggaactgtaattcatttcaatagggcaagaagtgtcactgtgcatacatctgggaccatcagcgcaacaggctttggctgtcgatctggagtaggacaagggaaaatgttaagaagcggtgtatgtggtggtggtggacatggtggcaaaggtgggaatggtttttataagggagaccttgctgagggtggagctatctatggcaatgctgatctaccctgtgaacttggcagcggcagtgggaatgactccacagagttgtccacagctggcgggggtataatagtgatgggctcatgggattattctttgccaagtcttgccctctatggttcagtagaatcaaatggtggcagctatgctagtggctctgttggaggacctggtggtggttctgggggcacaattcttctatttgtgcacactttgtccttagctgaaagctctgtcctttcaagtgttggtggcttcggaagtactggtagtggtggaggtggagggggaaggattcattttcattggtctaacattcctactggagatgaatatgtgcctgttgcagctgttaagggatcaatacttacaagggtactaggcctgctgtccaaagtgttgtgctagctgttatggctgaaggtcgtctttggtgtttagctggg

SEQ ID NO: 41630 - DNA, 3363 bp, Zea Mays
atccaattttgggtccgcagaacctcctcctctcgctccgccgccgccttcccctcgcccaccacgctttggtcccaaacccacggtcgctcatcctggacctccacgccatcgaggcagtgaagctgggctcattcgtgcaatcgtgctcaagtctggcatcaactcccccatctaccgggacctccacgcgctcgtctcccacccacgcctgctctccgttgttgcctcgctcctccatatgcccggcctcgtctgcaacgtcccctacacagcgctcccgtcgtcgtcctctgcgtcgaccgctccatccccatgctcatgcgccgcaaggaggccaagccttacgacatgattggtgagaccagaggagcacgagcgcaacctccgtcacccctaagatctcctcaccattgtggccatcctgcaagatcagtactcattatctattaagaaggttacggttagcttggtgtgtaagtgtgttggacaaatgaggtcccgtttttttactggatttatttgccttttcttttctgttttggatatttgaagtcttatttactagctattaatacattgtttttaagtcatcggccttgcaagcattgcctctttctttaaaattatctgatgactggtgaattctgttttgatcttttagattattggcattgaccttttatctcaaacgctgcgacccgtcattgttgaacttgcagaggataggcactggagagtttgacttgcgatatttgagtacatcccattgctggcgctccgagtatctggccatactattgattcacataccagctaaatttaggaccatcccgattgaaggctcttcccacttaagtgattcttccttctgaatccattttttagcttattcattcggattatgacccataattatgtttttttgtttgcttgaattcggtcaaacaaactgagaaaagcgtggatcctctgaagaatgtctgaaaaaaatgatagacaagtccctagatttaccccaatttcacttgctctatagatttatagttctataatatgtgcttccttatcaatctttgttactcaattatgctagataatcacttgtccttaatctaattaacagtgttgtcatcatagatgaagctgacaacttagttgattccttgaataagatatacaagtcaaagcttacatcttcttaggttactctcacctttcattaacctttccatcacagtctggcaaatagtattttgccttgtgccataggtcattatacttagttgcaattgtattgctttgtgtttcattcaatgaacataaacatctacattccatgttgtccattagttatgatttttgctggaacataaatggcatatagctctgtattttgtgtgcctgatgctcattcagtactattgtcaaagcacaaaagggagatttaggaatttatttggcttataaaggggcataaacaaagagggtcttttagtggtggagttagcttagcttgcctatggggttgtatggcacattataagagattctatatatggtttcatctggtttaggtttagaattttcattttgaaagcaacattcagtccatacatgacttgagcatgctttctaaattgacatttttggtgtttacttgggctaaaaactaggattcttgcatttttctgccatgtgctgtttacaggtgaaattgtgttgttcagaaacaaactttggcatccgtttctcattctcctaactgcatttacatgtattcattttccttttggattgtagctgaaagcagtcctttcccacctagatgaataccttaatagattttacaatgttttgggagctaggaattgatgatacatccagaccttggtagttttaacaaggtcttccacacatgttctgatcaacaatcaagatggtagcactgtgtcttctatgaccacaaaccaattcttgttttcccttgacatcgataacataaacatagttgaattttgtcactttgtgaaagacatcaatataatccacaaggtaaatttcttaatctataaccactgtttgaaattggtagtctacaatctatttgatgctttaagtgaactttagaagtttatatcatttccaagaaaagtttacattaccttttccaattaatgttgactcaacatatataagtaactaccaaaatttatttggaatagaaattgaatattaacaaacaaaaaatatcttgtacttaaaatttgtatactaatataacagaactgcgacaaactcaatgatgggcacaaaagagctttgcacaatctcattccaggatcaacgactcatagatgtttttatcaacactgcacacattgtttgctgaaattagctcatgttattgatggtgtttgaaagaaacattaaagttttgcttcgacaaatgtcttttgctcagggcatctggcttggtgtttcttgtttggtgatacctgtacaagcaaatttggtgacctgctacttaaaaactgtttctgcaaagaggtcgtcttgactgatcgcaatgatgaagttctggagtgttgttgttatgatgaaggcagacccaagtattgaaagggatgatctgattttgctctaggagattgccatgtacatgcttcttgcatgtggagctgtctatgtgatcttgataagaaagatttgtggatgttgacccaacaggaaattgctactgaggtgcaaagtgaatccaagtgaaagtaattaggggagttagctatgtcaaatggaaagagagtggttgctaaaggataggaagctgaagctggatgaaggaagcaactacatgcaaccgatggcaataatgcattgcagggttgaggctcgttagaaatgtcaagttggtcccggacgtgggtatggtgcccgcaaggccgacagagctgagatcaagcactgagatcgtgccctcgtgcctacggctgcatgtcacacctggccagaggcataggctaccactactgttctaagaggacaacctgctcgatagctagcctaggatggccttcagttccagcaaggcttgtcggctcgtctcactgcagaacgctattgttggcgcctaattgaacgaagttgataccggtaggatcccatgaagcaacataagcagcagaagtctgacgaggaatgacatagatgcagtgctttcgtttgttgctactgaaaaaagatctgaaccaagtatttctgtaagtataccaacaagttagttgctactactttgtatattgatcttcgttggccgaatgtttgagtttttttcaaggcacaaacactttattttgagatcta

SEQ ID NO: 41631 - DNA, 2073 bp, Zea Mays
atccccaatcgaaacggctcgcagctcatctcaatccgatccgatggcccgcgccgccgctcgcctcctccccatcttcctcccatggcggcgtcctcccccgccctgcctcctccgccggggcttcctaaaccctagcagccccagaacctccgcgcgcgtcgacaccctcgttctccctggagacgagcgcttgcccttcccctcgcccccacgcctcccgaaccagctgcgtcctgactacgggagtggcggcggaggcggcgctccctcgaccatcgcggccatcgtcacctcactcggcggaggccctgcagcggtggggatcgtgcggatctccggccccgatgccgtcgccgtcgccgaccgcgttttccgcccagccgggaccaggagggcgtcgacgccgtggcaaccgcgcagccactttgttgagtacggactcgcgctcgacgcggacggcagcgttattgacgaggttttggtggtgccaatgctctccccgaggtcctacacgcgagaggatgttgtggagcttcagtgccatggcaacgatctctgcttgcgccgcgtgctcagggcttgcttggaagctggagccagacttgctgatcctggtgagttcacccttcgtgcattcctgaatgggaggttggacttggcccaagcggagaatgtgtctaggcttatttcagcaaagtcagcagctgcagcggactcagctttggctggcatccagggaggcttttctaccctagtaaagtcattgagatcaaggtgcattgagttgctaacagaaattgaggctcgtttagattttgaagatgagatgcctcctttggacccagtgatgcttgtcagcaaaattaattgtatgaggaaggaggttcaggatgctttggacacttccaattatgataaattgttacaatctggtctacagatagcaataattggccgtccaaatgttggaaagtccagcctccttaatgcttggagtaagagtgaaagggctattgttactgaaatagccggaactacacgggatgtagtagaagcaaatgtctcaattaatggtgtacctgttactcttttggacactgctggtataagagaaactgatgatgttgtggaaaaaattggcgtgaaaagatccgaggctgctgcaatgggagctgatcttattgtaatggcaataagtgcagttgatggatggactgatgatgacactaaacttatggagcatgtttcggtaaataggaagtcctcaggttctgcagttccgatggttcttgtaatcaacaaggtagattgtgcgccatttgttcctggagaacagttcaaacaattcagtggcctcttcagaaaacacgtacagacatgtgcagtcaccggtaaaggcatttctgatttggagagcgctgtaatagaggtcaggggtattgagcatgtgccttctgagggacgaaggtggaccgtaaatcagaggcaatttgaacagctgttgaggactaaagaagctttcgcacgtctagagtcatcaatcaacgagcagttaccaatggacttttggactgtggacttgagggaagctgcgcttgcccttgcaacaatcagcggggaggacatctccgaagaagttttgagtagcatattcagcaaattctgcatcgggaaatgatctcgcaagatgctgcatccagtagtttggagcagaagctttttccttgactgagaacaggaaccaacatgctgagtggcacttggttcgcggcatcagaatggtgaacaggcgtgcttgttctctgaggtgccacaaagaacacaagggaggtgaagccctgtccatcctagtgcacaccgtatagatgctaaggatggaaccatcgagttcctgtcttcgacgtcggatacgaatcctgtatactcgtggttgatatgagaaaattttattagacctaattgagaacgcaaacagtttcattcatccgtcttgctgtacgggacgcaacatacccgaattgtgaccaggagacattaaggtgccgtctggttcagacgttgtaaaaagaa

SEQ ID NO: 41632 - DNA, 1729 bp, Zea Mays
tcccgtttccaacaggatccaaggatttatattacacgaaaccaaaccatctactgatgatgcttgccaggaccaatcagtaccaccagcctctggttccgcaacaaccagtaacactggaagtatctcaccttcttccatagttggagaggagctaaaactagctttccaactgcgtagatttacttttagtgaactgaaatgtgccacgagaaacttccgacctgagagtcttcttggcgagggaggttttggctgtgtctttaaaggatggattgaggagaatggaactgctcctgttaagccaggcaccggattaactgttgctgtcaagacactcaaccatgatgggttgcaggggcataaagagtgggtggcagaagttgattttcttggaaaccttcagcatccacatctagtgaaattggttggctactgcattgaagatgaccagaggttgcttgtgtatgaatttatgccccgtggaagtttggagaatcatctttttagaaagtcattgcctctaccatgggccattagaatgaaaattgctcttggtgctgcgaaaggcctcgcttttcttcatgaagaagctgaaagaccagtaatctatcgggacttcaaaacctccaatattcttttagatgcggactataacgcaaaactctctgattttggacttgctaaagatggccctgagggtgataaaacacatgtgtcaactagggtcatgggaacatatggatatgctgcacctgaatatgtaatgacaggtcacctgacatcgaagagtgacgtatatagctttggagttgtactactagagatgatgactggtagaaggtcaatggacaagaacaggccaaacggagaacacaacctggttgaatgggcacgcccttatctgggagaaagacgcagattctataagcttgtagaccctcgtttggatgggaacttctccataaaaggcgcccagaagacggctcagctggcccatgcctgcctcagccgtgaccccaaggctaggcctctgatgagccaggtggtggaggtgctgaagcctctccagaacctcaaggacatggccagctcttcctactacttccagtccatgcaacatgagcgtcgcacagcacttgccaacccatatggcagtcaaagcatgaaagcgcagagcacctttgcgcggaacgggcagcagcccatgaggagcctctcgtatggccctcatgcttccccgtatcgccagtcgccaagacttgacagcaagcggcaatgagtcatggtgcttgtctgtcgaccataacatattttcaagactgaagttgtaaccagaactggtgtatgaactcagccatccaacaagcatctgagctatctattattgtggatgaagcagcaacattgattcgaatttgcatatcatctgcgagtgaatttttctctcttgttatcgcttacattttagctgtactgtctttacggctctagataccttgacttgaaaggtggaactaaacagggttttgatcggtctttgaaacaatgctcaggcagcaaatgcttggaatttgttccttcctggaaaccagcagtaggcaagtctgatatatgttacatagttgtcctaaggctgttcataatctatggtttcttgtcacaatatccaaatttgccacgtcacatattactttaaaaggtatatttgtcccaatacatagtatta

SEQ ID NO: 41633 - DNA, 333 bp, Zea Mays
tggcattcaggtaaaaggcaaaggtatggagaatggaactatgcaatttcattgaatatcttgaagttccgttgattgtgatcataggtatgttcttgcctttcaattggtagtatcttggcttatgtgctttatgctttaaaatgttgtttcttttggtgtacctaaggaaccttcttaatcatggtgtacttagacattgcactttatatgtatgatcttgtcgttttcaattggtatatgtggtgtaatggttatcatgtatgaagcaggcctaggttgcttgtaaaatgttatactccttgaggcatgcattgttgtattaagtcaact

SEQ ID NO: 41634 - DNA, 1605 bp, Zea Mays
accagggttggttatgaaaatacctcctattgtgctttaccaagtatttgttactgcataatccacaccttcttgattgacattcattgcttttatttatttatttatttatttgaaaatggaacatgtaaagttattgtagtgattgcatgtcctcacaaaggttggctacccctttacattatataagtttttttgaatcattatgtggcttaaaaaagtcagcaatataatttatatataatctgttgtttgtcaaattctggaactcatgattgatggaaggcatttgtagttactagcaatcactgttctcagacctttctctttcttaatataatttacacgcagctctcctgcgtgtttcgagaaaaaaaaattgttccaatctcgtgaccttttttcatttaattcctataaattctgtggtagggcacattgcttctcattaactctggccaatatactttgtcagtctgatatgacaggagtagtagttgatattggggatggagctccacaaatcgtgccagttgtaaatggctatgtaattgggagtagcataaagtcttttccttcttccggaagtgatgtaacccagtttatttcgcaacttttacaggaaagaggtgagcttttggcacctgaggattctttggatatatctcgtaaagtgaaagaagtgtattgttatacttgttcagacattgtcaaggagttcaagaagcatgacaagaagcctgataagtacatcaaacattggtcagctgttaaaccaaagacgggggtcccatatacaattgacattggatatgaacgctttcttgggccagagatcttcttcaatcctgagatttactctgccgacttctccactcctttacctgagttgattgataactgtgttcagtctgcaccaattgacacaaggagagctctgtacaagaatatagtattatctggtggatctaccatgtttaaagacttccacaagagactccaaactgatataaagaagatagtggatgaccgtgttgctgcgactaatgcccgtcatcgtgtggaagtgagacctattgaagtcaacgtggttgcccatccaatccagagttatgcagtttggttcggggggtcagtagctgcatctaaccctgaattctttgagttctgccacacaaaggaggaatacgaggaacatggagccagcatctgcagaacaagcccggttttcaaaggaatgtactgaattttcctcacaacccatcgtctagcaggagagttcatttaggtttcttcgatagaatagtcaattttgattcttttctggtccgttgcacaaccattgtcgggctcgggccaccctgactagatttgtagttgtagctctgtttgtactagttgtttggtctgtgttctgcgtcgaatgttgtgtatagccaacagctcggttcctgttcgaggtgcttgattgtagccagaaggcccagaaccttggacagtttagaggggaaatattgttttttttacattagcttgttcagacagatttacggaactcatataataataaatcaggctaatctagagtggccaggatagaagata

SEQ ID NO: 41635 - DNA, 523 bp, Zea Mays
tcctccgcgagagcgttattgggggagtctctataattgctggtctctatctggtcatctgggctcgctacaatcaagggcagcgggcgcctacggatggttgtttggaccctcttattattgtggataatccaagaatccacaagacacaagaaagtcccttcgtgtagatcctgaaaaaaatgtgtggattatccacacatttgtataggtggtcttaaaagacagtatacttctatttgttaaacttcacatatgcattcaaataaacaagtggtcaaagattgtagtgaacctaggctctaattagaattgtatgttttgtagaacatttttataggctattcacctatctctagccatctagatcctatcagtcaccctgtaaaaatccatatagtccttcaatcgttggaaacagataaggatccattttgacataaggaagatgctgaggaaactttggtacgtgaagttctctatctcaacaccattggttcactaatgtgcctcctaaattgca

SEQ ID NO: 41636 - DNA, 3002 bp, Zea Mays
tcggaagtcttcactcggggtatacttcgtcttccagcgggtcgaccttggagaaactcgaccagctgcactgatgcgcttagatcaagaggattcgaacgtcccttcaatcactgccgcctcgacgatgatgcactgatcgaggagggctagctcgggagtggaatatctactgacccccgactccgcaaggcatgtccaagccagcagcctcaccaccctcttctttgcctttgcccttgtgtccatccaaccaaccagccacagccactagagaggtcgaatccttactttcttgcaaacaatgggcctccttccaatccacagaatcatcttgctgtgtttttgctcgtctagcttattactgcctcctccagtatcatcggacagccgcatccttcccaacaagccgctgactgttggaagcacgctcacctccgatgacggcacttttgccctgggcttcttctccccgtccaacccggacaagaaacactactactatgttggtatatggtacgccaacattcccaaggacaacgtcgtgtgggttgccaaccgtggaaccccaataatcacggacccttcctctgcaacacttgccctgacgaacacgtccgatcttgttttgtccagcgcggacggccagacgctttggatggcaaacaccagcgctgctgcgtcgtcggagccggagaccaccgccggagaagccacgcttgacaacactggaaacttcatcctctggagttcacagggcgccgtcttatggcaaagcttcgattacccggccgacactcttctgcctggcatgaaatttagagtcacccaccgtaggcatgcactgcaacagctggtctcttggaagggcccccaagacccagccccgggcagcttctcctacggcgcagatcctgacgagctcctgcagcgctttgtcaggaatggctcgagaccatactggagaagtccggtgttgaatagttacttggtagccaggtcatatatcggaattctcaagtccactatctacctcacaataagcaaatacgacgacggtgaggtctatatgtcctttggcgtacccggtggctcctcatcgtcaactgccatgaagatcaaaatggactactcaggaaagatagaaatcctaatctggaacaccaacattttggaatggtacgtcctggaggcacagcctatgaatgaatgcagtacatatggatattgtggtccgtttgggtactgtgataacacagagcttaatgcgacatgcaagtgtctcgacagtttcgagccaataagcaacgaaggcaggagcaatggaagttttacagaaggatgccgccgcaaggagacactaagatgcggcgaagaagatactagtttcttaactttggcggacatgaagattcccgacgagttcgtgcatgtcaagaatagaagcttcgacggatgcacggcggaatgcgctagcaactgctcctgcacaggttacgcttatgccaatttcagcaccacggctttcaccggggatgacacaaggtgcctattatggatgggagatttgattgacacagcgaagcgcactggagatggagaaaatctttaccttcgagtaaacagatcaaataaaaagaggaggagcaatatcctgaaaattactctgccagctgtatcaagtttgctaatactcgtattcatgtggtttgtttggatctgttactcccgagtcaaagaaagaaataaaaaaacttggaagaaggtagtatcaggagttttgggcacttctgatgaactcgaggacgcgaaccttccttgtattagcttccgagaaattgtactagcaacgaacaatttttctagctccaacatgcttggacacggaggtttcggacatgtttataagggaacattagaatgtggtaaggcaattgccgtgaaaaggcttagtaagggttctggccagggggtactggagttcagaaacgaagtaattctcatcgcgaagttgcagcacagaaacctagttaaacttcttggtttctgcattcatggagatgagaaactattgatatatgaatacttatcaaacaaaagtttggatgcctttcttttcaattccacaagaaaaccatcgcttgattggtcaaaaagattcaacataatcttagggatagctagaggacttctttatcttcaccaagattcaaggctgaagataatccacagggatctcaaagcaaacaacatattactggatgatgaaatgaaccccaggatatctgattttggtatggcaagaattttttatggcaaccagcaacaaggaaacaccaaccgcgttgttggcacatatggttacatgtcgcctgaatatgctctggaaggtgtgttttctgtcaagtctgatgtgtatagcttcggagttttagttctagagattgtgagtggctcgaagatcacctctacgcacatgacagaacattaccccaaccttatagcctgtgcttggagcttatggaaggatgggaacacaaaagaatttgttgactcgtccattgttgcggatagttgttcgcttgatgagacttcacagtgcatccatatcgggctcttgtgtgttcaagacaacccaaatgctcggccactcatgtcatcagttgtgtctatcctggagaatggagacacatcacttccacctccaaaacagccaatatattttgcagaaagaaactacggaactgacggagcagcagaagctgttgtgaattctgcaaatactatgagtgttacagcgttggagggacgctagacgtatagttcctgcaaataccgatgcaacacatgcatgagaaagcaacatacattgtataggatgaaaacggtcggaaacggtatttattcggtaatcagttttttggtcgtttttatttgattgcgaataaataggatatataatacactatataaatttgtattcttgtttataacattgagct

SEQ ID NO: 41637 - DNA, 1479 bp, Zea Mays
cgcgtgcgctgtctccccccaggccccccacctctctggctctctctctctctgcgagtctgcgacgacggggctaccgccgcctccgtacgccaggtgccgaggtcttcgttggtcctttcgccggcgacatccaccagaaattatatcatcaattcattaccgggtgtacatttgtacacagtacacccatgtccttcactggatccgcccctgtagtgaggataatatctttggagtttcggagggggcgcgctagaaggatggtttccaaaatgagatttcggaatgctctcggttctagaccatttcagtgttgttcgcgtgagaatcatacatatgtccggaagctgttggaccgagtgtcggagagatcaaagctccttaaaaaggtgtctgttttggtgggttacagtaatccacaagatttagttgagaaacaaagagcccctggggaatcttctgcagagttgattagtgccttgaaagaaatcgatttcccagaaattactgcaaagtttccatgcataaaagttggtgatgcatcacctgttgaactgtatgaggattctactaacatgaagtttaaagaagctgcactttctgaaaagctcacaaatttcatccaaggctcagctcgaaatttggagtcagcttatgaattccataatgactgtcatccattgaatcaaacacccacaactgcaggtgatctttcaatcagtgaagagatccctctcattgaaccaatagttgatacgaagtcccccgagtcattgtcagatgctataacctctgacaatagtatactggataaaagtataaggtgcttgcctggaacaactagtaggcaatatcgccagctagaggatggtggtttccatacggtccgcaaattattgcagcattttcctcggacttatgcagatctgcaaaaccctcaaggccccatagaatatgggcagtatattatgttatctggtactgttatatcttccaggggaatcaaggttaagtccactttaggtcttcttgaggtggttgttggttgttccataatcgagtctgaattgagctcttcagttgagagtagtcactctggagcagagcaaaagagaattcacttgcacctcaacagatttttcagtggcgcacgtttttcttcccaacattttcttaacttaatgtcagcaaagcacaaagaaggggatcttgtttatgttagtgataaaaaaggtgcttgctaatggccattatgagttgaaggagtacacaattgacgctattgaaggagaaggggaacacagcactatgcttgctaggaaaccacaccctatatacccgtcgaaagcgggattaaaacctagtctgcttggcctttcaatctctagggccttgaagatattgagcccagatgttgatccagtgcctcccgatgttctcgttgaattcaacttgcctaatctctttgatcaatag

SEQ ID NO: 41638 - DNA, 1060 bp, Zea Mays
agccgcgttgctgggaagtctggaacaaggaagcagccgtccccgtccagccttccgccccgcacgccgcaagccgtgctcctgccttcctacccgtcgcgcgcatcgccgattcaccggtgcccgtcgctcgcagacctctccctcgcccctcgcccagcttgtcggaggccgaaattgatttgctctgtccagctctgggctctgctgctttggcctccaagcgcgccatgtgtttctatcgacaataaaattcacaaatcaattacattgaattttaccatggcagctgaggaagatgtcaagcagaggcagatcattgaaaatcgtgccagaaatataagccacaatgttaggtgcactgagtgtggtagccaatcgattgaagattcacaggctgatgttgctattctccttaggaagctcattcgtgatgaaataaaagcaggaaagagtgataaagagatctacaagaaactagaggatgattatggggagacagtactatatgcccctaaatttgatcttcagactgctgggatttggctttcgcctgtcattgttggtggtatagcagctggaatctgggcttaccaaaggcataggcaaaggacaaatgttcacattatggctctgaacctggtccgaggggtaccactgactccaagggagaaggagaccatgctagacatccttacacctccaccggctccaaggaaatggtggtggccaggcaaatgatgtagaattcatgtgctggacctggtagatgctcacaaatggttaggatgcaaattacagtttggatgcatgatactttgatcgtgactttcagtttaaccaaaagcctgttcatttggctataattcatacaggcttctactagctcaatagtgttttgtctctatggattgtagctgcagcagctcaaacagttggctttaatccgaagcgaacaactagaagtcaaaactttgtaatgtgtactctatcatcgaactagttgtatgtcacacccgattttggaaggcaaaccgaatgcgaaccatgtatgtgtcag

SEQ ID NO: 41639 - DNA, 6938 bp, Zea Mays
gtcggttcgtcggtctccaaccgacctcgtctcgtctcgtcaagcatcatctgctttctgcgactctgccgcgaagccctcttcgctttctattcatcagaccatatcgaatcaagtcagattcagggaggggaaggcaaaaccctaacctctctcactccgccgccaccgggggagcgcgaggaggacccttcatcgacccgccgcacgaacaaagctcccatggccaacctcggcggtggcgccgaggcgcacgcgcgattcaagcagtacgagtatcgcgccaactccagcctcgtcctcaccacagactcccgcccgcgcgacacccacgagcccaccggagagcccgagacgctctggggcaggatcgaccccaggtccttcggcgaccgcgccgtccagaacaggccgcccgagctcgaggagaagctctccaagtcgcgcaccaaaaagtctaagcgcgacgctgctgccgcgctcgactccgccgacctcccccgtcgcgacgccaagcgcaggcgccgcgctgcttccgcccaggaggtctccgtcctctccctcaccgacgacgccgtgtacaagccccagaccaaggagacgcgtgccgcctatgaggccttgctcagcctcatccaacagcagcttggcggccagcccctcgatgtccttgctggggcagctgatgaggtgctcgctacactcaagaatgacaaggtcaagaaccctgataagaagaaggacattgagcagctgctcaaccctatctccagccagctctttgatcagcttgtctccattggcaagctcatcaccgacttccatgatgcggcagctggtgatgcttccggtgcgccttccgccgacgctgtggacaccactctggatgatgatgttggtgttgctgttgagtttgaagaagacgaagacgaggagagtgattttgatcaggtgcaagacgagctggatgaggatgaggaagatgacatggctgagttgaatggtcctggaggtatgcagatgggtggtgagttagacgacgatgacatgcagaacgccaatcaggggctgaccgtcaatgttcaggacatcgatgcttactggctccagaggaagatatcccaggcatacggggatggggacattgatgctcaacagagccagaagcttgctgaggatatcttgaagatcattgccgagggtgacgacagagacgtcgagaatcgccttgtcatgctcttggactatgagaagtttgatctcattaagttgttgctgcgcaaccgtctcaagattgtttggtgcacccgcttagccagggccgaagatcaggaacagaggaagaatatagaggaagagatggcaagtgacccaagtttggctccgatattggagcagctacatgcaaccagagcatccgcaaaggagaggcagaagaacctggagaaaagcatcagggatgaggccaagaggctcctcaacaatgatgctgctgctgctggtgctgatggtgccagggaccacagggcagccgagtgggacatggagagtggatggctgaaaggacagaggcagttgcttgatcttgaaagcctctcgttccatcagggtggtctctttatggctaacaagaaatgtgaacttccgactggatcgtttagaacccctcataagggatatgaggaggttcatgtgccagcactgaaggctaagccctatgaaacaggagagaagattgtgaagatatctgatatgccagagtgggcacggtcagcttttgatgggatgacacagctgaacagagttcagagcagggtctatgatactgctcttttcaaaccagacaatatccttctctgtgctccgactggtgctggcaaaacaaatgtggctgtgcttaccatccttcagcagattggtctgcatatgcaggatggagagtttgataataccaagtacaaaattgtctatgtggccccgatgaaagcattggttgctgaagtcgttggaaacctgtctaagcgtttggcaggttacaatgttactgttagggagctcagtggagaccagaacttgaccaagcaacagattgatgaaacacagattattgtcacaacacctgagaaatgggacattgtgaccaggaaatcaggggacagaacctatacccaaatggtgaagctgttaatcattgatgagattcatctgctacacgataacagagggcctgttctggagagcattgttgctaggacagtcaggcagattgagacgacaaaggagaatattcgtctggttgggctctctgcgactctaccaaactatgaagatgttgcattattcttgcgcgttcgcaaagaaagcctcttctattttgacaacagttaccgaccttgccctcttgcccagcaatacattgggatcactgttaggaagccactacagaggatgcagttgatgaatgagatttgttatgagaaggttatggctgccgctggtaagcatcaagtgcttatatttgtacactcaaggaaggagacggcaaagactgccaaagccatcagagatacggcgttggcaaatgacactgtcagccgctttctgaagaatgagagtgcaagccaagagatccttggcactcatgctgaacttgtcaaaaacaatgatcttaaagaccttttgccttatggatttgctattcatcatgctgggatggcaagggttgaccgtgagcttgttgaagaactttttgctgacaagcatattcaagtacttgtatccactgctacccttgcatggggtgtcaatttgcctgcacatactgttatcataaagggtacacagatttacaatccagaaaaaggtgcttggacagaactaagccctctggatgttatgcagatgcttggtcgtgcaggaaggcctcagtatgatacgcatggagaggggataatcttgactggccacagtgaattgcagttctacctgtctcttatgaaccagcagctgcctattgagagtcagttcatatccaaattggctgatcaattgaatgcagagattgttctggggactattcagaatgctcgtgaagcatgctcgtggcttggctatacttacctctatattcggatgctccgcaatccaacattgtatggtttgccagcagatatcttggagagtgataaaacacttgatgaaaggagagctgatttgatacattccgctgcaaatctactggataggaacaatctgataaagtatgacaggaaaacaggatacttccaagttactgacctgggaaggattgccagttattattatatcagtcatggaactatttcaacatacaatgagtacttaaaacctacaatgggtgatatcgaactgtgccgactgttttctctgagtgaagaatttaagtatgtaggtgtcaggcttgatgagaaaatggaactggcaaagcttttggatcgtgtgccaatacctgtgaaagagagcttggaggaacccagtgcaaagatcaatgttctgctgcaagcatatatttctaggttgaaactggaaggcctttctcttagttctgatatggtctacatcagacagagtgctggacgtctcttacgggcactattcgagattgttttgaagaggggatgggctcaactagcggagaaagcactgaatctttgcaagatggttgataaacaaatgtggagtgtccaaactcccttgaggcagtttactggaattcctaaggagatcttgatgaaacttgagaagaaggagttggcttgggagaggtactatgatctgtcctcacaagaaattggtgagctgatccgctatcccaagatggggaggccgctgcacaagtgcatccaccagttaccaaagctgaatctttcagcccatgtccagcccattactcgtacagttttgggttttgagctgacaattacacctgatttccagtgggatgataaggtacatggatatgtggagcccttttgggttattgttgaggataatgatggcgagtacattcttcaccatgaatatttcatgcttaagaaacagtatgttgacgaagatcatacattgaacttcacagtgccgatatatgagccgctgcctcctcagtatttcatacgtgttgtgtctgacaagtggcttggttctcagacaattctccctgtctgctttaggcatttaattctaccagaaaaatatgctccaccaactgaattgcttgatctgcagcctcttcctgttagtgcattgagaaatgcaagatatgagggcctctatagtgcttttaagcatttcaatcccatccagactcaagtattcactgtcttgtataacagcgatgacagcgtgttggtcgctgcgccaacaggcagtgggaagacgatatgtgcagagtttgctatactaaggaaccaccagaaggcattgtctggcgagagcaacatgcgggttgtttatatagctcccattgaagctctcgcaaaagaaagatacagggactgggagcggaaatttggagagtttgccaaggtagttgagctcactggtgaaacggcagctgatttgaagcttctggataaaggtgaaatcataatcagtactcctgaaaagtgggatgcattgtctcgccggtggaaacagcgaaagcacatccaacagcagtgagacctgtgccactggaaattcacatccagggtgtggatatagcgaactttgaggcaaggatgcaagcaatgacaaagcctacctacactgccatcacacagcatgcaaagaacaataaacctgccctggtgtatgtaccgacaaggaagcatgcaaggttgactgcattggacttgtgtgcgtactctagtgttgagggtgctggaactccatttcttcttgggtcaggagatgagatggatactttcaccagaggtgttgaagaagagactcttaagaatacacttaaatgtggtgttggctatttgcatgagggtctaagtgagcttgatcaggaacttgtaacccagctgttccttggtgggaggatccaagtgtgtgttgcaagcagcacaatgtgttggggaagaccattgcctgctcatttggtcgttgtcatggggactcagtattatgatgggcgggagaatgctcacaccgactatccaattacagatctgcttcaaatgatgggtcatgccagtagaccacttcaagataactcagggaaatgtgttatattgtgtcatgcacctcgcaaagagtactacaagaagtttctttttgaggccttccctgtcgaaagcaatcttcaccatttcttgcatgatcacatgaatgctgaggtggtggttggtgttgtagagaataagcaagatgctgtggattatcttacttggacgttcatgtatcggcggctagctaagaatcctaacttctacaatcttcagggtgtaagtcacaggcatctttcagaccatctttctgagctagttgagactattctgaatgatcttgaatcgagcaagtgtgtggctatagaggaggacatgtacctgaagcccctcaaccttggccttattgcttcatactactatattagctacacaactattgagcgttttagttctatgctgacccagaagactaaggtgaaaggactcctagagattctagcatctgcctcagaatatgcagagcttccgggtcgtcctggtgaggaagaattcattgagaggcttgttcgtcaccagaggttctctatcgagaaacccaagtatggggatccacatgtgaaggccaatgctctgctgcaagcccatttttcaaggcacacagtggtcggaaatctggcagctgatcagcgcgagattctcctttctgctcataggttgctccaggcaatggttgatgttatatccagcaatggttggcttagtcttgctcttagtacaatggagctgagtcaaatggtgacacaaggcatgtgggatcgggattctgtgctgcttcaagttccacacttcacaaaagacttggctcggaggtgccaggaaaatgaagggaagcccatcgagagtatctttgatctagctgagatggctgtcgatgagatgcgggatctcttacaactatcgaactctcagctgcaagacatcattgaattcatcaagcggttccccaatgttgatatgacctatgaggtccgtgagggtgatgatataagcgctggtgacaatgtaaccgtgcaggtaactctggagcgtgacatgactaacgtttcatctgaggttggtccagtccatgcgccaaggtttcccaagcctaaggaagaaggctggtggctggtgattggggacagctccacaaaccagttactggcaatcaaaagagtggcactccagaagagggcgagagtgaaacttgagttctctgctccggcagaggctgggagaaaggactacatgatttacttgatgtcagactcttacttgggctgcgatcaggagtatgaattcaccgttgatgtcaaggatgctggaggggattgatgatgaagactgtgacactatgtcgcatagaagtagaattgagtgtgtactgtaacgcgatattggaacattctgtgttgtaacctcgaacatgtggaagctgtaacttattttgcatgttgaccggtgcactttgggcgttgctgtgttatcctattctagtattgttgtaaggattgcgctcggttacacttgagccacagtattttggatcaacttgttgcttctataagcttgctgatgctataatgtttgatcgacctgttgatgcactaatggtgtgttgatgttttaacctgttctattggcaggacaggcagtaggctagttcgaaaactcaaacctcatgggggattaaggccccgttcg

SEQ ID NO: 41640 - DNA, 2102 bp, Zea Mays
cacaggaccttgttctgcctccccgcgcatcggctgctgccgcgcacaaatccgccgcgccctcggtcccgcaaatccgccgtgccagctccgcccgctcgattcccctcctagcgcccgcattccccgccgccgtcctcgcggccgcagcgcccctggaccccacgccagcaacgcccgcagtccccgccgtggatctcgcccgaaggcgccgccatggacgccctagatctaccacctcctcctctccccatcactgcgccgcctgcccccgccgcacacctacagcgcgccccttcccccaccgtggatctcgcccatacgccagcggatctcgcactccttccttcgacggcgcggtggcgaggaggtcagcgacggcggcgtcgagtcgaggtcgggcacgaaggcgcggaggccgtgggagcggtcgtggcctacgcacgcacgacgccgctcccccagttcaaaccgaggttgaaaaaattgctaaactgtcatttgagaaaaatgaagtaaaaaaagcctgattatgttggagttgatgatgataagtcaaaggctactgttgaaggcctgcagcagggttattgtgtcatttctagcgataaaaggttcttggttctgtatgctttcctaagaaagagaagataatggtgttcttctcatcatgtaattcagtaaagttccacgttgaacttctgaatttctttaggatagagtgttttgatatccatggaaaacagaagcaactgaagcgaactactacattctttagcttttgcaaggcaggaaagggcatcttattgtgtactaatgtggctgcccgtggacttgatactcctgacgtgaaggaaggcagtgttcatgtctcatccagttcaaatgaagtgacaggaaccattccagagacgaatggaggcgatcatcatatacctggaagctcttttcatgtttagtgaaggtctatgacatgtctgatagtcaaatgaagctaaatgattttatttcaagccttgttcttgagaggatggtcaagattaatttgagtagggtgacttcataatggacgacgaggaagaagtggaaggagaggaagaggaacaaaagagtgatgaccagaagcgaagaaacaaaactaaaaagaaaaggaagaggtacctccctttgttcgtactaggaataaatgccaatgtactgtgtacacctatcctgaaatgaggatgactatatgttgctttaggataataacatcactgccatcactctcccaaagtcgctatgtttttctgtcatagtttgttgtcctgaccaaattttttaatttgttgtctatttctcttaggttgttctttcaataagctgtatctttctctcgtatgcaatgtaaatttcaggtatttgtgaaatatgagtgttgttttggtctcaaaataaatccacaaaagattttagcatctgtaagcactgttgcacattatccaattatatcagggtggtctagaactgttttgtgttgtttatttttagttgaggtgtgtatctttccccaccattgtatgttacaattttctaactacatctgttatgtttgggtgctcttgcattctcgcaaagtgctatagaggagcaacggtaccaggacgcgtcaaggttgacaaagctatctgggaccacttttgtaattgccaactcttcactgattattttcctatatgttgctccagaataaatgggtgaagccttcgtgtctcctcgagggaaagtcactgacctttcttgggacgtggaccactgacggcccccgtcatcccccatgacggtgatcctagggtgaagccttcgtgtttcctcgagggaaatctaccagtgcgggattgatttagtcagcaccattggacacagggtttagttccattgcctggacccatcaatgaatcatggtgccaaggtcttgatggttcgacttcaaggtactgatattctccaggactattgttagcatcccttgtggtccatctgcattagcagtgaagaaagtcgcatggggacttgcttgatatgttgttattgctcagatttgtgtttcgtactggcaccac

SEQ ID NO: 41641 - DNA, 199 bp, Zea Mays
atggggtcgattccgatccggcccacactccacaagaccacaacaccgtgattacacgatgccactggtggcgagccggccatttcagccaaagcggtgggccgcgcttccttcctcagtcctcactactcactcgtccccttccagttccgcttccgatctgcgcttcgatctccctcttcgcagaggtgcttgtgag

SEQ ID NO: 41642 - DNA, 2093 bp, Zea Mays
cagcgtgcactttatggaagatcagctataaatttatgattcaagtctgaacaggtgtttatactgtttctcatgcagaagtaagtttgatttcttcttgtttttttaaacaaaggtacaaggagaacaggtgggatcccaagcagcttatcggctctggtggcatgccatcatcacattctgccacggttacagcactagcaccaaaaaaaaaaaaaaaaaaccctgagtcccgcaaaacccctaaaccctagcccctcacctctcgcctccgccctcatccgcgcgacttgcagcggttggaggcgaagccggctccatgacgaccctcctcaggcgcgcgtcgctgcggcgcgtcattgccgccgccgccgcctcttcttttcaccctgagagctataagcaagggatctgtggctccacatttcattgccgagagttcgcatcaaaagcaaaaaagaagtcaagtggaacagactctggggaggagaacatgtcaaagaaagacttggctttacaccaggctattgatcagataacgtctgcatttgggaagggggcaataatgtggcttgggcgttcacaaggccatagagatgtaccagtcgtgtctactgggtctttggatttggatatggctctaggaactggtggtcttccaaaggggcgtgttgtagaggtatatggtccagaggcttcaggcaagacaacgcttgctctacatgtcattgcagaagcacaaaagaatggaggttactgtgcctttgtagatgcagagcacgctttggatccagctctcgccgagtcaattggtgttgacactaacaatttactcctttctcagcccgattgtgctgagcaggcactcagtcttgtggacacactgattcgaagtggatctgttgatgttgttgtagtagacagtgttgctgcgcttgttccaaagactgagcttgatggtgagatgggtgatgcacatattgctcttcaggctaggttgatgagtcaagcccttcgcaagcttagccactccctttcactttcacaaacaattttgttatttattaatcagatcagggccaaggtagccacatttggatttggaggaccaactgaggttacttctggtggcaacgccttgaagttttatgcatctgttcgcttgaacatcaggcgtattggtttggtaaagaaaggcgaagagacaataggtagtcagattgctgtgaagattgtaaaaaacaagcatgccccacccttcaagactgcacagtttgagcttgaatttggaaaggggatatgccgcagttctgagctttttgaacttggattgaagcacaagcttatccgaaagagtggtggttcgtattatagtttcaatggtaaggctttcaatggtaaaagtaaccttaaatcttaccttactgaaaacaagagtgttgccaatgatctggagatggaactaaagagattgatgggaactgatgcgtctaaagagcaggaggcaggagacagttcgcagagtgattttcctgaagagagtgtcacacctgaagcatcgtcagaagaggatctgggagccataattgaaggttagccagtgatctgatgtgctggcaagtgggaacagaatttctggagcagttgttcctgtaaaacaatatcttgggtcctgaagtcaccaccgtttggatcgacatgcctgtggtgttctggtgatctcatcatagcagacttcagtctttactgtgcttatacagtagtgcagcaggaagagaattcacattgtgtgaaatcatggtgatatctgagaggtggaagttgtagtaagccgggaagggtgaggtattgtggtccgtggcatttaaacttcagtaagcaaacgccgtgtatatatgatgtgcacattttgaaaccgggcattctttattgactgctgctagatttacattgagctccctccacttccaatacctaccttttttttgcgtggagctagttttttggatggtgcttctgcggaagcctgttgctggaagatccaatgtcgtagagctggggcatttctgaccttggctgatctatgttcgccg

SEQ ID NO: 41643 - DNA, 15426 bp, Zea Mays
gatcattatcatcatatcatacagaaaaggcagatgcttcggttatgaggaaaacatttcggagaaaaaggaaattctcatgcttcgttgcgtacgaaaagaagggaaggtgtttttcgccttcggctcaaaaataaaatttcgtcgacagcaaagcagatcgtacacgaataaaggggaaaagatatattacaaggtacgcacaaatttacataagtttttatacaattatattacaacaatttttctagaatcttttgcagaaaaagtcctttggagcatctgttaagcttcagcttgtcattcttcagtttcatcatcctgcacatattaaaatgaaataagaaatgtgcagagttcaaggagaaggtaaaagtaacaagtataagtttctcactggcttaaggtggctccgagcttcgtcaccagctatttttcgcccgccgtttacccaaatctgggtcataaacctgtttcctatgcttcgggctaggcttgggatgtcaaccaaatctgccggcgacaaactgaagtttggcctatttacaatctttccgtgtgtgcagccagccttcaggaaagcggtagccgtgcctcgagaagctagcagggtgcagaaatcagcatgcccaacaataacttcgtcaagtgcatcaacttcgccctcaatgaattccaaggtgcttggcaggttttcagctgaaggtgtaaacttatcagagctggctccaattaagtgaaacacatccttcagccgctgcacacatcggctcccgaaatctaagcatttctcctgaagctccttcaatgatttttgcaaatttgaattcttctcgattttggtcttgagatttgtttagatattcttcttttcctgctcagatttttctgacttcataagtaattcattatttaatttgttattttcggcttgggcttcagccagtgaaccttccatagaaccaatgacgaagtctttcttttccaaggcagcttcgtgatctttaactttgatttcaaggccttgaatgacggagtctttttgtttcagagcagcttcgtaatttctaactttgttttctagatctttgatggtagcttcgtttttctcatcttcaagatcttgttgcattctcagcactatacttagaagtatactctgccaaaacaactttcgttagaaaatatattaattcaaaaaacaataaaaagtcgagtttttaccttgaaattagcatagagcaagctactggcaatatgttgtcgctggtacctgcagaggtccgcttctatcttcggcaggccaacgctttttgagaaggtcctaacaactttggcctcggttcggttgcgaaggcatctcagcttcccttcattgaccccaccaaatagcagagaccctggtttgtatccacaggatatagcatatttctttagctcttccttttcagcgtctgttaactcttgtccaagtatatcttgaaaattaaaatttccttcttccaaagtgtcctcaatctgctcttttcctttttcagttgtcatgttcaccgcaaccacaacagcttcttcttcagccattttcaaaagtatattgtcaatatcatcaagcgtggtttccaggttaggatcttcggtggccccggcttcggctccggtggcttcggctccgccggtttcggctccggtggtttcggctccgatggctgtggtttcggccatgacaatttttgacgccgatgtcggtggcggtgtctgatgaatcacatcagccacttggataattcttcgctttttcggctttgcgggactttctgctgtcgaagcttctttgtccttctgaaaaaacttcgtcagttctggcgccagcggacttagcttgacaggcaaaagttcagtcattaccttcagaatctcttccacttcggcagcagaaggtgttgcaggagcttcctcctctcgggccgatgtctttgattttggagatgcaggttttggagatgcaacttttcttttccttggagcagccatctttggctcagggctctgtttttcagaaatttctttttcctttttagccaatttggtgctttctttgcccagggcgctggcaatcctctttctcttcgggccttcggcatctctgcccagttgttcataatcagggtaatcaaaattcaaagcatctagcacacgattcaatcttcgcttcggacgggtgccgaaagctgcagtcatcaactgatcttctttcttagaataatttccgaggatatcgttgcacataatctcgattgtgtccaaccactcctggcagggttttttaaagtgtttcttaaacttgtagtaataaggcaatcgaacaagttctccctttttcttctcaccctccagcttcggcatctcccactccctcattgttgggaacactttaaaagccagaaattcctgcaccaagtctctagtgccaatatgatctgaaatcacgcgaaattcagccaaagcaagctggcttgggctcccccttatcatgttgcatcggggtctcgtctctccgaaggttagctctagcggactctggaccaacttatcttcatctttatcaactttaacataaaaccattcagacttccatccggctggccatttgcttcggtagcttatcactggaaacttcgtagtcttgcgataagcaaagttgtaacagccaaaattctcatgcagaccatctcctctggctttagtctggtagtgtaattcatgaactcggcagaaaccctcaccgaacggttccactccctggctacgaagggcccaaatataaacacttaatctaacgatagcattaggggtcagctgatgaaggtaaaccccaaacttcttcaaaacatcagcaatcatctcattcaaaggaaatcttaatcctgctttaaagaagcttttgaacactacaacctcattcttttccggcttcggagtaatttcctcttcgccaaaacgaatcagctccttttttgcttcactgaagtagcccagcttcaccattttgggaagatcagcttcaaagatggtggactttccaaactccaagtgactaggtttacttggcatcccgcagctgtactcatctttggaaccaacttcttcaacatcagcttgtgttgcttcggcagcaggtgtgtcctctgatgaaaccagcccagaacgcctcattgcttcggagatcggaatagtttcagcggcttcggtctcatctccatcacgctcaaccctagcagtggagcgtactctggccatttgaatttaaacttcttgagaatcctttggaaattaataaccttctttccgaagctcttctcgtgacgaagcaaaattaaaaactggagcttcgtttgaatgcaaaagtcaagcttcggctatggttaattttttggcagcaaaacagtgcaatagcaatgaatgctgtggtaacttcacacctacctgtctgtttatacagtgttgcaggtaagaaggtgaatcgtcaagatttttacaccggacaaatagtcgctcgcacccactgaacggtgggccgcaaaaatcaagtgaacctgcatggtgggaccgctccacgctcagaaactgtatcgtttctcagcaacgagctcagggaaggtgtttttcggaccttcggcttcccgaagcctaagagacttttttcacggatcaagctcgttacgaaaaacgatctagcaccgcgaaggggctactgttgggaccatgcttcatcgccgaaggtcctgcaaggagaaacagcttcggcaaaaagctgcttatatgtaatgccgaagctaccactcatgaagcttcggtgttatagcgtatccgaagatgaaggatcgaaccgacttaaagatggaatgaccttttagtccataagggtctgagtcattgttgtaaacttttataaggggtacgattgtaattccttacaggctgtgtcctgtgcctataaatagtgaacagtattcctttactgttcacgttattttttctgtacttgcaaacacattgctttggaattattgtctcctgtcaaggctaaggtatcaatatgcctaagtattatgttttgatatttgaattcatataataaaatatgtgaataatgttatctatctatggcatatctctttctaatacttcatgttttatattttatttcacattttttataagtctgttcacgaaggtatggccttcgtaatattttactcatggtcttcgtccgaagttcattaaatccttggggagataatgcttcagcggacgaagggcattaatgtttaatattttatgttgccttgttcttgaatcatagcatttgagaacaagtccccaacaatgccatcccccgcaggagtcctcaccgtgcggggtgaccgcaccgccgctctggcggctgttgaaaaactacacaccctagcggctgagaccgctcggccaaacgacggaggaagaagctccttagcccccggcgccaaagcaccgaaggtgcaaccaaccgaagcagacgacgggcactcaaaggtgactgcgaagaccatccaggtcggcgcagacccatcccgggaccacccgcatcgcgggagatctgggagagaaataggaactcgcgctcgtcaccttcctccgggcaaattccgacgtattcgcttgggagccatcgcagatgcctgggatccccggggaggtgattgagcaccatttgaagatatatccgaacgccaagccagtaagccagaagcctcggagacagtccgtggaacgacatgacttcatccgtgaggaggttcaaaaactgttgcacgctggcttcattgaagatgttcaccaccccgtgtggctgaccaacccagtcatcgtgccaaaagcaaacgggaaacttcggatgtgcatcgactacaccagcctgaataaggcatgccccaaggacccgtacccacttccacgtatagatcagatcgtggactctacctcagggtgtgactttttgtctttcctagatgcctactccggttttcatcaaatccggatgtctagggaagataggaagcacactgcttttgtaacggtagatgggttgtactgttatgttgtgatgccttatggtctgaaaaatgccctgccaacatttgttcgggcgatgagtaagacctttggggacctgatccgggacaaggtggaagtttacgtcgatgacatcgtggtcaagactagaagggggtcgactgtagtagaagatctaaccctggtcttcgacaagctgcgggcaacccgcaccaaactgaacccggagaaatgcatcttcggcgttttcgcaggaaagctgctgggtttcctggtttcataccggggcattaacccagaaaaaatcaaggctatcaagataatgaggcctcccgcccgtgtcaaggacatccagaagcttacaggatctttggctgctctgagccgcttcatttcaaggctgactgagagggctctgcccttcttcaagctcctacggaaatctggcccttttgcttggaccggagaggcggaacaagccttccgggaattgaaacaacacctaacctccctgccaatcctggttgccccagatccaggagaaatgctgtacttgtacattgcggcggctgcagaagcagtgagcatggtgttagtcgccgaaagggcgacactagaaggacagagacctgagaactcagaaccagcatccggcgcccggaccgtccagaaaccagtttattacgtcagcgaggtcctccatgaagcgaaggtcaggtacctcgagacacataagctcctctatgctgtcctggtcgcgtccaggaagttacgccactacttccaggcgcaaagagttgtggtggtgacctcctttccattgagggccatcctccacaactcaaacgccactggcaacatcaccaaatgggcagcggagctcgccgaattccagccccgccacgctatcaagagtcaggtcctagccgacttcattgtggagtggactccacccccgtacgcccctgggggcccggaccccgagccaggccccacacctgcggggcgcgggggcccagtcttcaccgaacaccactggacactcttcttcgacgggtctacccgccaagagagtgctggcgcaggagtggtcctcgtcggcccagacggggaccagttgaagtatgtggtacgcctcgagttcaaagccaccaacaacatggaagaatatgaggcactgatcttcggcctatctacggccctatccctgggggtccgccagctccttgtgaagggggactctcagctaatcatcaagcagacccgtggggaatgcagctgcaatgagcccaggctcgcagcttacctccttcatgtaaagaagctagagaaggactttgcggccttggaactacaacatgttcccagggccgacaactcaacgacagatgacctctcccagagagcatcaactcgagcacccgcgcccgagggcgccttcaaaaggcggttactgagacccaccgcccggccagccaaactgagcgaggggggcgagaccggcacctcgaagccgacggtcccgatggcgtcccaggacccaccaaaggtggtgtgtgcactggggggattcaccagcccctagctccgcaaccaacaactcagagtggtcccgatgcatggatctccgagatccgggactacctgaaggaaaatatccttcctgaagaccatgtctccgcagaacgcatagtacggttggctaaacggtacacgacggtagaaggggatctctaccaccacggcgccaatggtattcttatgcggtgcatcacccaggaggagggctgtgagttactcacggagatccatggaggggagtgcagaagtcattcttcatcccgcacgctggtcggtaaggccttccagcatggtttttactggccaaccgccctccaggatgcagccgagctagtaaagtcctgcgaagcgtgccagtaccacgcaaagctgatacacacaccggctcaggctctgcaaatgattctgccctcctggtcgttcgccgtatggggggtggatatcctgggaccatttcccagggccatcggtggctaccggtacctctttgtcgccatcgacaagttcaccaagtggccagaggccacccctgtggtcaacattacccagagtgctgctgtcgccttcctcaagtcgatcgtatgtagattcgaggtcccatgccatatcattatagacaacgggacccagtttacaagtcggatctttcaggaatactgcgaggacatcgacacccagctctgcttcgcatctgtggcccaccccagaagtaacaggcaggtggagagggcaaatgcagaaatcctcaagggactcaagacgcgcacctatgactgcttaaaaaagcatggcgcaaattgggtcagtgagctcccatccgtgttatgggggaaccggaccacgcccagccgagccaccggggagaccccattcttcctggtatacggggctaaagcttgccttcctccggaaatcattatgggctccccacgagtccagtcttttgatgagtctgcgtaggaacagctgcgacgtgaagatgtggacttcatcgacgaacacaggtgacaagcgtcaatccgaaatgcacgatacaaccaggcgctcaggtgctaccaccagcggttcgtgcatagtaggaagcttggggtcggggatctggtcctgaggcaaatactgaaccgagaagggctccataagctctctcccagttgggaaggatccttcaaagtgacagaaatatgctgccccggatgcgtccgccttgccacagccaacggagtacctcttcccaaaccttggaacatagaacatctccataagtttttcccataaagacataattgggggttcggtccctttccctgtaaccaagaagcacacttataagcgccagcccggggaggtccgccctcaaataaacccggcctgttggcctgcgcctgtgtatatcgagttataaggaaggggttcgacccacataactgttcttatgtggattttaatcatacagtttgcgaccattattgctatctcaccactcatgcagttttattccctggctggtattgtgacatccgagctgagtagccagacccggtaaccaggcggtgggatggttaggggtcgtgaagtcgcttggtatggtcaagtaccgtaagcctacacgccccaccgccccacgatcggtcctattgcgtaaatcaaaggataagaaataccagccggcggaccctatgggcgcactactaaaaataccttgccaagactgtgtgcaggtcaagtcccagttgggagctccccttgagggtcacgacatcagttgccaattacgaatcctggtatccagccccgacgcgtcgaggccatatcccaggggggccaagtaccaaggaagaagttggtaacggtgcacgcagcaaaggaaaagtggtgtgcagataagttataatattgcccagtaagtagtacctgaagagtatcttgtgaaatcaatggtatattacaacccgctccccagcggaaacctcgttttctccacgcaggcctagctactcatcaccagtaggatcccgctgaaagcgctcggccaccgcgtccacaacgtcctgcacgccctcacgagcagcatcttcagcgttggccaccggacctgcgatgactggccccaaggagacagccggatcatggctccggaagcatgtcaagacgtattctattgccgaccggcaaagtctgctgccctcggcctccaagcgggcgccaagaatccgatccagacgtcgaaggcgatcaacagtagaatccagtaccgggagcgcgtcggagatagacgccggccgcaccagtgccgggatggggctcacccccaacggcactagcgtcgtgcttgcctcgccggcccaggcagcgatgcgctgggccccggcacgttgctcagcccgcaggtcgtcgagtatcttctgcatcgcctccactgcctaggggcccgaggctgtctgcgtcgcctgagcaacttgcgctgcccgaaactggcggacctgctcctccagagcccacactttctcctccaaacgcttcctcctctcctcgtcctcgagctcaagctcatccagcagcttgttctgccttgcccacatctcctccctgaaggcgaggtcctcctcctgccgggtaagaccagctgcccgtttcacaagggaagcttcccccgaggcttccctcggcacgagcaatgtcgctggccctgtcggcgagctcctgctgcagcttctgcagcttcacctcaaccgcagcctgcttgacccgctgtttctccagcaccgtattataagctttcagcttagcttggagcgctgtgacggtctcctccctttggtctaagcgtatctccttcctagccaggcttttcttcttctggatcacctcgtcctcctggtcagacaccttccggatgtcctccttgaagtcctcacgctcctgctcaaactcggcccgttctgaggcaaaatggcaggacaccgccttagtgcgctcctccagttgggtgcaccagtcgccaaggcgctggtgctcggtctcgagcgcctcccactcccgccggatagccacctcggtttcccggagagcctggtgagcgcgggacagcacccgagggaggggagtcagcgttgcttcagattcggtgccagaccggagcggttgcccaaggataacctccagagaccccgtagttggtggtggaacagagctgggcgcgcctcccacgcctgtcgccgacggtgcatccaacggtatccccgccgctaggccctcagcggctgttggcaacagcgttacctctggaccctcagctggaactcggggacccgaaggtgccgcctcgacagtgacaggcggatcctgggggttcaacggcgccaccccagcaccagtgccacccagcgcggtggaggtaagtataatgggaacctcttcgaccactgtcaatggaggatttggcaccgacgctgatgctgaagatgcggtagccgctgacagatcgccgacaacgtcctcggcgggtgtacgctgctgggaaccagacccaccggcgggcacgacgaccgaaggggtacgagcgcctgtggaagttgaagaaggaggggccctgacaggaaaagggcggtccatgacccgtcagctaaaaactatgctcgaaatatgacattaggaagagcttaagcttacttggtgccatgaacttcccagtggccttggaagcggggcacccgttgtcgttgctgccgctgcccctgcgatggtgacgattggtccgtcatgggcggcggcggtggtggagtcaaatccaaaggaggtagcgttggagggctcacgcccctctgcctgtcctgggcctgaggttcggcctcctttgccccaccaaccgttttctggcgcttctgggaggagcccgatcaaggggtgggtccgagacaaaagacccatcggcgcgacgcagtcgatgtcgtctttcttccccccgacctcccggtggccgaatcaaggggtgggtccgaaacaaaggacccatcggcgcgatgtagtcgaggtcgcccctcttccccctgcctctcggcgacgtccggggtaaaggagctgcatgcaggctccttgcctttgcccgagaagctgggccccacagggggaccctgagggccacatcaacaggctgggggcctccggctggtgtaccaggaatatggatcccccaatgggggtcccggccgccggtctggagaaccgccacaccactctcatcaagggtcggcagccggaccagcaccgctgaccgcaaccctgggtcgtcgcagagtggtgaaatgccctggggaggcatcaaggatttggggatgaaagcctcaccggtaatccccctcacgaaaatttccaactcctcccaggtcaggtcagtcctaggcccgcgcaggatcctaccaatgtcactggagccggtgaaccaacatcacagacgcggccttccctgcagtgacatgactcggcgcctcaggaaatcaccgagtacgtgcattgaggttaggccgccaaccgctagttccttgatcctatccaggatgggcacaaactctagcaccaagcgtggtttttccctccactgcttccggctgagattgggcccgtcactcggaagggcaagacggtcgctgacctcagtatgggcaatcacccagttgtgtcgccagttctcccacctcgtgttgccaagagaggcgatgtaggtcactgtcggatctgaccttgtctggaaatagtaggccccaacgtggtctttgcccttcccagacctcaccaacacaaaaaactggcgaaagagggaagtacaagctgccactcccacgaacatctcacaaaaatgaacaaagatggctacatggagaatggagtggggcgtgagatgctggagttggagcccgaactcctccaacaacaacagaaagaacggcgaaatcggcagcgccaatccgcagaagagataggagacgaagagcacaaactcccccacgacaagattgccgaggggaatagtgctggcctggatcctcccggcgagcgcaggcgaaccccatccgagcatacggcgcaccgagtcgagcgcctcctcagtctggtagtgatcagggcgaaccagcgaggccatggcaaccgcggcggccggaaactgaggagcacgaacacggagaagcgaggaaagctcggaggcgaaaaggcagagcagttaggaaagaatgcggaggcaaaaccactgcgcacaagagaccctccttcaagagatggctcctcacacgctccggaaaaatccgcgtggcgcgtacctagcgcccgagcaactcagtcgctgacagaggaacccgagcctgcaagtcacatggctggggcgctggtctccatgcgcaggaagaacaaaccgccgtgcgctcccatgccgccttggggccgctgctgaaaagtattctcaacatgggcggtgccaacagggcgccccacgcgcgcggggcacgaccgaaccgccatgcgtggggggccacacaccagtttaccgcaaagacgggcgcaacggttggggtgaccagtagcaaactgacagcgtgtgtgaaagtcgcctagaggggggggtgaatagggcgaatctgaaatttacaaacttaatcacaactacaagccgggttagcgttagaaatataatcgagtccgagagagagggtgcaaaacaaatcgcaagcgaatagagagtgtgacacgcggatttgttttaccgaggttcggttctcgcaaacctactccccgttgaggtggtcacagagaccgggtctctttcaaccctttccctctcgcaaacggtccctcggaccgagtgagcttcttcttctcaatcaaacgggaacgaacttccccgcaaggaccaccacacaattggtgtctcttgcctcggttacaattgagttgttcgcaagaaagagtgaaagaaagaagcaatccaagcgcaagagctcaaaagaacacaacaaatctctctcacttaacactaaagcttttgtcgaattgggagaggatttgatcacttgggtgtgtctagaattgaatgcaagagctcttgtaagtagttggaaggtggaaaacttggatgacttgaatgtggggtggttgggggtatttataaccccaaccaccaaactagccgtttggtggaggctgctgtcgcatggcgcaccggacagtccggtgcgccaccggacactgtccggtgcgccagccacgtcaccaggtcgttgggtttcgaccgttggagctctgtcttatgggcccacatggctgtccggtggcgcaccggacaagtcctgtagactgtccggtgtgccactcgcgtgtgctctgtcctctgcgcgcgcaggcacgcatttaatgcgttgcagtcgaccgttgcgcgcgaagtagccgttgcaccgctggctcaccggacagtccggtgtgcaccagacatgtctggtgaattatagcggagcggattcccgaagctggtgacttcagagtcgctcttccttggagcaccggacactgtccggtggtgcaccggatagtccggtgaattatagcggagcgcctctgagaattcccgaaggtgttgagttgggcttggagttccctggtgcaccggacactatccggtggcacaccggacagtccggtgcgccagaccagggcacacttcggttgtcccttgctctttttgttgaacccttttctttgtctttttattggctttttgtgaacctttggcacctgtataacttatagactagagtaaactagttagtccaattatttgtgttgggcaattcaaccaccaaaatcaattaggaaaataggtgtaagcctaattccctttcaatctccccctttttggtgattgatgccaacacaaaccaaagcaagtatagaagcacataattgaactagtttgcataatgtaagtgcaaaggttacttagaattgagccaatataaatacttataagatacacatggattgtttctttagttttaacattttggaccacgcttgcaccacttgttttgtttttgcaaattcttttgtaaatccttttcaaggtccttttgcaaatagtcaaaggtaaatgaataagattttgcgaagcattttcaagatttgaaattttctccccctgtttcaaatgcttttactttgactaaacaaaactcccccttaatgaaatcctcctcttagtgttcaagagggttttgatgttaattttgaagagggtataccaatttgaaattatataacacataaaataccaatttgaaaatacttctttaaaaccaaattgaaagactaaaatttttgaaattggtggtggtgcggtccttttgctttgggctcatgctctctccccctttggcataaatcgccaaaaacgaaatcattagagccctttttaaactacttttgcaccctttggtaaataacatgtgagtgaagattataccaaagatgaagagttgctcggagcgacagcgaaggatgagttacggagtggaagcctttgtcttcaccgatgtggcagaacctccaagttatcgggcccacatgcacctgtccttgtctcaaagacctcagacggtcgtgcatgtgcaccagataacttaacaggatccgtccgattgccccaaggacaccggataaaccacttacaaccagaaccgcgagattaagtaacacaaatcacacacaccaatatttttgcagcggaaatcttattaccaaattttacaagttacaaaaattttatattattttatcggagtgattacaaaagtataagtttgaaatatatgctagctcaaatgaccatcatcagtaagaagataaagacgggttatacttatataagaaggtcgagcccaccggcacttaacaccatcaaaagcagcacaaagttagaacctgaaaaacaacagggaataaaaccctgagtatggaattactcagcaagacttacccgactaaagaaaagactctcaagggtatgctggatttaggaatcaaggagaggctttagcaagaatcaacttagatacttttgcagaaatagcttactaaagtgagttcttactttcaatattttaatgccagattaaatattaatagactctatttgcatctggtctaatttcatcatctcatcaatacaacatcatttttattcatgaggttcacatcctgacttaggttgcaggtcagtgatcaagtctccactcttcggggatataacggcgatccgaatcgatttactcagctgaggatctctaaccacacgacatatgtagcacttaacccttgcatatgtcaaccgttcccacagatcctccacaacgtgaaccggtccgcgctacccgggagcacagtactcctccatccagcctctagccaggagggcacacgctactcccaccatctcccacgcccagtgcgcggttgtcttttcacgtatggaatagccgggttcaagcttaccctgtcccatttccagggcatgtggccagttaagatagtccttgatctatcaggcctacatacacatccaatccttaattgacccgggcggagcatcacctgttcctagcccaagtcccgatttaagtacttccatccttaggagtgtttgtgctccctaggatgaaaagagcattatagggaactttgcagtaagatccc

SEQ ID NO: 41644 - DNA, 529 bp, Zea Mays
tgatgagtcctgcagccccacaacacaagctgagagaggccatcgctatggtagacgaggtcgggccgccggagaagcctgcaatggagccagcaccggccgcgaagcagatcatggtgccggagaagccagaggagatgctgagagctcagcatatgttgaccactctggtggacgaggtccggccaccggagaagccagaggagacgccggagaacacctccgcaggtcagcctgccctgttgcggtatcgccccgtcagtctctgtcctccctcgactgaccgccgccgctcaggatgtccaactccatcctacccccgcccaagaatgttgatgtcgagcgctccgcctgttccgctcccgcgccgccaacgagcaccgccgagctcctccctggcgccacgtcccgacagacgtcggcgccgagcggctggctccaccgtgctgaggttttaagaagatgaaggagacaaatggtccacctaaaaatttaaagaaccatgcactgacaagatgtggctatgatg

SEQ ID NO: 41645 - DNA, 234 bp, Zea Mays
aaccaccccacattcaagttatccaagttttcacacttccaaccacttacaagagctaggcattcaatacaagacacacccaagtgatcaaatcctctcccaaattccacaaaagcattagtgactagtgagagtgatttgttcgtgttcttttgagctcttgcgcttggattgctttcttctttctcattctttcttgatcaatactcaattgtaaccgaggcaagagacacc

SEQ ID NO: 41646 - DNA, 2702 bp, Zea Mays
tccgctcgccgtttgggcgcgccccaccgctctggtctgctcgccgccgacagaccacagccccggcccgcgcgcgccttgggtgggtgccggtgccggagcgacggcaatgccggaggcggcgcgggcgcggggcctgcgggaaccggcgggcgagggggaggcggagcaggaggacgagttctacgagtcgctggatcggatcctctcctcctcctgctcctccgcctccgcctccgacgacgacgccgaccaccgccgccgccgcagcaggcgccaccacctcctccaccagcaccagcaccagcaccagccgctgtcctccgcgtacgacgtctggatctccgagccaacctccgtggaggagcgccgccgcctcctgctccagcgcctgggcctcgcctccgacccgccgcctcgccgctcgccgtcgcctcccgcgtctaccccggcgtcgccaccggcgcccccggaggagcccagatccggcgccgggctcgggagccccccgctgacgcggaaccccagctccagcggcggggagcagcaatgccggatccggaacctggacgacggcacggagttcgaggtcggggaggtgcacgaggaggaggtggtgcgggaggtgggcaccggccgccacctcaccttcgaggagttcgagctctgcgttggccgctccccgatcgtgcacgagctcatgaagcggaccaccaccgcggcgtccgcgtccgcctccaatcacgccgcgcccgcggccagcaagccccggaggaagcccgggggcgggtggctgcggggcatcaggcagctggcgggcaccgtcgcgtacgggaggcgcggcgccgacgatggggacaaggagaaggagaaggagaagaaggagagggaggcgcggcgcctcagctctgccaccgatgacagcctcgatggcgccggctcgcgcgatgtaaggagggtccaggtgcgacagtacgggaaggcgtgcaaggagctcaccgggctgttcatgacgcaggaattggctgcccactcgggctccgtgtggtgcatcaacttcagcctggatggacgataccttgccactgctggagaggatcgtgtgatccatgtttgggaggtgtctgagggagacagaaagggtgagttgctcggggaaggttcgctggcaaaggagaatggtggtggctgcagcccgtttctcacgtttcttgggaatgattcaccggagatcgctgcattgtcattcacctgcgctgacatggataagaagagaaggctgaggaagcagagcaatcggaagtctgtagggtctgatcatctggtcgttcctgagtgtgtgtttggtttcagagacaagccagtttgctcgcttctggggcatgccgctgatgttcttgatctgtcatggtccaaatctcagtacctgatctcatcctccatggacaaaactgttaagctctgggacatcactaccagtacctgtttaaaaacattctcacatacggactatgtgacttgcatccagttcaatcctgtggatgacaacttcttcattagtggatcactggatgagaaagttcggatttggagtgtccgtgaccgtaagattgaggattggaatgatcttcatgagatggttaccgctgcttgttattcccctgatggacagggatgctgtcatatatttgatacatctgagaagaagcttctgtacaaaagtcagatagatttaagaattaggaaaaagaaatctggccagaagaagataactggattccagtttgctcctggaagctcatcggaagttctgattacttctgcagattcaagaatacgtgttgttaacggcgatgaatttgttcacaagtttaaagggcttcggaacacgagtagccaaatctcagcttctgtagctccgaatgggaaatacatcatctgtgccagcgaggattctcacgtctatgtgtggagacatgacaacagttcccaccctagtaggaacaggatcacagttgatgtaaccaactcatatgagcatttccactgccatggcgtgaccgtggctgtcacatggcctggtgctgaagcccggggctcgtttggatctcgaagcagcaggcacagcgattcagatggagcagtgaactctggccgagacatcccagctgagaacagccagcacaattctgacgcaggcaccagtagacatccaggcgatagagcatccacatcctggcctgacgaaaagttaccgtcagccaagagcagccctggtcactgctcgtccgatctttgcattggagctatggatgtccagcgccggtctgcgtgggggttggtgattgtcacagctgggcggggaggcgagatcagggtgttccagaattttggcttcccggttcaagtgtaaagctagcgtgagtgagatcatgcagatagggtttgtttggttctttactgtatataccatcggtagatgtagattgccgacagttttacgaaaacttccctgtgtttctctgtctccttgggtgcttcaagattgtacccccagaaccacactatcatatagttagcaatatcacttgttgatacaatacacagagctctgtaactgtatgcttagcacacatcaacttaatttgttctcatcatgtatttttctacacacagtgatgtacaaaatgaaaatatttttc

SEQ ID NO: 41647 - DNA, 472 bp, Zea Mays
cgcaacggccaccgcgttttctccgagattgaccagctaacgcccacttcccggacccctcggccacactcgtgcccttattagcatccctaggacccgtccgcgccgccacgatcccaatttccctaaccatagcgccatcggctcgccgtcaaccactggatagagagagggagagcggggatcttacatcgcaaaaatgcccgctcattgtcggccacatttgggttcaattagagtacctggagattcgcccagccctactgtgggtgcgtgaaccgtgggcgggcagagcgactggctgtggtgggcgaaatttctcgccgtagttgaagaaccgccgcgaacccgcaccacctcatggaccggaggtttctcgctgcgaactgagaagagcttgtgaccgaggatcctggtgaccagcagatagaagtagctgagcaggagttcattgaaggcaagttgtgtcctt

SEQ ID NO: 41648 - DNA, 10252 bp, Zea Mays
tctttccagaagaactccggagtccggatctctcccctcgcactcctcgatctgactgttcaagaaaaaaaaccccttgatcggaagaaaaccgaccgggaacattttatcctgtcctgttgcaattcccctcacgcgatctcgccgtgtccacttctatcactacctggccacctggggatcgggttgggctggattggatttccgaaccgaatcctgcgggctcgcctcgcgtcgccgtcctcttcgccgcggaggtgatgcgctgttgccgccgccgccgccgctagcgccggatcgggggcgatgaacatcgtcaagggcgtcgccgatctcctccgcaagtcgacgcccgcctcgccgggggccggcgccggcgggggcggcggaggcggagaccgaggaggcgtcgggtccccatccgccgacaggctcgccgccccgccatccccaagggtccgcttcagtgacaatggtgaggaaggagtccttaatgcgctttggcacaagtatgagagtggcattgacaaggctgagaagaagaagactctgcaaacatttgtcatgcattttgtaaaagcatttaaagattgggagccaggctatattgagcaatcaatcgatcatgaatcgttatcagatgatacaattttaggatgctctactggtcatccttctgaggtcatccttattctcattcaagagatttctcaaataacttcatctatcactgagagcagcagctgtccagaatcctctgctaacatttcggagttattgggtgacctgggattaaacgcagaaggtttgacaattttagagtgcttgacaattctcacgcgctcagtgcataactgtaaagtgtttagttattatggaggtgtgcagaaggtcactgcacttttgaaagccgcagttgtaaagctgaagaccttgaccagcttgcttgccgcagatgaacaactgtcaaataaaactgtagagaacatgaggacgatgcaaaaggttcttgtgtacattgttacaataatttcaaacttcatggatctggaaccaaatacaacaaggatttcacagtttatactaaacagctccaggcataccctatcgagcaactatttggccacagttgctccaaatacttccaaaagcatggtttttgatagaaattggcagaaaaaggccattgtttcagttatggaagctggtggtgtcaattggttagtagaacttctaagggttattcgaagattgaatttgaaagagcagtggactgacttgtcactccactttataactttgtactctctgaggtcaactatatctgaaaatgttcgtgcacaaaatcatttcagaagtatagggggactggaggttctattagatggactgggactgccatcaagcaaattttcagtctcgaagcagtcttttgttcccagtgatgaaaggagtggcattctccagctccagatactatatttggaaattctgagggaagcagtgtatcctgtcccattatttttaagtgcttatcatcagcaaaaaattcttaatgctcaggccatcctgaaagctgataaagaaagcactgggccttcaccaacattggaatctttctcaaatcctgtagatattcttgatacatcagaatggaacgagtattctgtaaaattaagcataacactttgctcatttctccttcctcccaaggagatcaaatactgccctgctccaactgatgttacccaaatttcactatccatctcattggcttactgggagcaatgtgcaaggtggattataaaggttctttcaacagttttcccgtgcatgaaagcttgtgctagtgaaactgatttgcctaaccatataaggattttagcaaataccatgcagcattacatgctttgcacgtttaggaaggttcttatttcagcaccagctctacttaaatcttttcgagaggagggtctctgggatctgatattttcagagaaatttttctactttggatcatctttggactacattcaacagaatgatcaacttattgatgctcccaaatcaatcgattccaaaagtttcagtgaaaccgatgtcaacgttcttcaagcagaagctatttccttcttggagtttgctgcaacactcaatgaaaactcaaataacttgccagaatgcttagcattggtaggtgcacttgaacattgtacctatgatcctggattggccggtggtattgttaagagctttcacgtgatcctacaacttgcaactgaacaaactctagcttctttcaagtcaattgatgtgctcactagagtcctgaaggttgcatgccttcaagcacaagaaataaggaagctgtcccaagatgacttaaatcaaaatggttctcaatccagaaatgctcagacgacttattcagatgagagaattaagaacacttgtgcatttgtgaaactggctttcaaccttttcaaggagtatgccacaatatctgacattggaaggattacagttttatgcaatgctaattgcatcgagtgtttatttgatttgttccaagaagaatacctcaggaaacacatattggagcaagtacttgccttatttaggttaccttcgtcatcagcacaacaccacgcagcaaagatgctactatgctccaaatatcttgagactttcactcgtgcaaaagaaaaggaaaaggcttttgcagaattgtcaattgatctattagtcaatatgagagaggtcataatgatagaccgtgtgtattatcaaaatctgtttcgcaatggggagtgcttcttgcatatagtctctttgctgaatggaacttttgatgaagcagttggggagcaattggttcttaatgtccttcggacactgactgctctacttgctgaaaatgatgagtcaaaggctgccttcagattgctggtcggtgcaggttatcaaacactgcaaagcttgctattggacttctgtaagtggattccaagtcctaaactcctggatgccctacttgacatgcttgtcgatgggacatttgacataaatgaaaaagcaacaataaagaatgaagatgtgattatgctattaataaatgttctgcaaaagagcagcacttcactccagcattatgggcttatggtcttgcaacagttgctcaaggggtccattacaaatagaacttcttgtttcagagcagggttgcttagtttccttcttgattggtttaaagttgagaaagggaatgacattgtaatgaaaatcgcagaaataattcagatcattggtggacacagtatttgtggaaaggatattcgaaaattttttgccctccttcgtgacgaggagattattgcaaagcagcagcacagttcattgcttttgacaagtgttagtcacatgctcaaggaaaagggtcctgaagctttctttgagtttagtggtcatgactctggcattgaaattaaatcatcagttcaatggccttacaataaaggtttatctttctgttgctggctaagggtggaaagtttccctgagaagggtttgatgggtctttactctttcttcactgaaaatggaaaaggatgtttagctatgattgggaataatactctaatctatgagtctgtcaatccaaagcatcagtgtgttttgttatctctaagcctccctatcaagcaatggaaattcctttgtgttactcatacaattgggagaaccttctctggagggagtcagctgagatgctatgtagatggcgatctagtatcaagtgaaaagtgcaggtacacaaaagtaaatgaactaatgactcgctgtagtgttggtacagaattgatgcccatcggtgaagaaccttcttctcttggctttgagaacactcttgcttttactggtcaaatgggccctgtttatgcattttccgatgctctctcccctgaacaaataaggggcatttataacctaggaccaagttacatgtactctttccttggtgatcagaatttgcttacaaatgatgactcacggtacaagggaatacttgatgcaaaggatggcatttcatcgaaaatgatttttggcttgaatgcacaggctagtaacaatcggactttgtttaatgtatcatctgcactggatggtcttgacaagagtaagtttgaggcaaccaccatgggtgggacaaaattatgctcccggcgcctgctgcaagaaataatctattgtgttggtggcgtttctgtatttttccctcttctgatccactttgatgatgctgtggttcagaatggagagtttgccaccagagatcaattggctggtcaagttattgagcttgttgcatctgttctagatggaaatatagcaaatcagcaacagatgcatcttctttctggattttctattttagggttcctgttccagtctgtttcaccgcagctgctaaatatcaagactctttcagcatcgaaatacatgtttactattttgaagacctctagcatgtcagatattctattgagagatgctctttcacagttttacttgaatccacatatctgggcatatgcaacctatcaagtacagagagaactttttttgtttctgatacaatattttgaagctgatgggaaatttttaccagtattatgtgcgctccctaggatcattgatgtcataaaacagttctactcggaaaagctagatccaaggttttctaagcctttgctggtaagcaaaaaggtgactggggagagaccaagcatggaagaaattcgcaagatccgacttctcctgttgagtctggcagaaatgagcttaaagctaaaggtttctcaacatgatatcagagctcttgtttcctttcttgaacgaagtcaagatgttgcatgtgttgaggatatactccatatgattatccgcgccctttcacagaactcgcttgtaccatctttcttggagcaagtaaattcacttggtggttgttacattttcatcaatcttcttaagagggaatttgagccaatccgcctattgggccttcagcttcttggaaagcttttggttggggttccatctgagaaaagagggccaaaaatttttggcctccctgtaggacgacctagatccattgctgaagatataaggaaaggggcaacagcagcacctcaactgtttttttattcaatatctgatagacttttcaaatttccactttcagatcatttatgtgctagtctttttgatgttcttcttggtggagccagtcctaagcaggttttacagaaacgttcccaatctgatgctttaaaagataggagcatggctcctttttttgtccctcagattctggtttgcatttttaaatatattcaatcttgtcgagatgcttcagtgcgtacaaagattttaagtgatcttcttgatttgctggattcaaatcctgtgaatgttgaatcccttatggagtatggttggagctcttggcttgaaacatctgcgaagcttgatgtacttaggaactacaaatcgaattctgtagccaaggctgacggtttggagaccaatgagctgattcttgtgaggaacatgtattcgttggttctctcctattgcatattctctgtgaaaggtggctggcatcaactggaagatacaacaaatttccttctactgaaaattgagcaggggcagttaccaaattcctccatgctccgagacatttttgaagatctcattggaagccttcttgagacatcttctgaagaaagtgttttcaattctcagccatgccgtgataatatcttgtatcttttaaatcttagtcatgaactctttgttgaccaaattggaattaaactcttgtttccttcacctgacatgtctgcacatttgtcatctgatgacatcaactcggcagttctagaaattatgaatactgagggcaatggtctgcttacaagtcttccttggagtaatatattatttaatgatggagaaaagttgactgatgattggtggagcttttttgacaagatatggacgcttctgtgctatttgaatggcaaaggccaaaccagattaacaccaaagggtttaaatacagctggaccatctattgggcaacgggcccgcggattagtagagtccctcaatatcccagctgcagaaatggctgctgtagttgtaacaggaggcatcagtagcgcattaggtggaaagactaacaaagttgctgacaaagctatgatgctaagaggggagagatttccaagaattatcttccatctcatcattatgtatctctgcaaagctggcttagaaaacgcatccaaatgtgttcagcaatttatatcactgctccctaatattatctctgaagatgatcagtgcaaaaatagactgcatttcttgatttggtccttactaagggtaagatcccagtatgggcaacttgatgatggtgcacgtttccatgtcatgtcacacttgattcttgaaactgtgatctatggaaagtctatgcttacaactaatatagtaggcagagatgattctactgaagcaaataacagtaaggaggctgggttcattcttaatcttgtacagaaggaccgggttctcactgcggctactgatgaggcaaagtacatgaaggatgcaattgctgatcgcatgaagctggtccaggaactccattctaaacttgatgaacgctcaattcaagacgttgaacaactgcaaagttttgaggatgatgtacagtttgccaagactgctgctatagctgcggacgacagtagaaaagcagctttccagctagcatttgacgaggatcagcaaattgttgcagacaagtggattcatattctccgtgctctgagtgatgagagggggccatggtctgctgctccttttccaaataatattgtgacatactggaaacttgacaaaactgaagataaatggcggcgccgactgaagctcaagcggaactataagtttgatgagtgcctttgtcatccatcatccatcaaatctagtaacgataatgctgccccaactgttgacccatctgctaatgccaagataacagaaaaaatgaagcacttacttttgaaaggagtgcgtggaattacaggggatatcagttctgaatcatgtgaggatagcaacgacatgattgatcctccccagaatgtcccgccagagaaccacactgttagtgatacttctgattctgcagattcctcagattatcctgctattgttcaaaatagaaaagaaagttcatcaaccagtagtgataatgattatatcgaggtgctatcatcagttcactgtgttcttgtaacccccaaaagaaaactagctgggcaattgactatcacacgaaatgccctacatttttcttttgaatttctagttgaagggactgggggatcatctgttttcgacagatttcatgataaaaaagattcagactccaagaatgagatgggaggtgtggaaaaactgaagggcaatcttgatggaggacgaggcaatgctgctgaatctagcgacactcaaattaaaaatcaatctggtaaaatcaaacaccatagaaggtggaaaataactaggataaaagcagttcattggacacggtacctactacaatatactgccacagagatattctttgatgatgcaaacgcaccagtatttcttaacttttcatcccaaaatgatgctaaaagtgttgggtctcttttagtttccctgaggaatgatgctttgttccccaaaggaacaaccagagacaagaatagtttaatttcctttgttgacagaaaggttgcccttgaaatgtctgagagtgctagggaaagttggagaagaagagaaataagcaactttgagtaccttatgattctcaacactcttgctggacgatcttacaacgatttaactcaatatcctatatttccttggatattggctgactactcttcagaaaagcttgattttaacaaatcatctacattcagggacctttcaaaaccagtaggtgccttggatgcaaagcgctttaaggcttttgaagatagatatcttaattttgttgatccggatataccaagtttttactatggatcccactactctagcatgggaattgttctttattaccttctaaggcttgagccttttactgcgctgcaccgcaatcttcagggtggtaagtttgaccatgcagatcgtctatttcagagcattgaaagcacatacagcaactgcctatcaaatacaagtgatgtcaaagagcttatacctgaattcttttacatgcctgagtttcttgagaattcaaattcatatcaccttggcataaagcaggatggtgaaccattaggtgatgttggtctccctccatgggcaaagggttccccagaagaatttattcatatcagtcgagaagcccttgaaagtgaatatgtaagctctaatctacatcattggattgatctcatatttggttacaagcagcgaggcaagcctgcagttgaggcagcaaacatattttattatctgacatatgagggtgccgttgatttggagaacatggatgatatgttacaaaagtccgctattgaggaccaaattgcaaattttggacaaacaccaattcaaatttttcggaagaaacacccaaggagaggtcctcctataccaattgtgcatccactatattttgcgccacaatcgataacagtgacttctgttgtcccgaccatagtcacccctttatctgtattattcattggtttgttggactcaaacgttgtcatgatgaatgaggggctcatactctctgtaaagctttggctaacaacacagttgcagtctggtggaaacttcacattttctggatcactggaacctttcttcggaattggttctgatgttatttctccgaggaaaattggcacttctttggctgaaaatgttgagtttggaagacaatgcttagcaactgttcaaattcgtggtgacaattacttaattttgtgtggtaattgggagaatagtttccagatcatatctctaagtgatggaaaaattgtgcagagcatccggcagcataaagatgtagttagttgtgtggcagtttcatctgacggaagtgtgattgcaacgggaagctatgacacaactgttatgatctggtatgcatttcaagggagatcaaatgacaaaagatataggaatgcaaattacgatctatcaactaaggatcatgtcatcattgaaagcccttgccatatcttatgtggccatgatgatattatcacatgcttatttgtcagcacggaattagacattgttatcagtgggtcaaaggacgggacttgtatgttccatacactgcgtgaggggacatatgttcgatcgattcgacatccgtcaggtgctggtttgtcaaaaatggtaacatcacagcatggcaggttagtgatatactctgatagtgacctttctttgcatatgtattccataaatggaaagcatattgcttcttcggaatccaattgtcgtctcaattgcatggagctaagttgctgtggagagtttatggtatgtgctggtgatcatggtcaaattgttctccgctccatgcattctcttgatgttgtttggaggtacgagggagctgggaaaacaataacttccttagttgtgactcctgaggagtgcttcttggcgggaaccaaggatggtagcttgattgttttttcaatagaaaaccctttgcttcgtaaaaacgccatgcaacggcacaaggcaaaaccttccattggtggttagaggtgtagatcaaaacagtaccagaacttcttgctgcatttcaaataaaggttatcaatccgcaataattataacagagaagattctataactcctgtataaatgtacatacgtcatcagatcgagtttaccattctgaagagtgcatgtgccgatcacaatcaagaggataattcttctaactgcaaaacacatactatggtagcagccatgtagataaggattgggtaaatagagaaaagatgcgccagttgagttttgatacatgtggaccacattgtctgtctggggagataaatttaagagagagcacgtggttgcgaaacaacttttctgcctagctgggtgaacatgccaaatttgattaactttcacc

SEQ ID NO: 41649 - DNA, 3079 bp, Zea Mays
cacgaaccttgacgcgctccctctcgtactgggaagcggtccctaccaactggcggcggcggttcataccctcgcgaagaccactagggccgccgccggcgaatctcaagttctcaacacctggcagaagcaaatcggcgtggcactcgccgggcaccgctcccttctccctcctcccacttcccagttctcgatcgtctcaactctgcgggctgcggttccgcctccgcctcctgacgacctcgcccacacgaccgctgcccgcttcgctcgtcgcccacaccgccgttctctcccccgggtgcccataaacccccttctccgcgccatcgttggcccggcgtaaccatctccgctgcggggacgaggaggagcaagcaaacaggaagcagccgagtatcttgccaggtggcattgctgatgaaagtgaagacatgaggcttgaatgaaccctaactgcccccgccaaccgccgccgccgcagcagtcaccgactcctccagtcaaatcagccatgtcgccgccgccctgtgacgccctgcccaccgctgccaacaacatccagccatttcttgtccttcacaaggctgctgcctcctcggtgccatcttcccggtctcagcgccagattcagacctcacagccatcctcacccaaccgcaaatcagcaaacagatgtcgtcaaccagcgggtgaggagtgtgaggacgaaggggattcggagctatatgagcagctgcgtgctgaggccttccaccgaacttggtccaagatccagtccaccatcgacgaggtcctcagggccatcaacctcaagctgttcgaccaggtgctgcagtgggcgaaggagtccttcgcttcggcccatgccatcacgaaaaagcaccacactgaagtccagcagccataccctctcctgactgatgtgatctgcagaaggatcccgacggtattcgtcctcaccaagaatgcagagtttgttgatgatatcacaacgtttcatgaccttgcagggcatatgaagtccaatggatgtcacatagtcaagctgtcagcggctgagttatcagcaaaacatggagttggtggttgcttcaggagcctgttgggacagctattatccgatgttccagatgttgctgatgtatctgcgctagcatcatggtattgtgaagctgagaactttgatcagcctatcattgtcataattgatgatttggagcaatgttctggcgatgtgcttggagagtttgtgatgatgctgagtgagtgggtgtttaaaattccagtcttctttgtaatggggatagcaactacccttgatgctccaaagaagcttctctcgtcagaggctcttcaacgattagagccctgcaaacttaccttggggtctccctcagatagattgaatgcacttgttgaggctgtccttgttaaaccatgcgctggattttgcatcagtcatgaagtcgcactgttcgtcagaaattacttttttaggcatgatgggacaataacttcttttattactgctctcaagcttgcatgcagtaagcacttctccatggaacctctaagctttttgtgcttaggaatggtggaggaagattctgaggaattttggcatgataagcttgaatcgctccctcaaacaatatggaaacatgctttcgatctaccctcaaacaaaaatgcaaggaattcttgcaacatggtagaaggattgtctaggctgctgaaatcgcaaaaggattggagttctgttctcttgtgcctgtatgaagctggaaggcatgacaaagtgcagcttttggatatcttctgtgaggcagccagcccagattggcaaactgaaaatgcaccagatagttacctatttgcttctaaagtggctttattaggagtaaagtcagggtctgctagaagatttatagcccaagtaatgaatacaataaggtacttgcctacggaaattttgttacacgtccttgaggtttggagcatccatttaaaaggaatgagtgagatcaacgacagagtgaaggagcttcggtcaaaaggttgtggtgcagatagtgttagggccaaaaggaaatcaaccgccaatactggaaatggagtggttctaataaacgaggaagcggctgcgctgttacaggatgttatcaggaaatatttggtacctgctgaatgcttacctttccatgaaatagtctgcttcaagaatgttgacatcctccgatctgcgctgattggaaacccaagaagaatgattcaactcgatcttctgaggtcacagagccatctgaaatgctcttgttgcagtaggagtggtgctgccgtgtcaggatcgttgcacgacacatcaatcctgtgcagtctagcccaagagtatggtgacatgattaacctccatgactggtacacggcctttgaagggattataaagagcacaaactcaaaagccaaagggaaatcttgcagctctccctcgaagaagaagaagaaatcaaaccccacgcctctggagggtgatggcatgatccaagcaaggttctgcagcgccgttactgagatgcaggtcactggccttgttcggatgccgagcaagagaaggcccgatcttgtgcagagaatcgcgttcggtccttaacagctcggtgattacatgcatgctatacagacgaaacgttttgtgcacgctgacgataatcccaccatgtggtaaattgggcagccgtggaaggaaggtttggttacttgtatcggtgcttcgaagagagctgtgagatggagcagcagccgccgcttcagatatgcagtgctgatgttgcgtctgatggctaagctatgtcgttatttttttcctcttaagagcagtattaaacatgttttagctattgattcggctctctgtagagctgacatgggctcatgtagcccaaggggtacatttgagaaatttttatccttgaaacaaagggcatttcgaattatttccccttttactgatctgttttcagttgcagcacagcatggaacaacgtatgaaaagcaaagcatagctgctgcctgcaaa

SEQ ID NO: 41650 - DNA, 1795 bp, Zea Mays
gtctgttctacgccgtcgcggtcacctccagccctagcgccatctgctctgtacccccaccgctaacctcctcagctctggcctgcccgcgctcctcctcgttgcctggatccggcagcccctccatgctcatccgcccctttcccgctctctcctcgaccggctcgctcccgcttgcaaccacccacaccctgttctgctccagagacagtcctggcggcgctgaaggaggagacgcagcagcggatggatgacgcatcgattggaggtcattggtggccactcacgcctcctcagacctcaccctcacttcgtcgtcagcgcaggtttggccaacggcccccgaccggatcgcaggtcctcctcacggtgaggcacagcccacagagtcgagccggacatcacaaccatgaccatgaggcatcgtcgcagcagtcggagtcatttttgctgccccctcccgacacctgtaaattttgtatgccttcacgccgtgaagccacatttgcggccattggcaatggctgtatccactgtttcgatccatatatttggtgatgtcccttcttcacctcttgttgggctgcttcaggacaaaatcaataactggagggagacatctcttatattgacatccatccttttcgctgcagttgtgttctggttcattggtgtgtctgaggctgcacaagatgctcttgatcatcttttcaaccaaggccacaatctcgtaacagaaaatgagatttctgatacctttactaggctggttgaaaggctaccacaagtggtacttggaagcgaggagacaaccacactttcacatgctaggatgttgttggctctgaccttttatgctggtccctagtttctgataaatcatcttcactgttctcctgtattgctgctcgtttctttgattgtttgggtttatgcataggtcatagctcacagttttctggttccatggacaagctaattgtatcaaagccactatctatcgggtatctttattcagttgctgagttgaagagtggcgcctattctaaagatacaactaacatatctctgcatgccacgtcaacatttgcagcctccaaaatatctgttatccatgataatgctttgccaaattcattacttggtacagttgaatatgagttgccccatgtgcctccatggtttattcatgctggtatccagaagctttatggggttcttgctggaataattagacttgttggcctatcaacagtgtcaggatagcatactcatacagtaatattgttgcatgtcgctcttaacaaatttcatttaggaaccgggccatgttgatgttcaaaagagttgtcagaagttcatgacatctggtatttattatatcttcttttgtagtgggctggtgtggtctgcttagcagcaggtagcactacaaccagcaatgtatggatgaattgaaggtagtaaagaacgcatgcaatcttatagaaactctacatcttgaaactggcatgattgacaaagaagctggatgcatcctttggattggtgtcttcttatcatcaagcagtaatgtgaagcaagttcatttgttgactaagaacagatgagcacaaatcagtgaagagttcattgcactagagatggaggatggataggtggtagatttcaatatggctttgatactattgtttctctttacaatctttgtacataacaagaaaaatgacgttgtatgtggatactattgtaattcaagaatttatttctgaataataaatatatttgtttataa

SEQ ID NO: 41651 - DNA, 351 bp, Zea Mays
gcgctgggtgaaacagttcgacgcgcgggtgggtggagtgaagatggcgcgatcgctgcggcacctactgtacgtctctcgctcttcagttcagagctcatatatactcgaggttgagggggttgctttgcttgcaagtttccccgccaatttacaggccggacaggacagagtacacgagtccttcgcctagctagtcactgcatgcgtttgggtgtgtgtgctccttgtcaagttccgaatctatctcgtgccctctagtttcagttgcccgagacgacgacgactgtgtgtccaggtgcatccgcggtactgtttcccttttttaattccatgcagaaacatgacgac

SEQ ID NO: 41652 - DNA, 5354 bp, Zea Mays
catttcaggaccagagcagaattcctcgtttctttcaaaccgcaagaaaactaagcagcacataattaccatttctgccctccgtcccctctcaactccgtcgtcgcgacctgccgcgccgtcatcgccggcggcgaccagcacgtgcagtggaccagtcgcgaagcaaccgcgcagaagagaagggtaaaaacaggactgttggaagtcgagtcgagaagcaacagcaagcagcagcttggggggtaggtggggcaacgcagcagagatagtccaattcgccgccttgccggccactgacctcgccggcggcggggtcccctctgttggagccgacggatccgttgccccctcctatccgaacctgatccacccatgggaactccagttaatatcatcgttggttctcatgtttgggtggaagacccaaatctagcttggatagatggagaagttattagcataaaaaacaatgaagtacatgtgcagacatcgaatgggaaaaaggttaccacagacaggtcaaaagtatttcccaaggatatggaagctccaccaggaggagttgatgatatgacaagactttcatacttacatgaacctggtgttctacagaatcttgctacccgctatgaactgaatgaaatatatacttacacaggcagcattttgattgctgtaaatccatttcaaagattgccacatctttatgatacccacatgatggaacagtacaagggtgcagattttggggaattgagtccccatgtctttgctatcgcggatgttgcttacagggcaatgataaatgaagggaaaagcaactctatattggtcagtggtgaaagtggtgctgggaagactgagacaacgaagatgcttatgagatatttagcacatttaggtgggcgatctggagtagaaggacgtacagtggaacaacaagttttagagtccaacccagttcttgaagcttttggtaatgctaaaactgtgcgaaataacaactcaagtcgctttggcaagtttgttgagatccaatttgacaagactggacggatctcaggagctgctatcagaacttacttgctggaaagatcacgtgtgtgccaaattaattctccagaaagaaattaccattgcttttattttctttgtgccgcaccacctgagtacactcagaggtacaagctgtctgatcctagatctttccattacctcaatcagtcgagctgtattgaggtggatggaatcaatgatgctgaagagtatttagcaacacgaagagctatggatatagttggaatcaatgaggaagagcaggaaggtatattccgggttgtagctgctgtacttcatcttggaaatataaattttgccaagggaacagaaatcgattcttctgtaatcaaggatgataaatccaggttccaccttaatatcgcagcagaacttttgaaatgtgattgccagaatttagagaaggcgctgataacacgagttatagtcacgcctgaagaagttatcactagaacacttgatcctgcttctgcagttgctagcagagacgcattagctaaaataatatactcccgattgtttgattggattgtggaaaaaattaatgtctcaattggacaggacccaaactcaaaacagttaattggagttcttgatatctatggttttgagagcttcaaagttaacagcacgtgttcaaaatggaacaagaagagtataccagagaagagataaactggagttacatcgagtttgttgataatcaagatgtgctagacttgatagagaagaaaggtggattgattgcacttctggatgaagcatgtatgtttcctagatctacacatgagacgtttgcgcagaagctatatacaacatttaagaataacaagcggtttgccaagccaaagctttcacgcactgattttacagtagtccattatgctggcgatgtgacataccaggctgattatttcttagacaagaacaaagattatgtagtggctgaacatcaggatctgctgaatgcttcttcatgcctattcgtagctggtttattccctcctctcccacaggagacagcaaagtcttcaaaattttcatccattggatcacgttttaagcttcaacttcaatccctcatggaaactttgagctctaccgaaccccactatattagatgtgtgaagccaaataatctccttaagccagctatttttgagaatacaaatgttatacaacaactaagatgtggaggtgttctcgaagctatcaggatcagctgtgctggatatcccacaagaaaaacattttatgaatttgtcaatcgttttggtgtccttgctcctgaagttttagaagggagcaatgatgataagattgcgtgccaaaagattttggaaaaaatgggtctggagaattaccagattggaaaaacaaaggtgtttctaagagctggacagatggctgatttggatgctcgtagagctgaagtattaggaagagcagcaagaatcatacagaggcaaatacgtacatatattgcaaggaaacagtttgctgagcttaaaagatcagcaacacagctgcaatcttttgtcagaggaaccttggctcgtaagttgtatgagtgcatgaggcaggaagcagcagcagtgaaaatacaaaagaatatgcgacgccacaaagcacgggaatcttatttacaattgcaagcagctgcaatcacattgcagacaggtttaagggcaatgtctgctcgcaaagaattcaggttcagaaaggaaacaaaagctgctgtccacatccaagctcaatggcgccgccacagagactactcacattacaagaatctgcaaggagcagctcttacttaccagtgtgcctggaggcaaaggcttgccagaagggagctcaggaagctcaagatggcggcaagagaaacaggagccctaaaagaggccaaggataaacttgagaagcgtgttgaagaactcacctggcgcttaggattggagaagcgattaaggactgaccttgaggaagcaaaagcccaggaaattgctaagctgcaagagacgttgcatgatatgcagcttcaagttgaagagtcaaaggccatggtagttaaggagagggaagctgctagaaaggcaattgaagaagcacctccagtaattaaagagactcctgtgctagtcgaagacacagaaaagattaactcactgacgaccgaagttgaacaactgaaggctttgctgctaactgaaagacaagcaacagaagctgcaaaaagagaacacgctgaatctgaactgagaaatgaagaactaattaagaaatttgagagcgcagagaaaaagattgagcaacttcaggaaactgtccataggctggaggagaaagcaaccaacatggagtctgagaacaaagtgctccgtcaacaagctgttgcaatttctcctacgtcaaaatcattagctgcatatcctaagtctcctttccagctgaaaactccggagaatgggaatgctctaaatggagaagtgaagtcatcaccagatatcacccctatcttaccaaaccccaaggagcttgaggctgaagagaagccacaaaaatcacttaatgaaaagcagcaggaaaatcaagacctactgatcaagtgtgtatcacaagatctgggattctccagtggcaaacctattgcagcttgccttatctacaggtgtcttctacactggagatcattcgaagttgaaagaactggtgtttttgaccgtattattcaaacaattggctctgctattgagtcccaggacaacaatgacaagttggcatattggctctcgaattcatccacactgctgctgctgctgcaacgaacactgaaaacaactggagcagctggattcactcctcaaaggcgcaggtcatctgctgcatcttttgggagggtgttttcggggatgcgagcctcaccacaaagtgctgggcgtgcttttatgggaagtcgcttgattggaggtctaggtgaccttcgtcaagttgaagccaagtaccctgccctgcttttcaagcaacagctcacagctttccttgagaagatctatggaatgataagagacaatttgaaaaaggagatatctcctttgcttggcctttgcatccaggcaccaagaacatcccgtgcaagcctaattaaagggtcacgttcccaagcaaatgccttagctcagcaaactctgattgcacattggcagagcattgtgaaaatattgacaaattacttgaatgttttaaaagcaaattatgtcccttcagtcttaatcagcaaagtgttcactcaaatcttttcatttattaatgttcagttatttaatagtcttcttcttcgacgggagtgctgttcatttagcaacggagaatatgtgaaagctggattggcagaattagagcagtggtgcatttatgcaacagaagagtatgcaggttcttcctgggaagaattaaaacatattaggcaggctgttggattccttgtgattcatcaaaagccaaagaaaacattgaaagaaattaccaacgatctgtgccctgtccttagcatacaacagctatatcgaatcagtacaatgtactgggatgataagtacggtacccacactgtttcatcagatgtcatctcaagtatgagagtaatgatgacagaagattctaataacgcggtcagcagttcgttcctgttggatgatgattccagcattccgttttcggtggacgacatctcgaagtcgatgacagaaatcgaggtaacagatgtcgacatgccacctctgatccgggagaattctggcttcaccttcctacaccaaagaaaggactaacagggtggtccttccagctgcatgtccctttttgcacattctttttctccgctcaacctgtgcataactcatgtacatacgctcgtgccttttgctctctggtcagggcttgttagatgtattgtctttggtttgattggttggttggttctttcctcgatcctctcccaattttgttgggcgaagggtccacaatctatgtttctccatactgtagtgaaaaggggccggatgcccctggtctccccgagctgcttttggaaaagctcgtggtcattaagcagttaagcttgtggaaaaggttctccacatctaccgagtcgttcgttgtgtcgccttcttcatatggatcatcgccatattgtaaattgcaaatacgattatagttgaaaaaagagatattacagtgatagcagtgttctggagtttggatctcatgaatattct

SEQ ID NO: 41653 - DNA, 2194 bp, Zea Mays
gtcgggccactatccctctggcctcgtctcgtcttctcttctcgcgaatggcggcgctgtgcgatctccgtcgctgccccctccgccagtgatttctgggacgcgcgacgaacacgagttggaaggaggtggtcgtgctttgggcggcgaaggacctgggcgctagcagcctcagaccctgacagatcacaacctgacagatcacagttgcagttggagtgacgggcgctaccaaaagcgatcacaggcgctaccaaaagcgacgggcggccgacggcggcattgcagttggagcgagcgagcgcggtgcctttcggacgacactgagcacaggtcgcacattgtcacatggagctagactagaggtcgtcgccatcctgtcagtgtctgctcgtgatcaaactgcctgctgcctgcccgccccaatacacccaaccagatttcaattcacttcttggaagctgctgcttcgagcttttgagtagcacccctgcttacagacatttcatatccatatatatgctcctcgtcctggatctccttgccggcattatattgccccccacaccacccccgactccccacgaccattaatctgaagtctatatttcacattgtcacgactatattttgttccaatttgtttccttaatttgcatcagttttatatgttatattgataggtagcacatctatataagtccatgattaaaatttatgtttctagataatgggttcttgggaggagaatgttaggcaatttttgttggaggaggaggaagatgatgatgaactattctttgttattctccctgctataatcccatacctctcggaagagaaaagacccatccacacatcctccctcaccggtgctaaaaaggttaaagaaattcttgaagggcatgagagctggtgcaaatctgagtttagaatggaaaaggaaatattcaaagccacgtcaaattttcttagaagggagaatttactacgtgacacacgaggagttagtgttgagaagcaacttgggatgttcatgtatatgatctcccacaacgccagtaaccaaatgctacaaaaggcttttcaacacagtggagagactatccatcgaaaaatatctgaagtttttgagatagttcccatactaactcaacgatttgtgaagcttcctagctcagttcaaactcatgctaggattgcaacagattctaggttcatgcccttttttcagaattgccttggtgccattgacggcacacatgtatccatcactatcgcagaagatagggcccctccatatagaaatagaaaaggaactctttcacacaatgttatggtagtctgcgactttgatctcaattttacatttgtctcgtgtggatgggaagggtcggcatcagacgcaggggtgcttcgatctgctattagcaaaagatttagtgtgccagaaggaaagttttatcttgtagatggtgggtatgcaaatacaccatcatacattgcaccatacagaggtgttcgataccatctcagtcaatttaggaggagtcgttcatcacaaagtggttatgcaaactacaaagagttattcaatcatcgccatgcaattctccgcaaccatatagagagggccattggtgttcttaagaaaaggttcccaattctaaaagtagacacattccatcccatagaaaatcaaatcaagatcgcagctgcagccattacatttcacaacataattagagggcaaaatggtgatgaaggatggctggacaaccaactagattatatatctccaagccattacattggtgttacttggtacttgcagagtgctgagtggaagcaacatatgaagctgacacggaaaaggaaaatggatgatctccttggttatgtttccctgtcttgtgcatgctgcatttcctgctaccgtgaagaccggggtccaggagagtaggagactgaaagcactgtcgagaagactgaaattatcacattgacatgaagaccaaagccatctcttacctacttatctttgtagcttacgtttctattttattctgtcatgaaaactaaagtcttatgtatggtcattatgtactattttggttctgaaaatatttgtttatgttatgaaaactattggttgaaagaatggtgattacggttttggcttgaaggttcagaa

SEQ ID NO: 41654 - DNA, 1870 bp, Zea Mays
agcccagtccgaggtgctggaggctattcagctgttttggcttggcttgtggccggtgagaggtggacacgacgacggtgacggtgaggtggagagcggagtggcggatcgtggctccgatccacaagggacggctccacacatcgggttcctgcctctgctcagcagccatgccggtgaggcggcggcagccgcgtcggccggagacgggtgcggcggagaggtacagggagatggggatcggggctgcgctgtcgcggccctgggactatcccacggcctgcggcgagcttgcagcgctgctgcgcctcggatacgcggacctccctaaggcagcccaggcgctcgttgcctccgacgtgctactcgcgtttcgcctccttcccgatgtgcagacaggatatgcagtaagcacagctaatgttcttctccaagcagtagaagttgctctaccaaagcaaaagaaggcgcaggctgtttcagagttcaagcactctattattgcacataaaaggcgtgcaagagtccaacaaatttcaggttcaccacacataccacaagatatacttgtccatatcttcagtttcctggacatgcattctttggtagcagcaggtcttgtctgctggtcttggaattcagcggcaaatgacaacaaactgtggaagatgaattactcgattttctttggcctcagccatttgagttgcaacaacattcctgtatctggtgtgcaatacagcacgaattcggtgccaaattatccaaactttagctggaaggagtccttccacactaagtatgcagaatgcgcgtcatggaaatttgtatcaaatagagcactatgtgcgcattgcagatcagttatttggctgagcaacctcacatgtgcttctccacaccattgccctaagaatagacaccatgaagtaaaactacgacctctgttacctgatacatcctggatcaggttgctaaatacatattgcgcgttgaagatctagcagcttcatcatctgaaagtgatgacacagatgactcagattatgagaattggcacccaagattttgggcgctataggacaatgatattcggattgtgactatttatgtcctcgattctactagtttgctgtatttagtatgtagcaactacaaacatcatacgaatggaacacattgtatattgtattgtctattgtagtcttggtacaactatatttaggagaagcaactgttgggttgatttcatttagggcgtcgagctagggagcgtggtgccgagcgaggagagggacgccgccgcgccgggagctaggcgctggggagcagggcgcaacaggaataacgacgacgatggtgtggtctacagaggttcttggtttggaaacgaccgaccaatgctaatagtgctcaacggctgatgggagactagcatgatgtgatctgcaggagctaacaggtacatatgtgctactagtgctcaatagctgaaacgaccgtgcaaactactgtgatgtggtgtgtaggagcaggcgttgccaaatagatacagttgctgctactacatgcactgccagtgagtgatgactgatgaagcaatgctactgcagaaaccgatacagacaatcagacataaaagaccgtgctagcgaaaccagtgatcactctttattccgagtttctaatgagtgtttggtttgagaaatgatatagtccatcatcttctcactccttattttttttatttggtttgtataatggagtgagttaatctatcatcacctcatttctcatagttagttgtttagtactaatatgtggaatagagttatcccaccaaatttgaggaatggacctatgatacacc

SEQ ID NO: 41655 - DNA, 3025 bp, Zea Mays
aacaaataaaaatacgcgcgacgaacagagctgaacacaaacacccacatcgatccaacccaagccacgcctcggcgacaggccgacagcccacgagcgagatccaacccaagttccgacgccgcgggcgagaccgatcagatccacctcagccgtctcggatggcgtcagcatcgacggcggtgcggatgctccccgacggcggcgctgacgacgaggagcggtggctcgccgagggcatcgccggcgtccagcaaaacgccttctacatgcaccgcgccctcgattccaacaacctcaaggacgcactcaagtactcggcgcagatgctctccgaactgcgcacctcgcgactatcgccgcacaagtactacgagctgtacatgagggcgtttgatgagatgaagaagctggagatgttcttcagggaggagactcgccggggcagctgctctgtggttgatatgtacgagcttgtgcagcatgctgggaatgtcttaccgagactctatctcctgtgcacggtgggatctgtgtacatcaaatcgaaagaggctcctgctaaagatgttcttaaagatctcgttgaaatgtgccgaggcattcagcatccccttcgtggcctttttctgagaagttatctttctcaaataagcagagacaagttgcctgatattggttccgagtatgaaggggatgctgaaactattaacgacgcagttgaatttgttcttcagaatttcatagaaatgaacaaactctgggttcggatgcaacatctggggcctgcccgagaaaaggaaaagcgtgggaaggaaagaaatgaactgcgtgatctggtaggcaaaaaccttcatgttctaagccagattgagggtgttgaccttgatatgtacaaagaaactgttcttccaaggatattagagcaggtggttaattgtaaggatgaccttgcacagttctacctgatggactgcataatccaagtctttccagatgaataccatttacaaacattggaaacattattgaatgcatttccccagcttcagccaagtgttgatatcaaaacagtactctctcaacttatggacagattgtctaactatgctgcctcaagtcctgaagtgttaccagagttcttgcaagttgaagcttttgctaagttcagtaatgctattggaaaggtgatagaagcccaacctgacatgccagttgttggagccgtaactctatatgtatcgcttctgacttttactctccgtgtacatcctgaccggcttgattatgttgaccaagtgctcggtgcatgtgtcaagaaactttcaggcaaagcaaaacttgaagatagcagggcaacgaagcaaattgttgcacttcttagtgctcccctagaaaaatatagcaatattgttactgcattagaactttcaaactatcctcgggtcatggattatcttgataatgctacaaccaaagtgatggctgtggtaataattcaaagcataatgaaaaacacaacctgcatatctacttctgacaagattgaggcactattcgatttaattaaggggctgataaaggatatggatggggctcaagatgatgaacttgatgaagaagattttaaggaggaacagaactctgtagcacgtctcattcacatgttgcacaatgatgagcctgaagagatgttgaagatcttatgtactgtacagaagcatatacttcagggaggccccaaacgtttaactttcactgtgccttctttagtattctccgctcttaagctggtcaggagattacaaagccaagatggagatgtcactggggaggatgttcctgcaactccaaagaaaatattccagatattgcatcagagttagctctgagactatatttgcattgtgcagaggctgccaatgactgtgatttggaaccagttgcttatgagttctttactcaagcgttcatattatatgaagaagaaattgcggattcaaaggctcaaatcactgcaattcacctgataattgggacccttcagcggatgaatatatttggggtggaaaatagagacactctcactcacaagacaacagggtactcagcaaaacttctcaagaagcctgatcaatgccgagcagtttatgcgtgttcacatcttttctgggctgatgaccaagatgggataatggatggtgaaagggttctgctttgtttgaaacgtgccttgagaatcgcaaatgctgctcaacagatggctagtgctacaaggggaagcagtggatccgtaactctatttattgagattttgaacaagtacttgtacttctttgagaaaggaattccgcagatcacaaataccgtgattcaagatttgattgaattgattagaacggagaagcaaagtgataactctgtagctgatccatctacagaggcattcttttctagcactttgcggtacattgaatttcagaagcagaaaggtgggagcataggcgaaaaatatgaacagataaagacgagttcatgagtcagaactagcgcggcgccacgactggtttcgattttgttgagaattgggtcgtttgtttggcatggttcagtgaaatagaaaccataagttttagctcgctccatgtaaaagatgtttatacgagctgttaattctcaaatctcacggtctgagcgggtctgttcgcccattggcaacactttcaggtttagtcaggtggcaataagctgtgtcctttggggagcacaggtctgtacaggattacttgtgttcgtgatcagttctactgctacctgaatttcatcgttgtatatttccgccccttatgcgaagcttatggattttagatctctgtaacattcggagtacatgccttcatttctgagttctgactggacattgatgattgtttcagagtggccagtgcaggacttgaacattttggatgcccgttcgttgacattttaatgttacccattactctgctgtgtggcatgacctcgc

SEQ ID NO: 41656 - DNA, 467 bp, Zea Mays
ctttccgttgcgataaacacagacgcaacaaaacgttctttctccctcctcctgttatcttgttccttctcccagtgaaaaatctttatgtcctcaagctcaagcataccgccaccaccagtctcagcccaacgctctacctcaacaactcacctcgttgtttacatttttgttctttggtcgtcgtccatagaaaagaatccccatcgtcaggtcgtttatctactccaagctggcgtctgtgatagggtgaggcagccaggcaggtatggtctttgggctcatgttgtgctgaatggggcagggtagttgtggggggggaagcgctcgtcttatgcttgttgagattcggctgggtgcaagcagccagggccttgcagccagaaattgttcgtcctgtatgtttgtgtggagaagaagtggtgtgagtagaaaaggaacagcgagggggttgatgctaatttgtg

SEQ ID NO: 41657 - DNA, 1509 bp, Zea Mays
ctgaagctgggtagctcctgctcctatcccggctgctggcgcgccgtggttttgtgctcttgtggacacactggcctccacccatccctctcacgtctctggccatccgcagccaaggcgcgcggcccatcgtcgatttatagccacaccatggccaggaagtgctcccactgtggcaactacggccacaactccaggacctgcggactaggactaggactaggacacagagaaataatgctctgcgaaggtggcgacgacaataatggccgcagcggcctaaggctcttcggagtgcaggtccgtatcggcggcggcggtggcgcagggtcggcgtccatgaagaagagctacagcatggactgcctgcagctcgcggctcctcatgcttgttcgtccctcgtctcgtccccgtcgtcgtcgtcgttgtgctcgtcctcgtccccgtcgtcgctgctgctgtcgattgatgatgggttgcagagaggggcggccgatggatacctgtctgatggacctcatggcagagctgtgcaggagaggaagaaaggagttccatggagcgaggaggagcacaggcagttccttgccggcctggacaagctgggcaagggcgactggcgaggcatcgccaggagctacgtgccgacgaggaccccgacgcaggtcgccagccacgcgcagaagttcttcctccggcagagcagcatggggaagaagaagcgccggtccagcctcttcgacatgcggcaggtgccgatctgcgagaacagtgcgagcatctccgatccgctggacgtggcacgccatggcgtcgcctcggcagactccgagagggcggccgtggacgtggacctgatgaattcgacgacggagggtgacgacggcaggagcagggacgtcgtgtcgtcggcgtcaggtgcagggaccgcactgcggttcccggcagcggcagctcagacggagccgctgcatccttcgtcatcgcatggccatgggcgcggccaccactgctctccgttggacctggagctgggcatgtccctgcccgccccatccgtcggaacgtgatggagatgaggcgaggccgaggccgtgcgtgactgctgtctccctcagctgtgtgtgtcagccagatggagatgatgcgctagccaatacagtactgttcgtgatcgtgaaaacggtgtgcaaacactagcacagcggcactaaactaggatgtcgctcctcgcaccatattgtgtactgtaaccacgttgatccacatcatctctatctcttcaccaccgttggatcataggctgtcagtttcatctatccgtccatgtgtcatactcattcacgatgcggtggcttaatgatccagcagtaatttttcttctttcgtgacttaagggtatatacggtggtatttaatgtagaggcttttgatgtatttaaaggggtatttgcaaaaaaattatggagccgtctctgcatgaagaaacgcatctgtctcgtaagtca

SEQ ID NO: 41658 - DNA, 7957 bp, Zea Mays
ttcagctactcttgtcctgacgatcacggccacggagggagggagagtcaacggtcagtgcgggggctatggtttgctttcttcccccgagcgcaagcgcaacccccgcaccaaacagacaacagcagtacagcagagcaaagcaaagaggaacaccatttcccttgcctgcttgccaacccaccaccaccaccaccaccacccacgaaggcagcagcaacccagcaccaccgatccatccatccactcgtcattcctccgccccgccgctcgccttcacccatctccgaccccgctccgccaccaaaccctaggctaccagctcttcccaccccgtgtgctccgctcccctgagggcggctcgcgcgccatttctccgctcgatttcctaaaaccgtactctcggattcgggatcgggccgcgacggggcctcctcttgctctcgctcttccgtccggtcggccgctgaggacaataaaggaggttgcgctcatgccgggggcgccgctcaggtgacttgctggggggccatgcataggtactccagcaacagcgctgggttcagcggtggcagggacggcgcgaggttggaagcctcgcccttctcgtcctcctcctctgggtaccctgtcagctccaggcggcagcagcagctagttccatacaagctaaagtgtgacaaagatccacttaataacaagtatgtctaacttatcgaccaaagccacttcacatcaatgagagagctaacgactcttctcctatttgcatgttttttttttaatctcagactggttatgattctcttcctttttttggccacccctatcagctttgacatgatatctgcttataaaacgacgatttcatatattgttcttctatttataactaagaactgttgatttgtcccacgatatggtttcgttggatccttgttgctccttttacatgtctcttctgtaggcttgggccacctgacttctatccacaaacaccaaactgtcccgaagagacattaaccaaagagtatgcacaagctgggtacaaggagactgttgaaggaattgaggaagcaagagagattgtactcagccagatcccgtacttctgtaagccagatgctgtcataaagtgcaaggaggcactaaagaagcgtttaagagcgatcaatgaatctcgtgctcaaaagagaaaggctggccaagtttatggagttcctctttctggatctctactgatcaagcctggagtttacccagagcaaagaccatgtaatgaggacgcccgcagaaaatggattgaggcccttgctcagccaaacaagcgactgcgttcattgtctgagcacgttcctcatggttaccgtaggaaatcactttttgaaggtctaattcgatataatgttccgttgctaagagcaacatggtttattaaagtcacatacctgaaccagacccgacagacacctaacagtatttcagtagcgggttctgataaccaacgctctaatcagtggacaaaggatgttgttgaatatttacaacatattttggacgaattttgttctaaagagggtgcattcgtgcatccatcttttagagagcagtcatcaccaggacctactgctggaaccaatcagataaaaatgaaaactgaagcatctccagctgctggagacattgaagaacccttggtgcacttcaaatggcggtatatggttcgtctcatccaatggcatctcacagaagaattgcttgttccctcagtacttatcgaatggctatctaaccaactccaggagagagattcagttgacgttttagaacttctcttgcctattatgcttggtctggttgacaccattactctctcacaaacatatgtgcgcatgtttgtggagctactagtgagacgtctcaatgatgcttctgttgttgatagtccaaaaggaccttcagtttcttctgttatagcagagttactgcggtacatggtacttgcagtgccagatacatttatttctttggattgctttcctctcccatcttttgtggttcctgatgtatatggtagaggtgctttgttgaagataactagcagtggtggaatttcaagttctaaaaggtgtgatgcttatcggtatttgtcctgtggttatgctgtttgttcaattcaaaaacgtgcatatgatctcgcaacagttgctaaccctaaccttcaagcacgtggtgcagccaaagtggtacaggctttggacatagctcttgtcacaggaaatttgtcagtggcatattcttcactctttaatgatttatctgatacgttaatggaagagagatggattaaagaagtcagccccagtctgcagtcttctctgatgtggattgggactgttgagctatcccttatctgttctatatttttcctttgtgaatgggcgacatgtgattatcgtgattgtcgagcatctccctctcggaatgtgaaatttacaggaagaagagatttgtctcagatacatatggcagtgtctatcttgaagaataaaatggatgagatgaataatttgtctcgttctaagagtagcactcgcgttaccctgaataatatcaccaaaggttcttcactgaccgatgcttgtttgacagcagctgctgtggatgacacttctggattgcaaagtaatgcaaagaatgtggatgagaagaaggatacgaatgatatctttgaaagccctggtccactgcatgatatcattgtgtgttggttggatcagcatgaagttagcagtgttgcaggttttacccgggtggatgttctcatcgtagaacttatccgcaatggtatattttttcctcaggcttatgtcaggcagctaattattagtggaattactgacaagaacgacacaatgttggatgttgaaagaaaaaggaggcatcacagaactttgaagcagcttcctgggtcttctttatttgatattcttgaggaaactaggaccgtggaagagcaacagttatatgagatgatgtcgacatactccagcgagcggcgccttgttctctctgaactttcatgtgatcactcattttatgcaagtggcagaggcgagtatactgcaagttcctgcattcggaagcagagtgatcttccacttgcatcaggaggtgataagcatggaagagtgccagaacaagtagaagatgttaaagccctattgtcaagtctgttgggttttacatatccttccccagtggaatccgaacctcgccaaatcaaaacaagctttcaagaatcagcaacttcaacactctcacaagttgagactggagaagcaaaaagtggatgtgaggtttgtatgaggtccaaagggcagaaattggatgatactgccactcctttccaagggttttcattgattcaatcggacgaggaagatatttggtgggtgaggaaaggcacaaagttacaagaatctttcaacattgaacctgttcagaagtctgttaagcaaacttctaggggtagggcaaaagtggttcgtaaaacacaaagtcttgcacaacttgcagctgctagaattgaaggtagccaggggacatctaccagtcatgtctgtgaaagcaaaatgagctgtccccaccataaacctaatattgatggcgataatgttaaggattttgatcacacgagggtggcaaatctgactgaaattgggaagtcactaaaaagacttagattgcttgagaggcgatctgtctcttcttggttgttgaaaacagtaagacaacttattgaaggaaatgaaacaacggctgctaaagctaccaattccataagcattctttctttgcagtctgatgacaaaacgacatccaaatggaggctaggtgatgaagaactactgtcagttctctatttactggatacatgctgtgatttagtctcttgtgcaaggttccttgtatggttactagcgaaaattcgtggtggaatgggctcttcgggccaacctgggaggagttctatgcatacgaggaacagagatcaccaagtttgtcaggtcagcgaggcacttgtgttctcatctctgcttaggtacgagaacatacttcttgcggctgacatcctgcctgatgttctaagtgctttagtgaacagaaattctgtgtcagcaattgtcaggcatcctggttcaacagcttttgcttacgtacgatactttttgaagaaatatagagatgtggctggtgtggccaagtgggaaaaaagctttcggaccacttgtgatcagcgcctgttagctgagcttgataacgggcggtccattgatggcgaattgatttcttcttcgggggtttcagcaggcgaggagattgatgagcaggtccgccaaaagttgaatggaaggagttcaagacttgtgcagaatatgaaagaaatagtgcaacggcaagctgatgaaattcagcgcagtttgaaggaaaagaaagttctagcaactcccaggaatccacccacttttgagaaagaagatagctatcaaattgcacatgacattgtttcgggcttagtagaatgcatcaggcaaaatgggggtgcaaatccagatggagacctttcaacagttgcttctgctgtttctgcaattgttgcgaatgctgggcatgtgatagcaaaacatttggattttgcaggaggtaactatcaaggtgttaattctgtgagtaattcactaaatttcgttaggcacactttgcgtgtccatataaattctctttgcttgctgaaagaaactcttggggaccgcttcagccgtgcatttgaaatagctctggctgttgaaacttctggagctgttacagcagcttttgcttctccaaagatgcaccgcaatcagtttcaaccatctcctgaggcccatgatgcatatggaaatcatacaagtgatctcagcaactcagggaaaggttttgttgggagaactgctaaagtatctgctgctgtttctgctcttgtcgtgggggctgttgttcatggagctgttagtcttgagcggatggttgctgctttaaaaataaaagatggtttggatattctgcagctcctgagaggtttgaaatcaagttcgaatggtgtatcccgtcctactggaacttttaggattgaacattccacagatgttttggtacattggtttagggttctattggggaactgcagaactgtctatgatgggcttattgcagatattcttggagattcgtacattcttgcactctcaaggttgcagcagatgcttcctcttagtgtaatctttcctccggcctactcaatttttgccatggttctttggagacgatatatttttaaccgcgaagatccacagctttatcagtctctgtcaaacgcaataagcgatattaccagacatcaaccttttcgggagatttgcttccgcaatacacatcggctgtataatcttctggcttcagatgttggtgattcagagtttgcagcaatgcttgaaactcatagtcctgacaggaattcaaaaatactgccatttatacctctccgtgcccggctttttctggacgctcttattgattgcaacacaccaactattcagggagatggagcttcggagccttgtgaccccaaagataatgaattaaagctttcagagaggcttatgcaacttcttgatactcttcaacctgcaaagttccattggcaatgggttgagatgaggcttcttttagatgaacaagctcttatggaaaaagttgcagcaggcaagacagcacttgaatcacttcggtcgttatcccctaaagctgaggggtttaccctttctgatagtgaaaaagggtttactgaagtcattctgtcaaggctacttgctagacctgatgctgctcctctctattcagaagctgtccgccttcttggcaagcttcaggagtcccttgttatggatgtgaaatggattttacaagggcaagatgctattcttggccgcaggtcaacaagacagcagcttgttcatattgcccaacgaaaagggctttcaacaaaggcacaggtttggaaaccatggggttggtccagcttgcttagcgatgttattcctaataaaactgcaaaaaggaagttggaagtcacatcaattgaggaaggtgaagttgtggatgatactgttgatgctaaaaggcctagcaagactccccctcatagtgttgatagaagctttgaagcgattagatccataaataaatatttaactgagaaagcccttgctgaattagtattgccatgcatcgacagaagttctgctgatatccgtggtatactttctgttgatctgatcaaacagatggggactatcagtgaacatatcaaagcaatagcacggaatggtgctaaacaagctggttcagtcccttcaggtaatgaagtgccatcaagcaaatcaagtggtcgtaaaggaattcgaggtggaagcccaaacattggcagaagagctccggttggtaatgacccaagccctccgtcggcttctgctctgagggcagcattgtggttacgcctccaattcatcattaggttgcttccagtaatcatggcagataggagcatgagacaaacacttgcttctgcaatcctaggcctgcttgcaacgcgcatgatttatgaagatgcagatctgccccttccacctaccaatgcaactgctttaaggcgggaggtggattccctgctggagcctcccctggacgtcctgcttgatcggcctggtgaaagtctttttgagaggcttttatgtgttctccatgcacttcttggcagctacaaaccaagttggctgaagtcaaggtcagcctctaggtcgacaattagaatccaacgagatttttccgcatttgataacgaagcagccgagggtttacagtctgcgttggatcacatggaattgcctgaaacaatcaggcggaggatccaagcagccatgcctcttcttccaccatcccggcacccttctttgcaatgtcaacctccgcagttgtcgttggctgcattaacaccactccagagcagtacatctggtgtaggtccgcaacagaaaagttgttctgcgagctgggtgcccactaacgtctcaggcagaagcaaggcggcgttgccttcgcatgatcctgaaatggaggtagatccatggaatctgctcgaagatggcacaagctgcccctcaacagcatctggaagccatggcgcgagtggagtgacgggtgaccatgctaatctgaaagcgtgcagctggcttaagggtgctgtgagggtgaggaggacagaactgacctacattggctctttagacgatgacacctgacgtgtgtatgattattttggtgaattgtggaggaaattagtctcacctgttggcactggagtgaatggtggaaaccaaccatggcccttggctttaggatggttgttgttggtgtagaatacatacacatcgctgcccccgttttgttttgttttgttttgttttagggccttgtgggggcggctgtatataatggaaaaacatttgatccattactgaggcatggcccgagaagacaccttcaaatgggcttctgtgtaagcttgcttatttgagaagtaggaagccatgcagtagattttgtatccaaaagccgtgtacttgtttttgtctgatatgtaatctagcgcatgtcacacatatgtattcccttcctttgattgaagggctaatggtatgatgtcttttttttttgataaaacatgaggggtgagagcccctactggaaattaaataaaaaaatatgtacaaggagttacacgtttcttaattactcctgttctaaaatatagttttttctaaccctctttttttatgtccacattcaaataaatgag

SEQ ID NO: 41659 - DNA, 371 bp, Zea Mays
gacatgacagacacattaaaatttatctattacttaatcttgcattaaatacatacaacattggaaaattcataacttaaaatctataaatccaaatttaatgattccagttcctatgatcttattttaatgtctagattattagtgtgtattttgtttacatgtttggtgtgatgttaatttttgctataccatgtatgtattgtgttgatgcgagtagacgagcaagtcactgaggatcctgaggttcagctggttgagactagtgagcaggagctcgtggaaggcaagttgtgcccttgatcacttccttttacccattcatgttcttattattcataatgacctgcataggttaattttgctgggac

SEQ ID NO: 41660 - DNA, 1730 bp, Zea Mays
cgttatatacccctacggagcctcttctcatcagcctgctccttatcgccggctgccgtgccgccgcgtcctgctccccgctcccgtgttcgtcgtccgaagcaccgccgagcgccgcggcctcgcgccagcgccaccgcccagaaaccatctttccctcccgcgccgctgagcccatagcccatatcggggcctcgttcgacttcgaccgaagcgcgctgtgtcaaatttctgcgaccttgccgccgccttcatcattctggagctcggattgatttcttcctttgctggcaatttcgagctggcaatgatagttcttaccttgaccaaggagccaagtcttggagtcaatattatgctgccatgcacattgcaataaatgctgtcattaccgaactaaagcagtttctgagagcaagcgtcacaatcgccatggaagctgggagaatggatcagccttgcatggcttctatcaatagccagcctttcgtggctgatactgagccagtgaagaaagccagtggggacatgcctgcggcgccgacaggaagcgggtgcttcgactgcaacatctgccttgattttgcagcagaaccagtggttaccctctgtggtcatctctactgctggccttgcatctacgagtggctgcgccctggggtggagtcaaccgccagcgacaacggcagttcggcaaggcggcaatgccctgtatgcaaggcaacactctcaccggacacccttgtgccgctatacggccgcggagggagctcaaagaagtcactggatggcatggccatcccgcgccgccccatggtacaccgggaggctgtcgagcaacagaatgcacggagccatgtcaatgaccagcactaccaccagagcacgggagacagccctcagcaccagccattgatgcaggcgcaccaccatcccgtcccccctgggttcgacttcatataccctccagcgccggtagggcgtggtttgatccactcgactgccggaggggtgctcggagggatggcagaggttgtgctcccgtgggtgctccgtggccagctgccagccagcttgcactacacgagcccataccatgttgcggcacagaacgtgaaccccaggctgaggcggcaacagatggaaatagagaggtccctgcaccagatctggttcttcctctttgtgtttgtgctgctgtgcctgctcttgttctgagacagaggactgttctatatgcctctctgtagatattgaagagggggagagagggatactaatggatgatgcgtatagtagacagggtaatggtctgtatcgacaagcatgctgatatagagttgtaatatgatgagacatgggaggtgaaatgtatatttcattcttctcgtcataacgtcagcggtttcctgatctatcgctgttggcctgttaggtaggttgcctacctgacatgtcttcatgtcagggccttcgatttgctcatttgcatatgtaaatcgaaaatgatgttttggctaccaatgtctgcgtcctcttcaatccctgttccgaaattgatacggcaattttgtagccaggacctcaggtgcacaacagcacaagtgcattttccttctatatgtgattacatgcatctgacgctgatccgggccattatatgtatgtggtatattgatcggagccaatatagattggcgtgaaagctaacagggaagagaaaaaaaaac

SEQ ID NO: 41661 - DNA, 1267 bp, Zea Mays
  misc_feature (1)..(1): n is a, c, g, or t
naaaccagcccctcagggaggaggaggaggcccaccagagagctgccttcctcgcgcagggcctcgcgatggcgcggaaggagggagtccacgccgacatcgtcgtcaaacccggcactgggcccccaatataggcccacaaagccattctggtaagttactgggcttttccttctacgcatacaacgtgggccttctcaaacgaagccgaggcaggccatcagctaattaatctcacgtctgatctgacgcatgcacgcaggccgcgaggtcggaggtgttcggccacgtgctggctggccgccgacgagcgctgcaagaagcagggatgtaatcggatcgaatacagacggatatcacagaaaccatatttgttttcatatttttattcggattcgaattcgaatatagatactttcggatacgaatacaaatacagatgttctcggatgcaaatacggatagccacgtgtcgaatacggaactagtcggacacggatagcgtcagtaacgaattttttgtcggataccgtgtaagacaccattccaaacatatcacgacttcacgagtgtcataatcatttagcactccttgagtccaaacattttttgagaatgatttaccaagactaataaacattttataagaagataacctcaggttcccacatgaaaatgataaagtgaaatattagttatgttgaaacttggatacttagagtgatttactaggggtgtaatcggatcgaatacggacggatatcacagaaaccatatttgttttcatatttttattcagattcgaattcgaatacggataccttcggatacgaatacaaatacggatgttctcggatgcaaatacggatagccacgtgtcgaatacgtaactagtcggacacggatagcgtcagtaacgaattttttatcggataccgtgtaagacaccattccaaacatatcacgacttcacgagtgtcataatcatttagccactccttgagttcaaacattttttgagaatgatttaccaagactaataaacattttataagaagataacctcaggttcccacatgaaaatgataaagtgaaatattggttatgttgaaacttggatacttagagtgattttatatgtaacttacgctattgcacatgaaacttagataacgccggttataaatattttctttggacatgaaaaaaatgcatcattcatatgtatcatacttattgtaataattctgaactagcactcgagtag

SEQ ID NO: 41662 - DNA, 826 bp, Zea Mays
atcatgaaacgcttgcaagaaagaaaacatatatgtggcatgacttggatggtgtgaatgatgccccaactttgaagaaggctaatattgagttgtgttgacgggtcgagcaattttccaaaagatgaaggattacacaatctatgttgtatcaattaccatccgtattgtgcttggttttatgcttcttgcactgatatggaagtttgacttcccaccatttatggtacagatcattgccatcctcaatgatggttctattttgtcaccgaagaaactgttctatgtccaaagccttgagaagactgtccaggatgattttcagaagctttcttccctgtaccttcaagtcagcacaatcagtcaggcccttaactctatgacgcggtctcgaaacctcgcaggctcgtagctggtcatttgtgtaccgtcctaggttcttgctgacctttgccttcttggtggcgcagctgctgagtgatctgagtctagtcccataccttactgtcgtatgtggtctttcctcatctcctcacattttgtggtgtttgcattaaccttaatctgtttttgtgatcttggggatttcgggttttagattggcgattggtcagtggtgtgctgtgtgcatggtgcatttgagctctctatgcatcagattgagcttttatatacaagtcatgatttgtgttttaggcttaaccctatgggataaagctaacgaagaatcactgctaaaatatgtttccattattgattgtagcatgattgtgtttaagaaatatgttcaaacttttgtgtcttcattatcaaatattttctcata

SEQ ID NO: 41663 - DNA, 5300 bp, Zea Mays
tgcgaattggagccctcctccccccgcatctagggtttcgcccatggaccccgccgccggcgggggccggggccgggaccgggcgggcttcgagcgggcgtgccggctgcccaacaccgtccactccgaggtcctgccgtcgctgccgctccccaccctcccgcgcgagctcggcttcgacgcgctccgcgacgacgagcccctcgccgcgcccgaccgccccgacacgatcatgcaggccgccaacatcgcccgcgtcctcgccgacaccgacgtctcccacctgggcttcaccgctgcggacaacgtcgacgtggaccccatccgctgctcctggctctggagggaggtgctcaagcacaaccccgacgctttcaaggtcaaggcgccaagtccgtcttcgcaaggtccatttggaggcccaggatatcaaaatcaagaacatgagaagcactttgagcattttacacctaatacgagcaaagcacgaaatgaatctgcatttcctcaggatgaaattgactcacatagagagcatttttataatgaactgacctcagattcaattgcttcaaagaagccaaaaataaggaagagagaaaataacaattctgtttcaagttctgctcccagcattcctaatactcaagatgttatcactaccttctgtgaggtggtggaggatttctgtggaaaaaccgaaattcctgatgatggagatggcggtgactggttgtcaatcccacttggtgatgttaaggttctcgtgaatgaaattacatctgttcgatccaaaaggatattgcatgaggttcctatggatacagttacaaggttattggatgtgattgaccgtcagattcgatattctcaaggtttgtcgatagatgtgaaagaaaattctgatgtcgttgatgctgaacctctggttttctctgctttggaggccagtcatgctgcgttggcaattatgacccaccatgatatgccaaagcaactgtaccgagaagaacttattgagcggattattgatttctcaaggcatcagatcacagattgtatggcagcaagtaacccaaccttccgagctctctacaaaccagctgaaaatgttgcaaatgatggagatgatgatgaagatgatttggaaaatggacaagttagcaagaggagacgtactgctactaatttgagcatgagaaaatcttcaaacaacagaacctaccatctagcagatgaagaccaaaagcaaatccagatgataacagcactgttagttcacctggttcagtttagtgcaattgttcccaatagcttaaaaggaacagttgattggaccactattgttgatgcctccggagatgctgattattatccaattaaatgccatgaagcggcaacagaggcttgttgccgtttttggactgatgtccttcaacgttttactgctgctaaatctcaagatatgtcggaaaccaaaggaataatagataatcttgttcaggatttcctaatgatactaaacttgccggagtatccagctgctgcttctatccttgaggttctctgtgtgttgctccttcagaatgctggattgaaatctaaggacactaatgttcggtgctttgctattgatcttcttggtggtattgcatcaagattgaagcatgattcggtcatctgtagtgaagagaagctttggatattgcaagatctcactgatgcaggtagcgatggctcaaaaatcttgaaaaacaagtgctgtgtttgtcttggtggaagagattgtatgggggctgctagccaggataacttagagcgtgatagtgtttgccccttgtgtttttgcaaacaacagctcaatgtgctacagacgtactgtcagtcacaaattaaagaaaatggcaaaaaaactgctgcgtctactagtaagaaatctgctaaaccagctgaggtgccagcagtggatattattcaacaaatactactgagttatctccaagaatctggtccacaagatgatgggaacctgtttactcgatggttctatctgtgcatctggaacaaagaaaaccaacattctcaggaggagatcatctactatctcgctagattaaaatcaaaagagattctgcgagattctggcaatggtctggcaatttccagagattcagcaaagaaaatttgcttggcacttggtcagaagaactcattttgcaggggttttgataaaattcttgctcttcttttggctagcttgagagaaaattctcctgtaataagagcaaaagccttgcgtgcggtcagcagtatagttgaagctgaccctgaggtcttgggtgacaaacgtgtccaatctgctgtcgaagggaggttttgtgattcggctatttctgttcgtgaagctgcccttgaacttgttgggaggcatattgcttcacatcctgatgtgggcctgaagtatatagaaaaagttgctgagcgaataaaggacactggagtcagcgttcgcaagcgtgcaatcaaaattataagggatctatgtgcttctaatccaaacacagacacaacacatgcctttgtggagataatttctcgtgttaatgatgaggaatccagtgtacaggatcttgtatgtaaaacattttatgaactatggtttgaagaaccaactgggagccataagcacttggttgctgatggaagttcagttccaatggagatagctaaaaagactgagcaaattgttgacatgttgaggaagatgaccaatcaccaacctctgattaccatcataaaacgtaacttgactcttgatttcctccctcagtcaaccaaggctgcagggattaactcatacatggtggcatcaattcagaagcgttgcgaattaatatgcaaacgcttattagaaagaatattgcaggttgaggagggagctgctaaggagatggaaatccacatgcttccttatattgttgctttgcaagcattttgtattgttgatcccacgctctgcattccagtaactgatccttctaagtttgttgtgacactacaaccataccttaatattcaggttgacagtaaatcagctgcccagttgcttgaaagtattatttttgtgattgatgctgttcttccactcataaggaagccaacacaaaatgttgttgaagaacttgagaaagatctgaaacatatgatagttcgccattcgtatttgacagttgtacatgcctgtatcaagtgcctttgtgctctgagcgagtcagcaggtagaggtccaggattagtggaaaaccttgtcaatattttctacaagcatctgtctggagctaattcagatagtcagactttgggatacatacttattgcgaagcctgaatttatgctacaaaaggatatgttgaaactcatagagacagcactatcttctgaggttgattatagattaaagattcaaggacttcaaaacctctatgagtatctcagagatgctgaaagccaacttactgccgagagcactgtgaaacctcctgtccggtgtgaaataaatggcagaagtaaagtgcctgttgctgctggtgctggagacaccaacatatgtggtggtattattcaattgtattggagttctattcttgaaaggtgcttggatacaaatgatcaagttcgccagagtgcacttaagattgttgaagttgtactccgccagggtttagttcaccctattacctgtgttcctcaccttatagcacttgaaatggacccactggaggggaactcaaagttggctcatcatctgctgatgaatatgaatgaaaagtaccctttattttttgaaagccgtttgggtgatggactacaaatgtcatttaaattctttgaatccatagtcagcaaccataagatggcagcaaacataaaatcaaatccaattgcatttgtcaaacctggcatatctagaatataccgtcttatccgttcaaatcgaaattccagaaacaaatttgtccactcgatagttcggaaattcgagtctgatagccggagtcgcagcacagttagctttcttgtatactgtgccgaagttcttgcctccctgcctttcacatgctccgatgaaccactttacttgatctatgatataaatcgaattattcaccttaaagctggaggagttgagagcaatttgaaaaggtggacttctatgtctcagtctcaaaatacagtggatatgccaacgttgccaggagagaggcatgttgtcatgcaagagcctggcggatattatgataacgtgggctatgcccatgaaagggtgaatgccaatccttgcagtacttcagacgtggacatggccaaagtgcaggttgacgtggatatggccaaagtgcagggagattgccttgatgcaatagcccttcagctactgctgaaattgaagagacatttgaaagttgtctatagtttagatgatgcccgctgtcagtcattttctctaaaggagcctccgaaatctggagaaacattctccaggcagaatattccttttaatgttagcagcactaacatcagtctgccgagctgcctgcaggacgtagcttctgtttaccaggatttcaagacagtgctccacgaagattccatggactttgctgtgttcatcccttcagtccagattaggaagcgcccaaccccgagaaatacgacaaacccaaccccaagaagtacgacgagggtcaggagaacggctgcctcgagtgttacaaaagcccgtggtggcgcacgtggcgatgactccgacgactccgatgatgacgactggaccgggggcccaagagtgcttgacttcagtgggggtggccgtgtgacaaggcagagggtccaagtatgatgactggtcttggtgcttttgtacattctagggaaacctatagcgggtagcagctgacacgaggagagttagggttgagttttaggtttaaagtcgtttagggtacatagaagcagaaaaggaaaggaagatagcctttttacttagatgccattgatttggagcactccttttcttgctctgcccctgtcctgtttgtaattccggtcgggctttggcaaaactgacaaacagggttgtgctccggcttctgatctgattcaatgggaatgaaattattccttttgctttgcctgtataataacagttaagcctatgtttcgtgtaattgtctgccttgctaatgttatatatctgtacgtgtgctgagccttttttgttgaagttcatagaaattgcc

SEQ ID NO: 41664 - DNA, 299 bp, Zea Mays
ggctaatataaagtgcaatatctgaagcttaatatttggtatgtgggtcatgtagccactttaattttaaattttattcttgtagggatggaccatcacactggcttatcattgggtcttcgttgtcgtacatacgatgcattgtatcatctatatttgtaccactatataatccatcagtttaaactttgcagaacccacccaactaattcacctctagacccgtaacctccactaaatccaccaaaaaattacaccgagacttaacacacaatcaaaaccaacgatttagatcacta

SEQ ID NO: 41665 - DNA, 635 bp, Zea Mays
tgcaaacataaccggccgttgtttctcttcttatctgtgtggattgggatacttctgtccgtttatctcttcttccactgcctccccaccacttcgtcctcgccggctcgcaactccttgatggcggccacggcgagtctcactaccactgctccctcccctccagctctcctcaaagcatcagctcctttgcttatctcctttcgccccgtctcccgccactgcaagaacctgtgcatcaagaccaaggccacagaaaatgatcagtctgctaaaaagcatcagaaggtgaagagcattctttgccaggactgcgaaggaaatggggcaatcgtatgcaccaaatgtgaaggaaatgggaggcaagcgtgaaatcctatgtgggaactgtaatggtgctggcttcttgggtggatttctaagcactttcgatgaaactgcgcaatagtcatcggtttagcactttcgatgaaactgcgcaatagtcatcggtttaatttatgtttaagttacattgagggacccataatatatgtatcgtgttccatggacacataatcatattatataaaataatatttttaatgaatactccttcgtccacttgatttggacgttctgggtttttatagaca

SEQ ID NO: 41666 - DNA, 314 bp, Zea Mays
cagcaacctccactcctcccccacaaaacagcagccccggatcccctccaaatcgcgtgtttcgttcgaactgcgcagtcccgacccacgccgtcgtgttggtgtttgggacagctccatgccacgccatcgctctgcgcagttcgaccgtctacgagcctcacttcgccggatctgcgcagccccaacatcgacgtcgttcaccctcggtgagacgacgacgatccttattgattccacatcggcattgttctccggtgattaattgtgtatatgtgctgtttttgttttgttttgtggaggagaggaacccc

SEQ ID NO: 41667 - DNA, 3134 bp, Zea Mays
cgcaacgcaagtagtgctggagattggagagtggagacagaaggcaagggggccgtcgcagaattcgcgccaccgcccgcgatggcttcgtcctcgaaggcctccgattcctcccaacgatccaagcggtcggatcaggggatgggcaaggacgccgctgccgcctctgttgtcccgatccacgcgaacctgacgcagctgatacggcaagtccaatcggggcgcctcgcgtacatcaaggagaaattggaggtgaacaggaaaacgctgcagaggcactcctgctcgctgttcgacgtggcagcggcggcggaggtggcgtcgaggggcaccgatggcggcaacgcgctgtcacagcgcgcggcggagagacagtgtgggtcagacctggcaaacgggataggggagagggacgtggtttccgttcaggaggagaacctggctaccggtacgctcgcgctctccagctcgggcgctaccgcgcagcggacaattgtgcggttcgtgaagctgccgctggttgagaagatccctccgtacaccacttggatcttcctggacaaaaaccaaagaatggctgacgatcagtcagttgttggtaggagaaggatatactatgatacagttggaaacgaggctctgatctgcagtgacagtgatgaagaaattccagaaccagaggaagagaaacactttttcacaaagggagaagatcatttgatatggagagctactcaagaccatgggttaaaccaagaggttgttaatgtcctttgccagtttattggtgcaaccccatcagaaattgaggaaagatctgaagtcctatttgagaaaaatgagaagcactcaggatcttcagataagatagagagccgactttctcttgacaaaactatggatgccgttctggattcttttgataatctcttctgccgcagatgcttggtttttgattgccgccttcatggttgttcacagaatttggtatttccatgtgagaagcaaccctacagctttgaccctgatgaaaacaagaagccatgtggtcatttgtgctaccttcgagagcaagacatggctgccagaacaagaatctatcgtcggaggggccgcaatcgaaagctgaaatatacttggaaatctgcagggcatccaactgttagaaaaagaactgatgacgggaagcaatgttacacacaatatagcccatgtgcgtgccagcaaatgtgtggtaaagattgcccctgtgcggacaagggaacttgctgtgagaagtactgtgggtgttcgaagagctgcaaaaacaagtttagaggctgtcattgtgcaaaaagccaatgcagaagcagacagtgcccctgttttgcagccagtcgtgaatgtgatccagatgtttgtaggaattgctgggtgagctgtggagatggttcactaggtgagccacttgcaagaggtgatggttatcagtgtggaaatatgaagctccttttgaaacaacagcaaaggattttgttaggaagatctgatgttgcaggttggggtgcattcattaagaatcctgtaaataaaaatgattatcttggagaatatactggtgaattgatctctcacaaggaagcagacaaacgcggcaaaatttatgaccgggcaaactcatcttttctgttcgatttaaatgaccagtatgtgttggatgcttatcgcaagggggacaaattgaagttcgcaaatcactcatctaaccccaactgctatgcaaaggtgatgctggtggctggcgaccatcgggttggtatatatgcgaaggagcatattgaggctagcgaggaactcttttatgattatcgttatggacctgaccaggctccagcttgggctaggagacccgaaggatcaaagaaggacgaggcatccgtctctcaccgtcgagcacacaaagtggctcgatagctgaagagtcgctccggatgatacaatatgcagtaaacttaatacttaatacatgattcagtcctagttcattggtagataaacatgctatatactatccattagtaaataaactctcattcatcgagttggagaataaatgcgtataaacatatgtggacctcaggtcgggaaggtggcaaccttgttagtttgagcaccaacaggttctcaaacttgagtggctattgctagagtatcaaataatggctgcgactatagccttgtttgtatattttcttggtgagatgaaataatttgtcaaacactcaaatgtacactttattcctgaaagtatttgatgattcattagtagtgttactagagagcctgatagtagggtatttgcatgtcacattattggctgcagacttccgagacaaacgtgattggctgattgtgcacttgcgccctcttttcaaactaaattaacatttacaaggcaagactaataaatatcccgacccaacaaaaaaaaagagcgggcaaataattcagtcgctaacttgttacatccttttcttgcggcgacagtagatggtagaataacagttcattccatgtatctgggactccaggaaggcaccagtggctgcagtcctgctggacgctcgacgcggttaaacctaccgtcttccggccatatacagatgggtgaccatctatcctgaccccagacagattagtaacgttcagaactgtcacaggagtcttcatttgcttcgtgacctgttccaagatcaagtttctctcaggcaccggcctagcacgggtgtcattgaggggcagcatgctctccctgcagtgtccccctgaattccactccccaccactgaaattgacaacaactagttacatagacctgcttgcgcagagatagcaacagctgcagcagcagctctaatgacactcgtgttagattgattaatcaaagaccaaacctgaaatgtgacggggatgagcttcggaagaacactcgagttagctgtggattgatgtgactgtcgacccaggatgcccaggtggttagtgctctttggaaagcggtagaggcatcgagatggggatggacatgatctccctcttgataatagttcactctgcagagtatatgtaataaccagatctttactaacatgatt

SEQ ID NO: 41668 - DNA, 1523 bp, Zea Mays
agcctacatttcggcggccgccgaaggcccgaaaccgtcgggcgtctcagggaggcgctgacgggggactcggagttgaggcgccggagtggcggcatccccctccagtcccagtccactactttctctgttcctttccgagacaggcacgcacgacacgcgctcgcacgcagagcaactgcttcgatctctccgtgtccgtcctctactctctagctaaccgcggtcggcccggggaggtggcgatgggcagcgaggacatgctcgtcgagatccacccccgcgagctccgctttctcgttgaggtgaagaagcagagttcatgttgtatccatcttgttaataagtcagatcaatatatcgcattcaaggttaaaacaacttctccaaaaaaatattgtgttcgaccaaatataggagttattcttccattggcatcacgtgattttacagttactatgcaagcgctaaagaatgttccacctgatttgcaaacaaaagacaagtttcttgtgcagaccacagttgttccatttggtacagctgacgaggacatcgttcctgcttttttctccaaagaaactgatcaatatattgaggagaagaagttgaaagttgtcactgtcagagtatcagagcctcaagtagagaagctcatcaatggagttccccatgccaaggaaacagctggagttactgtggcagagcagacactagatagtgtgaatgaagcacctaatgtggtgaatgaaaagcaagtgtagacctgaaagaatctccaccgctggaatatactcctgctccaagtgaagttccatcattaagtgataaagaatctaccaatgctgataatgtttatatacctcaggtaaccaaagattttcaaaatttacagatgaaacttaacaatcttgaagtaaaacttgatgaggctaaaactttgattgtaaaattgagggaagcaaacagaactaccatcctagagcgggataaattgcagaaagagatggtattcttgaaaagggcggaagctgctgcaaggagtcagtccatcggttttcccctgcttttcgtcatctacgtggcagttgttggcattttgctcggttaccttctacacctatgaggacggtgaattttagaagaagcacctgcgccattgctgatctctcttggagtcgctgagttcctgaacctgggttactttgtcagagtgaacctactgtcacgtcatgattgtcacattagtcagatgaacttgcatacatcttaggaccgggggtgataattactggagtatatagaaatagagcagcttaattttttacttggtataagaatagagtagtggttgatatatgctttgatcgagaaggccctgtaaccaggagatcatatccttgatacttctcctttcatgacaaggaacctccccttgtccttgtcacaatacgaacagaaactataaagagtttgttgaccttgtcaattaggttagagatcggttgttgattagcataaaa

SEQ ID NO: 41669 - DNA, 554 bp, Zea Mays
taacgtggtgaaggggtatctccctggccgcggtgccctcttccttctccgatggaccgtggtggcggcgctctgccccttacgacggatgccatggccggtgcacgcatcccgacatttcggccaccgaaccctacgtggaccagcgctacacgatgcaggacatgatacgaatctaattgtagtgttttactggtgagttatgacccgcaggttcccatccacggcgtggagcgtcatgagaacgaagcgatcacacgaggccccatcgccctgggtaagcgttccatgggtgcagacctctctccatgcccatccacagctcttcggttggtgcagggacgggaacgatgatggcggctcagcgtccctctccacatgacgatgttggcgtcgagctcctcccgttgccgctcgacgatgcttccttagttcgatgggcgaggcggcgcatgggatttatacaggggcacacgccaaaccctaataacccgagtggatcctaactaaggtcttgttcatttatgtcggattgcacccagaatcgtttcaga

SEQ ID NO: 41670 - DNA, 3220 bp, Zea Mays
gaatcttttagaggcacaacccaagtgcaactttgcttatgttatgcttgtttttggccagaattttcaggttttatgtatcctcacattagctgggttcgtctcatataaaaagaacttggttcttgaagatgcattcaatcaaaatatgctcggttcattccttctggcaaatatccttactggtctggttaatctctcagttaacacgctctctgcttcttccctcaccgccttcatgattctgtcagtatacacctttgctttatgcatggttactggccttatccatttttgtggtgttagaatgaaattctggtgaattgtaagctaccatttgatatgatgtatgcattcattaacttgtcagcgaactagtagctagcttgcttgaaatataatgatttttaggggggggggggggggaaataaggcagattggtatcctactacgtgatgcagatgacctgacgtatcccactgacgacctagctggaggtgcgtgggcattcggccctctttccgcgtggcgtttcttcgtgcctgaggcgacgacggtttggcaccggctctctgccgtcgagagagaatggcaccagccaccagctcgtgtcaccactgccggcataggtggtctgttcctcttcagctcgctgcttatttaagaaaccgtgacagagaatgcctttgaccttaaatctgttgaaccaatgtaccgggggaggaggtaaccagtgcatcagtactccggcccctcagctccacttcagatcagatctcctgaattgcacgtttgagatcgagatctatcaggccatgctaagagagtaagaggtgatcaaatgacagtactgaaaagtgtagcaacaaccacgcttgcttgtgtgtgatggtggagtgagagacaaggagagctggatccaccaccctgtcctctggagacttgatgagtcggacgcatcaaattgcgttgcgtgatcggacgggtccaaatggtattaactcgcagcccatggattgcgagccttcatggaatggtttccggatcacgatggatcaatcgttcatcgctgacgaactagtacgtggtatttgtattgcaccgaccttgtgtggcccatagtactacttcctttaacttgttttcggtactctcgtttctgaaattgatgttgctaggttattctaatcggtcaaattttcataagttcaactagatttataatatttcatgttttataatatttggttgcaaatgctatatcttgaggaaaggtagtcgactctctaaatttaagaagaaatgtgatgcggttttctactcgggtattcttcaaatagcaaggcttgtagggttttaaacaaaactcgtggcattattgaggaatcatttgatgttgagtttgatgaaacaaataggttttaagatgaaaatcaaaatcttaatgatgtaagtggagttcacttgaggaatgccattaagattgaccattggtgaaattcagccaaaagaagatgacgatgatgcatggttgtcattccatcatcttcaactctaaatgaggaaattcatcaaagttaacaaaataatgaagttgagaatgctcatgataatggtaacaagtcattcggttcctcaagcttcatcaagtgattctcatattgtatcaaggatccatcattatattgcaaaagataacatggtcgatcaaattatgggtgacataagtaagggtgtttaaactcgctcccgcattgctttattttatgaatatttctcttttgtatcttgtattaaacataaccgtatagatgaagcactacttgatgttgattgggtgaatgcaatgcatgaggaattaaataactacatccgtaatgaagtttgagagcttgttgaaagacccaagaatcacaatgttactggtactaaatgggtatttcacaacaagcataatgaagatagattggtagtgaggaacacgacacgattagtggcacaagattatatttaaatagaaggattgtattttggtgagataattttcatgttgcaagattagaggcaatatgggttcttcttgcttatgcttgtgcttacaacattaaactctaccaaatggatgtaaatgacgttttttctaaatgctaagattagtgaactagtgtatgtggagcaacctctcggttttgaggaccccaagaagcatagccacatgtacaagctttctaaagctttctatgggcttaagcaagctccatgcacttggtatgaaaggcttagagaattcttgttttccaaatagtttaaaattgggaaggttggcactatatgttcactaaaagaattggtaaagatttatttgtttgtcaaatctacgttgatgatatcatttttggatttactaatgagttgttttacgaggaatttggaaaatgatgtcaaaagagtttgaaatgtcaatgatatgggaattgaatttcttttgtggccttcaaaacaaacaatggaaatatgggatttttgtgagccaatctaagtatttaaaggacatgctaaagaaatttgggctagaagatgcaaatccaatcgagactcacatggctacaaatggtcatctagacttagatgagggatgtgcaattgttgattaaaagtgttttcgttctattattgatagtttactttacattactgcatctaggcctgatgtaatgtttagtgtttgcatgtgtgctcggtttcaagcttcacctagagaagtttatttgaaagtcgcaaagaggattctaaggtatttgaagcatactcccaatgttggcttattgtatcataaaggtgctcaatttgaattaattggatattcggattccgattatgcgggacacaaagttgatagaatgaacacttctggttgttgtcaatttcttggaagatctctagtctcatggtcttctaagaagtaaaatttggtcgatgtatctaccgccgaggtggaatacatatcagtctgtaattgttgtgctcaagtattgtggatgaagcaaactctattggattatgagatctttttcaaaaaatgtgtctttcatgtgtgataatgagagtgcagtgaaattgggtacaaattcggttcaacactcaagaacgaagcatattgatataaaacattattttttgagggatcatggtgtcaaaggggatatctcaatatgtttt

SEQ ID NO: 41671 - DNA, 2174 bp, Zea Mays
agagaaaatcggagacaaaaaacaaacccagacgctgaggtgatcgccctgtcgcccaagacgctgatggcgaccaacaggttcgtgtgcgaggtgtgcagcaaggggttccagcgagagcagaacctgcagctgcaccggcgcgggcacaacctgccgtggaagctgaagcagaaggacccgctgcaggcgcagcggcggcgcgtgtacctgtgcccggagccgacgtgcgcgcaccacgacccggcgcgcgccctgggcgacctgacggggatcaagaagcacttcagccgcaagcacggcgagaagaagtggaagtgcgacaagtgctccaagcgctacgccgtgcagtcggactggaaggcgcactccaagatctgcggcacccgcgagtaccgctgcgactgcggcacgctcttctcccggagggacagcttcatcacgcaccgggcgttctgcgacgcgctcgcgcaggagagcgcgcggctgccgccgaccagcagcctcagcaacctcaccagccacctctacggcgccgccaccaacgcgggcaacatggcgctcagtctctcgcaggtgggctcccacctcacctccactctccaggacggccaccaccaccgcccgtccccggagctcctgcgactcggcgctacggccggcggcggcggtggcagcagcatcgccgcgcgcctcgaccacctcctgtcgcccaacggtgcctccgccttccgcccagcgcagcctccgtccttcttccacaacgcgggggcatcggtcggccaggactttggggatgacgcgggcaatgggccgcactcgttccttcagctgcaggccaacaagcctttccatggactactcatgcagctgcccgacctccaaggcaacggtgctgggggccccggcgcctcaggcggacccagctctctcttcagcctgggtttctttgctaacaatggcaacagcagctcggggtccagtcacgagcatgcaagtcaggggctcatgaacagtgaccagttcagcggcggcggttcggaggcacaggcggcggcagggatttttggcgggaacttcgttagtgctggtggagatcaagttccaccgccggggctctacagagaccaagcctccatgctgccgcagatgtcggcgaccgctctgctccagaaggcggcgcagatgggcgcgaccacgagcgccaacggcgccagcgcggcgtccatgttccgaggcttcgcgggctcttccccacaacacgtgcggccagcgacgccgcacatggaacagagcgacgcgaacctgaacgacctgatgaactcgctcgctggaggcggtggcctcggtgccggcggaggaatgttcggcggcggcagcaacggcgccggccacgcgggcatgtttgatccgaggcagctgtgcgacatggcggagcgcgaggggaagttcggcttcggccagggtggtggcggagacatcacgcgggacttccttggcgtcggcggaggcggcctcgtgcgcgggatatcgacgccgagaggagaccaccagagcagcagcgatatgagctccatggaggctgagttgaagtcggcctcgtccttcaatggaggcaggatgccatgacagagaccgacccatcgatcaagattatacagacataagctcgcgcacagtaatccagagacttgatcaaccagatgcaatgggagagcagtaaggtcgtcgtcatgaagttagaaactgagtcgcatgagtgagttcatgcatgggataaagctagctagctagctttcatcatccgaagggaccttgggtgagaaagatgcgtcttctctgactaatggagcagtaagctggagtgcgagttggacgcatgtgatcacccatttgctcgtgcatggcgggggttggtgttcattctgctggtctcgttcttgttggttttcccttcctttgtagttggataatctttgttggatcaagtatagtttttctagtgatagtatctataaggatgttatttgtagctagcttataaaggggcgtgatttgcagcttaatttgctccattcccctcctcctattttttatttccttttctcttgtatcaaaacaatacccccccttacaatgtcattaatcatgctagctgaaattcatcatgttct

SEQ ID NO: 41672 - DNA, 979 bp, Zea Mays
aaatcctttttacgcagcgacaacgagccaggcacctccacctcatccgctgacagacaagagcgcaatcacccgcgggccttgggcttgggccttggaatagggtaccaccaaccaatcaatcgaagaagaggcccgccggccgccgcggtttgctcgctatcgctcccttgctggctgcggtgcgggtgcgccgccgtcgacgagggagtccctggctccctccctccgggttcgaattcgggttgcttccttagggttcagtggcagtacatagcatggccctaaagctcggctggaggagaggaggaggaggctggcttgcgcttccattggggaatcggaccaccgcgtcttcctccgcatgcagcagctccaacttgttcgtcggcggtctttcctacgacactaacgagacagctctcaaggatgttttctctcaatgtgcgaaggttatatgccatcccacaagcggcaagtcgaaaggatttggttttgtcaagttttcttcgcaaaaccaagctgacgcagcattgcaaaagatgaacggtcaggtgcttgatggaaggaaaattcgggtgcactatgcaaacgggactggatgacttgtgatttagaaacagatagaaaatgagatgagcaggtgatgattgatgagcatccagcggctggatcttaaaaatccgcattcgccattgaagttttgttgagatctcgaagctgtaaaaactcggacgaactcaagcgagacaaagatttctcttggtgacacggactgttataagatgttttctgtgaggaaaaagttagtctatcatatttttacttgccactatttttatttggtttgtaaaataaaatgagttgatccactcatagttagttaatactaaggttatcttcagtaacatcctctaaattttattccctaaaagaatattttttgtcctttacaaatcactctaaaagattccgtcct

SEQ ID NO: 41673 - DNA, 2720 bp, Zea Mays
atggagtcgaggtacggggtcgtggaacatggtatgctacactacttggaagagtttttttcacttcagatagaacatcaagtacgtaaaaagtgctcacctctactggagagtgctctgctgcctggtggaagtgattcgactctgcatgaatggaaggctgttccagatatttggaggacagcagcagaaaaatatgctgacctcgtagctgtggtagatccttaccatgaaccgccaacggaatggacgtatacacagcttgagcaagaaatattggatttttctcaaggtctaagggccattggtgttgctccggatgaaaagctagcactttttgctgataactcatgtcgttggctagttgcagatcaaggaatcatggcaaccggtgctataaatgttgttaggggaacaagatcatctgatgaagaattgtttcaaatatacactcattcagaaagcattgcacttgttgtggacagtcctcaattctttaaccggcttgcagagtctttcatgtcaaggattaatacaagattcattgttcttctttggggtgacaaatcatgcatagatagccaagctattaaggatataccactttatggatacaaggatatcatcgaacttggtcgagaaagccgcaatgcactgtttctttccgacgagcaaggtcagcaagatgtctttgaatctattagtcctgaagatgtggccacactaatatatactagtggaacaagtggcacaccaaaaggcgtaatgcttacccaccgaaatctcttgcatcagataaataatctgtgggagattgtaccagcagaacctggtgataggttcctaagcatgcttccaacatggcatgcatatgagcgtgcttgtgagtacttcatcttctcgtatggtatccagcaagtttacactactgttaagtacctgaaggaagatttgcagcgttaccagcctcaatatattatatcagtaccactggtctacgaaactctgtacagttcaattcataggcagatttcatccagttctgctgctcgaaaaattattgctctttcacttatcaagataagtttcctatatatggaggcaaagaagatctatgagggaacagttttatcaaacaatcttgtcaaaccatcagtcatcgcctatatgatgaagtggctgtgggcaagattggttgctgcatttctttggcctttacataatctggcgaagattctagtatacaagaaaattcattcagcaatcgggatttcaaaggctggtattagtggcggtggaagtcttccgatgcatgttgataagttttttgaggccattggcattaaagtacaaaacggctatggccttactgagacttctcctgttgttgctgctagacgaccattctgtaatgttcttgggacagttggtcacccaataaagcatactgaaatcaagatttttgacattgagactggtgaggtccttccagatggttcaaaggggattgtgaaaattaaaggaccacaagtaatgaagggatactataagaacccatcggctacaaatgaagcttttgatcaagagggttggttcagcactggagatgtaggttggatagtacctcatcatgccatggggccaagtcgccagtgtggagggatgattgttcttgaagggcgtgcaaaggatacaatagtcctatctacaggtgaaaatgttgaacctgctgagatcgaggaagcagccagcaggagtaccttgattaatcagatagttgtgatcgggcaggatcaacggcgtcttggtgccataattgttcccaacaatgatgaagttctggcagaagcaaaaaggaagtccatccttggtgaggatggcgagctagcgaaagataaggtcatgaacatgctatatgatgaattgagaacctggacagcgcactgctccttccgtgtcgggccaattctggttgtcgacgaaccattcacgattgacaatggtctgatgacacccaccatgaaaataaggagggacaaagtgacagacaagtacaggagggagatcgaagccttgttcaagtgacacgcggagcgcgtgcgcacccatcagagttcccttttccgagtacaagacggcaaccgtacggcgtacatacagacacctgcaagctgcaatgcgtccatgtaccatgtatacgtacgtacttgcgtacggtcggaagatgactgggttggaactggaagagatgatatggcggagcggccggtgggagaacaccatgagacttgttactagactcgaatgttcgtaggttgcatgagcaaaatgacatgtgttccacaattgcatcattcaataagcgattcactgagccagataaggtcttgttcggttagttctcaatccatatatatggattgagtgagtttaaatcccaaacaagtcaaacttcttcttaatttttttcaatctcatccaatccatatgtaatgacaataaccgaacaaggcatgaatcaataaaattctcccaaaccaccgcaggtaccatgcaattggtaaaaatatcatgcttctatcttatagatatctgaaaccaactttacagttttcttaataccataagaatatttgtctgatagaaacatggaaaaaatacagacagctatgtacaactcttgttacattgaaatcatcgagacgttcgataagaggagg

SEQ ID NO: 41674 - DNA, 1664 bp, Zea Mays
acaagagcaccttgctgtgaacttgtaacaggtttgaacttcgaaggaaaagataattttggtgctgtgattgatttcactgtgaggagtgaaatgaggctaagtattgggcaagtccatcgaaatgttcttgcgctggcatcttctcggtcatgttttgttctgggagatcgtgtttcgttcaggatgctgtcccaaccacgggtagctggatttcatcagactgcttggcgtggtagtcaaattttggaagataacaggggaggaccattgactcttgctagcctagaagtgcaaagcagggttgaatatggaaaaaaggggaaaatggaacgaactggaggtccaaagccaagttcaagagcttcttccctctatgtgaaaccaaaggtttcttcaaatgtcaaaccagcaaagagtgccttgatgaagccagctgggataaagaagacactgaaggtagatgaggctctgttttcggccaagtcatttgaagaacttggtttgccacctttgcttgttgaccagttgaacaaggaaggtctgactgccccaactgaggccctctgaagaggactatggaacaagaccattctgagaaaagatcaggtatagaagcagtcatcgttgctccttcgagagaattaggaatgcagattgtgcgagaagtggagaagattttgggtcctaatgacaaaagactggtccagcaacttgttggcggagctaatcgttccaggcaggaagaagcattgaagaagaacaaaccaatcattgttgtcggaacacctggccgtatttctgaaatttctgcagcagatgaagtcgaccagcttctgtcttttaattaccgtgaagatatgcatagaattttggagcatgttggaaggagacctggaggcacatctagggatattcttggcccacttgcgagacgatctgagcgtcagactatcctggtttctgcaacaataccattttcagttatacgagcagcaaggagttggggtcatgatccagttctcattagagctaaaagtgtagttccacttgattcaatcactgtgccaagacctgcgttatctcaaagtgacgctaaccccagttcgtcatcgcagtcagtgaaccaagctgctgttggcagcttgccgccatctttggaacactactattgtacggccaaggcgcagcacaaggttgacacattacggaggtgcatccatgctctggaagcacagacagtgattgcatttatgaacaacaccaagccactgaaggatgttgtgtttaagttggaggcccgtggtatcaaagccactgagctacatggagaccttggaaagcttgcaaggtcgacagttttgaaaaagttcaaggatggtgaattcagagttctcgttacgaatgagctgtctgccagaggactggacgtgccagaatgtgaccttgtggttaatctggaccttccaactgactccacacattatgctcacagagctggaagaactggacgtcttgggcggaaagggatcgtggtcacaatatgcgaagaaagcgagggatttgttgtaagaaaaatgcgcaagcagttagatgtggccatcaagccatgcgagttcactgaaggcgagcttgttgtccacaaggaggaagatgtggaataa

SEQ ID NO: 41675 - DNA, 2790 bp, Zea Mays
gacacattgtcgcggcgcagacctgggagaggagcaggagcggccagtcagcggagcggataggaggcaggaggagtcgcgccggagatggacacgcccgaccgcgccgccgcgcagtccgcggccacgcgcaccgaggactcgccggtgttcagcttcctcaacaacctgtcgcccatcgagcctctcaggtcgtcggcctacagcaccaacagcctccaggggttccagtccatcaacatcacgtccatctcctccatcttcacctccccgcacgacaacgtgagcaaggaaccgaggctcccaaagagcccgcttggtgaaatttctgacaaggaggttcgtgccgacgccgccggtacgaacgagccacccgagccttcgaacgcggccaggttgtttgcctgcactagcaccgtgactcgagaaacgcgcacgggtacatgtacgggcgtggctggtcctcctcccaccaccggggggccatgtgatctggccctgcctcgtcagttcgacaataacggcagtccagaccacaacacgacgccctgccacggtgtcaggtcagaccttaaacaggacaaggctaggaagctgctacaagctgcacagaacgctaaaaaaaacgcgctggagaagaggaagtgcttgttttccaccgaagtccggctcctggacggcggcggcggcggcggcggagagcctgggagtgacagtgatggagtcttgggatgcgagtggtccgacttagtctccccgacctcagcgaagcttttggccttcgacgccacgatggacgagcatcacagaggagtgcatttggcggctcagaacgcagagtcgtgtgggtatttgctgtcgaaacttgccggagacggtggcgtatcggacggagcatatcctactgcgtctgctcaggtatactatcaggaacttgtgatgggagaagatcagtcagagaacgccgctcctcaaatggacgctcaggaaaccatctcagccgaagaaacccaggataatatctatgaagcggatgtgtgtgttccattagagtacaaggtagtggagagccaacagcagcgtggcatacggagacgctgcctggtcttcgaggcagctggtgggttttcgaatagcgctgtgaaaagggggactattgaagatcgctcggtctcaacatgtagtaagggcaaaagccctgcggaaagccagccgcgtggactgcgaggcatcgggcttcatctgaatgcgcttgcgttaacaccaaaggggaaaatggcctgtcaggatcctcctcctacggcttctgctctccttccatcgtcagcgtctgaaaaggatgcgcgtggcgagctgctttgtgcaggagagaatttcgcacactcgggcggtgagctgttggagtttcccttggatggttgttcggctggaggagggtttcctgtaaatgaccatcatgtctcaggtcagagcgtcagccctcaaaagaagagacggaaaacggataatggcgatgatggtgaggcatgcaagcgatgcagctgtaagaagtcgaagtgcctgaaactttactgcgagtgtttcgctgctggtgtgtactgctcagaaccttgttcgtgccaaggatgtatgaacaagcccatacacgaggaaaccgtcctctccactcggaagcagatagagtttcgtaacccgctagcgtttgctccgaaagtgatccgcatgtctgatgccggtctggaaacagggatcctaacaacactccggcttcggctcgtcacaagagaggatgcaattgtaagaagtcaagctgtctcaagaaatactgtgaatgctaccagggaggtgttggatgctcgagcaactgcagatgtgagagttgcaaaaatgcttttggcagaagagatgccgagactgaactccctgaagaaatgaaacaagaagaaagtgaccagacagaaaatcctcaacaagaaaaggagaacgatcaacaaaaagcaaatgtacagggcgaggatcacccgctcctggaccttgtcccaataacaccgccttttgatttttgcagttctctgctcaaactgccaaatttctcaagcgcaaaaccgccgagaccgaccaaggctcgcagcgtgacctcccgctcgtctgcttcgaaagccactgcagcagtacagccttgtagatcatccaagcttgctgctagtgctagtgctagtggtatcgatgaggagacgccagatatcctgcacgaacctgactctctcagtaactgtgtcaagactactacttcaccgaacggaaaacgggtctcgccgccacataacgcgctcggcagctccccgaaccgaaaaggtggcaggaagttgatactcaagtcaattcccttgttcccgtcactcacgggagacacaaacagcggctctgcaatgaacagcactgatagcgcattctgcgcgtcacctctcactttaggaccatcttaaagctgtgaagttggtggccatgggaccggagtacgacttgtagtccgaacacgtgtgcctcgtatcctacggcaaggctcgaggtactgtagactgtagtaagttaggctttttaaagttgtagtaatctgtatttgtaaaatatgtagactcaataatctgtatgtaagatgctgcgatgggtgaagctgtttatctttatcaaattgtagcaacattacagatcacctcttgagtaggtttcacagttccaccccctgtctttctttttttttttttggaaaggaatccggtccatgttttc

SEQ ID NO: 41676 - DNA, 2283 bp, Zea Mays
ggaacgtgttgggcggccgacctcatgcctcaccccttccccgtcggcccccgactccccgagtcgccattgcctgccctcgttcggctcgatccccgcactacagcgcccgccaccaaccccgcccgcgcctccgctactaaagccgaggcctcacccaccacctgaccaccatgctcctccccctcctcagatcccacccgctcctccaccacgccgcgcgcctgtcctccccacgcacccgcctgctcctccgccgcgacgcaatcccgctcgcacgctccccgcctatccgcatggcggcctcgtccggctccggcgccagctcccctgcctcggcgccgccagctgccgtggtgcacaagtcaaagatcaaattttgccctgcttgtggaagtccaacgaaactggccatacctgatggcgatgagaagatgagggctgtttgttcttcttgtggaagagttcactatgaaaaccccaaaatggtaaatgctgaacaaataaaagaaaaaggaaaggatccatatacatttgtatttgtgctttaaattacgacactgaatgcctgttcgcacagtggccgtggattttttagttctacctacagtattttgtaggaggcaaatcacagctgcagctttaatctgcggtgaacaccccttcaattccatgattatagagcccgcattttttcattcatgtatgaagtgcttttgatgaacagatgtgtccccattttcttttttgtttaatctattggtgaaacaagggactatagctggcaatatttttttgttatatatgtgtaacacatgttggcttctattttctgccatttacaatatatatcatctggataggttgttggttgccttgttgagcatgataataaggttctcctttgcagaagaaagattgaaccagcttatggtctttggacacttcctgctggttatttagaggtgggggagtctactgctgaaggagcctctagagaaacattagaagaagcatgtgcagatgtagagatagtctcgccttttgctcagttggatattccactgattggccaatagagttacattattttccgagcaagattgaagacccccaacttttcacctgggccagagtcgctggaatgtgcactttttgctctggatgatataccattcgattctctagcattttcttcaatcattgtcaccttaaggatgtatactgaagatgtgaggtctggaagcatcaaatttcactattgcacgataaacaaaaggtaaatcatcccaccctttttgtagtaactgatcatcatcgtcattcataactctgatgacttctacaacttaggaagcttacgaatctttctctagttttctatgtgttctgttgatatctcagtgcaacttttctacagcactcacctatacgacaatcttgcggcatcttgaagttaacaaatcctgctcgagtttccaatgtggtctataacttgttttgtgcaacttggtttacaggttaggagccagcccttcagatcttcggagtttcgatattgataaccatatagccgtgtgaggttgaaaggttctaaaccttttgcgattgaggagaatggttttggcatacaacaggcgcgcgcgcacacaccattggaacagatttaaagtaggtgctggaactgtaaatgattcggtatcaaaaaggctggtttagccattttaggagattatgcgtttcgatttcatgggagttgggaggacagaattgtatcatagtgcagtaactcttggttgtaggattgagttatcctgcatgccatggttgtggcgcttcgtcagcgaccgaatgctgtaatgtggttacgattctctgagctccttttcaaccattaattccagttgtaaagcctgtattgcttcatcttttatcttttaaaagtcacgttatcttcagatcgaactgagtgctcaatacatgtgcagccatgctcgttcgtgattatttgcaccctagaaacagcaaaaggtatcaagtttgttcatcaaattcagaaagaaaaagaactttaactatcaatatctctaaaacaattgctggaatgaaaactcgggtattataagattaggtctgaatgtctgattatggatatagatgtaaaccttgttgccaatggtattataaagtttagtcgtggtaaagaaaacactccgtttatccaaaaaaaaaaaagcaattaatgtgtgttcttcgttaaaaaacaatatataattaaaaata

SEQ ID NO: 41677 - DNA, 619 bp, Zea Mays
gtgtaagcgacacgtattggcgggcaggcgggacgggacagcccgaccccgaccgagccacgccgtgtgggcgtcgtctcgtctccgtccgcggcagagatgacgatgagacgagcggtcgatcgaccacgccagccacgaccacacgacgcgaccgcccggacgggacgcctgcggagcgggagggcatgtgcccccccctccctccccgtgtcgctcgacagctcagacggcaccggatggccatggccggatcagggtccagccgcagcagcgcgggcgcggcggcgacgccgtcagcgtcggcgtcagatcaattcgatcggccagccagagcgatcaccctgtctgtgtgcggcccggccatgcgggcctagtatcgtgggcttgcagtgcgcggcttttggtgggcctcactcacgttttgctttgctttccagcccacacaaccccgctgaacttgtgccgctccgctccgcatcaaccggccaacttttctggattttagtccatcagcactaggatatcgttcgccttacagctagctggactctttgaatcaggtacccaaaaaaacatcagactgactgtcccccttgcagtataaaaacaagaatca

SEQ ID NO: 41678 - DNA, 2062 bp, Zea Mays
ggagttgcagattggatgaagagaagtttttggtcgtgccagcaaaggagatggagcctttgtttggatgcccaattatccagaccacagcagcaataattctcctcgcaagtgctggttttatatgcacttcttttcttctggcttttccgtgttttcacaaggagccggctctgtatgttgccgtggcctagaagagaccagggagtacctgccgagacaagtggagtgctccctacgcaaaaagtgtagcaaccggtctactataaacaacaacgcctcgtgtcgtgccgatcgaactgagattgtgtattacacgagtatgaacagacgggggctcttgggtgggtctgggcagggcatctccggactcccacacagctcctcttggtggcgccctctgacatctcctttttcctcgccttcgatcggtggccgccgccctcctcgacttccgtcccgccgccatgaagggacccggcctcttctccgacatcggcaagaaggaaggatctactcacctacgactagaagctgtccatctccaccgccagcgcctctggagtggcgcccagacccggcaatccgttagaatccgttcgtcgcagaggccatgagctcggcgcaggatccgttctacatcgtccgggaggagatccaggagtcgattgataaattgcaaagtaccttccaccgctgggagcaaactgcttcaaacacaggagaatatgttcatctgacaaaggagcttctgatcagctgtgaaagtatcgagtggcaggtagatgagctagaaaagacaatctcagttgcatcaagggatccggcatactatggacttgatgaagttgagctttccagacgaagaaactggactggttcttctcataagcaggtcggtacagtcaagagagctattgaaaagggcaagagcaatgcagcaacttcaaaataccaggatacaagcaggaccaaccactattctgcccaagataatgatgactttctttcttcagaatcagatagacagcttctactcatgaggcagcaggatgaagaacttgatgagctcagtgaaagtgtccaaaggattggtggcgtgggactaaccatacacgaagagctgtctggacaggaaaggatcctaaacgacctaagcttggagatggagactacttccaacagacttgatttcgtgcagaaaagagtggccatggtgataaagaaggccggcatcaagggtcagatcatgctgatcgtgttcctgattgttctgttcatcattcttttcgttttggtgttcttgacatagccaagtgcaccagggtcctcggttttctctctcatttgttgtgcctccctagtacgaacactagtaaattggtcgcgctccgcgtgagttgttgcttgatgtgcttacataagatgtagaatcttgttgctataggcatgtatcaacaggtgctagcagcttgcagttctcctaacagaaacaggtcgaagcagattttttgttctccaagtgatcagtttgtccaaggttgttaggctttccgtaatcgcttcgagtttgcttttcaagatcatcattcacatgttgcttgttagactttggctcaacataaggaggcagcatgcaggattctttatgtttgcaacatttagcttagtgtaaggagccttgtttctagtggtaccaccacccggtatactaagaagactcaatgaacgcccttgattctctgggtgctgagctcttacccctgaatctgcatgtctcccattgtgttcatgaccaccaggccattgagatcaagttctactacctccatcagcttcttttccaaagggcgaacaactcttctgtttagcttctgaacatccttttttgggtcctgttagtgtccacaggagacactggtttatgcaaatgttcattttcaacagacacatcaggttgttgcttcctcgaattcttatcaattgtatggtgtgcgttagcaacagaacgaatatctttttggatcaacagtatctccactttatcagtatggtgtgcagg

SEQ ID NO: 41679 - DNA, 1549 bp, Zea Mays
cgaagacgtacgttgactcgagtctgccccggctcagcccaatcagcttgtcggccagctcctctcgtcgatcgtttccaccaaatccaccggtctgccggccccgtcttccgctccgacgacccggagccggaggtctgtccagttggtagtcgcctcaagcaccaattcgcccctccgccgaagctaagctgctcggtcccaagggcatccctagctggctgaggcggatcggtagcaaaaccgatactgttacgttgccacggaggcagtttgatttggtggacctaacggccttgcggatctcttgggagccagagcgatggcgcgcggtgctcgcttcctccttgttctcgcgctgctggtcgcgctacttgccgtcgtcttccagctttatcgcctcaggaagccgaggttgtggacagtggaggagctatcgctgtacaatggaaccgatgaggggttgcccatactactcgcgattttgggctcagtgtttgacgtcacaaaagggaggtcacattatggccctggaggaggttatcatcattttgctgggagggatgcatcacgggcatttgtttctggaaattttacaggtgatggtttgactgattccttacagggtttatcaagcagtgagtcaagggaatcctacgaaatatctgaagggtgtagaaatgaaggcaaagagaggtgcacagcttcttgaaaagcagaagagtgatgaagctaaaatacctggctgcaattcaaaatggagccagcaagaaggtggagaagtctggtgcgacacgggctatccaagattggtgaggaggccaggtgacatagctctgaccggacaagttagccaaaggtgcgcttgcttccaggaaaacgagctggacaaagccgggctagtggtgtacgaagggtgtgattacctgtcccagtcttgcaaagtaaactaggccgtgcgtctcccttccacggacttgttgctttggggggtactcaaacgcaaggttcatcagttacgggggcgctgcgacattccacgagcacccaccagccacgcatgcatcatgaaggcgggcctttctgctctgtcccgcgtgaaacacctggtgcaacgtcgtggttcagttcagatgcctagatacgcaattgattggaagatacccgcgatcgaatcaaatgatggtaacgctgcgccgccacgggcaagatctcgatcctaaaggctgtccgtgttaataggcatggggccttgggctgtcgattgatcgaggctgccttgcaagttgcgccgtctgcaccataggctacctccatcaatgaaatgcatttttttggagagtcattttagccatttgcatagcgaacagtgtgtgcgtgtgtggtacgcaaatttttgtttctccaagttggatcatgcatatgcagatttatacagtgccgtgcgagaggcattttacgtttgcatacccctaacccctttgcgtgatctgttggagatagatcccaaactcattctctctgctgcaaaatacacgctctttggatt

SEQ ID NO: 41680 - DNA, 1455 bp, Zea Mays
agtaacatcagactttcccaagtggaatattgcttagggcaagctccctccatcggtccgtctctctcagcttcttcgtcttctctcttaggttgacctctttgcctcaactgcgccgcccgctcaccaagccaggcagaggctgcaggggtcgtagagttggagggcccagtccatctgggaggtcccagtgccgcccgctcaccagttaccagccaggccgtcgggaggggagagagagagagagagacgaaaagatcgagacccatacgctcagatcgaagttcgacttctcctctccccctcccccaacctaacagattcgtgtagcacagatccatccgactttgggttgatttcttcctttgctgctgatcagaaagttacagatggatcatgctgaggtctctggtttgttgtgtattggtacacgtgaaacagatgggggtgaagaatcatatgcggctgagtaccctaaaatggatcaggataccaatgcaacgaccaaatttgatgtagtaatggagacttcagcaatgtatactgatcaaatcaacaccaatgcttgcttagatgaatatcacatgtctggaaaacagcctatggaagaaatgggatttggcagtgcacatccctttgaacttccatcagaaggaatggtagctgattctggggaagaaagcatgccatctagccctgacacatctaccagtaattatgatgcgcctggttacacggagcaaaatctgcagcatatctataattcgtatgatgcactggttgacaaagacggagttgtgcttactcctgccttcatgatatgtgacaaaactttgtatcttgaacctcacctcactttctcattggacgggatcaagattgagtatttggatttagattcctttgaagacgagaagctgtcagctctacaatgggaaatatctaatattatttccatcagttgtaaatggactcgtagtgttggatctgccttaataacactccttgttggatctacagcagaaacaggaaatgcaggtcctgttagagcacgattttctcttgatgattcgcaatggccaaggagacaacagaggatttgggaactgggaccaagatatcaagaaatatggaaagacatcccatcagatgattttgcattggagaattggagcatcgaaccctgtctgtttttccctaggcaatacttttccagctggtcactacatcttttccaccattgcatgccattctcttctccaatctggggagtgaaattatggaggttgacctgtccaagcagcctaaaccaaaaattccttgcaaagacaacctacaagaagatggtctatggtttcaggcttctggtcacaaagggggcatcgatcaggatgactgagtcctcttttttgtagcctatcagctgtccaataccttctcaaggcagctagccaa

SEQ ID NO: 41681 - DNA, 1979 bp, Zea Mays
gtctcaaccacccacgcctcatctagagttgacacgcgccatgtactggacgattggccgctggagacgacgcacgctcggccatggcgctcgctctcctatccccctccacgccatcccatcgtatactgcttcgtcctattccatttccatctctgccagtcgcgcgcgccactagtgccggtagcttcggcctcgcgttcttctgccccctctctcgcggttcctcctcgctgcagaggaccggcgcggcaggcggcgttattgatagtgccggagagggctcatcggaagaaccggtcgctggatggctcagcgcagacctgctcaggcggatatcaggcgcggcggacgcggaccgggtcctggacattgttgccgagtcagttgaaggcgcgggtgccgctctgggcgcgcccgagtgcaacgcgatcgtctccgccgcttttgaccgtggcaacatcgcgctcgctctctcggtcttcgaagccatgcggtccggtttcgcgggagttggaggctggaggtgggcaaggcctgatgtgaggacttatgcgttgcttgtacagcggttggcggccgccccgcgtgttgctgatgcaatcatgataattgattatgtgtctcgcgcaggtgcttcttctatggatgaggttcctttcggaatcattgttcgctgtccaacctgcatgatagcagttgctgttgtgcagcctcaggatggaactcaggttgtttcctgttcaaagtgtcgatatcaatatgaattattttctggagacattacgagtattgaatccgaagaagttagcatggatatttcagccctggagaaagccttgagatttattaatatgaggaaagatggtattccagctgctgtccactctattgtgatccgctcaccttcaggaacagcacgtacttacagatttgctacccagaatgtaactcttcctgctcaagaaggagaaagggttaccatttccttggcggccccagttaacgtttaccgtgacatgggacccctcaaggttgctgcgcgctcacaaggatttaaacctggagaacctatgtgtctcactaatcacatcaatggatgctgcttccgcattcattgacccaagtcttcctagacttgttacagcaactgccattgcatcagctgccataggaacaacactaaatggagtggtcctgccaaaaattcaaaagcttccagaaaaagcagtggatatagttgctgtacagcaaaagcttttgtctcagtatgatattcttcagagtcgtcttaaggaactgaaacagtttgctcaaaaagaggtgtggatgcttgcgcggatgtgtcagttggataacaagatagtagcagttggtgaaccatcttatcgtactagacgagatagagtaaagagggttcgggaaagcttggaaagcacactcctggcaaggattgagctaatggaaagttatgcaaaactgtgctcaatgatcgaaattgaagttgagatggactctgatgttatagctgctgaagcggcaagcagtgcagagagaatatctgagcagatacaacaattaatggagatcgatagtcttgaagagcaatggcgtatacaagctgaggctaatgatgaagcagaaaggcttcttagttcagattcctcagaaacatatcctgctggacgtgtaatgtaatataactctgttagtgcgcaggcattattctttattttctatttagttgtttatctctcttcaatttaaatgttctccctaccaaagtacaaacaaaacctctagttagacttgtcaaggaaaataatgccagaaaattagaaaaatagtggaacaacatgataatagatagatcatatcattactacacaaaatagagtgtcacattcgttaataatggcaggctaccactagagacaagtgcccgccgagataagtggttgtccgcgttaatggttaac

SEQ ID NO: 41682 - DNA, 308 bp, Zea Mays
caagataaggagcatgaaggatgccacaatgagttcgtgagaggtctaggtcgtcgtctcccagtcaactatggctgcaaggatcgttgtcttcatatgattcccctgcacaactaaggtgaatcctaacaaagcaagagtcgttgcaagcaaccgacctgacggacgatcattgagtgcctggaaatttcttgcaccggcgagctgcccccaacacatttagatctgaggtcaatgtacctaaaaagttgcaacggttttacttaaaagcaatccaccatatacgccttcgtttcttaagttgttga

SEQ ID NO: 41683 - DNA, 8819 bp, Zea Mays
cagaaggccaccaagttgatgatcacaagctttgtccacggttcagacggcctgggaaaccaggatttccctccatcagctaccaagcctgtagatcaatcggctgctgccttcctggttgagcaaccaaatctataccctggacaagttaccattgtcgccctcagtccactaaccaaccttgctctgacagtcgagcttgaccctttgttctcgaagaatatatggcagattatttttcttggcggtgtgtattcaattaatggtaatgtgaactatgcagctgaggcaaatgtagatattgtgttcacccgcggtgctgatattttggctatggtactaattgtaacacatcaagtagttttaacccgtaattctgccatatttaagggtcacattatttctgctcaggatgtatgcttcatatactgagataatgcttcttttataacctacttctcattagtcaatggcaatctctactactctataagggtccagtgtgggcgtccacactggtaccgtgcccccgcccccaaaattctcgccccgcctcgctctccgtcgcgccattccagggaccctccatcgccgcccccgccatcatcgcgtcagcgcccgcgctccgtcgatggaaggcgccattccagggacccaccccaaccctgcgatcctcacccttccaaggatgccccgcacccatctcgtccaatccctcctcccgcctcacccgctcacaaggtcgacgacgacgaatctaaggacgccaacgccacccctctctgagctccctatggccactgcgggtgagtgcctctgggtagccggtcacccctctcttgcagcctccgagcttcggcgaacgcagaactggcagggcgcgacggccgacgcaatgtacgtgggtagccggcgtccaatgtcggccgccgctggcgagcgcccccggcgcggctgcccaaccaagctctgtccagatctgaccgtctagggcgaggtgaccccctcctggcggcgagcgagacagcccccactccaccccacctcgcaacagccaccgatcagtggagcgcactcaaaactgttggatttattttggaacttaggtgaaggaggaatgggtggagggacgagcaagatggcaacgttctattgaaacaaactgcctcgattattaggctatcattactaaacaaactacctttatcgtcaacctactaacttccatattcttcacattcagctttgcaaaatttacttgactggattttttagcttaacatataactcagggagacatgcgattttgggacgatcaaactgttggtaagtaaatacttgttggcctgttgctcttcttttagctatagctgaccataatttttcttggttgaggaaactgtagttagtgatagctcaatattttgtgtgtagaaacctgtataaagtattggacatgtatttcatagtttttgtaacttataaggctatgtaagtcacagattaactcttcaaagaattatacaacaaagaaattagcgctcagaaatgggatctttgcatttttagtcttgctcattttttattattcatgtatgactcatggttttctagagaaaaatattggaccgttacaataatgctaatatggtgttaatctaggattgctcattttgagtattcttgtacgactcatggttttctagagaaaagatcttggactgtagcactacctccacttgtgagatctggacttctgtagttatatgccatagcaacactgaaagtgacaatgtttgaatggtatagttcttttccttggtcggtgatatatattcacttgatggtatagctctgccaaaagcacaacagctcgtgcttgatccacaaaaaataggatgctcatgtgattgtattttgattttttagttttatttttgttgcatgtataatccaatcgccgagatcgacctctaccgtctcgagccataggacctcccctccctcttcaacatccgcagtcacaacgccaaggggtagttcttcgcccgtgcggtcgaggcggtcccagcaacaggaccaaccacgcacacgccgatggggtactggagatccggacggagtagcattcttgctggcccagggtcagcccacttcttgcgcaagtttgttgttgggaaccaatggaatccgactattcatttttcttgcggatggtcgtgtcggtggggtcaagaaaattctctggaatttggcactgataagatagaaatgcatgttggggctgtacaggccaacgatcgagctcttgtagtcgatgatcttattgccacccgtgtgcagctgtcaaacttatcggagatggacgatgaagcgttggatcaaggagatggaggttggatcaaggagatggaggaggtggccgccacggccaccacttccaggtcgattatgccctttagggccatccagaagggcaagccgttgtcggtgtccttggcatcgagaagaagtccacccctaagctctagaactccaggtgctcgccgtggccacaagcgtgtagtcccccgacgcagagaagaggaagggcatgtggcgtagttagagggatctgaaccctagcggtcgtccgcccgtccagatctgtgacccgcccttctcgacgcttcggtgacatgagtgcctggaaatctagggaggcgaaaaggtcagagttcagtcatgtcatgcttgatttgagttctgtgccagatcaaagcaagtagtagtacgtgagaagttaaccatgaacagacaccctttttctctttgtgtatcacagattttgaaacttgctgagagggaaaaacaaatttatggggaaaaaatgtgacactgaaagccatttgcttccagcagcttaagaattgttgcggtagatgcaactgaagagggtcttcaagtaagtaaatcaactactacaatggctcactaaaaatggtcgacaggacagtttcggaaccttattgttgttcttcagagagaacatcgacaaaggaacttgaagctccgtaggcgaaaggatctctagaaacgactaactaaattctcctaggtactactctagggaggatgctgaagatgctgtcaaatacattagtggaacaatgcttgacgatcgtccaatccgtgttgatttcgatcggggctttgaagaaggcagacagtggggccgtggacgaagtggtgtacaagctttacaaaccatgatatatgcagacaagactgaattagttcctacttctccccatcaattagaaatggggactatagaagatgtccgaacagagcctgatgtctcacaggaacaaacaactaaagaaaatggaagccagacaacctttagctatgaacgattgatatcaaagtccactgaccctgttagtgggatagacaacaagcacagagaggtttgtgactccaatgcacattgataaaagctctctctctcctgttacctcatttccttgtgaaagggctgagtatttgtagaaattaaaaaaggggacttttttgagcaattttcttgaatctagaccaatttagaactggcgaatttatttgcatttaaaagcaaacaaacacctagattcgcctcatctgaggctcaggcgttcagcatttacttcagaatttcgataaaacctttttttgtttgtaaacatttgtaggcaaaattattcacaataaagagtaaataggtaagctttggaaacttattatagactttgcttcaaggtcttatttcggaggtaacctctggttactaatatcccagacttacaatttgaaaaataccagccagtcaggattgctgcaattactgttagtcatgaagaagatgaggtgtaaaaggttattttggagaagaaacaaactggcatggaaaaaggagccaagatttgatcagaatcacaaccaaatccttctcttatttgcattatgctaatttgattcaccataatgcttaccattcatactattatgcttgtttttttctctttcgtaatcatcgaaatggtccacttttcaaagttcaagcccaacttaattttttaaagcaaaaatgtagcagtacttaaggttttatctataatttatcaatggataagtgagttctattgctccagtttagagagagtctaaacaattttgagtattttgaaattctagatgagctataaatttcctacaggattattgggttagaagttcacgtgtaggcatcacatctgtgtgcttttgggttacccacttaggtggattgtctgagtcactcatgaaatattattgtgtaccatcacaacacatgatttctaagtgtgcaagcaagctaacgacgacttcgactagcttagcgccatggtcactgtgctgctcaacctcgtcaacctacccctccggtgaggtgtggggctgccagacgcctcctgtgaggctgacatagctggatacttagtagtggatcaataatgtactttgcaactgattaccttggttttgttgcatcgcgtacacctaactatcaattattatgctagcacaaaaattgaggaatgcagcaaataaggtatcttttctcacctatcttgttaatgcagtctgacaagtacttgagaaatggaatggtagtatgtttttgtttcttaggtaattagttcaccttatccttagatctctaagtttagatttgaatttgcttgaagtggatgctccctcatcataattttgtcccgtgtaaccagtgtcgttgccattagaattctcctatacagacatctatgcataaggttagcccttccattcttctattcagtgttgtttcctttgttttgtttttggcctctttgaatgaacaatagaaattttgcccattgtgtcccatcggtaaaagaatataaggcaacatggcgctcttagttgttagatcccataaagggaaagtgatgggatacacttctccatttttccttttggcttttactacccagttccaactaacaaggaaaatcgagggtcaactgatctttatattatcaggtggatgcaatcaaaaccaagatgcaagttgcaagtctggaacgaccgactaccattcaatgttgcaagtgatttctattgttaagaagctatgagcgaaaattttgtgtctcaagatttgaagcatgagaagcgttgcgggggagaagcttcagtgcaacattgttgttctatagggatcaacatcctcaagatcacttggaaaactttcacgaaaaacttgcatggtgcactgcacattgatctttcttcttctatcgtatgatgtgacttgtgattgctttgccaatgcgacctacatggagctggattgttattacagacaacagaactgtatttatcttgaataatgattgatggttaagtgcatgcgtcactgggttcgagatcgactacagccactgggtggacgagcagaaaaggcacatggcagagctgacgtcgacgctccaggggcagcagacgtcggagctggagctccgcctgctggtggagacgtggctcagcaactacgagcgcctgtttaggatcaaggcgacggcggccaacgcggacgtgttctacgtcatgtcgggcttgtggaagacccccgccaagaggttcttcctctggatcggtgggttccggccgtcggatgtcctcaaggatgtaagcaatctcatgcacctgttgttgctcgcaaggttcatccctcacaagtacaagatcaaagactcgaaagcttaggttgctttgagccgtggtggatctcccggtgtgatgacatggggctgggtctgggagctcttctcaaatctgggggttctcggatttggttcagcttctcactttgtttttaatgagaagaagcagacaacaaattatagtgaaggctcctctcgtcccccgttgcttggtggatcacccccacggaaccagcctagccaaagacagggtgactattcttacctgaatagagtatttcgtgatctctttatccaggaagataccagttcaactatgtgtttgactggaccattctgaagtatcctcagataggctctaacctgtgaaccagggcaggtgaaagaaccagtggagctgctgggccctcaatgaataagatggagaaggccccaggagaagcgttcggtagaaggaaccctagcggtcctatgaaccagaccgacagttatgcgcaacagccacacgagaccgtatccatgtcgctaaagaaaattatgcatagcattgattgatctgggaaaggactatggagagatcactccaaatatctataaatagatccgtgccttttggacctccacttgctgatgacatgatcaaggacataaatagatcactaaaatattgtcaaagacccaaccaaagagagggtacaaatataaactcttgggaactttcttttaatttttacaattattatctataaagtatggtaaacttttctgtccaccttttctcttggcatttttacaattattatctataaagtatggtaactcagcacttctgtgtggctttgaaatgaagagcgccttttgggttttttgctaagagtaatggtttgtgatctcgaccctccttgtgttttgtatttggagaccagtggtgtgtttctaatatatagcaatactctttcaaggcctcacttgtgagtttgagggtgcatttacttgtactagacaagtttgcacttaaacatttgtttactgtaggtatcgtatttattttaatttgcaaatccattctttaagaatgtgagtccagttccactgtatttcatcatggaaatgaatgtgctagaaaagctcttattttgtgtttttcttatttgtgccatgatgcatttttagtttattgaagttctttacttctgttattgcttgggaagcattataatttacattcaatttgcttgtatggttcatgttttcttaactttgtttgagtggctacaagttctgtactaatgatattgctagggaagccttataattttcattccatttgcttggatgattcattttttcttaagagtttttttgctatcagtatgattcgccaaatcaagttttggattaaatttgtggttaaatgaggacttatgcttatttggcttgatttgttgaggtttcatgtgagtctccatgttatgtttgatgagctttgataatttgtagtgttttttggtgcatgtattaatattttttacatggcgttcgaatatatgtatatgtttgcgtttaatcttcattcatgtttagcattgttatcacagtcacaagcagcgcctctttgagatcttaagcatcatttgcaaattccccttggttgtcaatcgctctgctaattcagtcaactcctatcttgtcaggtcaaatagttttgtactcaacttctatccacgcaacagttctgaggcccccgatgaagtatatctcactataattagtgtgatagttcgtcgcagcttctaattcacacaaccctaatgacaaacaaaacattgcttctgattagcagggaagcacaaaatttaaaccatatagctgaattcaaatgataaacagatagaaaaaacacggtatgatagagggacataactaatcagaagtctagactttatgttgtgcatcctgtaatagtaaaaatttccccattgttgtgatgtccattgctgatgttttgctacatattgcttatgcgtcaattccttgctgctgctgagggctgcaaactttcaaaactaggctgcaaggtggtgtctatattgttaagctgaggaggctgaaatgatttcaatcgttgattatgcatttcagcgaggaacacaacgtcagaaaaggcaattgttagttgaactgtactcccctgaacttcagctattcaaggatctgactgtgcaaagttcctcctgatatcatctgtcctgcttcatatgactattgtgattgataaaatcttggagaaaggtaccgttgagtacttaatagtgcacacggccatattggactactttacaattgcagataagacctcagcctcggatgctatttgtcaacttatcccccttcttactcaaggggcattaatcatagatggagatgaacctacaaacgctccagaactaccaaagaaagcaaaagctaagaagaaaaggtcgaaagagccacttattgttcggatcatgcagacaagggaaggattaaaactaggaattagttgcctcaagtatggcagtgcaaagattagctttggaagatacacgattggccaagcttgagcatggatgaaaattcctagatgatcgcaaagattgttgtggtttgtaatgatgcaatcattggccactctgagcatcaatatgttgctacagggatgcccacaaaagctgctctgaaggacaatgcttccaccagcgcggccgtagaggcggaagcaaggggttgggcttctgtcggtgctggacagcgtgatgccaaacgtgccagccactcttgctgtcgtccgcctccctcttccacgataggttcgcccgcaccgagcctagacgcagatagctctcgaccgtccgctacagtgctgtcgaagagacggtaatggaggaggcctcgcccgagacggtggaggagccactgctggtgagcgcaatcagagggaaaaaggttgagagggcaccaatctggctcatgaggcaagccgagagtgcctcaagattctgaaggtttccgtca

SEQ ID NO: 41684 - DNA, 1936 bp, Zea Mays
taataaactatatcgttccttaaaccaaacacgctgtaaatacattgaaagcaataagtactctatactctctacttatcctatgtctctgcgtttgtgtctgaggctagaacggattatggatacaatacaaataagtaccgcaggtagaaatccgcgaggtgtgagcaaaccatgacgtaagttaggcttctagccacttgtcgcgttgggacaaaatgaaaagggaataaataaaaagagagaataactggctagttgtcgtctgcctctcgatttctgcgtgattcgcctgcctgccttccttcctgttggttgcttctttctactcgcgctcgcaccaaccagaggagcaaccgagcagtagcgactcctctgcgtgaggcctgccgtcatcccccgtgggccgtggccgtggccgtggccgtgcgcaaaaaaacaaaccatcctcgattcgaccggaggggaaggagacgcgccgggagaagggggaagagacgcggcgaccatgtctccgatctgggtgttcgggtacggctcgctgatctggaacccaggcttcgcctacgacgaccgcgtcgtcggctttgtcagggactaccgccgcgtcttctaccaagggagcacggaccacaggggcacgccgcagttccccgggaggaccgtcacgctcgagcaccagcccggagcgacttgctggggagttgcttacagaataaaggaggaagataaggagatagctttggagtatcttgaggtcagggagaagcaatatgatgagaaggtttaccttgacttgtatactgattcatcgcccaaagtaccagctgtcgaaaatgtgatggtatacttcgccaccagtaacaaggagaacaatcaaaactatcttggtcctgcacctctggaagaaatgaccaggcaaatttaccttgctcaaggcccatctggacctaacaaagagtatgtgttcaaactcgaggacgcgttacacaaattagaccaacatgtccaagaactggcaaatgctctgcgtgagtattctgacaccgagttatctaagtgaaagatcacatttaccccttgtttggagggtaaggatttataaataaagttagaattcattcatgcatgtcccaacatggatatattcttgtaagctgcgttttgagtgactacattacgattatattcctgtgcacatgtggtttgcaaaaatctgttggtttcccctgttcactttttctgatctaggagagcgatcatttgctttgctttctacttctagcaatgagcaacaaaaaggcgaccaggaaaaaagatgaatggaccaaagaaacgatgggcaatctattatatgctaccaaaaaaaaagtttacatcattgtagactttccaggtttatctcactatcggtgttaataaacggatttcatattcgaccaatcttatcagcagttatagagtttctcctcgagcgctgctccctcctttcgctactctgattactgaatggatacgcttttctgcaaatacacttcaggaatttctgacaaatgctaatatagagcaccgatgtctagtccccaatctcaatgtacaaattctctaaaatcctgtcacggagtacaagatcacgagaccaagtttccagtccatgcggaacctatctgttgcaaggagtcgcagatggccttggtgaaggtgatcttgccccggcgcaggtggtagaggacatgcatattctcctgctggaagttcccaagaatggacaccccgctcgtcttgccgatcattgggcttgggcacatcatcctgcggtgttgccagcggttttgccttgtttgggccatataaaactgaggatgctggtgacaatcctgggctgcagcacgtgttttctacgcggcagggtcggcttggcccagttagctaggct

SEQ ID NO: 41685 - DNA, 1446 bp, Zea Mays
gctcgtcggccctccacgcaaacgaaatccagcagaccgacgcgaaccgagaaaaatcccacgaaatctcgtggccgcggcgaccggaagaagaggacgacgacggacggagcggcgatggcgtgccgcgcacttgccctccgctccctgctcctccccgacccgctacaccgcctcccggccgcggcgccacctgtttggagagcgtcccgcggtggccgccgtccgcacctccgctgctgctccggcggcgggggcggggagcccgggcagccgccgcaagaagctgtgctcgaggccatatccaagatagcaaggtctaaaggaagggttgcactcacaacaaatatggtcatgggtggtactgtgactgacgatgcaagtgatgaatggcttgttctggatcagaaggtaaattcctaccccacagatagaggatttacagcaattggcactggaggtgatgattttgtccagtcaatggtagttgctgttgaatctgttcttcaagaatcaattcccaagggccgggtatctcagaaattatcttcaagagggaaatatgtttctgtaaacattgggccaattcgtgttgtttctagtgagcaggtgcatgcagacgataactgccaaatccaagaaaattcctccaggaaagaaaaggagatgaggatgcatgcgtcttttgccaatgttcttaatatgtccaagctgtgtatcgtgccatgagaagagataacaggatgaaatacttcttatgaagtgcaatttcatgtcctggatgttccctagtccattccatgttgtatcctacgatgcattttcgccatatttgctggacctccggtgaattccaatgacttttatgtgccattcaagcccaaattgaagcttctctactacaaaacaatatgttgggtccagctacgttatttagtgcagggggcgtatatagctactatgtattccctttcttctataatgaataagattcaaaggttcacagtttgtcctaaaataaataatattttacacaaatatgaaagattgtctcctaatatggaagttaatcataggtgcttgcaagcaataactgtcaaatccaagagatatcctctacaaaaggaaaggagataaggatacagcttcttttgccaacgttcctaatatatctgaaaatttctaggaacttgtttattatgggacggatggagtatgttaaagatgtatgttagtgtttcatattacatgtgttttactattttataaacagtatgaatagtagtataagtgctcctaaattatcgatgtgtgtcttcaattccaagagactattttttactctctatttgactctttatttacctctctataaagattaaaccctatatatagtatcttattcgaacagactttctaacagacaaattagtttagctagtcaga

SEQ ID NO: 41686 - DNA, 1995 bp, Zea Mays
caaacccccaatctcgtgtctcctcccctttcgagcctgtcgttgtctcaatagctcaatcctcattccttcaggcttcagggttctcaatgatcggcggcactgcccttaccaccacacgccgcctccgtcttctgtgaaagatcaagaattcgccgccgtctcagctgatcttcgctctacctgttcgacgagatgcctacgaaggtcacgaagccgtgggtgccggttaactggaccggggaagcatcgtcatcacgcgggcactcggtaggaggtgggggactcgaactcgagcccgccgctgaccgcctcagcgcgctgcccgacgtgctcctccaccacgtcatgtcgttcatgaaggcgtgggacgcggtacgcacgtgcgtgctctcgcggcggtggcgcgacctctgggcctctgcgccctgtgtggacatccgtgtggggaggtatagcgaaccgccccaggacttttccaagttcgtgtaccggctgctgcttgctagggaggcccttgcgccgataaacactctcaggctgcggtcaccaactgattacgacgaggatttcgacaattctgatgttaagatgtggatccgccatgcaatcagactgaatgcttgcgctattcagctaactggtcatcccaatttgtctgcggagcttgattctatagacttggtctctcaccacctcaaaatcttgaaactggcctatactttagtgcttgatagcttcaccagacagctctcgtctcggtgcccttctttggaggaactagagctcaaggactgtttggtagagtgccgcgagattacatctgtctctctgaagaggttgaccatggtcaagtgcacttttgcaaagaacttctttgttaatgctccaaaccttgtgtttgtgcagtgcatcgcaccagatacttgggtccctgtgttcaagaactttggggtgctggtaacaggtagtgtgatgcttgatgactctttactgagccgtgactttaaaaagtaccaatacgatgatgatgaatatcctcaaacaagtgatgatgatgatgacaacaacagtacatttgcccctgctaaatatgttcctgattctgatgacagtgatgaaatcctcagtgatgattctgaattcttagatgatttttatgatgagcattttgatgatatcaaggacaattatgattatggaagtgatatcaatagtgatagtgaaacctatgagtacagtgagattgcaaatgactatggagataaccagtttggaacccgtgataatgaacttgatcacactaggggcagtaaagatcatggttgcagtgcaaaacatatcattaatgattataaaaattttggtggccaaaatgttcttcattgcctttcaaatgctcgacatctagagctgttaggtcattctggagaggtcattatgaggagagaatcgttaaattgtccaacttttagcaacctgaagactttggccctgggagaatggtgtatcagtacggttgctgacttcgacatattacttgtcttgcttcagcattcacctagtctggagaagctttatcttcagcttgaaatgatcttcgtatcttgaaggaggagaggggtattgccatcgatgaactgcgtagatcttgatccgattcctattaaaaacagaaatagaacttgcagggcatgtggcgatagaatgcatgattgtctcgcacatctctattaagttgtcttgtcagctgatatcgtttgaagaacaaagttcagattcgagcaccttggttagtaaatcgtggtttagtagcgtgggttattcgttagcctgttgtcttttaacacatcgtggtttacggtctgtggttcagtttcgagtttctactgtgtaggggctaggggcatctatgttcaacatattctctaatctctaagcacgacagacctacaaatattttagtgttagataggagggaaatttatagtgata

SEQ ID NO: 41687 - DNA, 3787 bp, Zea Mays
ccaaaattgccgccgtcgcctccgtgtccttccacggcagggacccgccggagcatcaccgcctccgtccatgtcgctcaaccgcctcaaggaaaccctccacgcctgttcctcttcctcctccgaaccacggacccaaccgcgctcaccacagcatcctgcccgccttccgcggagacccccaaagacgtccctttcgcagcagctcctccgcctcgaggccgccgcctcttcatcctccttcttctcctccaggcccttacagctcccacccgcccccaggcccccgatcgagaagccgcgggaggatgtcgaaccgccgtcgtcggaggatgaggacgagagaaaaagtcgccccattatccgccgctgcctgcatccgccaccagcggccgccctcgagtcccgcgggccatacgagccacttgtgctctcgctgcctggagagcaccctgtcgtccaggtgcccccatcaataaattgcaggctacttgcgcatcagagggacggtgtgagattcttatacaatttgtatagaaacaatcatggcggtgttcttggagatgacatgggtttggggaagaccattcaaactattgcttttttgtcttctgttattggaaaaggcaatggccatgggcaatcaacaaacaaaggaaagatgactggtcctgtactcatcctctgccctacttcggtgatccggaactgggaaaatgaattttccgagtgggcagaattctctgttgctgtctatcatggtccaaatcgtgatttagttcttggaaaaattgaaaatcaaggactggaggtactcattaccagttttgacactttcagaattcatgataaggttttatgtggtatctcgtgggaacttgtggttgttgatgaggcacatcgtctcaagaatgaaaagtccaagttatatacagcatgcttggggataacaactcaaaagcggtttggtctcacggggaccataatgcagaataagatcatggaattatttaatctatttgactgggtcgtgcctggctgcttaggggaccgagaacactttcgagcttattatgatgagcctctaaaacagggtcagaggctaagtgctcctgagagatttgttcaagttgctgatgcgcgcaagaagcaccttgtttccattcttagggaattcttattgagaaggacaaaagaggagacaattggacatcttatgcttgggaaggaggataatattgttttctgcaaaatgagtgacgttcaaaaacgtgtttatagaagaatgctgcaacaacctgatatacaaatccttattaataaggatgtccgctgtagctgtggaagtcctttacctcaggttgaatgttgcaagagaactgaaccagatggtgttatatggtcttatcttcacagagagaaccctgaaggctgttctatatgccccttctgtcttgttcttcctttcctcgtcaagcttcagcagattagcaaccatctggagctgataaaacctaatccaaaggatgagcttgaaaagcagaagaaagatgctgaacttgcagctgctgtctttggtgcagatattgacttagttggtggtactgctaaaagtgagaacttcatgggtctcagtgatgctgagaactgtggaaagatgcgagcactagaaaggcttctgtcattatggactggacagggtgacaagattcttcttttcagttattctgtcaggatgcttgacatactagagaagtttctcataaggaagggttattgcttttcacgcttcgatggaacaactccgatgaatgcacgccaatcactagtggatgagttcaacagaagccctagcaaacaggttttccttatatctactcgagcaggtaatttaggtgtaaaccttgttagtgctaaccgcgtggtgatatttgatccaagttggaaccctgcccaagacttgcaagcacaagacagatcatttcggtatggacagagacggcatgttacagtatttcgcctacttggtgccggttcacttgaagagctcatttattctaggcaaatatataaacagcagctttccaacattgcagtctctggaaaaatagagaggcgttactttgaaggatgacaagaaatttcaaggtgagctctttgggatctgcaatcttttccgtgacttgtccgataagctttttactagtgagattattgagatgcatggagaacatggcaagagtagtgcaacagaagcaacagggataagagaaatagtcgatactgatttatttggttcacaagagaataggaagtcttccacagcaacaacacatacggatgatcagaaattggttgattttggtatgctctttctctgaaaaattacttggtgtttaccatataatatactcatataatattaccgcagctattagcttcaaaggctgatacagaaaactagttactcattttagatgcaatctatacctttggagatacttctcaaaagattttgaaatactgcactgttctgttctttgtttatctgtacctagtattcaagggctgctgttcaatgtgtcgatttctagttttgggatatttgatcttattcagtcacagttcatcataaattcagagcagcttggtttttccgcgaacgtgccttagcacgtcttcattcagattcaggtagcttgcattttgtacactaaaatataaactgcttaaaaagttgaaccatcatgttattttacgctgttttggaatatcaagctattcttttgtagccagaagctgagcagctgtttatgggtccagctataattatgcagtgattctcttcgctgaaaagtgaaaaacctgtcaaaatattttctccctttgactcccgggtgtattatgtaacctctcttccctctcactgatccattttattttgaagtaataaatctggcctgtctaacagggatagtttatgcccaccgcaacgaggatgtcgtgaacatgaggacagacggaagagagaaaggtggagcagacgagactgtccagagctccttagaggagctgcttagtaagaatgaaacaaagcacactgccatggaaaaatcttattcatcggaggagaaaagggaagtggcaagatcttattcactggagcagaaaaagaaagagtttagctgcatcgcatccttcatgggtatggatgaccttgaatttagcaagtggttgctatcagcctcaccgcaccagcggtctgaagtgctgcaggactacaggaggaagaagaaaaatcagaaatgatgatgcaggtcctcggagctaaccggctaccgcaaagctttgacgtagtgattagcttgtgtagctaattgtggtagttatgacaagggaatggtagtaaaattgacccgtggcaccgatcagtatgtatgtctgcagccccgcttattttgaaccttatattggtgcaaactgagctcagcaaggccttggtcactctccctggccgttttttttcggtcaggtgaaatataatctgtattgtgtctgttagttcctgttcagctgtctaagcctttgtgtagcgagtcttatcatgttaggtggcttgcaatgttaccttggtctgtactaatcatttggatatcgtagtcttctccgtactaaaatataattcgttttagattaaatatacattcattcggtaacttatgaatgtagtttgtctgtgtgtggctacattcattggaacgagttatttacaaacattacactccct

SEQ ID NO: 41688 - DNA, 3566 bp, Zea Mays
attccccctctcgtggttagcaaccgccgcgctggaatctgtcgcgcactttccccgctttcctccgccctgctctcacgtgttcatcgttggttctcactccccttctcgcccccttcaacactccgcgcttctgcgcgtcattgccagcggaggcgcgtcgctatcgcctgggaacaataagagtttgcgcgtctcgcgactgatcggtggcgactgccactcggcggcgacttggactcgacttccgggcaacagggcgaggagtcggccggccagtccactgggttcaaatcggcctcggcaccgcggcgcccccccgcgagttcttgctggattcgctcggagcacggcgcgggcttgtcggcacggcgccatgcagcagcagcagcaaggcttagacataggcaagctacaagaggtagtgaagacccgctggctaaagcctcaagaagttctcaagatactgcagaatcatgagctgttcacgatttcgcataagccccctcagaagccacagagtggttcttggtttcttttcaaccgtagagtactccggtacttccgaaatgatggatttgaatggcaaaagaagagaaatgggaagaccattaatgaagcccatgagcgccttaaggttgataatgtggatgcactgaattgctactatgctcgtggagacaaaaatccaacatttcagaggcggatatattggatgcttgatccggcttatgaacacattgtccttgtccactatagggatgttctagagggcagcatttcagtatctgcacgaaatgattcttcaacattgaatcagaatggcagtgctagcagagctgaagtacatagttcacctggttggacaagcgagttaattgcacattgtactaattcgtgcagtccgggatctgctgaagaagtcagttcccaaattagtgcaagtgaatctgatttgattcaacataaggcagccttgcggaagcttaaaatgcagctgagtctggaagacaaagaagattgtgatgttaatgccgaggatgttccagcagataatgagcctattattttacctgtgattcagaatgaggagccaggcacttctagaaatcatgatgatatctttgatgtgctggactttagtgaagatcatatcaacggaactggaacccatccatgtcacagtgctattgacgtgctaaaaaattcagacacatggttagaggatgatcaacttgaggcaattctgcatccagcgtgtatgacattgactgaaaatcaatggttcaggatacatgaggtttctccagaatcagcgttttcttatgaaagtacaaaggttatcattgtaggagacttcctttgcaatccccctcacagttcatggcaagtgctgtttggtgatgttaaggtatgtgtggaaattatccagcaaggtgtcatccgttgccatactccatgccttgatgctggaaaagtgagaatgtgcttgcttgatgggaatgggaagtcctgcagtgaagcacgagaatttgaattccttgaaaagcctaccaaatgcatgattgatggaaacacgaacccctgcaatgaagcacaagatgtcaaactgcatcagatacctaccaaaagtagtgaggagctgtcactgttactacattatgtgcatacactttttgatggtcatgctagtgggctattttcaaattttagcttgccactccaaaatcttggctgtggaatccaaagcaatcaaatggatgttatgaagaaggcgtataagcagctggaccctgagaatgtgcaataccgcaatattatacatacggttgcagccttgggatatgatttggctttgaagccactgcttagttcaggagtgcctataaactaccgtgatgcaaatggatggactgctctacattgggctgcaaggtttggcagagaagatatggtggtggctcttcttactgctggtgctgcagctggtgcactttcacatccgacatcagaggatcctgctgccaaaacacctgcttcaatagctttagcatatggtttcaagggcctatccgcgttcctttcagaagcacaattaacaactcatcttgattctatcgagtcaaaagaaaatggaaaacttgattctagggaagaggggatatgtcgtgctgtggacagaatatcagacaaaagcagccacgtgcatggtggaactgatgatcagcttgcgcttaaggattccctgggagctgtccggaatgcagttcaggctgcagggcgcatacaagctgcattccgaattttttcctttaagaagaagaaagagatggctcttgggaacagaaatagctgctgcttgtccattagtgaggcaggagcagtttcacatgatatgctggagaaagctgtattatctatccagaagaacttcaggtgctggaaaaaacgtaaagaattcctgaagatgcgaaataatgttgtcaggatacaggcccgggtgcgagctcatcaagaaagaaacaagtacaaggaattgatttcaagtgtcggaatccttgagaaggtgatgatacggtggtaccataaaggtgttggtctgcgtggattcaattctggggcaatgacaatcgatgaagaggtggacgaagacgttgccaaggtcttccggaagctcagagtggaaacagccatcgatgaagctgtttcaagggtatcatgtatcattggtagccctaaagcaatgcatcagtaccgaaggatgctcaataggtaccaacaaacaaaggatgatcaggagaagtaatgcttgtgttaaaccaacagtgatggagcaaacagcaaagcacaagccacccactatttatttatctcccttactgaagcacaagccttggtgactgaatggacagtggatcccgagtaaaactgaaaatttcttgggtgaactagaaccagctccaattcatgctggacgctgtttgagtgtacacagcaacgtcatgtgcaatagctgacttctggctgaaagttggtaaaggcgatgacttagtggtatatgcagaagcttccaaaagcctgatgagcaaggtagatgaggtctgagaaacactgcattcgatatatatatgccttatgtactaccttcatgcagtaggtttgtagtaaatttgtgcgtaactcttcttctgcgtattccagaaaaaaagtttgtagtaaatttgtactatatggtagtaaataggggtcaactattgtaatttgtagcacaatgaatcttgtaagaaatctcagtttagaaatactccatcttttacacatgggatgatgacgaccgatgatcaattttgccagttaatacgttcgccgcagtcctctattggcagtgacattccaacagttgaacgccagctgtttcatgcctttggcatcagctttcaaatggagcagcgatcaaagaaagcctcgtagcattaaacttctctctcggtagtctcgtgatcagaattcagatggctcaagcaactgccaacagaataaacaatcaggcagggtgcgagccactg

SEQ ID NO: 41689 - DNA, 3357 bp, Zea Mays
cgagggtgcagttccgcgcagccgtcggccgtcgcttctggcagcgcgctcaccctccttcccaattcgcaacctcccgcctctttttctccccgccccgcgcggccgaacaaaaccctagtccccctccccactccctcagtccccattcccacaccgttggtggctcggaaccgccactgaccacttccctgaccccgcgctctctccctctcactacagtcggagggcggcggcggtggcgaaccgacggcgtatgtaagttggtggatagagaggtgttgcggaagccgggaaggaatccaactgaacatttgacttgcttgttccgggagatctcttgcctaactgtgagcgagcgagttgtcacagaacagttggctgctcacaatggggacactttcaatgtccgacgccagccctatccctgccaagaactgggatgcttcccctgtcaagctcgaggctcaaggtggtgacgccatcctcggcatgaaggaggaagagcgactactggagctcgtgaaggatgagcaggctgatggaatcttggattcattaccaattgacctggaggccaagaatggcgatgcatcactcatcactgaagccatgaaaaaggaggaggagcagcttgaagacacccggatcaaggtgcaggaagaagaggaagccaggaagagggaagaggctgctagacttgcttttgatcctgagacacagtataacaagttagatgagctgctgacaaagacacaactcttttcggagtttctacttgagaacatggatcggattgccgatgaaagtgttgaaactcaagctgaacagccacaggtagaagagaagaagaaagggcgcggccggaagaggaaagcaaagccacagtacaatgataagaaggctaagacggcagtggctgccatgctcacaagatctcgcgaagaacgtcttgcggaagattctactctctcagaagaagaaaggtgggaaaaggagcaggctaatcttgtgccgttattgactggtggaaagttgaagtcatatcagataaagggtgtcaagtggcttatatcattgtggcagaatgggctgaatggaatactggctgatcaaatgggccttgggaaaaccatccagacaattggatttcttgctcatctgaaagggaaaggcatgcatggtccatacttaataatcgctcctctgtccactctctcaaactgggtgaatgaaatctcaaggtttactccatctctggttagtatcatataccatggaggtaaggctgcccgggcagagatccgaaggaaatttatgcccacaaatgttggccctgattttccgatagtagtgacttcatatgagatggccatgtttgatgctaaatttcttgctgcctataagtggaagtatgttgttgtggatgaggggcatcgtctgaaaaatgctaagtgtctattattgaagcagctgaagcgcataccaatggataataagctccttttgactggaacacccttgcagaataatcttgcagagctctggtcactattgaacttcattttgcctgatatattctcgtcacatcaagagtttgagtcatggtttgatttttctggtggaaatgaagaaactgatgagaagaaaaggctgcatgttgtttcaaagcttcacgctatcttgcgtccattccttctaaggcgtatgaaggaggatgtggaacagatgcttccacgaaagaaagagataatcatatatgccaacatgactgagcaacagaagcaaatccagcatcacttgatcgaaaaaacatttgacaactacttgcacgaggaatcagatattatattgaaaagacctggcattagggcaaggttgcataatctaatgattcagctgaggaagaattgcaaccatcctgatcttttggaatctccagttgattcaactggtttatatccacctgttgagaagcttctggaacagtgtggtaaattccaactttttgacaggttgctaaatttcctgatggcgcaaaagcacaaggttcttgtattctcgcagtggacaaaagtgctggacattattgaatactaccttgattcaaaaggccatgctgtttgccgaatcgatggtaatgtgaaactggaagaaaggaggaggcagatagcagaattcaatgacgtgaatagcagcatgcgtatcttcctcctgagcacaagggctggtgggcttggcatcaaccttactgccgctgacacctgtatcctctacgacagcgactggaaccctcagatggatttgcaggccatggaccgatgccaccggatcggccaaacacgcccagtgcatgtgtataggctggctacgtcacactccgttgaggggcggatgatgaagagagcctttgggaagctgaagctggagcacgtggtgatcggcaagggacagttcgagcaagacagagctaagccgagcgccttagatgaaggtgagctgctggcgcttctcaaggacgagcagaccgaggaggacaggatcgtccagaccgacatcagcgacgaggacctccagaggctgatggaccggagcgacctgatgggcccgccgcctggcgctggcggcgcaaacgcggcctcgcctcttgtaccgctgaaaggcccgggctgggaggtggtggtgccggccaagagtggcggcggcatgctgtcgtcgctcaccagctgagccgtcgtcgctgcggggatctgttgtgcttttggttggtcgcacgcactcagttttggtttgccccccccccccccccccccccccccactggtgctggtggttttggtggcagctgttgcgctgctcaggcgatggctgttgaactggggcgttgcccctgcagaagtagcttttagtttaggatcagcaacaaaacaagcaggactctaggccatgtgtggtcgactctccgtacggtacccaggtcgtttacagtacggaggtcgttgcgttagattacgtgggtgggtgatggcctcatgggggatgggacggttggttgaaccagacacatgccggttgctttgtaaagtttgtatcacgtcgtccgtgatacaatgcggtcctccgtctacaagcgtgctgatcctctcttgtttggctgtcttgtgatgtttgttgagaacgctgaacgaacgcccgtaccgtgacaaagatcggttcctggtcttgttactcttgtacagtctacaaaaggagaaggcgaacgctgcaacaaggttggttcctgtatactatactctctgtcagtggcacatgagtgtacaccaaatacgaaggaaagatataaactgtacaatcatc

SEQ ID NO: 41690 - DNA, 2167 bp, Zea Mays
cggtccaggaagccaatcgccagccagtcagagtcaggaagcgcggccgcaccaaccaggccctgtacatagcatcggccataacacaggttataggattctcagtccggccgtgccggccatccatccggatcctgagaagccgtgcaagtttcctgcttcgcggaggatttcagtcatccgcctgccgagggccgagtttctgcggagagtggccagtgggcagattttctcggccctgaatcgatttgcctgctactcgcggtaggcgaagggaaggattcaaatcaacataacatggccgcagccaccgccgccgcttccaccatgtcgctgctcccgatctcccagctcaggcagcagcacggcgcgggcgccatgaggcggcggccctgggtcgcgcggcggaggcgatacgtcgttccgggctcgtgggctcgtggctgtttcgatttgtttcccagacggcgaggctgttcgggccggcgatcttcgaggcgtcgaagctgaaggtgctgttcctgggcgtggacgacgaggccggcagcaagcagcacgggccgctgccgcggacgtacacgctgacgcacagcgacgtgacggccaggctgacgctcgccgtctcgcacaccatcaaccgcgcgcagctgcagggctggtacaaccgcctgcagcgcgacgaggtggtggccgagtggaagaaggtgcgcggccggatgtcgctgcacgtgcactgccacatctccggcggccacttcctgctcgacctcatcgcgggcctccgctacgtcatcttccgcaaggagctccccgtggtgctcaaggcgttcgtgcacggcgacggcgacctgttcagccggcacccggagctggaggaggccacggtgtgggtctacttccactccaacctggcccgcttcaaccgcgtggagtgctggggtccgctccgcgacgccgccgcgcccgccgaggacgactccgccgcgccggccgactcctccaactccaaggatggccagatgatggccatgtgcgagtggccgcaccggtgtccccagcagtgcgactgctgcttcccgccgcacagcctcatcccctggccgaacgagcacgacatggccaccgccgccgccgccgatgcctccggctccgcccaacagcagtagcgaaactgcacttgtgctgctacgcaatgtaagccgtcgtagctagactactagaactagcgtgttgtttggttgggtacgtagctgcaaccgcgcgcgtgcagtagtgtggcgccaacaccacaacacctgcatctgcatgcccggcccgcgctgcctattctttaattggtagcttagcttagctcgttcagctccacttctacaagctcttcgtctttggatcggaagtactccctccgtttcttcgtttctttttagttgttgctggatagttcaattttgcactatccagcgacaactaaaacaaaacgaaagaagtagtagcttggtcgaggtcggagatgaacatggtcttgtacatatagctagaacacttgatctctagatggaaaacctgcacgtacacacatatgttgcaggcaaagtatcatccgaagtattcttgaactggaagtcctagatttgtgtagtggtgtacaaaattggatatggttaattgtttgttcgaccgtaccatctttggtcacgcgtgtctctgtcaggaggtgtgaagatgcgtctcaaagtctggggccgatagccgacgtcgttgcgagtggtttgtgtgtactggaagaagatgtgcagtgtggtaggagtctggagttaccggtagttttcacgcttgcgtgccatttgacaagactggctccggagagatcgtctttttttttctttctctttgccttctcgtgattgctggactcggcaattttgtcagcatatgccgccgtttttttgtgatgggtttggtgctcttgcttggcgtgcttgttcggtacagtaggacgacttacatgcatgcatctgtctgcggaagaaattaccagaactcctggagtgcccaaggaacaggaaggatcatagaaacgacgggatcactctggatgtctttgttaataataactaacttggtatataatttctttctgctatgtatccttaaccagcgaataaac

SEQ ID NO: 41691 - DNA, 713 bp, Zea Mays
ctagagcattcacttgtcctacactagctttcttttaaaatccaacttttgtttcgcttgttatctacgatgaagggcagcgatccagtcttcatatccgagaagtaatggtgatccgaatcgattaatacccagctggggatctccaaccacacgacatatgcttctcttaactcttttgcacatgtctatcattcccacggatcctccaccacatgaacaggtccgtgccaccccagagcacaccaccccttttaggcgatcctttgccaggagggtacgtgccactctcgccatctctccactcctagtgcgcgattgtcttttcatgtatggaatcgctgggttcaagcttacccatgacgaggtatgtggccagataaaaggtcctagatcagcagggcaacaatcggtacggtccttaaacgactcagacgaagacactacaccgagactcctttctcgtgcaagtcactcgcccggtctcagctttattatttaaccccaaagtttggtacatggcagaggtacatcttttccgatgttgaatccatcaaggccctgatggattcaccatcaagttttatttttgaaaacttctcatccaatctgtagcatcacttttgttttaaaacaaaacattttgtttttcttaagcaaggctaaccatcataaaattcttttcaaaacgggtatcaaggaagggtaatcaa

SEQ ID NO: 41692 - DNA, 3173 bp, Zea Mays
gtccgcacgctcgctctagctcgtggcgtagcggaacggaagtggagaacgcgaagggaatcggaccgttgttatgagcctatgacacgtcaggtccgggtcatgtgactgggtccgtaggaagtgcgggcgtgagggacgaggccgagcggtgtgaggaaatagaaccgggagactggagcggaggcgggaggaggaggagggagaggggatcgagaggaacgcgcgcgaacagaagagaggaaggaagaggaggtggcaggctcggttccgcgcgcgccgacgtgagattccgggccgcacgtgcccgcagtgtgatagatatcatcttgaggtcttcataagtcagcaacctagagcagaaaatgtcagctccggaattcaggacttcttaccagcaatcccctgagaatgtcggtcaactcaaggtctgccaatgtgggtcgggcgactccaattttcagatcacaaataaatccgacggtggcgaaaattcaccaacaacttgtccaaactgtcaggtccttaagagtggaaatttactgctttcatctaaaggtgttatttcttgctgggattggctggacagtatggaaaaagcgttggtttattcttacaaggacatcattagtgttcttcaggagcgatcctaatgttccccctcccagaggaagtgaaccaattgttacacttggtggaattgacttgaataacactgcaagtatgatagtcaaagaagaaaggaaacttataacagtcgtgtttcctgatggccgtgacggacgcactttcacccttaaggcagaaactacagaagacctaaatgagtggagaagtgcattggagaatgctctggctcaggcacccagtgttgtgaatacagcgggacaacttccagtagtcagcactgacataacagaacctgttgaagctgctgttgaacaatcagagaataagtctgtaattggcagaccagcagaatttgcacttgtcgatgctgatggcactacagcattcctgcagaaggccttaaagttcatcgaagattatggtgttaaggtcgaaggaattcttcgtcagtctgctgatgttgaagaagtcaaacgcagggttcaggattacgaaaagggaaagaatgagttctccccagaagaggatgcacatgttatcggtgactgtattaagtgcattcttcgagagatgccatcttctccaattccggcaccatgttgcactgccctggttagagcttaccgaactgacaagacaaaaagactcgatgctatgaatagagtgatatatgaagtattcccagaaccaaatcgtcaattgttgcagaggattctcaaaatgatgcagattgttggatcacacaaagctgtaaataggatgtcttcatctgctttggcagcttgcatggcaccgcttcttctccgtcctcttcttcttggtgaatgtgaaattgatagtgaattcagtatggctggggatggttcattccagttgcttcaagctgctgctgctgccaaccatgcccaagctattgttattattatgcttgaggaatatgatcagatatttgatgatattgaagacggttcgtactcttcagatgcttataccgagtctgacattgacaaggaatattctacagacaatgacatccctgaagattatgatggctcctctggttctggtgaagatgttgaagaagatttgaatgatgatactgaacactcttatggcatgaaggtcgaatgtgatagtaacattaggattgataatgcaaatgataagggctcatattacgaagcttgaaaacaagaagactcatctccaatctaaacttacggaggaggagaaagaaaatacagtcctccaggcaaatttagaaaaacgaaaagaagcattacacaagcgccgtgtagcacttgaaaaagaagtggaaaatttacgagaccagctactgaaggagagaagtttgagggcttctctggagtctgggctaatgaatatgcgaagaggacaagtgtccttcccctcaacgatagacaccaagactaaggctgatcttgaggaagttgctgccgttgaagctgatattatgaacttgaagcaaaaggtttctgatcttcggggacaactcaacaaccaagttcagttgagttccacctcgttatgtgaatcatgcaacaacaagcgatccataaatgcagacaagcttgtcgagtaaggttttactgccaagcattcaatattgaggtgaacaaaacgctgccctttctccacagattgcctcagtcgaagcaccacctattgtagggtcttattctgtacctgacatgttctgggctacaaaccaaatggttcagaagatgttgtattcaaagggtgagattgcgaaggatggccaagacggatcacttacatcaagatggaactttgcacagagaccacactcaaatagtccagtcatgagcagggttcaaggttccgatgcctattcaagtactaaaaccgaggaatctggaggcgcaccttcctctgcattagcgaagctgactacccgactcaactttttgaaagaaagaagggccttgcttgccagtgagatgcaaaacttagatctgggccgctcccaggcccagaggcatacagctcctccgaaagctgagactccaactgagaagtagaatcgttttactgcatcgttgttaggccacaagctcaggtaggattgcaggcagtaacagaaaacttcgattcgacaatgcacagagactatctagctatagagtaacttgatttgtacatcgcacaggcattcatgtcttcaccctgatgattcatatgtcaagttttttagcgacaccgacgaacaacctggtttgtactattttatctccaaataaacaatactcctactctgggacaaagccaaagtgcgtttgcaaattatttgtcggtctgtctggtactctggtttgtacatcaacttcacttacgatcaagctaagtaaaaataccgtaccatgtgtatctatgccttcagtgtaacctaatagcaattccagtaaaacttggcagtcccagtgccaaaaagagcgaccagtatacctgcttgaacatcgtgctccgttaagttggcagttccagtgccaaaaagagcgacc

SEQ ID NO: 41693 - DNA, 2664 bp, Zea Mays
  misc_feature (1)..(1): n is a, c, g, or t
ntgccgccatccatcctttttcccttcctcccctcaccccctcgtcggaatcggaacggctgtcgtctgccccttcgcccccctcttcgatccctcaccccacccagtgctagctagctagctagcttctagtggctagtagctcccctcccctgtgggctgcaacctggtttgggttcgcggatcgatcgcgagatcaatcaatccatggcgcggaccaactgggtggccgataagatgctcgacgtctacatctatgactacctggtgaagcgcaacctgcaggccaccgccaaggccttcatcgccgagggcaaggtcgccaccgaccccgtcgccatcgacgcccccggcggcttcctcttcgagtggtggtccatcttctgggacatcttccattcgtccaccgccaaagcctcatccacatccactgccgccgccttcatcgaccacaccgccaagcaacagcagccaatcggcgccgggaccggggcgcctcctcctcatccccttcacgattccagagagcaccagatgaggctccagcagctgctgcaccaacacaacccccacctccacactacaagagatgcttctcctcccgcctctatcaatgccctcaactccgatgtctccgctgtcctcgcgtccaaaatgatgcaagaccgagtcaggaaccccaaccctattgactccgacgcctcacagcatctcctagacgcaaacaggatcgcgcttctaaagtcaccaccacctagccacactgggcctatgcctatgcagcagcagcttcatccaaggaaccagcaacttgacatcaagcccgatgttggtatgccacagagaacgatgcctgcagacccttcttccatgtatgcatcagggatgatgcacccaaaacctgcattacttgccactggactaaatcaaggtggtgttgggagtgtgccacttaaaggttggcctttaacggtcccaggtattgaccaactccggtccaatttaggtgtgcagaagcaattggtgccatcttcaaaccagttccaacttttatcgccacaacaacagttgcttgctcaggcacaaacacagaatgaccttaccagaatgggttctccagcaccatctgcttcgccgaatgttcgaccagatgacccggattatttgatgaagttgaagatggcccagatgcagcagtcctcaggccacaggcctatggaattgcaacagccgcatcagcagaacactagaaagcggaagccaacttcttccggagcagctaatagttctggcacaggaaatactgtcgggccttctcctccgtcaactccatccactcatacccctggtggtggagtaccagtggctagcaatgttaatattttacagaagagttcaatgatttgtggtgtggatgcaactggtggacttgcctcatcctcaaaccagatggatgctttggatagttttgttgattttgatgaaaacgtcgactcttttttgtcgaatgatgatgtagacggaagaggcatgtttgcagcacttgaaaaagggtcttcagagcacaatacagagtccttaaagggtctctctttgagtgaagttggtaacaaccgtacaagtaacaacaaagttgtttgctgtcacttctcttcagatgggaagttactcgctagtgccggccatgagaagaaggtcttcctctggaatatggacaattttaagatggataccaaaatagaagaccatacaaactttatcacagacataagattcagaactaattcaactcagttggctacatcatcttctgacggaactgttcgactttggaatgctgctgatgaaagtggcgctttacaaacttttcatgggcataggtctcatgtaacatcagtagattttcacccaagattgacagaggttctttgctcttgcgacgacaatggagaaattctcttctggacagttggtcagactacatctactcatgttttgcgggtgaagcagggtggaactggaagagtcaggtttgaacctcgaagtgggcagctcctcgctgtggcagctggaagcatggtgaacatttttgatgttgaaaagcaatccagcttaccctgccctccaaagggtcacaatagtgaggtaaactttgtgtcctgggatgaaaatggtgaatatctggcatctgtaagtcaggacactgtgaaagtgtggtcggtatcgtctggtgtgtgcattcatgagttacgatccaatggaaaccaatatcagtcatgcacattccatcctagatacccgaaagtgttgattgttggtggttatcagactctggagctgtggagcttatcagataaccagagaatcccaatccaggcgcacgaagggttgatagctgcactggcgcactccccgttcactggaatgattgcctctgccagtcatgacagatgtgtaaagctctggaagtagctatatatagaggcggagacgtgagatggatatacttttcaagggtgattggaccctgtgaggtggatggatgtagggtcggttgtacatgatatattgttgagctgatgattgggctgtatctgcgcctataccattatataacccaccggtttaaatttcgctgaacccatccaaccaaaccacgcccac

SEQ ID NO: 41694 - DNA, 1319 bp, Zea Mays
tggagaaaaaacaaatgaaactcgaggacgagtctgagcctgagttggtcattaatttcattagatgactttgtatctttagttgacttgacttggcaacgggacttggtatatagaagtcagatctagaactccttgaggctctccacccaaacaaccacagcttgctggcaagcctctgaatccatgcatccttcatcaccttccattctgcacttacagcagcagcagcagccgccgccacagcttgctgcgcttgttgtgcgacctcagctcgctccatggaccccttctgcttcagcttgcagataagcggatgtatgtcagttgcgtcatcatttatcactgtccaatgtccatagacatcacaacaagcactcgaagatttgggactgttccaacaagacatgcaccacaccaataccgggcaacaagccatgtaatgaccgccaaccggccggccacgctgctcggagcacgctgccggatcggaggttgccgcgtgaaagaaggcaggtcgagctcacgtaggtcagtagaatgacaaatttctgtcttccttcccgcgtggaaactggttggatctctcacttactcccgtgcgtaatccacgagctgtttgcagcatctactagcggagatgctctagttgcgtgccggactgccagttcaaacgtcaaacaaacaaaaaaaaaacttgaagataaaacaggttgccagtaaaaaaaaactagaaagggtagagaaaattttgcatgttgcatggccgtctattcttatgcacggagcgaaaaaggatgaaggaaaacggatcgaacccagctctacggcctgcggtgcacccaaagaagaggagaacgaagggggctagagcagtagagctcgaccttgaatcagcggatgtgcggcttcgcgtgtcgtcgtcgatccacatccacagcgcgaaggcgaccaggaaccacgcgggcgagacgggcggcgcggcgagaatctcggcgaagaggaggtagacggcggccgagatcatcacggcgacagctacgacacgcgacggagacgggaggacggcgacccggtcgcggtccggcaccgttcctgccttccatcgcagatgagatcgctatcttctcttctttccttgtctcgaaggggactggtgtgtgcgtgctgcaagcctcaggctctaaactgcagtcaccggctcacggcagcgacgagcccttacataaaatgtcctaatatactttttatggagggttagggcaaccgtacagtactttatacagtacagtactttatataaaatgttctaatatttt

SEQ ID NO: 41695 - DNA, 1791 bp, Zea Mays
tttttttcaccaaaccagcgaggcagctaccgttttgtcgccatagcactcccgccgaccccctcgccgccgccgggaatggagaccagcaccaagaagcttagcagccttcgtatcacctccctggacgacgatgacgacgagaccgagatcccgcaccagccccctcaagcaggcctctccaccgctgaagcggattatgaggacgacgacgatgaggaggaagaagccgaagtgactcttggtgtccttagcaaaccgaagcacccaggcctcctcctccgccacttgttccccagcaaggccggtggcatcccggcgtggctagacccggtgaacttgccgtcgggaaagtccagctactgtggtttctgtggcgagcctctgcagttcgtcctccagatttatgcaccaattgaagataatgtagcagccttccaccgaacgctgttcatgttcatgtgcccatccatggcatgcttgcttcgagatcaacatgaacaatggaagcacaagtacgggaatccatgtagaagcgtgaagattttccggtgccaattgccacggaataatgccttctactcagctcaacctccaaagcatgatggctctgacaaaccactctgtccaggagctcctgtatgccactggtgtggtacctggaaaggtgataaaatatgtagtagctgcaagaaaagcaaggtactgttctgagaaacatcaggcactgcattggcgaactggtcataaaaatgattgcctccagataataagttctgctgcttcaaattcagttctgccagctgtaggaatagttcctgctagcatttcttggccagaatttgagataaaaatagactacgaaggtacttttgattctgatagtggtgatgaaaacaactcgaagtcattggtgatgcaaagacatgggaaacttgatgctatgatgcagtcgtggatggaccatttcgaggctgatgctgacaacaaatgctgggcgtcttttcaagaacgggtctcaagagcaccaaatcaagtgttgaggtattgtcgagaaccaaatgctaaacctctatgggccttatctttcgggtgcccgtcagatgctgatatcccatcatgtagctactgtagaggtccattatgctatgaatttcaggtaatgccacaattgctttatttctttggtgttggaaatcaaccagactcgcttgattgggcaacaattgttgtctacacatgtcaagggtcatgtgaccaaactgttagctacaaagaggaatttgcttgggttcagttgtaccctacaacaaccacgaggcggtaataatgtttacctattcctcggagtaactactgtccaattctgcaggaatcataggcaagtgcatacctcctttgggtactggaattttgagataggatgtggcttcaatgtttccaggtctattggtcgtgcagggagttttaagcatcttccgaccgtggcccaatgcttggtgctcgttacagtgcctttgatccatttaggcactatccttgggcccacgaatacgtgatggcaaatagttgcatacttccatttttgtggtgggccaccattttcggtttaattgtcatcatcacatcattaaaaagctttgttgttttttgttatctaaaaggatcattggtctcagaaggtgctcgcattcatgtaaacatttccttcatcggctaaagttttgatgttggttttgattttaaatggaacattattatgttaatattccagtggtgttttcaccccca

SEQ ID NO: 41696 - DNA, 1481 bp, Zea Mays
ctctttccattagccatcctagccttcgccccctcgacgagaagaaccacctcaaaaccgaacagccgcaaaagaaagctgctagctactctatacatgataactagaacaggaccgtgaagtaatatatatataatgacgaagtcaggggcgctacaacttgctcggagcaccggagggtcgcttagcaaggaccaagtcaaatccgccgttgatcagtatgtgaagtaccacgacctccacggaggcgaacaagaatcaagaaagtcaaattacgctgatttggcaaacaagtactatgatcttgtcactggcttctacgaatatggatggggcgactcattccattttgctggcggatatccgggtgaaacttcccgtgaagccattaagcggcaccagcattttatggcactacaattggggctcaagaagggtatgaaggttctggacgtgggatgtggaattgggggacctttaatagaaattgccagattcagctcaacttcaataactggattgaccaacaatgactaccatgtctcaaggggcaaggagcacatcttttcagcaggtttgagtgagcaatgctgctccttgaagggggacttcatgaatatgccaatagctgataacacctttgatgcggcctatgcaatacaggctacatgttacgcaccagaggcacaaggtgtctatagtgaggtctaccgtgtgctgaaacctgggcagtattttgcactggatgaatggtgcctgactgaccgatttgatcccaacaacgctaagcatttgaccgccaaggctgagattgagcttggcgatggcctgcctgacatccgtaccactcgccagtgtgtccaagctatgaaagatgcaggattcgaggtcatttttgcaaaggatcttgctcaagattttccttgcccatggtaccagacgatggatcctaactacttttcatgggctaacttccaatgcacacgcccaggacggataatcacccgtgcaattttaattctttttttgtcaggtcaatacactagagttcctccgtattgccccagcaggcagcgtgggagcctacaacgtcctaacgagtgcctctgatggccttctaaaaggtggtcgggaaggtatcttcacagcgtccttcttcgtcctgggccgcaagcctctcaaggaaagtgaaatagtgaacggcggcaacctttgagctgcaacatgagtatggggtcgtacttataagagctatgaatcatggccaacgtgttacgtgctgaagtgtgtttaccggtttgtcttatggctcttgcgcgtgtggtgggtcatgttcacgcagtagcatactagcatgtatctgcttgttgtgtgttgtactatgaactatctgaataaaaatgctgtttacgcgttgtattaatcgcaccatttcttggcaacacggctttgatcggaccaatgtattgtctggatctatc

SEQ ID NO: 41697 - DNA, 1777 bp, Zea Mays
gcgccggcgcgtcgggtcgtgcccatcacgttgtctccactccgtcgcctctcctctcctctccgtccctgcgccacgcgggggagattaaagcgaagcgcctccccgctcacctctcctctcgtcgtgcgttggatcaaagtatcaaaccaatctcccctcgccgtccggccggcgtgcgcgcggggcctctttttttggagccttgcgccgcggcccgttcctcctgtccgaaataatccgcctcgacgtgttcgcctccccctccccctccctctctcccctcccctcgcgactcgtctcgtgcgtgactgcgtgctcgctctccttttcgctgcgctcatctcggtatctgtgccagcgctcgcctctccccgccggcccgccctccttcctttccttgtctagccgaaggccgaagccactgcgcgcgcgtgcgtgcgacgatgtcgtcggcggtggaggccatctcctgccccaaggtcgacgtccccgccggcccggagccgggggagccggccaaggaagcggcgccgcccgcggagcactgcgacacggcgcccaacggcaagtgcgcgccgcgttgtcacggggaggaggaggaggaggaggaggacgaggaggacgaggagaaggcccccaaggccatcgacctcggtcccatggtcagcatcaaggagcagctcgagaaggacaaggacgacgagagcctgcggcgatggaaggagcagctcctcggcggcgtggacttgaactccgtgggagagacgctggagccggacgtgaagataatgagcctgtccatcctgtcgcccgggcggcccgacatcgtgctgccgctgccggtggagcccaacggcaagggcgtgtggttcaccctcaaggaaggctccccgtaccggctcaagttcaccttctccgtcagcaacaacatcgtctccggcctccgctacaccaacaccgtctggaagacggggctcaaagttgacagagccaaggagatgctcggcacgttcagcccccagctggagccctacacgtacgtgacgccggaggacaccaccccgtcgggaatgtttgcccgggggtcctactctgccaggaccaagttcctcgacgacgaccgcaagtgctacctggagatcaactacaccttcgacatccgccgggagtggccgtcgacgagctgaccatccttccctccctccatcggtggcctgagcagaccagtcgtttcgttctgtgttcttccttttctatgttgcctcgtcctgtcctgtcactaggttttttgtttgttcaccgtcagcttgttcgctgcggcttctacagtatttttctctctatggattgcagctgcagcagtccaaacagctgcaacagtgtcggcttgtagccagccgaacacgccccgtgttgctgcgtgcgtgacgcacggtgcgtctatgtgccctttcccatgcgccagttgtctgctgtgttgacaccgttactagacagtgcaaatgtcaggtcggtctaccggactgtgcgtgcgtcagcgtgttcaacttgtcgatcagggtctcgttttttccgaaccgcctgttgagttaagacttcagagcaatgaagctgcgttctgcgtagtaatgccaccgtgatcgtgacctgttgtgcttcgagagttcgactgtagcattgaaatcaagtgtagcatgcttcgagtcctatttttgcgatcaatgttacaaatggccaaaaaaacgaagtatattgtttggagtccaaaaaatcc

SEQ ID NO: 41698 - DNA, 897 bp, Zea Mays
ttgtgcgcagatggatgggtttaccttgccaccatttgagtcaacctgcatctttagggacaacgatattataagggttaaacaaaaatcctgtacgaagcacatagagcacaatgatgtgcactgtattcaagatcatgagataatagagaagagatcacttccagttgatggcaaaatccttgcaatccaggataaggaggatgtctgtaaacaccaagaagaagaggcacatgacgatcaccagcttgaagaaaatgccactgctagccatagcacagaaaataatggtacaagtttgaagaggaagcggaatgatggggttgcagatatacctgagagctcaaagggacaaaggctgaaggtgacaaattctggaaagcatatagattacagcaagaaggaacaaaatggatctaaaaagttgaagctgtcagttattgatattgaagctaagaaagcaactccacaacatgaaactaccactaccttagtggagcagcaaaaatcagaggggaactatcaaactgagttgaaatgtgaggcaaaggtgacaaactatgatgctcaaagtgacacaaaaaagttggagagtcgaagtgctcgccgcaagaaaattaaaaggctaatgaaacaaagaggaaaattacaaatagaaaagaatgtgcatggagattcaccaatagctgctgattgtccatcatcaagcaatcaagatggcttgcctgtcccatcaagcaatcaaaatggatcacatgttcatttttcaagcctcaaagcagatgaggacgaatctgaaacgtcggatgagattgtcccagttgtggttcggcctggtcacattcgctttgagccagcagatgttgagactggaccgaaactcagaggacgctatgg

SEQ ID NO: 41699 - DNA, 1181 bp, Zea Mays
gattcttctccccccacggccacacccacgcaccgcagcgccgcctcgtctcctctcgccggcgatggaggaggtgggcggggacatgcctctcccgaaacagaagctctccgctgcaccgtacagggacggaggtggcgtcgtgctcgtggccactgggagctttaaccctcccacctacatgcacctgcgcatgtttgagctggcaaaggatgaactcgagctgcgaggttattctgtgttgggcggctacatgtctccggtgaatgatgcatataagaagaaggacctcttaccggctgctcaccgaattcgcttttgtgaacttgcgtccaaaagctcatcttttgtgatggttgatccgtgggaggcaatgcagaatggttatcagcgcactttgaccgttctttcgagaatacgaaactcactatgcaaggatggtgtagctgaccaaggtagcctcaaggtaatgcttttatgtggctctgacttgctcgagtcattcaccactccaggtgtttggatcctagaccaggtcagaaccatatgccaggactttggtgtcgtatgcatacggcgagaaggaaaggatgttggaaaattgatagacaacagcgatatattgcaagaatgcagggataacattatttcggttgatgagattgtgccaaatcagatcagttcatccagaagaacacaagctgtttatggaaggcaatggcggcgacatagcattgctgtaatagaggtatttggaggtaaactctgtaatcgacaaggatcggctgtggacgtctacctcaggagtcaggataccatctggaccgtgcattctgggcaattacttcgcacaaacacagaaataaacggaactggccacttaaattactactatatttttgttaaatttgattctggaggttgaagtgagttgcatgttgattaattttgcttttgtgccagaatcaagtgctacatacaacatgaattctgacaaccatataaatgccaaggttattctgacatagcaatcgtggatatagcatcggttagacaaacatatcataaagaattaagcctcatttgcagacagttctgatgtatataagcacagacaaaagatgtctctgtaacggattctattgaacagaacacatgccattatacaactgatcaactgc

SEQ ID NO: 41700 - DNA, 1928 bp, Zea Mays
gcttttcaatggggcctggacccaaccactaccaccgaaagcgtcagcgacacagctagtttttgggtatacacgagcaccgtatgctcgtgtccgatcctatcgccaccaccctctcgcctcgccataaagggcgggggccgctagggttagcgcatcggaatcaatcgtgtttctcgcctccacgccgagaccaatccagccaccgccaactctttgcctcgcctctccgattcgagggaacgatggagtgcgtcaccgatatgcccctcgcgacgctggacagccgaccgcgcaagcggcagcggctcgggtgggacgtcgttcccgccgagatgtatcaggttacgcggccgcggcttggttgggacgtcggccccgccgagatgaatcagtttgcactttgtggacaagaagttgtgaatgccttcagtgctgcagtgttgggcctatcttcaggttgtgtttcttctcaagtcaaccaagagcagcctcatgatggttcccctcctctgagagaagatgacaagaatgggcattatgtttttgctgttggagataatctcacatctcgctataagatcaatgcaaaaatgggagaaggtacctttggtcaggtgttggagtgttgggataaggaaacaaaagaaatggtggccataaagatcatcaggggcattaagaagtacagggatgctgcaatgatcgaaattggcatgcttgagaagcttggtaaatatggtgaaagcagatccagttgtgttcaaattcggaactggtttgactatcgtaaccatatctgtattgtctttgagaggcttggaccaagcttatatgattttctgaggaaaaacaattaccgctcattcccaattgccctagttcgggagtttgccaaacaactgttggaatgtatagcatttatgcatgaattgcgcctcatacacactgatttaaagcctgagaacattctccttgtttctccggagtacattaaagtgcctgattacaaagtctcatcccaatccccaaaggaggggtcctattacaagcagttgcccaagtctagtgctatcaaggtgattgatttcggtagcactacttatgatcaacatgatcagagttatgtggtatcgacgaggcactatcgggctccagaagttatattgggacatggatggagttacccatgtgatatctggagtgttggttgtattcttgttgagctttgcacgggtgaggcgttattccagactcacgaaaacttggaacatctggctatgatggagagagttcttggacctttgccgtaccatatgcttaagagggcagatcggcactctgacaaatacatcagaaaaggacgcctgaattggcctgagggttgcacctcgcgggagagcatgaaagctgtgatgaaattgtccaggcttcagaatctggtgatgcaaaatgtggaccaggctgcgggagatttcattggtcttttgcaagggctcctgaagtatgacccagcaagccgtttaacagcacgagaagcactgaggcatcctttcttcaccgaagggtttgggcgaagaagatgatacgtccttgaagcagaccttgtttgtcctctgtctctgaccaaactgtatataaagctgaaatggagctgtttcaatcttgtttgaaacgtcgtgtaactatagttgtatcacaagggaagtcagacggatactttttactaatcctgacttgtttgagttttgcaagccaattcaatgaaagtttgggttgaacagaatgtgttgcttgaaatattaaaactcgcatctatctggttttaaaataaaccagggtccattttttgttcactatctaaaaataggttaggtagtctttactcctttgtttaggagagctttaggaaatttagtagagtaggt

SEQ ID NO: 41701 - DNA, 4164 bp, Zea Mays
atgacccccactgtccattctctcatggtcgacgccgctccctgcttcgccggcgcgggttgcccttgtagctgctgccgtggcacccccgatgctccactgccctccttcaactccggcggtgctccccggcttcatctcgacgaccgcctcgcgcatggcccaagttacccatggcgtccctcctgccgcccggggccctacctttgtcctggccgctggtgccacctcctttctcgcttcacccagtttcgccgtgaccgctgaggtggattttgatgacaaaagcagctggtggtatttgttcaaggactattggttaaatttgaagacaaacttgtcattgacagttgaggaaatatcagcagccaagtctcaaaagagtggagaattacctgatactaatgacgaaattaattcagagagttcatcagggcgtcatctagaaaacaatacatcgaaaaagaggggcaggaaccgatctaaacaagctgccatcgagcagggctctgaaggaaaagagaccactgggaaatctgccaaactaggtctgtcaggcattcgtgatgctcagacttcttcagggaaaaaggttagaaaattatccaggcgttctttgagcagccagcattcaccaaaagattctgaaagtgttgggacatcaacatcctcagctgacgaggtcagctgggcttctaaggagctcataaactttgtagctcatgcgagaaatggtgataaatctgtgatcaatcagtatgacgtccaaccccttttacttgactatatcaaacgcaacaatctgcgcgatcctcgtcggaaaagccagataatttgtgattctttgctccaaagtctcttcgggaaagaccgtgttgggcattttgagatgcttaagcttcttgaatcacattttcccacgagtgaggtttcaccaattgatgctgatgaaaatcatggtggtgtagtagaccctgatcctagtcaggatgctgatggtaacagtgaagcttcagttgttatgagttcagaaaaaagaagaaaatcacgtaagtatgacctgaaacatcagcctaatatcgatgactatgcggcaatagataaccataacattggcttgatgtacttacgtcgcaacctaatggaagaattgattgatgacgttgacacttttgatgagaaagttgttggatcgtttgtgagaataagaattcctggtacagggcaaagacaggacatttatagacttgtacaaattgttggcactggaagatctgcagaaaaatataaatctgggaaaaggactactgatataacgctagtgatactaaacttagacaagcgggaggcagtaactattgacataatctcaaaccaggagttcactgaagaggagtgcaaacgcttgcgtcagagcataaagtatggattcattccaaggctgacagtgggagaggttcaggagaaggcaaaggttctccaaactctgaaagtcaatgattggattgaaagcgaaaagatgcgacttgggcatcttcgtgaccgtgcaagtgatatgggacgtagaaaagagcttagggaatgtgtagagaagctgaaattgctaagcactcctgaggagcgtgctcgtaggctcaatgaagaacctgaaatacatgctgaccctgcaatggatccatattatgaatctccggaagaacaggagcaggagattgaaagaagtagcttcaataagtccagaagttctttcttgaggaaagatggtagtcttgtgtctccaggtaaaggagatggtagaaatgctgcacagcgagatccaaaaactaactgggaatctaatcgaaacacaagggctgaatcgagttctcatatggaatcacccctttcacggaggtccacatattcttctcaaggagaaagtgttggttatacaaataagccagagggcttgaacattgatgcacaaaccgttagactggaaggcaccacgcgcagtgctccacaagggtcacctggtgcctcatctggaagtctagctactaacataggttcaggggcaaaaactgcatctcaatcagccattaacgagtctgagaagatctggctgtacatggatccttctaataaaatccaaggtcctttctcaatcatacagctgcggaaatggaacagcaatgggtacttccctcctagtttgaaaatatggaaagctagtgagaagcaggatgattccattctattgactgatgctttggcagggaagtttgagaaagaccttcctccatgggaaccaccacatgttagtttgtctcaaattaacaaaacccctcttgagcaaagcacaatagctgatgaacaaactccaaaatcagtaattgcaaagtctttctcaagcagtgatcaaagacatgattatagttcaacgaaccttggaacaaccatgatccattctggctcacaaggttattatggaatgcaaaattcccatgcagcatacacaagccagcaatctcttactgggagttggaatgccacgtcaagtcagtttggggttgcaataagtcctttgacacctacccagcctgccatgcaaagcctttcaggacaaaatattgtggctgcagaaaatatgggtcatttaactactggaatggctcctgcaactgcaaatgcagaaatggttaattcagatttgacttcccagaaccaaatgttgtcttctttaccgcaaacggatgacagattagctgatggaattgaatccaaatcaggagaagatgtttcacatggaagagtgaggtcttcggctgaagctatcggaccacaggatgcacagcttggaccagtgcaactaaacgctcagcaacttgaaaacacaagaaaccatatgtcatcaattgatctctccaagtcaatgatgccatcacagatgatgtcagcaccatctgctgcatcagtacagccttcattgacaaccactgctcgcagtgataatcaaagcagtgggtgggctgtacctgcacaaatggcgaacacacctggccagtctcagataactggaaatctaacctggggaaatacacctcagggtgacgcaagcttaggttggggaatggtgggacagagcaatatgaatatgccttgggtagcatcagctcaaggtgcttcaggctacaacatgggtgtagccatgccgacgcagccaaatgcagttccaaacatgggctggttaccaaatccaggaaacaccagcatgaacatgatctgggctgcaactcaaggccaggggactccaaatgcggctcctatgatgggaggtcagatgcaaggagtcccaatggccccttggggtggtgttgcagcaggaagtgcaaattcttatcctgcctggggaaaccaacaagctggaaacatgaaccaaaatgttggctggagtgctcctgtgcagggaaatccaggtcaggcaaataacaacatgaactggaacgcaccaaatggtaatcctaattggaataatcaacagagagagaatgggggcaggcactctggacaccgcggtgcttttagtggtggtgactcaggcggaaggtcatggaagtcacgctctggtggcgatggggggtcaaggggacatagcagattctcccattcaacaaacacagagggatatccatccaggactgatcggcattacgataggcagaattcaggcaacgagaggcgatatgagaatcacaatgagagaaatggtcgacagtttgataggcagccttcggataatgaaaggaaccatgataggcctgatggcagacatggtggcagggatgacgataggcaggctgataggtccgagtcaagagagctgcgttagaactggtttctgtttcttacattcgtttccttgtatgtgcagtagcaaactagcatagtagcttccgtgcatgttttgaactttatgctctgtagcgatctgcatacatgtgcagatcaccgtgtataacatttgtagtttaatgctgtgtgcatcctagttccgaatttgtaatttacttgaataaatcgtcttgtctgatttctgatgtaaagcaggggctacacgcccaggttcttggactagggttgttggagcatcaatggaagacaagggagagccagtggtggttg

SEQ ID NO: 41702 - DNA, 1229 bp, Zea Mays
tacggcggtctccactgtcctgtctcctcccctacctcttgttcccccctctcctctggcggtcggagccggttcctctgacgtactgcaggggcagtagggtcactgcgcgcgggccctgtcgcacgcgggggccacgcggcagtgaccacccccacgtcagaggatctcgttccctggcggtctggcctgtagttctagctcgttccccccgcaagctcgcgacctcgcctagcggccaaaccacgctagagttcgcagttggaagaggggaggaggaagaggacgagatggcgagggatgacgggttcccggtgtgggaagcggcgctgctcgctggcgtggctgccgtcttcgctgcggggctggctggcgtctacatctccatgcctcgctccgactacagcttcctcaagctcccccgcaacctccaggagctccaagtcctcactgtccatctggagggctacagcagtgactacaccatccaggtgctggtgggctactgtgccgtgtacatattcatgcagacgttcatgatcccagggaccattttcatgtccctgcttgccggggccctctttgggcagctcggtggtctagccctggtgatctttgctgccactgccggtgcttcttcctgttatttcctgtccaagctagtagggaaaccactggtcttctcgttgtggccagacaagctcacgttcttccaaaagcaggttgcaaaaagaagagagaagctgctgaattacatgcttttcctgagagtcactccaacactgcccaatactttcatcaatttttcttcacctatagtgggtgtgccataccatactttcttctttgcgacggccattggcctcgtcccagctgcctatgtgactgtcagggctggaattgctttgagcgacctgagatcgttgaatgatctgtatgatccgcagtcgatagcggtgctgttcctgatcgggcttgtttcggtggcgccaacgttgctgggcaagaacgagaagccaaccagcgcatcggacatggcagctaacaccaactgatcactaaagtgatgtctcatgatcacctcatcgtgaatcttgctggcaaaacgggctgggaacatctctctttcggttgctttgttttacattgtttcgctgttgtatcttgcacacgtcaaccagattcaatcaatacagccgattcagtgattcattcatgaacgtttgctg

SEQ ID NO: 41703 - DNA, 1213 bp, Zea Mays
gttcgacaccgtcaacggcggccgcgcgctcacgtcccggcggccacgggccgtgacagactcgagcccgtccgccgccttcgccgcgccgcctccgcctcctccatcgcacgccgactccgctgcctacatccgcgcacgtccgcctccactgcctccatccgctcgggagccgccgccctccgcgctaggcctcgcctccgtctggtctggattcttcgacatctggccatctgggcgctccgcgtcgccgacttctcgcaggcagagaagagctgtgttgatgcggtggtcatggagatggtggcagtctactgcggtggcctctacaccgccaaaccagagcttgctgcccgccgcatcgaggccatcggcttccaagtcgggcaccagctctctgagagatataccatggagcgccctcgatttagtgatcatcttgaagcaatcaagtttatctgcaaagatttttggtcagagctgttcaagaagcagattgacaatctgaaaacaaatcacaggggtacctttgtccttcaagataaccgttttcggtggcttactcgtgtttctctagatccacgtacagagaacacagattcaactgaaaatgattctgcagcattgggtgatactgcagcccaaacgactaccatgcttctgtatttcccatgcgggttgataagaggtgccttgaccaacttaggaatttcgtgttctgtctctgctgacatgtcaaaccttccagcatgttcgtttgtggtgcgcataaagacatgaactgtgaggaatgatacaagtacagtacgaagattcgacagtatctgcttgtggttcaagccgggttgaacattgaagatagcagagtttgggcatgcattagatgtattgtggtactgcagaaatattctgtgtagctgttggtttctgtttccgtttcttccagcagttacctgttttcactacctcaattgtttccccacctcttcgtgaccgtattccagagtttaggttggccattcctgcactctaggtagccgccactggcaccatttgtgagagttaaactatggttgttggttgcattatctctgtggcctgtgatagcacccttaaagcatgattcttgccatgattcgtgtgctagtactcttctaagcatgatttttgctaccatgattaattgattgtgaagtgcaaattgaataattca

SEQ ID NO: 41704 - DNA, 2226 bp, Zea Mays
ctcacccccaccagtcagcgatctcacacagtaacaactctctctctctctctccacctttttcactcccgttgctggctgctttgctcctctgctctccctctcctctctctcctccgctgcctttatctcacttcgccgccactcccagtcccagtcgtccctctctatctccatctctctatctctgcactgcactgctcacagtcacagctatagattctagaagccaacaaaaacagacgggagcggagaatcgtgctccgggaaaacaagagaatccacctcctctcccctcccctccccttcactctccagatctacgccggcggcggctggtgcgtccgtgctgctccgcggaggcggtgctgcgctgctagctggtcgtccgagagagcccggcccccgaccgagcgatgggggcggcgccggtcctcgtcctgctgctgctggtcgccgctgccgcattgccgcggcgggcaagcgcggccaccgacgccggcgacgtttctgctataaatggactttatgttgcacttggatcaccaaagctacctggatggtctgctagtggtggagatccctgtggtgagagttggcagggtgtcacatgtaccggctcaaaattttcaatgctgcaaatttgggtggacagctaggcagcctggggaacttcacttcaataactgaaataaatcttagcaacaacaatatcggtggaagcataccggaagatctacctgtcacactgcagaatatctttctctcagataaccaactaactggaagcattccagtgtcattatcaaaactccatagtctaacagccatgtcactgaatgataaccatctagatggaaaactaccagatacatttgattccctcacagaacttgtaaatcttgatatttcttccaacaacttcagtggtccattaccaccttcattgggaagcttgacatcactgactacattgcacatgcaggataatcaactatctgggacccttgatgtcttgcaggatctctccctcaaagatttaaatgtcgagaataatatgttttctggaccagttcctccgaagctgctcaacataccaaacttcaaaaatgatgggaatccttttaataccagcatagctccctccacctcaccctcttcacctacaggctcaccaacacaaacaccatcgtcctcttcatccccttcaggatctccttcaccatctaatgcagcatcaaactcttctagtggatctactgctcgaaatagcaattctacgtcatccaagaagaagaagccttcaaccctcagaactgttggatatgttcttcttgctattgtgctattcatagttcttgcgctactggtagtattttgcttgtccaagtatcaagaaagacagactagacgtgattattccatggctcaattaggtaggcatcagagggctgaggagccaaaaagcaagcaagcttcggtgcagtctagacatgatgccaaaaaaggtttatctgaagttcctgaaagaaagaaaccccgtgaaataaatttagctgtaccagttgccattgagaagcctcctgaaaagagaaaagagcatgtaattaatttggagcgaacagaatcagagatctttgctgcagcgcctcctccacctccacctccacctcctccacctccacctccgccaccaccaccctcaacaccgccacctccatctccacctccacgattgccatcaccacctcctgctgaaaaagtaactgtaaatcccattgtacgtccagtaaaaagagttaacactccgccaaggactggtccctcgacatctgcaacatccttttccgtggcatcacttcagcaatatacaaatagttttcaagagcaaaatttgataagggagagtagattgggaaaagtttatctggcagaacttcctgaagggaaattactggaagttatgaagattgataatgctaatggaagaataccagtagatgactttctagagttggttgcttgtatatcagatattagacaccctaacattcttgaattagttggatactgtgctgagtatgaacagaggttacttgtgtataaccacttcagtagaaaaacattacttgatgtactacatgaaggggaggatattgataatccattatcctggaatgctcgcctccagattgctcttcatgcagcaaaagccttagagtaagt

SEQ ID NO: 41705 - DNA, 2671 bp, Zea Mays
gccatttgtaaatcgcgctctcccggctcccgcaccccactccccgtttttctccgcaccgccctgctccccgaccccaactgccgtctccttcctcggggaatgcgaccgcgcgccagagcatgctccgcccggagcccgcgctagggttccccgccgccggccccgcccgcgcgcccgagcgccgccgtaagaagcagccgccgacgaggcggaggcgaccggccggtgccacaacggtgggactgggaccacgcggcgcggccgatccagatcccgcgcactcgtccgcgctgctgcctctcaccagcggcggcagcggcagcggctttgcctcgcggggcacggttgcgccagacgaggaagaggggagagacggggcgagctcggctgaatcgcaggaagtggcagaagcagcaaacgattcgttctcctactcactaagagagtgccagaagcagcggcgtctcaagtcagagaggtctgcactggtgcggccaccggcctcgcataagctcaataatgccggaggtattgagcttctagtgctctcgccgaggtgcttgattggtggtaacccgggaggaatgagcaagagctcaacgacatcatcccggagcagatcaggcacaggcacgttcccaagccctgggactccgagctgcaaccggcattgtgcaggcagcatgcagtactccaagggttggagttcagagcgcgtgccactgggcactggtaggaatagaaggtatgggggcagtggggttgtgcttccatttaacaatgggaggaagctgccatcgaaatgggaggatgcagagaagtggatcctaagtccagtttcctgtgatgggttggggaggatgtctgcaccagctccacatcatagacggcccaagtcgaagagtgggccacttggccatccagctggcattccaggggcttatgcggctgtttcaccgcttgttccttgctttgatggtgtgctggcagcagctaatttcgcagcacattcacctttctctgctggggttctcataccagagcacgggcgcattggcgacttcagcagtggaagagacagatgtggtgatgacggtagcagcagatcctactccgctgagaaagagtcctatatattaagatctgcaagcatacatgcatggacagaaacacttatggaggcatctgcttttgctaatatctcagaagaaaccgtacaagatgataaactgcaacgccagacagaagcaacttccatgatttccagtccaatcataaagaaagacatcggcacacagatgagtcctgaggatagtatatcttctccaaaagcgagacattcctgctccagtctgccttcaggacatctgataaaggaagcaaatagtcatatacctaaacctgaaattcgggacgtgcaggttgatgaccaagtaactgtgacccggtggtccaagcgacatgtaacacgaggctctgataagaggtcaacaaatattattgaatggaggaagaagaccactgaaacccgaactccatcttttgatgaaaaagaaagagaaagatgcatgtcacagtaagatattgcctatttctgcccatcagctaacaatcccattttgcaccactgcccagttttgaattggatttacacaaaaagaatatattgctccaattgtcatcttgtagctttcaatactccaagctgtcgttgtcgtgtatcatgtttattaagaaaggtcagctcaatgttgaagtgaagctactatggctgtaatacatgttcaaattcacagaaaggagtgcaaaagggaggaagcaaagatcacagcttgggaaaatctacagaaagcaaaagcagaggcagctatccgtaagctggagatgaaacttgaaaagaaacggtcatcatcaatggacaaaattttaggcaaactccgctctgctcagaagaaagcacaagacatgcgaagtgtagtttcttctagtgaaggtcagtgtagtgtgagggcaaccaagaagacatcttcctctgtcaaaactggcaggcctttcagctgctgctttacctaccgtgcttgctagttgtgatacacagttggtgcctgtggatacagcaatggatataggtctattcgacctcttctcaggcaacagttatggacgcgaagggaagtcagttgggttttgactacaaggcctaattgttaatgagatttgcactgatgaatgagatatcgttatggagcagcagacgaagaaagccacgcgaaatccactcatgtaactgatggagtggactaatgcagtctagtatgcgacgatcaatctctgtacacccggtagaaaaagttcatgagcttcatggcagttagaatcaggattgagctgatattcatcccgcttgatgtgtagctagcattcttgtaactggaattgtgtgtgtaatgcaaatcatgggcgcattagactgtaatgaagaaaaagtcagggctgcgcctttagaatgcagcttgctcactttttgagtttagtactgagactgggcttgtttgttattggttggcagcaattggaactgtgacgacgtatattttccttttttttggaacgcgctaaacttgttttcccgaattttatggcgaccaacaaagtacatattccattg

SEQ ID NO: 41706 - DNA, 2195 bp, Zea Mays
cgccaccgccgcctcccgtttgttctcaagattctctcccgccaccgctccgagtcccaacctccatcgacggggaggcgtcctccatccgggccggttagattcatcgctttgtagctggtcctcgtcgtttccctctgctgtggtgggagaagcgactcgcgcgcgcgatcggccaacaaattaagcacggggcagggccgtacgcaggaggcgagctctagggctctccggggagaaggttgccaggcacgccaggtgaacgccgtactgagtttgcagtccgggacgtagcgcgttctctggtcgggaggtggggaagcggagagcgatggctgcgccgaggaaggggacggcgacgccactgggcgccgtattctcgccagaggagacgaagagggccgtggcgagggtggccgagtccatcgctggccgccgcgccgagctcgggcacctactgggcttcgtcgccgacaacgcggccctcgtctccctcgtcaacaggctcccagtcgaactctcccacgaaatcatggtcccctttggtggtgctgcatttttcccagggcgtttaatacacacaaatgaactcttggtgcttctgggtgaggggtactatgccgagaggtctgctaagcagacgactgatatattgcacaggagggggcaggaattggaagctcaggtcgaagcaatgaaggcaactatcactgatcttgaagctgaggcgaatttttttgagtccactgccaccgaggcttcagagggtcttgttgaaatcagggaagagtatgatgaggatacagagacaaagacaacaagatcagaggcttcaattgctactggggttatgtttgataatgatagggaacatgctcaaatcatggcaaggttagttgaactcgaaagggaagaaaaggaagctggaaatacttgtgaagatgatgatgatgatggcgacgatgatggagatgctggtacaagtgaggatggtgaggaaaataaggaacccggaaatgctttaagtgatggcaatgaggaccacagttctggttctggtgctttattttttggaaatggtggcaatgataggagtaatgggaatatcaagctgaagagtgcactgaagaagcctggaggagatgaaatgctgaaagacatttctcatacaccatcagccgatacatctcatccagtatttggtggccaaacttctataacaaatcctgatgtccgagttcacactaaagctgtttcttttgaagacgacaaatttgtggttagttcgtcaaagtctcctaccttgctagtgggttcaatacagtctgatcctgggctcaagagttcttcagaccccactccatcatgtgaccgaaagataatatcgagtgggcgaaaggccttcacaggatctatcgtcgagcacgacgatgacgatctttcaaccattcaaccttctgcgggcaattcgttggcaaaacctggtacttctgcgtcttcaaggcccatgtcaaaattcaagatgcagaaaggagggcgtgcaccttcaccagtgagactgtttggcggggatacatgggatgttcagttagattcagtttaattagtggctggtggtgcagtatctctttcagaaacctatatatatatgccgccatgccgtttgtaaatctttcggcaacaaaagaaagaaagaaagtgtcgaaagattatattctctggatttaattggaaaaccatgctgcttaagactgatgacaacacaatctacggagactaaatagtgacgagggaacccatgggaaatggagcaaagaaggaaatcgtgagggtgatttggttggttggtccaacgtccaagcatcgcatcatcggttagccagccatcagtgatcggagttggtaaaacccccccaaagaacatgtcggccaataagtggagttaattacagatctagtggtgctagctagcttgcaatgctgttcctacttgtgctgtaacacagtgtcatgacatggtcagtagcagctgacgagcgccgccgcgcagtcaggtggtcgtcggctggtgtctcttcttctactccttccctaggcgccgccgccgccgccgtggagcaccagattgtctcccacacgtctctcaccagcagaaagggaggaaggacctgccctctgcatgtcagctccacctg

SEQ ID NO: 41707 - DNA, 581 bp, Zea Mays
agaccgaatgggcttcgcctggggacggatcgcgggagtggagggggcttcgtacctgggcagggggcctttgggaccgccaggacgccggccgggggctgctgcacaccgctagagatggaggcgaggagcacatggaaccgcatgtgctattttgtgatttggatctgggagagaggaaatggatgtccgcataggagaggcagttttaacgatagagagataggtgacggaacgtctgtatatatatagatgaaggatgtggtgaggcggttgcgcgctcgacgtgcgagacgttgcgcgaggaggcgaggcgaatcgaggtggttacgactgtgtccgtgccacatgcacatacgaaacggacaatggtttggctagacgaagctaaaacagagctcgagctagtgagacatgcagcggtgaggagcgcgcgtggtcggagaagcacgggtcgcgcagcgaagaaaggcgaggtgggttgatggggtagacacgagcagcatgccgtttgcgcggagatatagttcggtaatctcatgaaaaagggcacgagataagaataggtcgacgagataaag

SEQ ID NO: 41708 - DNA, 2389 bp, Zea Mays
gcgtagccgacgacgccgacgacgaggcagccatggccgcccccgccgcccggagaatagttggcgctgaggttcccatacccggctcggacaagctgcggtggatcgacctcaccatcccctcgtcctccgccgctgcgccggcgagcccctccgatcccttcgtctgcgtgcccccgcgtgctgcctcggggtgccacatcatcccttcgggcgattctcagtattacctctcgtggaggattcacgaggaacacccaaatgtgctggaggtcattgaacttagtccctccaaggagttccctagctttggactgcgtcttgccttccaggaggcgctatctccattcgcctttctatgtgaacgagagggtcgcaggcaaggggagcttgtatatatgctatatgtgcttaccgtttctggagttgctcttttgtgccacctacgcagcccattttcctacgtatctggttcagtgctgcatcaggatgatatagctgagtttaatctccaaactcaagctcagagcgcaaaggttacagcggtaacagcgaagccaggatgtattgtgattggtcggcaagatgggtccatctgttcttacagtcttggcaaattagccccaaactcaccaggtttctcgaatgaactacgagatgatgctgggattggacgtttatggactctcatgtcaagaacaaagactgtgggtcctgtgcaggacatagtagcaactgttgtaaatgaaagggacctgttatttgttcttcatttggatggacacttgcgcatatgggataatcacatgaaacttctcaactataatgtccactcaaatgacattgaaggccatccgtccaggctatgggttggtaaggctgatgatgatcaggagttgatatctttggcgattctgcatcaaaacactgtggttcaaggttgtgattatgttgctgtatatggcttcggtttttctgctgcggaaaggttcatgttctcttctgaaccttcaatttctactatacctttgctagaggggaagcttgcggacttgaaaatagccacatataagctttggatacttaaagaatttggctccatgctctatgaaatattacagtatgacattgacaccgaaactgcaaaatgttgtagtgagaaggtttgctgttatgtgctacaagaagatgctatcagtgaacagttgtttcaaagttctgacaatgcattggatgatttggtttggacagctgattcaatgttctcctccttgaaggaacaggcttttactttgatttcatccatgtttctgcggaggctacttcaaccaggagtaaaccactgttctgccctacgtgaaaccttactagagcataaaaggttcctatcagattctgagttccagtcacttacagcaaatgggctacgaaaagagatattatctattatagaacaagagggaagttcacagacagcaagtgctacagcttatcactggaaacaattctctgcacggtacctccacaattggtgctggcacaataagccctatggattgtttcttgatactacaaatgaagtgtttggtttagtaagaaagggttcattttctctattccgttgtttggagggtctggagatgcttatttatggttatgaccatggggtgaacttactcgacgatgtgtctgattttgaactcctcaatgaggtcctcagatgcatgggcaatatacaccatttgctggggagatcttccacagcagcatattatgaatccttaattagttctattatatcatctgatgaaattgtttcacatatagtaaagattctagagactggttttagtcatcagtcatcctcatccctcagtacattactaggaatggatacttatgtagaaagaaggcaggcagctcacaaaagtcaaaggaagttttctgttgagatgttacgatcttttcatacgttgcaatcaagatcagcatcctggtcggcagtattcgatgtgattgagaagtttatgaagtgtttgaacacaaacatgaacgtacaatcgtatggatcaaagagagtttgtaatgtaaattctgtgttactagttcaagctacttcacaggttgccagaacaatgtttgagtgtgcatttgatctgtttctgttccttagctatctggttggtgttggtgggcaggtttctttgttgcaaaatgatgttgccagaataaaactgaagctgttcccaatgattcaagacatattgggacaatggattgttctccattttgtaggaacctcaccaacctcaccaccaaccattgacgattttagctatcaactttcttctcttcagcttgatctggcgcaattgtgtgaagcctttcc

SEQ ID NO: 41709 - DNA, 2856 bp, Zea Mays
cagacatgccctttcctttcgtctgttttcctacggtcgtccattttgttctcccgttccgcatagcgtacgctcgctccctctctatctctctctctcggttctcccgttcccccgcgcggcgatctctctcgtggcgaccagcgggcgaccgccgcacgcccaggtcgtcattggctcctcagccaggtgctgttcgggcccctaaactgggcgccggcgacgagcacgcgccaggactgtaatctgatctcgtggtggtatggttcgtcctaggattctcgtggcttgttcatgctccgagactccgagttgtgctttacctcgaattgctgcagtatccgtagggggcatgattgatggtggaacatcctcaccagtgtcagaaatgtcaatgtagctctaacgttcatttctcagtttgctgaagtaaacgatttcgggatgggtttgcctcaaattcctgtggttaaggaggaagagcctactgaagtgagtacacctgccggttctagtttcagtgtcgatggcccctgcgattcgggtaaacttctcgagggaagctcaagtggaagttggtttcagaacccatccatcagcgacttcaagagaaaatttgcaccaggtgctgcttcgaatggattaaatagtcagttcagaactagacatgccgttgatgatcctgcgggctaccaaagcctgaatcctaaaccaagagatccaaattatagatcatgcactaaaatcaaatctactctacatatacctgcaatgagggttgttgggtttgattcaggaactgatggttctaccgggggccctgatataatggtatctcacaaaatgcattcatctttagtcattggtaattgtgattcatcagttgtacatcacgaagttcaggcaaggaaaagggtgttgtcaccattaactaatgcgcttcctgctggacagttctatgggaatgcgctgaatattggttccggcgatgaaaaagttcagaaccctcgttgtgttagacagctctcttattctggcttccatgacagtaaaaaagctaacactggagctcttgattcctttcagccatctactaggtcagaattgagatactccgattggagtacagggcaggggttctgtaagtttagttctaacacattcactgatggtcctttgcttgagggtagggaattattttcatgctcagatcaacctggagttgaagggattatgaaccttgcaaaggtgcctgcaagattgtcacattctcctccacccactctttctccactccgtccaaaatggatgcatagaatgaaggctgcaagagctcagagggatttgacgggacgaattgaaaatgacatcattgatttgaaggaaatgggaaggtcaaattttgacgattattcagaatatgtcggtacgataaggatgggtgatatactagaagaaaccagtattttgcatgatggatttgatacaatgatccctaagagaaattttcataggagataccggtgcttgggtccagaatctgcccctgtgtctacacacattgaatgtattaatagctcgaacctcctccctgtaaggaggtcattagttggctcctttgaggaatctctcttatctggtcgctattcatgtggaaaagacaatcagagtattgatggttttctggctattcttaatgtgactggcggtagtttttctcccccaactcagaagtttccgtttacagtgagcagcattgatgaagatagctccctgttgtactactcgtcgattgatcttgcggggaggttgcctacaaacaataccaaaggcccaaaacttaaaagaagcctcagtagcagtgattcacggtcaacaaatagccgattacgcattcccgtgaaaggccgcatacaactgtaacccagagaagacaccacttcacacctttttctgtacctatgatttgagtgacatgcctgctggaaccaagactttcatgcggcaaaagatcactctatcctctgcttctccctctcatccgaccagagaagaaagcaaggccagtgatgtaaaggtcgagtcagtccagtgtggaagtgaacttagagagttcggggctctattttctgaatgttctgacaatgggcatgagttggaaaagggacgttctgcagatatggaatgtttctccatggaatgtgacgttagagaaccaaatgaaaatggtacttcggggaattcagaaaatgatgctaatgctgaggggtgctgctgtcaaataaactcatgtgaaggtggaaagatatatttcaacagatctcccaaggtcaatgatattccagctggaggggttctgcggtatgctttgcacttacgttttctgagccccttctccaagaagtcatcaaagtcaaggtatcattgcaaattggatatgtcatcacaaccacacagtcgcagtaggactgaggaagagagaagattttatctttacaatgatattagagttgtctttcctcagaggcactcagactctgacgaaggcgagctgcgggttgagcatgacttcccagcaaatcccaagtattttgacataagcaactaagaactccttgcacactcgtgaagctgcagataaaatttgtacataccatttcgtcactaatcaatctttactgcttattaccatcgatgtacagactaaccttgcaatgaaattatttacttcatgtatctatatattttttatgtataaggtagtgcttgtggcttccactagctggtagtagaggtttggttatatcggcttgtgagaccgtcgaagctgattgatcgcgggctgtttgggtacca

SEQ ID NO: 41710 - DNA, 2144 bp, Zea Mays
cgaagtttgtcactgtcccgttcgtcgtgtcccaaagtccaaaacccaacccacaatggccgccacctcgccggccccggcgccgccgcgcatcctcctcgccggggatgcccacggccgactccaccagctcttcaagcgcgtcaaatcggtgaaccagtcaacggggccgttccacgcgctgctctgcgtggggcagtttttctcccccgagggtgctgcagagggctcaccggaggacgtcaccgactacctcgaggggcgcgcttccgtgcccatcccgacctacttcaccggcgactacggcccagccgcgccgcgattgctatcgaaggccgccgctggtgctcgcgggttcgcacccggtggcatcgagatatgccccaacgtcttctggcttaggggaagcaaccgcttcaccctccacggtttgtcggtggtttatttgtcagggaggaaagggttaggagggcctggctgttacagccaggatgatgtggatgccctacgggctcttgcagaagagccagggattgacgatctgttcttgactaatgaatggccgactggagtggtcagtgggtctgacacttccaatgtgcctaatcaggttttggatcccaatgggtatgatcctattgttgctgaattggttgctgagattaaaccaagatatcacattgctggcacaaaaggtgtcttttactcaagggaaccatatgtcaatgattctgctgctcatgttacccgctttattggacttgctaatgttggaaacaaagagaagcagcatctgtcatgtccagtgctgatatcaatgccaagcctccaaacgccactttgtcaccatatgttggttcagcaaaatcagttcctatcgaagaagctccaaaacgtgcagcggagaacatagattcacaatattggcgttatgatgtcaagcggcaaaggcatggggaagctggtgggggtggattgtgtttcaaatttgtatcctcaggatcctgtcaaagagggagtagatgcagttataggcatgatgaagaggcagtggagcattaccagagaaatgtctgttttgattttctaaacaaaggaaaatgtgagaggggcccagaatgcaagtttgttcacagtctttctggggagactgctctaagggatgcaagacctcctagtgaaagaagacgagtggagagcagttgctggttctgcttgtcgagtccagatgtcgagtcacatcttgtcattagcatcggtgaaggttactactgcacacttgcaaaggggccacttgttccaaatcacgttctaatgattcccgtggaacactgccccagtacattgatgatgcctccggaagcagaggcagaacttgggagatataagattgctctgagtaagtactttgagaagcaaggaaaaactgcagtctactttgagtgggtttcaccacgctctcaccatgcaaacctgcaggctgttcctgtaccattgtctaaagcagacgctgttaacaagatatttcatctagcagccaaaaaactgggatttgaattctctatggtgaatccagatggtgcaaaaactgctagagaatcattgatgtctcaatgcgaaagcaaatcagggctgttttatgttgagctcccggaaggtagaattctcttgcacatggtcgacagtaacgagaagttccctgttcagtttggacgcgaggtgttagcgggactgctaagcatggcggatcgtgcagattggaggaactgcaagatttcaaaggaggaagagattaaactggtggacgatttcaaacaaggtttccgcgaatttgaccctgcagagtgaaaacaatgctctgcgcctgtgtttttgttttgcaatttgtagtctatttttgaggtctcatttgaaatggacatatatgaagcacaagaatgtagtaacgttttccaatgccgcaatttttgttttagggctagttttggaaccacatttttcaagggattttcattctcctaagcaaaattagttcattttcttttgtgaaaataggttggaaaaatggtgttttcaaactagcccttagataaacgtatgtctgatctcggcgtgagtgggcacgcctagggatgaaaacggac

SEQ ID NO: 41711 - DNA, 327 bp, Zea Mays
tcgtccaaagaagtcggccatggtggacaggctcgtccagagaagtcgcacggcgcacggtgtaccacgaaatctgaggataaggtggctgagatactgaataagtctcagacggtagccaccagcaggcaccaagatccctggtgcagactgatttcacaatattcatggaaaacgatgtgcccacaaaagaagcaagaggaacaaatcgaaggatccatttctccaaccgagtagaacaattcaacacattcagattagggtcatggatatgttctcagtcaagagtctcaataactacctttggaactgcatagactatctcga

SEQ ID NO: 41712 - DNA, 1950 bp, Zea Mays
ttcatgtaaaaataggtaaagtatcaaattacaaatgcaccttcggctttgatagaaggtaaaagtacaagcgtgacgcacagacaggtacaagtcagcgtgaacagtacgggggtattgttcatctatttataggcataggacgcagcctatgagaaattacaattatgccctttacatttactattggcttatagaaaaatctatgaggactgaacaaccttttcccttttaagtcggttcccttttctgcggtttagccgaagctccctttcgcacagcttcggattgatggagccttcgtcacaattaagctcctcatcgtgtatgcttttatcataaatccgaagatacctgtccataaaccatacttggaagacattgttaaattaagtttttaaggaccttcggaggacgaaggcccccaacattagtggactcctcaacggggactaggccttcgagggctgaacctcagtaaaacaaatcacccgtgtcccttgtgtttattgcttgtgatttgtttgttctctccctttctaagttctcttgcgctactctttgctaatattattttgtgttgcttcaagttaaattctcatttagagaagcaactccttgcaagaaagaacttgtgtttatcctcttcttgtctaaagccctcttgcattattctccacttctagtagtattgctattgattaaattccgcactctttgaaaacaatactcgttgcaagcaaaggatttagttttatactctgataattgtgaatcttgttctaaccactaatcaagggatctagtttggatttagaattataattttcaggtttcgcctatccaccccccctctaggcgactttcaattccggacagtcgacttagaatggttgtagatgaacttatgcacctgtgaaatgatcaactgggcaaattggttagtccacaaggtttatgatggtcgtcaaacaccaaaattgattataggaaatattgagactatttccctttcaatctccccctttttggtgattgatgccaacacaaaccaaagcaaatataaagtgtagaaatgtaactagcttgcaattgagatgaatgtgcataggttacttggaattaaaccaataaaagattttcaacatatgaataagagtgaatggtttggctttcttttatttaatattttggaccacatttgcaccactagttttgtttttgcaaatcttttggatatctattcaaaaactttttgcaaatagccgtaggtatataaatatgattgtaagaagaatttttaggatttgaaattcctcctcctgtttcaaatgcttttcttttgactataagaaagcttcccctcaagaaattctccccttagctttcaagagggttttgaaacagatattagtgaaattataccaattgaaattctttcctactaaatgcgaagttttgaaaattccaatttgaaattttactttcacatatcaattgaaaaatacaccaattgaaatttaccaattaaaaatatatttcgaaaattttgaaatggtggtgcggtccttttgctttgggcttaatattttctccccctttggcattaatcgccaaaaaacggagaacatgagatccctttagtattttctcccctttaaggcctaacattttctcccaaatggtaaagtaaatatgagtgaagagtcataccattgagagtttgtggaataccggcgaagggtaaatgatactgtcggtaccctgaaactagggtaccccttaccactatataaagacgcagtacccacgtggctatatttagtcgcgtggtaaaagagttgtatgtgggaccaggccatgactcgccctagcctcgggcgactactctgggccagcaacagcacctgaccccaccacatgggtaggtccagtgccgccacgtgtcca

SEQ ID NO: 41713 - DNA, 1024 bp, Zea Mays
tgcaaaatgtaactggatgtcgaaacaaaaaccagcagagtactcctatataaaacgccgtactggccacatcgtcgatctcccccaacatgttgttcaggctccacacttgacagggcacagggcagggcgccaggagacggggagaatctttcgccctgaaaaaagagcaaagtgtcagccctttccccccggttcctagttttggtactactacaggctcccgctgcatcatccccaacgaaccagcagagctcgcaagcaacaaaagagaaggacgaagcaggcgcagccgccacacggacacgcagcagagcatcgccgcagcggtccagaggcatgggggccgccgccgccgcaaagcacgccttgcaggttgtcgcggcgggaggagatgctgggcaatcgagcttcagcgccaactcaccccccaccaccggcgccgggttcgtcgccctcgacgtcggtgagctctcgtctctggccggcgacgccggccctccgggcacgcccatcgcgccgccccggacacccagggtggtgaggtcgctgtcgaggaagggcgacaggaagccggccgacgccgacgccaacgccaccgccggtggcggtagagagcggccgcagctgttcgtacacgtggctgccggcgacctcggggacgcgcccggcagcgcccggctggtcgtccacacgccgctggccggcacgcccggaagcaagtcccggcggttcggaaggcgggcggcgccgtggctcgatccccgcagggtggtcttcctcttcgccacgctccccaaggacacgttcgtttcgttgcggcagaacgatggcgatggcgatggccatgctcgcagtggcagggttgcagagcgcaggacggactgcccgcgtcgcaggttttgtcggccccagcctccgtcgggttgccgttgcagagctagctcgggggctctggcctctcggccgtcgtcgtcgccttcgcaacagcgacagcagtgataaataaggacggagaccgacg

SEQ ID NO: 41714 - DNA, 2217 bp, Zea Mays
cgttgtcttctctagcgacggcgaggcttgagcgctcacgtcccggcgttcccgtgccggtggccaagccagcggccgacgagatggactacctcaggacggtggttccgtcacaactcttggcagagcgcggctccaatcttgtcgtcatcaacccaggatcgggaaatgtgcgaatggggtttgctagtcaggatgtgccattcaatataccacattgcattgcccgacacatcaatccacaagagggcgaagaaccaagattctctgtgcgcgatcagaatgcagagcgggagagtgcatatgatattattgcagcactgatgaaaatcccatttttggacgatgaagaaatgccttcaccgaaccaaccccttcctccaaagatgggacgtgttgatggcttctcttcgcagcaaaacagagacgataataaattcacttggacagatgtgtcagagagaattattaagccatccacaccattcgataggtcagtatacaaggatgctgaggaagatactctgccaagcacatctgatgatgataatggacaggactttaaagagaataagtataaagaaatgatatttggagaagatgctctgaaaatccctccttcagagtcatactgtctgagtcgcccaattaggagaggccattttaatgtgtcccataattattcagtgcatcaggttttagaagatttacgcactatttggaactggatactgacagaaaagttgcatatcaacccaagagacagaggtctatattctgcaattcttgttcttggggagacatttgacaaccgagaaataaaagagatgctgtctattgtccttcatgatttggggttcagcactgcagttgtacatcaggaagctctatctgcagcgtttggaaatggtttatctacaacttgtgttgtcaacattggtgctcaagttacacaagtagtttgtgttgaggatggagtagctttgccccacacagctctggcgcttccatatggtggagatgacatctccagatgcttgctttgggttcaacgtcgccatggcacgtggccaaacttccaaactgatccaatgagcaatcctatagatatgctaatgctcaacaaaatcaaagagtcatatagccaaataaagactgggagcattgatgcagctgtccttgttcattcatatgataatgaaaggtctggtggacatcagaagacaagactatcagcaattaatgttcctcctatgggtcttctttacccaagggttcttgttccagaagagtaccctccacctcctcgatcttggttccaagactatgatgacatgctggaggatacctggcaaacaagtgatggtctttaccctagtgggaatggtgggtttggcatgtgggacagttatccgatgtttcccactagattaaagaaatttgataacattggcctcgtagaggccattattagtagtgtactttcaacaggacgtgttgaccttcaaaagaagctgtttggtagcattcagttggttggtggtgcagcttctacagctggccttgcacaagtgctggagcaaagggttcgcactaaaatttcagcaaaccaatctattgagaaagttgaggtgttgcaatctaggacttatccattatttgttccatggaaaggtggagtgattttgggcgtccttgatattggtaaggatgcgtggattcatagagaagattggattaaaaatggtgtccacatcgggagtggcagaaaatataaggattcctattttcttcaggcgcaagtaatgtgctactacaacgtataacagtatcttatttccgagctacacacgaagacttgcacttatacaggttgttcgaccgtccaaaccatcctagaatatgattggtggactgcgattaaattgcgtacatgatgcatcagttctatgcatgctcgctgctgtctgttcggaggtcatcaactcgggacctggactaagggccttgtcgttcgctcaacccctatgaaaaagtttggctttctaaagatgtagtagaagtactcatttattccctgccaattgaacatttcaaatcttcgtatggtgttaatgaaaaatctgatgtttggattcgtatttatttccaatgataatgtatatgtgcattctcgactgttttggaaagaatgaaaaatcctcgtccgtttgcgta

SEQ ID NO: 41715 - DNA, 4123 bp, Zea Mays
tgtccacccacgccactccccgaccttccgctccacgcgacaacctccctctcggttctccctctgccgccgtccccctggccctgcttggcggcgcccttcttccctaggccggcgagcaggccctctttctccccctgccgaagctctcacgactccccctccatggcaggcgtcacgcccttccctgttggccgtggacgccgacgccgtcccccatccatggcactttccccatgcgccaccccctccgacggcgactgtgctaaccgtgcccgtcgtcctccatacacggtcgaccatctctcctcaagccgtcacagccatagcgagtcggggctgggctaggtcgccagagagccgtgcctctgctcccacctcaatgccggcgagctcgcccttagccgacgtgctatggccagctcccttcgacggcccagctacagctcgcctgcgccaagtcccccgcggcgaacaccaccatttcctgcagcccatagtcagcgctcctcgctgttctccgcaatgccctcaaactgttcgacataatgtccaagagaaacgccatgtcaatgacagcgtcgccgaaccccactcttgtccaagagaaacgatatgtaaagtattgaaccatttggagcagatgattgttgttcttttcttgagtaccaagcaccataaaagagaaggtggggctgagggcattgtcacatatcatttaaatgtactgtagccaactgagtaagcaaacgaagatgcctttgatcagctttgcacagcaatggaactccaccgttcttgcgattggaaaatgttgaaggacatatacaggaagctgggaaaacttgctgatgagcagtggcttcttatcctaaaaattacgagcccgtagagtaagaaccaactgcggatctgagggctggcaatgttcaaggcttccaggatcatcaagttggccttccgatgtagtacatgtactgacaggcgtccacattcgacgatggtgcacggttctgccgtcgcgctccctccgcctccccatgccccgctcccgtgatgcccgcgcgtgccctcgcctccgccgccctcgcgacgctgcgccctcccccgcgatgcccgcgccctccgtccgccgcgagatccccgcccttccctcaaaccctgtcctgcacctcgtgcctccgcctccactcgcgatgctcctgcccgccccaccgccgtgacaaccgccttcgcatccgccgccagatccccgcccttcccccaaaccctgcccccatcgtctctgcagatccggcgttcgctcgggtctccttgcctcgccggggtcccaccgcgatggtcgaggagcatggtgggcgcggggaggcgggaacgagcggcggaggaggtgaagctcgacatccgcaacatgctcatggcgctcgaatccctcaaggaggagtccctcaagaagaagaagggcgatgccgcgcagcagcaagagccaccacagaaggagatgtcgagtacgacgacgatgactcgatgcgtcccaccgccgagcccgccaaggaggaggacatcgagggagctgtgtgcagcgccccctgtcgtcgcgccgtcaggaatactaccccctccccctcgcgcgacatggtggatgcacgggccagtaccggtggtgaggatcccacggccgtggacgtcgtcgtgacacaactagctctgcaccggctgcgtccacctctagactttcttgcatcgcctatcgccctgctggaagattgtaaatacagtgaacatcatcgatgccaaaatcagagatcggatgttaaggggaactgctgtcggggcctaggttctcggactggtggtcgtgcgcggggctgcggtccgccttcgacctgcccatcgcggcggcgtagctgcagatcaaagcaaagcaggggcgagcaaagcagggccgcccagatcgagacgtcgtcgaggccgagcagagctccacacctccacctaggccacccgcttgccagagtggaggacgagctcctcctgtgccttcgccagctatgtgctccgtgctccgccgcctgtctccctaggccacagggaggttgtgtgggggttgcatctgacaacgccaaggcaccgtcgagaccgagcagagctctgtgccttcaccaggtcgcccacccgtccaagtggaggacgagctcctcctcaacagccagtaggccgagctcctccccgcggacccaccctcagccaagatccatagcccgctccgagccagcgcgccacgagctccaccgaggcaccgatcctatctccgccccggggaggggcctgaacctgaagcacgggaaggcaaccagccctctgggtccaatcagaaattggcagggaattccaacacagatttgtaagtattcaaacaggtttgctcgctctttctcttcccttcctgcttgataattcctgaattctgttaggccttgtgctattttatttttgttcaaatatgcatggctttcatttaatagaatgtcttttgaattactgcctcaggacaagtccagttgagtttgttgtcccctgtggttgctatatggaatcactaatatgacattaccattcccttttgttccgtaatcacatcttgtgagttggatattgattactatcttcatgtgatgacagctggggatgatcttatgtctgatagatatcacttgaggcccttaacaagatgataactcacagttctgcacctggaaataatgtgtttgtgggatttggagtgcggccagcgggcgggcgggtgcagcatgcaaggagcggatgggtccaggatgcgtggagcacgattgagcatcgggtcggtgcacgttaaaacataatgcaaatgagctgcacctgcactactgtgtagtgactacaaactcgtgaatcaacaaaatctaccacttgaaggctgtgatagcgagcagggggtgagggagcgaacagagtggttgtcccctcattcgagatgtaaagtcggccctctccttacctcaatctctgataatcaatgtagttgctgctgtcagttctggaaacgtgccgttgaatgatgttcagttgctgtgggttaacctaattatggatactttgggtgcccttgcattggcgacagaaccacctacaaaccatcttatggagagacccccagtagggagaagggagccattgattataaatatcatgtggagaaacttaattatcatggctttgtttcaagtttcatttctcctcactctcaacttcaagggaataagcctcctgcagttgaaaaatgatgatccagcacatgcagataaagtgaaaaataccttcatattcaacacatttgttttctgccaggtgttcaacgaattcaattcgtgtaaaccagatgagctgaatgtattcaagggcatttcagagaaccatctgtttattggcatcatagctataacagttgtactccaggatttggacccagccaagtggccaagtgtatggaagaatcgtgtcgtggcacagacgaccagctgcttgactctccctcttctgtctgatcacatttgtacgcaagatatagatagtactactatacagtggagtcttcttgcagtttgtctattttacacaactgacatagtcttcaggtatctcattgtctgttcttatttagttatattaatgatgtttactattaattttgaccatcacaacttcgacttgtccagctctgcctctatttgtcggttcagctctgcttctataatttttttggtccactgtacaatgggctcctttattacctccttgagaatccttttcagtttggtccactgtctcatcatccatcgaatcacggccgaggcacacaatctaaaaggcaaaagaattatagaggcagagctggacatagtcttcagttgaatttaaggttcctcttcccttgtttggaagaggttatgatcattgtacgctcccggctcaatgttgaacactcttgaagtacactgtgaagttgcagaggatggtcatcagaatctcaaagatcaagaattgccataaaggcacacaccttaaacctcgctcacccttcgaa

SEQ ID NO: 41716 - DNA, 2249 bp, Zea Mays
cgaactcacgcaacgcaagctgagcaaccgctgccggccgcgcacggccgcccacccaccagtccaccactaaagcctcacaccgccacagcagctgccgcggccgagccgacgacgaggatgagcggggccgcgctgtgcgcggcgctgacggagctggggttcgacggggaggacccgctggacgcggatgcgctggagtggccgttccagtatgaggaggcgcgaccgctgcttgcctggatctgctcctgcctccgcccctctaacgtcctctccccgtcccacctggcccagtatgaacaactcgtggaagagggaagactgttagagggtgaagatttggactctgcttttgatagtatttcagctttttcaagcaagaaagacaatcaagaggctgtgtttggatcggaagaaaccattcttgatatccgtgaagcaaaactagcatatagagccgaagtttttgagttacaaaagcagcttgtgcggcagcaagcacaatttgatttgcttgcaggccaggcttcaactcttattcaagatgaattcagttcttggaagaatcactgctactacccaggaactagcccattatcattcaggggatgaggaaagtatatatttggcatattcagacttccactcctatgttgttggtgacttggcttgtacgaaagagctaaataggtggttctcaaagcaatttgagaaggggccatttcgacttgttgctgaggaggggaaatccaaatgttcctgggttagtcttgatgacatcactaattgcttgataagaggagattctgaaaaatcgcatcatcaccaacgtgtcgctgagttgcaacgacttcggtccatatttgcaacaagtgaaagacaatggattgaagcgcaggttgagaatgctaaacagcaggctatactctctatattgaaagcacaagtgtcatccgacgaggctcatatacatagggatatccattctcttaggagaaaaggttctgagcttgctggagagctctcgacactttctcaaaaggtgcaagctttggtatctgagacaataccatgcctgtgttcagaacttgctcaacttcaaggcacatatatcttgcaaggggattatgatttaaaggtcatgcgccaggagtactacattaacaggcaaaaaacgttcatcaatcacttggttaatcagcttgccagacaccagtttctgaagattgcttgccaacttgaaaggaagaatatagctagtgcgtactcattgcttagagtaatagaatctgagttacaaagctacctctcagcagtcaatacccgcttgggtcattataattcattgattcaagctgcatctgaagtacgagaacaaggagctattgatgatcgtgacactttcctccatgcagtgcgagatctcctatgtattcactcaaatgtccaagcaacagtgccaacatacatgtcagcacatgcattggttcagcagatatcagcacttcaatctgacttgctttctcttcagtctgagctggagaacacccttccagctgaccggaaaagatgtatcaatgaattatgtactctgattcaaacagtggaacagcttctatttgcgtcgtcaactactgcagaaccaatattgacgccttggccattgatgcgggcacttgatgatatggaaaatgccaacgctcaagtcgaagtttctgtggaagaagtaaccaaggctcgcacccagaagataaagatctttgaaaatcgtgcccatgaggtggggagggagaggcaaatattcgttgatttcttctgcaaccctgaacgcctcaagaatcaagtcagagagctgacctcccgtgtgaaagctctccaggactaacctgtttctgtaggctggtctcacaggtcgtgatgctttttttttctatgtaaagtttgacttcactccagcgtcaggttggggctgctgtgcagggacggtatggaacaatatacccatcatgtagctcgggggggttcaggctgtaggtccttgtgccacccggaataggatggcattgttgtgatattatttgtagcgatatgtatgttgtaaagtatctcagaaatcacgagccctttctttcgtgtatggttttgcttttgagtaggttgtggtggtacagttgttagcgtccaaaggcacaatcggtactgtagtttggataaatgggatcgatttcctcttcactcgcctctca

SEQ ID NO: 41717 - DNA, 4625 bp, Zea Mays
cacgggggttgccgctttggggctcggcacctacggcgcgcacatgttccgccccaagaaccccgcgtacaaagaggtttggcacacggcgtccctgtaccatctcgtccacaccgcggcgctgctcggggcgcccatcaccaaagcgcccccaacgttttcggagggctcctcactgctggaattgtgctcttctctggaacgtgctacaccgtggcttatcttgaagacaggaagttttcttcaccggcaccattggggggctttgcgtttattgctgcttgggccagcctcctcttctgattaaattgtgcttttccaagaaaacaaaaaaagtcataaacctctctatatggtgttttatcaggttgtgaaaaatatacttgtaaagtgtatacagtggacagtatgcgcctctgtttaataattcaatctgtgattcctatgtttctattctatgatatgcttgctgctcatgatatgttttcagttggacatgccagtgaaattgcgcctctggttaataattcaagctgtatgatgtttatgtaacggccgaggttcaaggcagaccctttgcttgcctaaaagttaatggccacatgttcgctacttgatgcacaaatatgagaatctctctttgctttgaatgaacaatgcgatggtggaacaacacaatataaaactacactcgataaggtcggcaaagttaaagatggttcctttctttatgatgcccccttgacaaggttcaagggttgcaacttctctgttcacttttaggccctggctcaagcgtgaagcaggtggaattcaagaagaatgttttcagcacaaaaccaggacatgcttttgttccactttcggagatgcttcaccagaacaacaccatcaaagcagttgttttttctgaatgtagaattggatcaactggagccacgttgcttgcttcagctttggcaaacaacagaagtgtggaggatttccaaatatgggaggactccataggatccaagggggcagaagaactctccaagatgattgaggtgaactttatgctgaagaagttgatcatccttgacaacagctccattacagtggctccacttatctctgctgtactcgcacgcaaccgtagagtggaggttcacatatggggacacggttgtggtacaaaaggtggcacgaacagctgtaaaattgttgaattcctgcctgagactgggagcatgaagatctacagcagcattagctcaacagggctgcaacgggttgcttgtgctctgccatggaataccacagtgacaacactggacatgtcaagtgtcccactaaagtccaaatggaccaaagagcttagaggagtccttgaacggaacaggagcctgaaaactgtgaagctcagcaagtgttcccttggggacaaagcagtggtgtatatagctgcagggctttttaagaacagctatttagagaacttgactttggatggaaatagatttggtggagtaggggtggagcatttgctatgccctcttagcaccttttctccacttcagagacaagccaataccacattgaaggttttgagttttggaggagagcgagcgaatataagcaagtttggtgtacctgctatcttgcagatgttggagacaaaccagagcctaattcagctggcaatatgcaatgatgcaagtttgaagccaaatgatgttgtcaaaatctttactagtttagagaggaatgccactcttcgtagcttgtctttgagaggctgtaagggagttgagggggaggcaatcctgcagaccattatgagcactttagaagtcaacccttggattgaagaaattgacctccacggaacacctttgcatgttgctggtaaaacggaccaaatttatgagaagctctgtcaaaatgagagtcttgttctgccaaacgattttcttgatttgccactaagtgctcctacttgctgccgggtttttctatgtggtcaggaatcagcaggtaaaagcacgttacataactccataaatcagagcatgaacccattgaagtcgcctcacataaatataacaagtactttgatgaatccggttttgcaaatggagtacaccaatgagaataaaagtagtgttttctttgatggcaacacaaaaatgacaatgtacaatcttgatggacaagaggagggttttccctcacatgattttatgtttctggtgcatggtggtccatgctttttcatgattgtatctagtttggttctgaagcctgctaataggtatcccaaaagcatagagcagattgaactggagctaatatattggcttaagtttttggtttcaaattctaagagagtctcacaattatttcttcccagtgtaactatagttctcacccattatgacaaggtagctcatctgccagaagggctacagccaattgccacacttgtacaaaggctcagagaagaattccattcatatgcagaaatttaccccactgtttttgccgtggatgcaagatcattggtttcagtaagtagactcacccatcacttgaggatgacaattaagacaatcctccagcaagtacctcaagtttatgaagtatgcaatgatttggttagagttttgcatgactggaggttgaagaataataaagctgtaatcaaatggtctgagttccgtgagatatgtcagctcaacattccagagctaagattgagatcaaggcgtgataatgtagagaaagtggacacaagaagacgtacggttgcaaaatcactgcataacttgggtgaaatcatattttttgaggatcttggagtactgatcttggattgcgactggttctgtcgatatgtccttaaccaactggctacactgaaatcaatcaagacagaaagaagtggttttatccgcaaacaagagcttgagaagattctacaagagaagctgtgcaaccaaattcaagggtcaaactggagagccggtgcatctttccagggcaatgatgtcataaatttgctgttgaagcttgaattgtgttatgaacaggaacctggaaacccagacacattacttctagtgccatcaattcttgaggaaagcaaagaaggtgctcagcagtggcacttggccatgccagagtgcagatatgttggaaggtgtcttaaatgcacagatatacatatgtttttgacaggcgatttctttccaaggcttcaggttcgtttgcagaacaagatcatgtgcatgggacaacaacagggtgcactctacatcttggagaaaaatcttatttatacagtggtcaatagtatccatgtcagagtggtgctgggaagtacattagagtcatccgtcgatgtgcttgcatgctccagcaaaagtgttactgacatggtgaggatattccacaagttaataatcccaaccatactaaacctgtcttcaagtttgatgttcgaggaaagcattatcaggccagactgtgtaaaatatctcataccgcataggttcctccaaacacagcagctgcctctgaagagaatgaagcaaattcttttgtcattgcctgcagaaagcatgtatgattacgagcatacatggagtgccattgaaagcaataaaaggatcatcttacaatcaggatcagatcatgccagagaattgctatcagatgatgatttccatgaggttcttcaccgtagatactatgatctacagcacctcgcaactgaacttgctgtcaaccctgacaatcagcagcaacatgaaatcatccccgaaacagatgtggttgatccttccatattaggcattgcaaaaggtgttgagatggttctacaaagattgaagagagtggaacaaggaataagggacctcaaggaggaaatcgcaagcttgaggtactatgagtatcaccttttgactgaactccacaggaaaatggactacatgatgaattacaacacccagttggaggagaggaaagtgccacagatgttttatcttgttagcctggacaaccggtccaaacagctggtcacaagaatactgcctgggatgcggtccttacgggtgcatatgctatgtgaattccgtagagagatgcatgtagtggaagatcagctcggctgtgacctgattcaagtggacaaccagacggtgaaatccttgctaccttacatgagtaagttcatgaagctgctgacctttgctctgaagatcggcgcgcatttcatcgttgggatgggagagatgatacctgacctgagcagggaggtggtgcgcctgctggactcctcggccttgtacggcacaactgcatctgccatgtccgtgggggctctgggcgcggcagcactgtatggcaagtcaaggaatggtagcacgagcgacatgggagaggatatgacagcagccaggcaatggcttgtggatttcttgaaagggcaaggggttctgacggggatggacatagcacagagatttggcctgtggcgtgttcgatacagagatgacggccacattgcatggatctgcaggaaacacatcgcagcaagggaagaggaaatcttcgagctgccactttgagcatccagaggc

SEQ ID NO: 41718 - DNA, 3718 bp, Zea Mays
caggattcgtctccgcgctcttttttcccttttcccggttccctccactggccgtctcccccaacctcaaaattcgaaagctggggcgccctgcggccgcacaggatgctcctgtcaccgcacggacggctaggatctcaccgagacgcctcggtcgccgtgcccgcgcccaaaccggttaggaaggaaataaaatggaagacgtcctcgtctccatcgccggttgtgtctcctcctatccatttctccagtcgtttctctcccctcgcgctgcccatggccatcccggaggacctagaggggacctcgggcgatggcggggtgacgaatcgcgggagtagagggcggcgaaaaggcgcggcgaaggggcgcgggaggggcaggccgcggagcgccgacagatcctttccgccgccggcgatggctggggtggcggtcggggacagggtgctcagggagaggaggcacacgaccaacgttttctgcgagcgcgacacggatgttgacgatgaggatgatgttgagacagttaggtccaaggactcaaggagtggcgatgttttacagactgcaaaaaagaggaagaagggaggtgcagggaaggtttctgtcacaaaaaggtcgaaaagagagggtgaagaacaaaagaaggcatcaccctccaaggataaagattgtgctgaaactaatgggaaaaggaagatgttgactggggataatgccctgatgtgccaccagtgccagaggaatgataaagggagggtggtctggtgtaattcatgcagaaataagcgcttctgtgtgccatgcattgaaagatggtatcctaacttgtcagaagacgaatttgctgcaaaatgcccatattgtcgcaagaactgtaattgcaaaggatgccttagaatgagaggggttgaagagcctccaaagaaggaaatttctgaagaaaatcaaatctcttatgcttgcaatgttgtgcgcttgttgcttccctggttgagaaaactgcgacaggagcagatggaggagaagaaattggaggctaaaataaaaggtgttttggtgaatgagatgaagttggaacaagctgaatataatctagatgagcgtgtctactgcaataattgcaaaacttctatagttgattttcacagaagctgcaagtactgcttttatgatctgtgccttgactgctgtgtggagatccgcagaggtgagattcctggaggagaagagataatgagagtaaagcctgaagatagaggccgagcatatctttttggtactactaactcaaaggatgggagtaaaaggttctccatgaggaggcacagctcatccctggagaatgagccttccaatgtagtaggttctagtgagggggcaaataactctctggagctgtggaaagcagaaagtgatggtagcataccttgcccaccaaaggagctaggaggctgtggcggttcgattttggatctcaagtgtttttttccagaaaagatgctttcaaatttagaagaacgagctgacagaattatgaggagcgaagtatttgcaaaagcagtagccaaaagaagtgaccagtgcccttgttatgaccattcaggaaacataagaactcaggacgtgcgagagactgcaaatacgaaaggctcaagtgataaccatctctactgcccagttgccactgctatcaaggaggatgacttggcgcactttcagatgcactggacaaaaggcgaaccagttattgtttctgatgttctgcatttgacttctggtctaagttgggaaccattagttatgtggcgggcattgcgagagaaaaagactaatggtgacgtagaagatgagcactttgctgtcagggcattagattgccttgattggtgtgaggtggaaattaacatacacatgttttttgtgggatatatgaaaggcagaacgcatcacatgacacactggcctgagatgcttaagctaaaggactggccgccatctagttcttttgatcagagattgcctcgccatggtgctgagtttatcagtgcattgccatttcctgagtacactgatcctcgatatggtccgctgaatcttacagtcaagctacctgatggtgcattgaagccagatcttggaccaaaaacttacatcgcttatggattttaccaagagttaggcaggggtgattctgtgaccaagcttcactgtgacatgtctgatgcggtaaatatattgacacacacagcacaagtgccctatgcgcgttatcaacttgagaagatagaggaaaccagaaagaaaatgaaagaacaagatcttcaggaactttatggtgtttcagaactaaacctatcatcaccttttactgattccaggaatataagtgctgatgaaatgtcaaagacctcatgtttggacgtcaatgatgtaccacctgttaataatgaatctgaggtacaaagtggggcaggccagtgttcagattacattgacaaggatagaagttatgctgggatgcataacggggagagaaccggtggtgccttatgggatattttccgaagagaagattctgacaagatacaagattatcttaggaaacatgccacggaattccggcacatcttttgcaatcctgtgaagcaggtattattttccttgcacttatttgctctgtttttcttatgctgactaatggtcatgcaaatggtgcaggttattcacccaattcacgatcagactttctacttaaccgaggagcataagagaaagctcaaggaagaatatggtgttgaaccctggacgtttgagcagaagcttggtgaagcggttttcattcctgctggatgtcctcaccaagtgaggaacttgaagtcttgcattaaggttgcgatggactttgtctccccagaaagcgtcaacgagtgcatgaaactgactggagagtttaggcggcttccacctgatcacagggctaaagaggataagctggagatcaagaagattgctcttcatgctctgaaccaagtagtaaatttcttggatccttcctcggagtggtcgaagagttggtttgcccaactcaagaacaaaaaaaaggctggagctgaagaacaggagaagcctaaaaggaagcgtggccgcccatgtcgcaagtccaacgatgaagctgctggcgataggcacagaaagaagggcggccgccaaagaggtcggaagaggggatacggcaagtccaaagatggcgctggcgctgttgatgtgaagcctcctaaaaggcagcgcaatctcctgaaaggctctggcaatcgtgtaggtggttgattgtttcactgctgactgggaagatggaaggcgtaagggctgtaccgacccaaccttgacgtggttattttggtaccaggttgtaagtgtagactctagattgtagaatagaccaggcatttcgtcacccctgggcgccattatggcgtcttgcttttgttcatatgtggcgattgccggttgacaccgttttggaagaataatatgctagatgctcgttgtaccagactcttcatgtagcgggctatggtgaattgctgttcagcatgtctgatgctgatgttggtaattgacctgaatagatgtggtcatttgaactctctggattctgattttacatatccaatccattggctgaggctgagcattcttagttgaaaaacga

SEQ ID NO: 41719 - DNA, 2056 bp, Zea Mays
cttatacatccttcatcgattcggcgagttcaaccgtgtcctccgcgctccgtgcctgccagcctgccactgctcggttctagaatccactccctgacctgtgcggcgctccgtgcctggctgccagcctgccactgctcggttctagaatccactccctgacctgtgcggcgttcccgtgcccggccggagtatcgatcgcatggcctgcgccggcgccgcgcagaaggtctcagcggtgctctaccactacccgtgcccggacggcgcgttcgcagcgctcgccgctcacctctatttttccggcgccgcccacccggtccgattcttccccaataccgtctacgaccccatcaggagtgattcacttccactggaagaaataaaagatgtttaccttcttgactttgtgggacctcctggttttgttgaagatatagcccctaaagtcgaaagaataacaatcctggaccatcataagaccgcttttgaaagtttgtgtgtgaatgccacacttgggcaaaatgtgaccaaggtgatagacatgcagcgtagtggtgcgacaattgcatttgacttctttagaaacaagctcttaacagaagttagcacctcacggggtaatgaaagtggtaaagatgtagccaaggtcaaatatgtacctgacaacaaggctgaaacagtacacaagctttttaagtttattgaagacggggacttatggagatggaaaattccaaatagcaaggccttcagcagtggacttaaagatttggacattgaattcaatgtcaatgcaaataataaattgtttgatcagttgttggagttggatcctgagcatgtcatttcccatggacaagcgacattattagagaagcaaagattaatagatgattgtttggagaaatcctatgaaatttccctgggatgtggccagtttgggagttgtctggctgttgatgctgatgctatttcaaatttgagaagcgaacttggaaatcaactagctagcaagagccgtgattttaatctaaggggtattggggctgttgtatacaaagttcctgagttgaataatgaccagatactgaaagtaagtctaagaagtttagaacaagaagacacaacctgtatctctcaggaatatggtggtgggggacatcggaatgcaagctcgtttattttgagtgtgactgagtttgacaggtggaaagtcggatcttctcgaccaaaagttttgaagacatgaactgtcgtgtggatgaggtttcgcgtgcttggccaacgtcagtaacaaaacggcagcaggtgggcatctttgaagcaagtattggttgatgagctatgaattcttagggaagacggcccgaatgaacttcaagaaacgctccgagtagaactgggggtccacaaccgagatcgagtccgagtcatattgcatggaattcacgatcgattttctttgtcatattgtactattgcaatatgtcaatgatgcccaggtagaggaccaggaacggacccagccaaaagtttgagtgggggcttaaatagaagcataattattaatggacctttacagctacagtgaataatacaaacttcgcaagaaccagaaaattaagtgaggcccgtgcttcccactcagcctaacgtgggtccgcccatgtagaggacaacatcgcacacctcacggaggagaaggccaatgcagctgatgaggagttgaaaaccttgatgatatgctagttgtgatgcttctccaaccagtgagatagtagctgatgatatgctagttgaacagctttaaccagtgatgcacaattttactttatgcggggggaagggtgactcggaacgacatgttttacatagtagagatggagtgttcttatcacttggggccttggggtgagacagaaaaagaacaatggaacgctggctggttgtggagcagaaaatcttttattcttggtcttttttttcaaacttaaatagatgcaaatgtgtagatgagggcatgttcgtttccctctaataaattttagcatct

SEQ ID NO: 41720 - DNA, 2046 bp, Zea Mays
ctattctgggcgatttccacgtcgccaaaggcagcagccgtggctgtagactgtagcacgaaagagaaatctgtaacccagcagccagcgagtcaggcaatggcggccgtcgtggcgctggcaccggcctctccagctctcctccctgtccccttccgcggccgccgcgacggccgggtggccctctcgcctcgccgaacccgctgctccgcggggcgctgcagagccacggcccagaccttccaggggggcgccgccgccagctacgcccgcgagatggagcgcctctccgccaaggagtcattgctcctcgcctttaaagatgctgggggtttcgaggccttagtcagcgggaagaccactgagatgcagaggatcgatgtcaatgagcgaatcgttggacttgaacgcctgaatcccacaccgcgccccacaacatcgccgtttctggagggtcgatggaactttgaatggtttggtgatagtagtcctggagcatttgcagcccgtcttttgtttgagaggtcacctacggctgttgcacactttatgggacttgatgtgctgatcaaggatggatactccaagctctcatcaaacctcaagtttgtaaacacggatgaaagaggaatatgttgagggccttatagagattcccagaatcaatgaagaatcattgcctgaacagttaaagggcttgcttggccaaactgcaggagctctacaacaacttcctagccctataagggatgctgtttcagaggggcttaaattgccacttagtggatcatttcaacgcttattcatgatctcttacttggatgaagaaatattgattatcagagatgctgctggagcacctgacgtcttaaccagacttgaggggccgcaaccgaatccaggtgacggcacagcagatgcagtgatatcggaatatgaaagctaatgcctcagtgctgactgtagctccgcacctagctcctgtttatggctcctttctcctctttggtcattttctcagtctcgcgcgtatataaagctttctagttctagtgttgtcaacgatgatgaccactcgagtgtttttacttaatacataccatttgtctattctgaatatgagcaacaatatctaaatattcaaatgtccatcaccagtttatatgaaacacggtaaaacaaaaaaaaaaggtactggttgtttaaagttaaaaactgaccagtaagttccaagatacgtacgggctggtaaccgctcgatgcgtgcagagaaccagtgacagacagcaacctctatcaaaaacaaaagagactagaagagttctattcaaacactgatgaagttcattgttctattgggctcatggaactatcaaaaagaggacagacatggaaccatgaaacatgtccggtgatttatgtttatggttgcaaaacgattaaagttgagatcgttcatctcataatgtaaatgcttgcagagaaactgaccaggagacttggggggtaaacattcccatgcaccatctgatcataacttaaagccggccaccccgtctgtgtcgcaggagctgaggagaaaatcatagaagccatcgttgtagccatccggatcgagatcgtacagtaaccctcccccttctccagacgatgtttcggcctccactttcatcggcgacgacatcgcagtcggctgccacgacgatagcgatgatggcgaagcatcctcgtccgtgagtgccgacgccgcgcaggagcccttttgggacgatggcattccggtgagccgctggacgaccttacgaaagtcccgagcctctgttttgataacctccggcgccaagacgtgaacgatcctgatcttacgcggcggcgtcttcgggatagcgtgggagagccggtgctgtgacgacgatgcaccgcgggacgggagcttcgcggcgtgtttcatggcgtcgccgttcgtgtgtgtgagtgtgagggggagagagaccgaacgagatggagccaccgccgccagtggagaaggagctgagaacactggag

SEQ ID NO: 41721 - DNA, 345 bp, Zea Mays
atgacccaaatttgatttttccgttatcactccatgaccaaacacataaaaaatataaatgcctagataatttttttgttggacctaaagtgtacccggacttgaaacaagaatctcgagccatgtctccatcctaaaccatatccttattcaattggtgcaagctgatgtaccttatccagttcgcctattcttaaggatcgctatgttgctttatcaatctagaaaagacatgcccgatcaatttcttgaatttgatgcctttggttttcttatatctccagaaggcatactaatttgatcttatcatcattttcctccgtatctaatcagataccaatcctt

SEQ ID NO: 41722 - DNA, 1227 bp, Zea Mays
atccgcatggcggataatcccgttgagcatagccgcactaaacacatagccattcggtatcattttctaagggatcaccaacaaaaaggggatatcgagattgcttatattaacaccaaggaacaattagccgatatctttaccaagccactagatgaacaaacttttataaaacttaggcatgagctaaatattcttgattgtaggaatttcttttgatgtcttgcatacatagctcattaatatacctttgatcatgtctcttttatattgctatgactaatgtgttttcaagtatatttcaaaccaagtcatagattgaaagggaattagagcttcggcgaagacaaaggcttccactccactccatcaacatactcatccttcgccgtcgctccgagcaactctccgtctttggtataatcttcactcatatattgtgcgccaaagggggagaaagtagttttaaaaagggcttatatttcaatcaagtatccatttttggcgattcatgccaaagggggagaaagtattagcccaaagcaaaagggccgcaccaccaccgattttcaaaattcgagttaagaaaaggttttgaaatgatgaattttggaattggtatcctattttagatagaatttcaaaatgggtcaccctcttcaaaaactaatatctaaaaccctcttgaatactaagaggaggatttcactaagggggagttttgtttagtcaaaggaaaagcatttgaaacagggggagaaaatttcaaatcttgaaaatgcttctcaaaatcttattcatttacttttgactatttgcaaaaggactttgaaaagaatttgcaaaaacaaaacatgtggtgcaagcgtggtccaaaatgttaaatataaagaaacaatctatgcatatctcatgagtatatattggtttcattccaagcaacctttgcacttacattatacaaactagttcaattatgcacttctatatttgctttggtttgtgttggcatcaatcaccaaaaagggggagattgaaagggaattaggcttacaccttttcctaattaattttggtggttgaattgcccaacacaaattattggactaactagtttgctctagtctataagttttacaggtgccaaaggttcacaataagccaataaaaagaccaagaaagggttcaaacaaagagagcaaaaggcaacccaaaggcaccctggtc

SEQ ID NO: 41723 - DNA, 2016 bp, Zea Mays
taccagcagcggccacatgggcggggcaggtgggcttatgttgctgcgcgcgcggtgccgtctccaactctgtctcggcctctcgcgtggaggtggaggtggaggcggagccgatgagatcgatcgcccgacccccgtcacgtccggggtcgcattctctttccgtcccggggaaaaaagaaggaaaccgaaccttggcagcggcgtgccggcaggcatgtcagcgacggtagccggccacaggtccagattccggaaccgaaccaccgtcccccgcgaaccacggaacagcgaagacacctgggccagggctagtgaggccaagccgatccgaaacatcgcgttgcgtcccgcacaatcccgtcccgatctgggccgggggcacgcgagcgacgataaacttcctcgtggcggtgagggccggcttggagtcggcgcagagctggacgagttgcacttgcaccttgcacgcgacagccacgcactagcctgcagctgcagggcaggggcggagaccatggggagcccgcaccatggacacggcgttgacggtggcggccgcagcgacgacgaggagggcgacgccgggtcgtggcggctgcgcatggacagcggcttcagcgtcccggaccggttccaccgccagccgcccttctacgccaggatcttcggcggctcgcacgttcagttcaccgtgccagggaagcagaggaagatcgcgaagtactacaagaaacaagagaatctactgaaggatttcagcgaaatggagaccatgaacgaaatgggtggcctagatcagaatgctcctaccgaggaagagcagaagcagttggcgaagagcgagaggtttgccatcaacctgtcgaatgcagtcaacctggtcctcttcgtaacaaaagtcgtcgcttcagtcgaaagcgcgtccatggcggttatagcgtcgacgctggactctctgttggacctgctgtcagggttcatactttggttcactgcgtacaagatgaaaaagccgaacaagtacaactatccaattggaaagaggcgcatgcagccagtgggaataatagttttcgcatcagtgatgggcacacttggcttccaagtgctgatcgaatcagggcgccagctcataactcaggagcacgcggatttcaagttcaagcaagagctgtggatggtcattagcatgtcctctgttgcggtcgtgagttcttcctcatgctctactgcagaacgttcaagaatgagatcgtgagggcctacgcccaggaccatttcttcgacgtaatcacaaactcggtcggcctggtctcggcgctgctcgctgtccggttcaaatggtggatggaccctgttggcgccatactgatcgcgttgtacacgatcacgacgtgggcgcgaacagtgctggagaacgtaggcacactgataggcaagtcggcgccggcagagtacctgacgaagctcacgtacttgatctggaaccaccatgaggagatccagcacatcgacacggtgcgagcctacaccttcggcacgcactacttcgtcgaggtggacatcgttctctcgggcgacatgccgctgagtcaggcacatgacatcggcgagtcgctgcaggagaagctggagcagctgaccgaggtcgagcgcgccttcgtccatgtggatttcgagttcacgcaccggcccgagcacaaggccgaggtctgagtgcgtggttagtggttactgcagagttcagaccagctgtagcgctactgcagatttgacttcatatgctattagttcgtaagatgaatgctatattcatttcccacaactcttcaaaaagaatctagatattttttgtcatgtacgtgcagactggaataaaattttgtatagtcgttcatgaaccggtgaaaaatatattttttaatacatttgactaataaagaattattcatattagtttctttttattttctataaaacaaacataatagatatccaaagtgtatattttaa

SEQ ID NO: 41724 - DNA, 1605 bp, Zea Mays
gttgtttatcttgcgtccggcgtcctctctctctcgtggcgacgactgggcgacctccccgcccccgccgctctacgccaggtgcccagatcttcgtcgggcccttcgccgaagagcagccaacaggttaaaatcaaaaaaatttgtcgggcggataatacaaggcctacaccagaaggaacaccctttgtgcgacaggttgccggtctgcgggttgaatcatggcggagcacttggcttcgatcttcggcactgagaaggacagggtcaactgccctttttacttcaagattggggcctgtcgtcatggggatcgctgctctcgtctgcacaacaggccaactatatcaccaactcttgtgcttgctaacatgtatcagcgccctgatatgataacccctggagttgatgctcaaggccaacctattgaccctgagaagatgcaggagcattttgaggacttctatgaggacatctatgaggagttggggaagtttggtgagattgagaatctgaatgtttgtgataaccttgctgaccacatgattgggaatgtctatgtccagttcagggaggaagagcaagcagccgcagcatacaatgctcttcaggggcgcttttactctggccgccctataattgttgagtattctcctgtgaccgacttccgtgaagcaacctgtaggcagtttgaggagaacagctgcaaccgtggtggctactgtaatttcatgcatgtgaagcaaattggcagggatctcaggaggaagctgtatgggcgttctgcttccaggaggtaccatgggagaagccgaagccgaagcccgccaccacaaaggaggggccaccgtgaccgtgatgactaccaccaccgtgaccgtgatgactaccgtggtggcggcggtggtggaaggggaagaggtagcaggtatgacaggtacgatgacggagcaggcagaggtggcaggcatggcaggtatgatgatggagcaggcagaggcggcagacatgacaggtatgatgatggaggaaggcgcaggcatggtagcccctcaaggcgtgcaaggagcccagtcagggaaagcagcgaggagcgaagggccaagattgagcagtggaaccgtgaacgggagggaaaacagtgagctctccgtggctactgtttgccggacttgttgcttagctccggctctcatcgctatattctaagtatgcttgtgtggattgcattctgcatggctaagtaaaaccttttaagatcaggattcctcggttcattttatggttaaaccagacatcatttgtttccatctgtgttgtgtcggatcctttgctattatgttattttgacaattggtgtcaaatcttttgtggtgtgctattagcttatgatgatgtcagttgtggtttgtcactagatttgccatctggctttcagtcgtgtgttatgctgttccatggcggatttcttgttttccctcttctcatttttgctcaatgctcctagacagtgcttgggctgccgtcattgtactatgtgcagtagcacggagcaggttctattcagtttgagctgtcttttgtcttgggttcatggcaatctgt

SEQ ID NO: 41725 - DNA, 591 bp, Zea Mays
cgactataaagctcattatgaactatgtggctgggacagtggattatgggtgtgggtacgcaacgagaaaaattggaagttgttgggctatatggatactgacctagctggtgacgttgatacaagaaaaagcacctcaggcattattgtgtttttccttggcaacaatttgataagctggttgtcccagaagcaaaaggttgtagctttatcaacctgtgaagtggcatacattgaagctgcctctgatgcatgtcatggcatatggcttgcatgactgctaggtgatttgaggaataaaaaagttgaacctgttgatcctaaggtggataacaaatcagctttggtgccgatcaagaatccagcttctcatgacaggagcaagcatattcagacaaggtttcacttcagtcagttgatgagggggatatctgtccagattatattggcagtgaagggcaacttccaaacatcctgattaaggcgcttccaagggcatgtcatgtacgggcgctcgtacgccaggcagcgtcgcgcccgtgacaggcgccgcgcacaggagcgtgcagatcgccaggagcgcgatctggg

SEQ ID NO: 41726 - DNA, 575 bp, Zea Mays
gtcaatagctcagtggccaaccacaagcccgctaatattttttgtggcaaatgatacgggttggtggccagccgcgagctggcccacctgcttgcctaagtggctctctctgactgtggagtggctgtggtgactccctaactatctgatgattgcagaagtgcatatgccctgcaaagattccttttctaagcactgcgccaaatcgaagaaggtgcaaattgttcagcagataaatcatgatggagaggtcaatcgagctcgctatatgccccaaaattcatttataattgctactaagacagttagtgcagaagtatatgtcttcgactacagcaagcacccatctaagcctccactagatggtgcatgcaaccctgatttacggctgaagggacataattctgaaggatatggcttatcatggagtatttttaatgagggacatttgttaagtgggtctgaagatgctcaaatttgcttgtgggacattaaagcaaatagtagaaacaaaagtcttgatgccctgcagatttttaagtgacgcaagcttcatagaaatactaatgcagtaa

SEQ ID NO: 41727 - DNA, 902 bp, Zea Mays
atccagtacaagacaacgagatgattcctacgcctcagttcagctgattaaatcaaacttatttcattcacagaagtccagagcgcattgttcacctgttattctataagctgattacattgttttcaaatggattaggggtcagcaaagaatttgccgccttcatgcacttcgacgttacctccaggaacgtgctttttcccccagaacgaggtgaaacagatacagacacctctgttcatcctcaacgcagcatatgattcatggcaggtaaggaacattttggtgccaggagtagctgaccctcatggaaaatggcatagctgggtgattttctgaaggaagtggcagaactagggaactccgactcgagagggttgttcataaactcatgcttcgtgcactgccagtctgagatacaggagctatggttctcatctgactcccccgtgctcggaaacacaacagtagcaaacgctgttggcgactggttcttcgaccgcagctccttccagaagatagactgcccatacccttgtgactcgacctgtcacaatcggatctacgatgactcatcacaagcatagcaattacagtggcctcacttcgtactgccattcaccatgttattacatttgacgcttccagcattgctaacagtagggcaatgcgttgatagccattgattttttttttctttttacgaataagatcaggtgccggcggctttaactcggttgctaccggaaagtgagcgtgcatcttccgacggtacatggcatggtttatctggatggatgaatcgataatcataaattcttaaaaacacaataaatattctagaatttttatgttgtgcaaccgtgacttattttctctttgtattagtcatctatttatat

SEQ ID NO: 41728 - DNA, 3584 bp, Zea Mays
cgtgcccacgtcagatgcgaccgagatccatcttcacgaacggcgataaaatatgagctcatttggcgtcatagtgtgctcatctggtgccatataagtgccaaattatctgccctcgcctcgctccttcgctttcattcctcggcctccgcagctagcgcaacgcaaaggcagttccggcgggggcggactgggaacacatgggaatgagatgagatcattgctcggtcgtgctggcctgggccgtcggcgcgcgttgatcttgcatgtgttctcaggtcgcccccggagggccttccttgctgctgtgttccgctagacctggagtatctcgacgacggtggcaggcacacgcagtgacggcaccactacgtctgttccgccacgagagcctatgtaacggcatgtctataaagaaaaagatctacgtggtacggtctgggcactgatgattagttgctcttgttcaggccaactgataaccaagtaaatgaacatgtaagagtactactccatagattactctgctccgtttttttattactcgctccgtttttttatttgctacgttctagtttaaaaataaattaatatgcgataaatattcgagaacgagagtattgctttatagatctgttaaaatttggtttaggcgggaccagccaatttttctccttctttctgtttttatctccgatctaattaaaaattgtgacgtcgtcacagcgacaacaccttcacctggtaagttgcaacgagctttagatagtatgcattgacggcggttgtttaatcatttacatccgcaattgtttaatcaatgcagatttgtgtgcattgcgggtggaacgcgcatctgcacatcggcatgcgcaaaagttgaatgattgcagcactagcaaggctcgcgatgtcggcatcgagggcagaccagcgggggactcatggtgggaggcgcaacaagccggtgggggagtctgacgacactgacggaggccagcatgctggagggcaggccagtgggggaatgacgacgggaggcaggcgggggattaacgtcggagggtaggccagcagggtcccttgtcccatcaagccggcagtggcgccgtgcctctgtgctagtctcgagtgtataaggcatggatgacgggagggtggagaggaagtgggtcgaaatggttcgtttgtttttaaggaatccctagaacccacattttcaagaagtattttgacccagaaccaacctaacccacgagcattttgaaccaaacgtgggttgttgtgggttgaactcgttccaacctgcatcaacccactaaccaaacacaaactccgagtgtatgttgtatttggttgagtagagtgggagaatagagttgctccattccatttttggatgtttggtttctaacaaaatgagagcggagtggctcctagatcttcatatgaaaatttattataaatagttggaacgctctttctccacaaaaacgaccgaatgtgagcgctctcccggacacgggcgctctcccctctccactcctctacactcatacgactctccaaccaaacaacgattggagcggctccgttgtattctactcttcaaccaaacaaaaaatggagcagctatgttctttttgccaaatgcagaatagaacggctccattctcaaatactgaaatgaaaccactccattctatttgactctcctctccaaccaaacacacccttaatttgtcgagacagtacacgactctatttaggtcatgtttgtttccatactaaattatatcaatgaagattataactatcactttaggaccacaaataagctgaaattaagttagcattgagtagcttatttcaacttatttgtgattctaaagtaatattttactctcctacccttccaccataatccaacttatataatctaggagagaaacaaacatatccttattaatcggctgacgccagtatacgactctgcttaatcgaccagcgacaaggttgtatacactaatctaattttccctccgtcccaaatataatttgttttacactaatcacacattcactaagtaacatatgaatgtagattatatgtatgtctatattcattatcctttaaatgaatatagacagaaaaaagtggactagaaataactatattttaggatggagggattattattgcttattcattcttgattacaaatttgtttttggatgatatgttataaatttagtctctcgacatactcatttatgtaatctcatgacatgctatcaaataatttatttactaggtgatacaagtcaaagtatagggatttcttcacgagttttgatgaatcttcttcaatcgatgatgaggagctcatactttctgccactcaaattatacaaacgacttcgcatgttcaaagaaagacaggtggttctctcctaggacgtgcatacatacaccatgatagaagcagggcacaaaacaatatacaaagattacttggatgataatccgacgtatggttcaagcttgttccgatggaggtattagtctatttgatttttctggttaccaattgttcaagttgtagaacaacatgacgattactttctgcagaaaaagaaacaaagctcaccaactaggattaagttgcttccagaaggttactgtagtattctgtatgctaacttatgtaataccagcagatgctacggatgagtatgtacgtattagaaagtacaactctagaaagtctaagaaggtttgtcaaagatgttattgaagtttttggagatgagtattttgaggtcacccaatgagaatgatatagctcaattacttgtgtttggggtgaaaagaggtttttctggtatgctcaattcactttactatatgcattggagatggaagaattgcccatccgcctagcaagggctagtttttgggccatcatcatacacctataattattcttgaagttgttgcttcgaaggatctatggatttgacatgcctttttgtttacctagatctcttaatggcatcaatgttcttcaccgatctccacttttcacaaatctatcaaacaaagaagctccagaagtaaactacaacataaatgtccatgactatacaatgggatactaccttgcagatggcatatacccatcttgggccgcattggttaagaccatatccgcaccatgtgagaataagcgaatatactttgctaaagcacgagaagctataatggaacgagcttttggggttctacaatctcatttcgctattattcatggactagctcgattatgagatgaagaggaactaagtgacataatgacaactcatataatcatgcacaacatgattattgaagatgagggaattgtggatgcagatgaacgttttgagagtggaagagataatgttgaaccctcccatgagtggacaacagactttgaagaatttctccaaaatgacaagaatatcaggaactaagaaactcactatcaacttcgaaaagaccttgtggagcactagtggcaaaaccatatgcagatcaatat

SEQ ID NO: 41729 - DNA, 1856 bp, Zea Mays
cccatgcggaccggaacggtcaattatccctccactgcccgccacaccctatcccccacactcaccctccgcaccggatcccgtcatcacctccgagcggcgcgccgggccggcatccaactcgccgccgacgcgccgcgccccagaacgagccgccggaacgatctccctaacccccgatgcgccgtcctattgcccgcggcgagcccaaggtacaaaccctagctctagctcctccctccgcagccgccccaaccaagatgggcgcccataggcgacaacccagctcccaccgccgcgttgccggcgccctcacgctcctcgccgcgtccgcgctcgcgcttcttctcctagcatcccgccgggttcccccgacctacggcgtcatcatcgacgccggcagcacggggagccgcgtccacgtcctcgcctaccgctccacggcgggactcccgcagctggactgggcacgcatggcctcgatgaaggctaccccagggctatcgtccttcgcggcggacccacgcggcgcggggctgtctctggcgccgctattggagtttgccaggcgccgtgtgccgcgggagagctggggggaaaccgaggtgcggctcatggccactgccgggctgcggctgctcgattccgcagtggccgagtccatcctgcagtcttgcagggaagtgcttcgggggtcggggttccaatttcaggacgaatgggccaccgtgatctcaggggctgaggaagggatatacgcatgggttgcagcaaattatgctttggggactcttgggggtgatccaaacgacaccactgggattattgaacttggtggggcttctattcaggtgacacttgttactggtgaacctgtgccaccgaagttctctcatatgcttaagtttggtgatgtctcatataacctgtacagccacagttttttgcatcttggtctgaatgtagcatatgaatcactccatgacttgctcagctcacctggccttagatcaatggccacacatttgatttctcaagctaagtacaaagatccttgcactccaaggggatttacacgcatagcaggatcagctaaacttcctgttggtgttcttgagccgaaggttgaatacagaccttttgctcattctgcggggaacttctctgagtgtagatctgcagcactaacactactgcaaaaaggaaatgagggatgtacatatcatgaatgccgccttggagcagcatttgtaccagagttggaagggaaatttttggcgacagaaaacttttaccatacttcaaaggattgatgttgtaaaccaaatccatggcgtgcctgttgactgggcattgggtgctttcattgtgcagacgacgatgaacagaacagacattgtccattctaaggtggagaaaacctcgtctgaagacgatctacgatatggagaaaggcaggtacatcataacaagggtcagccaatgagtcgcgcacatcagcgttgggagtgggtggactttctgcagcggagcactattgaccatgtatgtagattttcctaaattgatttcttacttagtggccaactacctccagcatgttgccttgcggagtcaacttgttgagtttgagcagcaacccctgtatatgatagaaggatgcgggttgccgtggcatttgtgcatgttcagtgttgtatgtaatgttgctaaactgttgttgatgtaattagaattttgtgcatgggcatccatccgatgatgtaatcctgagataaccatgtgtctaatgatcgattgaagttctctgccatggatcatggatggcagggcagctgtatctttgtttcatgtca

SEQ ID NO: 41730 - DNA, 2893 bp, Zea Mays
acgtactctgtcaaacgatacgccgcgatgcttccagacgagcgccatccccttcctcgcctcacacgccgtcctgttggtcgtgcctctcttcaacctttttttcttgagcattagcgagagccccttacatggtgcagtgctagcatcgttgctggcgacctcggtgaggtcggatctgcaaaggttgcagctagcgcgcctacactacatcaacatggtgtggcatctcctttcgcagatccccaacatgctacgccgccggctgcctcattggaactcctgtgcaccgcttgcctttcttctcccattcaacccgcaggcgttccctggctcaatagcgcaactaggggatgtccgccgctacctccatataggaaacgacagatttagattttcaggtgatgcgtggtcgggatcccggatcaatcaaaataagtgtgaaataagtgtgaaatttgagaggctgttgaacttccagatcaggtaccaaccaaaaaaagtgacccttttgacggcgtattgcgtgggcaaggcatgccagtgcgacaatagagaaactaacggggagctctgttcgttctgctgattgcttatgattaggctcgcagtggtggtagctgggagagcttgggactggccagacgcgaccaactcacccatgtaataagacaacttttatacatagccgacagtacgcaacctcatgcgcaagatccttaatgaaaccaaagagctgcagcagataaccaacgacaagcagaaaaatcaggttgtacgcatccaacattttactttcatatttgctgaagatgtcaacaaacaaaatagacaagcagcccagacaatggagatgatgtatacgataattgcagatgagttcaagtcaatggacaataaggacatgcgccctgaagattacttgaacttcttttgtcttggaaaccgggaagaaccaccatctaatggcagcccagaatcagagaaatctacatataaaagtgcagagatagtctgtttttgcattttccttattcttaagggtatggcttagctcaacccttctgattacaccaaaactgaatatggttttggcgcacggaccttatgggaagctagaggtctgagctattgggaagctagaatttatgtttttatcaatgtttagtcattaactaattaattgcatatcgttttgttgtatatttattaactaatcgagtgttgcatacggttttcagaagcatttgaagacgcagaaattactcatgttgacgatacagtagatcctgttagagacatggaaactattagtgaagagctcagactaaagttttcgttggattttgttgatttacaagatcagctgtacaacacttaaaccttttttcgacactattctgtttctattttctgcaggatatagagttcatgaaaaagaaacttgaggaccttgataagccaatgaagaggaggaatgataagctgctcaaaattgagcatgaattatattgatccagcacaatgccgaggagactggagactaaacttggaggtgctactgaaggatgtgactttgagtcaaagggtagcacatggagagcttgaattgaattcaagcttggatatgattggaaaatatttgtattagatcacctagaagggtgattgatgcttgttattggccaagcagacaataggtagtcagatgaagattgtaaaaaacaagcatgcttaacccttcaagaatgcacagtttgagcttgaatttggaaaggggatatgccacagttcagagttttttgaacagaatttctggagcagttgttcctataaaataatattttaggtcttgaagccaccaccgtttggattgacatgatctgtggtattctggtgatctcattatagcagacttcatttcttattgtgcttatacagtagtgtagcgggaagagaattcacattgcatgaaatcatgttgatagctaagaggtggaagttgaagtaagccgggaagggtgagccaaaatctatagtgggaactcctgcatacattgctcatgaggttcttctgaagaaggaatacaatggaaaggttttatgcgtagtgtcgttaattattctacacttgacatactgtttttgtttagtgtgcatgttattattctccacttgaacaacatgtttgtttgtcaaaacattttatacacgcacgatttgtagtcatgcataacagggaactatgttggaaggttcgaatgctaaattagtcactaactctttgttactgaactaaggttgctgatgtgtggtcatgcggagtgatgccatacgtgatgctgacgatcaccatccctgagataagaaaccatccatggttcttgaaaaacctcctagctgaccaaatggatgacaatacgatgagtaagcagtacgaggagcctgaacaaccgatgcagagcatgaatgagttcatgcagatcctggttgaggcgaccattccagcagttggttcacgtggactcaatcagtttctgaatgatgacattgacctcgacgatgacatggaggacctagactcagatgccggtcttgacctggaaagcagtggggagatcgtgtatgctatttgacaacattgaatactttgttgtgtcgtaggttaccaagataattagagacaaggggcaggttgttgtgcttgcaagtatctgttgcagctgttgttcatgcctgatgttgatgcctcttttcatactgttgtgtttggatggtgtaccaccagtgttttacaacagtttggcccttggaattgctattgctaaaacttggttcctctgagaagaccttttgtttttgtattcccagtcgagggacggtgaagtactta

SEQ ID NO: 41731 - DNA, 1754 bp, Zea Mays
aaaccccccttcgtcccgtcgcatttcgttcaaaatcgcgcggtcaaatccgagctcggggccatcgccgtcgccgcgcctcccatcccgcgaagatgagctacgcggcgtacaagatgatgcatttgcccaccggaatcgaccattgcgctgccggcttcatcacccactcccccgccgacgctgccgccttctccacgcccgcgcccgcgcccaccgccgccgctggacccgacggcgatattgactccactgcggctagggcaccccggcgagtgggtcctacccccaacctggttgtgtcggcggctaacgtgctcgaggtgtatgccgtgagggccgaggtcgcgactggggccgaggatgcgggtaattcttcgtctaccggcaccatcctggatggtatctccggggctcgactggaacttgtgtgccattacaggcttcacggtaacattgaatcgatggctgtgttgtccgatggcacagagaataggcgagactccattgcagttacgtttaacgatgcaaaaataacatgtctggagtttgatgacagcatcaatggcctgcggacaagctcaatgcattgttttgaaggccctgaatggttccatctgaaaaggggcagggaatcatttgcctggggtcctatcataaaaggggatcctcaaggcagatgtggtgctgtacttgtttatggattacagataataattttgaaagcagctcagagcttagtaggagaggatgaacctacacgcgtgttgagttccactgctgttcggattgaatcttcgtatgtgattgatttacgtgatctagaaatgaatcacatcaaagactttacatttgtgcatggttatattgagcctgtgttggtcatacttcatgagcgagagcctacatgggctgggcgtatctcatcgaagagccaaacatgcatgctatctgcgtttagtataagcatgggtttaaagcaacatccgatgatatggtctgctgctaaacttccacatgatgcatatcaacttcttgcagtgccccctcctataagtggcattcttgtgatctgtgcaaattcaatccattatcatagtcagtccacttcttgttcacttgccttgaacagtttctcatcacagcctgacggaagcccagagattcttaaaacaagttttcatgttgagcttgatgtagctaaagcaacatggttatcccatgacattgtgatgttttcatcaaagaatggagaaatactattactaacagtggtttatgatgggcgagctgtgcaaagattagatcttatgaaatccaaagcatctgttcttagttcgggtgctacaactcttggaagttcgttcatatttcttggcagtcgtcttgcagatagccttcttgtgcaattttcatgtggcatgccaacatcggttctgcctgatctaacagatgagcctgctgatattgaaagtgatctgcctttctcaaagcgcctaaagaggattccctctgatgttctacaagatgttactagtgttgaggaactttcttttcataataaggcagtgccaaatattgtagattcagcagagaagatctcatttgttgtgagagatgctctgatcaatgttggtcctctgaaagattttgcatatggtttaagaactaattctgatcccaacgcagcaggcattgcgaagcaaagcaattatgagctgtttctgaaatcaagggaagctattgaaaaataa

SEQ ID NO: 41732 - DNA, 2507 bp, Zea Mays
ttctatactgctgtcttcctcatccatttctgcttcctctgctgtaactactactagttcttagttgaatcaatacctattgtgagtaggtcgctgactggtagccgcctcgggcgtggcgggatggaccgtggaggacgacgtcctcctcgccatcgagcgccaggctaccaatgatgctggtaggattgaagggcttgtggttatgaggattatcaatgagcccactgctgcggccttgtcatatggaatgaacagcaaggagggccttgtcggtgaagtgtgttcgtgccggagagcgtggagtgcgaggcctcatgacgcgaagcaagttcggtctgctcgtgcatgtcacccgtcgcgtgcgcgtgtgccggagagcgaggaggagtgcaaggcctcacgacgcgctgccaggtccgtgctgctcgtgcgcgtcacccattgctgatgatataccacaaatgttttcgacctaacaaagagggcatagaaagtagaagttggttgctcctttaaagcatcagtttcaagtagccatcagctgaaatctaccattgctgaaacaaggtgaaaaaaatgcagaatggactacttagagatagctacactatcgatgcatctacatcattttggactatatgggacaccatcagtaatggttgatcttgtctactgtgctttggagttcctttcaactttgcttggagcctttcatgccactgatggagtcatatgcctctgcccagaaattcagtttctgactgaactaaacggtggtggtttgaatcatcgtggttcactggttttcacaatattgggattcttggcaaccatgaggacattatgagattcttggctaccatgaggacaaattgttcaattacattttctacgtctatttcgaagcgtcgatggcggatgtccgcacacaaaatgccttgaagggtctggaggaagttgcaagtttcctgcgtgtccttggctactatccgtgcaacacaataacgatatgagctgttgcgtcacactgtctatcttggttgctccgccttggaagaccagagtgggagatggttgctatttctgctcaattgaataaaaggttcctcttcccttgtttggaagagattatggtcattatacactcccgactgaatatgaacactcttgaaatacattgcgaagctgcagaggatcgtcattagaattgcatgaaggttgtatgcgaaaccactggattgaacaattcgagaaatctacagaggaagtcgtgaacagctatgcacaagattgagtctaaggtataggcatctgatggaggacatgttgtctctactcccgcatatgaaggacaaccaggacaaggtcgagtccaagcagagcaaggggaacacgccgagcaagctgcttgagctcaggagttgctccagctgcctttcttcgagattctggctgttgaccatgcgtcggatgagggcgcgattgtaccaattggttcgcagcatgatgcacatttgaccaaactgatgaatatggaaaatgaccaacctttgttgccggcaccaccagttaatctggaatcagccatccttgagcaaaatgcaaatatggtggctctcaaggaaggctgttctgtgggaagtgagctgccacctggtctgcagggtaattttggtggtaacaaagcaaacacgtgtacttcagcactgcattctattgatgaagatacagaatttcatggccctgttgcaaccatttcaactacgggtcaatcagaaggatctgacactgagattaatgttccaaactattctgacctagaagcactgatacttgatctggacctgattccatgggatcaagaatctgacttcatccaaccagaagtttcaaggtttcagtatcctgaaagcaggaaggatttgataagattagagaaaggtgtctgctcttatatgaaccgatctatcatgtctaagggtgctttcgcaattctttatggccaacgcacgaaatactacataagagagcccgaggtaagtcttgggagagaaacagaagaagtacatgttgatatcgatttgagtaaagaaggaaaggcaaacaaaatatcccgtcgacaggcagttattaagatggacgatggtggatctttctacataaacaatactgggaagttttcaattttcgtgaatagcaaagaagtaccctgcagtaaacgtataaacttaatgtcagactcattaattgagataaggaacctgaaattcatttttcacgtgaaccacgaggctgcaaggcaatacatagttcgaaaaaggagaggaagctcccaaggcgggatcacggcgtttgattggagtcagaacccatgagtagttaacgttatgatcaaggttgtttataatctgcgatagctacctctctcttcaagaaagtattggataagcgtaaagttatttataatttccgatagctaatatttctctcttccagttagcact

SEQ ID NO: 41733 - DNA, 503 bp, Zea Mays
tacaaatacaataataaataatcaatacataccgttctgattcttgataaggaatccatccattctatctctataaacataaaatttaattttatcaactaacctactaacctagcaaataattgattaagccaaaataccaaataatcttactttttacctagcaaagtagcactagcagccacacacacataacagactaacacgcacatagcagactagcagccacacgctgctcaggattccttcctccatggtggtcggtcggagcagtaaacgcaggagctagcgagggcgagctgctcacgggaaagcgggaggccgagcgcgtgccggtgccacgcccgcgaggctgcgatggagcgccgccgcgccggcgcccgacgatggacatccctgtgcccctgtgggagtgttggctgtcgcggtgtctctaagactagagagagcggcggctggaccgtgttcatgggcacgaggtcgagacgagttgaggagtggct

SEQ ID NO: 41734 - DNA, 1773 bp, Zea Mays
aagtttgaaaatagggctaaattcgtaattatgaataaagagtaattgcggtcgtggttccggattccccgccgccgccgcaagaccggagccctaattccaagcggtaaacgatgaggccgcacgcggtgggtatgggtggcggtggcgtggggaggcggaaggcgggggccgccgccgccgcggctagccgggagtggttggtggtgccggcgtcgggcccggcgcgggtggaggaagcagggaagcacgcggtgatggcgcgtacggggcttcccgcgcgcgatctcagggtgctcgacccgttactctcgtacccgtccacgatcctgggccgcgagcgcgccatcgtggtcaacttggagcgcgtcaaagctctgatcacagccgcggaggtgctgcttcctaacaccaaggatcccgccttcgcgcgcttcgttcgcgacctccagacccgcgtcctcgcatcttcgtctgaccagacttctactctggagctagaggcatatccagcattagatgagctgacatcaaagatcagcacattaaaccttgaacgagttaggcaaatcaagagtcgtctggttgcgatatctggtcgagtacagaaggtgagggatgagcttgagcatttactggatgatgaaatggatatggctgaaatgtacttgacagagaagcttactcaacaagaaatcagtgaggcttcatctagagctgaggttgatgatgcatctcttacagaagacgatagggatgaagattatagaagtgaaccagatggaagcaatggtagtgttataggttataagcccaatattgaagagctagagatgcttctagaggcttactttgtgcaaattgatggcacacttaacaagctatcacatctgagggagtacgtcgatgacacagaagattatatcaatataatgttggacgacaagcagaatcagctgctgcagatgggagttatgctgtcaactgctactgtcgtcatcactgctggagtggctgtagttggtctttttggtatgaatattggcatatcactttacgcagacccaacaaccgaggaggaaactcgagcagcaaataggaaattttgggaaactactttcgggaccgttgctggctgcgtgattttgtacatcatagccatgggttggggaaagagaagtggattactgcaatgatgcggaagcatgactgcatgagtgttctgtacccagtgaatactgggttcacaaaaatctccaaaatgagagattattgtattggcatgctgctcgatcatactgctgccagaaaatacgcctcgttccactatgctggaaaagaaacatcttgtgtaccgctagtagctgctaatgcgtgaagtatattttacaatctgttgcccatcgtctgtcatggcaactcagcagttttgtacctgtttaccatgctaggtgctgtttttgctcttgttattgtgatcattcctgtaactgtatctagcggcctgtaatatgtatgccgctgattggttgagtgcctcccgcagtcccgcgtgcaggcctcccgcgcgcctggctcatcagcgattgtcatccgcgccatctccacacgcccagacgggtagtgaaaaaaatgcctagcctgcacacccgcatgctggccagcattctcatatctaagcaactaattagaatctcgtgcttggtcaaagcacgctggagcctcgttatctctatgcaagcaaccaatcacgtactatatgtacttgctctg

SEQ ID NO: 41735 - DNA, 2124 bp, Zea Mays
ctcggcaacattatttcgttccaaaagagttcacatggcaattgtgtaattaacggacggtctggtaccttgtgagttgtgagtctgtgagactgtgaccttgtcaagacaagaaaccaggtgctccgctctcaataatgcgcaggccatcctcggcatgcgacgcggggcccgtatgacccagccgtcccagcggccggacggcgacaccaaccacgccccgttccgttgaacagcgtcgagtcgtcgccccatatcaaacgcccacgcagcgccggggatggagcgcggccggcaccagatgagagctgcctcccacacatggcatcgtggccagcagcgtcaaggaggcggtccagcggcggcatgaaaagcgccgagctttcgggctccggtgcttcttacggctatggccggacgtcctcctcccctgatgcctgcggctacggccggcagttctcggcctacagcgcccgctcctcccaggtcagcaggagtggctccttcagtgcggcggcgcagcgggtcgccggcgccttcaccggctgcttcgtgccgcgccggcaggtcaaagccggggaagaggaggaggaggaggagaagaagagcaagcgctccatggattcaggatcctatcatggatggaatgaagcaaacttgagtgcagcagcaggatcatggcaggaaggcagggctctcaccatcgctgacgtgtcgaaggcaacatcaaacttcagcgaaaagaacgtgataaggcagggacgctcaagcaccatgtacagaggaaagctcagggatggttctcagatcgccgtcaaatgtgtcacgaagctgaacgaccagagtccgacggctgaactctggagggagcttgagaagatccagcacaggaatctggcgaggctctttggattcttcgaacgcgcagctgatagtctcgtcgtagtcgagtatgtcggcaatggttccttgagggaacatttggatggtatgcggtgttgctatggaatatcatcctgttgactgtgctagtttctcgtctacattctttcagtagtcagtagaccactgtttcagtataaactgttctgttctatacttctatgttctatcatagaatctgcattgaactggtgtttgtcactctaggaggataggatactgatgcattgattttgcggtgtggaaaaaaccctgcagaatcatgtggaaatggtttagagctcgcgcaacggctcaacatcgcgatcgacgttgctcaggccatcacctacctgcacgagtacaaagagcgtccgatcatccatggcggcatccggtcgtcaggcgtgctactgaccgacgcgctggcggcgaaggtggccggctttgggctggccgggactgcggcctcggggtcgggctcaggctccgacgcaacgccggcgaggagcgccgccgggtacgtggacccggagtacctgatcacgtaccagctgaccgacaagagcgacgtgtacgccttcggcgtcctcctcgtggagctagccaccggccggccgcccgtcgagcgcagccgcggcggcgaggcccggctcaccaccaaatgggcgttgcagaagtgcagagcaggggaagccgtggtggccatggaccccaggatgcggcggagcccggcgtcggtggccgcagtggagaggacgctggcgctggcagcgcagagcgtcgcggcggccagggatgagcggccgtccatgcggcggtgcagcgagctgctgtggaccatccggagagactaccaccgccaggaggagccgcgctgcggcgccgtcgctgcggaacgtagcgacgagtgggtcatcaggtagcttagcttgccagttgaatggatatgattctgctttggattgatcggcatggaactgtaactagcctgtaagtggatgcgaagttctaggaagctgcagatttttttagtacgtacaacttctgtgattactatcaaatgatgtagtcattgcagccaatacctgcgaatttctagaaaacagtagacgttgtaacaatcagacgactttgctgaagtagccacttgatccctcaatcaaatataaataaccatcgaaggatgaggatgttgatgta

SEQ ID NO: 41736 - DNA, 1210 bp, Zea Mays
gggtttgactctgctgcgagcccgaacccgaagcagcagagctgcaaaatctagtctagagcgaaagaaatggcgagcgtggcctccgcgaggtgttacggccttctcctcccgccaagcttcgccggagcacggtgctgctcccgtccgtcctcttcgctccgtctgcggccgcggtggggcctgcgccggccgaggacccccctcgcctgcgtcgcgccgcccgactccgcggagccacagacggatgagcaggctgtgaaagctgaatctatccaagaagatgctccgactagtacacccgaggatgctgggcttccagctctcccgaataaggatctcaacagaagggtagcactactgtccactcttggagcggtggctctgtttgcatcccagaggctcaatcttagcgaggcatctcttaaagatcttgcagccaattcggttccatatgaagaggctctttcaaatggcaggcccactgtggttgagttttatgcagactggtgcgaggtctgcagagaattagctccggatatctacaaagtggaacagcaatacaaggaccgtgtcaattttgtgatgctgaatgttgacaacacgaagtgggagcaagagcttgacgagttcggggtggaaggcattcctcacttcgcctttctggataaggaaggaaacgaggaaggcaatgttgtcgggagacttccaaagcagtatttccttgacaacgtggttgcgcttgcttctggtgatcccgagataccgcacgcacgagtggtcggtcagttctcgagcgctgaatctaggaaagttcatcaagtcgctgatcccagaagtcatggctagcagtagttgttttctatgtggacagctgtaatcatagttctaatgccaagaccgtttgacaatcttgtttttttgcaggaggagatcctaggctatatactatagttcattcagccctccctgtatcgaacatgcgggcgctgcaaagagctggtagattccacaaaacccggaagaaaaggctggcgcggattccttcagtgatactgaaacggttgcatgttattattatacgagatactgttacgttttttaaaagcagtatagagggtcgaaaaggagagagccagcctcggcccaccatattcgcatcgccgtctcctttgtgtgatcaggctgtctgccactctgttgcccggca

SEQ ID NO: 41737 - DNA, 2381 bp, Zea Mays
aaaaggaccccaagatacatggtaggatagtatctgactctgaccatttccataacaaaaaggatatatggcctgaaggatatactgctttcagaaagtacatgtcaatagaagacccacatgcagtaacattgtacaaaatggaagtacttaggaactctgatacaaaagcacgcccgttgtttagggtgatctcagaagacggggtgcagattgatggatctaccccaaatgcgtgctggaaagagatataccgcagaataaaggaaaaacagtgcactgaattggaaagaaacgtatgccaaagttctggttcctacatgtttggcttttcaaatccgcagataagacaacttattcaggaactgcccaatgcaaggtcatgtttgaaatattttgagaatggtggggacactatcctgggttatagagcggttcaggttaattggaaagatctggactattgcaatgtttgtgatatggatgaggagtatgaagacaacttattcttgcaatgtgacaagtgtcgtatgatggttcatgctagatgttatggtgaacttaaacaattggatggaggactttggctttgcaacttgtgtcgaccaggtgcacctcgtgtgtctccaaaatgctgtctatgtccagtcacaggtggtgcaatgaaacctacaacagatggccgttgggctcatctcgcatgtgctatatggatccctgaaacatgcttaaaggatgtaaagagaatggaacctattgatggactgagcagaatcaacaaggaccgttggaaacttgtatgcagcatttgcggagtttcatatggagtttgtatacagtgttctcatcctacctgtcgtgttgcgtatcaccctctttgtgcacgtgctgctgacctttgcattgaggtagttcagacagatatggcttcatcatctggttgtgcaaggaccgaaccctataatttacacaggagaaggggccaaaagcagccacaagttgtcgctactgcttctctgaaacgtttatatgtggagaatagacctcatattgtcagtggctactgccaaaacagagtaggcaatacatgcggagaatcaattcaaccgtttggtttgtcagatgctgtgcagcaagaagctattggcaatgtgtcttctatggttgaaaaatatacaatcgtgaaggctacatttaggaagagactaacttttggaaaatcaaaaattcatggatatggtgtctttgccaaggttgcacacaaggccggagatatgatggttgaatacataggggagattgttagaccaccgatatcagacactagagagcggcgaatttacaactcactagtgggtgctgggacatatatgttcaggatagatgatgaacgtgttatagatgccactcgggttggaagtatagcccgtctgatcaatcactcatgcgagcctaattgctattcacgtgccataactattcttggagatgaacacatcatcatttttgcgaaacgggacatagatccatgggaagagctgacatatgattataggtcagaaggttaagattttgctttttgaccttttgaacatcatagttttgtacaaaatgttgtccatgctttcttcaggtttttttcaagtgatcaacgacttccatgtttttgtggattccccaaatgccgtggagtagttaatgatgttgaggcagaggaacagtcggctaaaatcagagttaagagaagtgaattatttgaaaaaagtgaaaagtaaagggtatacgtatgaatcgggatgtgggctctaaagaaatgaacacgatgataaatacaaacttagcgtttgaccatggcaattggtgaaaaaagagtggtacatcatattggttgggatatgacatgcttgtgtgatatgcttgccagtgcctaaaggcaaattctaaaaaatggttgagtttcattcttgaatcctgataattcttctcattatttgagtggaagacgaatctaattgtataggtacccaatataggatcggcaatccaatttggggacataagttgaatcaattgtcgtgtaccattgaaatgttagttgttacacatatttcggccatttgagatggcctgccatgtgtaatgtaatcgaagtacatggttgcacttttcggtgttgcccatatattatccataacaatatgtagtttcagctgttctgcatttacgaaaatgcattggaagagaaacgtccacttcaactgaatgtattctacgaaatctttatttatgggtatccgtctgttgtgcattctaacctttgtgaatatagagcgtgtatcttatactccttaagtttcaatttacaatttgtttgacttgac

SEQ ID NO: 41738 - DNA, 5735 bp, Zea Mays
atcttcgacaggggtggtccatgcgtttgagctaaacgatacaggactggctgtagcggactcctgcagcttgagccgaaaaaatggtgtctgccggctaaatccactgtcctcttgcaaatcccatctccctctcgccgccgccgctgcctccgctccgctcccctccccgtcctactcccgctcccactgtcccacccaccacccgaaccttaaacccccacgaacttcgcccaaaccctaaacctcgtcgagccgcagccccgccatgccgaaggtctttggcaccggcgtcttcgagttccggcacccccgagcggccgagtacccactacccgcggacgccgcccccgctacggctgcggcgcccgacaaagttcccgcatccaccggcggcggctccatcacgctcctcgacatccagcgggaccgcctcacccgcgtcgccaccgagcattggggcacggccgccgctgcggcggccttcgacgcggaccttgtcaggaagatctatggcactgagctccgcgtcgaggggaggggccggaaaactgtgccgctgcagcgtgttatgatcctcgaggtcagccagtaccttgagaactacctgtggccgcacttcgacccggttgacgcttccttcgagcacgtaatgtccatcatcctcatggtcaacgagaagtttcgggagaatgtggcggcttggacatgtttccatgaccggaaggatgcattcaaggggttcctgtggcgggttctcaagctcaaggaagaggaaagggctcttaatatggcagagaaaacaaattacctcctgtttatgataaattcatttcagagtttggaggacgagcttgtccgggaaacaatacttcagttagtaagcctaaagctgtggaataccctttcgtttggacgacttcagatggaactctgcctaaaccctgaattgattaagaagtggaccaaaatcagaagaagagaggcaaaggaagcgaaaaaggctgaccaacctatcaacccttctgaaatgctcgagaataagttccttaggaatttaattgaagaattcgtggagattctcaattcaaaggtcatactatccaatcaagatggtgctgaagaatctgtattgaatgagtctttcagtgggcaaattgacgattcttgcgttctatattgtgagagatttatggaatttttgattgacatatttttgaggcccctggttgctgatgttgctgttgttgccaagtgccacttaagtgcactctacactcatgaaaagggacggctttttgcacagttggtcgacttgctgcagttttatgaaggttttgagattaatgatcactctgggacacagctcggtgatgatgatgtcctgcaggcgcattattcccgtttccaagcttttcagttgctagcatttaaacaagtgcctaagctgcgagattttgccttgtccagtattggttcactccataagcgagctgacttaacaaaaaagttgcttgtcttgtcagatgtggagctgcaagatctggtttgtaacaagcttaagttaatctcagagaaagatccatgcagtgaaagacgcgattttcttattgaagtcctagttgctttttttgagaagcggcaatcccaaaaagatgcagtaaatgcacttcctttgtatccaaatgagcagatcatgtgggatgaaagccttgttcctagcattaattactctggagaaggctgtcttgccctcccaaaactcaatctccaattcctgacgcttcatgattatttgttaagaaatttcaatctgtttcgtcttgaatcaacctatgaaattcgtgaagacattcaggaagctgttcctcatctacatgcttatatcaataatgagggagagacagccttccgtggatggtcaagaatggctgttccgatcaagggatttaagattacagaagtgaagcagccaaacattggagaagttaagccttctgctgtaactgctgatgttactttcagcatatcaagctacaggtatcagataaaatctgaatgggatgctctgaaggagcatgatgttctatttttgctgtcaatccgcccttcatttgaacctcttagccctgaagaggctgaaaaatcaactgtgccagaaaggttaggattgcaatatgtacgtggatgtgaggttattgaaattcgtgatgaggaaggagcactcatgaatgatttcacaggaaggataaaacgagaagagtggaaaccacccaaaggtgaaattcgtactgtccgagttgccttagatacagcgcagtaccacattgatgttaccgagacagcagagaagggcacagaaaatgtgtatggaacatttaatattctaatgagaaggaaacccaaggagaataatttcaaagcaatcctggaatctatacgtgatctaatgaatgaaacatgtgtagttccagaatggttgcataacatattcttgggttatggaaatccttcggccgcacagtggatgaatatgcctgatcttctggaagttatagatttcaaggacacttttcttgatgccaaccatgttcagcaaagttttccagattaccaggttacatttatcaattctgatggtacaaaaaacctgcatccaagtcccccttttaaaatcaggctatccaagaaaatgagggaaagcagtcatgctttacctggcaacatgaactccaatttgactgttaagagcagaaataatatggctgatggggagcctcagaaagagaaactaattgttgaaacttacattccagctgatcctgggccgtatcctcaagataaacctaaacagaactcagtgaggttcacaccaactcagatcggtgctataatatctggtattcaacctgggttgacgatggttgttggtcctcctggtacgggaaaaacagatactgctgtgcagatattaaatgttctatatcacaactgtccttcacaaagaacactgattataacccactccaatcaggctttgaatgatttatttgagaagataatgcagagggatgtgcctgctaggtaccttctccgccttggtcagggtgagcaagaattggccactgatcttgattttagtcgtcaaggtcgtgtcaacgctatgctggtccggcggctagagctgctcggtgaagtttctaaattggcgagatctcttcgtcttccagaagatgtgggctacacatgtgaaactgctgcatatttttggctattacatgtttatgcccgttgggaacaattcttagctgcctgtgctcaaaatcaagacaaaccctcttttgtcaaagaccgcttccccttttcagagttcttttcagatactccgcagcctatttttaccggcgagtcatttgagatggatatgcatgcagcgaaaggttgtttcaaacatctttctacaatattccaagagttggaggagtgtagggcttttgagctacttaagtcaacagtggagcgagcaaactatctaatgactaaacaggccaagatagttgctatgacttgtactcatgcagcattgaagaggagggactttcttcaattaggtttcaaatttgacaatttgctgatggaagaaagtgcacaaatattggagatagaaacttttataccgatgctgctgcagcggcaggaagatggccatgctcgtcttaaacgttgcattttaattggtgaccaccatcagttaccccctgttgttaagaacatggcttttcagaagtatagccacatggaccagagtctctttacaaggtttgttcgacttggtgtcccttatattgagctcaatgcccagggtcgtgcaagacctagtattgctgaactttataactggagatacagggagctgggagatctgccttatgtccgtgagcaagcaatcttccataaagctaacgccggattctcttttgagtatcagttagttgatgttcctgattataagggaaaaggtgagtcagcgccttctccttggttttaccagaatgaaggggaggctgagtatattgttagtgtgtatatctatatgcgcctgattggctaccctgccaataagatttcaatattgaccacctacaatggtcagaagcttcttattcgtgatgttatcaacaaaagatgcaaaccatggaatattgagccccctaacaaggttaccactgtggacaagttccagggccagcaaaatgatttcattttactttctcttgtccgtacccgttttgtgggtcatcttcgtgatgtcagaagacttattgtagctatgtcccgtgctcgtctgggcttgtacgtgttctgccgtcgttcactgtttgaacaatgttacaaattgcaaccaacattccagctgctcctccaaagatctgataagcttgccttgaatcttgaggagtgcactccttttaccgagcgacctttggaggaaactggaaacatccattacattactggtattgaagacattaattcatctagtaaagttcaggctggaacatcttcgtcaagtgcaatacatgcagtattatgctcctccggcaaatgaactgcctcaagcagcaccagaaaatattgctgatgcaatcccttctgaaaatggcaatgctggaagggctctgaatgatggaaacgaggacatgacccgggaagaaaatggtggtgcaactgacacagtgatcagtaataggatagaggaagacagcgttgaggcaaaggatgacatgacacaggaaggggacaagggtgaagtgagtggcaagggtcacatggctacagaggataggaaaggggaagcacaaggtggcgcagatggcaagctggaggaagcaaatgtgatgtcggcggacaagatgatggaggaagcaaatgcgacgtcggcagacaagatggaggaagcaaatgccacgtcggcggataagatggaagaagcagatgccacgtcgtcggacaagatggaagaagcagatgccacattgccggacaagatggaagaagcagatgccacattgccggacaagatggaagaagcagatgccacattgccggacaagatggaggaagcaaatgccatgtcgccggacaggatggaggagaaaaattctgatccgaaggacaagatggatgaggagtgacgtggtggtgtaaccagttttgaaatagcggtagacttgttctgtcagccgcatatcttgatttggaacatcatgtattcacctgtgttaccgcagatgaagactgatacgtgctccccaagaggtgtagccttgtgggcagaatcaagatcgacatatgatgaccatgttcctgcggttaatggtggtgaaggctgttttccctaccatcttggccaggctatgctggaaaatgttccttctcttccagccaagggtatccatgtttccgcatgtgtttaatcgtgtaaactgtagaggattttttgggtagttttttctgaaacacccgttccatctatcgttgtctccgtaacataacacagctggaacgttgcttttgtatacttgactgactactataattttggcacaagcattagatttttgcagatttgataggccttatcggccattcaaaattttgatttgacagaccaactcacccagcctataaaagagaagcaaatgggagtaagaaataaatgtatgacactggca

SEQ ID NO: 41739 - DNA, 2092 bp, Zea Mays
aagccctaaatccatggaccatggctcgcgaagcgacgaacgcgtggcctcggccgtcaccgtcagcgcggaaacgaagcaagggcaaacgagccgttctctcccccgcgccgccgacgcaagcagccgccacggagatggaggccgaggcgtccgtccccgccacggactacgtctacgacgcgctcccgggcctgcacctggccttctcaccggaggagacgctcgatgacgccgccgcggggcaggacgaggacgatgcgaccgcgacatacgccgtcttccgcaacgagataacggaggctggagatgtgctcgcggacatccctgctgcggacttcttctcactcgacgtctccacctctgcctccgtcgagcccgagcccgagcccgagccgccatccccggcgcccacagctgccgcggcaacgccctctatctcccgtgctttggaggaccagccgccgcagggctcggagcgcgcgtggttcaggggagggaggcggttcaggagccccatgcttcagctacacaaggagatcctggacttctgtgattttatctcaccttctactgaagagcaatcttcacgagcagctgctgtgcaagatgtctctgatgttgtcaaacatatatggccacagtgcaaggtggaagtttttggatctttcaggacaggtctctatctaccaacaagtgatatagatgttgtgatatttgaatccagagttaagactcctcaagttggtctatatgctcttgcaaaagcattatcccagaaaggtgttgctaaaaaaatacaggtaatagcaaaggcacgtgtgccaattgtgaagtttgtggaaagaaagagtggaatagcttttgacatcagctttgatatagatggtggcccacaggcagcagatttcatcaaggatgctgtgaagaagttgcctgctttaagacctttatgtatgattctgaaagtttttctgcatcagagagagctcaacgaggtctataccggtggaattggatcatatgctcttcttacgatgttgattacacatttacagttggtctggggaggaaaagatattctcgggtatcatcggtccaaggagcacaatctgggaattcttttggtcaggttttttgatttttatggacgcaagttgaacaactgggatgtcggagtatcatgcaattcttcaaggacctttttcttgaagagtgataaagactttatgaatcatgaccggccacatcttttagcgattcaggatcctatggcaccagataatgatatcggaaagaattcctttaactactttaagattcagttctccttgaccggaaaggctggaacaatgaagatatgttagcggaaccctgggagccgatcacccaacagtttgacaccgagaatgatgcagtatacaattggcatgtgatagacgaggatgaaccattgcccagaaatagtcaatccacatccgaggacactagttcgtcaccatctaaaaaacggaagtccccaaaatcaagacggaaatcgcgaaagaagtcgaaggctactgcctcaggcagtagtgatgttgcaaatgggttcagaaaggatagatcatccaagcgggaagcgggaagcagcaaacggaggaaagggccaaaggagtacgacagattcacgaatacactcccaaagtacacacatgttagcaagtggtaacttatagcatttatagtctggtcgcaaaggtccagcaatttgacagtgagaagagtatcatgtcacattatggcatgcgatgtgaatgacggaagtcatcagcagcaccagaagcgccatcgcatggtttgcttgttggtctgtttaattgctgtactttacgtaacagagatcacactagattaaatgatgttttggttattttatttatgctgcagcagttttggcgactagcttgtattctttttgtaacggtatgggttggtgacgatgagattatgtacgttcaaacatatttaattgatggtctgatggccttaatcactgaacaatgtgttcaaaacattatttttcaatcaaaaatgtagaactctgaaaaat

SEQ ID NO: 41740 - DNA, 610 bp, Zea Mays
ggccgttcggtttaaacagagttaggggccgttcggttattgaggaacggagccctggaactattcacatccaaattgtttctctaatttatgtaagttttgattagctagaataattcctggtgtaatcctgtgcaaacgaacaggaccttagttgaaattgtatatcctacggatggaggctctactagcatcgaattagcgaaggacgtggcaagcccccgcaccaacgaatgaggtggttgaagggacggatcaagcaccagtggatgaatcgcctggagaaatcataagatctgtcttggtagcgctcatttcattcattgccaaaaggagcgtgaaagccaccgccttcgcttcgtcgccgagcggtgccgctgccctcgccgccaggataccacccgacccctctccacgcggccaggatacctccgtgtatgcttctagctctctagcccgttgaaaaccatattgctaatgacgacttgccgaagaacacaactccatggaaatactaacatctgtcatgaaaagactgtaattcttgttccctccccgggttggaatatttaaaattcgatctgatattataaagtatatcaataaccgc

SEQ ID NO: 41741 - DNA, 285 bp, Zea Mays
cgtaccgtggtttggtgcgcaggaaggtcaacgaccacgcaggcggcggagtcgcggcggtgatgaatttcggcgagaaattccttggtcccggtcgatgctctggcccaagaaaccttaccggcatcctcggggtgttacgacgaacatcggacgatcctgtcactccgatttctgtcgtggtcagtggatagtggtgtggaggctcacagctccccctcggttcctgttgacgatcgacccctacctcggcgacatatggaattggtttggattggaagggaa

SEQ ID NO: 41742 - DNA, 996 bp, Zea Mays
acagagcgccacgaggcgagcagtcgagtgttccctagagtccccgttcctccgccgccgcctgcaaccgcttcacgtgccctgatccatcgcaggtcccctttctgaccccaaatggagccgaagaagtcctctgctcagcaccagccccacgccatggaacccaagaagtcctctccacgcggcgccggggccgtcgccgccaccgccactgaagccgagtccccgttgagcagcttgttctacccgccggcgcccgcggcaaatgggaaagatcaggagttgtacagcattatttacaaagggcagagcgggagcgcacaagctggcgcgacagatggtaaaccgcaatgggctccttccaaaagtcataccgcgtacgcaaaggacggtaaacattcaccaccttatgatacgtcatgttttgggtcatctgtgcattatggtggtcgagattatttctacggcagctctacaaccaagaaagcgacagaatcctccactgactacaaaggggacaagaaagatccagtcgcagattctcatggcgactggtggcaaggctcattttattactaagagaacctggtggcctctccttggagaacaaggaacagaaggagggcagtgaagctcggtttccttgattgctagcagtattatcttgtgtcatagtggacccgctttcgtccagcggtggtgccaatatttagaagcatcacctggcctgggcagatgtagtgtgcgtcttatagtctctgctttagatgtgcaatgtaacgaagctttagcacagtatgaactagaccgcataaaagaatccatgtccattccgccagtaatacgagcgggttggtatctgactccttagagtcaaaagtctgtacaattgtatcgtcgctccaaagcaaaaaaaaaacaataataatgtgctggagaagcggcgatgacttcacattgtacacctttaccagctggaatttgacagaagtttgg

SEQ ID NO: 41743 - DNA, 284 bp, Zea Mays
agttttgaaaaacagagaacgcgattgatctttggaaaggggttgaaattcatatttctgaatttcccccaagtgccttagtttaggggttgttttggggatttaaaaaagttcaaatggcaaaactcccttactatgctttgttagctaattagtgaactaaaactttgtaatttggtttttttccaaaatttgtatttttctcccaagattttctcccaattaccctttatgcttaaatggttcgcttaggatcaattagggtttgagagttttccttcctt

SEQ ID NO: 41744 - DNA, 2533 bp, Zea Mays
atggcgcggtggccgggcgcgggcgagggcgcggagggcgggcgccgtcgagggtgcggcgggcaggcgagcaagggcgcgagcacggcaggcaagggcgcggcggacgggagccggcgagggcgcgccggccgggcgaggtcgcggcggcgagcgagccaattcctctacccgttctgcccttctcagtttctccagtacaggatcgaggcttctcctggtagcctctccgtcggagcgctccccgccgcctgcacatctccctggcagtggcggttgcctccaccctcagcgccgcccagatccctcgtcctcacctgttctctatcgcggaccctgatctgtccatgctcaagaatcaatccagagttaagttgtatggatcctgctgatgttccagaagggattgatcccaagagtgcgtgcagagtggaggtcactgtcaattcctacttcactatgcaagatggtagaaaggaatataatcgaggcaagacagtaagctatgttgttgattcagaagaatactcagttattgatttagagaaagatattgcttcagaatttaaatgggggagcgaccaacagcctaatttctgggttctaacaaggggtaatatgacaagcaagttggcttcagatgcacaacttcttgacttgttaagggcatctagagtagtgaagttattaatgatagtgggcaactgtgagcacaatgtaggacatgggcatattcctgctacatggaacatacaagaagagatacctgttgcagtgaacatagaagaagagatgcttgatgcaatggataataatttggaggaagcagatggaggatttgcatgggcagaaatacctgaatatggggaaacaactgcagggccaccaatggctaaagaggaagaaaaggagcactttatcactgttgggtgcgatcctaatggagataagccagctggaataaatgaagaatggaggtactttaaaagtgttgatcatgtagctattgatccactgcaaaatcttaaagttgagggacagaaaagaaagagggcaagacctgttttagaaataagagactttgatactgaagctgttcctgaggatgagactactctgcttgatgtttttattgtgcctcacacatcacatgacagtgagaatccagtcattaaggagggtgacacctttgtagacaagattgcttttgtccacactattaagcaatatgccatcaaaaatgagtttgagactaggattgaacatagtgacaaagaaaggtacagggcaaggtgtgtagatgaaaattgtgattggagagtatatgcaaagaagctacatggtggcaacacatttatgtcaaactatcagaattggatgtgcacacttgttccagtcaaacatctcagaatgcttcaacaattggattaaagattacaaagatctcccagtcgctgatctaatggataagattagggagaaaattatggagaagatttatacaaggcaagagatagccaatcgaatggaagggcgtatcctacaaagtgtgatacatgagttgaacatgaagagcagaggattgcactatgaaatcgtgaagagtggactgttgtcagctgagatatcaggaataacaaaagaagggaagaattggagagttgcagttgacattaagaaaagaacttgtggatgtggacagtggcagatttctggaaaaccttgcactcatgcaatagctctatttgggaaacttagaaaccttaacattgaggactttgtggatgactactattcaattgagaggttcaaaatggcttatcagtttgtggtcgctccgatgggtgacaagactcaatggccaaaaattgaccctgggtttaaaatggttcctccaaagctagaaaggcctgctggtagaccaagaaagaaaagaatcaaggctagtggagaggcaggaaaaagaggcccatatcagtgcaaaaggtgttttcagtttggacatatagagaagggctgtactgctactcaagctgaattagaacaagagcttccaccacctcatccaaagaaaccaaaaaaacaaagaaaatccaaatctgaagctgttgaagtctctatggttgatgtcgagccatctcaaaccgacggtgttccaaaagtgatgtctagcccaggtgtaacaacaagaagcatgtcttctgcttctccaactagtccaggtcctacaacaaggaggaaggcatccatctcaccaggaggaattaatcggaggctcattattagctagatatagtagttgtcattctctattttgtgtgtgggcatggctgtgcaactattttgtgtaactattttgccgctatgcaacactatgtctgatggtggtgcttctatattctgaattgcaagaactcatttaaatgttgcagttatggtactgaaatggcatcaaaattatatatatatatatatatatatatatattgtgtccaaatgtaattgaaatggaggttggactacaactatattg

SEQ ID NO: 41745 - DNA, 2252 bp, Zea Mays
gtcaaaccttccctcttcaccttctcctctcctgtctcgtcttccgttgaagagaggcatgcgctcgggcggcggttgggtgcttcatcatcgtacgtagctgcctgccaaggcgcatcttatctttagaaggcgacgaggaggagaagggcagggagaggaggtgtgtgtgcgcgcgcgcactgtgcagtgatggaagcggcgggggacgaggtggtgcgggcgctcggtgccgggtttgacctcacgtccgacttccgtatgcggtttgccaaggccagcgaggggcggcgcctggtggagctcggcgaggagacaagggacgtgccgctcccgggcggcggcggggcaacgctccgcgcggtgccgcgcgacgtcggcgtcgacaagggagaccgcatccgctttcgctccgacgtactcgagttcaaccagatgtcagaattgcttaatcagaaatcttcagtccaagggaaagttccttcaggctattttaatgctctctttgaattaagtggagcttggttgactgatgccaaagagaccaagcatctagcattcgacggatatttcatttctttgtacaacttgcatctaaaggcttctccattagttcttcgagatgaagtaaaaaaggctgttccatcgaagtgggatcctattgcattatcatggtttataaagaattatgggacacatataattgttgaaatgggaatcggaggtcaggatgtcatatgtgttaaacaaagtcattcttcaaccatttcaactgtggatcttaagttgcacctggaggaccttggcgatttcttgttttctgatgggaagaaccactctccaatacatcgcaagacaaaggatggcaagagcaaggtgcctgatgtttttgtaaggatagtgcagcaaccaaataacctgcacctttctagctactctgaaacatcaaccaaggatggcctgacagttacatgttcgaagaggggaggagaagcatacctacccaaccactccaagtggctgcaaacagtggcaaagaaacctgatgccattatgtttaaatttgtccccatcacctctcttctaactggtattcctggtagtggttacctcagccatgccatcaatctatatcttcgctataaacctgatcttcaagacttgcaatatttcttggagtttcaagtgcctctacaatgggcacctatgtttaacgagcttgtccttgggccccaaaagaggaaaagctcttatccttcaatgcagttcagatttctcggccccagactccaagtcagcacttctcagttctcagaaaccggtggttggcctacggctatacctggagggcaggaagtgcaaccggttggccatccatgtccagcacctgtccagtgttccaagcatgattggagactccgtggcatcttcaatgtcagaatggcgcgagtcccaagacagcgacccggggtacgtcgaggccatccagtggaagaagtactcgtgcgtctgcacctccgtcgtcaagtacaacccggagtggcacaagagagctcccggcggagtctttatcgtcactggcgcgcagctcgtcacgaagggggcctggtccaagaaggtcctccatctgcgcctcctctacacccacatccccaactgcaccatccagaggaccgaatggacgaacgctccggcggcgtctcagaaggggagcttcctgacgacgatcagcacgacactgagctccccgttcacgcagcgtgacacccaccaggggaagcatgagccggtgcagctgaactcaggtgtctaccccgacggaccgccggtcccgctccggtccaggaagctcctcaagttcgtcgacatttcggaggtggtaaaagggccacacgacgtcccaggccactggctggtgatcgcggcgaagcttgtgaaagagagaaggaagatcgggatccatgttaagtttgcactgctgggctatgaaggcctgtcgcagaatgatagtttcatgggttgagtctgtacataacaacagctggctgatcttcgtagatttcaggattttagaaaaaagcataggatgaggatttgttattagttttttttttgggagggtcgacaggaagtgtatagagggcagtcagactcacagtaaaaccaatcacggctgtgttgagttgttccgtgaattagagaccatacttgtaaattacttcttttttaaatcacttcggttaagttactct

SEQ ID NO: 41746 - DNA, 1163 bp, Zea Mays
cctggattgtgcggttgcttcatcttgctgtgtcatggcttgccttgtgggctatatgttatgaggaggccaagaagaggatgtatgcttttagtacgacgacttatgttggttttcaggctgtaatgaccgaggaaatgtcagaaaaatttcgcggagacaaatatgacaatggtgtcatcactccaagaccaccacctgttcattatagcagaccatcaagaactgacaggaaccgtaactaccgaggaaactaccaggatggccctccacagcaaggaaattaccagaacaaccgtcctccaccagaaggtggttaccagaacaacccgccgcagcaaggaaactaccagacataccgctcgcagcaagatggaagaggctatgccccacagcagaattatgcacaaggtggtcaggatggtagaggttttggaaggaatgattacacagaccgttcaggctacaatggaccacctgattttcgaagtcaaactcagtaccaagggcatgtaaatccagctgggcaaggtcaaggttacaacaacccccaagagcgtagcaacttctcgcaagggcagggaggaggttttaggcctggtggtccttcagcacctgggtcttatggccaaccatcagcacctggatcttatggtcaacctaatacacttggtaactatgggcaggtacctccatcagtgaatcctggtggtaacagagttcctggtgtgaatcctagttatggtggggatggcagacagggggctggaccagcatatggtggagataactggcaaagaggttctggtcagtatcctagcccaggtgaaggacaaggaaactggcagggaaggcagtaagagctgacgtgttccactgaagacaagaatggcacttgagatttagaaatctccatctgtaaaataaacgactgtgatgcattactcttttttttttcttgcatttgaactctaaacttatgggcatgcgttattaccaaacctacggatgcaaattcattttagttttttgggccaaatgttggcatttttaaatggcgcagaatgtggaactcccctttgtcttcgtgtattgtttgcaggtatgctgtcactgtaaaacacgtgctaattactatagtattttggtgtagtttctcgttt

SEQ ID NO: 41747 - DNA, 1091 bp, Zea Mays
cgaaacgtccaagtcaaccaacgaggcaacgacgcgggcaaagcggcataggggaagcgagaagcccaaccaccgagccctcgcctcaaaatccagctgccacgccgagcccaagctcccaatcgccatgaagccggcggcgcggcggccgctgctgctgtgcgcgctggcggcggcggcggcgctctccatcctgctggtcgcgccgccgcctctcgccgcgcacctatcatcactgctcctcgccttcccggcgtcgccctacgcgggcgggcccaagctggtggtcctcctcgccggccagtccaatatggcaggccgcggcctcgcgccgtcgctgctcccgccgcagtttcgcccgcacccgcgcgtgctccgcctcgccgcgtcccgccgctgggtcgtcgccgccccgccgctccacgccgacatcgacacccacaaggcgtgcggtctcggtcccgccatgcccttcgcccaccgtctcctccacgctgcctccccggacctcgtcctgggcctcgtgccctgcgccgtcggcggcaccaggatctggatgtgggccaagggggagcctctctacgaggccgccgtcgcccgggggcgcgccgctgttgccgccggcggaggcaccctcggcgccgtgctctggttccagggggagagcgacaccatcgagctcgacgacgccacggcctacggcggcaggatggagcgcctcgtcaacgatttcagggctgatctcggcatgccgaatctgctcgtcatacaggagaggggaattacactgatatcgtcagggaggctcagagaaacatcaagcttcctaacgtagttcttgtagacgcgataggattgcccctccgcgacgaccaactacacctctccacagaagcccaactccggctgggtgacatgctcggacaagcctttttgaaatttaactcgtccatggattcgagacaatgacatcgatattataccggtactggacctgttgttgggtgtagagctaaatgacaaataccattcttttggaatgttccattgtaaagtgtagagcattgtacaagaggagtgagttctgtcca

SEQ ID NO: 41748 - DNA, 1719 bp, Zea Mays
cggactcccagactcctcccaaaaccctcgcatcctctcccacgcatgtcacaatcgccatgaccgacagaaaccccgccgccgcctcaagcaagcgtcactgtgacctctccctcgacgatcccacgccgtcggccaagctccagcggtgctccgagccgtcagaaccaacgccggcggggaaaccgaacggcggcgcggcgacgggagaggagagcgagatgatggccggcgcacggaaccctagggcgcagaggtacctggtcgccgtggagtacattggcacccgcttctccggctcacagaagcagcccaaccagcgcaccgtcactggggtcctcgaggaggcatttcaccgatttattgggcagccagtttcaataatcttttctagccgaacggtgttcatgctttatcaaatgtttgtcatgttgatgttgagcggataagtaaaaggaagcctggcgaagttttaacacctcatgagcctggagttgtaaaacgtgctgtgaaccactttctactgaagagtgaaggtgacataatggtgactgatgtctgctgtgttgcaccagattttcatgctagatacaaatctctagagcgcacatatcactatcgcttgcttgctggacctgaatcaacatctgtttttgagaaaaactctgtttggcatatatctgaagatttggatattcagtcaatgaagaaagcatgcagcatacttgttgggcatcatgatttcagttcatttcgagcggctggatgtcaggcaaactctccagtgcgaactctggatgaacttagtgttacagaagtattccctttcatgttttttccttcaagtgtagaaagatcagagttggaattatcaaatgtctctcttgtttattcaaggaaaccagacatggaatcttctgggaaaggatctgatggttcctgtaccagtagtgtgaaatcagattttgagaatggaaaagattttggaaagcggtcaaggcaccgttgctttgttgttactgcaagggcacggtcttttctttaccaccaggtaaggttgatggtcggtcttctaaaatctgttgggactggagatctaacaactgcagatgttgagagaattctggatgcaaagacggttactgctgcacccagtatggcaccttcttgtggtctgtaccttgctaacgttaaatatgatctgaatacctgaagacaagttttatctagtggcttctgttggtgggcctccagattttgtcagctgttggctatcaaaggaattatatgctgccacttgccaaagctttcagttgcctgttttgtccactgaatcttgcatggtgattgaaaacctagaattaagtttatctgtcagcacaagagccggcttcattctcttcttgtacacagagctcttctgcatgttcagaaacaaaataggtagcttcattttagttaagttcaactatccactctttaaatttcagctggatccacccgattttgttgggtgtacgtagatttgacctggtaggggcaaaattttatttcttggttttctcatgactgtacttggttcttgatatataattaattagccaaatgcgttgtgtgcatattgaaaatattcttttctgttccttgataaattacatcgagcaagactgcaagagaactttcttcaagaaaatattcttttctgttccttgataaatt

SEQ ID NO: 41749 - DNA, 2616 bp, Zea Mays
gaaaaatgtatgctgtgcgcgcacagccttttcttaaaaaaaggaaaaaagaggcacaataaatggcgtcaaagccacgggccttcgcgaaggtcttcctccccgcgctcccgccgccgcccctcctcactgcccccgtcttctcgcggtagccggccgacgaatcggggtgccggcgcggcggcgatgtcggctgcggcggcagcgccagcgcaggctccaaggaagtgggagggactagtggacgaggtgctcgagagggaggtgctggcagcgtgcctggaccaggcccccgagcgccgccgcatccgcgaggctttcaaggacgttcagctcagcatcgaccattgcctcttcaaggtcaacccctccccctattttgcctatttgcttaaaatccagttaaaggtgccactttttctcgtgttccagaaattatgttcgttcttattatcggttcttcatatttagtgacgtgccaggataggattggttgggcaagataatacaagtactgttttcgtgcgttattgtctactagttgagagaatagactaacaagatgcaatagaaacctgtgtttataataaaatgtttcgttttgtgaaccacaaacttctggccttcatctaaaagatgtctaggcaaagcatgtgttatcaattggttggaagtatgggtgggtactagtaatactgtacaatattattattttttggctttttaatctccagtgcaatggtttttgtagaatataaataaactctgctataatatattttttcaatcatctcacttcaaatgatggcatagaaaacaggctttatgatttcccatgctatggatgatctctctcacttgcattcggattatgatgcagggacaatatagtggcatcagaacaaaggaggtactatatcttaaactctatgatttcttcataataattagatccctcaacttctactgcaacacataaatttatttcatccatttctatacaaggttatttatgtcatactgcaacataaatttatttcatgcatttctgtacaaggttatttatgccatagagttgatcccttgttttctttctaatgagtgcacactgtacattggagaaatatttgaatgttttactctatgcaagtgaggtgtgttatttatttaattgaattgaagtattgaacgagtgctcaccgtgttgaaatattggatagttgcagtatttgttttttaaaaaagtaagtacagggcactgtaatgttgaaattcacatggcatgtccaatagtacattagtttctcctttgctttggtaggtgttttgctgtgagtgatgaaccttcaggagttggctattttatagatcatttttccttgtatggaagatattttcagtcatgtgagcataactctaggggtgtggagattttctcaaaatgctggtttccggagaatcgtcgaatgagagcaattgtttgtctttgccatggttatggagacacatgtaccttttttcttgatggagttgcgaggaagattgcttcagctggatatggagtatttgcactggactaccctggctttggtctttcagaaggacttcatggatatattccaagttttgatacacttgttgatgatgtagctgaacacttctctaaggtcaaaggaaatcctgaatatagaggcctaccgagctttctgtttggccaatctatgggtggagcagttgcattgaaggttcacttcaagcaaccaaatgaatggaatggtgcaatactggtggcaccgatgtgcaagatagcagacgatgtggttccaccttggcccattcagcaacttctaatttttatggccaaacttctgccaaaagaaaagcttgttcctcaaaaggatttagctgagttggcattcaaagagaagaagaaacaagagcagtgttctttcaatgtgattgcctacaaggataaaccacgtttgcgaacagctctggagatgctgagaacgacacaagagatagaaaggcgtctagaagaggtttctttgcccttgatcattttgcacggtgaggctgatatggttactgacccggcggttagtaaggctctgtatgagaaagccaagagccaagacaagaagctgtgcctctacaaaggtgcgtatcacgctatcttggaaggtgaaccggaccagacaatattccaagttctcgatgatatcatatcctggctcgatcagcattccacaaaagaaggtatatcgttgtgaatcaggcagcgctgttcaccaggattgggtgaattcctttggcaatgctgtatcgcttccggttggggatcccagattcaacggtggggattccatttttgatatgaccctgtaaaatttttagttcagattatcgatgtctccgtcatgtacctgaacgatgtagacgtacatatatgtaactgattaatgtgtatcaattgaccacgaattatttgggaaaacctcagttgcaaaacgccttttattttatcacaatttctatcctagagaggtgtctgaaagtgagatgaactagcaataaaggaggtgttctgatgaactagcgataatggagaaggtg

SEQ ID NO: 41750 - DNA, 461 bp, Zea Mays
gctcgtgacgcttcggggctcaagtggggagatctgcctttaaaaatgggtcgatccctcgggtagccagcatgccttgctcttcttcgcacttgctgtgtccatccgccttctgggcctccagatggggtacgccggtgctctcttgagaggtctgcgtgagggacgtatcttccggtggtagtgccggcagatttgtcttcctttcgccacccctgggggagcacgacctcgtggtggttggcgcttcttcgacacttgttcggcttcaaggattttcatcatacagccaggctgcagtcccccaccaatgctcatccagaaggatgaccaccagcctcgtggtggggagaagaaagccgggctgcggcctccctcttgccctcaacttcgaggatgttcatcatccttgctggggcgggggccgagccgagccggggttctatcctccgcatgggtcg

SEQ ID NO: 41751 - DNA, 746 bp, Zea Mays
atatggacaaatacctgctttgcccctgagaggtctcacatctctatataaggaacctgtacaccccttcatattagatagatcagaaagagaccagaggcccaaccctatatcctgtgtctcgtgtgtttcctctgtcgtgcttatggaaagggagacgggtactctacagcttcttgcgcctctactgctgacaggagggaaggaagcagatctggtgatccgtggtgacgtagatctcaatacgttatcagcacgctctacctcgatgttgctgcgggatccgatatgcatcaactcctcatcaagccggcaggtctctcggcctagccgaactgtcctacgcgacagccttcgattctccctctacgcacaaacagtatgtttattggttgatccgttgttgtgtacgttgtcgttcatcctcggcatggggaatatggactcaccgtcgaggtgctcagcctgtgcggtcgtcaccgctgtcgccaagggcctgttgcccaattgccagtgctcgactctgtcacaaaacgcccgcacgccatgccgaggtcgcgccggaagccgtagaagccgtgtcgcgccgtagccactaccggcgatctgccccttctacaagtaacgcaggagcatggaggcgttgcgccgtagcctcgaagagccccgtgatcctacgctcggcatagaacatggattgcgagcccgcgtgccgcgacgggctccttggacggccatggtgctcc

SEQ ID NO: 41752 - DNA, 1012 bp, Zea Mays
tgacaaactgacacactactcttaagcatatctgctcttggatttttgaagcatctttaagtgattccaaaaatccatggatctgatccgagcacaattaaaaggccaaagggaggccacacacgagtttaccaagcggacacacgcgagtacatccggcgcccaccatcagccatgtgaagacagttaccttccctttgcaatccaactatatatagagatcaacgtcaaaaggaaccttaggctttgtaaacgactaacataggtatcatttggttgcttcaaagaggtgcatcaccggccaaggctttcattgccgagggaaagtttgctgctgatccaattgataatcgttgcctactctcctattgctttgctctttcacattttgttgatgggctagcttttgttcatgacaacgcacaagagtttaagtattgttgtaggtgtgaattcgaattttgaagtacatagtgggcacccaattctgatatgaggtttcagtatggaatattccataattttattgtgtgtgtttggctgaagtaggtcacatgattggaatatgaattgatatgcagttttatcaaatattttatatactgtcgtaacacatggacattgcactatcgacttaagcttgacttctgcagtctgtacaagttcacatataggagtttcacatgaggaaaaatttagcagggtccaggaggttgtgcaacctgtgcaatcatccatctcagtccaccagtcagctacccaacaaacaattttgcctcaatttgttgagccgttggcacgaagggtgtggcctctgtgcggtgatcccttgaccatgtcgattctgcacgatgactattggagtgatctaacacacctcttttttgtgcatgttgaccgtgtgaggaacacattggaggaattaagaaggagctcatgaatctgaccgtactggccatagttaggcaagcaatcgaccctatggtgaagttactagaaagcacatatgttg

SEQ ID NO: 41753 - DNA, 3274 bp, Zea Mays
tttcaaccgcttggcgggaggcaagagtcgaggggtaaagcatataaaagcgggtaaagtggaacgtatccgcccctgacgtctccatctacacccggattcgccttttttttctgaacgtcttcacggctctccttccttcgccgccgcccgcccggccatggattccccgaggggtcccgcgagcttcgcaacgcaggccaacgccctcctccgcaagaacctctgcgttcagaaacggaacctcaagacaaacatcggcatcactttcttcccaatcctgatttgcgtgcttctcatcgtgctccagaacgtcatcaacagcgagcttgacaagcccaagtacaaatgcggttgcgtctgcctcgagaccagtgccaacggaaggtgcgtaaggaaagagtgtggcattcagtactcgacgctggatcaggtggggagctgtccgattcccagcccgccacagtggccagccctgattcagatcccccgtgctgatttccgggctgcaaggacgttctcccaaccgtttaatgatttgcctgatccattttgccgtgactcctggtcttgccctgcaactgtccttgtcactgggaaggacagagcggttgcagaagctatatcaagagggctgtttcctgtcctttctccgtctttgaatgcaacagatttactggatctcttctccaagatagtcgctggctcagatacacagccatggtacacacagttgctagagcctgcatttttctctggtcgtacattgtatgtgatccagcctgagtgcacacctgtcatgtcacagaccattacatataatactgggggcataccctttcagctcaatatacagtgtgttgaaggtgctccgttatggcgtgaaactgcatcaattatcaaccatgaatttttaaagggttatagacaacgaggaggacaaataaacgaatttattgcaggttatgacttcttgggcacaacacagtatggcctcggtgtaaatgtttggtacaactctacttacaatgataacaatgcatattcatttatctcaacattgcgggttccacgcttggtgaatgcagtatccaacgcttatctgaaattaatcaaagggactggggtagacatgctacttgagtttgtaaaagatatgcccaaagttgggacaagttttcagttggatctgtcttctcttctgagtgtcttattcttcacatggatcatcgaacttcttttcccagttatgttgacatatctggtgtatgagaagcagcagaagctaaggattatgatgaaaatgcacggtctgaaggatgggccttactggctgatatcttattcttatttccttgctctatcaatcgtctatatgttattctttatgatttttggctccttgattggtctcaattttttcagagtaaatgaatatagcatacaagctgtttttttcttcgtctgtataaatttgcagattgcacttgcattttttgtggcatctttctttttgtctgtcaagatggccacagtgattggctacatgtatgtatttggctctggcttacttggtgcatttcttttccgtttctttgttgaggacaaaacttttccctatggttggacattagtcatggagattgtcccaggattttccctctatcggggcctatatgaacttggtcagtatgcattctcgggaagcagtataggaactactggtatgacctggagaagtctgaaagatcccctcaatggaatgcgtgatgttatgatcgtaatgagtgtagaatgggcagtgctgctcatattagcattctatttagatcaaacctctttgctaggcggtggtgtcaggaaaaatccttttttctgcttcagatgtttacagaagaaatgtgcaacatcattgcatgaacctagctttgtccaacaggattccaaagtcattctcgatatggagaaatctgatgttgctctagaaagaaaagtagttgagcaatttttgatagatcccaatgcaaaccaagctatcatctgtgataacctcaggaaggtttatcatggaagggatggaaaccctgacaagctggctgttagaggtttatctcttgtccttcaaaagggccagtgctttggaatgcttggtccaaatggagccgggaaaacatctttcattaatatgatgattggactcattaaacctacatctggtactgcttatgtccacggaatggatataaatatggacatgggtgacatatatacaaatatgggagtgtgcccacaacagaacttgctttgggaaacactgactggaaaagaacatcttttcttttatggctgttgaccactctctgaagagtgtaaatctatctcatggtaatgttggtgataagcaagtgaagaaatacagcggaggcatgaaaagaaggctcagcgtggcaatctcattgattggggaccctaaagttgtcttcatggatgagccaagcacaggaatggacccagcatcaagaaataacctatggaatgttgtgaaggaggccaagaaaaaccgtgcaattattcttactactcactcaatggaagaggcagaggtattgtgtgaccggcttggcatctttgttgatggcgatttccaatgccttggaaaccctaaagagctaaaggctagatatggggggacatacatattcacagtgacaacacccccagaccaagagatggaggttgaacatctagtgcgtcagttctcgcccagcgcaaacaagatctaccatctatctggaactcagaaattcgagctgccgaagcaagaggtgaaaatagcccatgtttttgacatggtcgagaaggcgaagcgccggctctcaatacatgcctggggactggtcgacacgaccttagaggacgtcttcatcaaggtcgccagaggagcacaagtgttcaacgagtttgcgtagataacacctttaggactgccttcgtagcaagcacgggaccccaattattggatgggcggactgcatagagaatcttgtggttttgtaggtatttttcattagtgagtcattcttgtgtggaaaataggctccatatgcttggtttacgtggttgtacataaataaatacatttttgagactgcagttgcagaatagaataattgtccagttgtgtccatatatattttttctttttcatgtgtggtgctcatgttttacttactccgtatctttaatcagcttattcgattggccttaatttata

SEQ ID NO: 41754 - DNA, 291 bp, Zea Mays
gaatctgagcgcgcgagaagggcaggaccgagcgcgacgtagagagttccatggcgcgcggcgagcaggaagatccgggctggggcatcacggtctgctgcgcagccatggaggcgagtaaagggagcagggctccggccgggcgcagagaacgacgacgcaggggagcagggcggtgtgcggttgagctggaaggaacagagaagcagacaccgagtagaaaagcgcggccgggaaaaaggctccggccatggggatcgagaggaacgtgcacagagaagtttggctggg

SEQ ID NO: 41755 - DNA, 643 bp, Zea Mays
gacattttatgattattacaaataagttttgagaacctaactcattttgggctttattgacctcctaagctcaatttagggttaagtgccctcccctagggttgtacccatgacatatcacctcaattcaacttgtttgaattttttgtctggtgaatgtattacatgatatgccaaggcttacgatgttatgcccaagctttagtagaagtaacaccaggggtgttacacgtggtaccgacggaagttgtctctgaactcctcccatgtgatggcttcagggtcagcatgggtggcgaggtaggactcccaccaggaccatataggaccttctcccggtcattgcactgagcggtatgtagctcccgctccactgtgtgcaaccagtcttcggcgtccatggggtctgcagagtgagcaaacacttggggatgacccctcatgaactccgcatgctgctgcacctattgcatggctgccagggtctaaccaatcgcttggactgcctgagtctgcatcagaaacatctgctcgattgtcattgggggtggtggtggcaactgctgctgggggcttcatcttggggtgtttgttgctcttgctaggcacaccttccacctcggcgcctattgtaagacatctg

SEQ ID NO: 41756 - DNA, 1206 bp, Zea Mays
gacgtatatcggatggctgacttcgcggacacgggcacacggcaacagaaggtcttcgccggactctacgcccactgaacacgcccttgagggctgaggccttgacccactgaacacgcccttggcgaccgccgccgctctactcccagttgccctgttcttcgccggacccttcgccggcgacaagcactaaccaacgaccaacacgattccaacatttgaaatccaactccaccatgaccggttgttggcagtttccttctgatttccatttatccatggttttgttgcgatggggttattcaggggcagcttcactctcttggtgggaatgggatgtggtgtctatatagctcagaactacaatgtgccgaacgtcaagaagctattcaacacatatgtttttctggcaaagcacattgaggaaacctaccgtaagccgaagaaagacgatgattgatccttttacatttgttttccatgttatgccctgggaaagcaagtacagctgacgtaatacagaaaggtgcttttttgaaatggtgaaggcatttttgtttatggtctagtttgaactccagtggtaaatgttagttgtggaattcagttgctgtgatagtttttggtcgcatgggcttctagatcatccccttttggcctttgctcgtgttcctgtgcctgagaaatgcactgaactttgtagttgaactgttgaagtgcggccatggataatctagcacatattagtgtgtttgtcaagttaacttaggatgggatgatgtgtttagttgaatctagatttatctttgtttctttaaattgtttgttcttcgatttaccacgatggatgatgacatttgtatttgcaaccagatagtggggatgtgcctttcaccacccataagccttgtcgatgagggtgggcttgtctcggttatctttgtcgccgtgctcctggtacttgtcgcgtaccctgtcgccgtcgaaatcgtgggtggagacctgcaaggttgcgaacgccaacctcgacgaggcagactcctctcatggcaacggcaacagagacaaatgaggaggaggtgcgtcctatcagcgatcggccatggcttggggaggacacgctcgtgcagcgaagacaatgctacacgcttggctgatgctcaaatgtcagagaaaaaatatagacattccaaattttcaatacgt

SEQ ID NO: 41757 - DNA, 752 bp, Zea Mays
ctttaatctttcggtcttaactgtggtcggagatgggaccagtactctattttggttagataaatggttgaatgggaaggctatccaagatattgcaccagatgttgtctgtttggtggacagtagagtcagctctaccaggacggttgctcaagctatggataattggcagcgggttagtgatattgggagtcatctatatctgattgggctgcagcagtacttgaagttatgggatgctcttggggaggtaacgctttcacaggaggcggacaggcttgtttggatgcacactgcatttgggcagttctcttctaggtcttgctacagagccttcttcatggggttcatctcctttgagccatggaaaagattgtggaaaacctgggctccccctaaatgcaagtttttcctttggttagctataaggaataaatgttggactgctgacaggctccaaatgagaggattgcaatacccggtgtgttgtcccctatgtgatcaggagcaggaaacagtccagcatatcctctgcacctgcagttttactagacaattttggcatctcattttgtcgtccatcgggcttggtgacctcactccgtttgttgttgaacagtcctttgctgagtggtgggggaaggcttctaaaaaagtgcaaaggtgcaagaggaagggtttcaatagtgtcatgattcttggggcttggtgcttatggctcactcgtaataaggttgttttttatggagtga

SEQ ID NO: 41758 - DNA, 498 bp, Zea Mays
cgtggataaaagcaaggccatgaccccctgcgcatatctgcctacccatgcggtcctcccccaaacgtcttcatcacggacgaagccaagaagctgccagcgtcgatccacacatatcgtttggtcctcctctggcgccaagagatttgctgccggtccaacctcggcgactatcggagagggagcagagtgcatggcgaagtcgtgcggggtgcaacgtccggtgccgctgttacctgtggccgtggtaccgctgtcatctgttgcttccgaaaagccggtgccttctgtgggcctcgacaacctggctgtcgctgctgcaagcccagtcgttgccgcgcgctctgctccaggctgggacaccatcgctgcgctagataaagcttggagacgaagagagccaccgtgtggctgctaaggcgaggtcgaagccactatccagtatcgagtgcgaggttacgagtcatctgaagatcatcctggtacctagaatctcaa

SEQ ID NO: 41759 - DNA, 681 bp, Zea Mays
atatccccggagagtggagacttgatctccgacctgcaacctaagtcaggatgtaaacattatgagtaaaaatgatgttgtattgatgagatggtgaaattagactaggtgcaaacagagtctattaatatttaatctggcattaaaatattgaaagtaaggactcactttagtaagctttttctgcaaaagtatctaagttgattcttgctaaaagcctctccttgattcctaaatccagcatatccttgagagtctttttccttagtcgggtaagacttgcgaaagtacacttcgtactcagggctttgtcccatgttgttttaggtgaagagcctacgaagctttgccacttttgtgcaaaggtgtttccccagaagaaggaagaaccaaaaatagaagtgtgttgctgtggatggtgctaagtgccggtgggctcggccttcttatataagtataccccgtctttatcttcttactgaggatggtcatttgagctagcatatatttcaaacttatactcttgtaatcactccgataaaatattgtaaaatttttgtaacctgtaaaatttggtaataagatttccgctgctaaaatgttgatgtgtgtgatttgtgttacttaataccgcggttctggttgtaagtggtttatccggtgtccttggggcaatcggac

SEQ ID NO: 41760 - DNA, 1766 bp, Zea Mays
aaaattttaaataattcatataatgatatacgatttttagcgtatagggggagctgatagagtgaatggttggagatgtcctttatgtggggagtttcttttagggagatatagtaaaatataatgttctcttcgtcccattcattttagatcttgatttttatgtatatatttaaatggatcacgatgagtctagaattctagacacatacaaaacacatactaattattatatgaacctattaaaagtctgaaacaaatatttgtttaggatagagagagtagaaagtatagaaaagaatacatatgtgggaaatatgtgggaaaatggttggagatggccttggtgttgtactttactgacctgctcttgttagctgctcggcgctctgacctgctcggtgccacgttgtcactccggcctccatccgccagcctctgtcccctggccgggtctgttttgtacaatgggtggttcctgccgggggggtgggggtcaagatttattagtcaagtggattcaactgaatatccgtaacttttgcatcctagatgataatcagctacttaccaaatcgttaagttattcgtaatttaattaacaatttgtttaagtgagtttaaggtggttactatagtgatgaataacggtaccatatggagcatctccaagagaatttcaatttctaaattatcatttagaaagtcatctatataaaaatcattttctatatatttccaatcttcattaactttttaatatcttattgacaatctagagagtcatttacgttttataccttgggctagcgagaaatttgaaatataagatgaatatatttggataactatttaaataaactgttgcagggtagtttttttaaagaaaaagctctattcatatcaattagaaagaatagagtcttttggagttgcataggtattttagatagggaaaacgaaaacagagcttaaataatatgagattcatccctttcatcaactattcctctgtgacacagtgtaggaatgggcctgtgcaagaaatggatgatgggtcggtggctcaccatggctgcattgcccaggatccgagtcatccaacgccacccgagctcctgcacagatctgcatgcacaggagggaggttcagcgaaatgaggaacgcgacgaccgtgcaacttaagtgcctcaggtgggaagcctactactgtagtagctagaacgaggaggggagcgaggcagcgcggcgtgctcaccggcggcgaggtcagttgagttcccagtcaacccggaggagcagctggcttctgagacgagcgagggaatggctacctacgtacggatgcactcaaagatgcgagcatacatgagaggttattattgattaatgtgatgaaccatgtggcgcgttgacttggtatattgaaagggcaagtgtagaaaggatctagatgtactgagccggcctagttgactggatcataaaagttcgattcaataaagaatgtagagagagagagacagctggatcgcttcggttttgtcagataagttcatctcgacacattattcgccctaatttttttagtcaatcccagatcagttttcgtagcgcagcggctatagacaagttgcatccagctggtgcttattagaatatagttaggtgcgcatgtattactgttataaatgaatgcgacacaaataggatcaatcacagagaagacacggatttaacgtggaaaacccctccaaagtgaagg

SEQ ID NO: 41761 - DNA, 2780 bp, Zea Mays
agcatgcgtactttgtcggtatcagcaaagatgggtcaaaagatcaccgaataagttctgaagaggacaaaacagagacatgaatttggacattaaaaattaagacaaaatagagacagcatgcagaaaatatatgaagaaaatagtttgtgtctggtgccatttcctctacttatatggaattactgtcagttaacaataacatatatcttatcatcttttcacttttaatcaagcatatatctgatctgtacagaagtatagcaatgggacattggttagtaagtagtaactgtacttgcaagactggaattaaaaaaactgggccaaattaaaaaaacagccgtctgtttgcgcctgcagttggatgacccgaacgaagatgcagagatgatctatactatagcctgtgagcctcatttcttccccagttcctttagaatacagcaacccatggtcagttgtgccagcgatataccgaagcaaacgcttgactgcagccaaatgatcctccctaggtgactccataaaccgactcaaatagctgacactgaaggttagctcaggtctagtatgtagcaacgtccagcatattgtgaccaggtcgatgtccctttggcaaagtcacaagtgaccaggtcttgttctccttgttgatggactgcagttcctccagcatagctgcacgccaaagtgggttctggacaacttcttcacttgtagcaggctcattccccatgacagccaagagctcctcaacaagtcccatgtcattttgcacttgtacattgcctgaattcataatgctttcaagagttctgtaacggcatggtgcatcaccatgatctgcatcaaggtcgggggtcactgttggtggtgttgcaaactccatagtgctgggtactgctggtgtctacattaactgtgtaccacctggaatatctactgaagattgcactagcatgtgctgtgctgtgggtggtgacctggatggcccagccaagtctgtctccctgactggagtattgtccagctgaaagtcaccatcactcagctgaactcgccaccacgatcggtgcgaagagttcccagctttgttcctgcctcagattgtgccagtgcctgaaaggctatgaaggccctcatggtttggtccttcgtcaacatcagagtcacccacataaaccggcttagagtcacccacagatccctgactcagccacggtattattcactaatgcagaaatgtaaacaaactagctacgacgctgcaactaactaacagtaggcactggtatgggaaaatggtgaatgaaagtacagctgaacaagctgatgactagaattgtgactgatatctaggccgacattgcgactcaatcttaggcacagtctcagtcttacggattcacaaaaactaaaatgccggtagcagccacattatcacacaccaatcacacacttttcaccgaaacaaataactttgaggcaaacacacattatgcaagcagagaaataccagaacagactcccaacagttataatgacagtggtcgaaatggacttggtcggaaatactagaacaggctcccggcagttaagaacagactcacagaaataccagaacatgctctattctattcttttaaaaaggatcagctcaagaatgttcttcctggaaactataaggttaaggctggtaaagatataggccctaaaagactgaacttagatgaatagttatattatatagttatcatcatttgctaccatttgaagcatgctttgctatgcctatgcttttgttatgactggagtctgctcatatggtgttgtcgtccattggtagcaatgcctaaacatgcacttggcagatttttgcattgtactattaattatttgttacttctgtaaaggtctgggatagagcaaatgagttcattccagagaggtttaatttacagagacctgttccaaatgagtcaaacacagatttcaggtttattccattcagtgggggtcctcggaaatgtgttggagatcaatttgctctcctagaagcaatagtggcacttgcagttgtgttgcagaagatggatatgcagcttgtgccagatcaaaagattaacatgactactggagctacaattcatacaaccagtttgatatcaattggagttaaataaagaattataacaaaagctatgcaacttaagggcacattaggaggaaagtagaaggaagagaccaaacttactgatgttttctctatactactctcaaccatatataacagaggctaaaatttggacacttatgaaaattgtttcagttttgaaagctcgaaagtgtactatattcttgagttcaatcatgtttccccaagaaagtggaaagaaccaactatcataccaccttgccccattgtttgtccgcattttttccgttccactcacccttgtcgcctgtctatttttttccccgttccaagtacctcccaaatgccccctaactaacagtaggcactggtatgggaaaatggtgaatgaaagtacagctgaacaagctgatgactagaattacatatgattttagtattacctttcgaatgactacacttatacacaactatatatgaagaaaatatttacctgctgctgtagaaccttgggtcaacgttgattttttgttacgacccatctacaaatacagaacattagaagcttgttccattaattacataaataaaatacaaggttgtagtattaccttgtttgttg

SEQ ID NO: 41762 - DNA, 1409 bp, Zea Mays
agattatcaattgtaattttcaagactgcttcagctcatagttgggcatgcatggatctctacgtttttgcaacaccatataggataacatgggactattattttgctgctcgggagcacactttggagattaaatcatgggaggaagaagcggaattgaaatatgtgaaggagcatggcatttctatttttctcatgccatctggaatgctcggaactttgctatctttgattgatgtcctgcctttgttttcaaacactgcctggggccaacattccaacctagcctttttagagaagcatatgggagcctcatttgagaaacgaacccaaccttgggttgctaacattagaaaggaggatatacaatctggtgactttttggctttatcaaagattcgaggacgatggggtgggtttgagacattagagaaatgggtgactggtgcatttgctgggcatacctcggtttgcttaaaagacgagaagggtgatctttgggttgcagagtcaggctatgaaaacgagaaggtaatggcagttatgtcaatgtggactagattgcagccagtttatgctgcaaacatgtggaatgaagccctaaacaaacgacttggcactgaggatttcgaccttcaggggatcattatggagattgaaagacgtggaatgtcttttgatcagttgctcaccatacccgagcaagacgaatgggtgtacagtgatggtaaatcaactacttgtgtcgccttcattcttgcaatgtacaaggaggctggaatattcacccctttctcggagtcgatccaggtcaccgagttcactattcgtgacgcatacatgctcaagatatttgaagacaacccggcaaggcttccaggttggtgcaacgcaggcacggacaagcttcccttttgccagattctcggagagtacagaatggagctaccagagtacaacacgattgaaccttatgcgaaaatgaacgagaactgtccgtccttgcccccaacgtacaaacgacccgcacgctgctgactacgagattgtctactatgtatctttctgcagctgctgcctttacacagtggcattagagtgttgttgctatgttctgtaaataaaagacactatatatataggtgcttggtagatggtagttcttaccagtaatgtagctgcgatgtattcaggttcacggttttcagtcgatcagttctgaagccacggcgtcggcgaccaatatgaaggttaggatttgtcagctccggaaagttgcttatatgtatcaatgtatgtatgtaggcaacattatggcttggtcataaattgtgaactccgtcaagaaataaatctataatgcaacgtcaggtgattctgatatgtgattaagaaaataaaaaaacaaa

SEQ ID NO: 41763 - DNA, 2470 bp, Zea Mays
acggctcgccccacatctaccgcgtgccagccgccctcgctcccgttcagtccgtctcccccctctctccatccaaagcctacgcgccgccgccccgccaccgggcgcgccctcgttctcctacctagccgtgttctccaactgcccgctcgtcgccgcggtgctcaccttcgccatcgcgcaatccatcaaggtcctcaccacctggtataaggagaaccggtgggatgcgaagcagctggtgggctccggtgggatgccgtcctcgcactcggccaccgtcacagcgctcgccgtcgccgtcggcctgtaagaggggctcgccagctcgctgttcgccaccgccgtcgtctttgtctccgtggcacaataagccacttcaggcttcagtctgttctgtgatcagcagaacattatgggctctaaaacaggaggacttttgaggtattttgatgccaaaatttttagacataccatcattgaagttgctctgatctgtacaacatttacaagatttacagagcttcaactaagtcaacttgttgagtcgcttgttacatatcttttgcatatgggaaaaaataatagataaggtacttggagttggcaaacaattgtttgatatacccttttcatatgcacttgttttttggttaccaacctgctagctaataacaagttttcactcatctctaccattttttggaatggcggcgtctcttcgctatatgtcaatcaaagaggtagtgtgagacacatattggcaactgaccaaatgacttcagatatttggggtctcatcgatgttcaaacagagaatgcacaaagtagtcagaaatggtaattatattgtcattgttgttgctggtagtgatgttacttgttctactatcacgaaggagaaatttgatccaattggtgggcctttgcctaaactttcacaagctaattccaagcaatgtgtctgaaatctttttcttgtgttggtaaccaccagatgcttgtcaattgtcaaacttattttggttggcttattttcaagattaaatgatctctggtaactgaggagaatgttgtagatgttgattttccttttaggaaggaatggaaaatgtgcatatatgcttctgattgcagtgagattagcctcgtccaagttatgggatctgccatgaactagacaagattataagtttacagaggccttacatcaagagagtacaagattgccataaggaagtaaagtctttgagaaaagtgaccttatgagaagcttgagaaaatcaacttgtgtgtgagaagttttgtctacttgtgctaattagtcatatgatatttttagtcatgaactagacaagatcagaagtttaaagaggttttacatcgagtacaagatcgccataaggaagtacaagtctttgaggaaagtgaccttatgaaaagtttgagcaaatcaacttgtgtgcgagaagttttgtctacttgtgctgatcagtcataccttggaatattgctgaattgttgcctttgttgctcattggcttcaatacttcatacaccatcaaatgagtcatgtgcaaaattcttcgaagcatcagttcttgctctagaagaacttcatcagaggcggggtcgaatcagcaacgacggctgacatgacgctacccatccagttgctcactgctcaggttatagcgaagaacattgtcttagctggatacaaggagatgcagaagctctgagttttgaggatggatctatggatggttacactatcgcatttgggatcagaaatgtgacacacattgagaaagctctatcagaagcttacagttgatggttctaaagcaagggtggaggttcctatgcttggagttgagtcatgtggatgtccctatttttaaatagatttatgatgcttactcgttttctatgattccggctattggagagctggttgatggtgatcggcagatagaagacaggcaacatgctaaccaggcctgtgaaccttaaaccttggcaggaaaagtttgctcagatgattcaggaagccggattccagagggtggaatatgaaaacctcctgagcggtgtagttgccattcattctggactgaaactgtagagctgaatacagatggttgttttttcatgggtgcaccgattctacaattagtagtatttgttgttttttaatgaattctataataggttcggtggcttgtaaaagcagctggtgctggctgtcagcatcatcacaatatgtagaataagtagtatttgctagaagtatgtgctggagcagtagcgtcagtggctattttggcttttaagccagctgacctcttccatttgtaaagctttttcttggaaacgtgaaaccatccagaacatcaaattagtcttatcacatacctcctgcaatacatttttttgttctgaaaacaatgtcagagttaaaataaga

SEQ ID NO: 41764 - DNA, 1031 bp, Zea Mays
cctgttaccccaactctagtcgtcggaaccccaaccgagttccccagtactccgcagtccgcacggccgcatccgtcaagatccgcgaagagcaacgaggcgaggcgaggggagggaaaacaagtgagtgagagagagagagagaggagggaaaatgctgcgccacgccgcccgccgcctcgtttcccgcgccgtcgctccgcccaccgcgcgccgggcgctcgccacggcggaggtgcccgcggaggccgtcgaggactccacgttcgtcgaggcctggaaaaaggtcgcccccaacatcgagcccccagcgacgcccctctccctcatgcagccgcgcccgcccacgccagctaccatccctaccaagctcaccgtcaacttcgtcctcccctacaagtccgagatcgccaacaaggaggttgacatggtaattgtaccagctacaactggtcagatgggtgttttgccaggccatgttgccacaattgcagagctcaagcctggtgttctctcagtacatgaaggaaacgatgctatccctgtggatcagatcgacccagcattggttcagaagggtctcgctgaattcactgccaagcttggttcggcctctactgacctggagaaggctgaggcccagatcggagtcgatgttcacagtgccctcaatgctgcattgaccggttaattggtggcattttaaattgtcttgtctttttcatctacagttttagagtgagtttaagtttgcaaactcatgggcatgggatggagggaatgatcctaaataaattatactccatctaaaacatggacatatgtttcttgtttcctgaatcctgcatggatttctttttgtactggtaaacattttaactctgagctcaagacctggagctgctttctgcccccgttgagtttgggccatggatcagatgaaattgatgtttgtccgtaggttatgttaattgttaaatgttattatgtctatttttaagagaaatataaagtactgctcgggttactgc

SEQ ID NO: 41765 - DNA, 3508 bp, Zea Mays
gttgggccctggcctaaactcgtctaggctgcgacagtagagcggcgcaccagccaagggtagccgagttagaaactgaggtgttcgtcgtgctctttagatggagggtctggggcggagaaggacgagctgatccatagggtggagctggaggtggcacctgcgctgggagaaggacgccacggaggagtccgcataggggctgcggctgtggctgcgaactgtggctcatcccatgtgcgctctcttgctctgtccgcgtgacgaccgaggaccaccgccccaaccctacgacatatgccgagagcttcatcgggccctttgccactcaccgacaagcggcacccaccagatccaacgattgtggaggtgtgtcaaaagtcctaggatggtgtttctcacttccatggtcatcaaaggggatgttgcatgtgctttggttgtggcccatgagttcgcacatagctggactgtcaatctgattactacaagaccaatgaggatttctggctaaatgaggggtatcttcatcgcagggagcagcctcgtcggggtcgccatcaaggcgcctaggatcatgtccaagaacttcattagggcgaggttcaccgtcgtagtggattccttcattaaaacaggttcaaggtttggagaagcatttctagagtcagcttcatttcttgcgataagacccctgtttgagctggtctcagggagtcataggcttcctgttattgtcttgcattggtctgttgggtcagaagtacattctaagaaaggagggcatctttttgtttatggcggcgatgatatgggatctaaagaagttctcacggttcttagccaggaatcaacagctggattagaatcaaagagatgcatgtcacgaactgatctcaaacttgttggatcatttgctgatatgattcttattcctgatactagggttcctgataaaagaagaacttctgcactttttattttgacaaatcctgggcagctgaatttttatgatggtggctctctattttctgtgcaaaactcaaaagagggaaatcctcttcctgaagcacagaaatttccagtcgcaattcctacccttgatcccaacataacggtcactggtctttattcgctaaccgaaagtgaatttccaaatatttcagtgaagaaatttgatgctacgaaaaatgttgggcatttcatatcagagaacatgaaatggcctttgactggtggggttccaaatgagttgtcactgaacgaagatcatgctgttgaaagaatataaattgaaggctaccaagatggttctctgagaatatgggatgcaacatttcctgttctaatgccaaattttttcttggttggaaatgtcagtctcatttgtatatttgtagtattacttgcattattcctcattggtttataactaacggattaaccccaatcaagctgtaactattctttactataggttgctgatgttaatttggatggagctaatgcttttgtatcatctctagccttttgttcattaagcatgactttggctgttgggacaacaagtggtctagttagatcttgttggtcttacgaattggtcgaaagggtggtcatttgtatcattttagaatatgttttcataccattttttgtaggtgcacatctataaactccgagaacacactgagggttcaagcttccattttgtgagtgtgaatttaagcaagaaggctctttcaaatggcaagcccactgttgttgagttttatgcaaactggtgtggggtctgcagggaactagcttcagatatctacaaagctgaacaacaatacaaagactgtggaattgtggggtccgtccatgctgcctgctagaaatggaaaatgtgttagtagtagaaacaagtgttgtgggcctttgatcttctggaagtcatgtggttgcagttctaccgatacttgttctacttgggcaaaattaggacaattcagttggagtacactgatgctaaagaaagcctcctgcaagctgctcgtaaggcaccaacaacagcccatggttttcggatccagtgcaacaaatgggttatcatagtgaggctgctgcttggttggaacagaacaagacattgtgattttctttaactgttttgtaaggaattagtgaagcaggctgaattatggaatactattttgatgaacacagtgaagcaggctaagttgttgcgtggctctggttctggtctcagggagttacttgggaggggttggtctctccgactccactgttgctttttaggcactgctttttttcaagcacacattgctatagctgaaacctccataatttcttcaccagttttctttaatctcttgtttcaattataggtgtacacataaactgatttttcatttgcttctattactaaaacttaatttcacaatcagccttgtagcactttgagattctgttgtttatttcttgtattagatattcttctgagtactggaataaggttaatttatcatttttcatcagtaacttcctaagaggctgcttcttacatacaaacctgaagattgagaggaaattcttgagcctgctcctcttgaagaggaaatagcaccagttgaagatcatgttcttgtaccacctgttaatgaagttgtttcacctcctcccaagactgaggtgtcctgatactggtgacttactggttggaaaaataacacattaatattatggtctaaatcttatgtgcttgattctaaaatctgaagttgtgttcctggtgtggaaataaagttgttgggctatttgtgtggggtgggggttggcatgttcggagctgttcctggttggaaccagtgattttgctactcattttgacggataatttgagttcgaagtcgtcgaattttgaaacaagggagtgggtttacatgtaatgttggcaaacggggtctgaattattaataaagccagactgtttcgctgatattttcagttccaatctctacttctaactatatatatttgtatatttgtgagatagaattatgcaatgtgtgctcacataatatttttcattgcatttgtgtggccagggcatttgaaaacttcagaccacacggtttttgagttcaatcgtactcatagtgcgacaagtgatttacaagtcttgcggcaaacattgcatagaagagaaatggatctcagctttgtccgtacttctgttgaaaggcatggcaaaacttggcagtcttgagttaattatgtgatggttatcgcatggtgttgtgtaactatgagtttattattatgtatgagttcattttatgttttgtagttaatgatagggaattttatgtgtagtaaaagataattattagctattatcatgtcaagagcttgtctcactttatttgtcgacacgatatatgtgcacgtacttccaacgttgtattattggtgtctgacatctaacaaaattaagtgctaa

SEQ ID NO: 41766 - DNA, 4647 bp, Zea Mays
tatgtctttgttgtgtgtaaaaacaattgtgtgaaatgtattctctatataagtaaagtttgcacaatatttctttatgtagcgtgaaataagagtacgtaccgttttgagtcaaaggcgaaaaaacactttcccttcttttcatgcttcatagagaaatgttcttccgaccaaaggtcttataatgccataaaaatgtctgattgttgaagaagaactatttccctttcttcgcccttctgtctgtattatataatctttacaatggtataaaacatcatatacgaagccaaaagggggcatcaaatttgaacgtggtttcatcctttagatttaactttgcatttcgtagggaaatgctacggagtcatttttccacctgcacctggggagagcaattctccttcttttccgcttgtgtttatgaataataatatgtatgatgtgatgatgaaatgatggtatgatgcatgatgcttggtgctcaagatgatgataagaaaggaaagaataccggtgtatctttgtaagcttttgtatcatgactctacattcccttaggaacgactttagagtccttggcacctttgctaggtgtttttcattgagctttgcatccacttaagaacgactttggagcttttgcacctttactaggtgtttcttttgagctctacatccccttaggaacgactttggagcttttacacctttattagatgttttttttgagctctacatcccattaggaacgactttggagcttttacacacgatggtttaacctcagatttattacagagtgacgaaggatataccttcttgatgtttcttgggacaaaaaagtaaaggacagaaaactaaaactacaatagatttttcgaaacagcttcagacgtttggtccagccctcaggcattttagtagatgtgcttcgactccggtatagtactatttactgttctggctttatattgttcccttgtgtctcgctatggtatgtcctgtgtagagaactgcggctggatctgaagttgtccgggattttgttgcacatatgacgaaggtgcttgtgtaaatggctggggcagaatccatcgagccgaagattgaatgccgaagcaactgagctcaagggttgtggacttggctgttggtttcgaacatattctagaatgtatggagaatagtatgaggctctgtggaggacctgctttgactgattatgcatgcttaagcttcgatgatttccttcagtttttggattgtgacttgacaggtgttggtcacttgttctcaaatgctacaagttaagaacaaggcaacacaaatgttaatggttaaagaccttcgtcctccgaagcattatctcccttaggatataatggtcctcagacgaaggttatgaaggacataccttcatcatctcaatatgtaatgaaaagcaggaacatatgatacatataaagaatatgaataatcatatcaaatcattagattatttatattctcattgtataatcatgaataaacattaacgatatcgaattacatttataccttcgtcttgtcagaaggtaagaatccaagaatgacgtgcaagtgaatacaagtcagcgtgaacagtacgggggatactgttcacctatttataggcacaggacacaacccggtcaaaattacatttatatccttgataaccagttataatcatgacacaaattatcagggactaagcggtcttttcctctttaagtcggtgctgcccttcgtctcagtcgtgtcatcatgccgaagctcccttgattacagcttcggcatataccttcatgttacgcctgtttgcatatggccttgccgaaggtgtttttgcttagaggaccttcggtggagaagaaggcccccaacaacagtttcttgttgtatgctccttgtcctctccatagaaaaggcagaacattttcctcggttacgagttgaatcttcctccaaaacttcttcctcctttttttccaattggggccaatggtctgaaggtattttgctggttcctgaggattgaggatgacctttctgtccctgagtgtgattgtttttgtcttcgttctaatttggattatgtatggtcctgatgtgtcttggtttgaaccgtccaccaacgtccctggtcatctcagaatatctcatgacctctgaaagcattttggcccctggttggttttagtgattaatgacaacataagattatatgtgactaacgtgtgttttgcagagcaaatggtaagttaggtcacattacaggaggttgcattgcaacgttgaaaacaatccctcagatgagaacttgaagcgacgactgaaaaaggcgaatcaaaagatgaagatcttcatattccaagtgtcgaaggagttgtggacacttggtatagaattacgtcttctattttgttttagtcgtactataaagaggggttgtggatgagtagtttgaccaagagaattctagtgtagtgttggtgcatgttcacactcacaactagtactaggtgtcacattataacacacttacgagttagaacgaaatcgggttagaaaaaccaaaggaaaagaagttggctttgctgtcttaggggcactgaactatccggtgcgacccctgacagtggagctaggctgccccaggggcagcctctctgtccccgagaaaacccgagagcagcgagttcgcgaagtcgaattttagcgtgagcaccggactgtcccgtgcacaccggacagtcaatgttcactgtctggtgcgctgtcagagcaacggctagctatcggaactagccgttggagcacaccgttggcgcaccggactgtcctatttataccccctccaccagccacattaagtgtcttgctgcccacattcgcttgtattcattgctagtgcattgcaagccgacaaggcctggtgaggtgattaggaaaatcataatcccatgttaggacctcatcatttaaagtaaacttcgtcagacgagttagcttcgtcaagttgttaaaaacatccaaatggccagagtgcgatcaactgcaagggtatctcgtgaaggagaagggaccgatgtcactgagacaacgccaattttagaagtcatgtaacgatcaggactagttgtgacagagggagctattgacgaaggtactcatgatgctgaagctgaacatgctgttgctgaagaagaaaatgttgatgaagttgagacgattacagtattctgatccccacaaaacccaaccatctagattttgagaaatctactatgtccgaagacgacatgcccatgatgatgaagcttgtctactttggggaaactgaaagaaaaattgtccgatttgccggagaagagactactcctgcaccgaagaatgaagaagtagtggtttttaagagcttcttcagagcaggactgcgatttcctctgaacgagatgataggggaggtgctaaagaattttgaaatatatcttcatcagctgactcctaacgctatcgttaggctcaacgtcttcatctgggccctccaaagccaagggatgagcgcagatgctgaagccttctgccgagtgcacgatctgcactaccagacgaaggccagagcagatggccatcacgaaaattttggatgttataattttgcgtatcgcaaggatacgaaggcatcagtcctcagctatcgtacaaagtggccgactggctggaaaaatgaatggttttacatgaaagctgatgagaaaaagagagggaaactgatgacgatggtcatgagtccgctgtctttgaacttcggaatgaccaggcctctatgcaacatgcagctggggtcgccgtgtcagctagctgaagtggagttcagagttgtagctgagcaaatcagtaccagagacctggtgcaagaatatctggctaaccggacatatccaaaatcaagcggttgggaatgctgaagatgaaagaaacgaagaagaagcatgaacttgttcgactagcttatcgtttcgagtttgaaaaatagtttaaagaaccttgccaagaatggctggacatgatcgaaacaatgtgtaatgaaatacttgggaattatacaaagaaagaatatcaattgatgacagcagccttcggcacccggccaaaacgaaggttaaaccggatgatggatgccctgaaatttgaatacccagattatgaaagacttgataagggtgctgaaggtgtaaaaagaaagagagtcatcagtattctgagcaggcaagctgctagaatggtgaaggaggatgagaaggcttcaaagaaaagaaaaactactcctgagccgaaagctgctgctgcgaagaagaggaaggctgaaagcccagagtcgaagataaccgaggcagtagaggagacgccttcgacgcctcctgctaccgaaataacagaaaatttaaaggtaatgactgaatctttacccgtcaagctgctaagtcctctggggccagaactgatgaaacttttacagaagaaggatgagctttcggctataaagaagaaggcggatgtacaaaaaaaaaacaaaggatcgttactgttatgcaagccatcgaacggacgccacctttg

SEQ ID NO: 41767 - DNA, 468 bp, Zea Mays
attcacccaaccgaagcagtatccgtactataatctgagccgcctagagggagctcgacggttgaaatcaacaccccaaaccagtatgaccccgatctagtctaagtcgtccatccccaaatcaatggcagacaccacatctcctacctctgattgctagggcacgacggcgaccccgccagtcgcggcggcgccatgggcgagcacacaaccaagggattccttgctagcttcaccctaccaggtagaaacgagtgcagcgattacgatgagtacttttaggtgatcatgtaccgagattgtgcaaccgcacgtcttattaaggtgttcgaccgacaagcacacttcggtccgcgaccacgttcgtcctggtgtccatggattcccaggttggcgtgaccaagggggcgcggcggccacaagtcttatagtgccagggcaacagcgggtccggaaagatcacaactg

SEQ ID NO: 41768 - DNA, 2160 bp, Zea Mays
tataaagacacgaagtgattcagtgcaatataagtctattgtttggaacacattaatatagatttatgctaagttgataattggtttgttgttagttaatatgaagacatgatgtgatttgaagaatgattatttatttctatagatgctactagaattatttcaaaatgattggttttatcagttttgggtaaatctggtaaaactcgaccccgaatccgaattattggatatccaaaatttcggataatattttgtcgaaacagaattaggttaggaatttttaatacccggttttttatttatccaaattacgcgacccgattatttcagctaaccagaatgggaggcctctccggttgcctctttctttctcagttctcacctcaacgtcaccgcaactccgcaagtccgcaacctcctccttcccaccccttctcacgcgattcaagcgtttcccattcggagccctaatcctctctttccatactcgcggaagccaccaccaccggcaggggaagcggaaggggagcacctcgggccaggcaagatggtgctcgcgcagctgggcgggagcatctcccgcgccctggcgcagatgagcaacgccacggtgatcgatgagaaggtgctcaacgactgcctcaacgagatctcgcgcgctctcctacaggccgatgtccagttcaagatggtccgcgacatgcaggccaacatcaagcgcatcgtcaacctcgaggcgcttgccgcaggcaccaacaagcgccgtatcatgcagcaggctgtcttcacggaactctgcaacatgttagatcccgggaagccttctttcactcccaaaaagggcaagccaagcgtagtcatgtttgttggtctgcaaggttcgggtaaaactaccacttgttcaaaatatgcttattatcatcagaagaaaggattcaaaccagcgctggtttgtgccgatacatttagagctggtgcttttgatcagttaaagcaaaatgcaacgaaggccaagattcccttttacggaagttacatggaatctgatccagtgaaaattgctgttgagggtgtggagaggttcaagaaagaaaactgtgatctcatcattgtggatacaagtggaaggcacaaacaagaagcagcactctttgaagaaatgcggcaagtttcggaagcaacaggtcgcagcaacaaaaagtcctgttatattcattggaactggagagcacattgatgattttgaagtttttgatgtgaagccatttgttagtcgcctgttaggtatgggagattggtcaggctttatggacaagattcatgaagtgatacctacagatcaacagcctgaccttctgcagaaactgtctgaaggaagctttagtctcaggcttatgtatgagcagttccagaaccttcttaaaatgggtcctattggccaggctaagattaagcgctacatgacaatgatggattccatgactgatgcagagcttgacagcacaaatcctaagttgatgactgaatcacggatcattcggattgcacgggggtctgggcggcctgtcagggatgtcatggacatgctggaagagtacaagcgacttgctaaaatctggggcaagatgaagggtctcaagctccaaaagaaaggggacatgagtgcactgacccgcaacatgaatgttcagcagatgagcaaggcccttcctccgcagatgcttaaacagattggtggcatgggcggtctgcagtctctgatgaaacagatgggatcgaaggagatgagcggaatgtttggaggcatgggtggttgacttgtttttggtggatcgtcgctgtgatgctaaattgagagcgtttaatgctgcggtctgatcaccatcagagcattccctgaagatcagcctgcgctatgttttggatcaggcttagcgtagctccccatgcctgcaaatttaacctatatgaacagtacgtttgtcctctgaaaaaacggataaggtatatattacaaagcgaatatgcttatgtagatggttactccaaacattagtcttccagtggtggtgtcgttgggttggcaaaggatgcgccatggaactttcttgccagggtgcttgtttaggtgtgcactttgtgctcggcggaagttgg

SEQ ID NO: 41769 - DNA, 1054 bp, Zea Mays
atgggcggtggagctacagcctggcccttggcagccaacaggggcggaagtgaggtcgtgtggagccaggtccgtggagtggagttgcggaatcaggaacagccgtttgatatggggaaaaagaagaaaaggaacaaaaatgtccctgctgttgtgtggtatccgacaagggttatcgaatttcttggtcggcgcacacccattatcctcaaggaaaaggatacacggtgctccctagtagcaatatgcaacgttctcctgcttggagagaaaataaccctcgatttagatatcaagaaagtgttggagagccatctcatccatcttttccagaggcctcttttgtgtggcaatacacaaatgcagttggaacagaacttggaactatcagagttcaataaacaagttcttggtgtattgccgaagcttacatgcagcttatactttgatgtgacattttctagctcttgtggcttagagaagacctttgaaactgcactgtttggttttcttggtgtccctctacgccatggctggttggtagatccccaggatgctgagttggactcctcaatacgtggaagctcctactccaaactttcgtataatcttgctatctatgaatcaattcgacccaagacaaattcagggcctcaaaagcatggtcgatatgaagatgatatgttctattcagcgcttgcattctctaaaactggatcagaaaaagaacttgattctacttcttgtgcaacaatttcaacatttttgcagggccctcagctaacccgatatggattctcttccttacataatgacctcagagcgttacaacctactgtcctgatctggaatgaaaacttaattacaatatctaagtttgaagacaaaatatatgtgttgctgaacgatttgtccttgttgagaactgaaaccgatgctgtgtgggaaaggttaacacagtttcttgcgcatggtctcgttggacatgcccgacactgacctagccgacgccatcggtctttctggcgggtaacagtttgctgcacaaagtccc

SEQ ID NO: 41770 - DNA, 2320 bp, Zea Mays
tttggagtttggacttccttccgcctccccgaccgcggctgttgcaacgatccaaccccacctcccgccgccaccgcccccgcccccacccccgcgccttcgtcgtcaaggccggggttcctgcggccgcgtctccctcccctcgcccgtacccacacttgattaacgtgtcagctcgctaccggaggccctcgccaactcgactcgtactcccgttcccggcggcgatccggccggcaccggaaccctagggttccaacgaagcaggaatgatgagtcatcaacagcaaattgcccctcctagtaggggttctgtgaatggattcccccatctaaagctggatagggtgggtagtggaaggcatgaaagtaaaatcgtgaggtcatcatctggcggttttaccaattcaggaaatgacatcaaactagggcatggaagccattcgagggaccgactaatctatgttctaacacaacttattgggcatcatgtcaacgtgcatgtgaaaaatggctctataatatctggaattttccatgcaacaaactctgacaaagacttcggagtagtcttaaaaatggctcaggtcataaaggatggttctgccagaggacaaagatttgcttctgatgttgtaaagaaacctgagactatgataataccagcaagggagcttgtacaagtttttgccaaggatgtagcacttggcggtgatgagctgccaaaaggtcctggtcatgacaaaaggaaggacttgctgattgattctgccatttcccgctctcattaccttgaagagagggaacttgagcgctgggcaccagatgaaggagattcagagtgtatcgaactggagaagtatgacagaaagggaaataggagctgggatcagttcgaaaccaatgcagccttgtttggggtaaagagtacattcaatgaagaaatttataccacaaagcttgagagaggtcctcatatgagagagcttgaaaagcatgcttcgagaatagctagagaaatagaaggagaagataccaaagatattcatcttgcagaggagagaggcttattcctgggtgatgacttggaccatgatgaagagataaaatattcagcagtgcgtagagacaccgataacagcaagtacaagccaccatttactaatgtcccaagcagtacataccaagttgatttgtttaacaggacagtcaatattgttcccaaggatttgctgggatgttcatcaacaatggatgaagaatcatcatcccacatatttgatgatattgatgcatctgccactattcaaaccaatagcgttagacagccaacatctgattaccttccagatagactctcgtccaatgatgaaaacaggttggacagaaagctgagcaaagggagtaatgaaaatatggataagagaaagttgcaacctgagaataatttatctgatggtgcaagacctcttatttctgaagggtcggatgggccaccctcaagttcatatgcatatgaaccctcatcttctggccaaggattcaaatctccagaaacacctgatttgacagtatctgtcaaacatccttctaagacggaacatgtgattaactctcaaagacctggtagttcaacatcgtcaacatcagagcgcattgctgcaaactcagctgcgagtgctcttggcttgtcaccaagctcttcaataggatcccttacctctgaaaaatcaactttgaaccctaatgctaaggaattcaagctaaatcctaatgccaagagtttcactccgtcagcatctttgaggccaccacaccctgcatcatctgatgcatcatattactatactaataacattccagcagcaccacttggacctggtttgccagtgggcatggggttcccaccggcatatggcacccagcctgtcatgtataatgctcaacctggagcatcacagcagggttacatgcatcctgttggtctacagcagtatgggcagcagatgatgatgggaggagggcagaatcgtcctgtttattattatgcgcctgagatgcaacaatacagaggaagaaacttctagatatactattttgaactgctgctaggtgaaagtcacaacaatccccacaagtgggataatgacccggcaaaagccgctattagaatggaaagaactggtgatgatctccctgactgtcgctccgattccttggacaaaaagccccatcgactttgtgttgcttggttgcctggtcaaaaagctcttcattgttctgtcactgttgctcagaagcagaggacggagaatctccc

SEQ ID NO: 41771 - DNA, 427 bp, Zea Mays
gttcggcctgctccgctatcttgttacgaagctagtgcaccgttcctcgctcccgattagccaacacagcccccgaatttggaatttcccccaaatcggccaagaacgccgccgtgtgacctcgcgccgtggccagccatctgcaggtgatgaaagagctgagttctgttgtttctgctccaaggtggtgcccaagcaaaaggaagaacgctagacttatttggggagggtgttttgcctcccagtaatgtaataataagtgccacactcgaacacccggttatgtaataactactctttctataattttatatgaatgtaaagtatattattgtaatccttttcgctcattctctactctgattatgtgtaatatctgtgtgatgggttaagcgctcctgggcgatatgatgaagatacagataac

SEQ ID NO: 41772 - DNA, 2241 bp, Zea Mays
tggactcattggctagtattttacaggaaaaagggggatgcttctctggcaagacactgcattttaaaagcaatgaacgcagatccagaagatgtagatctgaagtatctttgtggttatatgtatcacaacctttgtgaatatcagaaagctgcagaaatatatgaacaaatagtcagaatttatcctgccaatagtgctgttcgtaaagtagcagcccagatcaagagggcacaactacatttgggatctcaacagaaactaccagtacaattgcaggcaaaagaagtaatctgccatgcatattgcggtgacatgaaacatgctgagattttccttcgtgatgtgcgtttggagccatcaaaagaaaacattgatgtgctcaaggaactcgcaagcaatttagaaaaaatgggacgatatgagtatgcagtaaagttttacctgctaattgaaaatgttgctactcaaaatgatggtggtttatgctttgatcacaaagaaatgggtagttggtatgtcaaagctgctcagtgctacatgatcttaggggacaaaaaaaatgctattccttatttttataaagcgttacaaagcatgaaggacaatattggtatacgattgaccttatcctcccttcttattgatgacgacaagacagatgaagctgccactttgctttctcctcccaaaattccagagttgcagtctgctaatactccagaccaacagaaaccttggtggtgtgatgggaaagttaagatggcgcttgcaaaactttattacaataaaggaaatttggaagattttgtggacacaatttttcatcctattctagaaactttgaatgttgaatatgctaatcgaaaggtcaagtcaatgagaaagcttccaaacattgttctgcatgaaagagtcaaagtattgggtgagcaacggccagatagtgtatttcaaggattaaggccaatagcatcacctgatgaattacaaaaggcaaacagagcaaagaaattaattgagaaaaggaccgctgcaaatgaagagttaaaacatgattatctgccaagaacaaagcaagttcctcctgttcctggtctactgacaaatgtggagcatcatcagcttgtgttaaatctttgtcgaacattagctttgctgcagcgatattgggatgcactgcagattatcaaccgaaccctcaaacttggaaatgacgcactcactggtgacaaaaaagaggaactcagatccttgggtgctcaaatagcttatagagctccagatcccagtcatggctttaagtatgtccgttacgttgttcagcagcacccatattctcttgccgcatggaattcctactataaggtggtatcaagaatagaggacaggtttccacatcatttcaaatatctccttcggacaagagaagcgaatcctgactgtgtgcctccaataatcatatccgggcatcgatttactgctataagtcagcatcagtcagctgcccgggattaccttgaagcttataagctggacccagaaaaccctcttattaatctatgtgtaggcactgccttgattagtttggcccttggcttcaggcttcagaataagaaccagtgcatcgtccaagcttttgctttcctgtacagataccttcgcctttgtgataacagtcaggaagcctcgtacaacattgctcgagcgtatcaccacattggcctgaataccttggcagctgtttactacgacaaggctttgtcaaccgaggagaaggatcatcccatccccaagcttccgtacgaggctggttcacgtgcgccagaggatctgaggccagggtattgtgatgtgcgaagagaggcagcgttcaatctgcatctaatctatatgaagagtggagctaccgatcttgcgagacggatcctaaaaacttactgcactgtctaaaagctggtatcgggcaatgttgttgggatcggatatcagatccttcaaggctccttgcattagcttaggatcaagctagtctataaagctagaacattggtgtaatatgtcactagtgactttagatgtgtagctgaagagttaacaacgtgcttgatccagatttaaacgtatattctggtttcacaatgctgtgttatagtcaaatggttcagcgatgctttgcttcatgtgatttattggcaattcattattatttttctctcaaacgcacaggagaacgcatag

SEQ ID NO: 41773 - DNA, 1182 bp, Zea Mays
gcggctgaaccagtgccagtcccacccgttcccagaccagcctcacgcgctcaccgtgctgcctccaccaccgatggctctccctcccggcgcaggggcggtggcgccggcgacgcccttcgccgcgaatccgtgccgtctccggcgggcgtctggtcctcctgccgccgcccttcggctcgggccgctcttctggccatgggaaaaggtgaaaatcggtcccctttctgtttcccccatgggttttggaacatgggcatggggaaaccagctactttggggctatcaagaaagcatggacaacgaacttcaggattgcttcaatctggctctaaggaatggcataaacctttttgacactgctgactcttacggaactggaaggctgaacggacagagcgaacggctactcggtaaattcatccttgagtttgaagggaggattaaatctccagatgatgtggtcatagcaactaagtttgctgcatatccttggcgacttacatcggggcagtttgtcagcgcctgtcttctttggaaagattacaacttgataggctcgggatagggcagctgcattggtctactgctaactatgcacccttgcaggagcgtgccctctgggatggactagttgaaatggccttgtaagtgctgtcggtgtcagcaattacgggccgaagcagcttctgaagatccacagctatctagcttctagaggagttcccttgagctcagctcaggttcagttctcgttactgagcatgggtgacgatcagatggagctgaaaagtgtgtgtgattcattgggcattcgcatcatcgcatatagcccgcttggattaggaatgctcactgggaagtatggtgcttctaacctcccaaaaggaccaaggtcagtgctgttccgacaaatccttcctgggctggagcctctgctgtcttgcctgagaaggattgccgaaaagaaggggaagaccatgcctcaggtggccatcaactggtgcatgtgcaagggcacagttcctatcccaggcgtcaaaacggtgaggcatgtccaggagaacctgggcgcgctcggctggaggctgagttctgccgagatctcggagctcgagtccgcagcgatggcggctccgaggaagatgatccagaatgtcttccagactgcctgaccgtgtg

SEQ ID NO: 41774 - DNA, 2829 bp, Zea Mays
ccacgccgctgcgcttccgatgcaaccctaaccacctcatcgccggcacgatcttccccgcccccactccccggctattgcctctgattggcggctctccgggattcacgttggtccggggtacggctcctgcgattttcacgcaatggagcaagatcagagcgtggttgtcggcagcgcggactctggtgctgcggcttttggttttgcgactggcaacccccctagcttggctgtgaccggcggaagcgccgtggcccccgacggtggagctcaggcagctgatgcctctgcgtaccaggccgagcacacggcgttgaatgggactgtcggcgatatgggtaattacccatctacaggagctgcagagaacggcgaagccgtccccaacgagacgggcgagccggttcctgagctatcgtacgaagaagaagaggctaggttatggagtgttgttaccgcgaattccttagattttaatgcctggaccgcacttattgaggaaacagagaaaaatgctgagaacaatattttgaagatacggaaagtgtatgattcgtttcttgcggaattccctctttgctttgggtattggaagaaatatgctgaccatgaagcgagacttgatggtgtgagtaaagttatagaggtgtatgaacgagcagttctcgcagttacttattcagtggacatttggtataactattgtcagtttgcaatttcaacatatgatgattcagatatcatacgaagactgtttgaacgtggcttggcatatgttggaacagattatcattccaatattttgtgggatgagtatattaagtatgaagagtcactggaggcttggagtcatctagctgatatatatacaagagtattggagcatcccatccagcagcttgatcggtattttaattgcctcaaggaattggcttcgaagcacagtttatcagaaatacttactgcagaagaagcctcgttgtatgttgtcacatctgagaccactgctcaagcgcctgatggtgaggcacatcctgatgatgttgataagcttggtcaaccagaaatttcgtcttcaacagacgcagaaagccttgcaaagtatgtctccatgagggaagagatgtacaggaaggctaaagaagcttgaaaattggcataactaccttgactacatcgagaaggaagaagacattaataaggttataaaattgtatgaaaggtgtgtgattgcatgtgctagttattcagaattctggatccgctatgtgcaatgtatggaggataaaaggagtctagacctagcaaacaatgccctggctcgtgctactcatgtgtttgtcaagaagcagccggagatccatctgtttagtgcgcgctttaaggagcttaatggcgatatttttggagcacgtgcagaatatcagcatctgtattcagatttatgccctggctttctagaggccattgtgaagcattctaatatggaacaccgactgggagataaagaattgtcctgttcagtttatgaaaaggtcatcgctgctgagaagggaaaggaacagagccagctcttaccaacattgcttattcagtactcccgtttcttatttttggccatcagagacttggagaaggcaagggagatattaactgtgctgcatgagcagttaaatttaacaaaaccagtgcttgaggctgtcatccatctagagtcgatttttccatgcgaaaagcgtattgaatttttagactcacttgtggagaagtttgttacacctgaatcatctcagggagagttggcaagtctagttgacaaagaagaaatatcttccatatttttagagtttttggatctctttggtgatgcaaagtcaatcaggaaggcttcaactcggcatacaactcttttttcatgtaagagaagcattctgccatcaaagaaacggaaggctgatgatgctgttgtgtcagacagggacaagtttgctaaaactgggtctgttcagtcagccacaggaactgatccaaatgcttccaatcctcctgtttggcctgcgacttctgaaacatctggacatcaatggggagcttcttatgctcagcaggctgcatatcctgcatatggaacttatgactacagccatcaaatgccacagcctgctcctcaaacagctgcctatggcgcttatcctccaacatactctgttcaggcctatacacaacaaagctacacacaacctgcagcaattccggcagcaccagtgccagcagtggtaccagcacctacaccggcgtcagcttaccctcagcaacctgcggcagctcctcaaccttattatggaacaacctactactgacaagtagagtaatcttcgatggcgatctgacgagcctgttaatcagcaggtttgtcgatacgaggtcaaaggcatcacaaaaccctctgtactgccattgtttagccccccttcagacagatgccgtcgacgagatgatcacttgagaacaaatttgagattggtatagtctgcatttttgtcgttagcatgtgtcgctagggattgctattgtttttcttgtaatagcataatctttactgtagaagaggcagcgggtgctaaccaatcctatgaacatataattaacattattcactgtttcatgccacctttcggagtgctttttttttcaaccactgatgatagcgggattcctgtcaagcacgctcactggtgaagtcctcggaacaaaattgtcaagatctgcgactacacagttcactgatttctactgtcactgtaggtcaaactatcttgatttgac

SEQ ID NO: 41775 - DNA, 3737 bp, Zea Mays
acttcccctccgtcccgcattccttgccgcgcgtctcggcgtttgcttgccccccgccgccgctggcctggatctcgcgggcttctttcgcaatgccgcagcagcactggtttgttgggggtcgagttctgctataagttctgatccgcgttcttgcgaggagctaaaacgacaaggaaaggaacgcacccatcgttgcatgcgtctatgcggtagcaggaagtcaggaactgaaccattgctggttgggagatatgggcccaaagatcttgcgatcttcactgattgtgtttattcgagtgacttcgctacaatgggtcatgccgtaatcaaaagaaggactacattttcatgccaacattgaagataccgccttccattattgctgggtaagttggaacagaggagtgcgtattcaagatgatggacatgaggcgccactctgtgtctgtggatgccccactgtcaagaaccttggtgcagctcaagcgagtgaggtcgctgcgggatccagcgacaaactcgatgagcaagtacgcgtctccttccgatcacatgatctgggagactgcttctagcaatggggtgactccggagcttggcaggtcagcacaccatcacctggttggggaagacgaagatgtgggagctgagcctactacaatggggtcagagcggagtttccggggaccaagcgcaaggactgcatcgtataggaaatcttctgctgtcaggatcagaggactgaacccaccaagaagcaagcaggttcaccgtgtccgccaagacggccaccgcaagtcattggattctaaccactcaaaccatagctctatccgtcaattggcagacaatatggtcagcaatgtggatgcagataaggaagagggggaagtgaattcctatgaaagaccaaaacttgcaatgccagataagtctgacgaagaggtgaaaatgccaggctgctccaaatccaggagcaagtcttctgctgcaatgagccgtgttgggagcccctgcatgtcagccagtgaggcacgctcagttgggtcaagaagaagcactttggggcatggaaccgaggatacacgactgaggtcaaatgatgtcgtgggatccaatttcagtggctgtggtataagctactgctggtcaggagcgtcaaagtaccgggagctttattctgacagcgatggtccagaccaacctctcttatccacagatgggattgaggcagcattccaaggcaatgtaccatacactgagacactgaggtgtctaagccagaagttccgccctcgttccttcagtgaactgattggcctaaatgtcgttgcccagtccctcctatattccacttgcaaaggaaaagttgctccaatgtacttgttccatggcccccggggtacaggcaagacatccacggcaaggatttttgccgcggcactgaactgtgtatctcttgaggagcaaaggccgtgtgggttctgtaaagagtgtgtcattcttttctctgggaagagcagagatgtgaaagagcttgacgctgcgaaaatggatcgtctaggccgagtgaaggcacttctcaagagcgcatcgctcgtgccatactcctcgcgcttcaaggtcttcatagtagatgagtgccacctcttgcgagaagatgcatggtcagcaatactgaagagccttgacgagccataccggcacacggtgtacattatgatcacttctgacatagaaagcctgcctcgcgcttccatcacacattgtcagaagttccattttccaaagataaaggtggcggatattgtctacaggttggagaggatctgtatagaagaaggattggaatttgaccatgatgggttgtacttcattgctgcaaagtctaatggttctcttagagattcagaaataatgcttgatcaactcagtttgcttgggaagaaggtcacaatttctcttgtgcatgaacttgtaggatctgtgtctgatgatgagttgattgaattgcttgatctagcgttgtcatccgacacaaccaataccgtaagacgagctcgagaacttatggggtcagcaatcgatcctctgcagctggtgtctcagttggccaaccttattatggacattctctcagggagatgtcaatctgcagtcacggaagtcagcaaaagtttcttgggtagatatgcattatcagaggttggaataaagaaactaagacatgcactgaagatactatcagaaactgaaaaacaattgagaacatcaaggaatcaggctacttgggttacagttgcgcttttgcagtttagcaccaatgaacctaaccctgttgctgaaacaaatgatatgcatgcacattcagtaactggatatacagatgactgggtttccaaggtgcactcaagtgccaatttttgccaggcatgtaacagcagcaagtccaactgttctgagagacactgtaggcggcttaagctcgagaacatatggaggagagccattggaaagtgtcgatctaggtcagctaaaagtttcctcaggaaagaaggcttcttatcgtcggttcacgtcaccgaagagctggccatagcagaagttggttttgaacacccagatcacctgtcaagagcggagaaaatgcaaagcctaatagaatcctctttgcaacacgttcttgggtgcaatgtggagatcagattcaaactcgtgccatgcccagtgagcaaagatgctaggttgaagagacagccgttcagctttctcaactgctctggccggaagcaagagctgtcagattcagtcgtgactgatgaagacgaagctgcgagggggcctggagcaagagagacaccgcttaaaggctacacctctagccagcaggaatcaccatacaccatgcgacgtgtcgattcgaaaccaacaacggtccacggttgcgaggatgacgcccggagtaccttgacgtcaagcagatccacggcagatgacctgacaaggacgtgcaggtcggagactggctacccaaagggtgtgcgtgagcagggccgctctgatggcacgcagcaggagcctgacctacagccgaactgcttctcgcgaacgctcaagcttcagaagaagctgctgtcttctggcgcagcgcacaccatctgtctgagggtccagccacataacaagatggatttcctgcctaagaaagagttcgatacgtacttctgcgcgtatgagccctacgagcagtgtccaagatcagattcaagagctacttacagttcaagagacgatgacttgtggagcaagaattcacgctttggctcgaatctactctgctggagagccccaaaacagtccatgtaatggaggaaagaacgagtgaactgggtggaacaaatcgattctgctacgagattttaccaattttgcccgaagctggagacatggacaccacccgcagctgcggggacaaattttgaagggaagtctaggaggggtctgtgctattcttgatcttggtaggcagctgaggattgaggaactatttagtgatgttttcttggaaatgcagatcctttataatgctagtgggcagttgtacagcgcgccagcgacgaaaccctgtgaattgttctgttattctgaattttgtaggacgatttgatgctctctctctgaatttacatgatctttttattagctgaatgattacagtgtccagaaaataggcc

SEQ ID NO: 41776 - DNA, 3499 bp, Zea Mays
ctcaaatctgattcaaagacttcgtacgcttgctacttattggatgagctgggacgacatgttcattgaattcatacatgtaggagatgatgaactatatggatggatatcttgaccagttcaatgaatatacaattcaaggctcatttcctaccttacatgcctgccaactaatatgacctactgcacttctgccaaagcttcttgccttcgaaggaggaagaagaagatgatgagcagctaagaagaattcggcaacatctccatgaactctccaaaaatggagctttctccatggcttgtgttctccttgggtttccttgcgcaggctctcgtcatcttggctgacacgaatgcacaagacgcttctgggctgaatgggattcaagattcctggaacaagaagccatcaaactggagggtgggcactgacccatgtggagataaatggaacgggataagctgcaccacaagccgggtcacggctataagactctcgagtttaggattgtcaggatccctttcaggcgacatccagtccctgtccgaattgcagaccttggatttctcctacaacaaggacttgggcggtcctcttcctgcgtccatcggaagcctgagtaacctcgaaaacctgattcttgtcggttgcagcttttctggagaaataccgaaagaactcggacagctcaccaagcttagatttttatctttgaactcaaacaagttcagcggttccattccggcatcactcggaaggctctcgaatctatactggtttgatctggctgacaataagctctccggaggactcccggtgttcgacggcacgaatcccgggctggataacctgacaaatacaaagcacttagttgtggttcatttgatggccgtttcttcgcagccacttcggggtcaatcagctctcaggaacaataccgagccagattttcaactcaaatatgacgctgatacatgtgcttcttgacaacaacaacttcaccggacgcattcctcctactctgggccttctcaatacactagaagtcatgcgttttgataacaactaccagctgactgggccggttcctagcaacatcaacaacctcacaaaacttgcagagctccatctggaaaacaaccagctgactggtccactgccagacctcacagggatgatcgcgctcagttttgtggacatgagcaacaacagcttcaatgcatctggtgttccttcctggttcaccactctgccatctttgacctcactgtaccttgaaaacctgcgtgtcacagggcagctgccccaagccctgttcagccttcctgcagttcagacactgaggctccggggaaaccgtttcaacggcacgctaactatcggatcagactacagcactcagctccagctaatcgatctgcgagacaaccaaatcagccagataactgtcggcggatcacagtacaacaagcagctcatactagtcgggaaccccatctgcagcccggggacggggagcagcgagaaatactgcgcgtcgccggggcagtccaaccaggcggcgccgccgccgtacagcaccccgatgaactgctcggggctgccgccgccgtgcctctcggaccagctcgtgagcccaggctgcgtctgcgccgtgccctacaggggcaccctgttcttcaggtcgccgtccttctctgacctcagcaacggctcgtactggggccagctggagaccggcatcagagccaagttccggagtctcagcgtccccgtcgactcggttgcgctccacgatccgtccgtcaactcggtcaacaacctgcagctcgcgctggaggtgttccccagcggcaagacccagtttagtgagcaggacatctctgacatcgggttcatactcagcaaccagacgtataagccaccctcagtattcggtccgtactattttcttggccagccgtacagctttgccaatgtggtgctaataccttccaaatcgaaggcgaacaaccgcttacctctgatcgtcggagcctcggtgggtggagcggttcttgttgcaatagttcttgctcttgttaccatcgtcgcaaggaggaagaagagaccaaagcagaacgaagagaggagccagtcttttgtttcttgggacatgaagagcacgagcggcagcagcgtcccccagctgcgcggcgcgcgcacgttcaacttcgacgagctgaggaagatcaccagcaacttctcggaggcgaacgacatcggcaacggcggctacgggaaggtgtacagagggaccctgcctagcgggcagctggtggccgtgaagaggtgccagcaggggtccctgcaggggagcctcgaattcaggacggagatcgagctgctctcccgggtgcaccacaagaacgtggtcagcctagtgggcttctgcctggaccaggcggagcagatcctcgtctacgagtacgtccccaacggcacgctcaaggagagcctcacgggcaagtccggcgtgcgtctggactggcggcggcgcctccgggtgctgctcggcgccgccaagggcatcgcctacctccacgagctagccgacccgcctatcgtgcaccgcgacatcaagtccagcaacgtcctccttgacgagcgcctcaacgccaaggtctccgacttcggcctctccaagcccctcggagaggacggcaggggacaagtcaccacgcaagtcaagggcacgatgggctaccttgatcctgagtactacatgacgcagcagcttacggacaagagcgacgtgtacagcttcggcgtgctgatgctggagatggccacggcgaggaagccgctggagcgcggccggtacattgtcagggagatgaaggtggcgctggaccgtaccaaggacctgtacggcctgcacgacctgctggacccggtgctgggctcgtcgccgtccgcgctggccgggctggagcagtacgtggatctggcgctgcgctgcgtcgaggaggccggcgccgaccggccatcgatgggcgaggtggtcggcgagatcgagcgggtgctcaagatggccggcggcccggggcccgagtccgcgtccaactccatgagctacgccagccggacgccgcgtcacccctacggcggcgacagccccttcgaccacagcaacagcgggttgccgtccgcgagggttgagcccaagtgaatctacagcgcgcgccgcgagtacatgcggaaaagcttcactcttcaacaaaagctagctctgaatgtacagggtattgtaattattagtgttataattttggttactatgataggtgtgcgattggattaagaactgatttcttgataacgattgtttacatgataattttggttgctatgtatttaagatagatatgcaattggattgttgacatgctaatatatttcatgtatgtcatcaaatacacaaatgattatttatgttcaaatattagacaatttcac

SEQ ID NO: 41777 - DNA, 524 bp, Zea Mays
tgctgttgaaattttatatatgaatattagatgtgtagtttagtagcattctggggtgtttgtggatcccggggtgttacacaaagtgaagaagaggttatgttcagatactatattattattacttgagtttttagtttacttcttgtgttcaatttactctttcgactttttcagactcatcaggttatggaagaagctaagaaagccgaggctgcagagctagaaaggcgcaaaacggaactttctccaccaccgaaaccatatgaccccgaagccgatccaacactaaaaggaattctcgatgaattcagggtggtgaacgtagcgatagacgaagctggtaatacattgttgaatgaagctgcagagaaagttctaaaggaggactaggattagtaggaaacttgttcttgactgtggtcttgagagacttgtaaaaacatttgaatatatgtttgctctgtataaaaacaaatacatgatttgtattatatatacacttagtatgtgtataatatttc

SEQ ID NO: 41778 - DNA, 699 bp, Zea Mays
ctcagtcactctctctcctagccatgccctgagacttacataggggaccatgctgtcagcgccaacctcccaacaaaatgcccctaatccagcgcggcgtaaaaaccatggccgcagtctccccagcttggtaggtcaccgagtccatcctgtcaagcctataaggaaggggaagggcgtcctcggccacgtgcacacacctcacaaaaccatagggcgctttggctctgagcaccgcaccatgaagagagaaagggagggaaggcgaaggttgccaccgtcggactcgcgctacgctggtgtccagaagctgtggatacccagggaggctcatcggggcctatcggacgaatacgcggtgttgccggggtcgagaatcgagcggcccaatgacgatttctcgtcgcacttcaacgtccaccgccataccacgcttgaccgtgggcggagcttgtggtttcgcaatccctgacaagcaaacaaccgaggatccctatactcaacaggttgaaaatacagagcaggagctcattgaaggtgaagagcaggtagaccaggaggaggactactatgaagagtttgataaagtctaggtggcgtctcccagtcagattattagcgccaaggaaataatattagttcacttattttttatcatttatttttgtaagacacttcctctatgtaataatgtttgtg

SEQ ID NO: 41779 - DNA, 4523 bp, Zea Mays
ccacctaccaccgccggccccaaaatcccaaatccgtggcaccgccggcggccgcacccccggttgcccgcccttgacacccatcactcgaccccacccgaccgccctcgccgccgctccactccacaaggtgctccgccccagcaccggatccaacaagccagcctaggcactgctgctcgagccgactggccccgagacccgtggaggagaagaaagctgtggtagcagccagtgtgatgaatgatgtggcggcatgatccgaacggcttcttgttcttgtccttcccgggcgctgccactgccgctccttgtttgcatccttcctgcgcaagctggagctgtccttatcttcattagtcacatctctgggtactcaaaatatgcaattctactgcattagtagcatcacttggtagctgctacggcatcggcatagaagcacaaggagagagggaggggagagtaagagcgatgggggatcttgtcgtcggattggcaaagtcggtggtggagggggttctaacaaaggcccagtcagctattgaggaagagtcaaagctgcgtcagagtgcacagagggaccttgtgttcatcacaggtgaatttgagatgatgcactcctttctcaatgtcgccaatgaagagcgtgccaagaacaacgtggttaggacatgggtgaggcaggtccgtgacctagcctacgatgtagaggattgcattgaatttgttgttcacttggataaccggccccactggtggcgccgcttcataccatcatgtatgccagcatcggcactacccgtagatgcagtggtcgccgagatagagaagatcaaggtcagggttgaggatgtgagcaagaggaactcacgttacagcctcatcagtgactctggatccaagccagtaatgcagcaacaaccagctaccggccctgctattggcacaacaacgcttgacatgtttgttgagtcaagggacgccacgaaaaagcagcaaggcttaggggatatcacacagttgatcactaaagaaaacattgaccttggagtgatctcgttgtggggtacaggtggagatcttggtaagacatccatcataaggaaagcataccaggatcaagaaatctgcgaaaactttggatgtcgaggctggatcaagctaacatatcctttcaatccacataagttcctccagagcttggttactcagttctatacgaattcctgtctgcaacaaggaactactttagatgtagctcaactgaagaggatggtagcaaagcgaggaataattgaagaattcacgaagcaagtggatgggaagaggtacctactcgtcctggaaaacatgtgcacgatgggagagtgggacgctatcagggcatgcctgcctcacaggaataagggcaactggattatcgtgtccaccgagcaccatgaaatcgcaagtttgtgtgttggacattcataccaagtgttggagcttaaacagtattcagctgagtaccctgtatgcgtcttcttcaaggagagcaagaagactggaagagtaatatctagcagtggtgaaatattagaagatgaaatgagccacaggggaggccttacttatggtaggattcccacctctagaaaggctttagccagcagttggatggatcagtctacccttgttggacgtgagtcacaaatgaatgaacttcgtaagtatcagaccacggcccgtttcaaagattggcaagtgatgtctgtgtggggaattgctggtgttggaaaatctgatcttgtcaaaaatttgtactatgaaaggatgcttaaagaggacccaatgtttgacaagtatggttgggtccacgtgtcccatccattcaatttgagggacttctctcggaacttacttttggattttcactcagatgccgtgggaatcagagaccctattcaggagtgtcataagcttctaaaagaacatcagtgtcttgttgttattgatgatctacagtctgtggaagaatgggacttaatacgacctgcacttgtatctagacattccaagagtgttatcatcgtcattacaacagatgaaaaaattgccacgtattgtgcagacgatgaagaggtcgtgtttaatgtgaaatgtctagaagctgaagcatcctttgatctctttaaaaaagaggtacaaaagaaaagccaaacatcccctctgatgaattcaaacaacaaggagctagaacaacttattctaaaatgtgggagacttcctaaagtgatagttgctgtagccaaatttttggcaccaaagacagttacatgtatggacagcacaaaaacactgaatcacagatttatgcaggagcttgagagcaaccctgagttcagtgttctgcaagatctgtttgcttggatgcattcttacttccgtgcttgcccggattttctaaggccgtgtatcttctatatgtcaatcttccctgggtcccaaatcattcgtcggaggcgtttagtgatgcgatgggttgcagagggctactccagggatacaaaagacatcactgcagaggagaaaggagagatgttcttctcaatgctcgtcaatctaagcatgattcagccgccaacatgcagggtcatcaccgacatgaaaatggtcctatgtcaagttagtgctttcttccatgaatacatcatttcacgtccagtggaagaaaatataatatttgcactcgaggtctttgcactgaaggggcgttgccttccaactaccggacgcacaggacggcaccttgtaatagagaggtgctgggacagggataggattgtgttcgagagcattgacttctcgcgcctgcggtctttaacagtgtttgggcagtgggaatcattcttcatctctaaaagtatgaaggtgcttcgggttcttgatctggagaatgccacaggtgtgacagataaagacctcgagcagatggtgaagcttcttcctcgcctcaagttcctatctttgcgaggaagtactggtatctgccaccttccgagttcattgggtgagctgcggcagcttgagactctggatattaggggtaccttcatagcaaaattgccagcatcgattaccaagctaaagaagctgcagtacatgcgtgctggtacaatatccctggcaaaggaatcatcaacatcttactcttcagcgtctaggttgccaaacctatgcaaatcttgtaaactagttggtgttgagatgccatcagggattgatgaactgacaccattgcacacgcttggtgttgtcaatgctggtattggagggggcaaggccactctaaaagagctgaagaagattacccaattgcgcaagcttggagtgtccggtgtcaacaagaaaaataacaaggaattctgtgctgccatctcatgtcatgtccgcctggaatccttgtcagtgtggcttagcaagggaaatcaaggtttgaatgaaatatcgtctcaggataagcctctgcaaaaccttcagagccttaagttatatggtcttggaagtgaggtgccagcttggatgaaagatcttcccaaactcacaaagttggatttgcatatgaccatatcagcagaagttgacataattaaagtccttggggaaataaaagaactatgcactctacgtctttgtgtcaagccccttcaagatggtgatggtaagcttgatttttgtgtttgggtgaatggaatacagcagcgctgttatttaaatctcaagatcctcgagattacttgcagttcaaagttaaatatatcctttggatcagaagctatgcaaaatcttgagctgctgagagctcgctgctgtagtggatcgacattgaagtttatggagataaagaatctctctaaacaaaaactcaaggaagttcagcttattggttcccatgacactgcactcaaggatgacatggagaagcaactgaaggaacatccaaggaaacctcctttgaagctggaggaaccggaaggatgctgatctcagtatttagcaatagtattattggcgctaatcctatgtgaaacatcttactctgcttcatttcttatcactaggagaagcaactgaaggaacatcttactctgcttcattcaagatgtcatgataattggcgctatcctatgtgaaacatccctaggagaagacattcagttcatttactccgtacatcaaacgccgagcttcagcttatgtaactccataaaggatgttcacttgtgtgcatgtttatggatttgacttatgcgttgatgtagtaatcgttttgtaattttgtgttagagtaatgttagggttttgaggttagccccttgtaattactgtcacacccttagagctgatttggtgaccggggatcccgagggaaagaaatcctcttgctattcaaaattgaattgcaagggaattcctcccccatggatcccctagggatccctaatcaccaaatcagtccttatgtaatggattaggcccaa

SEQ ID NO: 41780 - DNA, 1977 bp, Zea Mays
cttccactgcttgtcttcttgtaggccctgcacgccaatcttcgcctaagcgccggcccccatcccccgtacaacactcctacgatccctgcagtgcaggctctaacagattcactactgcttcctttaatttgtggtgtatttatttctctactagttactttcttacttgagaaaatttgcttattaatgtgactttcagagtataaacattgggaagaagagattgataagtggcagaccccggttctccaagatgagaggcttccagaatgatagtggatctttggtgtctgatgctgataacaagtcgaatccagaggaaagtaatttgtcacatgagatcgatgacaaagaaaatgttgggaaatttttgtaccttgaaggaatagaatacttcatgtggtgcacctatgatgtacacttctatgcctcctttgctcttttggatctgtttcctaagattgaattgagcattcaacgtgattttgctagagctgttttgcgggaagataacagaagagtcagatttcttgctgatggtacctggggtattcgtaaagtaatcggtgctgtcgcccatgatcttggagcacatgatccttggcatgaattgaatgcttacaacatacatgacacaagtagatggaaagatcttaatcccaagttcgttcttcagatttacagggattttgctgcaacaggtgacaagtcatttggcaaggatgtctggcctgcagtctgtactgctatggaatacatggaacaattcgatcatgatggtgatggtatgattgaaaatgatggatttcctgatcaaacttacgatgcttggacagttcaaggagtaagtgcatattgtggttgcctctggcttgctgcccttcaagctgcggcagcactggccggaagccttggacatgatgactatgctgagaggtgcatgacaagatttgtgaaagctaaaactgtatttgaagccaggttatggaatggttcacacttcaattatgacagtggtacaagttatagtagccgttccatccaggcagatcagctggctggacaatggtatactgcatcgtcaggtttgcctcctctatttgatgaggataggataaaatgcacgcttcagaaaatatttgactacaatgtgatgagggtgaaaggaggacgtatgggagccgtgaatggtatgcatccaaatgggaaggtagatgaaacctgtatgcagtcaagagaaatctggacaggagtaacatatagtttagcagcaacgatgctgctccatggaatggagcatcaggccttcactactgcagaaggcatttatactgcaggatggtctgaagagggctatgggtactggttccaaactccagaagcatggacaattgatggccattacaggtcactaatttatatgcgcccccttgcaatctgggcaatgcagtgggccttgtcgcctccaaggtcgatactggaggcgccgaaggtaaatacaatggacagagctcacatttctccaggcaccttccaatttctccaggatagcgttagaaagatgacaccaaaaaacggttgttttggaaacactgtaattaacttggattgctgatgtgacggtagcacttgtatctcgcactgtccaatgtatgtttacggagcacctcatttagaaaatgttgagtgtgaaacgggtgctatattctgttcagcctttgcagttatgtggtgtacctctctgatgtaaattgcatctcacagtgggccggactttgtaaattgttgtacagaaaacgtacatatgataatgccgtgttaccctgatattcatgacaccgtttaccacaaaaatctgtacagtttattgttcatatagtattttagaacgagtacttgtcagattggcgtaagacaatgtcctcttagcgctgtactcttgatggtatatatagatgtacatgtgaatgattt

SEQ ID NO: 41781 - DNA, 1562 bp, Zea Mays
  misc_feature (783)..(882): n is a, c, g, or t
ccacacctaggctccaccaccgccatgcccctgcgtccgcgtatctcgcccccacgcccgcgtatctcgcccaacgcacactgtgcccctgccccacgctcgagcaggtagccgcagctcccgccggatccttccccacgcccaagcaggcaaccacggatctcgaccactcctgagcagtcatcgcggatctcgcccctgctgtgcccccgatgcatggctcctcattctcctctcggaatcgctccctccctccgcgttcggcaccgtgcacccccctcgcctcgcatggccgccacgggggtcagccgaggctggcgggaatacacgggccgcgtctggcatgcggctgaggagctttgcctccgcatcctcacatcctctgccatcagcctcctcttcgcgttgctcctgcatccacctctgaatcgaaaggtgaggtaccctggctgatctcatccggaatagtctgattcttcacacgatctgggcgccgatctcacctccacgctgctcatttgatgtgatgccaagtaattggtccacgtgtaattcctgctattcaactttggttaagggaagggatactataaatcactagaatattatatgggcaaaaagttcatatttttgggtgactcctaaagtagcataagatggatgaccgacctgaaatctgtcgttggagctgtcttggtctctgattggcatggcaatacattatacaagggacatgacctgtacggaatatttgtgccctctttggtttgtgcgagagctatnnnnnnnnnnnnnnnnnnnnnnnnnnnnnnnnnnnnnnnnnnnnnnnnnnnnnnnnnnnnnnnnnnnnnnnnnnnnnnnnnnnnnnnnnnnnnnnnnnnngtttagactcgagatcagcttgattcgttttgctaagtcttctccacctaagtcctcaaaaatttgaacaaggccatattatcagataaaagcagatgtagctttcataggacttagttccagcaaagcaaaggttgacattgcaccaaacaatagcgtctatacttcattcttatggcttggagaagcctatgcaacatgacaagccagatgacatgtagatgagaaggttctgcatcaagagaaaccaaagcaaaatctttgcatcaagagagcaccgatgaaaagctgatgtagaggccagttgacaaacttatggaagaccagctgaccaaataattgaaaatctattgaactatgtatcaagttcattaatttgtgtaattctgaatgagaccttttatgctactgcaacgtctgtgaccacaaatgactgttgcagcaagaccatactccaggagtggagctgtctatatgaagagtgtaggtagagacaattggctaatattgtacaggttcagtttgcaggatcgtagcaacagggttcaaagacgtgtgtttgaaagggcagttgctgatgatcagcatgatggaaggtggggagttccattgctggtttaagctggagctagcttctgaagtccggtcagtcagtggaaactggattctgccacttctat

SEQ ID NO: 41782 - DNA, 538 bp, Zea Mays
cgagcctcgacgtcgccaagggagagctggggtgagcgcagggaggaactgagcgtcgtcgtgagcagagagaagtggagggaaccgaccgtcgtggtgattgggccatcggcatagctgaatccatggagatcggtttgggcgcttcgccgagtctccccgagtctttaggagggtcctcgaggtcttcgcaaacgacaggatacaccggggttgttcttctgtcgcagtggcgatcttcactgtggatcggatgcaaggctacgccatcgttgacgggcaagtgattgaggagcccggagcacagaaggttgaagactctaagcaggagctcactgaaggcaagttgtgtcgttgatcactcttctttacccaataatgttcttgttaaccactatggtatgctcaggctaattttatgggacctaataggttatcctagtttggtttacttcacaccttgcttaccactaaactattgggtagtatctgctattgctctatgtggttttgggtgttaagatacatatgatttatg

SEQ ID NO: 41783 - DNA, 1372 bp, Zea Mays
cgtcttcattctttctccctgcccctgccctcgcctgctgaaggaagccgcctttttggagtttggactcgggaggacagcctccgcactttccgtccgtcgcgaggaattcctgcccgggcgggcgtagagcagggcgaagcattcgttggggacgaacgtttagggccggggatcggggaacacgaggctgcgcgttggcgcaagcaagcaaattttgggtcctagcttgaaggactgccatctttttttttgcgtctgtttgatagaacgcatttttgccggccagctccactcgagaatttgaaggaattttaccaacgtggggagctgaattttttttctgctcctcacattttccactctccacccgcgcctgactgcagctggctgcgatccccctatctaccacctgattcatctttgtctccgtcggtgccgccctctccgccagcctgaccccagggatggctggaaaaggaagctatgtacctccacaatatattcccttatacagcctagataccgaagaggatcgtgtccctgccgtggaagagaaccatgctacgcgccctaaactaaaccaggatccaacacaatggtcatctggcatctgtgcctgttttgatgacccccagagctgttgtattggtgcgatttgcccctgtttcctttttggaaagaatgcacaattcttgggatctggaactcttgctggatcatgcactacgcattgcatgttgtggggccttctcacaagtctatgctgtgtatttactggaggtctagtattagcagttccaggatctgccgttgcttgttatgcttgcggatatcgcagtgcactaagaacaaagtacaatcttccggaagcaccctgtggcgatttgacgacacacttattctgtcacttgtgtgctatatgccaggagtacagggagatccgtgagagaacaggcagtggctcctcaccagctcctaatgtgactccacctccagttcagacgatggatgagctttgatctttaactgatatgaatgtatgttatctgacaaactttggtgtgtggcctggtgactagtgctgcctttgcctgttggcattttgacatatttttgttcttgggctctcacaacgctgctatgttgtttgtagagttgtaaacacgttttgaactagtgaaccactgacagttcacggaagttgtaacacagttgtaccatggaactgtagtagaattaagtgtatttttttgctatttatataggtgagaggatgagaagggaaaagaaaagaaatgcgcttatcatgcagaatgtttcattgtgtttagttctatgaacaatccaatattgtggtgagtggttgttt

SEQ ID NO: 41784 - DNA, 662 bp, Zea Mays
acgctcagacgtctaggcatctcgcttgctttccttccaggcttccacgattccaccccagtctgcccaccgactcttccctctccccactactgtcggcgcgtgctctttcctcctcacaccgcacacccgctgccggagctcgagagtcccctccgcttgtcggtgcccgttctgtcaacccctcgccggacgcctgccgccggagctagagagggccaatgcagccgccgctgcgtggtgcctagggcgggtcgcaggggacaaggccgagcccaccaccgtcgacgaggcattcatggaacgcagcaagagcttcatcaaggccctccaggagctcaagaacctgcgcccacagctctacaccgcctccgagtactgcgacaagtcctaactccacagtgagcagaagcaaaagcatacatggtggagctttatcaagataatcttatggacctattgctgccctgaaatgcaaagcaactaaagttagagataaaaaattccaaggtataagttttctttcctatatgcattcaattcgttgttcttaaagcacaatggatatgctatcctacttcatttgaatatttgatacagaagcctacattgagaatgatgaggtaattaattcgattgatactttgataagcttaatatac

SEQ ID NO: 41785 - DNA, 1193 bp, Zea Mays
acgataagcggcactcgcacgatcaatgtacacattgcccgtccgcgccaccacatccagcatcgtcgccagcctcgccacccccgcgccgtcctcctcctccggctccggctccggccgccccaggcccaggctcatccggaacgcccccgtcttcgccgcccccgccaccgtcgtgggcatggaccccaccgtcgagcgcttgaagagcgggttccagaagttcaagaccgaggtctatgacaagaagccggagctgttcgagcctctcaagtccggccagagccccaggtacatggtgttcgcctgctccgactcccgcgtgtgcccgtcggtgacactgggcctgcagcccggcgaggcattcaccgtccgcaacatcgcctccatggtcccaccctacgacaagatcaagtacgccggcaccgggtccgccatcgagtacgccgtgtgcgcgctcaaggtgcaggtcatcgtggtcattggccacagctgctgcggtggcatcagggcgctcctctccctcaaggacggcgcgcccgacaacttccacttcgtggaggactgggtcaggatcggcagccctgccaagaacaaggtgaagaaagagcacgcatcggtgccgttcgatgaccagtgctccatcctggagaaggaggccgtgaacgtgtcgctccagaacctcaagagctaccccttcgtcaaggaagggctggccggcgggacgctcaagctggttggcgcccactacgacttcgtcaaagggcagttcgtcacatgggagcctgtaggggtccacgcgcacagctcttcttttagagcaactccaatagattagccaaattttttattctatattctcatttagctagccgtttagctataattcactctctaaattacgattaattccaacagactagccaaattagactggtaggtcccacatgtcattctcaccttgccttcttccctatgtcccacgcgcctatgctacaccgtcctgcctccactccggctgaggacaaaggctatgggaggaccggatagctagcgtagggaattagtcatatttggctagcggagggggttgtttaccgagttggatagcgagagaaggatttgaagagactgttggatccaatttttactccaattttattatttttagctagtcaatttgttttacataa

SEQ ID NO: 41786 - DNA, 2167 bp, Zea Mays
ggcgagggacccccaggccccagcccgcgtccatccaccgcccgtgggaaggcagagcagtgagcgtcgcaggcatcggctccagctccggctccgcccgccgccgcaccggcccaccctcctcccccgatccgatcgccgatcaccggccctcgcttagcctcgccacgcctcgcgacaatatttggaacccctgttaccgatcgcctcatgccgtaccactgaacgatcccaccccaacaccgtacccccgccgcctcctccgccgtgcccacagtcgcctccgcctttcgcctgctaccccgtagaggctctatatcccgatcggactagggtgcggacgatggctagcaacgccgaccagcatgctgccgttgtctcggctgccccgtccgatagcccggttggggcgaagaaggctggggcggcggccgccgtctggaaactccccgcggccgcggcggttcccgtcgcggaggtggttgaaaaccccatcatggacgcacactcctggccggcgctgcccgggctgtcgtctccgccgccgccgccgccgccgcatgcggggccaacagccaaagcgtcaccgaaggccgcttctccagctcccactggggcggcgacgtcgcccgtctctttgggcaatcctggcgcgccggatgctagccatggtaacgatgctcgggtgcgcaatcctgtggcccggcgtgccctggtgatgcctgcggcggatgggctggagaagagtgcccctgcaccggaaccgtcccctgtttatgtgcctaatgcccggagcaatggtgcagatcctcatcagaatggacgtcctggctcgcatcaccatggccgaggtggtggctatggtgggggaaacaggaggggtaatggtggaggtggggggcgtcgcgggagtgagcaccacggtggttttgatgggcaacggcgcggaggtggccgcagagatggccatggaccggttcatcagctgcgtggccatcagccaacatacattaaggctcctgttgtagcaggagcacctccaccgcctccaccatttgttagccccgctactcctcagacaccaccttatggaccacctatgggcttccatgacatgtcagcgcatgtttactatttcccggcacccacctcggaaggcattcaaggcctgccttttgtgcctcttccagcaagcccccaagctgttctaattgacccttctcgaaagaaccttctggagcagatagaatactatttcagcgatgacaatttgtgcaaggacctttacttgcggcaacacatggatgggcaaggttgggtgccattatccctgatcgctggctttcgccaagtccagaaaattactaataatattcagtttatcttggaaacagtcatgctatctaacattgtggaagtgcagggagacaagctacggaggcgtggagcatgggagaattggttgcttccaaaactgaactattctgctgggagttcttctggttcgatgacccctgtgacatctaacattgatgctcttgcatctcagtttcgttctgttggacttgagggggcaacgtaccatccaagcatgcctgggatgtctggtgaagctctcctgacaagatcagcaacttcagttagtctaggttaccatgcatcaaccttcggtgggctacagagcaatgggagtgaacctctctttgggccgaagtctgcaagaaatctactcaggagcgataccttttgaggctatatattcaagagaagttaagtacaatggcaggccgagttttcacagtaacggcatgcacaccttatctcaggtgagatgtaaaaacagctgttaaataaaaccaaaaaaggcaaaagcataatacaaaaaaaaagcatacacaaagacaaaaaaatacaaaatgcaaaaacaaaaataaaaagagcataggcagcttttgtgctagtactcctgtcctttgtgttatgtggtatattacctagtaggtttgttttctaatgctaggagtttgatggctcttctgtgtgaaccgagttatttaagtgttatggatggtaccattgggaaactgttgagtggacgacgttatataaaagtacatgaaaacattgttaattatgctgctctctgctgatttgtgccgcatttctt

SEQ ID NO: 41787 - DNA, 1550 bp, Zea Mays
gagccacctccccgcacaagccgcgcaatgcgtcctacccgacactgtcgttccgcaaacaacctccgcgcagtcgtcgtccacacttgcccgcctggataaggatacgaagtccaaatcctcatccgaccggttccctacttccctcaaaccacgtcctctgcaacgagcgcgccctacgcgacggcgttccctcggctacctctacctcctggacatgccaccctcctcccggcctccttcgcctcaaccctaaccccgcaccttcgaacccattgctgctcccctctctccccggctctaatccgctcctaacttccgccttgtttgctgcaaggaggcgtgcgcgacctccagttccaatctgagcgactttggtggcatggacttcctgttcaccatcgccggcttcctcaccatcatcagctttggtggcggacatgagaggagagaagaatccttcgaggcttgcagagaagacaaacactggtagtcgtagaacccaatgaaattaacttcactagaataaagaagaaaaggaagaaaacgaagaaggtggatcttgatttaactcttaatgagcttggagatggggaggacactcaagaacaccaggcgatccatgcacaaattatcaggaagggtggtgggaagtgttccacttgccaccaattctcatctctcacctctctatcacatgaaccaacatatttctacaatgtggacattcctctcgagtcatcaaaggatctgaagaaaaggagaaagaactccatgctctgaagtgcctcgcggttgagtcagaacaaggcacagatgggtgcgacagagctgtgggatctcttggcctccggctcagagcaattcgtggagatgtacagggtgtatcaacacctcaggctgaagaactggtttgtaaggtcaggactgcagtacaggcagactttgttgctcactgtcatcgtccgacactagtgcactcgtagttcgtggaggttgtggctccaaaagggaaagcattcggcaccaggtgtgcccgcatgaaggtttggtctgaactattatgtgcgctttgggactcttcaagtgtggccaagatgttacttcttaccattagcaccaagagctacgagctagaatccttggattgtttggagcagatgattgttcatgagaggacgatcacaagatggataccacaaccgtgtcgtgagcaacaagacaaaccatgcagagaagaaaccaaaagggacatgcaaagacaaaaatcctgcagagaagtattaagcaacgaacagagcatacaagtgtgggggtggtgtagtgtttatctattggacgtagtgcagagctttacagttatttctagcttacttatctacaaactgaaatcttaactaaagagcttcctatttctgtatagtcatgttgatgaacgtgaataatgcaattctatggtaccaatttgttgtgattctcattgacttttctacatatctttgataacatcatcttatgtaatgcctacttgaaagggaaatggacttaat

SEQ ID NO: 41788 - DNA, 424 bp, Zea Mays
gtagccgggcggcggcgggacaaagaggaagtagtgacccctgcgtgttggcgcgaggagggggcagcgatggagaagggcgcaggcacatggcgacggcggctggtggaaaggagataggatggcctcgccttcatcaccgaccagacgtgcagcctctcttgcgacccgataccaggtctagcgaagatgacgtttagtcagaaaaaagaaaacttggtgctttagtgaacaacaaaaatgccacttgtgaatactaatatcactgcccgacaaacagactatgtgcttttgtttgcaagcagtgcttgcttacgtgtttcttagattcctaatgaactgtgtgtatgctgcttttggatccgttcaaattctaaatgaattatgtttgtatgctgcttttgcatctgttgtctcaaaaaat

SEQ ID NO: 41789 - DNA, 2471 bp, Zea Mays
ttcaccgcaggcgtcgtcgtcgtccgtctgcatttcactggagtgcttgatggctgccgcaaggggcattaaccagcttctgaagagaattctccacaaccagtccgctgtaagtggtccatggctgctttcttcatttcggggaaatcatgaagagtcctctgctggattgagagcattggcgcttcttggagttggtgcctccggtcttttgagttttgctacaatagcatctgctgatgaagctgagcatggtttggcagccccagattatccgtggccacatgctggcatcatgagctcttatgatcatgcatcaattcgccgagggcatcaagtttacacacaagtttgtgcttcttgtcactccatgtccttgatttcataccgtgatttggttggggtggcctatactgaggaggaaacaaaggcaatggctgctgagattgaggtcgttgatggtcctaatgatgagggtgaaatgttcacccgccctggtaaactcagcgatcgctttccacagccttatgcaaatgagcaagcagcccgatttgctaatggtggcgcctacccgccggaccttagtcttatcacaaaggcaaggcacaatggtcagaactatgttttcgctcttcttactggataccgtgatccacctgctggtgttcagattcgtgagggtctgcactacaacccctacttccctggtggtgccatagccatgcccaagatgctcaatgatggagctgttgagtatgaggatggtactcctgcaactgaagcccagatgggtaaggatgttgtatcattcctttcatgggcagctgagcctgagatggaagagagaaagctgatgggagtgaaatggatctttctactatcactagcgcttcttcaagctgcatactaccgccgcatgaggtggtcagtcttgaagtcccgtaagctggtcctggatgttgtcaactgaggactaccattacccttttttatatttaaatatgagctgttaaggagtattcaaaataatgaatttgtgatgtacaattttgccactgggggctaggttccatgcctagagattattttgttttctttactctgctgagctgcaaaagcatttcaccaacgggtacatttcacgtttttttggtttgcaatgcctcgatgttatcagcaaccttgtaacttaacagctgatgagagttgataaattcttgtgctatgaaatacacctatcgtatgtcttggtctcgcttgcgggagtattgtgtttgctattcagttattcttgctggacgtcgcccttcatcgcgcagcatagtttgagaacatttttttgcagatttaaagcaacggctaattgagggggttggggctataaataccctctatggctagtttggaagcttaaatcccctttgggattcaagtggattagagaggaaactagttcatttctatctcaatcctcttcaatcccaaaggaaatttgaggttatcaaagtagcccataaggccataagggctggtttgggaaccccattttttgagggaattctgttttcctaaaagaaattagtttattttctcttgggaaaatataaatctcttagaaaaatggagtttctaaattagccctaaatggtccattcgatacaccaatcaccactagagttgtacatcattctaaaacacttgtgtaacacgttcaccacttcgagagatccaagcactctagctgagttgagattgtcattctagagagagtgtgcttaagggattttgcatctttggtgttgttgtcgtgttcttgctcttgtgttggtgacacttctttataaaggttggagtgctttgtggagactctatctctctttttagtgaatcagagggctcaagtttgattgttgggatcacttgagaaggttgagagatgtcctttaggacgcctcaacggggacgtatgttctttagaaccgaacctctttaaaataaatcacaagtcttcttttgttctttactttctattgttgttggggccttcctcttccgaaggtcctaaaaaacgtgactaatcatatattttcagtatgacatagactgttacaggaggcttcgactttgggacgaagattttttctcatagtaaaggcatgcacgatatgaagatacaacccgaaggtgatatgaattggacgccgaagctatggctgaaggaacttcgacttaatatgatgacgaagatcaaggacgaaaccgacctaaggagaaaagactacttagtccttgataactcgcattatgattaagagtaaatatcagggacatgaatgtaattttgtccggactgcgtcccgtgcctataaattgaacagtaacactgtactgttcacgatggattgtaatcactctcacgtcattctcgcatccttaccttctggcaagtcgaaggtattaatgtaacatga

SEQ ID NO: 41790 - DNA, 4512 bp, Zea Mays
  misc_feature (4511)..(4512): n is a, c, g, or t
cgcggggccacacgagacggagcaatcgaatcacgggcgagctcgacggtcggtgcaggcagctgcacccagtccggctccggcccgtgcccgtcacgactcacgcgagacagcgaaacttttcccagcggcgaagcggagatcggagaaggaaccccaccctgcccagtgagatcttctcctagcagccgcaatctctcctccctcggcgcggaggacgagcagcgctgtagattcgatcgtgtgtgctcccgagatggcgatcgggtcggactaagccgaagcgaaagcgagagccgctgcccccgtcgtcactcgatgaccaggcggacgggtgggtgcgccggcggcttcctgctgccgttgctgctcctggcagcttctttacttgattggagcttggtttctcttattaatatggtcatcttctttgctattcgatttgctgttccaagaagaggtctttacacctggaggctgcacattgtattgtggtgtacaattatttactcagtccttgctattttagcacaagttgcgtttcatataatctggtacattgagggcaagggatggtctgtggctcattcttggtgggcgaagctggtgggtttagcaagggaccagccatgggaatcaccatcagttatctattttcttgcattacagctatctgctgcaggccttgctttggtcgaagtccttggaggaaggcttcaagattcttgctggttgaacttctcttttgaggttgagcaaataggttaccatttgcgggtagcatgctgcttattactgcctgctgctcagttagttgtcggtattagccatccttcatggatttcattaccgttctttgtatttagctgcattggccttgtggattggtccttaacaagtaactttcttggccttttccgatggtggaggttacttgagatatactcggtgttcagtattcttctgctttatctctaccagttacctatgaaatttccctatattgcgttagcatttgctgacttcattggtcttttcaaaatttcctcgaaatcagaatggcctgagctgtcttctggaatttctcttctggtatattatttcatgttgtcatcagcgaaacgagacatacaggaaatgggttcacttatatctctagaaaatgatagcttaacagaggaccttctgccttctagaaatgcgtttttggtccgccaatctcgatctggcagaaggcatggaaacatattactgagaggatcagttttccgaactttcagcattaatttcttcacttatggattcccggtcttgctgcttgccctttccttctggagtttcaacttcactagtatttgtgcttttggtctcctagcatacgttgggtacattttatatgcttttccttctttgttccaaatgcatcggctgaattggtcacttctagtgttcattctgctttgggcagccagcacatatgtcttcaatgtggcattcacattcttcaacaaaagatttcaaaaggatatgatgatttgggagactgttgggctttggcactattctattcctggattatttttacttgcccaattctgccttggagtttttgtggcactgtgtaatcttgttaacaattctgtttttctttacttgacttctgaagggggtccttcaacaagtgatgatcacctcattgatgagaaggaagatacaatggttctgattgtagcaacaatagcatggggtctacgcaaactttcacgtgcaattactttaacattactctttctacttgtgatgaaacgaggatttattcatgctgtttacatgtgctttttcttggtgtttctggtgaatcattcaatcgacaagagactgcgccagatcttagtattgttttgtgaggttcatttttcgatactgtacattctccagcttgatctagtgtccagtgctctggagcgcagtggttcattaacaatggaggtctctcaaataatgctacagcaaaggatttcatggagataggctcaatagtttgcttctgtgctgtgcatagccatggttttaagatgcttttttcattatcggcggttcttcggcatacaccttgtccacctgttggattcactattctaaaggctggtttgaacaagtcagttctactgtcagtttatagctcgcaaaattcacgagacggtgaagaccaccgtaatttacatgagaaaaaaatcgcatcatatctgagtaaaattggtcagaaatttctcttagtgtaccgctcatatggaacttatgtggcttttctcacaatacttttgactctatacttggtgacccctaattatatatcatttggttacctatttttccttctattttggattattggaaggcagcttgtggagaaaacaaaaaggcgactgtggtttcctctaaaagtatatgctacggttgtttttatttttacctacagcctgagtgtttcaccgatctttgcagaatcagtctcaaagttccttaaactataccctgatctgggatttgaccctgaagcttctttgctggaaaatgtttggcaatcattggccattctagtcgtaatgcaactttacagttatgaacgaagacaaaacagtgacaagaactttggtgtatctgatgcttcagaatctggacttctggggttcctaagaaggtttctaatttggcacagcgacaagatattatcagtttgtgtgttttatgcttgcttatcatcaatcagtttatctggcctaatttacctgttagggcttattgtgttttctacgttaccaaaagtttctcgaattccttccaaggtttaccttgtctacactggtttgcttgctgcatctgaatatctatttcaaatggtgtgcaaacctgcacagatgtgtcctcatcagcacttctatggtttgtctgtgtttcttggtctgaaatactatgattctgggttttggggtatcgaatacaggcttaggggaaaagttttagtgattgtggcctgtaccattcagtataatgttttccattggctagatttgatgccaacatctctagtacataagggtaaatgggaagagccctgtcaactttttatctcttccaacccaccttatagtcctgtcagaagcaacgaagaaagtcattcatctaataggtttacttcattgttttctaaagttcaaggtcttataggtagtagttcaagttcaagctcatcagtgggtccaggcagcattcaccagaaattagagtatgttgataatgccatcgaaggctcagatgaggacaaaagacactcatttgcaaagatttggggattgtcaaaagaaagccacaagtgggacaagaaaagggttatttttctgagaagagaaagattcgaaacccagaagacaacattcaaatgttacatgaaattctggatagaaaatcttttcaaactgcgaggtctggaaattaacatgattgtgttactattagcaagctttacactgttgaatgttgtatcgatcttctatatcatgtgccttgtcctttgcattcttatgaacagagatctaatccagaaattgtggcccctttttgtgtttctgtttgcttctgtcttaatacttgaatatgttgctctttggaatgatgagataacctggtatcatggtaccaatgacattgaagtccattgccgtgagtgctggaagaattcaaggattttttttgactactgctcaaaatgctggcttgggataattgctgatgatcctcgaatgctgattagctactatgttgtgtttatattttcctcttttaagcttcggtctgatcacttttcgagcttctcagactcggacacatatcggcagatgatgtcccaaaggaaaaatgcagtagtatggagggacctctcactggaaacaaaaagcttttggacattccttgactatgtgcggctttatgcctattgccatttattggacatagttttggcactaattgcaattaccggtactctagagtatgatgttctgcaccttggttatctcggatttgctctggttttctttagaatgagacttgaaatcttgaagaagaagaataggattttcaagtttctacggatgtataattttggtctcattgttttgtcacttgcttatcaatctccttatgttgggcaatttagctctggcaagtgcgatcaaattgactacctatatgagataattggattatacaaatatgactatgggtttaagataacatcacggtcagcttttgttgagatagtaatcttcctattggtatctgttcaatcatacatctttagctctagtgagttcgattatgtgtcaagatatcttgaagcagagcaaattggtgccatggtccgtgagcaggaaaaaaaagctttaaagaaaactgagcagctgcatcatcttcgcaggtctgaggagcataaacgtcagcggaatatgcann

SEQ ID NO: 41791 - DNA, 3340 bp, Zea Mays
ccgcaattcaacacgcgaagctaaaaaagaaaaaaacaattcgaaacccccgacctacgcgaggacaaaacagcaaaaccaaagcgctcagccgctcgcgaggagcgaaaggcgagcgcgcagccgggcgcccgtggcggaggcgaaacccccgccgccgcatcgccctgagaccctccggttcggcccgggccgagctcgagcccgcgcaatctcgccgccggcgggcttgatctgatccaaggccaccgcgcgccggcgcgggcggcgaggaatggggagcgtggacggccgcggggtcgaggggatccacgaagctaatcggcgcgcgcagttgattggatggatgaatgccttactcccggaattcagtttgcctccggattcatcgagtgaagagctgcgagagctgctcagtgacggcgtggtcctgtgccgtcttgtgaacacactcatcccgggggttcttgagggatcctgggagggttatgcaccgtcagatcagaggttaggcaacgtgaagaaattcctctcggtggtctctgatatggggctgccaggcttcagtttgaaagatcttgatgaggacaaaaggttcgtgaagttttccaattaaaacgcggatcatattcagatcttactgctgccaagatttcagagatgatgcactctaatagcttagataatgcaccgacacagtcgcttattagtgttgttaatggtattttggatgaaagcatagaaaggaaaaagggagaaataccacatcgtgtagtttacttactgcggaaagtcgttcaagagattgagcaccgtctctgtattcaagcagagcacataagaagtcaaaatgttaccatcaagacaagagaacaaaagtactgttcaaaaattaaagcacttgaaatgttggtaaatggcacaaatgaagaaaaccagatggcaataaacaggcttcagatagtcaagaatgagaagtcacaaatcgaagagaaaaaagaactctgtgagaaagatgttcaacgattaatgaaagagaaagaatattccaaaagcatcataatgaacctaacaaaagatatggaagccatgaatagattgcatgagcagcaacttgagcaaattggaagaaaggcaaaggaaatggaggaacaattaaccaccagggtaaaagaagtagagtatctcttgctacaatcgaataagaaagttgaagaacttgagattgcttctaggctaaaatcacagttatgggatcagaaagagaacatttttcagagttacatggataatcaacaattagttatcaaggacataagaatattgtcacagtcatatgaaaatgatatgtatgcacttcaaatgcagtggagaaatgaaatctctaatttaggatctgggttaaaatgtttggttgatgccgctgaaaattatcataaagtcctgacagagaaccaaaagttatttaatgaagtgcaagaactaaaaggtaatataagagtatattgtcgtgttaggccatttctttccggtcaagataaaaagtccaccacaattgactacatgggggaaaatggtgagcttcttatatcaaatccatttaagcaagggaaggacggacatagaatgttcaagtttaataaagtgtttactccatttgcttcccaagctgaggttttttctgacatacaaccactgatccgatcagttctggatggattcaacgtttgtatttttgcatatggccagactggttctggcaaaacttacactatgagtgggcctaccacatcaaaacaagattggggtgtcaattatcgagctttaaatgatttgtttgatatttcactaagtaggagaaatgccttctcatatgaggtgggggtacaaatggttgagatatacaatgaacaagtccgtgatctgctatcaaatgatattgcacaaaaaacacttgggatttggaacacttctcaacccaatgggcttgttgttccagatgcaagcttgcactcagttaagtcgacatctgatgtattagacttgatggagattggacaagcaaatagagcagttggttcaacagcgctaaatgaacgaagtagtcggtcacacagtattctaactgtacatgttcgagggatggatttgaagaatggatcaacctctaggggttgtttgcatcttattgatcttgctggtagtgagagggtagagaagtctgaagtaaccggcgatagattaaaagaagctcaatacattaacaaatcactctctgcgttaggtgatgttatttttgctttgtcacagaaaagtgcccatgtgccttatagaaacagcaagttaacacaagttcttcaaagttctttaggtggacaagcaaaaactctaatgtttgttcagataaatcctgatgttgagtcatattcagaaactataagtactttaaagtttgctgaaagggtgtctggagtagagttaggtgctgctagaagtaacaaggagggaaaagatataaaagagctattggaacaggttgcgtctttgaaagacacaattttgcgcaaagatatggaaatagagcagatccaggtcatcaaagacaaagtaaaatccccaaatttgttgttagatagaaatgtgcctggcttgacgaagactacagcaaaccaacctagccaactattatcaggcgaacgaatgcttaagtctagtgacagagttctatcggatcgtcagagttacggcgaggtgaatgtagatcctaaccaccatgtgatggatactgcaccagtgagcatagatgaagcaggatatgagaacaatgcatcggatgatggtttatcgggtgaaaccgagaatgataattcagctgctgagatgacagcggaacggctgcatagatttccatcaagaataagcaggttcactctcacaaagaacgggcagccatctatgtctagatcgaacccaaaggatgctaagactccaagcaatacgaaagctccatcgagccggttgacaggaggctcttcagccaggtctaaaagacggcagtagagcacgatcatgttgctcgttttgatgtgcattgtagttgaaatgtgaatttgatgggtagttgtaggaccgttttatgattgtaactttagaaaatgtcagacactgatggcagaatatttgaggcatttgtttgatcatttgcttatgccgagcaaaacagcaaacaatgctcgattgtatgtgaaacactctgacctgtgaccatttgaatgtcggtgcgcctccggaagtccggagttgtgtatataccaccaaattgccggcctaaaatttccag

SEQ ID NO: 41792 - DNA, 731 bp, Zea Mays
ttcttgctcgagcacgcggcgctccctccagccccaacgcccaaccggagctcccgccctactcggatttcgtcagaccgcgtagctccctggcgcccccctcctcggaactccctcctatcgctccagctcgccgcgcactcctctgctcggctctcctcaagcacgcgcccatccctctgccccctcgccacagtcggcgtttctcacagctcggaccgcgcccagccgggcggtcccttgcgtcgcgcggacctcccccgagctcgccctgcgctcggattccatctccctgcgcgcgctagctccagctcagccgcatccttcttcttcctcactgcatctccgtcttccttcccctgctagccgcaagctgccgagtctccctctgctccagccatggccgcgcgcttcatccccctgcgtgtcgcgccaaagctcctccctcttcctctgtcggcgcccagctcctccgctcgccggcgtcaagtccctgctcgtcttcctccacacgacgcgcgcccagccggagttcggcccatacgcgctcccctctgctcatccccaagccgcgcccagccgaagtctcctgcgcgcgtgcctgcgcctagctcctctcagcggcggagccagaaatttttagaagcctgggcaatttaaaagatcatatgatgtaaataaataatacatatactataaagtagttaaagaattgcttacatgtatataat

SEQ ID NO: 41793 - DNA, 660 bp, Zea Mays
cggggagggtggagaaggcggcgctgcacgcgaacgtgacaaagatcggctacaactggacacgctgcagcgatgcgatctacacttggaacgacgccgccttctccaccctccccgtcatccgcaagctggtcgccggcggcctcaggttgtgggtgttcagcggcgacactgacggaaggatccccgtgacgtcgacgaggctcaccctccacaagctcgggctcaagaccgtccaggagtggacgccgtggtacgaccatctgcaggttggtggatggacgatcgtgtacgagggcctgacattcgtcacgatccgcggcgctgggcatgaggtgcctttgtacgcgccgcggcaggcgcgtacgctcttcagcaacttcctggcaggcaccaagatgcccccaacggcgttcccctaactgctgtctccccctcttttctctctctctctctctctcgcttctaccaaagatgcatgtgtaattcgatcggaaaaaaaggaaaaggttcaggaataaaagtcagtcaggttttaatagagaagattcataatgctcaaaatcacaacgtactgtgctgtctcttgaatgtgtcctccaagactgtcgcagtagctgacagcatatgaaacattaaacaagacacctccgtagtgtt

SEQ ID NO: 41794 - DNA, 2198 bp, Zea Mays
ttgctgtccattgccagacccagttttccatgagagaatgatgcgatcctcctcgccctctataaaaattggcacgagaagcatcggttgggcaccgcaccggcaccaccaagactctaggcgcagcagctcctccacgcttcgctgccgggtcaagctcctctcatggagatcacggccagctgcgacgacggcgcggtcacagctggcgccgtttctggtctgctgctcgcgtctgttctgtctctgttcggcgcgtttctggtatacttctacgcgccgttctggagcgtgaggagagtcccggggcctccagccaggttcccaatcggccacctccatcttcttgccaggaacgggccagacgtcttccgtgcgattgcgaaagagtatggcccaatcttcaggtttcacatgggaaggcaaccactggtgatcgtggccaatgccgagctgtgcaaggaggtcggcatcaagaagttcaaggacatccccaaccggagcaccccgccgccgtcgatcggttccctgcaccaggacgccctcttcctcaccaggtgcacgcactggtccatccttctagggactcgacgtggtcggcgatgaggagcacggtggttccgctctaccagccagcgcggcttgccgggctcattccggtgatgcagtcgtacgtcgacacactggcggcgaacatcgccgcctgcccggaccaggactgcgtccccttctgccagctctcgctccggatggccatcgacatcatcggcaggacggccttcggcatcgagttcggcctgtccaagaacgccgcaggcacaggcagcagcagcagcgagtccccaggcggcggcgagggcgagggcgacgtcagggaattcctcagggagtacaagcggtccatggagttcgtcaagatggacctgacgagctctctgtccaccatcctcggcctcttcctcccgtgcgtccagacgccgtgcaagcgcctgctgcggcgggtgcccggcacggcggactacaagatggaccagaacgagcgccgcctctgctcccgcatcgacgccatcatagccggccgccggcgggaccgggccacgcgccggcgttgcggccccggcgccgcccccgcccccgccccgctggacttcatcgcggcgctgctggatgcgatggagagcgggcggcggcggcggcggcggtgcaggtgccaacaaggacttcgcgctggcggacaggcacgtgcgcgcgctggcgtacgagcacctcatcgccggcaccaagaccacggcgttcacgctgtcgtcggtggtgtacctggtctcgtgccacccgctcgtggaggccaagctgctgcgggagttggacggcttcgcgccgcgccgcgggcgcgggcgcgcgccggacgccgacgagctccagagcgggttcccctacctcgaccaggtcatcaaggaggccatgcggttttacgtcgtctcgccgctcatcgccaggcagacctccgagcgcgtggagatcgggggctacgttctccccaagggcgcgtacgtttggctggcgccgggtgtgctggcccgggacgcggcgcagttcccggacccggaggagttccggccggagcggttcgcgccggaggcggaggaggagcgggcgcgccacccgtacgcgcacatccccttcggcgtcgggcccagggcgtgcatcgggcacaagttcgcgctgcaacaggtgaagcttgccgtggtggagctctaccgccggtacgtgttccgacactcgccgtccatggagtcgcccatccagttcgactttgacctcgtccttgccttccgccacggcgtcaagctcagggccatcaggaggggctgaggctgcctagcttggggtcacgtgtgtgtggaactgcatccgtgacgtgatggtgccacagcgtgtcttcttgtgtgtaatatagcactaataagcatatattgagtatgtatatatagaaatagatggtgaagaagattgcacgtattggacagctggcaaatgtgttgcagatactccctctgtttcgttttagttgtcgctggatagtgcaaaattgaactatccagcgacaactaaaaagaaacggagggagtacaacttcagtagaagaacgtacgcgtgtgttgtcctggactaaacatgaatctgacatatttctcgag

SEQ ID NO: 41795 - DNA, 857 bp, Zea Mays
aaatgaggtgtgaggaaaaggagggaaagcattggcgggcgggcgggcgggcgcctgtctcttgcggctgtggtgccgcccgagagcgcgacccattcgttcgcgagcctcacttccagttccagcacgaatcctcgtccaatccacgcctgctgctcgcgagccatcgccacagtgctggcctggccatgcctggagccgttgcgcttgcgcccacgttcgcggcagcgagcagctccgccgccgcggcctccacgctggctccgaacccgacaagccgaggcgacccgctaattattaggttgtgccgcaatgctcctgctagcgcaactccacttgttccacttgtagccacccgtcgctacgtgcgtggctgccgcggcgcggctctagtggccagtccccaccacgctccaaaccctcgcctccgattcgcgtctgcggcagaggggatggctgcggaagcgagcacggcgggtgcggcgtcggcagccgaggcgaagcccttcgccgtcctcttcgtgtgcctcgggaatatttgccggagtcctgcggctgaagctgtgtttcggaccctcgtaagcaagcgtgggcttgactccaagtttctcatagactctgctggtaccatcgggtatcatgagggtaataaggcagactcaaggatgagagcagcttcaaaaaagcgggggattgaggtcacatcaatatccaggcctatcaaaccctcggattttcgtgattttgatcttatccttgcaatggacaggcagaactatgaagatatattgaactcgtttgagagatggagacgcaaagagcccctccctgatagtgcacccaataagcttttttat

SEQ ID NO: 41796 - DNA, 1842 bp, Zea Mays
tggatgctgctggaatgaacttcccagactctataagacaattgaaagtcaagttccaaatgtttgtcaaactgaagcatggaagagcaggacacattgggctggttctcaagtgcctgaagaagctacccaatccattaaaaaggccgatgaatacctccagtcttgcagacctgtacggagaaaacatgggaggttgctggaggaaggtgctagtggttttcttgctgggaaagttcctgttggggatgatgattctgttaagtgtcatgagaaaagttggagctctttcaatgaacttattaaatctaaggagagtgctgagaatacatttggtagcagtaactgggcatcagtttatcttgcaagtaccccccaggaagcagccgcattaggtctccagtttcctggagttgatgagaataacagaggggagaatcctaaccccaccctgtgttgaaatgttgtcttcctgcaatgttaggacaaaggtagaggagatatctgaagttgatggtgattttgatgatataaaaggtgtagatgaagtagagctttctgaggaacagagaaggaaatacagaaaggtaagggaagaggatgacgcaaaaataatgaagtgcctgcagcgccgtttgaaaggaaaaaggatgagagactggtgtaaggagaactttggtttggtctcatcatgtgacgagaagcctcctctaccagaaaatggcgttttaggtgctaaaagtgactgtccttcatctaaaaaactcaaaactgatgaaaacaaagtttctattgagatatgaagcatacatgtgaagatgatgataatgagaagagattgaaaactgtgatagttgaaagcgatgatgatatgcagatagatagcaaacaagctttacaaaaggatggtgaaggtagttcaacagaatttgaaaaagtggttgatatcattgatcttgatctcttcccaagccctaagctccctaataaaagtttgcataaaactttcaaatgtactatttgctctgaaatgctgaatgcctctgatgtgcatcgccaccctgtcttggatgttgttgtttgtggatcatgcagatttcttgtgatagagaagaatcgccttgaggatcctgtatctggtagttattgcacttggtgtgcacaaagtgaactgattcaaagttgtagttctttgttgctgctgtgtacccagtcaactagagctcttaatttctgaatgtgacaaggccctcagtggtgtggaatcttccgattcagagactagcaatgcagagctttctggatcagagaataatggtcctgttagcaagcaaaaaatgaagaagagtattagaagaattatggatgatacagaacttggtgaagaaacaaagcgtaaaattgcaatggagaaggcaaggcaagaccatttgaagtcaatgcaagagcaatctgccaccaagttaaggagcaagaatgttggaaatccctttgaaactccactggaaatctgtttacaggatgctggggatggacatgtagtcaaccttgccagggaggaggatgaggaacctgttaggattccaagcagcatgtcttctaaactgaagcctcatcaggttgaaggaataaggtttatgtgggaaaatgttattcaatctgttaaaaaggtcaaatccagggataaaggtcttgggtgcattttggcgcataacatgggccttgggaaaacttttcaggtctgtgttgggctgttggcttatagcttggatatatatttacattttcttcaagagttattcgttcattgtatgctgcacctattgtacccatgacaatcaa

SEQ ID NO: 41797 - DNA, 388 bp, Zea Mays
gatcgcaaagtgggcagtggagatcatgggcgaaacgatctcgttcgcccctcggaaggccatcaagtcccaagtgttggcggatttcgtggctgaatgggtcgatacccaactaccaacgactctgatccaaccggagctctggaccatgtttttcgacgggtcgctgatgaagacgggggccggtgcgggcctgctcttcatctcgcccctcggaaagcacttgcgctaagtgctgcgcctccacttcccggcgcccaacaatgtggccgagtacgaagctctggtcaacggattgcggatcgccatcgagctaggggtcagacgcctcgacgcacgcggtgattcgcagctcgtcatcgaccaagccatgaagaactcccactgc

SEQ ID NO: 41798 - DNA, 734 bp, Zea Mays
atggcggagaggaaaagggaggagacgaggagcagtcgcgccgcctcggtggacgcaagagcaaggccagagctacacttggacatacgcgaggaagctgccaagaagaacagggaaccaccgaccgcgtccaacatacgccggcattcatcgtcactgcaggtctgccactggctgctgccatccaccgcgggctcggtcgccacgtcgacgccatccctgtcctcgagcgcgccgtcacagtcgtggcgccggcacaagaatcgtctgccgacagcgagcctgaggccggtgcagccggcggcgacgactaccagcagctgcagcctgtcgagcccgactagaggggtgagtggtgctgctcctgatgagatcgctggaggcttaatggagattcctatcatctatgatgcacttggcgatctcgatgaggcccaaaagcttcttcatatggcactcaggttgctcgagggctcatcgagggagtggagcattattgccggtgttgtggcacaaatgggcgttctgtactacatggtggggaggtatgcaaattcggggaactcgttcaagagtgcagatgcaaattctagggccattgatgaggttgcacagttgtttgaggaggcaagggcggttctggagcaggagtgtggcgcttctcatcctaatactcttggtgtgtacaacaaccttgctgcaatctataatgccatgggaagtcctaatctgta

SEQ ID NO: 41799 - DNA, 1375 bp, Zea Mays
aaagttaataaccgggccggatgggccggcccaccgtcgctgctagctcattcatttcttctttccctgccgggccccggcggcctctcctctcctcgcttgtccccaccaggcgccatggacgctggcgacgacgaaccccccgttctcctcgaccgcgccgcccgcgcctcccgaggcaagaggataaccaagctgctcgaggacgaggtcgagcaggacgaggctttctggaaccaagaagccctcaaggatgaggagaacgatgacaactacgtggaagagccggatgctggtgacgaattcgacagtgattttggtgaagatgaatctgaaactgatgatgagccggagaaggaagtacgcgagagattacctatcaagaaacggctaatgtttcctggcaagacgctgaggaagaccaacgtcaagaagaagaaggcgaccccaaaaccagaagatggcacaaaagccgacaagtctgctgataagccgagttcatccacacaagcagatcttcctgatgaactggaggctgagaaggccatccggaaatcaaccagaacgtcggtcatcgtgaggcaagctgaaagagaagcgatacgtgctgaaaaagaagcaacggccaagccgattaagagaaaaaaggagggagaagaaaagcggatgacacaagaggagatgcttttggaagcagctgaaacagagatcatgaacatgagaaatctagaacgtgtcctggcaagagaggaggaagtgaagaaaaaagctgttgttcataaggacacttatgagggtcctacaattcgttttttctcaagagatggggaatcacgtctggaattcataaatggagcatcatttgggtctgaactttgtacaacatcatctccttatccggagaaacctgtttgtgtggtgacaggacttccagccaatttcctgaaagaggaggctgatagaaagcgtccgaacatgtcgaatatgggagagcttttcgaatcaataactggtggacacttgatgcctaagaagagaagggttgagataaggtctccgaacatgttaggaggctctaggcatggcgggcgtacctggcgaatacctgcttttgatatggtggacgaggactaacgagacagatcccgtggctcccaatatgtcgaatatgagagatctttctaaatcaatagccggtgaagaggaagatggataggatgttgtatttagtgttagatcttgtgcttgtagttatcttaatgtatttttgtcagttgataaattcatggttattaaagtggtaaaacgttaaaatgttatgaaacaactttttaatattttaacgtttaaacgaacgttgaaacgtcttttcaga

SEQ ID NO: 41800 - DNA, 1364 bp, Zea Mays
atgtaccgccgtgaattattctttaaatcgagtgctggtgttggcagcttggtttgcccgagaaaaacttcttcaatgacaacttcgagttggtgctctcagaacctagcgatgccaataccaatagcaccaccctcctctcagacgagaccgacgataggcctaaaggaaacacgaatcaagaaacaggcacctcaaagcaacttgaatacgaggtaatgaaccaagcacccatttggaagattgttgcagtccaggttttttttatgtttccagttctgttctttgacgttgccacaaagatctgcccttttggctctatgttgtatgttgatgacatgctaacagtatacttgtttaaatgcccttccacttggcgtgtttcagtctaatccttcggttgctgagcccgaccagagagaaaagatggagggtgttccaggctctgccctagatgccagtaaaaaatcctctccaagaagagcgttttcacgccctataaaaactaacctgagggttgccgagtcgtctgcatttctagcatatgtcaagccaagcaccccagccaccagctcatttgacagcgaattacaaaggggtggcagccgattagattccttggataaccagggtaattgctctagcgcaaccgatagaagtgacactggtactgatgtaaatattcggagtaaagaagcttttgagatgcctgcgcagtaccctatgtttaatccttctggcatgagtacgcactcaagtcatttaccaacgcaaaatgtgtggtcatcggcatcgagcacaccaccagtgcctgaggaaacatgcagtcgctctgaaaggagggctgcagcacttgccaagttcaggctgaagaggaaagagcgctgctttgacaagaaggtgaggtatgtgaaccggaagaaactcgctgaaacgaggccaagggtgcgaggtcagtttgttagacagccaaccaatacggatgtcatcagcattggagatgatatatctgaagacgaagatgacgatccatcgtccagggaggtagatatggtttcttctccagagtagtagtggagaggtcctccatgtgaaaaaatagactgcagatggttactgctcatcttgttacaactcagtagacctaggcaatacaccctttttgctcacacacagtattacatttttgtccctaaaacatgtggctgttaccctggttgctttaatgaagaaatcatctttgataaagtgtagctgaagttttgctagttattgttgcacagaccagtctaatcaatatgatcttatggcaggataatcttttgagaaaaacagggctattattgtacattcctcctattatt

SEQ ID NO: 41801 - DNA, 237 bp, Zea Mays
ccctaatcccctcccctttgcagccgcccccccatttcccctagcccttggccgccgccccctcccatcttctcctccctcaaactcttgcagccacaccacctaaccctagccgccccccatctcctcctccccaaggtgccattccttgccgcttggatctacgtcgcgtggtgcaagtctccaattggttttggtggagggaagaatggacgaaggaaagggggagaatccaag

SEQ ID NO: 41802 - DNA, 875 bp, Zea Mays
cttgtaattttcaatcttgtttgttaaatttgtattaatttgatacaatcaatttaaatttatctttaaatattgtacttctagcgggaacagattccccgcggggttccccacggggataaattccccgacggggacggggatgggagaaaaagctcccccgtgagcgttcgcgggaacggggacggggaatttttgtccccgcggggacggggatgggaagccattccccgacgggaaaatccccgttgccatccctaaccatgggtggtacgaaaatagaaatgcaaaattaccatagtaagaagaccggcgaccttcatgaccagaatcataccttactctagttctgctgcgcatttcttctggcctttttcgtgactcagcagcaagaacaacagctatttcccgaccaaagaaaacttggcgattcatgtgatactgggcttcagaggcatcgtaaggatcaacaaactctacaaaggcaaatcctcgaggctcccatcaaattcaaatattcactgtgccctctatggttctcagcgaagcacagtcaacaacttacaaacattccatcagaagagaagcaagtgttgcaaaaagcagtaagatgcccaggctctagtgtccaagtttcttgtatacaactacgtaaggtgatcctcataaagagtatcttcataaaaatcgttcgcttcaagttccccaacatttgaaaaagtcacaaaagtacttgaaattgacttgactctcttttatcttctcatgtaccagccagtatatatgtctctcatcttctcttcatgaaattaattttctcaaagtatcaaatcttgtcttcatagaagaacttcattggacaagactccagagta

SEQ ID NO: 41803 - DNA, 4495 bp, Zea Mays
cttcacacgtggtatacagatttttcttctggcatcggctttatcccctggccgccgtcttcatcctttctgcagccgcaggcatccgagcccctggcttcccatggcactcgcccctccctgctcgctctctagctcggtctccagctccctcctctccctccatctccctcacagccgcgccctgctcgcccttgcttctccctccctctgcccgtttccatggccgtcgccctgccctgccttccactgccgcgccgcgtgctctgctctctgcgcgccgcggtcgcctagctcgcgaaggccgccgagtccgaccccgccgtgagctcaccctgggtgcttggccgctcttcatcgcacttgctcactggacaccggctccttgctcggcctctgctcctctctacgcgcgtctccctgcgcacgcgccgccgtcgagcttcctgctcgcgcctatctccctcccatggcgcgctctctgctcgccggttctccttgtaccagctcggttacccatctccctagctcgcgcccccacagagcagcttgagtctggcatgacaaacagggaaagaagtagccgagctcctctgtgcgcagccgcgcccttctgcttggctatggccaccgtcgtgccgaggatttgtggatccctctgtgttcggcctcgacaaaaactctggacgctcggacctcgccgtggacgctgatcgcctctgtttttctctggtgcgcgcccctgtgcttgggtccttgctagcagccgagcagctccttcgcgccgcagtgctccctcgtgtgcgcgccctgccgaagccccttccgactgtcggcaactccccatcctctagttgtgctcgctgctggccctgtggtgagctccctgcttcatcctcgccatggacgccatctagcacgcgcgccggatgtatttcctccttcgcgcagtgccttggtgactgtcgagtagcacaccaggcctgcgcagcctcgccgcgtctgtatagccccagttgcaatgcatccaccgctccggtcgttgacgtcgtgcctcgcataccgcctattcgataaaatgctccagctaagcttcgtcaccgatctcatgaatcccgatcgacattgttgtcgtgccctgcgtcttcaacatgtccgtgaagccgttgtggcattgctgtcgttcgtctccatgtggtgggtgcagcaatgtcgtcgttcactccatggggcttatcgtcgactttgtcttccggagagtgatcctagagtggaatgaaaatgtgagggaagtctgtgtagcgattgccaggagctcgatcggatgtctaaactgagaaccgtcgtcgcactcgcggttatcaaatcgattcgatcgtggtacgcttattaatcacgagatgtggaggacaagagccgagtcgaccccaaaatgacgtaacgggtggactactccccatagctgatggatgagtctgaagatggataatctgaacaagtgcgaagaaaaagatggttgtcaagtgatcgacgtctaacaaacactaacatagtgtttattccaggcaagccccggtgcatttgccacctacttgctgttttaaaatctttatcaccttatttgatgcattaggtgataggggttgtgtgctaaaccgttgatgcatttctttcattggaaaattgattacccttccttgatacccttttatgaaaatttttttatgatgcttagccttgctctagaagaacaaaaatgttttgttttaaaaccaaagtgatgctttagtggatgagaatttttacaaaagaaaatactaatgatggtgaatccgtcaaaggccttgatgggttcaacatcggaaaagatgtacctctgccaggtaccaaattttgggttgaaaataataaagctaagactgggtggttgacttgcacgagaaggaagtttcggtgtagtgtctccgtctgactcgattaaggaccgtgtcgatgtgagcctgctgaccgaggaccctttaactggcacatgcttcatcatgggtaagctttgccttgggcagactaataccagaaaggccaacacgcaatgggagtggagagatggcgagagtagcgtgtaccctccgtggcaagagactggacggtggtgtatctttgctctcggttggcgtgaacccggtctggtcttaagaaacccggtggcgagttgacatatccaagggttaagtgctacatatgtcgtgtgattggagatccccagctgggtattaatcgatttggattgctgttacttctcggacatgaagacttggtcactgacttacacatagcaatccagtgaactgaagggttgacaaaaagatggctagtttaggccaagtgattgaactaggaagaaagaacgctagatgcaggtaacttcacttaacctgacaataaaactggatttttaaggatccactgttagtaagcatttctgcaaaatagagtctttgaatcttgttaaaccttcccttgattcccaaaagccagcatatccttgagagtctttttccttagacaggtaagacttgcgaaagtacacttcgtacacatggttttcgaacccatgttgttgcatgtactagattgtgcagctgtggatggtgttaagcgccggtgggcacgaccttcttataagtctaagtaactcttctatacttattgaggatggtcacttgagctagcatatatttcaaaactataaataatttataacagttcaaagttatttctctgaatcacttttgtaatcacttcaatcatgtacaatgtaaacttgatgtaacttataaaatttggtaataagatttccgctgcaaattgttggtgtgtgatttgtgtttacttaatcttgcggtcctggttgtaagtggtttatccgaggtccttggggcactcggatagatcctgttaagttatctggtgcacatgcatagccgtctgaggtctttgagacaagggcaggtgcatgtgggcccaataacttgggaggttctgccacagatggctcccatggattcacggtggtggagttttcgcggaacaacggatgttaaaggggcacgacccgggcgcccacgcctccttatgtaagcatgcagaaccgggaacgcccagctgaggccagaagacccggaaagggttgttacgctggtgacccgcgaatctcggcgagcgtcgttgccccgatctcatggaatagagatgacaagtgggcccagagcgcagcgagtcatccgcgtcttagtgtgggcacgagcaaccggccgccaagcaggccccacccgtcattgagagggttacggccaccctgagtgcgagtgcgaggctgacgccaagggcccatgcgcagttgtctgcaggcgagtgtgctgggctgcgcagagagtaatcggggtgcgccggaagctaggttttgggcctgagcgtggtttcccctttctttttttattctttttttgtttttcttttatattttgttttgttttccctttgagtttgaaattcaaaatctaaattcaaatttactctggggtaaagcttcctcggattaagagtataattttgcacatactattattacctttaaaatatttattttgtatatgcattttctttcttctctaaattccagaatttcttttaaattccactttggacttttaatatattccttgtcacattagtattttattttgccacaatatgcacacaaaagaaaaatcccagcatgatgcatgatttatttgggtgttcttttgttaattatttatctatgtaagtgaggtgtccacatgaaatgatagataaagatgacacacatatccataaaggcagataatttcttcttttagatttttttacaaagtgggtattacacagtattaccagcagatttgatctttggggcacccaggctaacaatcaaaagcatagctaaagctgaagcgtccaggctggaggatgttgatatattagaaggggaacatatgattgttgtcattcaatcgtctagataccagcaaacactaaggcgctaccacgacaaagcagtgcagcatcgatcctttgcagtaggagatctagtccttcgccgagtgctgacaggagaagggcgacacaaattgtcatctccatgggaaggaccattcatcattgcagaggttatccggccaggatcctaccgacttacctaaatggacggacccgaagtaggaaattcgtggaatattgaacaccttagaaaattctatacgtagaagtacctcaaaatctggtgggcaaactatactttgtaagtaagagctttcattatcaataaattttttgtgttctacttcatacaaactctcaatcaacaagcggtttaagtcggaaatgacttaaaactggcacaacatacctggacacttacataactcaaggtgattactataccctaccaacggag

SEQ ID NO: 41804 - DNA, 2174 bp, Zea Mays
acgtactctgtcaaacgatacgccgcgatgcttccagacgagcgccatccccttcctcgcctcacacgccgtcctgttggtcgtgcctctcttcaacctttttttcttgagcattagcgagagccccttacatggtgcagtgctagcatcgttgctggcgacctcggtgaggtcggatctgcaaaggttgcagctagcgcgcctacactacatcaacatggtgtggcatctcctttcgcagatccccaacatgctacgccgccggctgcctcattggaactcctgtgcaccgcttgcctttcttctcccattcaacccgcaggcgttccctggctcaatagcgcaactaggggatgtccgccgctacctccatataggaaacgacagatttagattttcaggtgatgcgtggtcgggatcccggatcaatcaaaataagtgtgaaataagtgtgaaatttgagaggctgttgaacttccagatcaggtaccaaccaaaaaaagtgacccttttgacggcgtattgcgtgggcaaggcatgccagtgcgacaatagagaaactaacggggagctctgttcgttctgctgattgcttatgattaggctcgcagtggtggtagctgggagagcttgggactggccagacgcgaccaactcacccatgtaataagacaacttttatacatagccgacagtacgcaacctcatgcgcaagatccttaatgaaaccaaagagctgcagcagataaccaacgacaagcagaaaaatcaggttgtacgcatccaacattttactttcatatttgctgaagatgtcaacaaacaaaatagacaagcagcccagacaatggagatgatgtatacgataattgcagatgagttcaagtcaatggacaataaggacatgcgccctgaagattacttgaacttcttttgtcttggaaaccgggaagaaccaccatctaatggcagcccagaatcagagaaatctacatataaaagtgcagagatagatatagagttcatgaaaaagaaacttgaggaccttgataagccaatgaagaggaggaatgataagctgctcaaaattgagcatgaattatattgatccagcacaatgccgaggagactggagactaaacttggaggtgctactgaaggatgtgactttgagtcaaagggtagcacatggagagcttgaattgaattcaagcttggatatgattggaaaatatttgtattagatcacctagaagggtgattgatgcttgttattggccaagcagacaatagttctatactcgcagccaaaatctatagtgggaactcctgcatacattgctcatgaggttcttctgaagaaggaatacaatggaaaggttttatgcgtagtgtcgttaattattctacacttgacatactgtttttgtttagtgtgcatgttattattctccacttgaacaacatgtttgtttgtcaaaacattttatacacgcacgatttgtagtcatgcataacagggaactatgttggaaggttcgaatgctaaattagtcactaactctttgttactgaactaaggttgctgatgtgtggtcatgcggagtgatgccatacgtgatgctgacgatcaccatccctgagataagaaaccatccatggttcttgaaaaacctcctagctgaccaaatggatgacaatacgatgagtaagcagtacgaggagcctgaacaaccgatgcagagcatgaatgagttcatgcagatcctggttgaggcgaccattccagcagttggttcacgtggactcaatcagtttctgaatgatgacattgacctcgacgatgacatggaggacctagactcagatgccggtcttgacctggaaagcagtggggagatcgtgtatgctatttgacaacattgaatactttgttgtgtcgtaggttaccaagataattagagacaaggggcaggttgttgtgcttgcaagtatctgttgcagctgttgttcatgcctgatgttgatgcctcttttcatactgttgtgtttggatggtgtaccaccagtgttttacaacagtttggcccttggaattgctattgctaaaacttggttcctctgagaagaccttttgtttttgtattcccagtcgagggacggtgaagtactta

SEQ ID NO: 41805 - DNA, 3223 bp, Zea Mays
tactgtagtccagtctccagtctatctactactcgtacttccagtggggcctcgcttgctactgcaagtcctacttccgtctttcctccgccccgttatccattctattctcaccagccatcgcccatctttaaaaaaaaatcttgaacccctcctttgccgactcctctctccagaaggccccaacccatctcatcactcaccgctcccaaggcgagagatctcacctccccattcccaaaccaacccaaacaccaaaattcaaactgacgatcgatccaaaaacgccacaaatcccaccaaatccacctcaaatttgccacaaaatgccccagattggcacccaaaccccgcacccaccgtttcaaatctgacctcgccattcccactcctcccactctacccaccgcatactccagatccccaccgcaatggcgaccgcggtctccaaatccgccgtcaaatcccaccccaggttgcccaccacagcgcagccgccgccgccgaaccccggctccaacgccgcgtcggctggcggaggggcggcgcctccgccgccgccgtctcccgccgccggcgcgacgccgtcgaagaacgcggcgatggcggagctcaagtcgcgcgtgctcgccgcgctcgccaagctctcggaccgcgacacgcaccacatcgccgttgaggagctggaccgcatcatccgcgcgccgccgtcgaccgacgccgtgcccatgctgctcaatgcgctggcacccgactccccggggctcgcctccccggccaggcgcgagtgtctgcgcctcctcgccacgctctgcacgtcgcacccggatgccgccgcgtcgcacctccacaaggtgctcgcccacctcgcgcgtcggctaaaggacccggcgtccgacacttccgtgcgcgacacgtgccgagacgtcgcggggcagctcgcggcagtgtacctccgccctctgtcggcttcaggcgtttgcgaggcgggcaatgcgaccgtgacgctgttcgtgaagccgctgttcgaggtgatgggggagcagagcaaatcggtgcagggcggggcggccgcatgcttggccaaggcggtggaaggggcgggacctgggcccggtgccatcgggatgtttgggaagctcggtcctaggatttgcaagttgctcggtgggcagggcgtgcaagccaaggcgggattactaggcatcatgggaagtttggcgcaggtgggagcaatcagttcccagaatatgcagcagactctgcaaagtatccgcgactgccttgagaacagcgattgggctactagaaaagcagctgctgatacattatctgtctttgctacccattctgttcacttgataggtgacggaacagctccaaccattgctgctctcgaagcttgccgttttgataaggtaaggcctgtcagagatagcatgattgatgcagtacagttgtggaaaaagttgactggagaagatgcaaatgcagatggtagaaataaggatcttgctgatggtgaagggaaactggactcaagaaggtcaatacaaagaggtggaaaatcagaatcctttgatgattcctctccagattcacctagtaacaacgtgaagggcagtagcatagctgaaaaggcagcttttcttttgaagaaaagaccaacattaactgacagggaattgaaccctgagtttttccaaaagctcgagacaagaaaaacagatgacttggcagttgaggttgtagtcccccacaagactctacaatctcacttgcgaggtgaagatgaaacagaagaagatgatgatcctgttggtccagctgacagcaatggatcagctgaagatgaagcaaatctaactcaaatgcgtgctagctttaattttcagaatatccgggataaatgggctggccaaaggggaaatagaaacaaaattacaaaagctaggacaactgatgttgaagataggggcgaacccagtacaaaagattccactgctgcagccatgaacatttctggagaaggccctttcataaataataaaacaaattggttagcaatacagaggcaattgtcacacttggagaggcagcaaactagtctcatgaacatgttgcaggatttcatgggagggtctcatgacagcatggttacattggagaacagagtacgtggtcttgagagagttgttgaggaaatggctagagaaatatcactctcctcaggcaggagaggtggtggtccagcgttgggctttgattcatctcctggcagatcatctaaacacaatggtttccatgaatattctaattcgaaatatggaaggagtggtgatggacggatgggatttgcagaaaggtatttctctgcagatgctatggcttctggtacgaaaaaccaatcttggagaccagattctgaaccatgggactcatatgcttattctggatcaagaagtggtatgaatgtgaggagaggattagattctgtttcatcagacaatagaatggcaagaaatgaacggagtaatgatcaagtgggtccccggagaggttgggacaaaggtcagggaccctttaggttcggtgagggtccttctgcccgaagtgcatggcgggcctcaaaagatgaagcaacactggaagctattagagtagctggtgaagataatggaaattcaagggccgctgcaagagttgctattcctgaactggatggagaagctttgaatgatgacaaccaaggggatgaaagaggcccactttgggaggcctggactcgtgcgatggatgctgttcatcttgaggatatggactctgcttatgctgaacttctttcgactggtgatgctgaattacttgtaaagttgatggagcaaactggaccggtcgttgatcaactttcaaatgaggttgcaaatgaagtcctacatgcagtggggcagtttctcatggaagaaagcttatatgacgtagcattaaactggcttcagcagttgactgatctggtaatggaaaatggctctgattatctcggaatacctctagacgcaaagcaggacgtcttactgggacttcatgaggcgacagcgattgacctgcctgatgactgggagggagcgacaccgttgcagataatgaagcagctagcttcatcctggcacatcgacctacagcaacttatcaattaggtcatgcagattgtatggtggtgttg

SEQ ID NO: 41806 - DNA, 336 bp, Zea Mays
tgacactaacataattaaattacatattacttcgtacttccaaccagtaaagatcaaaggataataagcttgtaagcatagttaattcatactaaattcatattgtttgtgttgctgattgctgacagatgacttgttgtgcactaatcactcactcactacagagtacagaccaaacacataggcacaccgcacacatcagtcaccactcataagttcatgtctagccaataacatattacataagttcatgtctagatataacagaaccaaattgccagatgacagtacttcaaaagcattggttggagcaatatagttgctcagtgtctaaca

SEQ ID NO: 41807 - DNA, 843 bp, Zea Mays
aagggtctagaaatggcaacccttctcttgatagtttgctcaagcaagcatcatggactaccttcaccagcatgatataacaaaatcattggcaactaaggagttagtttggttcctggcttctgctttgctggctctgcctgtcttcattatatacaggcttctagtagggaccttctgctccaaaaagaataaaaggcctcgtagtagtaatggtaaccatggccacaagagatacaagcggcgacatgctgacaagtagatcagtttactgaacactttagggttcagtatgctgtgtaccgtggcagatctttgagcaggattgggtcatgggcacccttaccttgaaagcattgtacaccaccaacatactcttctcttttgcattttcgtcccaggtgtaatatggacttcagtgcagcagaccttttatctgcactttgctgggttcatgtggttatgcctcggcctttgtttgattggtcatttgtttattgtaacttgtgaatgcgtttgaatttgtatgcttgttcttgtcggcgacctacattcgaacttaatacttatgtatacagtggttggtttagctaataactggatgtctcctgttcacttcgttcatgtatggcttggtcgacaccatgatctggtagaatggtggctgactcagctgctgaagtgttacgaacaggattacaggaaaaagagagtgtctataaattgctagccatcctgtatgcttggtgtgttatatcaaaatacagaaactcaacatcagtttgtcatgtagggtccgagtactgaacctgagctgctggaattacccaatggaatcacgac

SEQ ID NO: 41808 - DNA, 2584 bp, Zea Mays
cgccacggagccctccgacaaggcaagcacccaaccgccgccggagcccggagcaaaaccatctccaaaaccctagcccccatcccctcgctggaaagtctcgtcggcggccgcggagatgggcaaggcgaaggggaagcagcgtcaggacaagttctaccacctagccaaggagcaagggtatcggagtcgcgcggcgttcaagctgctccagctcgacgcgcggttccgcttcctcctgacggcgcactcggtgctcgacctctgcgccgcgccgggagggtgggttcaggtggccgtcaaccatgccccagtcggagccttcgtcgtcggcgtcgacctcgttcccatccgccccattcgcggggcccactcgctcaccgaggacatcaccaccaccaagtgccgcgccgcggtgcggaggctcatggactccaatggcgtctccgccttcgacgtcgtgctccacgatgggtcgcccaacgtcggtggtgcctgggcgcaggaggccacatcgcagtcggcgctagttattgacgcactgcgcctcgctaccatgttcctcgcccccaagggcgccttcatcacgaaggtttttaggtctcaagattacaacgctattatgtactgtcttaaacagttgtttgagaaggttgaggcaactaaacctacggcaagtcggtctacatctgctgaaatttatatcatctgtctgaaatataaggctcccgcaaagattcaaccagaacttcttgatataaagcacttgttcagtgtggttccagaacagaccaaatctagggatgttatggatggtaggaaaaagagacaccgtgatgggtatgaagaagggaatacgacattacggaaagttggtttggcatctgattttatatggtctgatgcccagcttgaggagatgcttgatgaagcttatgagcgctttgtaactagaaagggtggtgaaattaaacaagaacgcaagcgtgcgaaacgaatcaatcctgacgctgatgcagacttgttagagggaggtgaagatgatggtgttgctgaaatggatcaagattttgatgaagaccaagatcttgatgaacatcaagatcaggagaccaatccccttctgttagctctagatgaacagaggccaactaaagagcagattgtaaagcaaatggtatagtcaggacgtgttcacagaagcagcaactggcattactgagcagagtgacactgaagatgaaagggagagtttgcaaaggaatatgaagaagatggttactggcaaaacggaaaaagtggctaaagcacagcgtttgcaacgagatgatattgagattgtaccagcagaacctgtccgagatgaagaggatacgtcttcatcttctggtgaatcagatgtttcggaggatgaactcgatgattacagaaaggctgaagtactagcctatgctaagaagatgctgaggaagaaacagagagagcagatacttgatgatgcttacaacaagtacatgtttgatgatgaagggttacccaactggtttgttgaggatgaaaaaaggcataggcagcccatgaagcctgttacacgtgaggaagtagctgcaatgagggctcagtttaaggagatcgatgcccgcccatccaagaaggttgcagaggccaaggcccggaagaagcgtgttgccatgaagaaactggacaaggctcgccaaaaggcagatgctatagctgaccagaatgacataaacgagctatcgaagaggaagatgattgaccggatttacaggaaggcgatgccaacgaagcctcagaaggagtatgtcgttgcaaagaagggggttcagttgaggactggcaaagggaaggtgttggtggatccacgtatgaagaaggacaagcgggccagcggaacttgtaagaaagggaagaagggcggcaaaggcggcaaggggaagggtggtcagaaaggcatgagagggaaaactgggaagaaggccgggaaagccccgagttaaggaagatgaggagctaagcacggctgggatgctggatgccttcctcccagctaattttttgtctcgtcctactacagctactctcagtaggcagatgctttgaagtcgtgtgatgataaaatttatgtgttaagttttgtagcgtgagttatcatggctacaatttgttctgaaactagtggtcactaatcttaatttacacagttcagtcaattatcaaaactttttaacccctttggcgacaccagagtataagaaatacagatgcctgcatttctactaatatttgtgtggcgcacccttgtggagacttcttttttacaggtgaggaatccgcttgcatttccttatcagatgaaatgaaggcagcactttgagggcgtgttcggctggctacaagccgacactgttgcagctgtttggactgctgcagctgcaatccatagagagaaaaatactgtagaagccgcagccgcagccggattgcagccgcagcaagccgcagcgaacaagctggaatccgaaacattgagatgcagagaccgtcatggattcgcatttcc

SEQ ID NO: 41809 - DNA, 3230 bp, Zea Mays
aaacgacgcctgaacggtcccaaaacccacaccgccacacggccacgcccagttctcccctctctcgctgcgcatcgacgacggcgagggcgccatgatcgtgcgcacgtacaggcgtagatcccgttccatctccgaaggcgggggcggggtctcgtcctcgcaggaggcgttcgacttcgatgccgacgtcgacgtgctgggatcgtcggcctcgcagccgctcccgccatcgcaggaatcctcctcgatgtgggatttcgacgaggacccgcctccgtccccgccgcggcccgggaaggaggggaggcgaagcgggcggggcggagccagaagaggaggagggttggagctcgcggaagctcccgcgatggcgccgacggtgacgctgatggaggcggaggagtacggagagatgatggagagcgtggacgacgtcacgttcgcgctcgacgggctccgccccgccgcgcagaagcggacgcggcgggccagcctgctcgcgctgctcgggatctgcgactccgccgagcgccgccgcgtgcttcggtcccaagggagctcttttatttgttttggcaagtgatgtccaagacaataatttgctgtcttcagaaacttgtgtccatttcctcctcaaattattaaaccctccggtgaatgttgttgatgccaaagcaccatcaataggttccaaacttcttggaatcagtaaatttcagatgcttaacggttccaataaggatgtggactcttgttcagaggacatacttttaaaagttgaagaaatcctcttaagctgcaaagagatcaaaccagcagacagggattataagagaacaacaaggccggaactatgttcaaagtggcttgctttgttgacaatggaaaaggcgtgcttgtctgctgttgcattagaggatacatctgacatggtcttagaactcggaggaaatttcaaagaaacattaaggcagttgggtggccttgatgatatttttaatgtcatggtgaattgccattcagaattggagaaacttgtaaaggatgcctccactacggttgtggagggaaaagaaggtgctcctctacaaagcaccacactcctcttgaaatgtttgaaaattttggagaatgccacatttctaagtgacaacaacaagacccatttgctcagcatgagtcgaaaattgagccctaaatgccgctcactttcttttgttggtgtcattctcaacattgttgagttactatcagctctctctctccttcagaaaccttccactgtttcaagaaaagcagatccaaaaaatactaaagtttgcaacggggcctgctctgacagtagaggtttgagcttattgaatcatcattgcaagtgcaataactcaaagaaaaagagcattttactgaaccgaaggtgccagtattgttcatccaccaaatcagaagcttctcatgttaccctctcttctagtagtgatgtcagtcagtcagaaaggatactcaattgctcatctttttcaagcaatgggacatcaagtggttcatttggagtgaaacatattaatggtgctagtttgaagctcaatgtaagaatggatcgttctaaagcttatccagtcagaggctcaactggttggatttctatgaaagcacaaacttctgattggaactccagagaaatggcaaaaaagcggcgcctatctgaaaatgtacgcactgatttgagtaatggtggtgatgatccatttgcatttgatgatattgatcaagaaccttcaaattgggatctatttggtccaaaaaggaaatcaccacagaagcgagcgaaaagaactaatggagaagtgttggatgattgtggaactgcattaatgggaagtcctaaattatgtcaacctgaagatatttatcagtcagttgcaacttctggttctaaggttgtagatgagtccaatcttttggaggattgccttttggcgtcagttaaggttcttatgaacttggcaaatgacaacccgtctggttgcgaacagatcgcgtcatgtggcggacttaataacatggcctccttgatcattaaacatttcccctcatttgatttctccatgaacagtaacaatcaaatgaatgaaagtgtgtcctctggtgatccgttgtcttcccagaacagcaagtcaccccaaatcaaaactaagcagttgcgggactatgaacttgattttctagttgccatattgggattgcttgtgaaccttgtggagaaggatagccttaatagggtacgacttgcgaatgctcgtgtttctgttaatctatctcaaaatccagatagcaaagaggtacagagggatgtcatacccctgctctgttcaatattcttagcgagtcaaggtaccggggaaactgctgaagctatatcaccggatgatgaagaatctctgttgcaaggagaacgcgaagctgaaatgatgattgtggaggcctatgcagctcttgtgctcgcctttctttcaacggaaagtatgaaggttcgaggagccatttctagttgccttccggacaacaacttgaaagttcttgtaccagtgctagagaaatttgtgtcatttcatctgcagctcaacatgatgacaagggaaacgcattcagctgtgactgaagtcatcgaaagatgtcggctatcatagaagtgggaagaggcgccctgtacagattagctgacctctttgcagccgaagcacacacaggtgttgctcatcacctggccagggcgcaacaaatggatgccagaggctggcctgcagtgggctttgggagctaacagtgattttattctttcttttgtccctagtttcttgttctccgcatcccccgaaatcacatgtttcattgtcgtaggaatagtccgtattatgaatgtacaataacaacataggccgtagggggaatgtagttgtgctgtttcagttcctgggctgtctgcctttcaggttgtatgctcgtgtcacatggaatcagtgaccgcatgcctaaatctgagttaagattgtatatcacataatagccgtgcaattcaactatgtagccctatgtacagaggcgccatatattgaagcatcttctggttgcaaaaaacatgaatgttgtataaatagtgtaactgaaggtatacaaatcttccaggcagttccttggtgctatataatgcacggcttagtggcgta

SEQ ID NO: 41810 - DNA, 449 bp, Zea Mays
gttgcaaccacgactgcagtttcctctgcgcctagctcgaaagcccttggcttcatgattaaaagttgggtgtgccgtgctattccctccgtttgcgcctacctattcctcccctcgctccctcgaacacagcgcggacgtcatcctcatcgccataggccgcaagttgagaggataattcgacggcgtagtacctctggtgtcgggtctagggcttggcctatcgtgtgcctagagcttggtgcactgcggggtcgtcgttggcgaggcacttgtcatcgtggacaggcagaccctaccgacgcgctcatctacgcagtgaggtctcgagaacctaaagatcatcctggtacctggaatctcaagtcccaggcaagttatgcccttgaccacttttattactcaattatgttctttatagtcatttatcatgcataagtttaattttg

SEQ ID NO: 41811 - DNA, 1627 bp, Zea Mays
gggatgagataccgagcatgatggagaggaacggggaaatctattgaagttagacaggcagctggtctattactgaaaaacaatctgcgaacgacttacatttccatgcaatcttcatcccagcattatgttaagtctgagctgttaccatgtataggggcaaccaatagggcaattagatccacagttggaacagtgatcagtgtgcttttccaaattgtacgagttgctggatggattgagttgtttcaggcactccataagtgtttggagagtaatgacctggatcacatggaaggtgctatggatgcgatatacaagatctgtgaggatgtccctgaagagcttgatgttgatgttcctggtttgtctgaacgaccgatcaacgtgtttatgccaagaatactgcagtttttccagtcaccacatgcaagtttgagaaaactatcattgggtatcataaaccagtacatagtagtgatgccatcggcactctacatgtctatggatcagtatattcagggattattcaaccttgcaaaggactcttcagcagatgttcggaaactggtttgttcagcctgggttcagctcattgaagttcgcccatcaattttggagccacatcttaaaaatgttactgaattgattctgcaagctaataaagattcagatgatgaagttgctctggaagcttgtgagttctggtctgcatactgtgatgtgagcatgcctcctgaaggtttacaggagttcttgccgcacttaatcccgactttgttgtcgaacatggtatatgctgacggcgatgagtcccttgatgatgctgaggaagatgaatcctttccagacagggaccaggatttgaagccccgcttccatgattctcgattgcatggatcggaaactggagatgacgatgatgatgctgatgctgtaaatgtctggaacctgcggaagtgtagtgctgctgggttggatgttctctctaatgtgtttggtgacagcatccttccaactttaatgccattgattgagcaaaacttggctcgaacagatgatgattcttggaaggagagggaaactgctgttttatgtctaggcgctatagcagaggggtgcattagtggtctatacccacaccttcctcagattgttgcctttctaatcccacttcttgatgataaatttcctcttatacggagtattacgtgttggacgctctctcgatacagcaaattcattgttcagagccttgatcatccaaatggacgcggacaatttgataagattcttatgggagtgctcagaaggatattggatactaacaaaagagtgcaagaggctgcttgttcggcgtttgcaatccttgaagaggaagcttctgaagaattagtaccccatttggaagtaattttgcagcacctcatgtgtgcctatagaaaataccagagacgaaatctccggatactctatgacgccctcggtaccctggctgatgctgttggagcagaattaaatcaggcaaaatatctagacatatttatgccgcctttaatcacaaagtggcagcaactttccaattatgacaaagatctatttccactccttgaatgctttacatcta

SEQ ID NO: 41812 - DNA, 1484 bp, Zea Mays
aaggaatcggaatcctctctctcattcactcactctctcttatccaaacgcccccgtgccccgtctgcgtcgcgtagggttttggcaacttgcacgtacgagagcgtccatggacgacggcagcagcaacaaggtggttgaggacgtcgcggaggaggaccccggccgccgcggcggtccatggaggacggatgaggccgacgccaacgagaaggcgcctcgcccgagcaggcgggtcgcttccctcgacgtcttccgcggcctcaccgtcgcgctgatgatactggtggacggcgccggcggcgagtggccggtcatcgggcacgcgccgtggaacggctgcaacctcgcggacttcgtgatgcccttcttcctcttcatcgtcggcatggccgttcccctggccctcaaggtccgtcgtcgtcgtcggtcttcccgtccatccgtcgttcatgccatgcatgctcacaggatcccggaccgtggccgagccgtgaggagagtggtcgtaaggacgctgaagctgctcttctggggcatcctgttgcaaggcggttactcccacgctccggacgaactggcgtatggagtcgacatgaggcacgtgaggtggggcggaatcctccagaggatcgctcttgcgtacctggtggttgcggttctagagatggtgacgaaagacggcgccaaggttcatcaggaccagccgccaggttcttcaggccgcttctcccgtgtattcagaatgtatctctcccagtggatcgtcgcgtgctgcattctggtggtctacctgtcccttgcctacggggtctacgttcctgactgggagttcagagtgcgaaacgctgacagcccagactacggcaaagttctaacggtgaggtgtggtacgaggggggcgttggaccctccctgcaacgccgtaggctacatcgaccgcagagtcctgggcatcaaccacatgtaccagaagccggcatggagaaggcacagggcctgcactgatgactccccacacgaggggcctttcagagaggatgccccagcgtggtgtgtcgcgccattcgagcctgaagggatactgagctcactgtctgctgtgctgagtacggtcgtcggtgttcactacgggcatgtgcttgtccacatgaagagccatacggacaggcttaggcagtgggttaccatgggcgtagctcttctcgttctcggaatcattctgcacttctcgcatgcgatcccgctcaacaagcagctctacacgttcagctacatctgcgtcactgccggcgccgctggggtcgtcttctcagcgctctacttcttggtcgacgtcgtgagcctgcgctacgccttcgcgccgctgcggtgggtcggcatgaacgcgatgctggtgtacgtgatggccgcggaaggcgtcttcgagggcttcctcaacgggtggtactacgagagcaccaacaacactctgtttggtgcag

SEQ ID NO: 41813 - DNA, 2314 bp, Zea Mays
caaacaagtacgaggagtcgaggactgcagctgccccaccaaacgccgacctgccgggacatggcagctgcggcgccggccgcgggcaagggaaaacgaaagcgccacctctccgaggacgacgtctgcctcctccaaaggtacaatccggggacgatcctgacggcgctgcaggaggtggcgcagcatgcggagggccggatcatcgactggagggcggtggtggcgaagtcggccacggggatcacctccgcccgcgagtaccagatgctctggcgctacttagcatatcaccacgacctaaacgagagcatcgaagccggtgacctgcctctgggcgatgacagtgacctggaattggagcttgaacccaatcccagcgagaccaaggaagctttatctgaggcctctgcattggccaaggcgctaatatccagatcttcacgtgagcaagcctcgggtcatcgcattaatttggatgttcctgcgctgaacactcaaaatgaaaagatagtgcgggttccatctaagcagcttgctcagagtcatcgtgtaacaaatgttacatgtcctgtttccaatccaaaacagttatctcatatagtaccctctcctactcatttggatccaaatggagcttctaaaaagagaaaaaaggcaaaagcttggtctaaagaggaggatgcagacctagcagctggtgtgcagaagtatggtgaaggaaattgggaggtcattttgcataaatgtaactttgataatacaagaacgcctgatcagttatctcagagatgggcactaaaacgcccaggaggatcaaccaagcctgctagcactaaacacgcctctgttggctcagaagaaagatcagcaactatcaaggcacttcatttggctgtcggtcctatgcctgtatcatctgcactaagatcaggacgtgaacaaagcattcagcataagtctacagcgtttgctcctaagatgccacaagtaagatctgcagtaaccccttcactggcaccggcactggcgctgccagtccaacctctgcgtgtggcagctgaagttcagtctccgcttcgtcatgggcaacaagctcctggccaaggagtttctgcagttaatcaatcagggccacctgctggagcggaaactaagaaggcattgggtaccacactagcacctgtcccatgcgacagcgaggaaaatgaggatggctctgaattttgtgcgattacgttagatgacttattccctgaagatgcaaagcagccggaaactgtggataccaaggcaaagcaaccagaaaccacgggtcccaaggcaaagcagccagaaaatgcagatcccaaggcaatgcatcaagaaaccatggatcccaaatcaaagcagccagatacactaaaggttgggatattagatcccaaagataaagacatgctagagttcgatcaatatgttgcttctcaaggagcacacttaaacacggatgatctgaataaaagcaagtgtaccaacagtgcttcccaagcccaaggtcttgttggcagccagaagaacccactgaaactgactcctgtggacgggaaagctaaccctgtaactgcggctgggagaggtaagcctgtagctgctggagtggcatcaaccggaaagaaggctacaatccctatctcacatttggcagcagggaccccacgcggcatagttgacacagtcaatgccaacgccccaattagaagaacactaacaaggagggcagccgcccttgtccccgctggttgccaagctcctcccccgaagcatgccatagacgcgaaaggctgccaaatgacgaatagcattgccacgtttgtcagttctggagtaccagccagcagccaggctagcacgcccgcgaaagatgctaacaaagcaagcccaccgtccagcagctgccagcccaagccggatagtgtggcggtgaacggtgctatcagggccgtgaagagtgttgctaagaaggggaatctgccagcagcagcagccaggcaatagacaggaccctgaataacacggtaaattttgtagtaatacccgtaggacttttgcgcgtcgattgtaccttggaatgtgaatattagtcgttttgcgtgtcattcttttcaccttgcatttgggtgatttttgtctggtattcctgctgggcatcgctaacgtaacttgaaagacgttctcgtctagttcccttgtgaagtgtgatgcttgtgtgtgtgtgtctacttgcgcccgaggcgatggtgccgccatctttgtgcctgtctgtctgggcagg

SEQ ID NO: 41814 - DNA, 1652 bp, Zea Mays
gatagcccctcacgccagccgccaatgccccaatcccgtaatcgcagcctcgccccgctcgcatcttcctctccctctcagcactggtgctcaatctacaggttgtcccgctccctacacacccgccctccggtgtgaacctccatgacgtccacaaccactctccgatctgctgtcgtgacctcatccagccgtgctgtggcagtggatcgaagttcgctccagctctgattgggggaaaatgactagggtatcaagtggaaaaacataatggtccaggttctactgcggcacctctttcaggctaagcatctaaacaacaatatgtaaattatccttttccaataaaatacatgcttaaatcgtggctgctaggcgaatggtcctactttggtcatcaaatgcaggaattccactactatatgtgccacttgaagttgttatgtcaaaataatatggtgaaaacgagcgtctattgggatctattttttatcttgcaaatgatcttcctgaaggagattgatatgtcaagatacgcttgtttcatttgagctcaatgttatctgaaaatatatagactgccttcgtccccttcatcactgctaatgaccgtgacttggagacccgacagcggccctcgacgttgtcgccgccgagcccatgctggttccaccagtggtccaccacccggatgtggtccgccaagacgagcagtaacggtggcagcgaggcgaggtggtagatccagcaccgcttctgcacgaccatccattcctccacccagagcatgtacccaggcttgcctctcctcggggaacatgccgaggtcgtccgactggagcagaaggcgacatcgctcaacaagctggtcgaggagcagtgcgagagcataaacgatctcaagtccaagagggaagctgaaccttgttcttctgccatcatctagcatgcggcttacctttgtttgtgatgatggttatccagagcaactagctctcttgagcaacgactttgaattttcggaagttatgattgaagaaatatcagctgataattctggacgctctttcctaatcagaatttcagaatctaaagtgttttactactggtgtgctgagaagtcgaaggaagattgaatggaacttcttgcaaaggtcttcaagggagaagcggcttaaaatgtgtgagcaggtattttcggactcgtaccagaaagggaaaagctacaaaggttgacacagcgccgaagctgtgaagcaggaaagcttcggcatgttcgcagaaaagggaaccgacttaaagatgaaaaggccatttagacctcgatagagtgctatagaattatcaccaaatgtaaagggcatgtatgtaattttgtatgggttgtaccccgtgcctataaataggtgaacagtacccccgtactgttcacgttgacttggcatttgcttttgcgtcacacttgtattttcatctccttccaaaccgaaggtacatttataatttgatattgtctctatttctctataatgatataataaagttaaatgaatgatgttatatgattattcgtgctatcttttatgtttcatatgcttcgtctttcattaatgtatactgtgatgatgaaggttcgtccttcatgaccttcg

SEQ ID NO: 41815 - DNA, 2464 bp, Zea Mays
ctgtccttgagctacttactagcgagggacagaggaaagatgagaagtaagtgcgccatggccatatcatcctccacctcgcgaacacaagatctggtgccattgctgtgtctgttgctaatggcagcagcagcaccacagcatagttgtgcgtcgccgccgttgcctgtgacactcccagggtgccccgacaagtgcggcaacataagcatcccctaccctttcggcaccaaggagggatgcttcaaacccgacttcgaggtcctctgcaacgacagcttccatccgcctcgcgccttcatccagatggcgggagcgaagatcaccgtcgacgacacgtactacaagaccaacgaggacggcatgccggacaatgatatcggaagttctgaatggccgatcgagctcgtcgacgtgtcggtctcggaggggaaagcgcgggtgctcggcgccttcagctacgactgcaagatgaacgacacgtaccacgcggtgaggcggcaggagatcgacttgggctactggatgccgttctccatgtcggacgccgatgatgtgctcatgggcatcgggagcaacgtcgtcgccaagcagacatccggaccgcagtgccagtcctacctcttataccagctctccaccaggaagaccgacgaccccgtcaacgggtcttgctctgggcagggctgctgcagcgccaaccttcgctctggtggcatggccgccaccgaggtgacaatccagaagaacaccaaagacgacggcggcttctacggcgacggtgtctcctgctcgtacgccatgatcgtggacaagtcctggtacaacttctcgtcgccggatgtcgacagcgacgctttcctacggaggaacgccgcgggggtccccgtcgtcgtaaacttctccttcggcgtagatggctgtcccaacgccagcgaaccaacgccagatgacttcgcctgcgtaagcaactacagcacctgcatcgagcgaccacccgtcctcgacaatgtgtccataccgtacttctgcagttgctcggctggatacgaagggaatccatacatccatggaggttgccaagacattgatgagtgcgctcggccacacatgtatccgtgctacggtggcaaatgcaagaacacgccaggagactacgaatgcagctgcccagccggaacaaaaggaaatgcaaaacaagcgccatgcaccgacttgtttcctctgcctgcaaagatatccgtaggtggcataggtggacttttcttaatagcactaatggtattcgtagttcttattcgtaacgagaaaaggaagatggcagaatttttcaaaaagaatggaggccctacattagagaaagcaaaaataataaagatttacagaaaggaggagctgaccccaatcttgacacgaagtaattttattggacgtggtgcttttggtgaagtttacaagggcctgcttgacaatcagttagttgcagtaaagaagccaattgatggcaatgtagcacagaatgatcaatttgccaatgaagtcattattcaatcacaagtgatccacaaaaacattgttaagctaataggttgttgcctagaagttgataaaccaatgcttgtgtatgagtatctctccaaagggagcctggatgatattcttcacggaagcagtggcgttctattaactttggagcaacgtttaaatattgctgcagaatcagcggaaggtctagcttatatgcattcgaaaacaggaaaaataatattgcatggtgatgttaaaccggccaatatacttttgaacgattgcttcacaccaaagatctctgactttggcatatcaaggctaattgttatagataaagaacaaacagatcatatcattggtgacaggacttatatggatccagtatatctacgagatggcatactaactgataaaagtgatgtctacagttttggggttgtgctcttggagctcataagcaggaagaaggccacgtattctgacaacaatagcttggtaaggagttttctcgatgctcacaaaaatcaaaaggaggcaacagagctatttgataaagaaattgcaaaaccagatgttttaaagattcttgcaagtgtttatgagattgcagtgagttgtctaaatcttgatgcggacgaaagaccaaacatggcacaggtagaagcaagtcttctgaagttgaaggcagatcttggtatgataaattgataaatctcatctaccagtggttagatttatatatatgttacagtttgaggttgcattataatattatattgtatttctcaaataagtaactattagtgtgatctgccactattggacttatatatattagagattgaggctgagttagtgtaataaggtaaatggtactacttattagtgtgattgtgtctacatctactgttaaaacaaaatttcttaagcaagg

SEQ ID NO: 41816 - DNA, 924 bp, Zea Mays
gaaaaggggggaaaagaaaaaaagaaaaagttcccgtcttcggtcttcccaaacccccaacatccatgatccatctcatcgacaccccctccgctctccttatcccttccattcgcccaaacccccgccgccgtgacccctgccagcccgcggccttcccctcgttctaggcttcaactgccggcctcgtgtcttctgcgcgtccctgtggcagggcaagtgaagagagagatggcgtcgccaataccgcgcgagtgggtcgggctgcagcagtttcctccggccacccagaccgagctgcacgagctcctcggcaagctcaaggaggaggatgtgagcacattgacaattctggtgatggggaaaggcggagtggggaagtcatctactgttaactccatcgtcggggagaggatcgccactgtcagcgctttccagtctgagggtctgagaccgatgatgtggtcgcgcacaagggcagggttcaccttgaacattatcgacactcctgggcttattgaaggtggatacattaatgagcaggctgttgacatcattaagagatttcttctgggcaagactattgatgttctcctgtatgtggatcgtttggatgcgtacagaatggatacacttgatggacaggttataagagccatcaccaattcatttggaaaagatatttggcgaagatcattggttgtgttgacccatgctcaactctcaccacctgatggaatcgagtataatgatttctttacaagaaggtcagaggcacttttgcgatacatccactcgggagcaggaatcaagaaacgagaatatgggatatgggaggcaggcaggcagccaccattgaggcaaggagttgaggactttccaactctggtggacaggaccatgcatcttagggagaagcagcaa

SEQ ID NO: 41817 - DNA, 3213 bp, Zea Mays
cttttcttcttttgccttctttcttggtggccccatccgactccgcctgctcttcctcggcgccccatccatctgccttgcgtctgctccctctccaccaaaccctagccggccaacagagcttattgaaggccggctaggcgagagcagcatccaccgccgcgctctcatggcggcgcccaaaccgatctgggtgcgccaggctgaggaggccaagctcaagtccgaggcggagaccgctgccgccgccaaggccgccttcgaggccaccttcaaggccctcgctgccgcacccggcgacgacgacaaggacgccgaccccgccccgccctccccggccgaacccgcctcccccgagtccgatgacgatgccccggccccgccaggcccggtcgacccgtccaagtgctccgccgctggccccggcatcgggggcggctccgccggaactccctccaccttcaccgtcgtcgccaaggaccgccacagccggaggctcaccgccggcggggcgctcgtgcgcgtgcgtgtctcgcctgctgctgcagtcggcggggacgatctcgagggtgctgtcaaggacaacggggacggatcctacacggtcacctacgtcgtccccaagcgcggcaactacatggcgcgccctccagtgccttccccagcctcctcggggccatgcctggttcctcagctggttcctcgagtggagtcatgctgcctggggttggtgcttcattgggggagatatgccgggactacatgaatgggaggtgcacaaaggtggagactgactgtaagttcacccacccaccgcaacagctgctgatgtcgatgcttgcagccacgagttctgtcagtgctcttgggcatgcgccgttggcgccctctgcggctgctatggcagctgcacaggccatcatggctgctcaggcactgcaggcacatgctgcgcaagccaaggccgcaggctcagtacacaaagctgatgaagctgatgccctgaagagaacagttcaaattagcaacctgagtccacttcttactgtggattatgttaagcagctatttggattgtgtggtaaagttgttgattgtaccatcacagattcaaaacacattgcttatgttgaatactccaaacctgaagaagcgactgcagcgttggagttcaataacaagaatgttggtggtcgtccattgaatgtggagatggctaaatctcttccttctaaagcaaataataacttgcctatgatgatgcagcaagccattcagctgcaacagatgcaattccagcaggcactaatgatgcaacagtcaatagcaacccaacaggctgctgcacgtgctgccaccatgaaatctgccactgaagcagctgcagcaagggctgctgagataagcaggaagttgaaggcggagggctttggtgcggacaacatggaagaaaagcatgccaaagggaagtcaagatcaccatcgccctctactcgtagatcaaaatctcggtcgagatcacctatcaaataccgtaggagcaggcggtcccgctcctactctcccccagttagacgctcaagggagcagcgatcacgatcaccatcaaaatctcgccactcaaagtacggtagtgatcgatcgcatagggatgataaggacaggtatagcaggtccgggagaagggagagtgaacgatctcgtgatcatcattcatctagttcaaggaggaacagaagtaaaagtagaagtccaaggcataagaagccctccagagttgattctaggtcacccaagaaacaaagagaggaaagtttaagcccatcaaaatcaaggtcagcaagggctggttcaagatcaccacgccatcataagggaagcaaatcatcgccaactcgtgaccgtcattctcgccatagcaggcattcaaggtccagatctcctggcagaaagcaccgtcacagtgataaaagggacagcagaaagtctgagattcaggacgacaaaagaagatctcatagaggtagcagacacgacaaagatgaaagttcagtaaaggacgaaggggaaagatctcatagaagcaatagaggtgacaaagatgaaaggtctgtaaaggatccagtggaagataaagggatggatactaaagttgttgcacataagaggagctcaacagtatctgaagatgaaattctgaacaacaatagtagtaaccataagaaatatagacatgaagttggtttggaagttgatggaaatgatgtgtgctctgctgcagctgacattgataggaaacatgaaactggagtagatggctctttggggggcgctgcagaatcagctatgtgatggctgctgtatcattgagtttgctgtttacagatggattgatgatgatggagaatgctgaactggtgtttattatctccttttctgatttaggagttttatttgcagggcatgaagatcttcggagaacttgagtgctgttcggagtgctcatctgatatattaaaatgctcatgattccatgaagagttcttggagcacatttctgggatgtcggttgaagatacaagggagtatacacttcctcaagtttttcaagggggttgacattggagtatgttttgagggaagtcagtgcatacttcattttgtgaatgaggactatgttgcggatgctcaaccggtgaggattacatgttctatcaggagtgaagacttgtgcacgagagctgcaagtgaacctttctgcatgtggatgcttatttatatcaacatgtgtctcccggataatatagcttgccgcttgcgagttgggatatgagcgctaatctaagcttggagtgattcaccaaaccgctctaagattaaggaaatatagggatattcaaacaacaaatggagttaatccaggtcgtgcctgtgggaaaaacatccatagacttcaatttgttagggaaaaatattttctaaaataagggtgaaatacactgttttttctctttcttttttgctcagaaagaataaaattgagtaaggaggtgctaaattctgtgccctggttcttttccctaaattttcagatttgtttttgaggtaactttacgaaatctggtcgatgtgaattgcaaatgtataaatttgacgtgataaatgacgggaatcaaaatcgagtgtaaacaactatatcttgacacgtcatgg

SEQ ID NO: 41818 - DNA, 2746 bp, Zea Mays
gcaattgtttccaggtaatctcgcatcagcaaacagcaccgggctccgttcaccgccttcccttctcttctccggttcctccctcgcgcgttcgctcgctctcgtggcgcaactcgtagaccgccgccgcctccgctctacgccaggtgcctaggtctagcttcgtcggtcccttcgccaacgacgagcacccacccgaagttcagctaggagtgcatcttgtttacctgttgcttaatcatggacaactctcagaatcaaccaccaccacctggtgttggaacatggccgcagacacctcctagtcacccgccacaatgccatgctgatccacagtcttatcatccacaatttgctgctagacctgacaatgctagtgccaataatagtggtagttcagcaaacattgagtcagctgtccaggaggctgttcttcacgcgcaggacattgagactcagcaagtcatacagaatcaaagatatgcaaacacaacaagtgaacctacaaaatatggggaagacttactttcgaaccgccgtgaccctaatgcattgaaggagcatttactaaagatgacagctgatcatcgtgcagagatggcaagcaaaagggggaagccacttcatccaaacaatggcaactgtgaaattggcaatggctatggtgtacctggaggcggtgcttattatgctgcaaacttgccaagtcctcaaatgaataaacctagagatgaaactgataaagctaaatgtgcaaacgatctccctgattttttaaagcagaggttaagggcaaggggaattctcaaagatgagactacaaataagaattacacgagtacgcagactgtaagttgctaatttctttccaaactgaagtgcgaaggtggaagctaagtactagtagttgggagaaacttgatctagtgccagcacaatcttattattcagcagtaggcaagtatcattaccctgcagttgtgtctgagtgcctgattcaggtctttggtcgtagtccttaggtgtagtcttcttcatttgttccctagttctgttctttacaaacttctgtattttcattttattaatggaaatggggttatccttggatcgaaaagaaaaaaaaatgccacatggatatggaaatctatcatatgaaatgatgaaaactgtatggttgactaaaagtgcacttacctacataaataaaaagaacactgggaaatttgatgatactgaaaaatgttagaaaggatgccttttgtctttagcattagcttgcacatatgacaaacttgatgtgcaattgatattttatccatcacatttttttgtgttaattaatgtgtcattcatttggtgccactgagttacaggtggattctcaagaaatcgagaacaaatctgcacaagagttgcctcctggttggattgaagtgaaggacccgacaactggagcgccatacttctacaatcaaagcactggagtgagtcaatgggatcgccctgacagtgttgtgaatatcatgcaacatcaagtttctccatccttgccagagaactgggaggaggcaattgacaaatcaacaggccacaaatactattataacacgaagacacagaccacacaatgggaacctcctacttctgtgaacaccagtgttagacctccagcttccaccaacactgcagttgagccagtcgctcaagctgcagatatttggaactctcaaatgcagagatgtttgggctgtggtggatggggagttggtcttgtccagccttggggatactgcaatcactgcacaagggttcaaaatcgtccttttcaacagtacccatcttacacaaataatacgatgcacgccagtggtaacaatgctcccaaagctcaggggaatgtttcagctaagaacagatcaagctcaaagccacctttagggaaaccaaacagaaaagaccaccgcaaaagaaatcgccccgaggatgatgaacttgacccaatggacccgagttcttactcagatgctccacgcgggggctgggttgttggtttgaagggtgttcaaccacgagcagcagatactaccgcagctggacctttgttccaacaaagaccatatccctcaccgggtgctgtgttgagaaaaaatgcagaggtagcaacccatggcaagaaacgtggtggtatggctccgataacaaaaagaggagatggcagcgacggacttggggaggcagattagtcttttggtgaactgaaatgttgtgctatccgaatctccttggtggttgtctctggagctgctaaactatcattgcacgcctgaagaaaatcgaaaaaatattggctgccagatctggaatgaggaaactcactacagttcgcgagtttttgcagcgattaacgctagtgtactcgctggacctcgaggctagagcaatgcgagctcaccccggcttgctgatgacacattcactgagttcactgcggtttgccgatgacattcaatgtgcccttggtgtgaattttatatgaaaatgaactataatctgtaattggaaagagtgatttcaatgtaaggaattaacttttgtggggtgatgaaccatactagcgatgcacttagccaaacaagagaaatttggatttgtaccattaaaagattacaactttagatatatagcattgctatctcactaacatgtgtggtccacatgagacatgagtcaataacatgtggag

SEQ ID NO: 41819 - DNA, 2295 bp, Zea Mays
ggcgagacaggggcctgaatgaagtgaagctcgtggtgggctgggttacgtatgccaatgggcgcgcttcaggtgatgctcctccgcttggtgctgctcgccgcgtccgccgcgacgacggctgtcacggtcacggccgcgccgccgcccagtgaggtggcagtgggcgcactcttcacctacgactccaccattggccgcgccgcgcgcctcgccattgagctcgccgtcgacgacgtcaacgccgaccgcaccgtcctcgccgggacccgcctcaacttgctcgcccaggacaccaactgcagcggctttcttggcgccgtcgaagcattgcagctaatggaaagaaatgtggttgctgttattggcccacaatcctccgggataggccatgtcatctcccatgttgttaatgagctacatgtacctcttctgtcatttgcggccacagatccaactctttctgcatcggagtatccttacttcataaggacaaccataagtgactacttccaaatgaatgccgttgctagcattgttgattactatcagtggaaagaggtgacggctatattcgttgatgatgattatgggcgaggtggtgtgtcggcccttggtgatgcgcttgcagcaaaaagggcgaggatttcatataaagcagctatccctcccaattcaaatacagatgtgatcaatgatgtactgtttaaagcaaatatgatggaatcaagggtcatggttgtgcatgtcaatcctgacacagggacgagaatattttctgttgctaacaagctccagatgatggccactggctatgtctggatagtaactgattggctagctgctgtcttggattcctcgacgtcaagagatcgtaaagaaatgagtcatattcagggactaattgttctgcgccagcacactcctgaatctgttgccaagaataagttcatatcaaaatggaataatgctgctcgtaatagaagtattacttcgggcttgaactcgtatggtttctatgcttatgactcagtttgggccattgctcgtggtgtcgatcaatttctcaataatgggcagcagatcaacttttctacagatccagtattgcacgatactaatggtagtagtttgcatctatcaactctcaagatatttgatggcggtgagcagatgctacagcaacttctgctcacaaattttacaggcctaactggtcgagtccaatttaattcagatcgcaatttggtgcacccagcatatgacatccttaacatcggtggttctggctcccggttgattggctattggtccaattactcaggcctctctgttgctgcacctgaaatattgtatcagaagccaccagatacttcttcaattgctcagcggctccacaatgtggtttggccgggtgattccacaaccactcctaaagggtgggttttcccgaacaatggccagccgctgcgggttggtgtcccaatcaagccaagctttaaggaattagtggcagctggaaaaggccctgataatgtgactggttattgcattgatatattcaacgcagcaattagactgcttccttaccccgttccatgtcaattcatagcaattggggatggtagaaagaaccctaactacgacgacattattagtatggttgctgccaattcccttgatgcagctgtaggcgactttgctattgtgagaaacagaacaaagattgcagaattcacacagccttatattgagtcagggcttgtgatagtagcgccagtgaaacaagcaacttcaagtgcctgggctttcctcaaaccgttcacattggagatgtggtgtgtaactggtgctctttttattttttttatggcccaatcaatggtcgtattgcgtttcgaaatttcctgttccaggcgaataacttctgctgataattcagcaatgcagcggctatcgtgcgcatgctccctgcatccatggcatagctcagacctgagtcgctccactctagcctccaaatccccgatagggtcgttgcttccactgctacttccttcatgcctagaggccagctggtgcctaggtacaccatgtggtccggttgatttgtgttgagtggtcttggttcgcgccatatctccataagaggggaagatttattagtatagtttaaacatgatgcatgcataacctaatcattatgggatcaatctttcattgatcccctacttccttacatatactgcattctgttacccgactttaaaagataagttactaccagaaagttgt

SEQ ID NO: 41820 - DNA, 2338 bp, Zea Mays
caggcgtgcgatggcgccattgtgtggcctggcttccgttccgcccgccgaggccagtgtggcaggcagctcccgcgcgagcgcgagcgcgatccagaggctggcgcacctgcgtcactcgctccgcgctgccgcgatctcctctgacgtcgaagtcgcccgggggatgacacagggggaaggggtggtgtgggaggggtgaacaggagctcggtgacttttgtgagggccgccagatggaggagcgccggctcgacacgccggcgatgaggagaatcagcgagtggattctttcactagagttcccaagcgatattaccatccaggttggggaggcgaccttcaacttgcacaagctcccgttggcatcgaggtgcggctacataagggagcaggtgtcggggatcaatggctccagggtcacccacatcgacatcacgggcttgccgggcggcgccgcggcgttcgagctcgtcaccaaattctgctacggcgagaacttcgagctcacggaggacaacgtcgccatgctgcggtgcgccgccgagcacctgcagatgaccgacgacgacagcaggggcgggaacctggccggcaggaccgaggcctacctggaggccgtggcgctgatgagcctcgcgggcgcggtcaccgtgctccggaggtcggaggacctcctcccggtgtccgaggaggtggacctcgtcggcaggtgcgtcgacgccatcgcctacttcacctgcaacgacagtcagttcagcatgtccaacggtaacggcatggacgtgtcgtcgtccaaggtcatcatcgatgattggttggctgacgagctcacgtcgctgcggattgacacgttccagagagtcgtaattgccatgaaggcgagggggttcaagggcattgctctgggcacgctcatcatgctctatgcgcagaagtcgctgcgaacgctggtgagctcaaccgtgcaatgtgcatctgcatctgtctacaagacacacacggaagggagaagcaaaagatggagccgaggcaggaacacgagaagcgtgtggtgcttgagaccatcgtgactctgctgcccaaggagaggaactccatgtccgtgagcttcctctcgatgctgcttcgagcagcgctgtgcctggacacgaccctggcgtgccggctcgacctcgagaagcggatggccgcgcagctcgggcaggccgtgctcgacgacctcctgatcccgatcttcttgcccgacgccggcaacacgttcgacgtcgacgcggtccagaggatcctggtcgggtacctggagcacgaggccgaggcggaccggctggactacaacaccgacgacgacttcacctcgacggcgtcgccgcccaacgacgtcggaatggtcggcaagctcatggagtcctacctggctgagatcgcctcggacgtggacctgcccgttgacaagttcaccggcctcgccgagatgatcccggaacgcgctaggttcaacgacgacggcatgtaccgttccatcgacatctacttgaaggcgcatccgtatctgagcgaggccgagcggaagacggtgtgccgggtgatggactgccagaagctgtcgcgcgaggcgtgcgcgcacgcggcgcagaacaatcggctgccagtgcagacagtggtgcaggttctccaccacgagcagcggcgcctgcgcgaggcccctacgtcgtcgttctacggcggcgagtccccgaccccggcgccgagcctccagggccggcacggccggagcgtgccggacgagatgtcacagctgcagcgggagaacgaggagctcaagatggagctgctgcggctgaagatgaacctgagggacccgtcggcgcccccgcagcacagcgacgctccaccatcggggcgccgcccgctgccgaagaaggcggcaggcggcagcggggggttcattaacaacgtgtccaagaagctcgggcggctgaacccgttcctgcggcctgacgccgtgggtggcgccaaagtgcgcaccaagccgtccaggaccaaggatcggaggcactccatcggctagtgattggaattggctcatgctcattgccggcttctttcatcttgaatcttcttgacggctatttcactcgatgaacgtaaaaaaacactcgttgattgattgattgaatggccgagtcgtgagtaaagatgtgtagctatcgcacttgaacataaataagatgctatgttatactttcttcattctttttttatatgccgtgttttagtttaaaaataaactagcgaataacacatatttgaaagtggaataatagtaactctagcg

SEQ ID NO: 41821 - DNA, 1889 bp, Zea Mays
ggcttaccgcttacctccgcgcactgcacacgttcgacgaaatgccgccgcgagccctcttcgtcgtcaactgagatttgcctcacatcatctccgattccttcccctacttccgtccccatcagtggacccagccgagatcgactggatctcctggctcgggcggctttgatggttcctggggtcggcccggggaggagttcgaggcgatgagcaggcttgcgtcggggctccagcgcccgcggaggtcgttgtcgccgtgcgaggtgctgtggtgcgcgctcgcgtcatgcggcctagtgcttttctcgcagctcgccgtggcgatggttccccgcctcttcccttccctctatctcctcgccatgctccccatcgcggggctggtgttactcgcggctatcgtgctcggccgcctgtggaggaggttcatcggagtgacggcgtcggcgccgctcttcgtgctcttcaacatcctcctatcgtggggcgtttacatcttcgtaatccgtagaagtactgtaaattggattcagccattaagagatgattttatgctccattcaatgagagttgcagacttcaaagcatatactaagggattatttcaactatgaatccctgtagtacttcaacattaggtcactccttgtcaccaaatttgtgctcaactacaaaacccgtatctgctcaagactgagctggcttcggttaagggaccaagtgtggacactgcatgctctagtcaatttgtgctcacttttagagtcctaattcttggtgaatcaaaatgcttcaagagatcaagcatggaagcattactcttggtttgtctgtgctcacctctagttcatcgtgaattgcagtgctattaaccagaaacttcttctctgctggacatgctaataaatgcagaatgtgcactgcttctgtggggattctacaggattttatcttgtgatcctggtatttttgcttgtgattcttcttatttggcagaggctggttgcaaggattttgtggaagctatatacacgagtgagagactcccaatgctctcaagagtcaggcagtgtacctggtgcaaagcaaacattaggggctatgaccatcattgccctgcatttggtacttgtataggacagaaaaatcatcgtctatttatggcccttttgacaggatttgttgttgctgaatcaacatatacgatgtgctcaacaaaatatattactatatgcattagctcaggaactataaaatcagagaatcctgtatctctaaacatggtaatcagtacaatgctcttctctatcctccaagtcctctggcagattgtattcttgatgtggcacatatattgcatctgcttcaacatcaagacatatgagtggattaactggaagaaatatcctgagttccagatgaaggaacaacctcgatcagattctgaagtcaaatctatgaacccatatgacaaaggcatgctgtgtaacataagagattttctaaaaccagttttgagtacgaagacctgacctctgatggaactatagaaacatgggaaatctgaagtgcgttatactggagccaacatggaagcttgtttcccttgttgctgccgtagcatttattgagactcgtcgtgaggattctgctgtgtaatttaatgtgcaagtagcattcttttataagattacttccgaccgggaattctagtctcttaacttcagaactgatttggtgagtaggtaaatagaggggatctatggggtcccttactattcatatggagttcacatcgtgatcctgcatttttttcctgtctggtcttgccaaagggtaactcttgcaggtgaaaggaccacgatgctcaagagggggtgaattgg

SEQ ID NO: 41822 - DNA, 2185 bp, Zea Mays
caaaccccggccgaccaaccccaaccacggacccggactggctgtccgcctatcacccgccactattgctcttgcagcctgcttctctccccccttctcgccgcgtacgcacgggtcgcacgcacgcacaccccgttcgtgccacactgccacctaacccccctcccccacgatcccgaggctactagcactaggcgtcgtcctcggcagcaacggcggctgggctcccgccgatggcggcgtccctcgccgccgccgcctctcgcctcgccgccaccggcggcgagttgtcgtggtcggcgcggccctgccccgggagtctcgtggcgagcttccccagcgccgggcggctccggcgccccgcttcgggcgtgcggtgcggaggtggggttttgcccgcggccgcggggacgggggcggaagcggaggaagggggccgcttcgttggctggttccgggaggcgtggccttacatccggggccaccggggcagcaccttcgtcgtcgtcatctccggggaggtcatcgccggcccgcacctcgacggcattctgcaggatatatcccttcttcatggtctcgggatcaaatttgttcttgttcctggaacacatgtccagattgataagctcttggctgagagagggaagaaggctaagtatgctggtcgctaccgcattactgattcagattcattagatgctgcaatggaggcagctggccgaatacggctaactatagaagcgaagctgtctcctggaccaccaatgttaaatctccgtaggcatggtgttaatggccgttggcatgaaatctctgataatgttgcaagtggaaatttccttggtgctaagaggcgaggggttgttggtggcattgattatggattcaccggtgaagttaaaaaaatagatgtttcacggataagagaaaggcttgatagagacagcatagttgttgtgagcaacatggggtactccagcgcaggagaggtcttgaattgcaatacctatgaagttgctacagcatgtgctttatccatagaggcggacaagcttatttgcattgttgatggccaaatatttgatgagcatggtagagtcaatcgttttatgtctattgaagaagcagatatgttgatcagaacacgtgctaagcagagtgaaattgctgcaaattatgtgaaggttgttgatgaggaggacatcaatcatgtccgctgcctcccaatgaaacatggtacagaacatgggtttgctattggcggggaggagcgcttgagcaggtcaaatggttacctatcagagttagcagcggcagcatacgtatgccatggtggtgtccaaagagtgcatatcatagatggtactgttggtggagcattgttgctagaactattcactagagatggtgttggaacgatgatagctagggatatgtatgaaggaacaagaatggccagagaggaagatctttctggtattagaaagatcattcgtcctctagaagaatctggtgtcctggtgcgccgaacagatcaagagcttcttgaagcattgacatcatttattgtcgtggaaagagatggctcaatcatagcgtgtgctgccctcttcccttttcttgaggataaatctggggaagttgctgctattgctgtatctgaagaatgtcgaggccaaggtcaaggagacaaattacttggtttgttcgtcgcggctttaaggagtgctcgttcgattccctgcctttggtgaggagaaaacgtatcgacctctcgcgcgggtcaaaatattacatgaagtggctccaggcagcagaggttgggcatatggctgccgacggttttgccatgagatgatgagtgctgcaaacaagcatctctacgaatctagtcgatggacgtgaggtttctttatgagctgtgcagtcgcttatacatcgtagaaatgtatatttattgtgcaagaaaataatcagtcaataatcgaagatgtggttgtgtttcttgagttgatttcttcttgagcatagcaatgctcaaaagagttgttgatctgcacactgctgacaaagcctgcacgactgcgctttttaaactgataaatacttagctgcaaattcagcaatgttcttgttgagctccctccatcgcctcctctagaaaaaatgcgtatgttacgca

SEQ ID NO: 41823 - DNA, 2955 bp, Zea Mays
caatgcttagattcatacgtttgctggtcctctgtccatgcgaagtgattctcctgtgttcaatttcatcaacaatctctcgcctataccaccacctaaacctttagactcagcacataatgtgcagctattcaagtcatcagatttggcacctgtttcttcgatctttgcctcaccacatgttaatccaacaaagggaactaaagttctgatcagggacgaatctgttcagcttcctcatgaattgcactcacctagcagtgtcagaactcggataggcacctcaggctcttttagaatgatcagatgcaaagacattgtgccagagaattgtaatatcacttgtcaactaaacgaggcatctattgattcttcagatcatacatcaagctctacaggccaattgactcaatccataaaagatgctgctggcagtatggaaagcgataaggatcaatgcgctggtggtaaaatagaccttaccatgtcccaggagtgcacaggcctagaaggtatgaaccttgatgagagtagcccagacagaatggattcatcacattctgggatagttgttcatgaaaaccagctatctgaacaaaacaatgatgaacctgcggcatataatggggtttacatgattacacaccaatcaagtagtgatatgctgactttagccgtaccatctggaacagaagcacaaccaatgaatgatacacaaaaggctgataatccctacccttgtgaatccttgttggatgttcagtcaagtggaaattgcacccaaaattctgtgcatgaaccccatctgtactggaacggggcagttgaaggggctgcagtagcttatactccccaagcacttcctggtgctttgcaaagtcagttgatgccatgtaacaagctcaatgagccaaaagattacatgcctactgagcaaaatgctttgtcacagcatttacgtggcatgcgtaggcgcagccttttcaatgaaaaggctgggcttagtaataaaggtgtagacaaagcttcagatcatcatcctgtaaattcaactacccccaaatgcaaaaccatttctggtgacaactcaaagactctaagaacccccccatgtgcattgcctggtattggcttgcacttgaatgcccttgccgcaactgcaacacctaaagagaaaatagtccctcaagacattcagtctactataaatgaatcaagtaacttgataggccctgctggatcttctccggcaccttctgagcaaaacattataaatgatgatttcactcaaacaactgatgttgcaaccgctgaagcttctagtcagggtagtcccaagaagaaaaggcataagtttgatagtggtgatggcacttcatgcaagcgttgtagttgtaagaagtccaaatgcctgaaactttactgtgagtgttttgctgctggagtctattgttctgagccttgttcgtgtatcggctgtatgaacaaccagagtcatacggaaactgttctatctacgcggcaacagattgaatctcgcaatccattagcatttgctcctaaagtaattcatacatctgagcctggtctggaactaagggacttctccaataaaactcctgcttcagctcgtcacaaaaggggatgcaattgcaagaagtcgtcatgtctaaaaaaatactgtgaatgttttcagggtggtgtgggatgctccataagttgcagatgcgagggctgtaagaatgcttttggaaaacgggagggggctgccgtgttaagcatagaggaacctaagcagggattggaagaaaaggatgtttgtgtgaaagaagagaaaagtgaaatcgagaaacagcttgttgtctaccaaactcctgatgatgctcctgctgaaaatgtactgaccacaccttccatggtgcagtgcagacccttggcttgtcgtccacccccaagctccaagaaaagctccaaaaaaccacgatcttcaacaaaactcactggacatccttcgcggttgtgcaacttacaagctcctccgaagaccgacactatgctctccccattcgaaaactacgcggaaatggtccttggtgatagcacatcggatatcctcaagggaaattcatctcctcaaacttctgttaaagtggtgtcaccaaacaagaagcgaatctctcccctgcgaatgggtaccgggctatctccaatctgtaggagtggcaggaagctgattttaaagtccattccttctttcccttcccttggcggtgatgtaaacaatgaggatccagaaaccaagttgccagccccttgaatttaccatattttgtcactggtttatttctaccataccatctgatagtggacagccaagcgactttcctttcatcatttctatctctctcgatcaatgattatttatgtactgctataataatctgccgcgtgctggcaaaattctgcctccctagaacaaccaatggcatttggtttgctggtaaattatctcttggctccgtgtgttccctgtggctgtctgtctataatttatgttcattattttgttccggagaccgaagaatctgaggacttgtatgtatctgggatcaagatgtgaatctcgcatgtaccagatgacagaactgttaagacttatatttgtctgaggttaaactgcaagacttttatttaagctagaactttgatcactataggatatggcatgatatagcagggctcttgagatgcattctcttgtgcgtgcttggtaactgtagtcgtgcaactgttgacggcgtttgttcagaacaagtggttgatgaatttgaagatggtttagggagtgggaatgattttgtttgtgtgcgtgcgaacttgtaaaatctccgtgtatgaactggcaatgcttttatggtattgatcatctgcggtgtgttaactgagtgcaaaata

SEQ ID NO: 41824 - DNA, 1976 bp, Zea Mays
atccagccgtccggcccataccgcgaatgtccacgaccgctgcaaaagtttcttcttcaggttcttaatcagtaatcacgcacggacgataaatccaagtaaggaaatccccgatgatctcctgcgcgtcgcagcgccagccactcgattagtggagtccaccaaccaagcacgcgtccctccccgtcccagatcccatcccgcggcagccggtcagtccgatccatctccagtacccagcccgtcacccgccttccccgttcgctctcgtcggcgcgcgatggagggtctcatcaaggggttggtccacgtggccatcgacgccgtggaggacgccgtgagggagagggaccacggccgcgccgacgacgacgaggtgccgaggaggagggcggcccaaagctccgatccagatgacgacggggaggaggaacgcgacgaacgatcgcggtcgacgtgggccgaggtcgtctccgagcagaagggcagcgatccggacgagcgccgggaccatcgaagctcggggcgggacaatcgccatgagaggagggatgacgagggttggaaaagggccgatggtcggaaccagcagcagcaccacgcaggccggcagaaccagtgcgagggggaggaaaggtgggatggcagtggcagccggcggcgtcagcaacagcagcaggcacaaggatacgggaatcagcatcaggaagaagaaaggataaacgatggaggctggcagaccgtcggtgagaaaaagcgccatggaagaccacagcagtctgaagcatggaatggatacagaaagccaccatcagaacaaaagtactctgaggatgtcggtcatatccaccaaggactcaatttcgagcccaccagggaggagctgaatagcttatcgaaagcgtgtagccgactttgggagctcgatatgaaccgtattgttcctggtaaggactacataatcgactgtggcaaggggaagaaagtttatcagaagggtgatatggcatctgaaagcttgttcagctggctaggcgacgatgtgctaagaaaacccacctactcacgtttctgcgcacttctggataactacaacccccaccaggggtacaaagaagttgttacccagcaggataagcacgaagaaatagctttcgttgaagagatcgctagaacagcgccaattaagtacttgcaccggtacttagtgcagaagggggctgtgcctcaggactacgaggacttcaagagaatgctgacatccctatggtttgatttgtatggaagaggtggcaactctagctgctcttctgcctttgagcatgtgtttgttggtgagatcaaaggacggggacaaggggagagtgaggtattccgtgactaatttgcagttttacctggaagaagccaagggaaatgtggattaccaaggttatatatttccaaggcgccgtggtgaatcgcctgattcagagatacagctgctgactgttcagtttgagtggcatggcgtgctgaaatcggtatccagcacgttgattggcgtcagtcctgagtttgaggttgcactctacacgttgtgcttttttgttggaggggaagacaaccgcgtcgatattggcccgtatagtgtgaacgtcaagtgctaccgattggggaacaacaaaattggatcagcctttcccattgtagagaactgattatctggtgctatgcttctgcaggtttccaaatattcactttcttcgtttcataatcaattacgtgaagttaacaatgtactattttacttgtgcatgaaaaggtaccatactgttcaatttgttgctgccatctgcaatagtattgctacttgcactgctaaaaagttgacgaccgagactgaagttacttttcatgattttgttgctgtggatgtggaagctttccgatgtatattttctgcctttgtcatgtttatttactgatatgctgtt

SEQ ID NO: 41825 - DNA, 3107 bp, Zea Mays
cctggcccctgtgctccccttgccaccgaacgagagccaaaagcctcccgccccacgacgcgcccgccccggcggcgacgccccggaggacgtttcccgcagcgaccggcgaccaagccttgattgcctccgccccatggctacccgggcgcgggcgtagccgccgcctcggccgcagcaggctcggtccgcccccctcggcgatttctgttccagtcgcatcgcgcgacagctcgtcgtccgattcggatccccgccaccgcggcggaacgaggcgtctccggtccccgagggtattcggggaatttgagactgataagtcgggatcctgtcgataatgcggggctacgtgtacgagaccaagaccgcagaagggaagggagcctgcgctagttgctaatgacggagagcgaggtagagagcttgatcttggtctcgggcgcgaaggagctcctggtgatggtgcagctgctggtgcgctgtcgaccccttgcttgctcccttgtcaagccccagatgtccaggaaggtggactccctcgtgctccccatggcgcggacccatgtgcagggttgggggatggcgtggtcgtggctgacgggaagcgtggcctctacaaccacgagcgttggccagcatgctttgtcactgtgcgccagtttggaagaagggaaaggtcctctacgtgggcctccagttgctccttgtgtgctaggttggtgaggcccccgagcatggtggacatggcggggtcctgcatcattgccctgcccagccgcttcgccatggccacgagctatggattctgcatcggatatgtacctaagtggttcaactggggttaccaccaggaagtggaagatgagtacggagatgagtactatgatcaagatgagtatgaggaggaaggttcgggtgctggggatgggtatgctgaggaggaagagcctacagagggacaaaaggagatccttgaattgagagaaagattaaaagagcagattaggcgaaaggcaaaggctgctgctgcctgcacagctggtcgatcatcttcttcacaaatacctcaagccagggacaaatttggctctttttttgggccatccaagccggtgatttctcgtcgagtgatagaagaaagaaaatcattgaaagaactgcatagcacggttgcaagggagccaaggccttctggagtacataaggatattccatcgtcctctaaagtgcaaagtagagtaaatggacatcagcataaacaaaagattgttaatcaggtaaagaagaaggctgaggcacttaaggataaccgggattattcatttctactctcggatgatgctgacctgtcatcctctccaaaggagaaacctgctgctagatcttccttgactcaaagggctgatcgtgaggtgacacaatcaacagtaaagaggaaggcaccaacaagtcaacctgcacgcttgtcaaatggatatggacctaagaacacaatgtcaactcaaaggcatgctgaaggtaaggtaaattccatgagaagggaggatttctcgaatacagaaagggttgtttcacgtgacaatgagaggatgtatgaaagggttgtttcacgtgacaatgagaggatgcatagtattgcaagaaatggatccaaccaggcaagtactagcaaaaccacaatccaaaagcatccaagcaggggtcccattgctaataagcaaccgtccaaggattcgaatgatgcaactctgaggaagagcagtgtagcctcaaagcaccatcccttagagattgacagaccaaaatcctcgcaaagtcagaggatgcagtcagctggtcagagaccacagcattcttcccatggtcagacgccacatcaatccatgcagcataggacgcagcagtcattgcagagtcggaggccacaacaaatgacacagggtcagaagccacaacagtctttgcagagtcaaaggactcaacagtccttgcagaatcgaaggccacagcagtcctcacatattcagaaatcgcaatcctcacaagcacacagaccacagtcattaagtaacaggtctcaggctttacaaggacaaaggcctctttcttcacagggtcaatatccggagcaaagaagagtacatgcaagtgacagagtcaaacaagctgaaaggcagattcggcctccttccaagtccatgccatcacggccagtctcttccaatggaattcgtgatgatcatgcaaaaaggaagcaagtggcaaaaagaagatttgatgaagatgatgaagaccccttagcaatgatcagaaatatgtttgggtatgatcctagtagatatgcaggcagagatgaagatgtcagtgacatggaagccgattttgctactatagaaatggaagagaaaaggagcgcgaggattgctaggcaggaggatgaagaacaacttcgcttgattgaggaagaagagagacgcgagcaggagagaaagaggcgaaagatggcacgaggccgatagtcgaatacactcctatttggatgttataatatactaccttcgttctcgaatatttgtcgtccgctggttcatttttgaactaaaccgtgacaaataaaaaagaacgcaggagtatctggcaggcctgattgcctgaatacgaagccccatggcggatcagacaggcacttctcttgcagtcctgtttacccttaccacgatgattatctggaggcaaatcaagggaaaacgacaggtgaccaacactgggcacgtgtaacagcagactgtagttgtagtggtttagttctcgaagctgacatggactatatttaagttctcgtcagattgtttggatagcagaaggtttccattgttgcagcgcctcaccagattgtttcttcatatgatatactgattctttcagtcaagcctatataaggatgcgtaatacaagtgcccctcttgtatatctttttcgggtgtaatagtgttgtaataaacgatgttcgaattttcggatatgattttgagctttgtcaggcgatcactgcaccacggtccacagagatgcgcttctggccgggagccaatcgaaggaagcgggaa

SEQ ID NO: 41826 - DNA, 670 bp, Zea Mays
taaagaactacccttccagctatcaagtcttttttccaacttttcctcaagtttcttcgccgcccgtcagtcttctttgcatccgttgcctgacctctcgcgcatccaccgccaccgcaccgtgtcttccgtgaaggacccattcgaggcggccatatcgaggagcaagactcgccatccgttgcttgacctctcgcgcatccaccgccaccacaccatgtcttccgtgaaggacccattcgaggcggccatatcgaggagcaggactcgccgccggagtcgccagttttgcgccgccgcacgaggaggaacccagaaccctgagccccgcggacctcgccgagaaatatgaaccgtgacccgccccacgctactcgtcggcaccggcgtcgcacgcagctgcagcctgcagccgtggccaaggcttcccagcagcactgaccatgacactcaatccaacttgcttcactcgtgatgaaaaccaacttgctgcagccttcttgcttcactcgtgatgaaaaccaacaagatgcaatatgccacgaacctaatagaacaaacacatgttcagtttgatgttaaaactgagcagtgcctggcaacgctgcttgagatcaaataaggcatgtacgctcacgtattatggaatcagggtcacctaaagatgccc

SEQ ID NO: 41827 - DNA, 1269 bp, Zea Mays
cccccccgccatccttcaccggagtccgatgctggtcccgtccgtcctcttcgctccacccccgcccccggtggggcctgcgccggccaaggaccctcgcctgcgtcgtgccgcccgactccgcggagccacagacgggtgagcaagatgcgaaagttgagtctgccgaagaagaggctcggactagtataccccaggatgctgagcttccagctctcccaaacaaggatctcaacagaagggtagcactactgtctactcttgggggctggggcggtagctctctttgcatcccagaggctcaatcttagcgagatatctcttaaagatgttgcagccaatgcggttccatatgaagagggaccgtgtcaatttcgtaatgctgaatgttgacagcacaaagtgggaacaggagctcgacgagatcggggtggaaggcattccccactttgcctttctggataaggaaggaaatgaggaaggcaatgttgttgggagacttccaaagcagtatttccttgacaacgtggttgcgctcgcttctggtaatcccagtgtacccgatgcacgagtggtcggtcagttctcgagcgctgagtctaggaaagttcaccaagttgctgatgccaggagtcatggctagcagttgtttatgtgggggcagcagtggttctagtttaactggcaagaccatgtgacagttggatatatcagttatagcaagattctatagtgggtcaccacaagtctagaaaccgtggatttcttttgcacactgaaatgacttctggccatcaaaaaaacattggaccttttgtgaaggcaggttttggaaccaaggagagatggaaggctatactatagtgtattcaatcttctcggtatcgagcatgcgggcgctggaaagagctgttagattccacagatcacagaagaaaagggcgtgatatgctgtgcatgtgcgtgtggattccgggtccactcccatcgtcggcgcgggttcgtcagcgacactggaacggttgcatgctgtacggcaaatgcagagatgctgtatgtttttttagacacagcagggtgtgggtggctcacgaaagaagcttttgcttgtattcgttgctcgtgtaacacatgttcacgctgcccttttcaagaattcaaggtgccgtttggttcacataattgtaacgtaatgggtaacggataacgttaaatcatgtttgttttagtccaactgtaatcagataccacactaaaatttgataccag

SEQ ID NO: 41828 - DNA, 1166 bp, Zea Mays
ctgcacgatggagttcgatagcacggcgctcaccaataacttaatccaacttgaaggccacgagggcgagatgctggagcactctaagcaaaaagaacagggagcattgatgccagagttgctggaacggcaggcgcaaggagctgggtgagcgcaagggcgagcagggaagggacgagtccgacgactcgatggtggccgtgggagaagcagagaccaggggcgcgcagagggactcaacgtgactctggttccagggagtctattggtgttgccgagatggggctactactgctcctaagcatccatggccagaggagggagagagtatggagaaacgcgctgagtagggaagcacaaccggaggagctcagcagcagagagctgagcaaaggaagcgccagccggacgcttggccatgggagacgggaaggaggggcctcggctagggaggggcgaggagcaggggcgcggccgacaagctggagcaccagcgagcagcaaccaagagcagggcgcggcggccagggagctcggccaggcactggggctgggcgcgcgcaggagagatggagggaggagagaggagtggctggagaagatgactagggcaggaaccagggcgcgtgcagagagctccaaaccggcgtggccatggaaagcgagctttttggaaccaaggtatcaccaagactgggcttctgaaaaaatgaaccgatcggcgctggagctcctctcccgacgctcttctctcccggcgctggagctcctctgtcaagtcttgtccgacggcgcttctcggcgctcctctccctagtcctcggccctttctccttccctgcctgtatcctctcgagcgctctatcctctctagtgcccccacaaggtaactgaaactcaagttgcttaacagcctcccccagatggctattgggactcaatcttgggctctgttctgttgaagttgtgttgcataatgaggcactagaagatggctgagaggctcaaaaggactaatcttggggatcccagtttgctatacgctctaacgtattaaatttgctccttatatgccagtttgtaccatatttgcacctagggagaaacggtgtggttaaaaacacaaacattttcttttctggtatagcacctcgcctgtagttcac

SEQ ID NO: 41829 - DNA, 2904 bp, Zea Mays
ctcgactctggggtctggaactctggactcttccaccgaactgccccgctctctcttgactagcgcagtcgcacgctcgacggctcgagtaaacaataaactactaaaaaaatgcgcacaaaataaaaccgctggcgaaccaaaaaataagaatccccaaagctacctctcctgccgctcctcccctctcatgcctcctcccctcgctgccgccgccgccgccgccgttgagagaactaggaccacgggcgggtggagcactggcatcctgcggactcgccgccgctccacgggcgcaggcgctagccgtcgcggggtcgctctgtgagccctggtcggtgctggggggttcggcggcggtctggtagacgggcggtggcgggcgatggcgccggcgaagaggaagcgcgcagcggctgcggcggccgcggcggcggctgccgcggccaagtggaaggtaggggacctcgtgctcgctaagatgaagggcttcccggcctggccggctatgattagtgaaccagaacagtggaagatgccttctactaaaaagaaaccgctggtctatttctatggtactaaacagatggatgcacagccacaaaattgctacacacgtagtagggttccatctctgcgaaagtcaaggagttcaataagtgttgaatcaaggaaggctcaaggttctgataatgtctggttgcattctggcagaggcacttccaaccaacctgtaactttggggactacttgtaacggcagcaaaatgttgaatcctcctgttaaggcggatagtacttgtaacagtgaagcatctgaaaatggaacttcagagacagaattgaaatcaaatggcacatctaatctacccatgaatacagaagtaattttcaggagaataagaaaatcagatagaaaacctgttcctcattatgaagattgtacaacaccaaataaagatgaattacgtgctgagtacagtgaaatcctttcagattctccaaattcaaagaatgaagtatgcaagtcagatggagatgagcacttgccattggtcaaaagagcaagggtccgaatgggaaggtctcatttggaggattcaccagttgatgaagttgatgtttctaataagaagccagagcttacaacaacctcagaccaatgcgataggaatggtaaacctgcaagtcctgtcaatgattattcagctgatcaggtgtccacagttgtaagttctgcttctaatccgtcctgcaaatcagacatgcctatcctgtcaaaggaaggtcatcttccttggaagaataaagaataccacccaaaaattttagcattagatgtggaagctgctttgcctccttcaaaacgccttcatcgtgccttagaagcgatgtctgctaatgtcgctgagaatgtcaagaatatacctgaagtgacaggaccaaatgaaatggctctaaatggctctctgttgacagcaaacaaccattctaataaatctgctgatgcagtagtcacagtatccaataaacctgtaatagttcaatgctctgaaccttctctagacacacagtttaagcatacccaatcaggtaaatgtacgtcagaatcaactttacaaaataataccatccctgattctgcttcagttccatcaaaagaaaatgatatcatgttaaaagaaaatgataccaatggttcctgggtttgtagtgaactagataatggttcctgtgggaaaacttcagccctttgtatgatattgaatcgacccggacttgatgttacacaaaccacatctgtacctgaccggttatcttcgtcttttgagaaagaaagtgaaaatgtggcaacaagcagtgtcaaagagacaaaaccttttggctcagctgtttgtgaggttgacagaagtgcagaagcagaacaaattgaccattcaaacaacaatgtgattagcaacactatacggcatagtgagactattgtagtggattcagtgaacaatgtgggagatacggcaagcaactcttcaatggctactaaatcatccagtatacaatccgatgcagacacccggacttctgaagtgcatacattctcatctctggcgttgaaagaactgaaccatagaaaaattaaggacagaagcacttctccagattcaatgccgatgaaagaacttatagctgtggcacaagctagaaggttttctcgactgacttcctttccagatatcttcctaaatgccaagtatattcctgaaagagccacaaatacacctcccaaggaaggctcacacaggcagttgtcaccctcaaatcggatattcaggtccacctctggaaatgataatgttcattctaggagtccttttgatattatccaacagaagaaattagcagggcatgttgaagccaatgcagcacgaaggtctttcaaagatttcctcagtacattgacaagaaccaaagaaagtatatcacgcgcgacgcgtcttgctattgagtgtgctaagtttggcattgctggcaattgacattatcgttgaacacttggaaaaggaatcaaatttatataagagggtggatctcttctttcttgtagattcaataacacaatgctctcgcaaccagaaaggtggagctggagatgtatatccctctctcattcaggcagttctacctcgaatactctatgctgctgcacctcctgggaactcagcatgggagaatcgaaagcaatgcctaaaggttttgaaactttggcttgaaaggagaacactttcagaatatattatccgtcaccatattaaagaaattgagactatcatgaggcatcatttggaagttctcgccgtccttcatgcccggggagagctctaaatgaccctttgcgagataatga

SEQ ID NO: 41830 - DNA, 1684 bp, Zea Mays
cgtgccatttcatctatccatcccgcagctcttgtctctggcaaccgtacgcccaaccgtgttcccgcgccgcccacgaactactctccggcgctgcccatgacgacggtgtcgcgcgcgctcggctccgcgttcgcgggcttcacgcgggcgcccgcggtggcgcagaccgcgacgaccctgccctccccgtacggctcgtcggctctgcaccagcactggcgctggagccgggcctgccgcacccggcggttctcgtccggccgcgcggcacggattagcatgagcctccgcgccggtatcgtcgggcttcctaacgtcggcaagtcaaccctcttcaacgccattttctgctgctgtgcaagttgccctctggacttgcttgagtaaaatgcttcgaatggagaaatgttgaaaacgggaaggcacaagctgcaaactttcccttttgcaccatcagcccaaacgttggtgtggtggctatccctgatcctcgtttgcaggtgctctcaaaattaagcaagtcccagcagacggtcccaacatccattgagcttgtggacattgctggtctagtcaaaggagcaagcaaaggagagggactaggaaatcaattcctttcaaacattcgtgaagtggattccatacttcaggttgtgcgatgctttgaggatgacgatatagttcatgtcaatggcaaggtcgatcccagatcagacattgatgtcattaacctagagctgatattttcagaccttgaacagatagagaagaggctagataagcttaacaagagtaaaacgaaagatacccaagtaaaagtgaaggaacaagcagagaaatcaggattggaaaaaattcagcaggcacttatggaaggaaagcctgcaagatcggtcgatttagctgagcatgagaaagaagctataaaacacctttatctgctaactatgaaacctgtcatttatgttgctaatgtgacagaatctgatcttgctgaacctgatagcaattctcatgtcaaagaggtggctaaagcagcatcagacttgcagtctggtatggttacaatatcagctcaggttgaagctgaactcgccgagctacctctagaagagagagtagaatatttaaaatctcttggtgttgctgaaagtggactaggaaatttggtaaaagcaacatataatctattggggttaagaacttatttcacaaccggagacaaggaaacaaaagcttggactattctttcaggcatgactgcgccacaagcagctggagttattcatagtgacttccagaaaggattcatcagagctgaaactctggttctcttggagtagcaagggagaaagggctgctgaggttggaagggaaggattatgttgtgcaggaaggagatgtcatgcttttcagattcaacgtgtgacagcaatagtagcaaaaggcttcaaaaacaccggaatttgtactaggcagaatatagtttgcccatattgtgagattttttttttgccacttgaccaccgattattgatctaccacgctggtagggcagctttcttagatcaagcctaatactggacagctatcattgttagcttcacctaaaaagtagtaccccgcactagggaataatttctcggacgaatttcaaaaaaaaaaaaaaactcgctctcgg

SEQ ID NO: 41831 - DNA, 2856 bp, Zea Mays
agcaaagcacctccgactccaagtcgcgagagccttctcattcgtcttcctcctcttccacccatcctgcctgctcacttccgttccgtagtccagctagatccccgggcaaccgatccaccgagaagcttgtggttgtggcggcggcggagagggaagcgggaggtcggaggtaggcgcggatgccactgttgtgccggcgccggcggggccggtgatgcccgcttgagctgggccaccgtgcgtcggaggtggacgagggagcgaggcggcgccagaccgaggttgcgtcgggctcgatttctactgggctgctgtctgctgagagtaacagaaattggatcaattcaagtagatggaggtgaattcctctggcgaggaaactgtggtaaaggtaagaaagccgtacacaataacgaagcagcgggagcggtggacagaggctgaacacaaacggttccttgaagccttgaaactttatggcagagcatggcagcgcatagaagagcatgttgggacaaagacagccgtgcagatcagaagtcacgctcaaaagttcttcactaagttggaaaaggaagctatgaacaatggtacttctccggggcaagcccatgacattgacatacctccaccacggcctaaaagaaagccaaacagtccatatcctcgaaaaagttgtctcagctccgagacacaaaccaaagaacttccaaatgacaagtcaacaaaaccaaatatgcccttgagcaatgggcatgtaaaaatggtaggcgatgcatctcttcagaattttcaaaggaaggagttgtctgaaaaaggaagtcgctcggaagttcttaatctcttccgtgatgccccatctgcatcattttcttcagttaacaaaagctcttcaaatcatggggcacccaggaggaccgaggcaagtaaaacagaaagccgagatatgtccatcatggaaaataattcttttaaccccaacacccaagaggatgtaaaggtgatcagtgatcaggaaatggaaaggcttaatggtatccagatcagatctaaatgtgaacattctcatgaggggtatttggacatctcaacgcaacaaatgaagctaatgccaaagtctgtggagacaacatatgtggatgaacaaactgcaagagcttcacacaccctagcagagagcgacgggacagctagcattccagtgactgtacctgaaggaactcatcctgatcaaacaagtgatcaagtgggaatcaatggaagcatgaacccatgcatccatccaatggtttctgctgacccaaaatttggtagtagtgccacaccacagactttccctcataattatgcggcctttgctccaatgatgcagtgcaactgtaaccaagatacgtacaggtcattcaccaacatgtcatccaccttctccagcatgcttgtttccacgttgttgtcaaaccctgccatccatgcagccgccaggctcgcagcatcatactggccagcagctgaaggtaacactcctattgatccgaatcaagaaaaccctgcagatggcgtccaaggaaggaacataggctctcctccaagcatggtttctattgtagcagctacagttgctgcagcatctgcatggtgggcaacacaaggtcttctccctttcttcgctccacccgtggcttttccatttgtaccagctcctagtgctgcctttcccacagttgatgttccacgaccttcagagaaagacagagattgcccagctgaaaatgcacagattgaatgccaagaagctcgaaaacaggtacagttcgaaggtttaagaattgctgcttcttcagagtctgatgggagtggaaaaggcgaggtgtctctccatacggagttaaagctatctcctgcccagaatgctgatgccacacctaccacaggagctggcacaaatgatgcattcaggaataagaaaaagcaggatcgctcttcatgcggttctaacacaccttcaagtagtgatgtagatgcgggcaatgttcctgaggaggacaatgctaatgagaaggcgaagcaagcctcctgcagcaactcttcagctggtgacactaaccaccgcagatttagaagcaatggaagcacaagtgattcatggaaggaagtttccgaagagggtcgtctggctttcgatgcgctgttcagtagggaaaagcttccgcaaagcttttctcccccacaagcagtagactcgaaggaggttgccaaggaggaggaagatgaagtgaccacagtggcagttgacctcaacaagaatgccacaagcattgatcatgatgacctcgacacaatggatgagcccagggcttcctttcccaatgaattgtcgcacctgaagctgaaatcgcgccgtacaggcttcaaaccatacaagagatgttctgtggaagcgaaggaaaaccgggtgccggctagcgacatggttggtaccaagaggattcgtcttgatagcgaagcatccacataattgatttcttcaaagttatatttacatctaagctactataggacttcagatcttgcaatgcagtgcttcattaaaactcaatctgttgtgtgctgtattttaatgcttgtcaagcagcccgctagactgctttaaaaccttatctcgtagagtctgatttaagcatcatgcaactatcaaacttttttttttggtcaaaatgtattttccttatgttttatatttttggaaaggaaaataattgaaatattatttattttgaaggctcatgcaaaggtttatttgatcaaggtgtaggataggctgagcgagagggtgaacattatgactaatatagg

SEQ ID NO: 41832 - DNA, 381 bp, Zea Mays
attaaatcaaaagaacaaagagcttgatcacatacaagttttttttggatatctagctcgccttcatccaattcttagctacacaatctcggttgtcgccgctgccgccttgattgaacagagggacctaatttattacacgatgaaatcaacctaaacacaaactgagtgaagtagaagctagggtggtagtaggtggccgaactgagtgaagtagaagctagggtggtagtaggtggccgaccgacaagcaggggccggtcggtaggcggccggtgagaaagacgttcgatctgttgccgtggtgcgccttgacggactcctgcgatgcgaaggccagccggcacgccttgcacgcaaatctcaggcggctctaggccc

SEQ ID NO: 41833 - DNA, 1036 bp, Zea Mays
atggcttccaacggcagcgacatggtgatgatgtacgggacacggcgctgctggagccatccaagcagcccaagccagcgactctctccgtcaaggtatcataattcctggattccaaatctgagacggatgttgatgttgactataacagcttgtactcaaagcagggctttctacagggtgaggtgctcgtttcgttgtggctagagtaacttgtgtactctatctcatcgtttttaatttatttagttttcacaacaactgttttgtgatatgtgctatcacttgatacttagattcatgctattagagattcatacctcaggtttgcaagatgtatgtcctaagatttttatggctttcatacctacatacatttgcttggtaaaatatatgaactgaacatataaacgcggcatatatagctaacaactgtgcctggaaattcatgcatgacaaacaactttgcatacgctataacccaaacaactattgatgtgcactaatttattgtattgtacttctataaaggatgaaatcatgtctgcaatcgagaaacacataactgcttggacattttttctaggaggtaatttgcattgggtctttgcctcatgtagctagatggatatcctctgcctgcaagtatagatatgaaagtatgtatatgaaattttctgttctggcattagaatgccatgcatatgttccctcggtcaaaggtcagttggaaaacatacctttgcatcaggtgctcggcacatcctttgccagtaaaggcatcgcactacctgggaggctgggagaaacggggtgcccgctctgccgctcattcataaaggcacagaccatagatgatgatgactcaggacagtgccaaaggtatattcacatcggatctgatgctaaccagaaggaacagagcggaacaaacataaataaacttggcaggcagtctcctatagaagttgaaaggcacggagggcatcctgctgcggaaccggggatgtcgcagcagttgttgattggggcatga

SEQ ID NO: 41834 - DNA, 961 bp, Zea Mays
tttttttcccatcgcaactcacgtgtcggattcgctcgtccacctacccggacgcgcgcacgcaaagcagaacgctcccctcccggccttcccttcctccccgccctccgaagtccgaaggccagaagcttccggaagccagcccaagccatgaacgccgccagcaccgccgccgcggcccccgcgcctgccgcgaccgtgcaggtgccgcgcgggcaggtggatctgatcgacttcatcgactggaccggcgtcgagtgcctcaaccaggactcgtcccacagcatcgtcaacgcgctcaagcaggtagtcaaactgcattccgcgctattcaaaggtcccgaggaagagggccccaaaacagtaaaactcttctccaacaaagagcatatgggtttcagcaatgtcaatgactatccaccaagtgacaccctcgagctatcatccgatcatttgatagagaataaacttttgccactaaagtatgtcaagtttcaaaatgttcgcagtctgactatatttattgaggacaaccaaagtggaagtgatgtctccaaaattcacaagattgctctttatggaacaactgtggacacgacaaatatgaaggatctgaagaagatagaagagcactgagacgattttaaggctgagcttattccagtccagtgggtgcatggcatactagaagcagtttagatgttgaattgagcaatttctagttgaccctgcaactttccccccctatttttatacatgaggagttaaaagagtgcgagtctggtgatgccgaagctattacctcttggtatcttgtaatcctgcaatttatttatgtggcttgggagtgacagtcagacgatccggatccatttcatgaatgaatcaaaattgctccatgcatcgatggtcttgcaaaagcttagatcgttcctgggaagttttgtttgtgttgaacatt

SEQ ID NO: 41835 - DNA, 3618 bp, Zea Mays
taaattcgtcgaccaccgtatgctgaagcggcgaagctgcttacaagtttctgcaaggctatagtttaaacagccaacattcgagcagaagagacgcagctccattccaggccccgcagcttctccgttctctgtctgcgtgtggtcgtcagttgcggaggatgcatggatgaaccgttaccgtgctttcgcggaaggagtggtggtgatggtctgcccggtgcttcttgcgatagcgctgaagaaggttgacctgaagagcgaagagcatggtggtgccgtcccgaccaccatgctcgtggtagcagcggttactctagtcgccggttccccacacgctgctaccatgttgctggcacccttatccagcacatgtttagtggcacttgcctgttggatcgtacatctcatcctagacagctgggcgttccctgcggtcggcgccctcgtcggactctgctccgcgattcgtaccgtcatgcacttcacaacccgtgcgggacaaggagatgctgaaatggagtactgcgatagactggagagctcgcttgatttcttggttggtataactgcgcttctgtttctgggactggaaggcctcgctctggagggtcagattaacagctccagcggtcgtcttaccacgccgatcggcacaagcttcgttgtctgtgtttttgctgcgagcttaatgctcgtggagacgatgcctccacgcagactcgtgaggtatctgacagagaccattgatatcctcacgggttttgccgtctccctggctatgttcttcatcatgtatccactcatgggactacgagcattgcttctgctagcagctccgttcctgatcctcatggcgtatgtcttctacgtcgctatcggcaaggatgatggcaacaacaaccaccaggttgctagcgcgaacggcgatgaagaatcgtcaggtgttagcagcagccgcaggagtggtgcggcggcggacggtgataataaaccagcgtcgcttgaactgacaaaagtaacattcgcagggttcctggcggtgtcgataccaagcatcagcaaaggttcagtcaccatttattccgaatgtttcttgcaccttgcagcagcagctgttgtctcaggcctcgtgtggaggctcctaacgcattacaaaaagtcacagaccaccgtcgcaactgttgcagatattgcttccttctgcacccatctctgtgttgcagttgcggtaattccgtttacgataatggccgggaatgcactctcatgattttgtagtactagtctgtcgagtcctgctctcattttgactaataaacattttttatgttaagatgaatgtgttttcttctccttgtcattttctattacaatagggcataatatgtgctcgctctgtagttcctttccaactatgaaaagctatttgtcagtaacatttctctccttgataccaagagctctcccctttcatgccaccaacattttattttaacttctaaattttaatcttgttgattgttatcgatttttcatcctctggttaagctcaaactcttgctctagttatatctttgattaactctatagatttttttatctgcaggttaagttgaatctttttgtttaattacagcttttattagctctcgttttgtccttttaaatatagtttagggttgtagactgcgcttttatgtactaagatggtataaacagccattttaagactacaccacattgcttaagataagcagtagagcttaaagtaagatctaggagaaggtagcagcgttaaactgaagaggataacaatatataatctttataataattctttactctaaagttatttaaaaggccattaagatattgcttcatgtggtttgcactaacctctgcagcttctcaaaagttaaggaattactaccacgtgaaatgctatggtttttataaatcctttgactagactttattttaataaaacacaaaaatatggttgtcctattgttcaaaaatcaatgacaagtcaggaactcaagttctgaaattgccaagtgcggaccatccggccccttctggcggatcgtccgcgacaccgctatgacttcgaccaggaactataaatcgtggatagttcggctataaaccgcggaccgtccagctatacagtgcggacctttcggctataattcatggatcgtccgcacgtgaagatctagtttagctcgaagttgacaagtcgagcaaaaggaattttagagatggcgcggaccgtccgggaccaagggcagaccgtccgcgtattgtcaccagggaaagactgtcgttatctagccgttggcttgtaaggcgtatccgttgaagttgtcacaaccgaccgttggaaggtcgcggaccgcacttgccgcagcccgtccgccagtgcagtttctggcagatgcgccacaacggctatatgggtggttgagggctataaaagccaccccaaccagcccattcacaaacattcaatgatctaccccatacacaagagttggctattcactcctatctactagagcaacacttctatacacatcaaagcgtcacaagtgccataaaagagagatgaagcaagatagggctactcgtgtgtgtttagcgatagtgcctcatgagaatcattgagagaaagtgtgtgctagctcttgtgatcaatttaagcgtggagttttgactcccattcattgtaaagctagcaagagcccttatatttgtggttggcctcgcggaaactttggtctttttttgataaagaagaaggaacactcgccggtcctggtgaccattggagagaggaaaaggggttgaaaaagacccgtccttagtggactcctaaatggggattagggtcttggtgaactgaacctcggtaaaacaaataatccgtgtcacttgtgtttattgtttgtgatttgtttgtcttctccctctttaagttctcttgcactattctttgttgatattactttgtgttgcttcaagttaaattctcatatatagaagcaacccattgcaagaaagaacttgtattatttatcttcttatctaagcccttttgctttattctccatagatattttagttgtgttgctttgtgttaatgccgcattctttgaaagcaatactttttgcaagcaaaggacttagttttatactccgataattgttcatcttgttttaaccactaatcgagggatcaagggtcgtgttaaagctataaattttaggtttcgcctattcaccccctaggcgactttcaattggtatcagaggtaggcactttatattaagtctaacaactcgaagtgatggctcggagaaaatcccaaaagaacaagaagacaccaccgaaggagaacaatgaggtaactcttgagatattactttctgattgttctaattatgcttcatggtctactagagtgataaatgcttttagaaccatagacccacaattagaaaaaaattagacaagggtattataccttctagttatgataagaaaatgcttctgaggaagatcgaagatgtttacgcttaaattatcttgcttatgacatcttaggtaat

SEQ ID NO: 41836 - DNA, 1235 bp, Zea Mays
ggaccgattttgctaaccctgagcccaacgcgacccaacctcttcgtctccgatagtccgactccacgaagcgaagccgctcaacatcctcttccgctgcgcctgcgcgcgcgggaggacgaaatacggcaagaagctactcgagaaaggccacgcacgatgatggcgtgtcggcggctggcgagggacgccgtcgcggcctcgctccggcggagcgccgccaccgagaccaccgcctccacgcccgccttcttctcctcttcctccgccgctgcgtcctcctgctcctccggcgcaccagtcgccggcagccccattcgccacttcctggcgcgctattcaagccccgctttccagatccagcctagcgctgcggggctcggcccttcgttcgccgcgagagtggcccttggtctccggccgcagttgtcaggcctcaatctgatcaaaggatttggaacaagcaccatgctagcgatgacgcttcatcagggacaggttactgctgccacaaaagcttcatcatagggaggtgggtcaaaaccatgctgtgtcgaaggaggagtacatgcgtacaagaaatattattactgaagattacaagtttttttcaattggaaccattgaattagtagatgggagggtgctgcatctcattggaatgctgggcagctggtggatctaccgtgtgtcattcaagtgcaaagagctggtgtagaatatattttagttctgaaggaagagcgagttaaccatgtggtgctgaatagcagatattttgaatcatttctaactgaagtaggtacttgaattggcttttcagtaggtgctgtattactgttttttgaaagcagtgatgtccaatgttttgctagagtattttgcaagaatataatggaagtatggagcccggtggccggtgctatttctcacagggcataaagcaattccatgtggaagatacatttcttgtcacatagcacatcgttgtcctgggtgtgttttctgtacaatcgccaatggattgcattatgtcccaaatgttgcttctctaggtttatcatctgtaaacaaggacatgattataatgaacactagtagctgccgcacgcacctgcgcgctgccgccatggtgctagattcatagtttatcatttgtattaggatatgtataagtataaaagtttaatttttgaataaattttagtctctatattcagagttcatgttctcta

SEQ ID NO: 41837 - DNA, 4000 bp, Zea Mays
gcaaggttctgcctggttccccgccatcaacgcccggatccccaccctccttcccaccgccgccgcaatcaacgcgctcctcccccacgtggatccctccaccctcctccccaccgccgccgctcgaccgcggtttcgtcgcactccttccttcgaaagcgctcctttccatcctcgattcctccttccttccatgtcgctccttccttcgacggccagcctcatccggtcattcctcctcgctgtgccccctcccccgtattcaaccacctcttcctcctgcggatccaccaccgccgtcctcgcccaacgtctccttgacgcatatgcccgcagcggctccctcgcgtccccaatgttgagtctggcctgtatggaaggagtgcgggcgtgggtggagtgtgtagagaaatccaagcgaaaccccgtgagagcgaggtgacggcagacggaggcgagtgggtgagctgcgggcgagagacgaggtagcgggctagcggatggcgtcgctggttgtagtggccgcagcgctgctggtggcggcgctggtggcattctgcggcacggacccgctctggacggggttcgagtcccacctcgtcgaccttcccggggttcgagtcccacctcgtcgacctccccgatcccgccgagatgtcgacgcacgcggacgaacgggagtggctccgcggagccgaggtgcaacccctccaaaccggcgttcaaggacggcgccgctcaccagttgtatctggttgtgaagaactaggggtgggagcgcctgtatggcgggcttatgccttctctcatcggcaccgctgcctcccaggagagggcttggcgatgggtctgttgggatgctccagtctctcactgtctactactacttgtaccaaatatctactggactctggatgggcatcgaattttatgctataaacaccgattcccaagcccttattaattcacaagcgcaatatcctctgcaaattggagagcagttgacccacgacttaggtaccggtggaaatccaaatttgggagagcaggctgctgaggaatcaagagaaaccatagccactgccctgagggattcagatcttgttttcataacagctgggatgggagggggtgctgctccaattgttgcccagatatcaaaggaagctggttatcttactgttggtgttgtcacctatccattcaatttcgagggccgtaagcgctctttacaggtagcatattgcgagggcggtcctcgtcgctcccatgtgcaggatctcccatgtgacagatggcttggcaagattatactagagacttgtatttctcagatccatatttggcttaggtatgattcttgtgtcaatgctacatatatttttcctaattattgtaggtacttccatttagccttgcgacaataaatattttgtgcgaaacacatcatctcttcacggttcaatacgatcatcggctatatatcctggctgatcatcgtcaagagcattagtagttgctactgatatatataggtcagctctttgctcttttcacatctatatcaattgcttgccccacaaatgatcagccagggtcaggtaaaccatattgtgtaaccatcactataacactgcaatcattttctaaatagtacttttataaatcacaaatcgaaggtataaatacaaaagtgtagaaaattataatgagaacattacctatataaacaagaaaggaaaaccaatgatgttttccttgttgaagttatttgtggcttttacaatgtcagagaacgtgagcttgttttcatttacttttccttgtggcaccatgatcactccaaatgcaattgcaagaatggccttcttatttcttcctcctgtggataccagaggcacatcggctgaatcgcatcgacgaccgatcataaagccgcacagctttggattccctagaaagctggagttctgaaatgtaccaaattgaccaccggttggaataggcccctctaggtcattgttagaaacgttgaatgtggaaaggaagtgcagattctcgaatgcaactggaattttacccgtgagatcattgctggataaatctagcatccagcaggtttgtgagattgcagatagatgtggggatcggtccggttaagctgttggagctgatatcaagtgaaaggaggccttttaactgaccaatctctgggagaatcagaactgtgaatatgttgctgcttagatttagaattttaggaaaagcaatcggtatccggtacggtttcttcaaagaaattgatgccaagaagaagcgtggtcaggttcttagagctcctcagtatctgaagcgtgtttgttatatttgaaaggctgttgtttgggcaaggcgaatcaggcaagagttgatgacgagcggctaaactaatccaagagttgatgacgaccggcttgttctttcacttgcaacgacttagagtcgggcgacctgcaagatcaaggtgcatggtcgtcgaaggatggcgacggcgtatcctcgttcaggcaaggcgaatcaggcaagcatctatttggaggttggttagttatcccatgtcatcagacatcacgcaggaatcaagtcatccatcaggaagcagccaactctgcctggactaacccagggcaaaggcaaacagcaaactttccaggataagtctctgacttcgttatactttcctgtgtgcaggaggtcttgaagatctggaactgcaggtgcagaatgctattgcagcagttgcagctccacccaaggaaagcaatagtgtcagcagcaacgatcctggtagctcgtcctctgtgatttttccgtctggtccagctgatcaagtccctgttcctgctacctctccagaaattgagccccgttttgcaaaccaaatccctgctgcttcttcggaggttaaggcaccatgcatggcaggtctgttgtttgtaagcgacaggaacgagaggaactttaggttgcctagcccttctgataattgtccatggaacttattcgaatctagccgtagcgcagtcagctttctacaggagtatatgctttccggaatcgtgccactgaagttattcagcatgagatctatggttcttagactgggcatattgctgaataactatagttggtagatggtctcgctacagtagacaggaaaggcaccatgcctggcactggcaggtctgcagcgaacaccgttgtatgtgtatgtatagtatgcacgtgtgcaattcatattagcttaacagcctgtgtaacaaaaacaattacccaacttcccaagatagttaatgcactatatatccaaaacctgatacatgcatcaatttgtcttaaaaagtacattcataaaaatataaatgtataaagagttcatttgtattttaacaaaagtctttggtcaaagccatattctggagaccgtgtcagtgtcctagaccacaaataacattggagggagtaaattatatctcatgtctatcaacgaagttttactttttaggttctattaatgtctaattcttgtaacccctcttttttggtatctcaattgttgcagttaggaaaccttccattacggccttatttctgcagaagtatgacaccaactttcatctattctctaccaccaaagagatggaaaagcaggtcaaagggccatacttcatagctttttgctcctcattgttttaagtgaaagggcgccaactattcaaaatttactctaggtagataattttcattgtcgagttttattttggtatatgtaactttttgtaattgggcctaagcgtattggagcactctaagttaacaggtgcttgaagctgatgatgaaattatacagcttggatgaataaacctttgttgtagtgacataaggagtttcgaaattacaaggaattttaaatttgaatatttttcagtgagatgttgaggttgataattttaatctttg

SEQ ID NO: 41838 - DNA, 2717 bp, Zea Mays
cgccggcggtttcgttttcgtcctcgtatgcgccagcgaattcttgtcgcggtgtggggggtgtccgctatttaatccttcgctggcagcaagttgatccttcccagctccggctcagtgttccggagaggtgcaaggtggaaggcacatttgctgggaattagggcaatcaacgtttaagtacatgtggtctactgctgtttgattattactgagattcaatcatttggtcagatgagagttctggctggggacttacaagtgtagcactgttgtcggcttgtgactaaatagcatcacttcacatacaacactggataatggatcgtagggatacttcagggtttgttagtggaggatgcaaaaataatgaagcctactagtttctctatatcttctaacttggtagctttattgacaattatttaacccagaagtgaggccagctggtacttcccataaagtttggttactctaatagcaatggaacccaggcatgggcgttcagcattcactataagtttctcaaatccaaatggctttgctaatcagtgcaccgccattccagccgtcagttattcagcggctggttctagccaacttgatgtgctggctcctactagaggttgcaagagaaagtggactgagttggctctaggtctgggtgacacatcaagctcagacagcagcaagcagagcatgggtactggctgcactgtttcttctctcaagggaagcgatgatgtctcatgtatggattacgacataagtttcaagttatctcttggcaatgaagatacttccaagctgcataaacaggcttgtggttctaaaaggactatggagaagcctcggttggatcttaagttatctttggctccatctcaatccgatgtaactgacgcggatctaatcagaagcagtgcacctcaggacatgtttgtgcagccgtacttgatgtcctcagtgccaacagtcgatgaaggatctacatctgctcgacatccatctggaggcatggtggtttccttccttaaccaggctgggatttctccgaaccagttgcccccacttaactctcatctggtccagggtccagcttgttcagcaccaacagtgctccaactgccaaaaagttcagctgccacttcttctgggtttgtccgcccacagcaacgcaacggtagcacaaagatctgttcagagccaggttgtgcaaaaggagccaggggttcatctgggcggtgcattgcccacggtgggggcagaaggtgccagaaagaaggctgcaacaaaggagccgaggggaggaccatcttctgtaaagcccatggagggggcaagcgctgtgagcgccttggatgcaccaaaagtgccgaaggccggacagatttctgcatagctcacggcggcgggcggcgttgcagtcatgacgggtgcaagagggcggcgcgaggcagatcgggcctgtgtatcaagcatggtggcgggaagaggtgccaaacgctgaactgcacaaagagcgcggaagggcggtcaggcatgtgcatcgctcatggtggcgggcggcgctgccagtacgctggctgcgggaagggagcccagggcagcacaaacttctgcaaggcccacggcggcggcaagagatgcacgcaccccgactgctccaagggcgcggaggggagcacggcgttctgcaaagcccacggaggcggcaagcgctgctcggctgacggctgcacgaagagcgtgcacggcgggacccagttctgcgtcgcgcacggaggcgggaagaggtgcgtggtggaagggtgcgggaagagcgcgagaggcaggaccgaccgctgcgtcggccatggcgggggcaagcggtgccactccgccggctgcgggaagagcgcgcaggggagcaccgatttctgcaagtcccacggcggtggcaggcgctgctcgtgggggcaccctggctcagacctcgggtctggtggcgctccctgcgaccggctggcgagaggcaagaaggggctgtgcgaccggcacaacccgctggtccatgacaacagcgtgcatgggggtgcgtcgttcggtggcttcagtgtcgtcagtgccgccgccctttctgagggagatggctctccatctccaggcaccgagacaagcatgcgcagcttcttcatgcacgcggtggaggctcctcgctgtgtggcggcctcggcccatgaaggccgggtgcatgggggcaacttcatgcctatcatgctcgacggtggcgtgggactcgggaagaggccggccgacaacgctgatgctggtgcctctgcccctcctcgcagctggaaaagtatggagaaggcctgtggatctgcgccgcgcagctggctgtagtatttgccagaagttcgtgacctgctcacagctcactctctccatctgggtctcctctgctcctgctccaagtgtctcccgtgtcctctggtcatgcgtggtatggtatgataacatgaactgtgtgtgtactggttggtcaggactcgggacttgtttggtactgtggatattgtggttgtttgtgctcttgtagcataggtctggtcgaacatacctactagtaacagtcgtcgtgtgcggtgtgtgattgaattgtaaatgaaaggaacgcctcgtcatgatacaaataaaaaatagtacctttcctcgcggcgcccgccaaataaaaa

SEQ ID NO: 41839 - DNA, 1949 bp, Zea Mays
gcttccactggactgcaagctgctgctgcccctctcgttgaagagatctcgtcgaaagccctctcggtctctcccgcggtcccgccccgtgccgtgcccgtgccctttctcccaatggccgcctcctccgacgaaccgtagcgccgcggacaaccagcaggtcgcttggttccagatccccactcagacacgtcacatcgcatggcggcgaacgcggcgcagcaggacccgcgcggccaacggcggctctgcggcgggggcgggggcggggccacggcgtgcgtgcgcccacgcgcctggtgctgctccttctccttctccggcgtgcccgacagccccgacctccgcccgctcccctcctcggccgcgtccccgccggcggggaggaagttgccgcccaagtccccctcggcggcgtcattctatggctcgccgacttcatacaggctagcgggcctcatcgacccgcgccgcatcctctcacccggccgcgtctcccctatcgatcacgacggcgcggtcccgccgcccctcccgctccctccgccgccgccgccggctgcggccgccgctgacgattcggcagttgtgatccccgcagagcggctggcgtcggcattgccatctgccacggtggcgccgtcgctggtcgccgtgcgggaggaggcagacgcggctgggatgctcgatctgaggttgttgctgcggggggcacacgggaggtgcgtcctcatggagctcgactccagcgtgctgtgcggctgtagcgacttcttcgccgccatggccccgcgcgaggatgctgctggcgctggtgggaagaggctcgaggtggacggggtggagaatttggatgctttctgcgccgctgtggagctcatgtacaatcctgatccaatagggtgtcttgcagctgctggtgtgtcaagggccatagatgtgcttgaggtatgctcctctatcatgttcagcaagggaatcaaatcatgtttgacatacatagaagctgttccctggaatgaaaacgaagaggagaagctgaagaacctctttgcaagattcacttttgacgaagcaatgtcccaggatatactggcaagattgcgtccgcacaactggaaaagctcagatgacctcactatacagcttattcaatctgtcactggaagcaccagcactgtggcaagaaaagacatgcaatctttggtaaatggtcttctaagcaaaagttcagtctatcaaaaggactcttcagggctaaacaaggagagtctgtaccagatatgttattcatgtcttgagtcactggttgatctctttgaagaggccagagaaccaacagattatacaggtcagattcttgtagttagagggagtaaaccactgattgagcgagtctctaggcaaacagagaacctcagttggctcttggatattctagtaaacaatgacattgcagaagaatttgtagaactgtgggcgaagcaagacaggctcattaggatgcacgaacaagcgtcagcgatggtcaggtatgagctaagccgaatatcagccgctgtgttcattgcacttggtaaaggaaaagttcagtgtcgtggcaatgtacgaagcctcgtctttcgtggatggttcagcacgatgttgttggattttggctggcttcagcgctgccccaaaggtctagacctaagatcactggaggagaatctagggcgaggcattttaaccctccctctgaggcagcagcaatgtttgtttgaagaatggttccagttctattcgaccaaaggtgctgagtgtccgaaccttattagggctttccaggtatggtggagaaggtctttcgttagatcgtcggtagaacctcaaagaaggtggaacaactgtaccgatgcaatgatgacgaggcggcccgcaccgctggatccgccgatgatggcgacgat

SEQ ID NO: 41840 - DNA, 956 bp, Zea Mays
tctctctgcttgccgcgtccggccgagcgtccctgcgggccgcggtttcctcccctgtgctttgctcgtcgcgccctgccccagcgtcgaccccagctcggttctgtcctcagctcggcctccatttctgcgtccagtcatcggacctccgcctccgcgctgagttcggcaagctcgccggggattcgaccgccgtggacaagatgttgtccccatagcgtgagtcccgtgctacaggctatcaggactctgccgataggcacctgttctggtcctgcgccggttgctgctcacctcgatccgtcctcgtcgcgataattgtagcctcacgcagaccgtccggtggtaaacgacttgcatgtgtgttgatgaggaaggaggagattagttgaagaaagaaaaggctagaattttgctcacctggtgctcggcgagaggcttgaaccaaagcatgtcggtggttcgtgtttatcgagtcccgatgtcgatctggtggtcgtcgatttgaagctctgaacggattcggccacgtccagcactatctgtgtccttgtcgttcgatgctgaccagcatcgtcgtttcccttcatgtgctcatccttcatctccgcctcgccatggcgcgtgtcatcatttttaatttcagcagctctttcgatacgcgcctcaccgtgcttcgcctcctcgtggtcagccttatctggatcacaggagcggaagatctcaacactgctttatatggctgttttagatgctgtttgcggggtagagagtgttgtgatggatggttttcgccctctcgtcgtgttcgcaatcatcgttgatcgttgtcggtttgagagaaatcaccagatggtgtggagaaggaagtgaagccgcacaacatccgtcagatgttcgacgacaagactgagccaggatttatcagcattcttacgagtattgagtaacgtttg

SEQ ID NO: 41841 - DNA, 3515 bp, Zea Mays
tgttttttcgctgaaggctcaaaaatagtatgtacgtaaagtttcatgcatcgtaaagaactgaattacaaacagcttatatattacattcaaaactgtagaatattacacactttgtttagcaaatattacatcaatattccgaatgtttttacaacaatagctattcttcttttaaaactgcttctgcagctttgtttagtagttgagtcacagcttcatccataatagcttcggccatctttgtaatttcatcttccttttttgcttcgggatcggccaatgactcgaaaggctccggggaaggagatagttcagctgcgatacaaaacataaataagttcgaagtcacacaaataaaacataaagtcaaaagcaattaggtagtacctatccgcctttcaagttctgcagttttttcagctgcctttgctgcttctctagcatcgtgagtatctttttcacttttctttataatttcgtgagccatccctcggccaccattttcccagatgtcggtgaaaaactttccgccaactaagcttgcctcggccgaggggtcttttgtatcttcaatagagaacgcagcttcggcttgggccagaatcttcacatgctcgcatcgtgccttctccaaaatagccgcaattcccctggcacctgagaaggcgcagacatctccacgaccactcaaaacttcctcaaaagcttcggcttcactgttgatccagtcgattggaccttcgggatcgcccagtacgaagttatcttcacacgaatatgcaccaatattggcgatgctggtttttatcctttgtacacatgctacagatttttcatagcatcttttttttgaggaacgaagctccacaactgttttttcccagtaatttttccagtagtcactggcgtctcggtcagcttcggcaatagcacattttaacttcgcttcagccagttgtttctgaagatcttcaatttcgcacttctgggcttcaggtttggctttggaagtagcttcgtcttcttttattttattcagcaatgattttaatattttatctttctcaagaccttcgttccttagttcaattacttcggaacgaaggttgttcaaagctataatgcatccttcgtcttcggcacttttttgtgccctgagggcgttgctaagaatcagaccctacaaaaagaagtatggtattaagtataagcaaataaaacaaatcttggttttttaatacaaaaaattcattttcatacctttaagctattatatgctaagctgtcagccagttcatctttcgatagcaccgaaagcccatcttctagcgtcgggaatccgaagcttttgctcatctcccggcagacagaaatttccttgctgtctgggagacaatacaagaaatctccttctccgctgccgttgaatattaatgccccctttggatattttaatttttgggcataatattgagcttctcgcttttcctcttcagatagccttttgcccaaagcatgtcgtacaatataatcaggtactctggaagatgcttcgggagttgaagagagagttttttcaggcagaatttgctttgtagcctcttttttcgtttcttctccgatttccaaggatttctccttggcgagctccgaaggcccagcttcggcctcggtctggctctttgcagcttcgtctttggatgtttttgtctcaatttgcgtttttgacgcttcggtagttttcttcggagtggtgcttgaagactttattgtttccagcacatctagtacattgaccatcctttttctcttgggagtcgccgtgagatctttttgtgccttcgacactatcattcctgctgaagggcttgtaacttctaatatctttgttttctcggcctctattcctttaatattattagccttcagcatcatagccggctcttcattcttctgtgtaagagcaggtcctttggcttcagtagccgtagaggtctcaccaccaaattcgggcactgtggtcggttcaatgaagcgcggttggtgagtaaggaccttcacctttttcctctttggcgcggactcacatagagcaactgaagcatcacctttcccagaagttgcactttttctcttttgccctttcagcgggtaacggtaatcagggtacataaacccaatagcatcaaaaactctattcagcctcttcttcttccggcctccgaaggccgcagataacgtgttatcttctgcctttgaatatggtccaagcagttcatcgcttgtagcttcgatgcacttcagccaatcatcatctagctcagtaaatttaccttcatatctgaaggtgtatttcaacctaaccagcccaccttcgtcagacttgctgatagtttcctttgacatttcccattgctttacaagcggccacactttgaaggctatgtgctcctggaccaaatctctcatcccgatgaaagagtagactatgccaaaggccttttggcattcttcggctgcttcatcaatttccaccttcggtttccgaaggccgaagcactgccagataggacgcatgataatatctttaatgtcttctcgtgcctttagatcgtttttcacgtaaaaccattccttcatccagtccccaggtcatcttttccggaaggttggcatgggatagctcgagccagagcgagcgacgaagctatagcagccaaagttgttatgatattgctctttgccccagggtttcgtctcatataacagttcgtgcatactgcagaaactttttgcatttggctccaagccctggctcctcatggcccatacgaagattcccattcttatgatcgcttcgggagtaatttgatgaaggtagacctgatagatctttaaaacctcaaccacaaatctgtttaaggggaaccgaagcccagctttgaaaaagcttcgaaagatcatgacttcatcctcttcgggagtaggcacagtcttctctccgtcatctgccctcacagtagacatatcacgaaaatatcttcccctcatattgtcaaggtgactctgcttaatagttgattttctgaagactgtgtgacttggtcgccacggtcgatattcggagtcttcgcctccactttccacatcataactatcactctcaccggtgtcttcagataaaccttctaaaatctccctagtgattttctctgtattcgtctttgctatcgattcaagaaacccaagattcttctcctcagaaaggctaagcttcgtctcggcaacagcttttttatcttgagtcatcttcgaaaatgttgaaaatgtgctcttaaggccgaagctaaaaaatctcaaaagccaggaaagtgttggtatgcaagagctaaaaagttgggaaagcaagagcagatggcaagaaagcgtgccaaatgtgctcgcggtatgctcttatttatacgcctagtgcgttgcaagtgggagggccccgcttgtcattgactgttgct

SEQ ID NO: 41842 - DNA, 2249 bp, Zea Mays
gttctatttaacccccctcgtctccccctccgtttccagcctcaaactcttgccctccccccggcaccacactagcctagtgagaagtgcagcagcagcaccagcggcagaagtgttacttagttgctcctcctacctgtgctgctgcgcaggagcagagcctgaaaggacgacggccgtcggcgtaaggggagcgagcgagcgagcggccatgaagtacgtgctggtgaccggaggggtggtgagcgggctcggcaagggcgtgacggccagcagcatcggcgtcgtgctcaaggcctgcggcctccgcgtcaccaccatcaagatcgatccatacctcaacaccgatgctggaaccatgtcgccgttcgagcacggggaggttttcgttttggacgatggcggagaggtggacttggaccttggaaactacgaacgttttctggacatcaaattgacccgcgacaacaatataaccacgggaaagatcttccaggctgtcattaacaaggagaggagaggcgactacctagggaagaccgtccaggtagtgccgcacatcacggatgagatacaggactggatcgaacgcgtcgcggtggtcccagtggacggcaaggaagggcctcctgacgtctgcgtcatcgagctcgggggcactataggggatatcgagtcaatgcctttcattgaagcgttaggtcaattctcgtaccgtgttggacctggaaacttctgtctcgttcatgtcagtcttgttccggttctaaatgtagtcggtgaacagccattggaggaacatgtgaaggccaagctttcacagttttgccatgtcccggaccagaaggcccatgaagcgattctgaaggttttagacctccagtatgatggaaaggtgcctcgggaacctgagctaacaaagtggactaaaagagccaccaagtttgacaagttgaagactccggtcaagattgccatggttggaaaatacactggcctgtcggattcctacctgtctgtcataaaggctcttttgcatgcatcggttgctatggaaagaaaacttgtagtcgagtgggttccttcctgcgacctggaagattcttcagctaaagagacccctgaagcccataaaaaagcatggaaattgctgaagggcgcagatggcgtactcgtccctggagggtttggggacaggggagtccagggcaaaatcctcgccgcgaaatacgcacgcgagaacaacgttccttatcttggcatctgcctgggaatgcaaatcgcggtgatcgagtttgcccgctcggtgatgaagctacgaggtgccaatagcacggagttcgatccagctacgacgtcaccctgtgtcatcttcatgccagagggctcaaaaacccaaatgggagccacgatgaggcttgggtcgaggaggacctatttccatgtcagtggctgcaaatctgcgaagctgtacggcaacgccagctctgtagatgaaagacatcgccacagatacgaggtgaaccctgacatggtcccagactttgagaaggccgggcttcagttcgtgggcaaagatgagagtgggaaacgcatggggatcgttgagcttccctctcacaagttcttcatcggtgcacagttccatcctgaattcaagtcgagaccagggaagccatctccgcttttcttagggctgatagccgcggcgtctgggcagctagaaccattgcttcagcgcagcaatccgacaacgaaagcatgttcgatcagtaaagtcccgaaactgaaactgtaccccactgggcctgtgaataatccactgaacagcttggtgaacgggtactacccaaatgagaagagaaggctaagattcagcaagcccccagctccagcgacacatggttccgacatttttaacgaggaacgccttccagtccgttgaagcgagctagccatagggtggtgaggtctagtgtgatgttgttgttgtttttttctctttcctttttttttggcctggaactaaggcgcgaagtgttttgagtagcgctagtagagcctggaagaagttatctaaactatttgtacattatggaagaacttatctaaggactgaatacacaaatgcttggccatgattgctttgttgccacaatatgaacaaccacgctcagatgaagagtattggtgttgttaaaaaatgccagtgaaattgttgttgttaatgtttgtgcctgtgttgccct

SEQ ID NO: 41843 - DNA, 4955 bp, Zea Mays
cccacgacggcccatcagcgacacttccgtctcagtcctccccgtttcacccacgcgtgcgctctctcctcactctccctctccctctcgtcgacgattgggaaagcgccgccgccgccgcgccacaccacgccaggtggcgagttcttcgtagcgccgttcgccaggtctccgtagcgcccttagccgtccgcgagaaccctcaaaggcatttgcattatggttgcagcgtaggtggggagccattagaaggaggggcaacaagagttgctgggcatggcggctcaggaggccgcggcagctgattctttgggccctcggtttgctccggatgacccgacgctccctgcgccttggaaagggctgattgatggcgcgacgctgtactattggaatcctgagacgaatgtcacccagtatgagaagccggctgcaactgcaggtgtgccccctttgtcagcaggtcttccgccggcaacccctgcgcaggttccggaatctgcaccagtggcttttccgcagcttaacgtgcagtttggacaagctggccaggcagggcaccaggagcgtcctgaccaggcagcttatcctcaggctggccagcttggccagcagcacactcaacagccagctcagcagcaaccgtttcagcagcagcaaccgtttcagcagcatgtccaggcgcaacaccaagcttcgtttcagcatgtgccatatcagcaacagcaaacacacatgccaaatcagccacatcaataccacagcacgcatcctcaacacatgccgtaccagcatggtctttacatgcaacctcagcagcaacagcaggctccaccatattcatatcaggcagaccagcagccacagatgcgacaaactgcttataatcaagctcagcagccatcagtgcctcaagctgcctacaatcaaagtcagagtcagcagccaccaatgcctcaatcttcctacgatcaaggtcagagtcagcagccaccaatgccgcaaccttcctacaatcaaggtcaagttcagcagccaccgatgccacaaccttcttacaatcaaggtcagcaatccatgataccacagtctgcctacaatcaagctcagcagcctcaaattccacatggtgcttataatcaaagccagcaaccgctgggagataggattccccagggtcaagggcaacatcctcaacaatctttgagctctcatcatcctgcccaagcttcgcagtcgccgcaagtttcccaacctcaaggacctaaaatgccgactcaacaaggtcaactgcaacatggattgccgttcactcagcatggaaaaacgccattgtcacatgggcaacaaagtcctttgttgaaggatgatgatggaggagttcatgaaggcaagcggactggctttccgttaccacttagtcagcagcgtggccaagctcctcttccaaatcagcagctaccttctactcatcaacatcctggagcccttagtagccagccaaatatacctggagtcggtgggccattttatcctgccaggaatcttcctgatggaccatcctctgctgagactaataacatgggttttatgaactcacctgctcaaatgcatcaaggtggagcagatacaaactaccagaaaaaaccagttagtggccatacagttccaaatcatgttggtccatcaccaattcgacctccaatggggttcgatatgggtaatagtgttggacactttgaaagagatgaccctcactcttatggaaggtttgatggagcaaaggctctccagcagcagccaaagcttgctgctctcccaacttcacaaaattccatggtcatgcataatggaccgctttatcctcggccagacaattttggtggtcataacatggcacctccgcattcagtaccaaatccatataatcttggtccattgcctattggaacttcagtgaggccaccgtcaagtatgtttgctcctccagattttccaagcgtatcttcagctgatgcataccgtcaacaccatgaagtcactgccatgggtgagaacgttcctgctccgtttatgacatttgaggccactggattccctccagagattctgagagagattataaaatgaggctgaggcttcctgcttcttgtctctgccactgaatcaacaaagagcttcttcatgccttgagttgcttaaatccatgcagctggtttttcaaatcccactccaattcaagctcaaacatggcctgttgcgctgcaaaaccgggacatagtagctattgctaagacagggtctggaaagacgctggggtacctaatccctgcttttatacatctgaggagatgccacaataatccgatgctgggccctacagtattggttttggcccctactcgcgaacttgcttcacaaatacaagccgaagtagttaagtttggtcaatcatctagagtttcttgcacatgcctatatggtggaacttcaaaggtccctcagctaagagaacttgagcgtggagcagatattgtggtagcaacaccagggcgtcttaatgatatcctggagatgaagaggattaacctccatcaggtttcattacttgtgcttgatgaagcagaccgcatgcttgacatggggtttgaaccgcaaatacggaagattgtggatgagcttcctaatgctaggcagactctaatgtacactgccacttggccaaaggaggttacaaaaatagctggggatttactgagagatcctgtccaggtgaacattggcagtatcgatgaacttgttgctaacaaatccatcactcagtatgtagaggtggttccacctatggacaagcagcggcgtctagagcagattcttggagatcaagaaaggggctcaaaaatcatcatattttgctcaactaagaaaatgtgcgatcagcttgctcgtggcattggtcgcaactttaatgctgtaagcattcatggtgataaatcacaggccgaaagagataatgttctcaatcagtttcgaactggcagggcttcagtattagtagccacagatgttgctgctcgtggacttgatatcaaagatattagagtggtaatcaattatgactttccaactgggatagaggactatgtgcatcgcatagggcgtacaggaagagctggcgctactggagtctcgtacacatttttctcagaacaagattggaaatatgcttgtgatttggtgaaactcttgcaaggtgccaaccagcttgtccctccgcagctgcaagacatggctgcacgcagtgcttctggaggtccaagaaaccaggcttctgggatgagtcgctgggatgggcctggtggtcgtggttttgaacctggtgttggtggccctgttggttatggtggtgttagggagggtcctggaggttttggtggtcgtgagggcccaggtggacttggtgttcgagaaagcccagccatgtttggtggccccggtggcttcggtgatcgggaaggccccggtggcttcagtggccatgagggccatggtggctttggtggccgggaacgggagggtcctggtggctttgttggcagaaagggcccaggtggttttggtggacgggatggccctgggtcaagtggtttcggtggtagaggacagcgtggatctggtggttttggcagtagaggtggagcaagccctgggggctttggtggacgtggtggcaggggcgattctcctggttttggtggacgcggcaggggtgatttttccggttttggtggacgaggtaggggagatttttctggtgggcgcggtggcaggggccgtggatttggtggcaggggacgttctgaccggtttgtctcagatggacggggacgatatgataaccgtcgaggatttggagacaagggtagggatcggagctacagccgcagcccggatagagtccgggcacggggttatgacagaagaagtgacagcaggagcattagtaggagcaggagtcgcagcaggagctggtcacgcagcagaagccgcagcaggagctggagccgaagcagcagccggagtcacagcaggagcaggagtcgtgaccatggggcagcaccggagcgcaggccccgagcaagatccggcttcgatgtgctgcctcctgcaactggagctgctggacctgcacctgttcccgtacctggaccagcagcaccgcctgttcctgctccggcacctgaacaatcactggctaatacatcttcaatgtcaccgatgtctcctggtggcctagtccagccagctgctgcacctgctggtggccaaccttcccaagggactggcgctgcattccccagttctcctgcaggcgaaacgtttccaggcgcagcagctcagcatcccgcgcctgatgtataatgagtcggacgacatccagtgccctaaatatgtaatccggtgtacaataggagaaatgagtttccgggtagtagtttatatggcaaaaaaatcggcttttccgcaattttctgatctcgtggtgaattgacgtatggatgttgtgtgtttttgtgctgaattcaagaaaaagttatgttgtgcaactatattttgttttgtgtgttttctcgttttacaattttgtgtttctttgaattcttttgttgttgctatttttgcctacaattgcgcgacctgattttgcgtacaattgcgcgacctggtctgcattcttgtacttgtgttttgttgccagctaaatccagttgtttaacaggttttcagcgaaacacgtggtcgatacattttaaatttttctttcaaaatttgttgtttccgggtcaactgaattgtcgcttcgtgttgtcattgtttttttttaaaaaaaatcggctaaattctgttagttcgaccggtttttctggcatgtgaggtacatacaattttttttt

SEQ ID NO: 41844 - DNA, 1631 bp, Zea Mays
gtcgaaaccccccgcacactgcttattctacagcgacccttctgaatttcctctgaaagttgctgctggtgacacattgcttggtttgtatgagaaagagcggttaggcctgttgcagtatgccgacgacgagtctaaagaagagaggtactgggaaaccttggatgctgatttgcgttactggaccagatccctgcgcccagtgcagtggtatcctggtcatattgcaaaaacagagaaagaattgaaggaacaattgaggctcatggatgtcgtcatagagatccgtgatgctaggattcccttgtccaccagccatcctaagatggactcatggctaggcaaccggaaaaggatcatagtcttgaatcgcaaggacatgatctcaactgaggatatgaatgcatgggctacttactttggtaatcagggcatcaaagttgttttctccaatggccagctgggtatgggtacaatgaaattaggtaggatggcgaaatcagtagcatctgttgcgaacacaaagagaaaggagaagggattgcttcctcgtccggttcgagctggaatagttggatatccaaatgttggcaaatcttccttgattaatcgcttgctaaaacgaagaatgtgcccagcagcacctaggccaggtgtcacaagagagctgaagtgggttcgttttggaacagacctagagttgttagattcacctggaattttacctatgcgaattagtgaccagacatctgcaatcaagctcgctatatgtgatgatattggagaaaggtcatacgattttgctgatgtggcggcgattcttgtgcagatgttgataagacatcctgcagtaggttctgaagcatttcgaagacgatataagattgatgtagatagtgagtgcggtaaaacgtatgctttgactgatcctctcttctttatccaaaaaatgttattctgacatagtactaggagttaattttctgatgaagttttctataagctgcaggtttgtcacaaagctctctgttcacttgttcaatggagacacaagccaggcagctttccgcatattgtctgactacaggaaaggcaaatttggatgggtagcgctggagagacctccaacatgaacaagcgggatatcatagatccttagataaaagacatgtgcttgttcatgtagtatcacacaatttagtgtcgttcattggaccactctcgacagttttcactggacctgcacatatacgaggaattaattcagaatagctgtccatctgatgatctaaagacaaaacttaagaaatgctcctgctgttatcagacagtccagagcaaacgagctgatttgtatgatctattgaatgagctcaactatgtttctatgtaacggaattaggtttgagaaatgaaagattgtatgtctcctaatttagttgctcatgtactttgttcttttaggaaaagttgctcctgtacttctggatgattcattagattcgggaactggtgtaacattttaggcccagacaatagacatccctctacaaattcagtttccctgcttttaagttttctgcaaaaaaatattttctcccttctaaactataagtcgttttggcttttct

SEQ ID NO: 41845 - DNA, 333 bp, Zea Mays
ccagcccccaggtcgtcccgacgcctcctcgcagcgggaaggagcgcgacggcgtcatcgcgggcgaagttgcgtgacgtgacgcgatcacgcgacggcgcccggtctcggtctcagctggtaacccgcgctgcccgtttccattccttcacactgcccggcctgcccatcacggattcaccctgcagcccccgccctcgcattaaaatctactatagtaccaaagcgagccggggccccgccacaacgcctcccgataaacaccaccatcgattccccgccaccggctggctggcccacgccgtcagcgggagtgccgccgaatcggtgtcg

SEQ ID NO: 41846 - DNA, 3507 bp, Zea Mays
gggcatgggccactactgctagtgctagtgctagtagcagcggcacagcgcggagaggcagagaagtagccaaagccaagtaggaggaggaggaggaggcagggcgcggggcgagagcttgacgcggcaaccaccgctgcactgcactgcacccctcgctcctccgagctcagcagcagcagcagcagcagctcgctcgcggcatgtcgccatgtatgcttttgctggcgcccgtcgcccccacccttttcccgttccccttccccgctcgcggatgagatctttgggtttggttggtttctttaagacccgagcgtccaaatcacccctgtgctactgctgtgcctgccttttcttttgatcccaatttcctccttttccacccctgccctcccccaacacaaagcgagattcttgcttgcttggcagaggtaaagagggggggcctatggctacctagctatctatctgctagcggctcgtgctactattcttgctctcccccgatgattgctacttgcaacgcatcttatttgacttaattagcttgcttgcttgcttatgttttctcctttttctctctcttttctcatcaggactgtatatgttttctctggtatatgtgtgtgtatacatctctctctctctctctctcttttgctgtgtgtctgtgttcctcgttgatcgatgatcatgcgtgtcgtctgggctggtcgacgatgagctatagctggccatgtcaggaaagatttatctggtcggccgatcgagctcctctcctccgaagcactgaagctccagcggctgccctgcctgacagccactccgcacgacaaaattaaaaagcgcgggcgatcaagatggcgcacgaccccagcctgggcttcgcggactacttctcggcggcggcggcggcgggcgccacggcgatggacgacgacgtcggggcgccggagctctatggcctgcatgccgacgacatggagttcctcggcatgcgtggcctggccgccatgccccccgccgcggcacaccaccagcaccaccaccatcacggccacagcaaggccggtgcgctcctcgacgacgacgacgcgggggtggggccagacgtcagcggctccgcggacgacgccaccatgcgcttcctgagcgagcagcagcagcagcagcaccaggcgccgctgtcgctgtcgctgtgccggccggacgtggcgacgacgttgcacgagcagcagcacctcgccggcggtggctcctcgtcccggtaccatcaggagcagcagccggcggcgtgggtgcagcagcagcacgactactcgccgtcgccgcagcagcacgcgtggcacctgcgcagctccaggttcctcgtcccggcgcagcaggtcctgcaggagttctgcagcctccccgtggacagcagcagcgctgccgcctccagcaagcgcgccaaggccgcaaataagccggcctcgcagcagcagcagcagcaagaagacggcggcggcgccgaggggtcgtcgtcgtcggcctcctgggcgccgtcgccgcagatccaggccatggacgcgctggagctgcagcggctcaaggacaagctctacatcatgctggaagaggtggaccggagataccggcggtactgcgagcagatgcgggcgctggcgggcgggttcgaggcggtggccggggagcgcgcggcggcggcgtacacggcgctggcgtcgcgcaccatctcgcggcacttccggagcctccgggacggcgtggtggcgcagctgcaggcggcgcgcagggcgctcggggagaaggacgtggcggtgcccgggatgacgcgcggggacacgcccaggctcagggtgctcgaccagtgcatccgccagcacaaggcgctcacccaggccgccggcatgatggagagccacccgtggcgcccgcagcgcggactccccgagcgcgccgtcaccatcctccgggcgtggctcttcgagcacttcctgcacccgtatccaagcgacgtcgacaagcatatcctggctcgccagacgggcctctcacggagccaggtgtccaactggttcatcaatgcgcgggtcaggctctggaagccaatggtggaggagatgtacgtggaggagatgaaggccgagggccaggacggcgggggccagcagcaggtaggcgtcgccgtcgccaacaaccctaaccctagcagcgccggccacgcctccgaggcggctgaggacgatgggcgcggggacagcggcggcggcgccgtcgtcgaccggaagccgacgcgggcgcagctcctgcacgacgccggctcgctcgcctcggtcgtcaacatcggcggcggatcgcgcgcgggattcggcatcatggaccacctcgacttcgacgcctacggcggccaccatgccggcgccgtgtccctcacgctgggcctgcagcagcacgactcccacgccgacggcggcgccggcggcgtcaacatcgcgttcggcgcgccgccgcccgcgcaccaccacgggtacctgttcgctccgacggcggcggcggcaggccatcagatgggcggcggcgtgcacccgggactacaccaccacgtccagttcagcggcgccggcgccggcatcgacggcgaggcggcgcacgggcaggagcactaccggggcctgcagggcggcggcgggttccacctcctgcgtgacctggccgggtgatcgatctgctccatccacggcccgtgcatccgcggtcggccgcgcgcgagctctagctgcgactccgagtgagctgagcgatggggacgtcgtgccggcgcctagctagctaccgggtgtccgcgccggattcatggcacgcactcgatcgcgcgtgcgctcatccggccacagcggcgctgtgtacgtacgcaccggatttgtttggcttgttgcttgcctggctcgtgccggtctccatcggtctcgatcgccgccggcggcggcttggccgggcccgggtctagctggctagctagctgccctagttatacataatatatgtatttgtagcgtgtacagatcgggtcgcgatcgagcagtttggacgcgcgcaggtgcagctagtactagtagtagctagcccgccggaactgcgtagttgatcaaacacgcattgcatgcaggttaattgcattgtttgtcaatttcttgaaggattcgacgacgtacggcacaatttataccaggcattattgacgattttcctggcagaatattcatcagtccatatgcccatgcatgtttgcgaattgtctatatgtatgtttgtgattggctggtgtgtaagcctctggttagtttgcattatctaaacttttcgtaaacaaaaaaaggtgagagcgtcagctaatgttttttttcataaattgagtggctgaacaatttgaaatgagctataagagtcaggccagtttggatcaactaaagtaagttggtgtccactaataaaaagctctagctg

SEQ ID NO: 41847 - DNA, 1362 bp, Zea Mays
cttatttgcgctggttcgtttggaggttgggggcacctggctgcgaagtggacttgctctggcgatggtgccgccgtgggtcgtgtgggcgccgacgcgcctaggttagtcgaagaggagacgagaaaaggggttgcgctcgacgaccgttggatcttcaacggatggatgggattagaaccggagtagcagcgaggttaacgagtcacttgaagaccaagttggtgaaatacctaggaatcttgagtctaaggcaagttgtgcccttgatcacttttctctttacccaataatgttccaattaatcactatgacatgctcaggttaattttatgggacctaataggttccctagatttgtttatcccacaccttgtttaccactgaacttttgggtagttttgctattgctctacctggttttgggattaatgttacattatgatcctgttcccagttatgctgttgttttaattattgttcatgacaagatcattgtgttgattggaacatccgaacatggagcttaacttgagatatccatgataccacaagggtggaatgggacgcccttggtcgactaattaggaaagctagtggagcactaccttaaccaaaaggggcaagggcgatagaggagctgtgtatagggaggttctcgggtcgatcatgctgcgatggcttttcggacgagggattcctatattgcccttcttagaaaccgtagcgggttttctaaagctagtggaactttgtaaaggcctcatagtggatccctagccattcacctcggaagtgtctaagagccttgaaaccctggctagacgggatacacgacttgtgggtaaagggcgcaacctctgcagagtgtaaaactggtatatcagccatgctcacggtcaagagcgactcaggactctcgcatgattaacttatggaactaaacttaatctgttagatgcattgcgtcgtgggtgttattatcaattgtgatcttttatttaattgggttggtatctacttatgcatagtaaatgctaataaaattctgaccaactctaaaagcaatgcttagctttaaccatctcctttggtaagccttacacttcacatgagatcccaccttcgatgagttcatgcacattattccccacaacttgttgagcgatgaacgtatgtgagctcacccttgctgtactcagatccccccaggtcaagaataggtaccgtaggatgaggcgcatgaaggatgctgtgatgagttcatgagtggtctaggccatcgtctcccagtcaactttggttgctggatcgttgtcttcgtatgatgtaattacttaactattttgtatagaactccat

SEQ ID NO: 41848 - DNA, 2049 bp, Zea Mays
cagttcccctcaccgccgtggacgcgcgaaccaacacccaaaccgtctgttcccaacagataacaccctcggctgcggcagctgcagcgccctcgctgccggcgcaggtccggcgaggcggccagccaagttctaggcctccgcctccggggccaaccctagccaccactcgcaacgccagaggcggggggcgccatgctgttccaagtgggagggcagggcgcgcgacccaccttcttcgagatgtccgccgcgcagcagctgcccgccagcctccgcgccgccctcacctattcgctcggggtttttgctctaagaagaccattactacacacagttttggattatgaagacgatttttttgctttgttaatgggtgtccttgagtcccatagcctacggacaacagatggttccttttcagagtcattatatggtctcaggaggagacctgttaaggttgcagtgaagagaaagagtcctggtacagaatccaatgacaaagtctatggttctgctctaaggaagcgccagaaaatcctttcagttgtttttttggttgttttgccatattttaagtcaaagttgcagtctatatataacaaagaaagggaagccaggttgcaggcaaccctttggggtcaggatgatgttagatttgatgaagttgactttgtattagatcaggagcagacttctcaagcacagactgaacctacaactggagaaatgtcaaatttgacacgttttaaaaagaattttgcctcacttataggtgtttgctatccatggattcatgcaactaatgaagtgtttaccaacactggtcggctcgagaaaaaattctgggagaagaaaagaaaagggagagggcagtagtgtggactgtggaggacggtgtggtgcttcagctttcatcatgctagatgctggtctctcgtttgcataccagctcttgtatctgttggatgcaactgcattttatagtccagcactacatgtacttgggattcatgtttgtcgtgctactggacaagagctgatggattcatcttctaggatatcaaggattagaagtcgtgaacttgagaggcttcgcggtcctccatggttcaaggctgtgcaacgagtgttccttagttgtgtgtacacaactctagattatgcacaaaccggtttaattgctgcagtcttctttttcaagatgatggagtggtggtatcaatctgctgaagaaagaatgtcagctccgactgtatatccaccaccccctcctcctccaactcctaaggttgccaaagacgggattccgttgccacctgacaggacgctctgccccctgtgctgccagaagcgtgctaacccctccgttctttctgtttctggttttgttttttgctacagctgcatattcaaatctgtctcacagcataaaaggtgccctgtcacgctaatgcctgccggcgttgagcaaatcaggcgtctcttccacgatttgtagccatggaagacccgaaaacttcttttctaaagaccagggacgtcagcaactcagcatacagaaacatatatcagaaccaccattttgtaaactataagaaactcagcatacttttttaagcaaatgcatggatggcactttcttcccgatttcctttgtacggttattcttcgtccattggaaattgcacaggaaaagcaagctggagtttgagcttgacagtcttaggttgggggtgtataatctgttgttaggtgatactagcatatccattgagataggctgttgttaggtgatactagcatatccattgagataggcgttaattgtgtacctgcatgactgtatccactctcttcatttgtttgtaaaaaaaactgtctgtaattttggattggtcctgctcgacgtcacttatattggctgtttggagtaatctctcagattatgggcatgtttggtttgtggctaaatgtgtcacactttgcctaaggttagtcgttcgaattgaataactaatcttaggcagaaaagttaggcaaagtgtg

SEQ ID NO: 41849 - DNA, 639 bp, Zea Mays
caacaaagtataaatagatatcatgataagaaaacatataagacattaataatctgctagcaatgggaagacaaccataacaacaatgaaccgaattaatcagtgcgcacgactagttaaaaacaaacatcctttgacaagaagtttctaattaaatcatggctgtgtctgggctgcattattatgagagtgaaggtggatgtgctgctacttcccgctccccttgatgagcaacaagcacctgcattgagtaatgcaagagtgagatgaaacatctcagcaagctaattgttccgacgagatatttaaaccacaaattgaattcatcaacattttaaaagagtcacaataaaaaaaaatcagaaatacttgtagatatagaactcagtagtcccactataaccaataccatctcatttcctcgaacaaccacaataggttctataacacttccctgcgtcaacaatacctgcaaatatcacttcaatgtatgcataggaatgcaatgtgtaggtactctatcttcatacctctgggggtataaaaccacatcatctgcaaatatcacttcaatgaatgcatatgaatgcaatgcatatgtcctctgccttcatacctctaagggtatgaagccgcatc

SEQ ID NO: 41850 - DNA, 5317 bp, Zea Mays
gttaccaattatacatgataaataataatatttttttatatttaatcaaagataaaatatttatcttcccaaaaaacgagggtggtgttattttctggagatggagtaggcacatgttaaattatttctgttttggccacagtttataaaattattttttacactacaaaataagtattgtcagatttatgaagaaaatattgattttagtaggtatttttggaacaaattaattcataaagtaacataaaaagtaatatgacatacatgatcaaaattaacagtattattccatatgtgactaatttagagttcatctcaaaggtcgcacacaagaacaagagaaaagcaaatggatgaagatactctatagcaggtcagtggcaagaactagagaaaagaaaagtaaggggatgaagatatactatgtagcgggaccagtgccacgcgggcacggaggcactgttctgtgtggagttgctatcaattttaaattgatcgacattgatgggtcgatagagattgtatgttgtgtagtagtgagaatgcatcgaaaatgtaatagaatgaaacagattatgaaaaaggaaacaagttagaacaagggaccacaaaagacatacaaaaataaaaagcacaaagatcgaagtgctgacatgcatcatcacaaaagatataaaaaatagctagcaacaaagaagcaaggctggaatggagagctctaagggactccccaagttaagatatttcttagttttttctactttggattggctcaattcatggatcaaaaatcaagaccgaacctaacacgatacacccatatgtatgtttctttcggacaagttagagcagatgacccatgatcaggtctacccatcaccagtcttgcaacacaccttagctagcgtgctaaagtgattcatcatcatgggaaaagttgggtatagtcaaggaaacaatatctttaggaaggagtcatccaactaacattaattcaaaagagcatggactccctatatcaacccaaataaaaatatgggcatgaacaaggtttgaacaaaaacattcaaccctagacagtaggtggacccaagttcacaaactagtagtgtaggccaactagagccaccacttacaacatgcatgaacttgagattgatatatatactcaagtgttgctctacgaatgcaatcaggccctaatgagggttttggtgttgatgaccaccgatttagagaactaatgatatttattgatatgacaagcatggaatcaaataggaaggatgttatacaagttgaaggacccccaatcactaatggaggctttgccaactcaatgtttttaaactcttttatgttttgtatcttgagtttataaaaagtcgtagggagactcaaggatagttggtcaaactattaaaccatattccctttaagagtggtagtgttgcccttaacataaccgttagaactctgagtataagtactcatctgttcacgcacaatggctactactacttctttctcgcatttgaccatcacataacagaaaagtgttcaaccctctctccaatgttctctctcaagcttccaagcaaatctttgattccaaccataaaaacttgagagaaaagatagcaaacatctattagattagagagtggatcgattgatttcccctctcaaatagcatttggttcacgtttggtcggtggttctagggtttgttactcttggagcttgcttctagccggctaggtgttgccctacttgcctaggggatgtttgtaacacacaaatcgtagctaagaaatcaccctcacttcaagagtttggtcacttggtttgaaaacaagagaagggcaagccttggtggcaagcctaagccttttgtggcatcctcatcaatgtggacttaggcaagccttagtggcaagctgaaccacatgataaatccatgtcttgtgtgcttcacttacattcttataagttcatattattgatttaggatttatggtcgatctactagctcactagtgatatacttgatttatctctcgatctatgatctatatacctacagaaaggctacaagtttagctcttctaagttctgctaggtgcatttcgaatttagtttgaattcctctatgtaggtcggtagtgctgccctttactctgatagaatttcaagttgaatttttacaggcctattcacccctctaggccttcatccccttccaggagatcctacatgctcttggaacaacatgtctttgcacatgatcaagcacgatatgcttcaatcatgtttgatattgcgcaagtagccaattgtgttgatactcatacatataaatagacacataatttagattgaaatattatctaagtgttataagtttttagttgtctcattaaaaacttttctagattaaacatcatgagaaaaaactagaaagaaaaagggcacaccctagctcaaatgtttaatgcatacattacatgcaattatgtaacaacctacatgctaagtgagccacacattaataataccaaccccttatgcttttatccttgcttcatttaaaaggattatcccaagaatggtggtatggaatatataagccatatatattggcctaacccacactcaacatccaacactacttcataacacacatatccacctattactgttaggattgctagagccagtagtgaatttagttcattgttgggttcctaagactaggatattgacaatgattggaatccattgacccaacagtaaagctcattgtcattgtcaagtcaaaccatgacctagcaataatatatacctagtaggtttagccatgagccagcagtggtatggaagatcacactatcagatcaatccatagaccaattctgataggccaatagagtcatggcttgacccaatagtaggcacacgatgacggtgtcatgttgtggatagactcgacaatgtcctaactatagtgtaaaacctagtccccttcttgttcctctttccttctcataccaagaatagtcatttagttttccccactattctctctagtgttggatccatttttcacaaaaatgtttatgaacaagcttagttttaatggatggacatgctctcctacattaagatgggtaagtagcataccttgaatttgtagtttgttttattggttagattgtttttattctcatgattgttttttcttcattacagagagcatttttgtcgattttttatgaagactgttgcgcttttgtgaatctacgtggtacctatgaatccattttatttgtatctagttttcttcatcttgttttttgattgtctacttcaataacaataattattatacttgatgccacataaaaatatagaggctaattacagaaacataaaaattagaggcttaatgaacaacagttgtagctaaaaagaatagattgctagatgttacatggacaagtccatcaaattaaaaaaccctattatacttcatgcaagaactaaagaatcacattataacacttatcaaaactaccatttaatttggtagaaattaaatggttaacaaacattaacctttcgaaaaaagattcaccataatttgaacaccttcctcaagatctaattcaaaagtgatctcttgaatgaaaacaaatggctagagagggatgaataacctatagaaatttacttacacaactaataattacaattatagcaaatataaaagatatacgaaagcgattacttgctctagttttactcaagattattttccttaaataaataaatagtgggaaagggatatgtatgaaaaagataagctatgtactaaataagatatgcttgataagtggatgagctagcaacaagtatatgtaaaagggaggatactttgggaagtaaatcacatctggcaagatatgatatgatatttatcctcgaagtttagttgcttcctcaatgtggcaaatctaaaccaaatgattcatgtgcttaattcgtataacaagccaagcctataaagggtggcgtaagcattactctaacaaggcactccagcaagccatgatatcactaggatgtttgcgaatctcacgtggggttgaccacaaaaccccttacaatatgatgatcggagtcaacaacaatcacaaaaatctttcaatgatcctccgctatctcgaagccatataggtggcaacaaccaccaagagtaataagattctcgcatctcaatatgatcactagtatcactagatgcaaaaactctatgcaaatcactaaagatcactcccagccccactttggataaatcactatcactggatgtgagtgaaaaagtttcctttgggcttactagggtgcatatcaagttgagaagcctagattctcactgcaagcccacataatctctacttataggatcctaatggccaactagccgttggaaccattcttgtgcattttgcaaggttgtcggaccatccaacacgtcaccattagaccaaagctcaaggtctgacgaccatagatcgtttcatgtgtactaggcatttgaatgttaccattgttaccaccaacttctatcttagtgtatggtctaatgcccttagtgtgacgaccatcaaaacatagaatacatggtatgatgtctttcgttaagtgaccggagagcaaccagtaatgttgaactggtctaatgcccttcatcggaccaatcttcatggtttgacaatcttgttcccaatcacatgggagaagtgatagtgggaccgatttaataaacaatgtattcattcggttcgatgtgctcatttcctcaccgtcgaaccaaatccctagggtccaacactctctagaaaacaactagagagcaattgtgagcattgaactagtccaacgacctccatcgaaccatagcacagagttagataattactctgatcgtgcaactatggttagccattggactagtactattttggtatgatgtctctatctattagagtctaacgcctattctagacaagcattagtttttttcatctaacctttgcacgtgtgctaactccaatgtgttctaaactctagagtctatgagataacctttacttaatggtgtataagatggaaatttataactttacaagttctaatgcaaatgcatgagtttgtttaatctagtggtatatgagtaaccattttgaaccttgggttcccctctttatagcacaactacttatacaaaattcagtcacacactattgca

SEQ ID NO: 41851 - DNA, 1118 bp, Zea Mays
gcacatttctcttctggaacataagtagcgtgcaaacttcgaccgggaccggcgatatccgccatggccaccaccactgccgccgctcgctggagcttccccgcccgtctccagctcctcaccagccgccgcttttgcttccccgcctcctctgccgcgccgcccagttctgtagcggggttcagttgggccgacgccctccgcgtcgctggggacggcgggcgcggcgacgagtccgacctctccgggtacttccggaaggtcaagagctgcaaccgcggaatggataaaaaagggcagttcgtgaagttctctgtggaggatcaggtcgtggggtacatccacaagggatttatcgaacacatcagagactttcatgatgtttttaccattgtcatggatgacaatggcagcaacactgtggagcatgtgtctctccagtcatcactaaggactccagaagaccgaacacatgctattggaagtgtcattaaaagccttggagaattgattccagctctacccagtaacgtcatcttatggcatgcctgtgtacttctctctggaacgtgctgctgctccttactttggtataaaagcttatggagttcatatgaatgggtatgttgagaaggatggtcagaaatttctttggattggtaaacggagtgatgtgaagcaaacatatccaggaatgcttgatcatcttgttgcgggtggcctgccatacggaatgtcctgcaaagagaatatcatcaaggaatgtgaggaggaagctggaatcacaagatccatatcaacaaatgctacttctgttggagcggtttcttatatggatattgaaggctttagatacaaaagggatgttctcttctgctatgacctccaacttcctgctgattttgttcctaataatgaagatggtgaggttgatagcttcagactagtccctgttatacatgctgcaaacattataaggaggacagattttttcaagccgaactgcaaccttgtgatcatcgacttcctcttccgtcatgggtacataaacccagattctcgttgttacttagatctgctgcaaagcttgaggagtggtgatttgtaatatatgaaca

SEQ ID NO: 41852 - DNA, 579 bp, Zea Mays
cctctgctgtcccactgcggcaggactacagaagacgtcaaggcaacaacgcaaggagcgtaagaagcgacagaagtggttctggggttcagttgggcttgcagtcacccttggtgccacggccattgcctggtcttatctaccttcatcgcagccccgagctagtgcagattcaaatagtaccgtcagtgactagagctaggatgaagatactccctccgtttctttttatttgtcgctggatagtgtaaaattgcactatccagcgacaaataaaaagaaacggagggagtatctcatttcagaagcctaacaaacctctaactatactcctagaggagaaaaaaaaaacgttgtataagttctcttttggtgatcgtccatgatcgctacaatcttcatttgctgctttgtatgtaaaaatgttgggtgggccatctccgtcaggattggctccattccaatcaccgtaaatctctgcatagatgattcatggttgagcaaataatacaaagggatgtggatatggttagtaatccatgcccaccgaccccactcgaggagttgattttgccaacc

SEQ ID NO: 41853 - DNA, 448 bp, Zea Mays
gtttttatcagtttaataaatatttattattatgtgctatcagtttaataaatatttattatatgactatgcctgcgggtgtacccgcgggtagcgggtttgggtaacatatgctacccgtcacgggtagcgggtacgtgtttaacattaatctcgcgggtacgagtttgtaatctttgtgcccgcgggttttaaacccgttgccatccctacaccggactgtccggtgcgccacccgatagaaggcaagaatttccttcctattgtaactccaacggctcctagctagctgccttggggctattaaagggacccctaggcgcatggagcagaacaccaagcattcacaaaacatcctaagacacctagactacgcaatcacacaatcggttcatcatgttagagatttgagcaccgttcgagttgtaaactccctgcgccatgtttt

SEQ ID NO: 41854 - DNA, 3548 bp, Zea Mays
atgcagcctcccggcccgcctctggcgacgccgcagccgctgccgccggcggtggcggcggagctcgcgcagcttgagtcgaggctgggccaggtcgccggagagcccgcgcgccacgagctcgcggagctaggcgaagtcgccgcggttcgcgtgctacgtaggatcgcgaggtctcaagagcaggtccggacgctcactggctacatcgtctcggctgcggtgcaggagacgttcgcgctcaatgcgcaggccgtccccaccgccgagagccgcgcctgcaactcctccgctccttccctaagtgatggatctgtacaagggccgcagtgcgccagtgaacttcgaatggaagaagtaactgcgggcctctcaaactatcgcatggcaatatgcgagggtcaaggtcaggaggatcatgcagtgatgatggcaattgacaacccacctgactgcatccccccctggggttgggaccaagattgcattgaagttgataaccttgtgccaggaattgcttctcaggcaaaccagatgcctatgcagtatggcgaccgcgaccgtatccaagaactagtttctattgtaccacatggtgttcgtatgctggctgaaagtcttgaaaatggcagagcatctgagttgcagaactatgtacaaaatggcattcccgaacagtggatggttccagcagatcaaagaatggaatccacctcgagccgcctgcaacatgttttaaaatgtcttcagggagttggaccctttggacaccatctcggtccggaatgtgcaataatgataccaaagcctgagccaaatgttgttgtcgaaaatttgttcagggagatagcaagccctcatatcacagacaacaaattgaggaatacagcgagccctcagatgtgtgcgttggaggatttagagttcagcaagagatttttgatactctcttatctttgtcggaataacctggaagatgaagttgtactgactgtggactatattaaatcgttgaagtttctgtccatggttcattttgagtcccaaatttggaggaaatttggtcagaagaattttcaggcatccaatagagctgcaacagatagggcaaagaatttcgattcagacccaactacaacaaaattataccattgcaatatcgagataagaggggagtccatattctttgttttgaaggggccatatatggagaataagaggacttatctacaaaaagttcttggtgatgataatgttcttctagtaaagtttatggtttcttcagacaagagcactgatttctaccgccaacattaccatagggttgttgaagatggtattgttttgggtctgcgacgatataattttttcgtttacaaggatccaggaaaagagacgaaaaagaaagacagtgaacagggggatatcaagaaatgcacttcgcctgtaagatgctattttatttgcactaagtctgggtggaggggggatgaggcttatattccaattgacaagtgccgcaaactgttcatgcatatccatactgctcccaccattgcaaattatatgaaaaggtttcatttgatactttccaaaactctaacactggatgttgatttatcgacaattgacgttatactgattgatgatgaaccttgtcgggacgagcatgggaacattgttatgctagatgggaagcgtttgatccatactgatgggactggcttcatatctgaaaatttggctaagaaatgccctagcagaataatcaaaggaaagaagtcaaaagtttatatgcatcaaggtgaaacaacggtccgtcttttttataatggatatgctgtaaagggaactctgctagttgacaaaaggattagtaataatactattgtgatccgaccatcaatggtaaaagtaaaagctgacccaaagttgtgccggatgaagtctctgagttctttggaaatagtttccacaagttgcatatggatatgctaatatggaggattcaatgttagaacgcatgattcattctggaattccactagaagaaccatacttgctatctaggctgagttttatggccaaacaggaaatgaaagtattcagagaaggaaagctaccaattgatgaatgctattatttgatgggtacaacagatcctacaggaacgctgaaaccaaatgaagtttgtgtgatacttgacagcggacaatactctggagatgttcttgtgtttaaacatcctgggctacattttggcgatatacatatcttaactgcaaggcaaattgatggactagagaagaattttattggatattcaaaaaatgcaatactttttcctacttctggacaaagatcattggctgatgagatggccaatagtgattttgatggtgacgagttctgggtctcaagaaacaatatgttactaaagactttcgagaagcgaagtgagccatgggttgaactattaaaactgaaggagacccagcacaggcttagcaaacctggggatttaaatgaattgattctcgaaagagtgctatttaatgaatgcttgacgactatgtttatacccaattacacaaaaggtttagcgcctgactgttggttagcacatatggaccgattattaacagaaggagtcgatcaagatgagaagaagtcaatcgtggaaaacatgattaaattagttgacctttattatgcggctctggatgggcacaaggtagatgttgatcgccatctgagagtaaaagcatatccacacttcatggagaagaaaggatttgaatcctaccattcttcatctattttgggcagaatctacgatgagactgaggaaataatagcgcagcaatgtgacgaacagatccagataacgacactgccgtgcttcagtgaggtggaggcaaccccggaatgcacctccctatgggaacaccggtaccaggagtacttgacaaagagcaggggccttttcgatctgggcaaggaagaaaagaacgacgagttccagaaactctaccaacactacaaacatctgctatacgacgccgacgaactggaggagacctcgcgggacctctcagacgtgttcatggaggcctgcgcgatatacaggatcgtgtacgagcgagcatggtgtaccaggagcgtcagcaggtgccgtttcgtgtggaacgtggctggagcggcgctgtgccacctccacgcgaccaagtacgcggcgcagcgcggggagaaaaccgcgctctgcccgctctcagttatccgccagctttacatctgatatatatattttttttttggtaaagcagctgatttctgcctgtaaaatgaaacgggtgagctgatgcgtcttaagagaagtatatactggggctctcgatcaacttagtcaagagcttcacagttgctttgatttgatgaggttaatatagaattgctttcttgtacgtcaccagccttcaatcttaaagactcgttcgcatcttttgatacacagaagttgtgtaggtttgccgattttttttatctaa

SEQ ID NO: 41855 - DNA, 1727 bp, Zea Mays
accatcagcacgcactttattatccctcgccgtccacacatccagcaccaaatccaaaaaccccatctcccacctctccttccttaccggaagagaaaaaaagatgaaaaccaaacgaacatacacagatacaagcacagcagcaacgatatccaaagctagcagctcatcagataggcaaacaccaagaagctaagctagcgcgccatgcagacgccgaccatgtcgacgtccatggccaccacggcgccagcgaagccccccgcgccgccgcggcaatgctgcaggtacctcctcctcccctccaccggccaccgccggagcgtggcggcatggtctgccaaaaagaagaacccgtggctggacccgttcgacgatgggcccgacgaggagttcgattaccagggcatgttctccggcgggaagcaggaggaagacccgcggccgcccgaggaccctgagaacccgtacgggttcctgaggttcccgcagggctacaacccggagctggacagcctcgcctccaagatgctcaaggaccggtaccccggcgtgctggtggacgtggtggcgtcggccaggggcaagcaggtgtacgagatgtgcaagaacgtcaggtacgctaacgtctatgaccccgacgacgactggccggagcccgccgaatacacgcacatgctcggcgtcctaaagaataggtactatgatctgatcatctccacgaggctggcggggatcgggcacgcgctcttccttttcatgtcgtcggcgcgcgacaaggtcggctacgtttaccccaacgtcaacagcgtcggcgcgggcctcttcctcaacgagatgttcaaggcgccgactaacaacctcgccgacggcgggtaccacatgtataaagacatgctggagtggatcggccggccggcgaagaacgttccccagcagccgacacagccgctgcgggtgtccatctccaagaagctacgggcgtacgtggaggacaagtatagccgcgccggcgtggagaagggcaagtacgtcgtcatccacggcatcgcctctgactccgtcgccaacatgaagtccagaggcgacgacgactgccttcttcccctcgggcactgggctcagatagccaaggaaatcagctccggcgacagggggctcaagcctctgttcgtgatccctcatgagaagcacagagatgaaatcgaggaggaggtgggggacgacacaagcatcctgttcatcaccaccccaggccagctcacctgcctcatcaacgactctgccggcgtcgtcgcgaccaataccgctgccgtgcagctcgccaacgcccgcgacaagccatgtgtggcgttgttctcgtcggcagagaaggcaaggctgttcctgccatacgtggagggcaagagcagctgcaccgtcatatcttcggcgacggggaacctgatcgacatcgacctcaacgcggtgaagaatgtggtgaaggacttggagcccgctcccagcttcgcattggcacagaagtagcagctgcgttccaacatcacccccattgctttgtacatagttcaaacagcagcaacgctagagagaatggtgcagtattacaaactacaaacagcacacatgccgtgtattccgatgttataaataacatctcatatcagctatgcaacgaataaaacttagaacaagaaaccaaaaacaagataacataaatgaattaa

SEQ ID NO: 41856 - DNA, 2769 bp, Zea Mays
atttcccgcaaaagggaggggcctatatacaaaaagatcaccactactgtactacggcaccccttcctcccccgctcccccacctccgctcccgaaaccctcgccgccgccgccgccgccgccgacgccgaaatcctcgtcgcggcggcgatcactgctcccctctatgatagcggcgcgtgagggcggcggagcgcggcctgtcgctccccggtccgcgtgcccggggcggctctgagagcccagagctcgtctcggttccctgccaagcgcagccgagcaccgcgccggcgccgcgtggcagttcaggccgtagtctgggcgctgttctgctctgggtctactggagtgcgtttgggattttttcggttcctactacattcgggggcgctgaaaataaggcgtctctctttcatggggcagccagggatggattctgttccagggaaggagaacaacggcattgcccctaacctcaatggggtcgtgtctccagcgaagcagcagctggaggggaaggaagcgatgcggtatgcaaacatcctccggtcgcgcaataagtttgctgacgcgatcaacctgtacaccattgttctcgagaaggatggcaccaatgtggaggcccttatcgggaaagggatttgcctccaggcgcagaacctaccaagacaggccattgagtgctttacagaagctgtcaaaatcgagccaggaaatgcgtctgctcttacacattgtgggatgatttacaaagatgagggtcacttggttgaagcagctgaggcatatcaaaaagctaggatggctgatccttcctacaaacctgcttcggaatttcttgctattgtgttgactgatcttggaactagcttgaagcttgcgggtaatacagaggaggggattcaaaaatattgtgaagctctggaagtagacaaccactatgcgccggcttactacaaccttggagttgtttattcggagatgatgcaatttgatatggctcttagttgttacgagaaagctgcactggagagaccattgtatgctgaggcctattgcaacatgggagttatctataagaatcggggagatctagatgcagcaattatctgctacgagaggtgcttgaccatttctcccaactttgagattgctaagaataatatggcaatagcactaactgacttgggaacaaaggtaaaaattgaaggtgacatcaatagaggtgtagcatattacaagaaagctctatactacaattggcactatgctgatgccatgtataatcttggcgttgcatatggtgaaatgttgaattttgagatggcaattgtcttttacgagcttgcgctgcacttcaatcctcgctgtgcggaagcatgcaacaatttaggagtcatatacaaagacagggataaccttgacaaagctgttgaatgttatcaaatggcactgtcaattaagccacttttcgctcagtcgctaaataaccttggagttgtctatactgttcaaggtaagatggattctgctgctagcatgattgagaaggctatacatgcaaatcccacatatgctgaagcatataataatctaggtgttctttacagagacgctggtagtattactttagcaattcatgcttacgagagatgccttcagatcgatcctgattcacgaaatgctggccagaaccgtttgcttgcaatgaactatattgacgagggctcagatgacaagctttatgaagctcacagggagtggggaaaacgctttatgaaattgtatccacaatatacaagttgggataactcaaaagttgctgaccgcccattgatcatcggttatttgtctcctgattactttactcattccgtgtcctacttcattgaagctccccttacacaccatgattccacagtttgcaaggtggttgtctactccggtgttgtgaagatgccaagacacttagattcaaggataaggtgttgaaaaagggtgggttgtggagagatatatatggtattgatgaaaagagggttgctagcttggtaagggaggataaagtggacatacttgtggaacttactggtcacacagcaaataataagttagggacaatggcatgccgacctgctcctattcaggttacctggattggctaccccaacacaacaggtttgccaacaatagactaccgaatctcagactcattgactgatccacctatgacaaagcaaaagcatgttgaggagttggtgcgccttcctgaaagctttctttgttatactccttccccagaagctggtcctgtttgtccaacaccagcaatttcaaatggtttcgtcacttttgggagctttaacaatctagcaaagattacaccgaaagtgttgcaagtttgggccagaatattatgttcagtccctaactccaggcttgtggttaagtgcaagccattctgctgtgagaacataaggcagaaatttttggccacactggaggagttgggtttggagtcattacgggttgatctgttgccactcatccatctgaatcatgatcacatgcaggcgtattctttgatggacatcagcctggatacatttccctatgctggtactacgactacatgtgaatctttatacatgggggttccatgtgttacaatggctggtgctgttcatgctcataacgttggtgtcagcttgctcagcaaagtcgggttggggaggctggttgccaaaactgaggatgagtatggagcaa

SEQ ID NO: 41857 - DNA, 3239 bp, Zea Mays
cggtcgtcggcccacctagttccttatccgtcgtctcctacgcctccatccacactccacagccacgccacagtcgttgcccaccacccagagcacgcggcggcttgtcgccgtgcgcgccgccaccatcaccacacgaggcgccggagaaagacatcaagcgcacgcccatggccatgactcctcacgcctcggcggccaccgtagccgttacccctgcgttgcgctttccccacactttgtctgccacgggcctctcctcaccgcctctggctgggggctgcggcggctgccgggttcggttccggcccagccagcgcggccgaggcacgcaggggcggcgaggtggctctcacgtgtcgcgcgtggggggcctgctgggcaccgtattcggcgggggcggccgcgacgacggggaggccacgcggaagaagtacgcagacaccgtggcgcgtatcaactccatggagctcgaggtctccgcgctctcagacgctgatttgcgtgcacgcaccgctgcgctccaggaccgtgctcgctccggggaatccctggattcccttctccccgaagcatttgctgttgtgagggaggcttccaagagagttctaggcctccggccctttgatgtgcagttgattggtggtatggttctgcacaagggggagattgctgaaatgaagaccggagaggggaagactcttgtggccattctgccagcatacttaaatgctttgagtgggaaaggagtgcatgttgtcactgtaaatgattatctcgcaagacgtgattgtgagtgggttggtcaagtcccccgatttctaggactgcagagaacatgacacctgagcaaaggagggaaaattactcatatgatattacttatgtcacaaacagtgagcttggttttgattatctaagagataaccttgcaatgactgtagatgaacttgtcttgaggaacttcaattactgtgtgatagatgaagttgattcaatccttattgatgaagcaagaacacctcttataatatcaggcctagctgaaaagccaagtgatcggtattacaaagcagcaaaaatagctgaagcttttgagcgagacattcattacacggtggatgaaaagcagagaaacgttttacttacagaagaaggttatgctgatgctgaagaaatactggacatagatgatctgtacgatcctcgtgaacagtgggcttcgtatattctaaatgcaatcaaggctaaggagctcttccttaaagatgtcaattacattgttcgtagcaaggaagtgcttattgtagatgagtttactggcagagttatggcgggcaggcgatggagtgatggtctccatcaagcaattgaagcaaaagaaggtgtacctatacaaaatgaaaccataactctcgcatcaataagttaccaaaacttctttcttcagttccccaaactatgtggcatgactggaactgcagctacagagacccaagagtttgagagcatatataaacttaaagttactgttgtcccaacaaacaagccaatgatacggaaggatgactcagatgttgttttcagagcaacaaatggaaaatggcgtgctgttcttgttgagatatcaagaatgaataaagttggccgtcctgtgcttgttggtaccaccagtgttgagcaaagcgaatctttatcaaagcaattgcgtgaagctgggattcctcacgaggtcctgaatgctaagccagagaatgttgagagggaggcagagatcgtagctcagagtggacgccttggtgctgtgacaattgctaccaatatggcgggacgtggaactgatattatccttggtggcaatgcagaattcatggccaggttgaagttgcgtgagatccttatgccaagagtcgtcaatccaatagatggtgttattgtatccaaaaagcagatgccaccaagaaagacatggaagacaaatgaaagcttgttcccatgtgaactttcaaaagaaacattatcgtctgtcaaggatacagttgaaatggctgtcaaagaatggggagataaatcattaactgaactggaagcagaagagcggctgtcctattcatgtgagaagggaccaacacgtgatgaagtaatagcgaatttgagaaatgcatttgtgaagatagcagacgaatataaagtttacactgaggaggaaaagcagaaggtcattacagtaggtgggcttcacgtagtaggaacagagcgccatgaatcacgcagaattgacaatcagctccgtggtcgaagtggaagacagggggatcctggaagctctcgcttctttcttagtctcgaggataatattttccggatctttggaggtgacaggatacagggtctgatgcaagcattccgagttgaagatcttcctatcgaatcgaaaatgctaacgagggctctagatgaagcgcagcggaaagttgagaattacttttttgacatcaggaagcagttgtttgagtatgatgaggtattgaatagccagagagatcgtgtatatgcggaaagaagacgtgctcttgcatctgacagtcttcaatcacttattgtggaatatgctgaattgacaatggacgacatattaggggttggttatggctaacataggacctgatactccaaaggaaaattgggacctgaacaaacttatagctaagctgcaacagtattgccatctgttggatgacttgacaccagaattgttggagggcaaaagctcaagctacgacgatttgcgggagtacctgcgtaagcgagggcgtgaagcttacttccagaaaactgttagttatttctccttttcctttcatggatattgttttttcgcatggttcaaaggttttaagaagttcaacaacaacaacatcaacatagccttttagtcccaaacaagttggggtaggctagagttgaaacccaacaagaagtcaccaaaaagagaaagagagagaaaggggaggggaaaaagtttttgagagaactaaaagggaaaaggcctaatcacagttcgggcacgtggatagtttttttccaagcacttctatccaaacacaactcctttggatattccattccttcaagtcccttttgattgcttccttccatgtcaagtttggtcgtcctctacctctcttcacattattgtcctgtcttatgatgcctttgtgcactggtgcctctggggg

SEQ ID NO: 41858 - DNA, 3354 bp, Zea Mays
atcctgccttggccttcctcacacagttcgatccagcccaaccgaaccaaatctctagcagacgggaacctgggaacctgaaccctcaaaccccgccccttggcctcccatacctttcgcgccgaacacccgccgtcaccaaaactgacggctcctccccctctcccctctccccttttgtgattggactgaagtgggattcatatatcaggtgtttggattcttctctttcctctgctggtgaggacgtcggtttcttctttttgtgctgtttcccccctttatcttctcattcagcgatcttcaaattcaatatgttgtccgtcggattggcgctctagtctggtgggtttgctttcagatttgccgagtatcaatccgggtctccattcggtggtggctgaagcttgatttctccatgtcgctccgtgcagcttcatgaatccatgttctcaagtgtatttgatcatgattctataaacaaccatcttatattactaatctgtaggagtttttttacatgttggtggtccaagctgaaaaaaataatttaggacaaagctagattgtcttttacatttgtgattggaaggagtaggctttttcattatccagtggcagttatagacagttgttgcgctcgtgcagcttcaaatattttgggatgttgccatgttaaggtattagccttttgttgtttcagtatactagcttcctaaaggatcgatgtcggctatctccaatcagaagaaacgcaccttggaagcccttcagcaacagtatactgctgcaaaagctaagaaattgcaagatgaacaggttaagagtcagaagaagagcaattttaatacccctaagcctaaatttgatgcaccaaggggaagcaaaggtctagtaatcactcctcgacgaacatatgcccagccttctcctcataaagatgtagcattttctagttctaattgtcaacaaaagccttccacgtcctcaggtgaagaaatcaatcctgtgtatgctgaactttcttgtgcttttcatgacactttgtccaaaggatttggatggcacagaggttgttcacaatgttatatatgacataattcagaaaggtggagatgctgggaaaattacaaagggagccaaaaagttgaaactggaaaagggatccttttggatgagggaaatttggatccataccattaaaagatcaccactttggatccataccattactatctcacttacatgtgggtccacatgagtcaatgacatgtggggtccatggtatatatctaaagtttggatcttttaatggtatagatccaattgttcctttggataattatgttcaaaggggttctagattagtggatgaccaagcaagatctttgctaattcattcaaagtgataaaaaggcacatgtctctgaaacaacataagaaatgtggttcatttgatttagatggtacattccacaagtactacctctataagctaatgcatgagatgtggaaggactatatcaaagagcttatggatatgagcccatacgactccacagtatccttttgtctgttattttggacctcttatcttccttttttattttctacatatttttagcggaaataaatccatgtgttatactgaaactcaacaaaataaaagacagtctttgagtgttcttgttatgagcggcagatggctgcgagggttagaggacgatggctagggttagagggcgacagctatggttaggggcgctggggaggtcggccgcagggatttgcccacgaccggcaagagagaagggatttttcttctaatctcttgtttaccttcaattgatacaatcactcttcttatatagtgagggttacttgacccctaagcactagatctaatcttattccaaactaatctatctttatctaaacaaccttgaggggtgtgctacagtgcgccgttactgtagtgggccctcttgggccctgacagttctgctgcttttggtctcaaaattttgactcttgagtcagcggcggagtcgctgtccacccctctgggccgccggctgggctcattggcgaagttcaaaagaaatatttctttatatcaaacaaaaatactataatttgctagctaaattttttgcataatgtgggttgtccagacacctgaaagcttttggctacgctactgtctccacttgaacttttttgtcgtttaatacaaaggcaggagaagctacagatcattgcattaatgagaaagtattttagtggacaaccccacacaagcacaccacccaacatatattgaactgggttctattgagaatgctatagtgataggtggatagtataacgtgatggatttaaacccactatgtctaatgtagcaaatagttaaagggcacggatttccagactttatacaatacaataaaatgagctttcttgtataagctacgtcgagaccactcaaagactctagttttcttgaactgaaatttattgaccatatgaattatgaactaaactaaaaacactaaatcatttgttaccatataagcattatattttatgaaatatcaacgaatttgaagatttgaacaaacaagaaagacaataattaacctgagtgtgaagcaagcgcattcagagtagtggaccaactcgagcttttggaaaactttaatgtaaaccctattattgtgcctgttcctgtaatatgtacccttgagctaattacatgtcctgtcttcaccacaggaaaaataaatttactgagaaccttctttcagcagatcttcatggggcccttctaatagtggcagaacacaaagctgcttcatataaaagtgtaaacggaatcatgattcgagatactgcagagacgtttggaattatatccgaggacaaccgcttccgggtttatcaaaagctggttcagttttcgtacttcaagcagaccgctggaagttcacactgatcggcgacaagctctcgcccagggagaagttgaaggaggatcagcgtcaacaacgtgcgcaatcgctaatcagatagtttccaatgtgccagctgttctctcacaaaatttttgctccacggaatacttgcttttgtttaggtcctgccactgtagcatggtagttttagcgctctagaggcgttgacatttcttagcgacttactggcagctcgagttgtggaggggtgtgtgatcatgagccatgtactccggtgactgattattgattagtataggcgaagcaagtccatttacgtttgtttcatctagtcacacaaacctgtggcaaatatttattacgccttgtttctgtcgcc

SEQ ID NO: 41859 - DNA, 3583 bp, Zea Mays
tggaaataggagaagtggatgtcatgattggtgtctatcaaaccattttgtaccatattagatggctcgcacacacatcgataatttgccaacttctgcataagttcgtagcagcctctgtaacattttggccaaaatgaggatagcttttctcgtgctgttggttctctccctgtttctcctccctaatgggatcggcaaaagcttagccgcaaggccttcggtcgtgaatattgggtcgattcttcggttgaactccaccactggaggtgtttcagatgttgccatccgtgcagcagtggaggatatcaactcagaccccacagttctaaatggaacaacgttacatgttcaaacgagggatacaaactgcgacgacggttttcttggcatggttcaagctttgcagttcatggagactgatgttattgcgatcattgggccacaatgctctcctattgcacatatcatttcgtatgtcgcaaatgagctccaagttcctttgatgtcctttgcatcggatgcaactctgtcatcaatccagttcccgttcttcgtgcggactatgcccagcgatctctaccaaatggcagctgtggcggcagttattgattactaccaatggaagatagtcactgccatatacgttgatgatgattatggccgaaacggcattgctgctttggatgatgaacttactgcaagacgctgcaaaatttcattcaagattgggttccgttccaatgctaaaaaaagtgatcttctgaatctgttggttactgttagtaatatggagtctcgtgttattattctccatactggttcggaacctggactcaagcttctgtcacttgctaatggactaaacatgatgggcaacggctatgtatggattgctactgattggctttctgcttatcttgatgctaattcatcggtatctgctgaaactataaatggcatgcaaggtgttctgactgtacgtccacacacccctaaatcaaaggtgaagagtaatctggtgtccaagtggagcagcttaagcaagaaatacaaccacagcgatctccgcaccagtgcttacggtttttatgtttatgatagtgtgtggactgtagctcgggccctggatgccttctttgatgatggtgggaggatttcctttacaaatgactcaaggctgcgtgacgaaaccgggggaactcttcaccttgaagccatgagtgtttttgacatgggaaacaaattactgaataagattagaaatgtgaacttcactggggtgtctggccaagtgcaatttaatgctcagtttgaactcattcatcctgcctatgatatcataagcataattggcaacggcatgcggaccattggtttttggtcaaactatacaagattgctatcgaccgtccttcctgaagacctatattcgaagcctcctaatacttcgcttgccaaccaacaactctatgatgtcatttggcctggtgagactgcacagaggcctcgaggttgggcttttccttccaatgccaaggagttgaaaattggtgtccctaacagatttagctttaaagactttgttagcaaagataatgctactgggtcaatgaagggctattgcatcgatgtcttcactcaagcattggcattgcttccttatccagttacatacaggtttataccttttggcaatggtactgaaaaccctcattatagccaacttgtgcagatggttgctgacaatgtaagtgtggacatgcattttttccctccacatttcatcatgtatagtagtgataagagtaaacttattctgcaggattttgatgcagcaataggggatatcgtaattacaatgagccgaactaaagctgttgatttcacccagcccttcattgagtcaggcctggttatcttgtctccaataaaaaagcatataacaaattcttgggcattcttgcagccatttacattggggatgtggtgtgttacagggttgtcttttcttgttgtgggtgtggttatttggattcttgagcatcgaataaataatgatttccgcggctcgccgcgacaacaaataataactattgtttggttcagtttttcgactctgttttttgcacatagagaaaacacaatgagtaccttaggacgtggtgttttgctcatatggctatttgttgtattgatcattcaatcaagctacactgcaagtcttacttccatcctaaccgtgcaacagcttgatacatctataagaggacttgatgacctgaaaaatagtgattatcctattggtttccaagttggttcttttgtcgaagaatacatgattaaggaactgaacatctcacagtcgaggctaaaagctcttggttctcctgaagagtatgctgaaaatctcaagctaggtcccaagaaaggaggtgttatggctattgttgatgagcgcccctatgttgagctgtttttgtcaacttactgcaagattgctgttgctggctcagatttcaccagcggtggatggggctttgcatttccaagggactcccctctgcaaatagacctgtccaccgcaatcctgacactgtcggagaacggggagctgcagcggatccatgacaagtggctcaagacaggcgactgctcaacggacaatgctgagttcgtggactcgaaccagctccgcctcgagagcttcatgggcctgttcctcatctgcggcgcggcatgcgtcctcgccctgctcatctacctcggcatcacgatacgccagtacctgagacacgaacagccggaaaaagaaagagaggggtggaaatgggatattccattcctggtacccttccaggcttccacctgtgctttctttatggataacgatgatgatgactatgaggcggccgttgtgggcgcgccattccggaccctacactccagctccactctcccatggcttcctccgccctgccttccagaaccttgcaccgccgcgcgctcccctcgtctacgccgtgccaccctgcgacggagaccttcgcccccggcgccgtctcccggcggcgagcagccgtgcggctcctctccgccgggttcctgaccgccgtcgcgccgccgccgtcgctcgccgcgaggaggggacgcgttgtcgtgccaccggaggactacgccactgcacccgatggtctcaagtactacgatcttgtcgaagggaagggaccaactgctgagaagggctcaaccgtgctggtccacttcgactgcatttaccgtggcatcaccgcggtgtcgagccgtgagtcgaagctcctggcggggaaccggagcatcgcccagccttacgagttcatcgttgggtcgctgcctgggaaagaacgcaagcgggatttcgcggacaacgccaacgggctgtactcggcgcaggcggctccgaagcctccggccgccatgtacaccataaccgaggggatgaaggtggggggaaagaggagagtgattgtccctccagagctggggtatgggaagaggggaatgagtgagataccgcctgacgctcctttgaactggacctcga

SEQ ID NO: 41860 - DNA, 1118 bp, Zea Mays
atgggccgctcttccacatttcggccgacctctgccattggtgccaagctgtgtggccttgtgggtggcctcacggcgctggcgcatttacaggctcttgtaataccccaggtcttactgtgcagctcacctctctctgcccttctcctccagttcgccgtggagctcaccttgggtgttgttcgctggccacctcctgctcatctccccttcatgctcgtctaccgtcaccatacaacgcccgtctgctctgtcctgtggagatcgtcagcgctcagatggccatcgtcgaccatgctgttggtccaagccacgtccatggtcgtcgagcacgacaaccatcatgggctcccctcactcgaatccctgtttgccggcgtcgcttgggtcagcctcgccgtgaacctgctacggtcttccgctcatcccggatctagtcgcgggcaccagcgccctgcacacgcaagctggttgtacctatcttcctcgtcggcgtcctccctcatcagcgccctaccgtccctgctccagccatcggactctagtacccatgccaagccgtcctcctccctcagttcatcggatgtcgatctccgttgcacttgtctccctcagtgtcgcctcgagctctccactgtacgcccagccgtctcaaacctcatcgtcttgcagctcatccgcgacctcactgtcgattggtcgtgagctgttcgcccctgcgcgcgctcactctgccaccgctcagcctttgcaccttgccgagctcatctgcctctcctccaattcgccccatagcgtctcgatccttttcctgcgccagcacgccaagtcactgtcacgagaatttgcctcgctctcgcagcactgttgtgttcatcgttcgctgtgctttggagcaacgtggtcgacctccctgcttactatgctcacatcgccaattgaagagaaaaatctaaaaggttgatagagaagaaagctcatgcgtcgctcgcgatgtgctcgacgtaatggcggaattggaaatcgtagttgtgctcgtggccttcgagacggattaaattattggtacgttaagtgatcacgtaatgcggaagacgagctaagtcgaccccaagatg

SEQ ID NO: 41861 - DNA, 4789 bp, Zea Mays
tgctattgggcctctcaaaggcccgaaaaaacacaggtcaccgtcctctcctctagcgccgcccatccatccagccgtccaacgcctactaccgccgccacccgcctcccgcctctcctctagccccagccgttcagcgccgcccgcctccctcctctcctcctctcctccctcctccagtgccgccacgacgctcgccactagcgccgttcgcctcctccaacgcccgagcaccgcctccctcctccctcctccagcgccgactgcccctaacaccgccctctagctcctctagcagccagcgtcgcttacagccatcaagttccagggcaggagtcaagacagtgaatcacccagctgctctattcgctaaatcatggaagatagtaatgccctgattttgccctgcaaaaggaagaacaaggcgcaagtgaaagccaaggatggtaagaaagccaagaaggaagacccaaagatgagcaagacgaagctcaaaaagctgcaaaaattggaggaggaaaagaaaaagaagctgctacaagctaaaagcatcgaggttttgcagaagcacaagatctcagaggatgcatattcactgcttcatgcttcagggactattggtcaagctgagactttgaaagaaaaacggaggcgtgctgtgcaattctcaaaggctggcctggatgttcctgaagaactctcactgttcaagaaaagcggtggtacgaaagttcctgaaaacagtgatgttggggagcaagtttccccattaaagtttgttgagccagcaccaattgtggattctggtagagaatgtaataacaaaatgaaggatctagtgaaagctattgaatgccaaccgattatgggttttggagctggcattccagagccagaaactgaagagcctagtgatgatgctcatatgttgacaaatcagaaaattcagttgtcaattccaagttgttctggagcagaattagatttgcagggtaaagaactaggacaagggcagcattctgtacaggagtgcataaatcctccaattgttgtacctgtgtcaagactgcatgaagttgagaaggcaaggagggatctcccaataataatgatggagcaagaaataatggaagctatctatgaaaattctgtagtaattctgtgcggagagactggctgcggtaaaactacccaggttccccagttcctatacgaagctggcttcggcactagtgaccgagctgatagaaaagggatgattggtatcacacaaccacggcgcgtagctgttcatgccacagctaagagggtttcctatgagttaggacttaagctgggaagagaagttggttttcaagttaggcatgatagaaaggtaggaagtgaatgctccatcaagttcatgacagatggtattttgctgcgagaaatccagggtgattttctgttgaagcgctattcagtgatcatattggatgaggcacacgaaaggagcttgaacacagatatacttattgggatgctttctagaattataaagattcgcaaggatttgtatgcaaagcagcaggaaaaattacggtctggatttaagatcaaaccagaggataagatcagtcagttaaaggtggtgctcatgagtgctactctgcagttaaaggactttatttcaaatagaaggttgtttggcgtgatcccaccagctgttaaggtacctgtgcggcagtttccagtatcagttcacttctcaaagaggacacatgatgattatttagggctagcttataaaaaggttatgtcaatccacaagaggcttccaccaggtggaatcctcgtatttgtcactggacaacgggaagtggagtacttgtgtaagaaactgcgaagagcatccaaggtgcaaactgctaagaatcctgggaaaactgatggtgaagacaatggtccatgcccaaaagtagatgaaaaggaaatttttgaagcatatgatattgacagagatgaacccgagcaccgatatgacatgttttcctcgtatgatgacgatggtatgtatgatgacgatggtatgaatgttgagacaaatattgattcttctgacaacgaaacggagagcgaaatggatactgaaaccgatgacgaagagtctgttactattgaaactacagaagaggatgttccagtattagcatttttgaaagatgctgagagctcatctgcgttgaaggcatcatttggagctttgtcgggaataccaaatgtgctggaaagtgtcgaggaattaagtgatgctaaatgtgaagaaaagaccagcacttcacttcgttgttttagtaaatgcacagaacataagcctgtttcacatggtagacttcgtgtcttgccactttatgcaaagttatcagcttcacaacagcttcaagtgtttgaagatgtcccagagggggaaagattagttgtggtggcaactaatgttgccgaaacctctctaacaattccaggcataaaatatgtagttgatactggaaaagaaaaggttaagaattatgatcatgctactgggatgtcaagttatgatgtccaatggataagcaaggcatcagcatcccagcgtgctggaagagcaggaagaacagggcctggccactgttaccgtctctactcagctgcagcatatggtaaagatgatttattccctgaattcgctgaacctcagattaagaaaattccagttgaaggtgttgtcctgatgctcaagttcatgtctattgataaggttgagaactttcctttcccaacaccaccaaacaaggaaagtttggttgaagctgagcgttgcttaaagacattggaagcacttcatagtgatggaaaacttacacctatgggcaaggcaatggcacagtaccccatgagcccaagacattctcgtcttcttcttacagtgattaagaatttgaagaataagcagcaaggctttgctagatctaacttcatattaggatatgctgctgctgctgcatcaggtttgaattttactaatccttttctcaagcaattggatgaatgtgacacttatggtgaatcagtagaaaacactaatctggaagctaatggtccatgggaaaggaagagacagaagaagctcaaggctgtggttagagaggcacgggaaaagttttctaaccctagcagtgatgctttaaccatcgctcgtgccctgcagttctttgagttgtcagaaaacccagtggaattctgcagagccaattcacttcatcttaaaaccatggaagagatgtcaaagttgagaaagcagcttctgcagttaatatttcgccatagcaaatggtgcgaggagtttgcttggaattcgggtgactctgctgaggttgaacgggcctggaggaacgagcccagtatattgcagttgaatgaagaggaacttcttgggcaaggaatttgcgctggatgggctgatagagttgcaaggaggattcacacctatttgaaaccatcagaagacgatcgaaaggttcgagccgttcgttatcagtcttgtgcacttgatgatacaatatatctgcaccgatcatcatctgtcgcccaagttgccccagagcttgtagtttactcggagctacttagtacaaagaggctatacatgcacggtgtaacgaccgtaaagccagggtggcttttgaagtatgctagttccctctgcaccttctctgcaccgttggaagatccgaagccgtactatgacccactgaacgaccaagtctactgctacgttagcccggtcttctctcgtcataactggcagcttccgttgcacagtttacctatcaaagacggtgcgagccggctgcaggtgtttgcatgcgcgttgcttaaaggggacgtcctgccatgtctacgggacgccaaggatttcctcgcgctgtcaccatccgctgtgttggggcctgccaggcaacggagagtgggagatcttcttagcaggatgaagatcggtccgaagttagtcgacagcagggcagcactgagaggcgtgtggaattttgatcctggttttctctatcctgagctcaagttgtggtaccaggatagattccatgaccagtttgacttggtgtgggagcagatgcaccaacaggttctccttgaggggcgcaagcttttcccaaagaggtccaagaaagttaaaggctaggccaaaatttttggtgcagttggttggctggcagaagcttttttgtgtgtgtggttttaaggaatagatacgagagatgcagtgagacatcatgcacaagcagttttgtctagacattttgccttgatctggatttgttccattgcatctccgtgttgaactgttgatgtacaccgttcctctgcaagcaaccttcaccctgccatctgtgtcagaaatgttttctgatccaaccatttgctcaaaaccttgaacctgaaaaatatcctgatatccaaccatcgccatggcccatggggattggagggaattggcttcgagtgagggccaggggtaggattcgccagaaacaaacaggggatggtcgtgcgcagattgattacatttctctcctttccgtctctcgctctatttgcttttagcatatgaagtgtccgattccaggggtaaaaacagcggtagagtcgatataaaaatgtagcactaaactatattaccctcagttcaagaaaacaaattacccctctggcatgcttgcatgaactttggtctgcatgtaaaattgaattccag

SEQ ID NO: 41862 - DNA, 388 bp, Zea Mays
ttcagttagaaaaactgttgggagtttggaagacatgattatttctatggtgtttgcatttttagattagtgaaatttatagaaacgttgaagtgtcaagttatttctgtgtgtgctttctcgtcctttggcggtagagtatagtgcttgcttatttggtgcaaacgccatgaagtccctattgagaaggaaatttgtatgggcaatggacattgactcggaattcagattctaggagagcattggcacgttatttgcctctgttaatttcaagaaaaacatgacaggttaatttcaacaatgcacgttattcaccaaaccgcaccttatccagggaacaatggagttattgatggccatagcttggtatggtggcattggttgcgct

SEQ ID NO: 41863 - DNA, 1472 bp, Zea Mays
tatagctacagttcgtggtaaccttatcttctctctcaatggaacacacaccgtgtcgttttagtgttctcatcctccatccgcttgctcctgctctctcaagtcaaagcagttgatacggtggcgcgagcagcaagctcgggaggccagacaccggcgatggccactctggcgacggccgcggcggcgtggacaagggaggaggacaaggcgttcgagaacgcggtcgcggccgccgcggcgcccccggacgacgggccgccggatgatgggtggttcacggcgctcgtggccagtgtgccggcgcggacggcggaggaggtgcggcggcactacgaggcgctggtggaggacgtggccgctatcgaggccggccgcatcccgctcccgcgctatgctggagaggagtcgtccgccgcgacgcccgagggctccggatccgccgcctccgcgcccaaggacgctggaggaggaggaggaggcggtgggcaccgacgcgaagaacggaagagcggcgtcggcgttgacgtggggaagagtagctctaaggctgagcaggagcggcggaagggcatcccgtggacggaagaggagcacaggttgttcttgctgggtctggacaagttcggcaagggcgactggcggagcatctcgcgcaacttcgtcatctcacggacgccgacgcaggtggcgagccacgcgcagaaatacttcatccgtctcaactccatgaaccgggaccggcgccgctccagcatccacgacatcaccagcgtgagcgcgggcgaagtcgccgcggccggcgcacccatcacgggcggcccaaccacggcgggagcgatgccgatgggtcccgcgggcatgaagcaccaccaccaccacccggctccgccgatgggcatgtacgggcacgcgcccatgggccacccggtctcggggcacatggtggcgccggcggccgtcggcacgcccgtcatgttcccgccgggtcatcactcgccctatgtcgtgccagtgggatacccggcgccgccggccaagatgcaccaatgatcgtttacccggcatttgcacatctgcagagctgcatttcgttgcttgttctttcttgattttgttgatcttgtgtagccagagcaatctatccatcctttcctgatctcctggagtgagtgcagggcaggcaggcaggcaggcgatgcgacgaagaataagtatctgctgactgttgcaatagcgctacttgtagtagtcacactgatggaggctccaggaatgttactagtagcagccttccaggttgcggatacttactgatcatttgtgcagagttgcaagttgcacctggggactgatccgattccattgtccgaatgtaaatggattgtctataatattactatctcatctgtttatttaaagaaggaattacacttggcatgttgtaaaaaaaaacttataccatgttatct

SEQ ID NO: 41864 - DNA, 195 bp, Zea Mays
ccagagtgcatctgaagcaacggaaaggtgatgggctggtggccagcacagcagcattcttgcctcgaatgaatgatgattaagctactgagctcttgaatgcaaagaccactaatgttcgaaaatccagctcaaccataatcctctgtttctggccgtgctctagtaaaccaatgtcagcactttgtttccctg

SEQ ID NO: 41865 - DNA, 336 bp, Zea Mays
atggtatggacatgtattgcggtggcagggcggaggggggcaggtaggggcgtcggacggaggcggggcgacgagggtacctgtcgcggtgggggaggcgggcggaggcctcgcgagcgtggtggagaggggcgaggaccaccgcgagagcgtgccgagaccgggcgagcgggcgggatccatgcgcggtggaggcgtgcatcgtgggcgagatccgcgggtgtgttccatgcgcggacacggggaggtggagcacaggcggagggagagacggtgtggggagaagggcgggagatccgcggcaccttccatcggcggcgagaccttccatccgcg

SEQ ID NO: 41866 - DNA, 1691 bp, Zea Mays
tgtcatgaactcctccctgcagtcaaagtttgacttggagaagaaaactcatgagaggcacgcggattaagacccgcaagcggaacattgcagctcctttggaccctgcatcattctctgatgcaattgtccagatttatctggataatggtggagatctggaactcgtcgccaaaagtattgagtcttccgacctcaacttctcacgttacggtgacaccttttttgaggtggtttttgttggaggacgcactcagcctggcactgtaaaacctgaagaaggagaccgccacccttattctatgttagattgtgtggcacagcgtgaaacaattttgcctttcgtactctatatccagaaaacattgcgcaggaggcctttcttaataaaaaatcttgaaaatgttatgcgcaaattcctccaatccttggagttctttgaggaaaatgagaggaagaaactcgccatattcacagcccttgcattttctcaaaagctgtcagggcttcctccggagacagtgttccagccattgctcaaggataatctggttgccaaagggatagtactttcattcataactgagtttttcaaggagtacctgaaggaaaacaccttggatgatttgattgcgcttttgaagaaaggaaaaatggaggacaatctgttggacttttttccatcagctaagagatcctctgaggctttatctgagcatttcatcaaagaaggtctgactagccttgttgagtacaatgaaaagaagatgtttgaagttaaacttaaagagataaagtcaacactgaccactatgatcaatgatgaggctgcaatacctgaagtgattgagactgtcaaacagcaagttaaggatgctaaatttcctgatctagaggtcattcgcatgttgtgggatgtgctcatggaggctgttcagtggtctgggaagaaccagcaacagaattctaatgcagcacttcggcaggtgaaagcatgggctgagcttttgaatgctttttgcacgagtggcagactcgaactggaacttatatacaaagtacagacacagtgctatgaggatgctaagctgatgaagctgtttcctgaaatcataagaacactgtatgaccaagatgtcctagctgaagatactgtcctgctttggttccgtaaaggttcaaaccagaagggcaggcaatctttcgtgaaagctctggagccgtttgtcaaatggctcgaggaggctgaggaggaagaataagtttttgatttggagaacggccgaatgctggcctaagtgttactttatatttctgaagttagaagtttgtggaggaattattgctgctgcctcttactgccgagaactttatgttatgatgtttagccacatggatcccggctgcagagtgctataatatgttgctgttaaaactttgtgtcgagcatttgttgaaacttttgttatcattactgaaaggatttataatgggacgtcagtttactgtcggtattgtacaattactggattattcataagctgcagaatgctacaaatgtcatttctggcaaatggaatattgaaatgttacgaatgtaaggactctccctgtctgccgtaatttagagcagcctaagtagggctcctttggaatccataggattctcaaaacgtaggattagaaaaaac

SEQ ID NO: 41867 - DNA, 342 bp, Zea Mays
gttccctgttattccgcaacaaaacaagtaaacattgatcccaagattttcaaactctggccttctatcactaatggatcggcgtcaatcgttcactctataacagtctaatcggaggataccgcaacattagtctcagccaagaaaaccccgaaccctggtccaccatcactaccagcccaacatcaaccgtccactctgtaacggcccaaccggatgcacaggacatcgtaacccgagagcggatggagcactacgagaattttttttaaccaaccccgaaaaattagcccgaggggaatcgaacccgaggcttagagatgctacttgtaagccttaacc

SEQ ID NO: 41868 - DNA, 946 bp, Zea Mays
cggtgatgtgatcacttactggaggttgtttggtgctgtgaatgacatcttctgcttgttccaagggcatattgagaacattgccaacctgaagcagcattatggcctgagcaagactgcaaatgaggtgactatcctcatagaggcctacaggaccctgagggacaggggccctgtcccagccagccaggttgtgagagaccttagtgggaagttcgcgttcatcctgtatgacaccctgtcgaagtctacctttgttgctgctgacgctgatggtagcatccctttcttctggggcgttgactacgaaaaccaccttgtgttctctgacgatgttgggatcctcaagacaggctgcggcaactcgtacgctccatttcctaaaggttgcttctacaccacctccggtgggctgcagagcttcgagcacccgttgcacgaggtcaaggcggtgccacgcgtggacagccaaggccagatgtgcggctccatcttcaaggtcgacagcgagagcaagaagaagcaggacgctagcatcccccgcgtcggcagtgctgccgactggtccaaccagttctgaccatcttcttgccatccattgtcccggctagtacgaggtgcagagctgtgtatctgatgaatccatgagacgatttctgctacgtttcttgcacgcttgtcgaacactgtgagactcacatcgcgctcatctacgctacgtgtaactgatactaatgatacggagtgttccaggtggtggtagatgtactgcagaatctatctcccatgtttcaataaacctgaataaggtgctcggtttggatctatgcatttatgattctagtacttctgaatcgaattttatcgcatcctttcctttttcttcttgttctcctgttctgcatttcagttctgtctggcggacggttacccgttaccgtggtag

SEQ ID NO: 41869 - DNA, 3899 bp, Zea Mays
cccatagaggtatggcattgtagccgacggacgaccgacgcgcaccccccgccatgctctccagccgaagatgcttcgcggcggcggccaaccgggtccggccgctcgccagggccttctgcgacgcgccggcctcgcgcgcggatgcgggggcctccgggacgcccagcccgcaggatcacgccgagaaggttgctgccctgaaggatccgcccgatgtgctagacgttgctatcgttggtggaggcatggtgggcttggctgtcgcttgtgcattgtcaaatatgccgttaacgaaacaccttagagtcgctattatcgatagcaatccagcgctgaagtcaaggagttacctggataaaaacagtatacccgattctagggtcagcaccgttacccctgcaaccatttctttcttcaagggtatgattctgaatcaactatgtgtatcatcgattcatcgtatttaattttagttgtatttcatcttgattcttgcaacggtatttggatttatgtttgagcttgtatgttcaggtggcatttcgtctagatgacctttcatgttgtttccacagatatttacacattttgtttgatcaactataccatgtgaccacattggatgtacataaaaagcagttcaatcatcattagttagcgtttggttcaaagttcgagcttgccatggtgtactagccctggagtcctgaacccagctgtcactcatggttgcaaaggcgactaggcatccaggctagagcttggtgtgccttgacacctaggcgataaggccccattgttccccaaggcgagctgggtatgcctaggtggcgcctttgaaaccgggttgacactcacccattttcttttcatagcttgcacaagtttgccgaaccgatttggctgccacagatggctccccaaatgaaatacagtaaagcatttctttcataatctccacgttccaaatcacagtttactttagctttggtctaagtcaaattttactaactttgacctagttctttaggaaaatatactaacatccatgatatcaaataaatatactattaataaatgtttaatagaaatttagtgtaactattttgatgttctagatttgatgattttttctataaacttcatcaatgttactccatccagtgttttcttagtttcctatccagtgggacatattatggtgatatgtcggaaatcagttagaaacaagcatgtcaatatatatggttctgacaaccactctttaatttatccaaccttcttcaaagtttatcacaacaaatgccaaattttccattattgtgttgttctttgattgtttctgtttcattgtggcagtggcaacactgccaattttctttcaggtcaccagtttagactttcagctgtgtgtacatttattttgacagaggtaaacctggctttcataaaaagcttagaatgttacagataagcaactgctagggattctagcttagagataagcaacacaactaacaacagagaacagagttacagaaaagctaagaaaggggatacagcagaaagcctaaaccacaagctcctcaactgagtccacctcaaaacaaaactaaaaagcctaacgactggcgactccctccacctctagatcttcagttttcttccaaaatgcctgcaaccaactctttgttcttccaaaatgtctcagaagaattcgtcatttctgcaagaacactatgatctgtggtttcatttttttagttgtgtgtacatttcactactgtaactgtaacaatcacaaattaccatctgttgttaaattttctgcactttgtgcacattggaaatacaaaaataaatgtctattttcaccaagtataatttaaaaatgatacttttccatgttttaatgtgcatggcttgttttgctaccggagacaatagtgcattattggtaatgttcttcgtgagtgtgtgtgcattattgtggcagatattggcgcctgggagcatgttcaacagcaaagacatgctttctttggtaaaatgcaggtgtgggattacactggacttggatacacgaggtataatgctagagatgtgggcaaagaacaccttggatgtgtggtggagaacaaggtgctttgcaactcactgctcttacgtttacaggaagaattggatgatattgaaaatgtgatatatcctaccagattggtgtctcttactttcccgttgaagaccagacaagcaggaatgaaaccaacatcaagagaaccattatctgttggtcatactacagaagagttccatcgcagtcatttagttaaacttgatctcagtgatggacggagtttatattccaaattggtgataggagctgatggttcgaagtccaatgttagacagattgcaggcataaaaacaactagttggaattatccgcagagtgcaattatctgtacagtagagcatgttgtggaaaatgattgtgcgtggcagaggtttctcccttctggtccaattgcgctacttccgataggcaataacttcagcaacattgtatggacaatgagtccagaggagtcactgcgccataagtcaatgagcccagaagagtttgtgaattctgtgaaccacgcattggattttggttatggtccgcatccacactctaccgctcttgaccattacatggaacagttcttttctggcattgggagcagtgcagcatctacaaaggaatgcttcgaagtgccaccgaaagcaacccgtgtagtttctgagagaatggcgtttccattgtcgttgatgcattcccatgattatgtttccaaaaggttagcattagttggagatgctgctcatactgtccaccccttagccggccaaggtgtaaacttgggctttggtgatgctgctgctttagcaaaagttattgctgagggagtttcagtgggctcggatgttggggatctgactttgctacagcggtatgagaaggagaggaaggctgccaatgtggcgatggcagcagtgctagatggttttcagaagatgtactctgttgatttggggccccttaatgtagtgagagctgctgcgttccacggtgcccagtacatatcaccactaaaaaagaacatcatctcttatgcaacgggtgacacgaaatggtcactatttcagtgaacagcactgctttgaaactcttgtcctcacctcgttctttgtttcggcatgtactggaaacaaagaacgcaatcagtaatttcgttcgaaagacatcctcatttgggctgtttggttactgggacacgtcaagcgcccgtctcgcgctagcctggatccctgggaacgtagctcttctgcgtttctgctcgtacaggccagcgaccaaaaaaagctctatactgcatgcgcgggtgcaagcagtcgtcatgcactacagtcatccaaacacgagctcagcatggtcaacgtgacgccgtgggcctagacgccaccagccaatcaaccaatcatgcgaattgtgttgctttcgatcttagtgttaatttgagcgcccgaggcccgacctagtttgtgaggttagtctctttccgtgctcactttgtatttgtactagctagagatataatactcagcgcgttgctacgtgagttgagttgctgacgatttaaataaaagtagactatatacaattatcagtacgaaggagtaaactattccctgtgccctaaaatataatttgttttagactaaacacatatgtaatttgtatgtaagtctacaatcattattatgattcattcgcactataaattaatattaatggactctggcatgttgacgtggacagcaaaatgctttgttcttttttttttaatttc

SEQ ID NO: 41870 - DNA, 942 bp, Zea Mays
tatatattttgtatatatatgcttcttgtgagcagtgttaattgattttattttatgttgcagttgagattccccaggaaattggtacacttgcgaacatgcaaaggctttgggttcactgtcaaaccttcagcaactttctgttcctcaaaattttttactgtgcctgcctaagagcataggagatttgcgcaatatgtcagtactcaatgtatctgataacaaactaaaggaacttccagaatcaattggaggttgcagttccctggaagaatttcaagccaatggaaatgctattgaagatgtgccagcgtcaatttgcaacctagtttgcctgaaatccttatcactgaacggcaacaaaattcgacagcttccacaaaacttactgaaagactgcacggctcttcagagtttatccctgcacgacaacccaatcacaatggaccagttccaacaaatggatggatttggagagtttgaggcgcgcagaaggaagaaattcgacaagcagattgattcaggggtcatgatgggctcgacggccctggatgaaggggttgatttccactgattttagaactcgagtgtctcccattctttctagttggtcaggagtcaggaccgattgtagatttgtagatatcagtctcaacctacaaaacagggttcaccaaaccggttgtaaggtgaaaaccggcgcccagtgaaaactggtaaaaactggccgaaatcaaaatcaccccacttttcaatttgaaacggtttgaaaccgataaatcggctcattaatcggctcctaggctgattaaccggcgtcatagaagcagaaaccgatccatatgtatttttgcaaataaagcacattgagatctcataatttgaataaaagatgaccacaaatattatcacaagtctaatgacaacatttagtagttcaaa

SEQ ID NO: 41871 - DNA, 4443 bp, Zea Mays
ctctctcacatgtctcattcctgcccacacgcttctctctctcaccagcgccaggctgcgccgcctccgccccaccgcctacaggccgcgccgcctccgccccaccgcctgcaggccgcgccgcctccgccccaccgcctgcaggccgcgccgccgccccggctcggcaccgacagcaggccacgccgccgccgtgccaccgccccggctcgcgccaccgccctggctcggcaccaccgccccggctcggcaccgacagcgggtcgcgccgccgcccctgctcgccaaccccagcggttcaaacattagctcgttttcactgctactgcattgggttctgcatagttcttccttggttgtttgatgtaaaccacagctggggagcttagctgtatagaactgatttcacgtgtttgttgacgagtttagctgcataggtaccgatgagtttgtcctgaacagaaattttatttggattcagttcggtgagctcttaattgtgtcctacccacatccctctgcatccctctgcagggtgcaagaactgtgctaacgtgtgttctaaggtcttccaaatcgaggatgatttcggacgggcaagagtttacgaccaatcaggcagcacagaactgattcaagaagctattgacagttggtgaggatggggaaaaatgtttatctttttttcgttaatttaccaatgatcctagtatccctactgaaaatttggtataacgtgggccaaacaaacatttcttttggtttcaagtcatgtattttgactaccttttctgatgttctgataagttctcgtttttgtaatgcacagagtagagagagtaaatgtatgattatgttgactgtaagattattttgactaccatgttacattcttctttgatcatttttgtttgaatgtaggcaaaggtgaaatgcttgtctggtttgctgtccaccagaattgtgctgaaccttagttcataatgatagtgccatttgtattgcatatgctttcacacactttcacttcatagcaatgccatttaacacaactgatgtcgtatagctgagccatcctacaaatttatttatctttatgcacattgggtatgctttcttcaacacagaagaatctgcctggcttaggcaagtgctccctgattttggatgcttgggaggttttaaagtcgagcgactagtaatgactagtcgagaagtagatgcagaggtgatagtcaatatgagcgacttgactttctctactagtcgctcgactcgtcgactagtcacaactagtcgtagcatttgagttaggcgactagtcacaacacagaagaatctctgcagtaatccaagtttatcttactattttaacttagttgcattgcatttcttcgggtctacacatacaggtatcagtcttgcttgcttggatcttttcaaactgtggaactaattgaaacatttatgaactatcaggtacggggcagatagataagcttggttttttatccatccttttcgctgatatcagatacttcccgagcctaaaaaaaactaccatccctttccattttacattttcctctactatgttatgtcatgactgcattagtggtttaatctgttacctaagtataaaaatagcaacctgccaaatagtcgaatggttcaggaaagaagactttatgttgagtccacgagtgatgcatttatatttgcaatgttgtttgttttatctgtctctaggtttcaattttttttgggtgggggttcaaattaattgtggtttcacacatttttctaatgccatgtttgaacagatctcatgtatattggatttgtgttccagctccaaatacttgtcaagaacagaaatcactgcaataagttgtgagtagtaaaaaaagggacaatgcttaagttgcatgaaaactagatgagtataggtgaagcaatgcatgtgttagatgctactagttgctatgctaacctcttgaaatagatttcaatggggtcacctttttgggagtttctttttctttgtttacctaaatacctagtagatataattctttatggttgactgtagcctcattgtttttgactagtagattaagatgtatgatccagcatgtttctgcatctaaacatttgtatcatttcaagtgattgaacaatcgtagctttattgcttatttcagtatgtggtgcttctctgatgatagcatcgaaatattgatgaggcaatcacttcctgaagttgatatgttatatcatcaacacttcttccaaagtcaaactagccacggctttctaacctcttgtaatatgttttctgccttctcaggcaagttcacgctgggagaaaagacaagccaaagtcctggagaaggtaagaaggcggatgagccaagatgattccagaaagggtggctcatggagtgacatctggggagcaccaacaagatacgagaagaacggtacatcccattactaaaggagacatttatgttcccacaaagcttgggcattttaggtggaaaacctggtacatcaacacacattgctggggtacaggatgatagggctctctacctagatccccatgaagtttagatgatctttctgagtgtacagtttatttggaggggagaaggataaagatgagaatggcgatgaagcgccatcgaaagtattggcaaatattaagtggcctgaaacactcgagactgattttatctacagtgctttatcatttgggacttcaattaatccacagttcattgcaagctttgcttctgctgctggtaaacgtcctcatcaagatttcgactctcaagaatctgatccagaggcaattcttaactgtttgctgaagcttactgtattctagaaaatcactggaatatgtatatcttttcttgatggacataaccacttaagtgttccttaattttcgtagtggggttggtggatagcaaaccatgagctgaagaagccatcaattagtctgttgtttccaacaatcatcctcctcagtcgccgccatcaacagcagcagcagcgatgctaaatagtagtggtggatctggttctaactactctggtggcgagatcctacctccaccatttttttatctttattatctgtgattctgcaatccacatgtttgattttttacttagtttctctttgagaccggtcgccatgtttggttagcacatctagaatgcattacaattggaggcaatagctgttcactatccactataacctgaaagcttagctgttcaactgagctttctgattcttccatttttttccattcaagtatatgatattcttgtgtgctattcaatattacaaataacaaatttgcatatgagaataattaagtaaatttggccacctaatcagtaggattgtttggttggaggaatttttgtagcatgtgaaacttgagctaattagaaagcaaccactaccttctcttcagcatgaaaaaatagcttagccatttcttagagttaagcccttagccacttgctggccttatcgtctggaagaagaaatggtactcaactgctggtctctttggcaaatttttctttgcacttttcttgttcgaactggcaatccacaaccaagtaccttgcttgcaccaacaaaagtcccttctactgtagggcaatccatggatttattgcttgtcctgaaatttgatagaggcattcatgatatcagttgctcgttaattccatttgtttcttgttctcttgtgcattgttatgacatatttgcaccttttgcggggaacgatcgaccaacaatggagtggcccactagattaaagatcgctctgtgtgctgccaagggtttagctcatcttcatgaagactgtcatccaaagatcatccaccgcgacattaaggcatctaacattcttcttgacttcaaatttgaatataaggttgctgactttggacttgcaaagttcactactaataataacacccatgtttcaacaagagtaatgggcacctttgggtatttggcacctgagtatgcagcgtctggcaagctcacagaaaaatttgatgtattttctttcggagtcatgcttcttgagcttattactgggcggcgaccaattgacacaacccaattggcactgcttgctataagcacatatgtacttccatttgcatgttgtataatactaataccaattgcaaaattatagttattttttctacccttgttagttaataagcatatttctggtcaataggttgtattcttattcttgtaaccgtgttaattaatgttatggacttgtagtcttgtattaccttgtgaatatatctgtccctgcctgccatgtgaacgtgcttagcctggaatttgtgatatgtacatatatcaatgtgtttgaaatc

SEQ ID NO: 41872 - DNA, 2080 bp, Zea Mays
ccgtcgctatcgaccccatcgcgttgccggatcgagctcagctctatctcgaaccttggttcgccgcacggcaccagaagcacggccgtgttctcatcccctccacacgtttccgcctcccgatccacgtccgccgttagccgcggccgacacagctcctcctcctcctcgcagctcttctccagctctcggaggcccgaggtttcatcgacccgcgctccttcatcctcgacacctcactccggcggcgcgggtccgcagtgctgcacatcgcgagccgcgcggcacagccgcacttgttgtccttcgtgcgtggggtgcggttcgacgcggcggcgggatggcggcgagcgcgcgggacagcgccgatgcagcggagcgagttgtggatgaccacgacggctgggcgtcggacgccgagatggacgtggagatggatgtggtggaaggcgatgccgaccggagggacggcggcgcggatggtgatgatgaatacttgctgctcactaggataagggacacgtcagcagctgaagcaagggcaggaaaggatatacaaggtataccatgggagaggatacacatagccaggcaagattaccgaaaagctaggttggaacagtataagaactatgaaaatttccctcaatcaggagagctcatggataagttgtgcaagcaagtggagaagagcagcaagtattatgaatttcagcacaacactagatcagtgaagccatcaattctccattttcagtaagccactggtcatcattgtctcacaaattatcagaggttcttgacttctctgggcatgttgctccagcggagaagtatcctggcagtttactagaaggtttctctggtgttcaagttagcacacttgctgtgaatgagggtttggtggtagctggcggttttcaaggagaactaattggcaaagatgtggaaggctgtagtgtaaaattctgtatgaggacaactttgagtgacaatgccataacaaatgccatagatatacacagatcgataagtggaagcctgcacattacagtatctaacaacgattgtggtgttcgtgaatatgatatggagagatatcagctcgtgaaccactaccgatataactggccggttaatcacacatccgtgagcccagataagaaacttttggctgtggttggagatgatcgagatgctcttcttgtggattcacgaaatggaaaggtaacctctaccctagttggccatctggactactcatttgctacggcatggcacccggacagccggacattcgcgaccgggaaccaggacaaaacctgccgcatctgggacacccgcaacttgtcgacctcacttgcagtactgcggggcaacatcggcgcgatccggtgcatccgctactcctccgacgggcggttcctggtgttctcggagcctgccgacttcgtccatgtgtacagtgtggctgcggactacaagaaacggcaggagatcgacttctttggtgaggtgtccgggatcacgctcagcccggacgacgagtccctgttcatcggagtgtgcgaccgcgtctatgccagcctgttgcagtacaggatgatccgcggattcgactatcttgactcatacgtgtgaagaactgagctttggtgaccggtgttgtgctaggtgctggctgaaggttctgatgcgcggttcagggaatatatctgcctgctcttagttcatggcgaatgatggttcggtgggactcgacgccagcgaatctgccgtgtaaatagtttagaatttgaagcgtagtgtagtgctgtggaccaatgctgtctctgaacatacatatgatcagagtaatgtgtgtttgcgctgttagtttcagactccggaatacaaatagttttggaccaaattcctaaagcctgtttgtactgtggaacacatgaaagggctagtttgtattcacttcgatatatgtgttgttattattgagttccctggacagtgtttcaaatttaaacatcgtatttttagatgcataataaaaacatgtatgcagatataacatgtatatttgtta

SEQ ID NO: 41873 - DNA, 648 bp, Zea Mays
cgcagatgcatgcaggggtagacatctcacctccgcgacaaactaccataaggtgaacgtggcgtggctccctcctcgatggcgagagggcgaaggcgtcgacgagctcgatgatggcgaggcttggatgcacgacgaaggtgatgcgcatgctcaccgcgtctctcctcctgatgacgacggccgtgcatggtggggcatggtcggcgtgccgatggcgaggctgtgcaactcctccacgcaatgatcgggcgcgtgtagggacgcgtcggtgaggcatccacgctggcgagccgcgtcagaccgccacgctgagctggccgcaccggctggccgcgccgggctgccgcgctggctgctcgccgcgggccgcgccggctggacgccgggacctagggctggggcgggatgaggcaggggtagacgcgctgcgcgggtggccggagctgggtgagaggagcgcgttgggcgagatcttaggggcggtttccgtttcctgtgcgtgcacgaacgagtaggagccggatcgagtggagtcagtttttttgaagaggaaacatatgacaagtgggcccagcatgcagagcaagagcggtgtccaggccagagacgcggtcaggtgcggcggtggctgggcgaacgagcgac

SEQ ID NO: 41874 - DNA, 280 bp, Zea Mays
ttgcctctttttgctacccacgccgagcacacaggaaacaagcaagcaagcagccgcctgtccaaactgagacaaattcagtcaactggcaattcttcagttacctacaactgaacttacaccaccgaactgaacttgtatctcgactaccacctaatcccatgatttcaattggtatcgtgggatcaaccttaatgaactttgttcaccaactaaccctctaacaatgttccatggggaccttagtcttataccccttggatcatacacaaaacagctc

SEQ ID NO: 41875 - DNA, 1483 bp, Zea Mays
catgtgtgcagaaactgcctaggataggggagtgtataaagatcaaagaagatggcagctgtcgacacattcctcttcacctcggagtctgtgaacgagggacaccctgacaagctctgtgaccaggtctcagatgccgttcttgacgcttgccttgctgaggaccctgacagcaaggttgcttgtgagacctgcaccaagaccaacatggtcatggtctttggtgagatcaccaccaaggccaatgttgactacgagaagattgtcagggagacctgccgcaacattggttttgtgtcaaacgatgttgggcttgacgccgaccactgcaaggtgctcgtgaacattgagcagcagtcccctgatattgctcagggtgtgcatggccacttcaccaagcgccccgaggagattggagctggtgaccagggacacatgttcgggtatgcgaccgatgagacccctgagttgatgcccctcagccatgtccttgccaccaagctaggtgctcgtctcaccgaggtccgcaagaacggaacctgcccctggctcaggcctgatgggaagacccaggtgacagtcgagtaccgcaatgagggtggtgccatggtccccatccgtgtccacaccgtcctcatctccacccagcacgacgagacagtgaccaatgatgagatcgctgctgacctgaaggagcatgtcatcaagcctgtcatccctgagcagtaccttgacgagaagaccatcttccaccttaacccatctggccgctttgtcattggtggacctcacggcgatgctggcctcactggccgcaagatcatcattgacacctacggtggctggggagcccatggtggtggcgctttctccggcaaggacccaaccaaggttgaccgcagcggagcctatgtcgcaaggcaggctgccaagagcatcgtcgccagcggccttgctcgccgcgccatcgtccaggtgtcttacgccatcggcgtgcccgagcctctctccgtgttcgtcgacacaacttcgatttcaggcctggcatgatcatcatcaaccttgacctcaagaaaggcggcaacgggcgctacctcaagacggcggcctacggccactttggaagggacgaccctgacttcacctgggaggtggtgaagccactcaagtcggagaaaccttctgcctaaggcggcctttttttcagtaagaagcttttggtggtctgctgtgcttaatcatgcttttatatggcttctacatgttgtggttctttcttgatctgcaccgcgcttatcgtttgtgttgtactgccctaataagtggtgcttatgaggactgtttctggttttgctgcttatgttgtaatgctttgaaacaatgaaagaagctacaggccacagctattttgagaagtaatggaacctcgtgccgttttgattatatcgcaatgctgtgcttgtcttctggtaagaccgatcgc

SEQ ID NO: 41876 - DNA, 434 bp, Zea Mays
cacagaatgctctactagttggtcagataggcagattgagtcgcgagatggtagtaatcaccactctgtgcaagaaaagattgagatggtcaccataatgggtaatatagattacacactttgttttgagaaactcactaagcccacagtgggctcaccataatatgaccataagatgctacagtataacatcaataaggtcaagtgggaaagatacgtaaagtgtttggtcataattaagagcctcatcaagtaccctattaagagtgttattccagagtgtgagatagccaagaagtaccttaagaagatagcttctcatttcactaggtcctctaaggcttatgcacgttccttgatgatggagtttctcaatgttacgtacgatggaagtggtgtaaagctatttattcagaacatgatttgcattgtta

SEQ ID NO: 41877 - DNA, 783 bp, Zea Mays
ccaccgaccagcccacaggaaagtgggaccccggcgcgctgaaacgaaaccacgggagctgacgggattggactccgcccacggcccacccacagaagcacacatgaccgtgtgctatttttagacgacggatggctatcatgccagccagtacaactccaaacaaactcccgtcgtggcgtctcaccgtttccaggatacgaacatgaggtcggccaccctgcttacgatctgcaccttgtccgcgctgctgctggtggcgcgcggctcggagaagccatcggccgcgccgccgccggtggtggccgtgggcgtggcggcagccagcgacctcatccgctccggcggtcaccgctacctggacgtcagcattacatttgctttggagtcctctctccgcccttcgtctaattaaactaacagaggaggaattcaggagtgggcatgtggaggattcactcaacgtgccctatcttttcttcacttcacaaggaagggagaagaaccccaagttcatcgcacaggtcgcagcgggtttcgacaaagaggacaacatagttgtgcggagtgaggtctgaattagcatgtgctgatctcatggcagctggatttagaaatgtgaagaacatagaaggtggttataccgcatgggtggaaagtggtcttgccgtgaagaaatctcaagcacaagatgaactatgatgtgccctatcctgttggttcttccttgctttgacgacaaccttcgaagaaaataacaataagtgccaaaacggattctcg

SEQ ID NO: 41878 - DNA, 249 bp, Zea Mays
tagactaatgattctaagtttgttagtcttctaagtttgttagtcttctggtattgaacgttagctaagggaagtagtatgtgggtatagcttatcgttttttgtgatgttgtaactagatctagttaaactggaagaatgcgattgttatgtgtttagtttattgttttgtgatgtatgagctaccttcgaataggctggaaaagcgtaattattatagttagtcgtatagcgacagctagcgtttct

SEQ ID NO: 41879 - DNA, 3268 bp, Zea Mays
ggccgatcaagtagttccaagcagtcaaatccgatggtagtagccgcttcgggcatgtcctcacaagcctcccaaagcccggtggtggagagtacgggaagtactatagcttaccagccctgaatgatcgtaggatagaaagattgccatactctatccggtatctactggagtcagccatccgcaactgtgacggttttcagattacagagaaggatgtcgaaaatatcattgactgggagaataccgctcccaagctagtggagatacccttcaagcctgcccgtgtgcttctgcaggattttaccggtgtcccagctatcgttgatcttgcaagcatgcgtgatgctatggcccgactgggtgatgatcctggaaagattgatcccctgattccagtggatctagtcattgatcattcggtacaagctgatgtggtaagatcagagaatgccctccaagctaatatgcagcgcgaattcgataggaacaaggagcgcttcgctttccttcggtggggctctgtggcattcaataatatgcttattgttccaccaggttcaggaattgttcatcaggtgaatcttgaatatcttggacgagttgttttcaataccgatggcattttatatcttgatagcgtgctgggaacagattctcacactactatgattgatggaatgggggttgcaggctggggtgttgggggaattgaagcagaagcaacaatgcttggtcagccaatgagcatggtcttgcccagtgtagttggatttaaactgtcagggaaattgcgtgatggtgttactgcaaccgatctagtattgacagtgacacatattcttaggaagcatggtgttgttggcaaatttgttgagttttatggcgagggaatgagtgagttagcagttgctaacagggcaacaattgctaacatgtcaccagaatacggtgcaacaatgggcttcttccctgttgatcatgtgacccttggatacctgaagctgacagggagaagtgatgaaaaggttgagatggtggaggcatatcttcgagctaacaatatgtttgttgattacaacgaggttagcatcgttgtcactatctctgataccaaaggaaacatatgtctaatacagaactgtagtttcagactcaaacagaaagagtttactcatcttatctagagttagatttagcagacgttgaaccatgtgtttcaggcccgaaaagacctcatgaccatgttgctctgaaagatatgaaatcagactggcattcctgtctcggtaataaagttggttttaagggctttggtgtacctaaagagcaacatgataaattcgtcaagttcaccttccatggacaacctgcagagattagacatggtagcattgtgattgctgccataacaagttgcacaaacacatcaaatccaagtgtcatgcttggcgctggccttgttgcaaagaaggcgtgtgagcttggccttgaggttaatccatggattaaaactagtcttgcgccaggatccggggcagtgaccaaatatctgctgaaaagtggcttgcaaaagtatttagatcatctaggtttcaacttaattggatatggttgcacaacatgcattggtaactcgggcgagcttgatgaagatgttgctaaggcagttaccgacaacgatatcattgcggctgcagtactctccggtaacaggaacttcgaagggcgaattcatgcattggttcgggccaattatcttgcctcccctcctctggttgtggcctatgcccttgctggcactgtttatattgattttgagacggaaccaattgggaaaggaaaagatggaacggatgtgtactttaaggacatatggccatcaaatgaagaaattgcagaggttgagcaatcaagtgtgctgcctgacatgttcaggagcacctatgaagcaatcacgcagggcaacccaatgtggaaccagctgtcagttccaaaggcagaccgcttcccatgggaccccagttccacctacattcatgatcctccattcttcaaggatattacaccgactccgccaggtccatgcagcatagagaatgcctattgcctgctgaagtttggtgacagcatcacgaccgaccacatctcaccagctgggagcatccccagggacagccctgctggcaagtacctgcttgagcgtggtgtgcagccaaaggatttcaattcttatggaagccgtcggggcaacgatgaagtgatggcacgaggaacctttgcaaatatcaggattgtgaataggctgttaaatggagaagttggaccgaagacgattcacgtccctacaaacgagaagcttttcgtgttcgatgctgcaatgagatacaaagctgatgggcatcacaccatagtgttggctggagaggaatatggcagtggaagttctcgggattgggctgccaaggggccaatgttactggtatatgcatatcatacagctgtcgttttcttcgcttgctaccagaaattcgcaagaatcttttgacaaaaccatgtcatcagggggtcaaagcagtaattgccaagagtttcgagaggatccaccgcagcaaccttgtaggaatgggagtgttaccgctgtgtttcaaacctggtgaggatgctgattctctggggctcaccggtcatgagcgctacacgataaggctccctaccaatgtgagcgagatacaaccgggccaagatgtccaggtgctcagtgacactgggaagtcattcacctgcaagctccggattgatacaatggtggagctggcttacttcgatcatggcgggatccttcactacgttttgaggaacctggtgaggcagcaacagcagtaaaacgctaaaaccgcatgcaaacatgtgaatatcttgtctgtttcgaaaaaggctatgataagaataaaattggactcaagaagaagccgatgtaaatgtccatgagatgagctgtggtgttttgtatagtaccctttttatgtgataataaaggtgcatttgtgtcatgtacgggcacaagtataggcgccgtcgtgacatcagacgcgcagctgagcgcgctgctcacgctacacaggatggcgccaccattagtggctgagatttcaaaatttaaacagcagattagtttccatttttcctaaatcaatagtttccttgctatgcctaaattataggagcagattagtttccctttttccccaaatcaatagtttccttt

SEQ ID NO: 41880 - DNA, 290 bp, Zea Mays
aaattctggacagcccccctctatccaatcgcaaacgcaacatctaatcaattgaatcgcagcgcaaatgaacaagggatgaacacaaaagaaaaaatcaccttgggttctccccttttccttcctcccttcatccctccaccaaaacgattggagattcgcaccaagagacgatgattcgagcggcacggagtagcacctagggaggaggggattggggggggcggctagggttttggtggctgcaacaatggagagaggaggaggtgggcagggggggcggccaaggg

SEQ ID NO: 41881 - DNA, 451 bp, Zea Mays
tggcgaacaaaatatgagtgaagattataccaaagacggagagtgacgcggagcgacggcgaaggatgagtgattcaatggagtggagtggaagcctttgtcttcgtcgaagactccaattccctttcaatctatgacttggtttgaaatacacttgaaaacatattagtcatagcatataaaagagatatgatcaaagatatattaatgagctatgtgtgcaagacatcaaaagaaattccgagaatcaagaatatgtagctcatgcctaagtttgttgaagtttgttcatctagtggcttggtaaagatatcgggtaattgttctttggtgttaatatatgcaatctcgatatcccccttttgttggtgatccctcagaaaatgatatcgaatggctatgtgtttagtgcggctatgttcaatgggattatccaccatgcggattgcac

SEQ ID NO: 41882 - DNA, 1478 bp, Zea Mays
aggacagcaaaaacccaggcaatggggaattcgccactgagaatcgagcgaagccatggattatggtgaagaccgccgtcgttgggatcacttcacatcggcgctcgagaactagctagtggtcgaggaagactgctagggcactaggaacctgggcgtggcttcctcaggcgcggtggtggattggtgcgctggaatttctcgtcgactatcgtactccgcatggagccgctttcctccataggccacacttggacacctttacctctgtgaggtcgcgagaatctgaagatcatccttgtacctgagaatctcaagtctaaggcaagttgtgcccttggtcacttttctttacccaataatgttccggttaatcaatgtgacatgcacaggttaatctaatgggacctaataggtttccctagacttgtttatcccacaccttgtatgccactgaacttttgggtagttttgctattgctctacctggttttgggattaatattacattatgatcatgttccaattatagtgttttttaattattgttcatgacaagatcattgtgttaattggaacatggagcttaacttgagaaacacgtgctaccacaagggtggaatgggacacccttggctgactaattaggaaagctagtggaggactaccttacccgaaaggggcaagggcactaggggagttacatatagggaggttctcaggtcgatcatgctgcgatggcttttcggacgagggattccaataccctttctagaaactgtagcgggtttcctaaagctagtggaactttgtaaaggcctcgtagtggatccctagccattcacctcgaaagtgtctaagggtctagctaaccctagctagatgggatacacgacttgtggggtaaagggtgcaacctctgcagtgtaaaactggtatattagccgtgctcgcggtcatgagcagctcaggactctcgcataattaatttatggaactaaatttaatctatcatatgcattgcatcgcgagtgttgttatcaatttgatctcatactttttggtttggtatctacttagtaactgctaatacaattttgaccaactttaaaagcaatgttcagctgtaaccatctcctttggtaagccttacacttcacatgagctcctacctttggtgagttcatgctcattattccccacaacttgttgagcgatgaacgtatgtgagctcacctttgctgtactcacatccccaggtccaagaacaggtaccacaagatgaggcgcatgaaggatgccgtgacgagttcgtgagtggtctaggccatcgtctcctagtcaactttggttgctggatcgatgtctgcgtatgatgtaattatttatttaatttgtacagaactcctattgtatagtaaatatgtggcattcatttctataccatgagtaatcatatgtgtgagatttgatcctag

SEQ ID NO: 41883 - DNA, 3234 bp, Zea Mays
atgtggggacgttctacccgaatcagtataaatatcgcgctcactgagctcaacatccggaccccagaacgtgcacaaacaaatttacttgtcggagtaggttcgaaacaccgacatagtgtttatttaagcgagcatctggagaagtatggaattcctgtgcccagttatgctcttgtcaatagagaatatccggaccaagagctagactacttcatcgagcaagaagattttgttgaggtccatgggaagcggtttttgaagccttttgtggagaaacctgtcaatggggatgatcaccgaataatgatatattatcctagttctgctggtggtggaatgaaggaattattcagaaaggtgggtaaccgatctagtgaatttcatcctgatgttaggagagtgagacgtgaaggatcctacatatacgaggaattcatgcctactggtggcactgatgttaaagtttacactgttggcccaggatatgcacatgctgaggcacgtaaatcgcctgttgttgatggtgttgttatgaggaaccctgacggcaaggaagtacgataccctgtacttttgacccctactgagaaacaaatggcaagagatgtctgcaatgcttttagacagatggtttgtggttttgatctcttaagatgtgatgggagatcatatgtctgtgacgttaatggatggagctttgtgaagaactcatataagtattatgatgatgctgcttgcatcttgagaaaaatatttcttgatgcaaaagctcctcatctttcatcaaccatccctccaactcttccttggaagtctgaaccagttcagcccactgaaggtcttacacgacagggaagtggaattattggtacatttgggcagtcagaagaactgcgctgtgtaattgttgtaatacgccatggcgatcggacaccaaagcagaaggtgaaattgaaagtgacagaagaaaagcttctgaatttgatgttgaagtacaatggtggaaaaccaagagttgagacgaaactaaaaagtgctgtacagttacaagacttgctggatgctacaagacaacttgtaccaccaactaggtctggtcgggagagtgatagtgatgctgatgatattgagcatatcgagaaacttcgtcaagtcaaagcagtcctagaggaggaaagtgcagctaaagccattgaaatggataaaagttccaaagcgtaatggtgatggtgaagaggaacgaccgattgaagccctgatgattctgaaatatggtggtgtgctcacccatgctgggagaaaacaggcagaggagctgggaagatttttcagaaataacatatatccaggtgaaggaactggtttgcttcgtctgcatagcacttatagacatgatttaaaaatatacagctcggacgaaggtcgtgtacagatgtctgcagcagcatttgcaaaaggccttcttgatttggaagggcagttgactccgatactggtatctttagtaagtaaagactcatctatgctagatggactagaagatgcaagcaccgagatggatgaagctaaggctagattgcatgagattattatttcaagtgagaaagcaaagaacacagaagggccagtggaatttccatggatggttgatggtgcaggattgcctgcaaatgcttcccagctcctgcctaagatggccaagttgacgaaagaagtgacttcacaagtaaagctgcttgctgaaggtgaagatgaaagacttgcgttgacgagcacattttcaaaatatgaccaggcaaaagctcttggaaagacaactattgatgtggctcgtattgctgccgggttgccatgtggtagtgaaagcttcctcttgatgtttgccagatggagaaaacttgagagggatttatacaatgaaagaaaggaccgttttgacattacacagatcccagatgtatatgattcctgcaagtatgaccttttgcataatgctcatctcaatcttaagggtttggaagagctattcaaagttgctcaaatactcgctgatggtgttattccaaatgagtatgggatcaacccaaagcaaaaactgaaaatcggctcaaagatagcgcgccgtttattgggaaaaatcctaatcgatctacgcaacactcgtgaagaagctatcagtgttgccgaaccaaaatttattgaagacgaagctctattcctaccaacaaaagaagcagagcaccagcagaaggttcatgttagaaatgaggatggaagaagatctagctctacgagtgagaagtcattggaccaagaagatgaagatgatagagaaactaaataccgattagatcccaagtatgccaatgtaaggacacctgagcgccatgtccgcactaggctttacttcacatcggaatctcatatacactcattgatgaatgtccttcgttactgcaatttggacgaaagtctacaaggagaggaaagccttgtctgccagagtgctttggaccgtctacatagaactagggagcttgattacatgagtaatattgtgcttagaatgtttgaaaacatagaggttcctttggaagatgagaagaggttcaggattgaaatgacgttcagtcgtggcgccgatctcagtcccctagaggacaaaaccagtgaaagttcttccttgctccaggagcacaccttgcccataatggggcccgagagactgcaggaagttgggtcctgcctgaccatggacaagttcgagaaaatggtgcggccattcgccatgccgccggaggacttccctcctgccgctccgccacaagccttgggctacttctccaaaggggcaggggtgcttgaaaggttggctagcctctggcctttccacaagagcgctaacgggaagtagctggaagctaacaaatccctgaaaccagttcatgtggttattcttgttctgtaacactttctgcacgccagcccaattttgacgatctgaatcatagtgaaaattttgctggttctttttcatgagcgcgagacataattgtgctatcatgttgcttgcatggatctgagatttaagggtgcgtttggttgctggatagccaaaacaggaatgtcccctggtatcctctcttgtccctccaattttaaggaacaactggggacaatactagaataattctgtctcaatccttgatcctgaactaaacaaacttattt

SEQ ID NO: 41884 - DNA, 1514 bp, Zea Mays
gaggtatgaccctggggcctgggccctgggccctggcacaatacaacgcgcccgttgactgactttgctgtgctccgtgctcagctgtgttcggttcggagttcggacaatctcctggaaattctgatcgaacctcctgcttggagcttcgcagcaacaccatcccgtattcccgttggattcgtttatcccgcgtcccgcaagcaatatcagatccttagcttctgtggttctgcacttattcagcgtctctccagcttggaccccttaaagtgttctccaggtacagctacttgaatcgtcagaaatggccactgacgccagcggagaaaactgggtcaaggtggatttggaactgtttacaagggattcctgcaagacgggcaagccattgctgtgaagaagctctcagataattccccagtggcaaccgaaaaacagttcaagaatgaggttgggaaccttatggccatccagcatgagaacatagtgaggttgtatggctactgtcatgaactgcagaagaaagtgatagaacacaatggaagatacattcttgtggatgtggttcagagcatgctctgctacgaatacgcccccaaggggagccttgacaagtgtatttttgatatatcttctaggcctaattgggccacatgcttcaaaataattaagggcatttgccagggtttatatttcctacataaggggatggataggcctattgttcatctggatcttcagcctgccaacatactattggatgacaacatggtaccaaaaattgcggattttggcctgtcaaggctctttggtgaagaacaaacccgaataaacacaataaatgttgtgggagccaaagggtatatggctccagaatatctgtacagaggggagatctcaacccggtctgacatatacagcttaggcgtactaatcatggagatcacaactgggcagaagaactctccgaatgacaaagacatgtgtgcaaggaactttataaatcaggtttgccaaacatggacagacgaacacatggcatccaagtactcatcactagatgcagacagcctccagcaagtaaaagcatgcattgaaactgggctaaaatgtgtggatatcgatcagaagaagaggccctctatagttgaaattgttgacaagctcgatggaaggcttgctctctgaatggtagtgtatgctgcgcaaggtaaaactgtgatgcagagttaattctgcctatggtgatatgctctagatgcaatcacggaaacaataattgtatcacttactaatttatgtacttatgaaaaatatgttgcttgtgtaatgcatgtgttttggttagcatctagtacaccttccagccagttttttgtgtaacttcagctgtgaacaaaagatgtcataatgtgacatacctgtgatctcaatgttcatgttatgattttactctaaactatgtctataatcttgtatcatttgcatgttcatatatttttagaaagaag

SEQ ID NO: 41885 - DNA, 609 bp, Zea Mays
gggaaactcgataatttggggcgtcgtgcgggctgagcaaattgggaagggaagccgagtcaccgccgccatcgattacacccatacgccaccgacggggtccgtgtgtcgtggtctggagcttctccaagccttcacgaaggcgctcgtggatttcccggggcgtgattggtagtcgagcagtagcaattgctcgccggagcgatggtgccaccgtgtggccgctcgcatatgtgggcagggcacctcgtcgcttcttccgcaggtcaagaacaagtacaacatgatgagaagcatgaaggatgtcacgatggatttgtgagaggtctaggtcgtcatctcccagtcaactttggttgctggatcgttgtcttcgtatgatgtaattatttatctattttgtacagaacttcgttatatattaataatgtgacattcgtttctgtaccataagtcatcatatgtgtgagacttgatcctagcacacatgtgagtcgcgcctaggtttgcccccctaaatccgggtgtgacaaaactcagtttgcgttgtcgatgatgtaactattgtttgtttgcaactcttccacgaaatagatcccccagtaagag

SEQ ID NO: 41886 - DNA, 4932 bp, Zea Mays
cagtggtgtagtttgtaattgtaaaggttgctgaacaaggtcacaaaggatgggattgagaccactcgaggttccgagctcccgcaatcaccagtgaggactggggattcgctgatcagatgcggtgtgtggggccttgctcagcggcggggctgggaggtccgagcggaatagatgtcgatggcatggcggttgctccgcacaatccatttccggcatctgagcccaggtgtcaggcgagcatccaagattgtagaccaaggctttaccaataatgccccagagctgagtaccaacaaagggagtttgctgaggtgtagcagcatccgcttcggggagaagcggaactcaatttttgcttgcgctccagacaatttggagcagaaatctggacaaacgttcgaagctgatgcccattctgcgctaaaattgtgctctggtatcgggagtgtagttatagccaagtgttctcacatatttgagagaaatggggacacctttgatgggaactgcagtttgcaagatatcctcaagcctggtttatggctctcaccggagaccctccgccggttttggcgtgtctctgagctgaagcctaaggattttcttgacattttgaatggttttggactcagtgccgtaaaagtgagaaatgcaagatttctatggaatttgtacaggtggacatcgcggcagagcaaagagttccaacatctgccaaggtcaaatgagacaatggtatccatacttgcagatgctcatatgctcagtcaagcagaatcactactgctttcattgattgatcatatgactccagctgtttctagtgaactattcagtcagattatccaggtgtattcagaagcaggcaaccttgggaaatcagttgcactttatgattatgcaaggggcaagcatttgattccttcagcttcatgctatcaagtacttcttcattttctaaccagaaacagaaaggatgaattgattttgagagtatatctggacatgcttgaagttggatttggttcttgcaccgaaggaaatattcttgattctgttgtcatggctttaatcaggaaaggtaaacttttggaagctcttggtattcttcggcaattaaagagtttgggtcttaaattaagcaagggagccttgtcaaatatagttgaagaatttaacaagaaaaaggatattggggatctgatgaatttcttggaagattggaggtgtatacctgagttgcgtctttgcaacagaatccttgcgtctttgtgcacaaatcttggtacttgtcaggcatggttggtcttccaaagtttggaggccttagggtttgctccagatgctacgacttttggaattttcatttttcacagctgtagagaaatgaaactaaaatctgcacttgtatatttatcagagtgctttgctaggcatgttaaacctggagtgtgtgcctataatgctattttaggtggtgttttcagggaggggctatatagacatgcaaagtatatatttgaagacatgattgaaagagaagtaacacccaatctttcaacatataagataattcttgcagggtattgcaggtataggcggtttgatgatattgaacaagtcttgaggcacatgaaaaccaatggtgtaaatgttcttctctctggaaactgtgtgctctccaaggccttatcattcttggggctagatcacctaggggtgaaaatcaagagagataatgtcactggtttcccaaaagctgagttttttgattcagttggcaatggattgtatttggacactgattccaaaatgtttgaggtttcattgtcacaagttttggatagcgcacttctcccagatattaactcagagctaatcagggcatctcagcaaggcgatgttgcaagtgctcttcttgtgaaagacaaagcttttcaatggggatatgacatttcaccagatagctgctctgagctattcaaggccttatgtgtgagccctgcttatgttatagatgtcattgaccttatggaggagatgccagatatactttacaaacttgatgctcaaaatctagatttggttgcccaaacattgagtaggaatggaatgtctgctcatgcaaaactggttttagaaaaaatgttgagagaagacttgtcaatcagtcacaatacatatacttatttaatgataggtttatgcgaagaaaggaacatagcagggttttgggaatgttggaatcttgcaacaaagtgcagatggtcacctgatagcaaggatatgatgggcctcatcagttacttgtgcaaatggggagtgattgaggaagccctgaaacttatgaactctttatttgactgctaccatgatctgttttttagtgcatattgtgcacttctcaaagagttgtgcaggacaggtcataccagcattggatgcgcaatgttggaggctctcaaagaaaagggtgtggctgtggatcgatcattattcttttatgtgatggagggcttcctaaaggagcaaagaactgctgaatcaattggaatgcatgacatgtggcttagcaaaagcaaagaacttgatgtttttacttaccgatctgtgttgccttcattaccatggctggacacagatcgagccaagaacttggtagaatctatgctgaccgtgaaacttactgaattctcatatcgcggttgcattgtgaatgaattaatgcaaacaaggaatataaaatgggccattccagtcttgcaagaatcagctcctgggaagctcagtgccactttgttaaattccttacttcaagcctatggttggctaaaaaattggagaaagttagatgcagttctttgcaagatgctaaagatgcatgccaccctttctatatctagctaccgctttcttgtgtgcagaatgtgtgagcaaagtcgtttttctagcgcttcaagccttagagcacttttccaacatactgacaagtcaagagaactgattgcatgcaacattctaatattttatctttttcaaagaagaaacagctcacagattcatgatttattgaaggacattgaagggaataaaaccaagcaaccgcagtctcagaatagtgttaagtcattactgcaggctaggaaaccatgagaaatcactagcattatttcacttgattgagcgcaatggatggaagcatggtttaatcattaagaccaccctagcttcatgtctcctttcatttgggagacaattggaagcaaaatcatgtctgaacaacctgagcaaaggtgagtttatcggatgttcaagcaattttgatgatctcatcaaggaattctgcattctaggagatttgaaaatgactctttatctgctaaatacaatgttaaagaaaggcacactgcctaatgaagccagttacagttctgttatatataaactttgtacattgaaggagttcgatcaggcacttgattttcttgctgaaatgcagctggcaagtctaaaatcaagtgaaatctcctgtgatgcacttgtacatggcctttgtgccatgggaagaccttctgatgctagaaaggttttggaaatgctaaccaccttgggatctgcaccatcctatggcatgtttagagttgtttttgataactattgcagaagtagcaatctacagaaagctgcggcacttctgcatgacatgcaacaagcaggacaagtgcccaactttgagatgcattggtctgttataagcaatttaagcagtaccaatgagaaaactgaaggacatggagagtgcattttgccaaacctttttctttctgcaaattccccttaaaggtcataaggcgatatatggcttccagaaaatggtgaactgatgattgttctcaagttgaaccctagtggaactgataaaactcgtgaaaccaaggttatgcaactctggaactcaaacgttctactcgaggattgatggttcacataaatgtgggaacacgtaggaaaaactatgcatcttcgatttaggttgcaaaagagggagcttgaactcattacctgagccatcacaactttcttctctgcaacttggttacaggttatgcccttgctaaagggataatgcaaagatccctacaacaccaattagaattggggaagacgaacctcctcctcagtctcctagcttgttcgttgctctcacctgggatctgccctgggatcacctttgcaacatcagttgaactaaagatttggactggacatggttcagttgtttttgaacgagtacgcaaatgccaggtttttcctgtttgggcacaaatggaaacaaaaaagttggactcagcctatcgtgaagctacgaaggaagagcactgtcccattattctgttttttcgaatatattattgttgcactctcaaatggtgggttgctaacttgctatgtcatgggagtttgggtgaaggccagaaggatgtgatagacgtcgattcgatgcaggtccatgggatgctctgtacaggggtgggaatatcctagcgttcgccttggtttcggtcttctctggcagcaagtgtgctcccagttttcaagctgtcaaagctgtccaactcagttccttggggaaggcctcgattcgctcatctcctcggacccggaggactacaacaatatgaagcagtatgagaagctgaccgtcgcgtcaatttactttcttgtgatgagtgttgagcatcatcatatgattcatacaattgatatgcaactagaacccagattttaatgtgtacggttatgatttatcttttctcgttaaataatgtgagatattgaggtgtatgataaattatatgttcatctctatgtaatcattatacactaacattttaataacgagagcatagaacgataaatagtgcttct

SEQ ID NO: 41887 - DNA, 4676 bp, Zea Mays
ccttctcccgtccactcagcgtgcctgactgcccgtgcgcgccctcgctcagtcgctctcgcgcgcggcgacaactgagccaccgccgacggtccaactcttcgtcggaccctttgccggcgacgagcacccaccaggtaacccctcactctcttccctcgcatgctcttttgcaggggtttcatggtagcgtgacctgtctcggcctagaaaatgtatataaagaaggtcgtaatcgaagggtttaagagctacaaggaggagatatcaacagagcccttcagtcccaaagttaacgtagttgttggtgcaaatggatctggcaaatcaaatttctttcatgctatacgatttgtcctgagtgacatgtttcagaacctgcgaagtgaagataggggtgcccttctccatgaaggtgctggacactcggttgtatctgcttttgttgagatagtgtttgacaattcagacaatcgtattccagttgataaagaagaggtacgcttgcgcaggacaattgcttcaaagaaggatgaatactacttggatgggaagcatgtcagtaaaactgaagtcatgaatctgctagagagtgctggtttctctcgttctaatccatactacgttgtgcagcaaggaaagattgcatcccttaccttgatgaaagattctgaacgactggatcttctcaaagagattggtggtacacgtgtttatgaggatagacggaaggagagcttgaaaataatgaccgaaacagccaacaaaaggaagcagattgatcaagttgtccactacttagaggaaagactgagagaactcgatgaagagaaagaagaactaaagaagtaccagcagctggacaaacagagaagatcacttgagtatactatattggaccatgagcttaatgacgcaaggaatgaattagcttcgatggatgataaccgaagaaaaatttctgaaagtatgtcccttgcggacaatgaagtggtggatgtccgagagatgatcaagagttttgataaagaaataaaagtctcaactaaagggataaatgataccaaggcgcaaaaggaaggtgttgagaagaggcgtactgaagctctgaaggtagttgctaagattgaacttgatttgagagatataaaagataggattgtgaatgagaagcgagcaaaggatgaggcagcgagggatttgcagagtgtgaggagagagagtgaaaagtcaaagtctgaattggctgaaattagtaaggtgcatcaggccaaactaaaggaagaggaggatatatcgaagagcattatggatcgtgagaagcggctaagtatattgtaccaaaagcagggaagggcgacccaattcgcaaacaaagctgctagagataagtggcttcaaaaggaaattgaagatctcaagcctgtacttttatcaaataaaaagcaggaaggtttacttcaagaagaaatccagaagcttaaagatgaaatcaatgatttaactaactacatcgagtctcggaaaagcgaatcaagtaagttagaggaaacacttgcgaaaagacataatgactataacgatttgaggaagcagagagatgtgcttcaagaagaaaggaagtcatattggaaggaggaatctgaggtgacagctgaacttgataggctacaagaagatcttataaaggcacagaaaagcttggaccaagcaactcctggggatatcaggagaggcctgaattctgttagcagaatcattaaggaccatggtattactggtgtttttggtcctgtattagaactggttgattgtgaagagaagttctttacagctgttgaggtcactgctgcaaatagcttgttccatgtggttgtcgagaatgatgacatatcaacaaagatcattcaaatattaactagagaaaaaggtggaagggtgacatttataccattgaacagagtgaaagttccagatctcagctgtccgcaaagtcctgattttgttccattgttgaaaaaattgaaatatcgatctgaccatcgtcgtgctttcgaacaggtttttggcaggacagtcatatgccgagatctggaaactgcgactaaagttgcacgtagcaatggtctagattgcatcacacttgatggtgatcaggtagggaaaaaaggtgctatgacaggaggcttctatgattctagacgctcaaaactaaagtttgtgaagataataagggataacaagacagcaattgatagaaagacgggtcatctagagagtgtcgtaaacaagctaaaagatatagataagaaaattacagatttagttaccaaacagcagcaaatggatgctgaacgtgatcatgcgaagtcagagttggaacaatttaaggctgacattgccagggctatgaagcaaagggggtcacttgagaaagcccttgtcaagaaggaaaaatcacttaacaacatctgcaaccaaattgagcaagtccagtctagcattgcaatgaagaatgatgaaatgggcacagagcttattgatcagctaacttcagaagaaagagatctcctttcacgattgaatcctgaaattactgatttgaaggagagatttctaatgtgtaaaaacagtcggattgagatcgaagcacgaaaggaagaattggagaccaatttatcaacaaatcttatcaggcgtcagaaagagctagaagcgataatttcatctgcagattctagaaccttgcctttggaagctgaggcaaaggagcaagaactgaaaagttccaagagaaaccttgatgaactaacttcattattaaaggctaatgtcgatgccataaataatttcaccagaaagatggatgatctgaaaagaaaaagggatgatctgaaggctcgtgaagctattttagagcagactgtacaagatggtgccaaagacttagaacagttgatgaacagcaggaacacttatctagccaagcaagaagagtgcacgaagaagatccgagatttgggcttgttgcctgctgatgcttttgaagcgtacaagaggaaaaacaagaaacagctacataagatactctatgactgtaatgagcagttgaagcagtttagtcatgtgaaccaaaaggctcttgaccaatatgtgaacttcacagaacaacgcgaacaactgcagagaaggcgagctgaacttgatgccggtgatgtgaaaatcatggaactcatatcggttttagaccaaaggaaggatgaatccattgagcgcacatttaaaggggttgcaaggcacttccgtgaagtgttttctgagctggtgcaaggtggtcatggatatttggttatgatgaagaaaaaggatggggatgcagttgatgatgatgaggaggaggatggacctcgtgatccaggccctgatgggagaatagaaaagtatatcggtgtgaaagtcaaggtatcatttactggcaagggagaaactcagtctatgaaacaattgtcaggcggacagaagacggtggtcgcactaacactgattttcgctatccaacgatgtgacccagctccattttatctgttcgacgagatcgatgctgctctggatccacaataccgaacagcagttggaaatatgatccgccgtctagctgacatggctgacactcagttcattgcgaccacattccggccagagattgctaaagtggctgataagatatatgccgtgagacacaagaatagggtgagcaacatcgacgtggtgtccaaggaggaggccctggacttcatcgagcgtgatcagacttaggtagctattggaccagcttgtttggcgcatcaacgttgtgaatgtagcagctaccaccttggtttggtaccagctttaattaagtttgggaagcgctgattagactagacgtacgttacatgttgccccatgattgttgtatggcacgcccagcccaaaatggcagtaatcagttcatttcgacaattaacgtaagtgtaagtgtacgagtagtggtattcaaatgttttttaactgtatttttctagtacatttattttttgtacccataaatcatgttacacgtagtttcattggagggagcataaacatgttcctttgacagaaagcctaataaggctataaaacaaaaattactacacgtagtttcagcaacgcaaacaaaaaaccccgtgcctgcctaatgaattggtcattaggcatgggcttctgcttctctataaggcgactacgagctcccagctgctcagtagctagggtacatgcccatccttcctatggtgctcctgcagccgaagttgacagagcctcgaggctttctgctgccatttgccttcgtggtggatttcgcaatcctcttttccttgcccgtgaacttatcactgtctcgagctctttctttcgaccgtgccacttttgtcattgacgagagagagctttaagtcagtaccaggtcatggcaaaatcaaatggaaactaaatagtatagcaggttatctgaacacaaacaactctatttggaagatctgtgaaactagagtcataataatctggggctgtaggcattaccttagctagcctctccttaagctttggccttgcagatactaccactcttgctggttgacggtccgcgtttt

SEQ ID NO: 41888 - DNA, 3261 bp, Zea Mays
cgtcttcctccacgcatcacacatgccacacgcgcgccagcaatcgcccccggtatctcgcccgcgccccaccaactctgcccttgaacccgcctgccaccaatctcgtcgccgggtatcccgcccgccaccaaaccgcgccccctgtcctcgccctcgacggcgctgccctttgtgatggtgcccttccttccccagctcccccaaatgctgccaagtcccccaccaacgccgcccttccttccccggcagcccgcccccactagctccgcgctccgcgtgccccaccagccacgctagctgccgccgggatactcaccacctccgcgcccccaccaaaccgaaaggcgagatccgccgccagttccacgctccgcgcgtcaagagcagccatcacagtgatgccgcgcgagggagaggaaggaaggccgcgtgagtcgccgcagggaaagctgccaggcatcaccgtaaggtgagatccggttgcgcgtgagggagaggaaggaaggccgcgtgagtcgccgccgagaaagccacagggaaagccgccagtgtgagtcgccgccgggaaagccgccagtgtatgatggttcggtcatccagatgtgggtggcgtacaacgttgtcactcatttcctcctgcactgtaccgactgcaaggcgcaagctcactggcgtgttcgacctcctgaagattatgctatacaaggtgtgcgcaaatggctcatcggcgcttcccgattgggagatggaggccagcatcatggagttctacgctgttgcatcttctaagtggcatcaccgagctggacgacaggaaacagagaaaattgtgcctgaaaaaatttaggagcagggatgagcatttatcagaagtggacacaaagagggagcttgagtgtgggctctgcatgcggtgctttgagtattggaaaggggatcttctgcgacgatagcgatgaagacgaagacagtgaccaggagagggaggtgaacaaggagatggttgtctaccttatcgatgcctcgcccaaaatgttcacccctgccaccacctagggcaatgaaaagcaggagacacatttccataccattgttaactgcatcacagagtctctgaagacacaaattattggtagaacttatgatgaagtcgcaatatgtctctttaacactatgatgctccagttctgcaacttctttccgacaaaatgtccactcatatatttacaactctataagggtttagtgtgggcgtccacaccccttcaccatgcccccgcctcagcccccgtcaaccacgcaaggactccagcgtgaaagtcgggcccgtcgccggccttgcatcgtcgcgacacactccgtgcctcccttccatcatcgctcgatcgcggtttcgtcgcactccttccttcgatggcactcctttccatcctcgattcctcctgccccagcaccggccagcctcatcaggtcattcctcctcgctgtgccccctccaccgtattcaaccacctcttcctcggcaccaaacgtagacgcctcctccgcgatgccctcagaccgcccgtcctcgcccaacatctccttgccgcatatgcccgcagcggctgcctcgcatcccgcccgcacgccacctccttgcacccgcgcatggatgccactgcacgcctactatggaagggggacgcctactattgaagctcccatccacgatcccattccaaatccagcttcaaatttgccccaatctgcagtcaaccttccacccaacatcttccccttatatattgttgtctctgctataaaagacttgacagaggcgaggcctccaaaccactaccactctccaccgattcactggagtcgcgagacgttggaggccctgagacgttcaagcctcatctgcagtctcctccaaagaggtccacaaatgatttgagagctgtaggtctacaaatgataatgcaacaaattctgattcatgcatttctttactgtgtggaggccatttaattacgcctatttgatttgagagctcgagtagacaagatcatgtaggctctgaaatctatcttctggaggaccaaggccattaaagtacagggttctttcagcagcaatggcctcactatttcttctaaattaccaagattctcggacatgtacactctcacgatagcaagtgtagacccacagtttatcgtagcaaacaagccaatccatttcactaagagcgtgacaaagtgtcacagagcccttcttcttcgctctgccacccacaccgtggcacctcgccgagctccgcatcgaaactgcgttgttgccttctccgtgctctgcgttgaagacatgcagcgcaagcgtcgctgcctcatcccggcctcctctagacgcaagacgacaagaggatgctgctcgagctgtccccttggatcccacgccgaacgccctgtcacctccgtcgacaacatcaagctcctgtccctcccccacctcactgcaatagattcttcggttgtggaacttagggagagttttgagtcgtggtggtgtataaagcagtcgtcaagcacaagctcctccaaagtaccatcaggatcctacagtagaagagttagccaaaacactcgattgttggccatcaatgaattattatatcacgggttgtaaatatgttcttatgccatgaaaattcaacgaatgtcacgcccttttcgtaatagatcatgttaaaagcatgtgacttttatcgactttacaccgactcaagattggtgtaaacacatgccatacaagaggtttgcggaagctattatcatggcctcaaagaaatataagattgcttacaacaagaaacgttctggatgggcggaggatatctttaagtgggaacatacaattcagactggtgttccaattgacttaagagggtttaataccagctacctcgttctacaagttatgaccatgtgggggaatgacagacgaatgaaatttgttgggaatgcaaatattcttcgaaggaactttgtgattgatctgttaagttatgaggacaattcgtgccgatatgccatccctgcaaacatacaacagagacttatcgatatcgctaaaaaggattagctgattagtgtacggttgtcgacacatttgtctgtaattaaaaattctaaattatctttttagaaataatttgtgtgatattgataatgaaaaacacggattttgcatattatatagtgatgtttgtcgttc

SEQ ID NO: 41889 - DNA, 728 bp, Zea Mays
cacgcacgcacgggccacggggtggcagaacgatccttcgctggtggccccgtgccggcccccgcccgccaggcgttccgattccgggatccggcggcactgcagtgcagggcccatcggtgaaatccattcccgcggggacggggacaagcggacgcggacgtgagcgtcggagacttcgagaagcgccgaaagggacgcgcgcgggttccctagcctagccagccagcgggggcgacaagcggtggtcgaccggcgtggccgtggtggcgattgctgccgtcatcgatcgtgtcaggccgcccgccgtctgtcgtcttcgtctccgcctgtctgcggcatctcggtttctggcgcgagaggcctcatccacaagacaacacgagcatgcagatgcaggaagccggaaccgagcggtaaaataacttgtatttgaccgtaccgtaaactcgtattcgttgtatttgagctgtaaaagaaaccagtggagccgaccgttgactcaccgatgacgcaccggactatttggtggacctatacgcagaatagttcaacagcgactagtttggtgcgtggggattatttatactctctccacctgccttattgagtgttttgatgcccacatttaaactcatgcattgctagagcattgcaagcaccacaaagcctagtaaggtgattacaaaatcttaatctcgtgttaggacctcattagtacaactcag

SEQ ID NO: 41890 - DNA, 1284 bp, Zea Mays
gtacacaagctcgcctcgcaccagaaacccgcgaatcaatcccgaatcccgatcgaccggcggcgcgggaggcgatgccggacaaggcggtggacgacgtcatggaggccgcggtgggggcccacttcagcggcctccgcctcgaggcgctgcgcctctccacctctgcgccctcttccccttcctcctcccccgccgccgcggcgcacacgcactccaacggagccgtctacgccaacggcaccaccgagcttccctctcctgccgctgcccggcagccattcgtcatcggggtttctggagggacggcgtcggggaagacgacggtgtgcgacatgatcatccagcagctgcacgaccaccgtgtcgtgctcgttaaccaggattcgttttaccgtggccttactgctgaagagtctgcacatgcacaagactataattttgatcaccctgatgcatttgatacagagcaacttctagaatgcatggggcagctgaaatgtgctcaacctgtaaatgttcctatatatgatttcaagaagcatcgacggtgttctgaaagctttagaaaggtcaatgcatcagatgtcattattttggagggcattttagtgttccatgaccagagagttcgcaatctgatggacatgaaaatttttgtagacacagatgctgacattaggcttgctcgacgaatcagacgtgatacagttgaaagaggaagagatatcagctccgtgcttgaccaatatgggaggtttgtgaagccagcgttcgatgattttgttttgccttcaaagaagtatgctgacgtgatcattcctcgaggtggtgataaccatgtagcagttgatctgattgttcaacatatccgtacaaaacttggtcagcatgacttgtgcaaaatctatccaaatgttcatgttgttcaatcaacttttcagatccgaggaatgcatactcttatccgtgatagggacatcaccacacctgactttgtattttattcagatcgattgatccgtttggtagtggagcatggtcttggacatttgccatttacagaaaagcaggttattaccccaacaggatctgtttatatgggagttgacttttgtaagaagctctgtggagtctctattgtgcgaagtggtgagagtatggagaacgcattgcgtgcttgttgtaaaggaataaaaattgggaaaattctaattcatcgtgttggagacaatggacaacagagggagtatgcttaaaatgatcgagttaatcacgatggat

SEQ ID NO: 41891 - DNA, 1991 bp, Zea Mays
cgaggcccgtgccgaccctccgcatttcaaattccctcggctttcccttctcccttcgaccgatcctccggccaggccagccttcaaacacctcgccgacgccgccgtgcccgtcccggcgcggacgggcgctagaggcaggtaccccgtcctccccgcatggacagcgacgacgaggagatgtgcgacgccgcctcctccgccccgtcctcgcccgccgccggcggcggggtgggagagggggaggaggaggagggcggcgtagatgacggcaggcgcgggagcgagggggtggtgatcatggaggtcacgtggttccaggtggacctggactatgagttcgacgcgcccaggtggttcgaccttgcccaagaggaggcgccgctggatgccgctgcggcgcaagagtggttcacctccgcccccagctacccgccctctcccttaattgctaagatgttagctgaggatcttgggttacaaaccattagaagcattgcagatacagatgatctgcattgttctacagcttctcacgaatgttctagtggcatgggaccaaaaatccgtcagcttgaagttaaaataggacgaaaagcttgcaatggtgcatcagaaaatgaacgccgttctcactatcaaactaccatgaagggcaattctttgagaggttccacactgatgaagcctactgccagccaattagccaagcaaaacagaccggcacagttaaagaatttgacacagaataaaaagtcagtgggagttataagagagagaagtaccataagctcaaacgattgcaattaccaatccactaaaagacaaagattagagaatgggcatctcaacaaggctgctgctactgctatccagcatgagtttattcataaaaatcatgaaaagaatgttatgaatcaaaacatggatcagcccactgttctgcccagattgaagattacaattcctagatcacctgatttggcaacaaagctaagagcagagaggtcaaaagctcaaagagcagtgccaactcttccaaagcagttaaatgacttaattcaacgggttgcaccctctgctcctacagttcaagtcgcaccaactagaaagcaggtagttcaacctttttgggctactggtcatcaacatgcaagcagacaacacgaggatgttgggtcaaatgtggcagcatgtacatccaatcatgcaaggcatcttaagagcgtagataacaaaaccgaagataccaggcatggtctgtttaaatttaaagcccgtccgttggatagaaagatgttagagaacaaaggtgatggtgtatttcgatgtgcaaaaaggaatacaactgtgcctaaggaatttaacctatcaacaggcaggaaagccaatccagctccgttgtctgaactatttaacaagctttctttaactgcgggtgcacatcaaaatcgtggagtagggcgtcagatcagggatctgccaaattatatcactaccaaggactgcaaagagaacatgattggtaacatgcatcgctagtctgactcatgtcaatgaagaagtagaatatacaggatttctcttttgatagttagtgcctggtttaggctcaacgtcaccccacccgcacagagaccaagcgtttgttttggtgttttggacagttgactcagaaggaagctcgcatcctcctaacctgctcatacattatttgagattaagagcaccatcgctgaggtcgagtgtggaggcactgattctcgtctcggtcatagagttgcttctgctgagcatgttacagttatctcagctgcccggagccaatgagtcatggctgtgatggggtggtttttgtacagcaagagataaaccatagtgtaggggcggctcactcggtggatctgcagccctgcgggctcccgcagagactccaaagtgtaacgtattgcaatcgtcttggcaaggtcgtgctcttcttttcgtctttg

SEQ ID NO: 41892 - DNA, 2711 bp, Zea Mays
cactttcccatcgaagtctgattatcgtattcgcacgccatcgtcatcctagggccaaggaaacgccaccgctccagtcatatccccgccgcccgcgccgccgaaggccgaaccctcgtcgcctcccctgcccacgcccgccgcctccagcaggaccacaccgccggattcgacttttttgtcctcgccctctccccctcctctcgtctcctttgatggcgtcgaggggaggctcctccggctttatcgagtattttcataacagcacaaagcgtcatggcagcaatagagagaacacaagtcagcaaggcatgaatgctatcagggtgcaaaaagaaatgaaaaaagaatgggcaagacctggaagagttttcaatagaaatattactagaggaggctactctcgaagttcattgcctggagtcacacaggaatttcgtgttgtcaaagataacagaattaaactgaaagaagttagtgagactttgccagaagcatctcagaacggcgattctagcaatgaatgtgctttttcaaatgttagagataaatgctcaaccaaaaagcttgctgcccaacaccacttggttacttgcaatgttaatgggcatggagcggcccatgctgacaatggtatcaaaattgcggctcaagcccatgacaaggaagtcaagccttctattgtccgaaaaatggaacaatatgaagggacacaagcatcattggttggatctcatgcagttcttggaaagggcaaccagaacacggtggacactgcagcatcagggaaaaataattttggtggcgaactttgctgttcttcatcagatccaatccatgtgccctctcctggttctaaatcagctggaacttttggagccataaagcgtgaagttggagtagttggtgctaggcaaaggccagctgatagtgcagcaatatacacatctacttctaatggcttagtcaaagtggtatcagcaccaaaggttagcccacatttggaatggaagcccaaatcagtaagccccagcactgctgcacctcctggtgctccatcacctgttgatgatggaagtaaaacagaagtgtctgctttgtctaagaagctttcacatgctaatgtatcacatgaacatgtcattataccggagcacatcaggataccagattctgaaagaactcatttcatcttcggttcttttgaatctgaaatttatccaaaggcttctttagcagcctattatgatgctgtggctaaagaagacttgaatgatcactctccatcaagcgtggcagcattgggtttcacatcaactgatgggactcttaatgataggatggataatgttggttcctgcagtccacttccacagtcagagcctgctgtttcagtttctgaacatgagcagtcattgacggagtgtgtggatgttcggagccctggtgttgtcggtggaacaaatgagacgatttcaagcaaggtaacacattctcaacctcgactccagcatcaggaagctgcacagaattttaaggcatatgagccagattctggttatgggatgtcatttattactaaagttgatggtgaagcagcccaaggtatagcttattcatctgaggctatggttttacattctgtaaatggctatcagttacctgcatctacagcaactcaacaaccagtgccccagatgttttctcaacaattccaagcacctcagtatccaaactttttgccatatcggcatgttttctcaccacagtttgggtctctaatggttgttccaaactattcaagcaaccatgcatttcctcagttgccacatgccagcagctatctggtaatgccaaatggagcctcacaactagctgccaatggcatgaaatatggatcaaaccatcagtataagcaagtatttcaaggagcccctgctggatatggctacggaaatcataatggttaccctaacggtgttattggcggcacaggtgctattgaggatatgaatatgagtaaatataaggacaactgcctctatgcacccaatccacaggtggaaacagcagatgtatggattcaaagtcagaaagagagtcccaatatgccatctgcaccgttctacaatatggtgggacaaccagtgtctccacatgcagcatacttaccaccacaaagtggccacactgccttcagtcccgccccttcccatcctggtcacttgcagtacccgggctttgtgcatgcactgcagccaacatccatgaccatggtgcagaacccgcagaccatgatacatcagccggctgcaccgccattggcaggaaatctaggcctggacatgtcggccatggttcctggaaatcaagtaggagcgtttcaacataaccagcttgcccatcttggctggaccacacaatccttttgagattttggtgtgcttctatggctggataagtgaaatttcggttccgtgtggatagaacctaattgaagtgatatgctgtaatatgcaggataggcctgatgaataccaggtttttctttgttttaattataaaaggggaaccgttttttcgtgccgttgtgatttgcaagaacgtgtttaatgttcacttccagtttttgttccaaaattttgttgtaagtgctagtttggaaactcaaattctctttcgggattagaatgaccctacaatctccaatc

SEQ ID NO: 41893 - DNA, 3470 bp, Zea Mays
cacaagtgcggtgccataagtgacagccacctcagtctctgtctgtggagctctctctcgcgcgcgttgccatctcgcaggttcttcatctcgtcgctctgttcaggcgcaggcggcgacaggagatggacggggagcaggcggcgcggtgggcggcggcgcaggagggggttcccgtcggggcggaccttgtcgcggcggcgctgcggcagctgcgcttcctcgcggcggtggaccgccgccggtggctctacgacgagggcccgctgctcgaccgggccatacgcaggtacaaagcatgctggcttccgcttcttgacaagcacactaagggtgtggttgtagatggtccattggttgttcctcttgattgtgagtggatatggcactgccatcgccttaacccggttcagtacataagggactgcaagaaagtgtatggcagaatactgaacaataacaacgttgagtcgtccactcaaacaaagtcgacacttgagtcagaaaaagtttggaaagagctgtatcctgaggagcccttcgaattgttgttcacaagaacctttgacactgccgtggatgtcaaccctgcaggtgcagaggaggacattacctatgatctggtctcggctgttaagagacaatcctctttctattatcaggttggaacaccaacaatgcatgatccacggtttctccaagaagctctagctcgatacaaggcgtttctttacctgatcaagatgaatcaagaaaaaggattgcagcgcttccgtgtaccaacctatgatgtggatctgttgtggcacactcaccagctgcatcctattacctaccgcaacgacatggtgaagcttcttggaaaagttctggagcatgatgacaccgatgctgatcgatctgaagggaagaaactcgatgttggatttaccgagactactgaacagttcgagagtacctttggtgtaagatactggaaggctggatgtatgtaccgtggcaacgtgccatctcctgtgacatccactcctcagacattcagtgctgaggttggtactgggtcttacatctgcaaagcccagaaagatcttaatgcccttgatgtaacagttgtagagttatatttacaaattgtagacatcaagaatttaccatctgctgttcaaaaagaaaatgtgtatgtacggttcgccaagaatcaatcagatatgttcatcagtgacggcggcaggttggatatctcaacagttacagggaagaacaccggagtttgtttacagtgtgaacctaccggagaactcattcttgcagtaatggttgatcaattatcaaagaaaccagaaccgatagggaaggtttctttcccactgcacgatttgacagggcctgattctaagctctccttcgagaagtggtttgaactgaaagctcatggatggagccattctctctcaagtcatgtcttttgccacattccatcaaggatcagaacacgggcagctggactcgtttcgtaaatgattgtggtaccgagcttatccgtctccagataagagagcacaaggcgaagaatagcatggccgtcgttcgagaattggttggagtattgaagtcaacaaaaaagcaaattcaacttgcagaattcaaggaaaacaagtggaccctaaaagactccaacttgccaataagtcatggcactgatggcagtctactcgatctcaaaggtgacaaccatctgatcaagctttatcggggaaggaaactggaatacgagcgcaaatgttgcagcgctcactctgaggacgtatcagctgttactgctgtaaagttctgtgctgaacatccatatggcaaagccgttgccttgctagacactgaagctcagcttatcatggtgaacgaggattggctcctacttccatggatctccatatcagtcctgtttatggacggcgatggcggtacgaaacttggcggcggtgccatggttcagaaaggtacagtgtttggatccgacactagcatggtgctagagacacagaccgtcggagcagggagcgtggcatccaatctagcacaatgtggcacttgcagcgccgtgttcggtggtgatgataaagaaatggcgaactgcaaggttgagcatgcgagctctggcgcttctcgcacggttgttgcaagtggtgagaatgggcacactgagactgctggctgtggaggcggctgtggtagcaattgtggacccatgatggctgaagaccccaaggccggcaatgccaagtccggaggctgtggttcggggtgtggtggtggctgcggtggcgcgggaggttgtgggaccatggccaacgaaggccaatccaggtccggaggtgttggcaccttgttgagctccaacgccatgggtggtgagggccagcaggcccattcagctggctgtggctccggctgtggtggtggctgcggcagcggcatggtcatcgaaggctccaaggttaacaacgttaacgccatgtccggtggctgtggctctggttgcggtggtggatgcggcagcggcatgctcatcgaaggctccaaggccaacaaagccatgtccggcggctgtggctctggttgtggtggtggttgcggcagcggcatggtcatcgaatgctccaaggccaacaacaccatgtccggcggctgtggctctggttgcggtggtggttgcggcagtggcatggtcatcgaaggctccaaggccaacaacgccatgtccggcggctgtggctctggttgtggtggtggttgcggcagtggcatggtcaacgaaggctccaaggccgccaacaccatgtccggcggctgtggctccggttgcggtggtggttgcggtgccctgttcaacgctagcactgctgccggagagggcctgcacaataagtcggctgggtgcggcggcggcgggtgcggctccgggtgcggcggtggcggcggctgtggtagcggcatggctatcgaaggcttcaaggccaaccacgccaagtctggtggctgcggctctggctgcggtggtggctgtggcactggcagcatggtcgctgaaggctccaacggcgggaacgccaagtccggcggctgtggcggcggttgcggtggcggaggtggctgcggcggcggaggctgtggcgggggttgcggcgccgtgttcaacgcatgatctcggtggagtggaggcatttgtgcagacatgcagtcgtcgtcgtctactgctagataccacatgctacagcatactgtgtattgctgtgcataatctactaaataaaaggaatgaataaacaatggatggatcggctgcctccgtggcgtttctgcaaacgaaaaatctcggtgttgttgggtgcagggatgaggatgaaaacgatttcaaacggtccgaaacgatatcgtctatttaacggttggttaagaaattacctgattta

SEQ ID NO: 41894 - DNA, 2603 bp, Zea Mays
gctctcctcaggtccccggatcccatctgtccccgttgctgcgccctatgctatcctgacgccgttctaggctttcacagttttgtgtttgttgaatgtgtttgcaatggagattgaagaacacacagattcactttcaatagaggaacccatcacaaggctcccaccagatattattgaggggatacttctcaggcttccggtaaactctctaatgaggctgcgtcaagtctgcaagcaatggtggaacatggtcagcgtgccccgctttatcaaagaacatgcctatcatgcacccaagcacctcctcctttacttgcctaagttgaatatatctgcatcgctccatccaaagactgccaaaccatgtcttgcaacaatcattaatgaaaagtggtctccattgacatgggcctcatcgcatatggaccctgatgatcacctctttgcatcatgcaacggtttgctttgcttctacaagacatacacactaaagatatctaaccctgcaacaggtcaatgcctgcatctcttgaaacctgacggcatattgttgtacgacttccactatctatacagctttggatttcacccgattactggagaatacaagctcgtgcactttctccgtgagcctcagcgctacaaatcaggacagcctttccatttcgacaccattcaagtgtacacccttggtgaagacaaatggagagctatcagagctcctataccatgctgcatggtgcatcttggagtagtaaatgtggatggagtgatgtattggctaacagaagataaaggaacaagctgtggcatggcagttgtatcgtttgatctcagggaagaaatgtttgccttgattcatcttccagcattggaggtgaaagagacagcctcttgtgccaccatcaaagttgcttactatatgactgagatagatgacaaagtgtgcgtagtgactatgccataccaaagccatgcaccaaggtggcgccgaaacaacgcagagctttcaggcaggactgacatttgggctcttgaaagtgacaagtggttcctgaaatatagcatccagtcaccatctctatctcggtatgttcctcagccatgcttcatccacagggagaagatcatactgcaggacagtgaaagtaatgtgtggtaccatgatttgcgaggcaagaacgtgcagattgagcatgcagatggggcgaagcttttgcaccttggtgacaacagattctatgagacacagtcctatttctacaaggagacacttgctcccttgagcatttatgccagagcagccattgttcgtgcaccgcctgagcctcttgctcgttcagttgctttacattagtttctgagaggctcttgcactctgaaggtttggcagcaagtactgacgaatattttaatatggagagtgggtaatggggacggcacacgtatggaatgatccctggttttggagagagtggactagccatccatgccaaggggtgtaaatcctatgaaccaagtgaatcattgagatgattgacacatgcataggcaattggaacgaggcactaaagatgtgaatgaatcttagtaagcccagttcatatggagatggatgatgtctcagtcttgcactatggagtcttttcatgatcaaatcagcctatatttagtccgggaggagttggccactatggaaagcataggaatagatgtgtattcgacagtgagcaactagaggtccatgaagttccccaggaggttgtagacaagggtagtgtttgggtgagggctgatactgtagctttggggcagctaacacatcagtagacagtagtctcaggactcaggaggttaggctgctcaatcttcacaatgggtgcgaatgtaacaaaaaaactaatctgagccatgtatctggatcgttctatcttttaatatagtgtttttaaatatagtgatgtgcagctctcttgcatattcgagaaaaaaatcaagaggagtttgaaaagaaaaacaagtatggagctgtttcatcttcacgggggctttgatcgataaggattcaggagtgctggaagaagatttggagcaagagctgtcgctgtccggcgtctggcggtctgggggagaccagtgattttcctacgcacgcctgccaaaagtgggatggagttgaacgcaaaatgtgttgtttgtcattgggtagatggaggaggacacctcgtttatacgcgcggaggaggtgtagtgcgactgtgcgagttgaatttgtaagaaactcagccgcatgcttgcttggagatacttgagatggaacggaaaactcaggtctcaacagctgtagagaaggtgaggggagggaagcaaacaacctagcttacattgtgatgaaacaaggcagatgagttctggacctctctctctctctctctctctctctcaaaaatggtttgccagtatagtctgtgacttaggaagattgtcatgcctgaatcccgatatagaatttctggtgtaattttcacagtaatattgttcacacatgtcgatggttcagctgttttcggtgctactgcattttttttctatttctgaac

SEQ ID NO: 41895 - DNA, 1213 bp, Zea Mays
agtacactcattcagttaggcttaaatgtagccgctagttagacctgcaacagaacagagttccagagactccactgcacagacctactgagctctctcctcttctcaaccattcaccagtaaacgaatccaccgaccaccactcccaggagcagggtattccgactttgattacatggagccaaggaggagatgaggtgttcctggaaggatcgtgggataactggacatcgaggagggcacttgagagatctggaaaagatcacgccgtcttgttggttctgccatccggagtctaccattaccggatcatcgtggacggggagctgaggtacatccctgaactacctcacgcagctgacgaaagagggcgagtggccaacgtcctcgatgtccatgtcagtaagaatggcattattcaaacctgtgacagttttaaacagcaaagacaagcaaattaccatctctcattctcgtctgtgttctttggacaggactacgtgccagaaagcctcgacagcgtagccgagttcgaagcgcccccgtctcccgtgcacagctacgacctgcattgcccgggcgacgaggagttcgccaaggagccgcccacgctcccgccccagcttctcgtgtccgtcctcgggggggacgtcgatagcgctggccatggcaatcaagctttgaagccacagcacgtcgtcctcgaccacctgttcatcgagaaagggtgggggtcgcagtcgctgctcgccctcggcgtcacccaccggtttgagtccaagtacgtgagctttgtgctctacaagccgttggagaggtgatggtggtactgtctactagctgtgtgtgagtggaagaacagagtggactgctggagatatccggactttgttctgatgtggagacaccatgggaaaaaagaaaaaaaaaggaaaataacgacaccagcaaatcagtggataaagcggatttgtcgatttgatggaggcggtagttaactaggacaggtaaagaaaatgatggatgcccgctgatgtcgatgttcaccaaagggacgatagataacgtcgtgcgatcacgagctgcctggatttgtcaaaaagcttgacagcgactaggggaggaaatggtctttttctctcgattttttggagtccgaattcgtttttatgaatgatttccatggggtgtctgtatgtagattcgattccga

SEQ ID NO: 41896 - DNA, 4469 bp, Zea Mays
tttcgtgtttgctaccgccgcggcttctgcttctcccctccctagggcgggcgtgaatacgtgatccatcatctccatctccgtctgctgtggtgtgctggtttgagagactcgacggctggcgagacgagactgaagggcacaaatctctccgccatctgttagattccatcgtatcccccacgtcttggcgtcgcttcgtcggctgcgacctgcgagaagccggtgccgccgcgccggtggacgaagacgatcaaggattaggaacggcaaggtcccttgcgatccgatccaattcttcattcttcgattccttccttgggcgggcggctcccctcagcttccttccacatggctcgtcgcccgccgccgtcaccccctcccccggcgcaagggaacgggagtgggagcgggagcctcaccaccagagacgccctcgcctatctcaaggccgtcaaggacaagttccaggaaaagcgccacacgtacgagcagttcatccaggtcatgcgtgatttcaagagcgacaggctcgacagcaccggcgtgatcgcccgtgtcaagaccatcttccacggctacccggacctaatcctcggattcaacgccttcctgcccaaggagcatgccatcaggcctctggacctccgcgaggacaagaagcccgtcgattatcccagggccatcagccttgtcaacaggattaagagccgattccagcaggaggaacatgtctacaagtcattcctggggatcctcaataagtaccgcatgcataacaagcccatccaagatgtttacaacgaggtcaccgcactgttacatggccatccagatttactcgaggagttcagtcattttttgcctgatacgcccatgcctcctccgcaggcaggcactactactaaagttaggcatgatgacaataatgctataatgcattctgtcacgagagctcagacagtccagagggggagagattttccatcaactgctgattgggacaccagtgctgatcgccttgatcttgagcatgatattcaaaaaagttgtattgagaaggagaaaattcgtgatgcctgcccacgtcagcatagaagaggttataaaaggaatgagaagaatgacgagtatgaaaatgaagatttggatgtggagcaatgcggtcacaaatcacaaagaaagatggagggtactggtgatgatacaccaggggatgctacattgtcctcattcaattgttcacacgcacaagagtttcaattttgtgagaaactaaaggcacatctagagcctgaagcttaccaagagttcttgaaatgccttcacatatacaaccaagatattattacaagaaatgaactaaaaagattggtaaaggatatacttcaacattacccagatcttgtgaatggattcaatgacttcttgggtcactgtgaaaatatagatggttttttggaaggaaccttcaataaaaggcaaacatcgcggatggttagacctgtggaaaaagagagatacaaggagaacgagggggatagcgatcctgagaaagagagatacaaggaaagcaaaaattctgaaagagtattgaccttcaattctaaggaaggagcagctcatgaagctagtacattccctagcaaagagaagtataacttatgcaaaccaatatcagagcttgatctatcaaattgtcagcggtgcactccaagttaccgacttttgcctaaaaattatccagtaccttctgcaagcaacaggactgacactgaagcttccgtgctgaatgatcgctgggtatcggtgacctcaggaagtgaagattattcatttaagcatatgcgcaaaaatcagtatgaagaaagcttgtttagatgtgaagatgacatgtttgagctggacatgctgttggaatctgttactgttgcaattgagcgtgttgagaagttggtggaaaggatggaaggcaattcactgaaaccagacagctctatctccctcgatgaacatttgactagtttgaatatgaggtgcattgagcggctatatggtgaccatggacttgatgttattgatgttcttcgaaaaaatgttggtgtgacattaccagttattttaaccaggcttaaacaaaagcaggaggagtggtcaaggtgccagtcagattttaataaagtttgggctgaggtatattcaaaaaattatcacaagtctcttgaccatcgcagtttttatttcaaacaacaagacacaaagaatttgaacacaaaagctctattatctcagattaaagaaatcagtgagaagaataggaagggggatgatgtgttacttgctattgctgctgggaataggtggccactagttgccaacatgtcatttgtgtatttggatatggacattcatgaagatctttatcagatcatcaaatactcttgcggagaactatgcaattcttcagatcaagttaacaaagtgatgaggatctggacaacatttttagagcctctgttagggattcatcatagggctcatggcgctgaagatgcagatatggtaaaatcaaagaggcgaactagagaagttggtttggcatgtggcgggaaaacaaataatgctgcagcaaagggtggtaatggctctaaaagtgctggagctgagtctgtggctgaatttatgggtaggaatgaaacaattccgtctatgaagagcataaaacatgacaggataacatctttgtatggagtgggtgtacatccatttagtgcatattcggtgtcccacaacaatttaaggcctgaaacagaagagggtgaattatctcctaatggtgatttcaaagaggaacacttctgtgttttcgaagatgaagctgtagatggaacttctaaacaaaatgaaggttctaccagcagatctccccagggtagacctaagaattatctcaagttttcaggcaaggatcattcaggtgcagaaaatgaaggtaacaagagagcccagaggtctgcagaggatagtgaaaatgcatctgaggctgatgaagatatctctggcagtgaatctgctggtgatgaggagtcttctcatgaagatcaggaggaagaagaggatgatatggatcttgatacaaaggcaaaaaatgactgcagagcagaggtaaatagggaggcacagggtttggatggaggaacatcattgtcattttcagaatgtttgcaaagtacagttaaaccaatttccaagtatgtttccactgcattaccaaaccatgaaaagaaactttctcacatattttatggaaatgactcattttatgttctgttcaggctacatcagatcttttatgagagaatattgtcagctaagacaaactgttccacatcagacaataactggaaagcttcaaggcacataaattctccagatcaatattcaaggtttatcagtgcactatacaacttgcttgatggttcttctgaccacaccaaatttgaagatgactgccgctccatcattgggactcagtcatatgttctctttactatagataaactgatatacaaaattgtgaagcagcttcaagcattagcatctgatgaaatggacaaccagcttctccagctttatttatatgaaaagtcgaggtctcctgggagcttctttgatctggtttatcacgaaaatgcacgagcccttctacatgatgacaacatataccgttttgaatgtcattctgatcctacagaattaactattcagctcatggagtatgggaatgaaaaacctgagttgactgctgtctcatttgatccaaccttttcaccgtatctttataatggttatctgtcaagtattgatgataccaaattggttgatgacgtcttccttaggaggaataagcggaagcaagggaggaatgatgactcccctacttccttgaagatcatggacaatgtcatgtttgctaatggtcttgaatgcaagatatcttgcgaatcttcaaaagtctcttatgtcctcgatactgaggatgtcttatttcgtacgagaaagaggagaagctctatctagtggaaccatgcctgcgctgcaaagacaaattttgtgaaaattaacaccgtaaaatcgatagtttcatttatctcttcagaccgtatagggtcttgtggtagagttatgttaattacaatggcatgcactggtgggatcctcgtgttgttgatctgtcacttcactggaatatattggtgattctttgtgttttactcgctaccaattatatatgagcgtgtagcatgggcgagtcacggaggcagtgttccgtatgtgtttttgcagttcaacgcgctgggttcactgtgttgcgttatgacaggtggaccctaaaacttaaggagtagctaatgcaagagtggggcgaacaaggaactatgagtgtgtttggtttgagtaatgaagtg

SEQ ID NO: 41897 - DNA, 3302 bp, Zea Mays
cgaactgctggaccggagatggcctaaacatagggtttagaccgttgccgtccctactcccgcctagccgaccccactcgtcccagtcccagtcccagtccgccgcctggttccttcttgctcttccctccactctctacagacgcagattgacaaggaagagagagagaggccgaggggaggaggcgtcgtcgtcttcttctgaatgcctgaactatggctgccaaaatggctggagctgtccaagtgctcaaggatgacactgttaaacgcacacccatggcacgacctagtaacggccgtgaaggaaagcccattaggttgctgtcgaaccacttctcagtgaagcttagaggagttgatgctgttttctaccaatacagtgtctgcatcaaatctgaggatgataaggtggttgatagcaagggtattggccgaaaggtcatagataaactattgcaaacatactgttctgagcttgatgggaaggattttgcatatgatggagagaaatgtctatttactgtgggacctcttccacagaataactttgagttcactgttatcttggaggaaacatcttcaagggctgctggtggaagtccagtgcatgaaagccctactcaagctaacaaaaagcgagtcaagcgatcacatctggcaaaaaagttcagtgtagacataagttatgccgcaaagattcctcttcagtcggttgctttggctcttcgaggaagcgagtcagaacatggtcaagatgttctgagagtccttgacgttgttttaaggcaacagcaggctaagagaggttgtctacttgttagacagtcatttttcagtgatgatagtcgaaaccttgttgatttaactggtggagttagtggttgtcgtggactccactctagtttccgtactacaattggtggtctttcactaaatatggatgtttcaaccactatggttgtaactcctggaccagttattgattttctcgtcacaaatcaaaatgccaagaaaatgcttaaaaatctcagagttaaagctaagcacaacaacatggagttcaagattattggccttagtgatcaaccatgctctagacagatgttcccaatgaaagttcgaaatggaaacatcgaaattaaatctgttgatatcactgttcaggattattttaaatccaagcaagttgagctaacaatgccttatctgccatgtcttgatgtgggaaaaccaaaacgccctaattatctcccaattgagttatgccacatggtatcacttcaacgttatacaaaggcactgtcttctcaacaaagggcaatgttggttgaaaagtcacgacagaaacctcaagaaagaatgcgagttgttacagatgctgtaaaaagtaatatgtatgatgatgatccaatcttatcttcatgtggtattgaaattgagaaacaacttactcgtgttgacgctcgtgttctctctgcaccagcgctagttgtgggcaacagtgaagattgcatcccaaacaggggtaggtggaactacaataataagaggctattcgatccagtcaagattgagcgttgggccattgttaatttctctgctcgttgtgacatgagccgaatctcaagagaactgataaactgtggacgcagcaaaggcattttcattgaatgtcctcacagtttggtggatgaggacagccagtctaggagatgttcacctgtggaaagggttgaaaagatgtttgaaaaagtcaaagcaagccttcctggtcctccagagtttctcctttgtcttttaccagagaggaagaattgtgatatttacgggccatggaagaagaaaaatcttcatgaaatgggtattgtcactcaatgcattgctccaagtaataagatgaatgatcaatatttcaccaatgttcttctaaaaattaatgctaagcttggtggaatgaactccaaactggcactggaacatcgtcaaatgataccagttgtgactcaaataccaacattaattcttggcatggatgtttcacatggttctccaggtcgagcagatataccatcaattgctgcggttgttggatctagatgctggccattgatatcacggtacagagcatctgtgcgcacccagtctccaaaggtagagatgattgattctctatttaagccactggatgatgggaaggatgatggcataatgagggaacttctactagacttctaccaaaccagtcaacaaagaaagcctaagcagataatcatcttcagggatggtgttagcgagtctcagtttagccaagtactgaacgtagaacttaatcaaattataaaggcatatcagagtatgggacagggggaccttccgaagttcacagtgatcattgctcaaaagaatcaccacacaaaactcttccaagctgattcaccagagaacgttccacctgggactgttgtggactccggcatagttcatccaagacagtatgatttctacatgtgtgctcatgccggaccaattggtacttcaaggccaacccattaccatgtgttgcttgatgagattggcttctctgcagataatctccagaagctagttctttcactttcatatgtgtaccagaggagcaccactgcgatttctgtggtggcacctatctgttatgcccacctcgcagcagctcagatgggccagttcatgaaatttgaagagtttgcagatacgtcgtcagggagtgtcaattcatcatcgccaccatcaataccagaattgccacggctgcatgctgatgtctgcagttccatgttcttctgttgacgtgattttagtttgaccgttgtggggtagggccaattctttgtgaaaggaaccttaccttatatgttggcacacagcaggctaaccgtttttgtgaagaaaccatgtaggtcgttagttgtcgtatatcgcacgcgtgcatctttttggagcggttttcggctccccccacccacaggtggcggttccgttaggtacagtttccagattttaacgatgctaatacagtaaaagcagtttgtacattctacgcagattttgcagggatacgtggttagatgatctttttgttatgcccagaaatacgtgtgcattggggggttatgaaagtgagctaaatttctgtgcctcgcatggcatccaattgtactcggagattgtgtttgtgctcgatacgcttcctgccactgaaatgcgaaaatgaccacttccactcgctactcgtgacaccacaggaaaatccttgcatcgac

SEQ ID NO: 41898 - DNA, 3546 bp, Zea Mays
cccatccatggcacctcgtagctggacgcctggactgctgctgcacaagcacaagcacagctaccaaatccagtcctgggccctactggtaaccaagttgtgttgtgtgtagttgtgtacgtgccctattgcattgcagctctatttgcgttgtctatctatactatatatatatcctccacgatccacacgtctcagcggcagcgctcagaggtcacagcacacagacagcattcattctttcttctccgtcagttccctccactgccttcttggagctgaagctctgcacccttctcctctccccacaattggatcacgccctatctgtccgtccatccggcctcaagattccacggcgctgcgcaaggtgaggctgtccctgctcttttttctcaccttctgttgtcaccttccacaaatctgttatggccgtcgtcggtccagtccacccatggtggaaagtgatagcaaatcccgcagagaatatgaatatggcgccatttctcctcttgccgctacgtacgaccttccatccattgccatgtcgtcaaaccagaacgagagcggcggcggcggcggcgcgggaccgccgctgccgacggcgttcaagagcccgtccacggacggcaagagcggcagccgccggagcacgcggttcaaggacgaggacgagtacgtggaggtcacgctcgacgtccgggacggcggcggcggcggcgacgacgtcgccgtcctggccatcaaggacgacgtccgcgacgacacgcaggacgccgcgtcgctcctggaccgcccggcgcccggcggggcggggggcggcctgtcctccaagctcagggcagcgcgcgcgcgcctcggccgcatcgcgtcggggaagcgcgccgcggtgccgctctcggcgctgctccgccgcgaccccgaccgcgccaggctcgacaggagcgtcgtcaccgcgctcaggggcctccagttcctcaaccaggccgccgtcaccgagggctggcccgaggtcgagaagcgcttccaccgcctcgccgtcgacggcttcctcctccgctcgcgattcggccagtgcatcgggatggtcggatccgaggagtttgcggcgcagatcttcgacgccctggcacggcgaagggggatcacggcaatggtgctcaccaaggatcaggtccgggagttctgggagcagctctctgatccaggattcgatgccaagcttcagaccttctttgacatggttgacaagaatgccgatggtcagatcactgaggaggagctcaaggaggtcctcactctgactgcctctgcgaacaagctgtccaagatcctggagcgtgtggacgagtacacggcgctgatcatggaggagctcgatcctgacagccttggctacatcgagatcgcgaacctggagtcgctgctgctgcagccgccgtcgcaggcgccgacgaggttggtgacgcacagctccaacatcagccagctgatcagccagaggctggcgccagcgcgcgacgacggcccgctccggcgcggcgccagggccgtgctctacttcgcggaggacaactggaagcgcgtctgggtgatggcgctctggctggccatcaacgccggactcttcacctggaagttcctcgcgtaccggcgccaccccacgttcgacgtcatgggctactgcgtctgcgtcgccaagggcggcgccgagaccaccaagttcaacatggcgctcatcctgctccccgtgtgccggaacaccatcacgtggctgcggtcccggaccaggctcggcgccgccgtcccgttcaacgacaacatcaacttccacaaggtggtcgccggcggcgtggcggtcggcgtggcgctgcacgccgtgacgcacctcacgtgcgacttcccgcggctgctgcacgccagcgccgccgcgtacgagcccatgaaggcgtacttcggccagcgccggatccccaactactggtggttcgtcaggggcgtggaggggatcaccggcgtcatcatggtcgtgctcatggccgtcgcctacacgctggcgcacccgtggttccgccgggggaagctcagcgagggcaacccgctgcgccggctcagcggcttcaacatgttctggtactcgcaccacctcttcgtcatcgtctacgtcgccttcgtcgtccacggcgtctgcctctacatcaacaggacgtggtacaaacagacgacatggatgtacctcgccattcccatccttctctacgccggcgagcggcttctccgggcgctgaggtcccatggcctcaccaccgtgaggatcgagaaggttgccctgtaccccgggaatgtcatcgccattcacatgagcaagccgcatgggttcagctacaagagcgggcagtacatctacgtcaactgcggcgaggtctcgcccttcgagtggcacccgttcaccatcacctcggcgcccggcgacgactacctgagcatgcacatccggtgccgcggcgactggacggccagcttcagggcgctcttcgcgcaggtgtgccggccgcccgccgccggccagagcggcctcctgcgggccgacttcgcgtcctccacggcggccggcggcggcgggaagctgccgaagctgctgatcgacgggccctacggcgcccccgcgcaggactaccgcaagtacgacgtgctcctcctcatcggtctcggcatcggcgccaccccgctcatcagcatcgtcaaggacgtgctcaacaacatctcggacaacaaagacgaagagcagccggcggagttcatgacgcggcgcgtgtacttctactggtgcacgcgggaggagggctccttcgagtggttccgcggcgtgatgaacgaggtggcggagcgcgacgcccgcggcgacgtggtggagctccacaaccactgcaccagcgtgtacgaggaaggcgacgcgcggtcggcgctgctggtgatgctgcaagcgctgcaccacgccaagagcggcgtcgacgtggtgtccgggacgcgggtgcgcacgcacttcgcgcggcccaactggcgggacgtcttcaagcgggtggcctgcaaccaccagggccagcgcgtcggcgtcttctactgcggcgaccagaaggtcacgccggagctccgacgcctgtcgcaggacttctcgcacaagaccaccaccaagttcgtcttccacaaggagaacttctgatgtggaccaccacgaagcaggacatgatagtttcattcgtgaagcaagttattcctggtgtgttttagggtaggacaaaaacgcttgacatatgtatatgtggataataacgtatgtagtatctagtaattaagcagcttttgtttttatcttttgcgttttggaaaaaatagataggagtatacagtacagcattgttcattagtgatgttcaaagtatatactgcccgcaagtacaaaatacaaagcaaaaaaatgacttaattttggtggaattgtttgatttccttaacaaacttagcacaaacctaccgtcaacaattttt

SEQ ID NO: 41899 - DNA, 1434 bp, Zea Mays
tggtaactcaccttcttacctgagcttaggtgcgtcgttataagtacattacacttctcagtattcccatgtctgtatacccataaatatccatggggtaagatcaaggtcgagacgaggctaggtatgaagggcgtcgatgtccatggccacgtagaggatgacatcgtcgggccagcatgccgacacaaggcgtgatggagcgaacgcaacctgggcgtggttgcgagaacgccgactgacggggaggaagctgggcgtcagacaccagaggaggcgcgacaaatttttgctggacagaaaggagcgtcgcgcgctgggagaaactcggccaggcagagaacttgagggagagagaggagaaagccacggcgttgcgcagagagaaggacgccagagcgcgcgacagtcgcgcagggagctcaggcgagtcgagggggcgcagccatggagaggagacgagcgcgcagggagatccggctggggtagaggaaatccgagctcagcaaagagatgaagacgcgagggagagctgagggagaaagaagatgtctgggcgcaagagcacgcgcggtcgagcaggggttggacgcgccatggaagggagctccacgagctggggtgcggcgatgggaactgggggaaaaagatggagctctagccggacgccaggaagacgaccgagcagggcaccgaggaggaagtccagggcgcggcgattttggctgccgcgtcaactgttgtcctctgttcccaccggaggaagcaccggatgctgggcgcgaacagggaggaatccgcgcactggagctcaggggaagagaaaccgcagcgcagagaggaagggcggccaggctcgagggagtggcgccatggagaggagcttgggggtcgcggcgcgtagcagagaggctcggcacatagggagatgggacgagcggctcatcaccagcggctggatgagcggaggaacgacgcgacggagaggctcgaccatgggggctagggagggagaatacgagctacaggagggagatggcaacggctatagaggaggagtggctgggcaccgatttcagcagaagagcacggcgaggaaaaaatcctggcgacgacatcgatcctcatctaggtgcttgagcggcggtgaaaaaaaaatccggggagggcggcgggacggggataggaaggagacggctgggagattgagatgaaggggatatttttttttatttctctctttttttaacagaaaccgaagatattttggatcccgatatttaacgacgtttacgatgtagatagtaattgtgacacggttttgatttgacgaatactcagaaatcggatgaatgcgtactgttaattcacctttttaaatcaaggcgaaaagcaacggaccgaattaaacatatttcggctttgttaattttg

SEQ ID NO: 41900 - DNA, 802 bp, Zea Mays
gtcagcgccctcacctgacagcctcgctctagccttcagcccacgctcgtcgcgcccccacagccagcgcccttgccccggccatctttgtctagcctccagcccacgcccgccgctcgtcgcctgcgccatggtgccagctagccgctgcctagcccagccctagtaggcaccagtcgcactgccctaggccccacacatctgccctgtgagcgcaggaggtttctgtgcgttttttgggagaggactgaatcaataattggttctttatctcttgtacttcgttgggattctttactcttgtagaatttataattatgtctcatatagattatatatttgctggaatcaaagttaacttgatgttttattgaggcagggccaacatgatccgaagatgatgatacaagttccacactgacagtggaaacatttagcttctaagagctctctgctacaactaataatttcattgggatccactgtgattaggttgaagacaaaggatggtgtcgtcctcgctattgagaaacttgtgacctcaccactactgcatttgtggctgaggctagaatagaagggaagaatctaagacctctattgaagcagattgtatagaagggaagagtcttcaagatattggtcttgtagttgcaacaaagagaagagacaatggtggtgatgctatatctatagaagtagcaacgttggtattgtagctccaagatttggttgttgatgaatgatatatatgataatacattgttaagtatatgtgataatcattgattgttatttaatt

SEQ ID NO: 41901 - DNA, 2532 bp, Zea Mays
ccccatccccctccacctgccaaaataaatccatgcgctctccagctcggtgctgcaatcccatcaaaagctagggtttcacgcctctcccgacttcacagttcacattcctctcctccccttcccacctccccaactcggccgccgtagacgcggtggcgcacgaactgccctagatttgagcgagccaccctgcgaatcttcacctgacgcacaaagtctgtcagagacagtgaagaattcgaacacgatcttaaacatcgttgattaagaccacacacaaacacatctacctggcttcccccctatcagttgtttttgtgtgtttttttttgctgtttcggacgattcataagaaccgacctgcaaggcttgcagatctaccttgagaaccagggcccttgttttggacgtccagaacgaacccttgaccctgcggatctgcttgatccgttttggatctgcttgtttttttgctggatctggagagaatgttcaagtcgatggtttattacgtgaacacctcaatcggagaggtggaggtgtggcccaagggcgaggcgagcgcgggcctgaccatggcggcgtgggcgcgagaaatccgcgttgaacgcatttccccgcccagcgagcggtgccctccgctggccgtcatgcacaccgtggccgtcggcgcccgatgcctcgtcatggagtccaggccgcccgttgtcgccgacgttgtgccgcctctcgtcgtcatgcacaccgcttgcctcagggagaacaagactgcggttgttccacttggagatgaagagttgcatttagttgcgatgacatccagaagaaacttgacaaatcatgcatgtttctggggctataaattgccatttggtttgtataattcttgcttgaccatgttaaatcttcggtgcctgggtattgtatttgaccttgatgagacattgattgtcgccaatacatcacggtcttttgaggacagaattgacgcacttcaaagaaagctgagtaatgagactgatccacaacgtaggaatggtatgctatcagagatcaagaggtaccaggatgataagtccatcctaaagcaatatatagaaggtgatcaggtctatgatgatggaaaagtgtataaagcacaacctgagattgttccaccattgtctgataaccagcaaccaatgacacgtccagttataagattacaagataaaaacattatcctgacaagaataaatcctctgattagggataccagtgtgcttgtatgtttaaggccagcctgggaggatcttcgcagctacttaattgccagaggtcgcaagcgttttgaggtctatgtgtgtacgatggctgaaagagactatgctttagaaatgtggagattgcttgatccagattcaagattgattaattctgttcaactccatgatcggatggtgtgtgtaaaatctggtttaaaaaagtccttgctaaatgtcttccatgatggttcttgccatcctggtatggcattagtaattgatgatcgcctgaaagtttgggatgagaaggatcaattacgagttcatgtggttcctgcatttactccatattatgctcctcaggcggaggcaaattgttctatcccagttctgtgtgtagccagaaacgttgcatgcaatgttaggggtggtttcttcaaagactttgatgaaggcctcttaccaaggattagcaatgttcactatgaggatgaagtaaatgagatatctgcgccagatgttggcaattatttgataacagatgatgaaaatgtcgcattagtgaatgggaatagagattcattgccttttgatggtatggcagatgcagaggttgagcggagaatgaaggaagccaatgctcaatcattccatcaaacagcgggagactttgtcatgccagtagcccctgcccagaatttcgtttcgacttcagttgcatcattagccccacctcttggcatgatgccatctccatttagccagccagttgctccaccaggtttttcagattcactgcaaggttctccagctagagaagagggtgaagttccagagtctgagttggatccggacacaaggagaaggcttcttatattacagcatggccaagacacaagagatcctacatctccactaccagcaataccacccgtccaagttccagttcctccagtgcaaccccatgggaattggtttcccacagaggatgggataaaccaaagtaacctgaatagaggctcagcaggattcactgtagaatctgattctattgtctatgagaaaaagcaaccacctcatccttcattctttcatggtggggatagtcctatgccgtctgatagatttggctatcagaaccagaggtttccctctcagctaccacacgaggatcaccccatgatgcagaaccatgcacctccaaaatacagatccttttctgcttactggtccttctggcttcgtagaatatttttgcacaaacctgtgcgttattggtgaataa

SEQ ID NO: 41902 - DNA, 538 bp, Zea Mays
aagctcgattctatactcgtcagctattcgatagaggacttcaactgaaggccatcgtcgttcaggcaactaccaaatcgaattgagatgtggtacgataattcatcacgtgatacggaagacgaaccaagtcgaccccaagcgtgggctactccgcatggtggtgctgatggatgaacctgcctgaacaaatgccaagacaaaaggatggtcgtcaagtggtcgccacctaacaaacactaacgtagtgtttattccaggcaagccccggtgcattcgccccttgtgttttaaatggtttttcaccttatatgatgcattaggtgataggagttgtgtgataaacaattgatgcattaccattcattggaaactccttaatcccggttttataaaaagaactaataatgcttagccctgcttagaaactgaaaaatcatttgttttcaataagaatgattgtggaacattggttatgggcctttcgtttcaaaaatcaaatcaaacttatggtgatgattccacttcggccggagtg

SEQ ID NO: 41903 - DNA, 2733 bp, Zea Mays
caaggtctttgggggtcccaagaattaaagcatgtacagtccatccaagtggccgcatatagagatagggaataaaatggaggacatatggtctgtctcagattgaatcaggggggtcttgaggattttcaggaactgagtaggttgtttgtatcagggggatcttgtggatattgaggaactgtgtaggttgtttggttgaggtagattgcagattggatttgttttggtttcttgagatccttgtttgccccttcatttttctttcgattttcattttgtcacccccaaccaaagattgaagttgaaggggtaggtgtccgatttttttcttttcctggggaataccattccttgttccttaaatcagcttccatatcctctttgcggtttcttaatagaaggttttgagcttttctataagatattatggatgctggtctgtgactgtgtatttttatgcttttcctaggtttgaatgcctgatgcataatattgcataaggccaagggaagttctacacatttttcatgcgcaaggctgcctagttacaaacatatgggagctgataagttactatgtttctaggtgtcagcatttcgggaaagtaagtcagatgacaggagattttacatattttcccccactaagacgcttcacttgaagacaaactcaaaagttgaccgtgttgcctggattgaggctttgatcctggcaaggagtgtttattctcttgggtcacttagcgggagagcaacttttgtgcagagtgatgtttcaatttcaactgcaaggcttagagatcgaatgcatcaggagggtttgaatgagagtcttatacaggactgtgaacaaattgtgctttccgagttctcaagctaccggaagcaactgaagtgtcgttacgaggattacttaagcttgtttgggtcctgcagacataattttgaggaaggtaaagatggaagtataacacaggggacattgacacgaaatgacttctctagttctaggcatggaaattttagcgaatatagcacaacagaatctgatgagcatgagtttgagaaacacgatggaggcgaattgatttgtgaagatgaatctgcattctttgattctatagattacttcacagagtcagacaacaggtcttcaaccatgttaagtggcaaggaagtagtggattcccaaacacatgattccagtaataatatacaagcacaaatcagacgacggagtaggctgcctgaccctattgagaaagagaaagggatcagtctctggtccattattaaagatagcgttggaaaggatttgacacgagtttgtcttccagtttacttcaatgaaccactctcatcccttcagaagtgctttgaggatttggagtattcatacctcttggatcaggcatatcaacatggaaaagtgggggacagcctcatgagaatcctcaaagtagctgcttttgcggcctctggctatgcttcatctgttgcaaggccttgcaaaccattcaatccattgctaggagagacctatgaagctgattaccctgacagaggaattcgtttttttgcagaaaaggcaagggctggaaattctggggcgacagcaatctcaaatccaagttttggggacagtcaattcaagttgaaccagttggcattttgactctagaatttgaggatggtgaaatcttccaatggaataaggttacaacaaccattcacaatctcattcttgggaagttgtactgcagccaccatggaacaatgcatataaaagggaatcgccaatattcatgtaaactgaagttcaaagagccatcacttcttgaccggaatccccatctagtacaaggctttgtagaggacaacaatgggaacaaagcttcgtttttgatagggatgtgggacgaaagcatatattgtagtaactctgatacttccaaggtgaagagcgccgatcaactgaaaggtgcctcgctgctgtgggaaaagaacaaacctgctcctaacccaactcgatacaatttatcttcattcgcgatcacactgaatgagttgaccccagggctgcaggagaaacttccacctactgattcacggctgagaccagaccagcgccacctagagaatggtgaatacgagaaagcgaatgcagagaagctgaggttggaacgacggcaaagaatgtctactaaacttcaagacaatggctggaaatcccggtggttcgagcaagacaccgaggacgggacgtattgctacaaaggtggatactgggaaacaagagagaggggcttctgggatgggtgcctcgacatttttggggatagcagaggttcaagcagccaacacgccacccagaaacaatggagtactgccatctccaatggagcatcctcttgcctctagaagagaagggggaggagccctgtgcgaggagtagagcattcgagatgtgaaggcattgtgccttgaatggtagcatagcatatgattggccacgaataggcattgccaccttgttagtatagtatagttcgatccaatgcaaataagaatgctgacattcattctttggttccttcttgcgttgaacatggatctgttgtcgtggaagaaatttgcttgctcggctaggcaaaagtctgcctacactgtatttgtttgccgatcgaaaaccaaagcaagtcaccatctataactcttcacttccatgaga

SEQ ID NO: 41904 - DNA, 4364 bp, Zea Mays
attcctcccacattccaccgcacccacacgtttctttaccctaaccccgacagccgccgccgtttcttcatcttcctcgcagcgccggcgctccatcttccgctccctccccgactcgcgatcggcacgcaggcgacgtcggggcagtctcggactcggcggcggcgtcagcggctccccctcccgccctcgccagtcgcttccggtcctccgcacaccaaccggcgactctgcgtgcgcgcctcctgcttccggtggaccgtcgacggcgcccgggccccggtggccggcgggcagcgagagccagcagcctggcagttttcctcattggaaaggaaggacaatcagagccaagagtttcttcataaacctgaataaaaggacatgcgattacggaatacagacagggcaccgcgtagctcaggtcgtcgcaataatgttctttcatggatctctgaagttaaagacacatctaatgtgggcgtaagaaagaaaagggggagaagagcacctccatctgctaaaagattgcgtgataaaagggtggataaggcgattgaaagtgatggtgctgttgacagtgacagcgatgatacagatggacaggttgacaagaatcagcctagtgcacacattgaggaacatgttgatgggagaactggtgatgacttagcaacagcaggccactcaggcaattcttccaatggtccatcctcagcttcagaagaacaggaccattcaacaaactctaaagacaagctccaaaaagctagctctcaaaacacaaagaaggtttttggaaactcaacaaacggcaagcaaggtgcatctaatttggaacaggaatgtgcaaatgaagatgggtctcatgtgctagttgctgctgtgtacaaggatattgataatgaaagaagctctcaaaagattagggatgatgtatcagatgcacaactggatacagcttcatctgatgacaaaagttcagaagaagtcgaagacgtttgtgacatttgtggagatgttggtgaggaggagaagctcgctgtctgtagcagatgcaatgacggcgcagagcacacgtattgcatgcgggtaatgatggaagaggttccagatagtgagtggttgtgtgaagactgccaaactgctgtagaatctgaaaatgagaatagactacaaaagtctcaggtgaaggctggcacttcaaaagagctttccttagaaggggagattaacaaacctgccattgctgcaaagggaagaagttcatctgactgtgaattgaaggctgggaatatagaaaacaaagagtcaaataccacaaatgagaggaatggcacagtcaaaaccaggacggaagaagatgctgtgacgacatcctcaactagagatattttttctgaaactggtggcttgtacatgggggctgactctagaaagagaatggaaccatcacacgagacattcgtgtctgatgctgacaaaggaaagcaacctagccatcaagtatcaacttcattggtggttaatgctctgaagaatcaggcaccacagtctcgtggtcaactttccaaatccacttctttcaataactcaaaggtccccaaagtgaaacagctattgaatgaagttcctcagaagccaaaatttttgaaggaatcttggtcctctattatcaataaaaaggaaggaccaatcagcatgactactaagtcagcgaccttcaaaaagcctaagccttgtgagccaacaaacaaggcaaagtcttccgtcttgtcacctgtcgaggagccaagggtgccgaatcagttggcgagccacaatgtaacaaatggtcagtgttctatattggggcctccctctgccacatcatcaatggttgctcctgttctaagaactgatagcacaactcagctgctctctacaagaaataacacagttgactcaaataatttaggttctgttcatctacaaggaaacagtgagctaaagaagcctcgtttagcaaaagtgccgggaagtatgatgctatctaatgctgaaagatccgcaggtgggattcttggttccggtgctcatcgagaagtgattcaaaattcagacccttcacatagggatgctaaaataaaggaccaaactggcttcagacagggtgcttctagcagcaatcggacaatccgttgccaaagatgtaatgaatatggccattctacacatttttgcgaagttgaaaaacttcgtttgtcttcaggaaaacctttgagtgagcgaaacttgaaggatgcatctgccaaaagaaataagacatccgaagttagtacattggcttctagtgaaaaaactccttccagagaaccagagcatgtcgtaaagtgtgctattaatcagaatctgataaatgggcctaatgatggtatacctgccccattcagccatgtaaagaagcactcattatcacctcgagctaatgtgtccatccctgggagcggagtagattgtagcaagcctaagttcaaaaataatgatccatctctatctggcacagcaggaatctttgttcataatggtcgcattatgccaaatgatcatagggatgaacctgctcaagggttttcagctggtgatgaaccaacgtcttcaactgtccctgagctgggctggatatggcaaggtggttttgagctgcagaggactggaagttcaccggagctgtgtgatggtttccaagcccatttatcatgttctgcttcacagttagtgctggacgcagttaagaaattcccttctaaagtccagcttgaggaagttcctcggaagaattcatggccaacacagtttcagaaaaacggtccaacttatgacaacataggtctttttttctttgctagagatgttcaaagctatgaaaatcactacagtaaattagttgagaatatgctgaagaatgatttagttctcagaggaagtgttggtactgttgagttgcttatattcccttccaatatcctatcaaagaacttccaaaggtggaatatgttgtactttctatggggtctattcagagttagcaaaaaagattcctctaacctcccatcttatctatccacaagtagagtagaacgaaattttaatgatgatctccaggccatggattggatgccatctacccattcattctcacagaacaggagtgatttagctgaaccggaccctgatttgttaaagtcaactaattttgaaccgagtttggaagccagtcgtgaggtgtgtttggatggagagaactctttgaatcaacttgtacgcagaagagctctagatgatcacctagattcagatgcaaaagcatgttcaacgattagcaatggtgccatgggttcctctgccatgtctatgcaaagaaaacatcagaaacctgattatccagaacatcaagataaaaagagggacacttttggtggtaatgttagtgaaagagatttcgatgtgaacacggtgccagttacttgttctgtctccttaactcaccttcaggaagaacctggtaagctgagcacagccatcgacctcatggatatagaccatggggttagcgcaggtgcactggatcgttcacatgcatcaggtggtgcaggtaaaagaagttttgagacggccgaagtagctgctgaagtacccgagcataagaaaactaagctggataataatgttgtgcctataagctctggtccacgcgagaatgcctgtacgaatgatggcaatagcgataaactgatgcctggaagctcaagcagtgatggcaagcgcgtgtttccacttgatctaaatgcagtgggggatgaggacatcgtaaatattccagccttcaggtgatgaagagttcgctgttccatgacaaaccaaccgtggtggtttggttcagaatgagagatgtgcattgtaaatcgcatgtgcagtttttgacctaatgttttcagacaacacttacagatgtgatgttcccctctttggcagtgaataattctgctccagaatatgcttacagatgtgatctcatctgccagattccttgtgatgtcatgctaatatcgtacaccacctggcttcgcttggcaggatacacgtccatcaagttactaattaggatgcgtgtatgcacgtggagacaccgttcaaacggacgtgtaaaacactgttttctactctgtaggtgacaatttatagatagccttaccatcttcagggatttgcccaaatggccgacgccgcgagaggtttgatctgcgacaatagacatgcttaattttcgtttttgttcattgtatcaagaagcacgaacaagacttatatcccatgaaagagaa

SEQ ID NO: 41905 - DNA, 508 bp, Zea Mays
attatgatttacaaaaatgcttagccctgctcagatcttgtggatagaggttgtcttttgcattaaggcctagctcaggggttatcccgaggaaagatgacttctacctgcaagaatactttcattgagagtgtggtgtgatcttactgcaaagttccctttgatgctcttttcatcctaaggaacacaaacaatcctaaggatggaagtacttaaatcgggactcgggctaggaacaggtgatgttctacctaggttgattaaggattgaatgcgtatgtaggcgtgctgatcgaggaccctttaactggtcacatgcctcgtcatgggtaagccttgcctcaggcagactaaggccagaataagataacacggaatgggcgtggagcggtggcgagagtagcgtgtaccctccgtggcaagaggctggacggtgatgtatctgtgctctcagttcgcgtgaacctgatttggtcttaagaaccccagtggcgggttgacatatgca

SEQ ID NO: 41906 - DNA, 543 bp, Zea Mays
ctgtaaacaaaagcactattggtacaatcttgtgtttgttttattttttttccccctcaaacttgtacgtaccgctggatcgaacaactcgctgtgaccatgggacaaacggcgagcaaagcaaactgacgatgctatcgtgtcatcactcgaccagaaatcgatagtgacgataagcagagcgacaaaggacgcgacaacagaccctgcaatgcatgcaacatggatctaccatggaattgactgtgaaggctaaaaacacgcacatcgtatctcggattgatctatcgtagaccgatcacccacaccaccgatggctcactgaaccttgccgcagagtcgcgccgcgcgtcgccggccgatgacgtcgtcgtcgtcgtcctctcctccctcatcaaggcgccccacagcctttgcccgaccgaccaaaaacaaaaccgatggtccaaaaccggatagtggatacgtgtccgtcgctcgaccacgtacaagcgcaacaagtacggccgagaaaccgatggaccgatcgagacacgcctgagc

SEQ ID NO: 41907 - DNA, 1706 bp, Zea Mays
attccagtccaccctcccttccccgcacgaaacccccaccagtattcatccatgtcagccgccgtccgctcccgcgccgcagcggccgccctctcggccgcgcgccgcatccacgctggccacgccgcggggcagaagcagcagggcagcaacagcactggcgcctttcgccgaccttggaccctcttcaggcgccagcagcaggaggagcggagccacgttccccgcgccgccgctcctgtcctggatgctgtcgccgatcacagggccggcggttcggacggtgcggagcccccagagatctggcgacagcccggagaagcccctgtcgctcccgagggtgtgggcgccgtcgggaggatcgacgtggttagggttgcagcccccggtggggaagactttgatggaaaggacgggggcggggaaagcgggggttggggtggctctaacctgggacgacggtttcccacgcccaaggagatttgccgtgggctggacaagtttgtcatcggccagcagcgagccaagaaggtgttgtcagtagcagtttataatcactataaaaggatctattgtgaatcactcatcaacaggtctgctgcggattgcagtcagagtgattcttgcacgagtgacaccgacatggtagagcttgagaaaagcaatattcttgtcatgggaccaacgggctcggggaaaacattgctggcaaaaacactggcaagatttgtgaacgtgcccttcgttatagctgatgcgacaagcctcactcaggctggatatgttggtgaggatgttgaatctattttgtataagctcctaggctgctgatttcgacgtagctgctgcccagcagggaatcgtctatattgatgaagttgataaaataacaaagaaggctgaaagcatcaatcttagcagagatgtttcaggtgaaggtgtgcaacaagcattgttgaaaatgcttgaaggaacggttgttagtgttcctgagaaaggggccagaaggcacccaaggggtgacaatatccagattgataccaaaaacattctcttcatctgcggtggtgcttttgtggacttggagaaaactatttctgaaaggagacatgattcttcaattggtttccgagcgcaggttcgttcaaatatgcgatctggtggtgtcataaatgctgagattacatcatcgctactgaaatcagttgaaagtggcgatctcattgcgtatggactaatcccagagtttgttggtagatttccaattcttgttggtctatcctccctcagcgaagatcagcttgttgaggttctcacagagccaaagaatgcccttggcaggcagtataccaagttgttcgaaatgaatgacgtcaaattgcattttacggaggaggctttacggcttattgccaaaagagcaatatcgaagaatactggggctcgtggtttaaggtccatattagaaagtatattgacagaagctatgtatgagattccagagacacgaactggaaaagataaaatagatgctgtggttgttgacgaggagtctgttggatctgtaaatcagcatggaattggagctaagattctttgcggagaaaaagctttggatgtctatctggccaatcacaacaataaagaatcaacggatgctacatgtttggctgcatacgttggtgtgtccatggtggaggtgatta

SEQ ID NO: 41908 - DNA, 4933 bp, Zea Mays
atcgaagctccgagcaggaaacgccaccgccctccatctcccccgtgtccctagccaggagcaccgtccccctcaccaccccgcctaactttcctatcctcatcccgacgcctggagatccatcctcaaacgccgctgctagggcaccgtcccgcgctaggaccccccgcgcctcgcaatcatgtcaccggcaactctgacgacctagggctcacagaggctagcaccacgatggccgacccgggcgcctccgtcaacatcgctgcgcgccaccacctcgcgtcgcagctcgcgaggcagccgccagtgacgcacacgggctggtggggaggggcgcgttcgtaccaccatgggaggggcgtggggcgtggcatcaagggtgagggaggggcgtcgaggaggcggacggcaacaagcccacacatccaacaccctaccaggtctttgatgctgctgcttcaccaaacaatgaaatgctcttgatgcatgattcaggagctaggaggatatctattgtcgtcgagttacatgaagttgactttcctctgctgctgttgtgctcagtgtggatgacattgtgctgcctcaggtacaactttccttttctgtgcttaagtaaaaaaatgttgttccattcgatacacagtcggattatttgatttaaagccttgctgaagttgacattgtgatatatcgtgaccctggtaaaaaatattttcaagttcagaaagcaggatacttcctttaatatgtctatcacacatgttcacggagataattctacacatggttttttatacctctttttgaccccacttggagatggaagcgagattttgaagttttaaggcctgcagtgccgtggtcttgcgttgatatctgtagttgtacatagaaattttctcatttggtgtatgtctttgctactttttccttaaacataaattatatttttataactatctggcagttattgatctatcactgccttactacatgatacctatctggcagttatgaaaatattcgaatccattttatatgtaaatcctaaaattttcgaatccaaagccacccattacaatattatgtactgaaattatatcttttacttatgtgtcactctgcatttttttaagatttaaaaaaatttcttccttattttatacatggttgaacaccaaccttcatgattcactggatcttcttagtattatctctaacaaaagaatttataaagttctttccccacaaatgcaaatataggtattagcttattgattttaaattggttattaaatgtctggcatggatctcctccctgctcacgggcctcaccatcctcaatggcgagtgtaaaacttcgcaccaacacactcgacaagcttgatggcgacccctacgtcaacatccgcatgggcaaggtcatgtaatttttatcttcatttcaatagtgattgaagcaaatgaaaattttaaaattttggcagtgagtatgcaacacttccaagcaatggataatgtattaatgtggggctgtgggcgttggaacgtgcgtgttgactagctttgattagcttgtcgatatacatacttagccatctattttttcttctcctttcaaatgctatgctattgctactgctgttggagtgtaccatttaacttgatatatgatttaatagatgctttgtgtgcataaatcgtctacagttaccatctggacttttttagccatgtttgagagatgtgacggagtttggatttcacttaaaaatgcaggtccagttgatgtttaatgtgcctgaactgcagttacagtcataaagctcaaacaatcttgagcatttggttttacattatattctctggtttctgtttttgtgatttgtgttctgatgatgcaaacgcttccattttttatgttgctcctgcacaagatttcctgcacaaccaactgttttttgaattctttatgttatttgatccagggagtggacacaatcaggctcttgcgcaagtatcccctgaatttactacctgtagtttcgaaatgggcttacccaaaaaaatatttgcactaagaatatttatgtttgtttagttggtctggacaaaccacaagatcagtttaagcattgcttccaaatgccattaaatatttatcttgactgaaaattcgcacacaagaatagtaatattctatgaccaagtgactgtagtatgaagaagcatgtgtcattttcctgattaatttagctggttcaactttgttggggtcccaagtcttggccagaacttgatgtaattaaactcctttagacaattgagtacctttctatgtggatttacatatccctttgcttatttagtaacttctgcaaaatttgaatcctaggcaatgtcaacctcaacaccttgatgaacatgttcagtgtgcttggtgctggtggtggccttggtggtcgaaatgcttctaatggctctggaccgccatgcttgcgtcggacgcgggacgtccacgccgccatcgcccgtgagcagctccgacagcctcatcgccgcgttgcacctgctcttgtgtcgcaggctcgggttaccgtcggtgctgacaccgaggaaggcatgatccatgcggagcagcccaaggcgcgatgccacctccgctgtcacgcatgatgagctgcttcgcctctggcaccgccttgttccttcgcgatctcacattggacggtggatgaacttgggcttccaagatccgtaatacaaggtaaattgagtaccttttgtgacctcttctgtatttctaggcctttgtataacagctgtggacaaaacctgtaaacatgttggatgaactggagcagctattgaaaggtaactctatggtgaaagagctaacgcctaggacaaatgactaccttgtttcatttcgagaatgtatgtccaccaggattttatctgttaatttgaacaaaattcatatcaaagcacgacaggtacttcttgatatttccttgatttgcacagtgattgagtgagcttttaagggtacgaatgtagcagcctagaataattctatatttacttactactataaagagcgggagcaaaatatagctatacaattgatgtatatttagcatatcaaacaatgctcaagatacttaattaattgcatactatagttaggctgtatataccaatgcaatggtcactagcaagataatgcagcctcacagtcttatgacatcagccaatatataaattagaccatttttgttgctgcaactgcaactaatactatgttgaagtgtttttcgttaactctgctctgaaaatgctttttgcttcactctttgacatatctatatgactatatagccgatgcctgtttttactatatgcttatcatgaatctcatgttttccatatgaataatgctagctgttgcaacatctttgtttggagctaatgatacatttaatcctagacttgatggcaaagaacgggtgcaattttttgtctctctatttcctatttatgttgcacaaataattgtttccttttgttatccaaataaataattacttccttctccacccttttctccagttgtagcgagtgagttttagtaagggataaacaatagtaggaagaactctgttgtgtttcaatctcgagtatttgatggatggggcattgttctatagatggtgtatacagaaatgatcttaactgtcattttggtcaaaaccacaatagttctacttatgttagaaaatcaaaagatttaagtgtcttccatggtttaaagttcatgatgagcaaatttgacttatttttaattgtttatcatattttgagaataattttgctgcctattcaacagataccatggggggagcatttgatccagctagctggcaaacaagatttggtggtaactgtttatgatgaaacaaatatttcgaatcattaattgctatgtttgtgtctgcatcctgtcagcaattaggatgtgacaggacatggcctccctccaatgcaaaaatcccaaaagctccttgcagacacacttatttgcattctttgcgctgacatgcagttaggatgcgacagggcctccctccaatgcaaaatcacattaaccatgtcaccgctgtcaattgttttcttgagtttgttcccaaaacctcttaattattattgcccacggatagtcatgttatctacataatccgttttgccactcttcagggttctgcattgtgaatagaggttcatctttgtgattagattgccaccgccgctgctttctactcattcgacgaatgttttgcaaagaagaaatctggtttatcttaccctcgattccttcctatgatacaactaacaaaatgaattggtacattcagaaacgattgaaaactattgtttcccgtcacctcctgtcatagatggcttggaccctcttattatcctgggagcctcggtggtttggaagcatagaaacagagtggtgttcggtagagtttcttccaacctcactcttattctggagtctgctaatgaggaaagcgagaaatgacaagttgcaggagccaagggttatcctttctggctgctccaagccatataatttagggtggttggatccttcatggatattttaatgtacttctgttgttggcctccgtaagaagtgcatgtatcccgggcgtctttcagctctttgtattcttcgtcttttaatatagtggggcgcagttctcctgtgcttttcgagaaaaaaaaatatgtgcatctatttaagtctcttaccaataagtgtttataaaatatgtttcattgttcttagcttgatatgtggtaaggtcttcttctttcttgatcatctatgtatgccttaattcatatactccgaaataat

SEQ ID NO: 41909 - DNA, 2675 bp, Zea Mays
tagctgcgactgtgtactatactagtccgcatccgcacactagccagtagttgtccaattctccaagtggttcagaggagctagcagtacctcacgcggagtatatgagcgagtgttggcactggcgctgtctatccgcctatcatccctccccagcccgaaaagctatggccctgagctctcctccctcgccctggcgcaaagtgtagtgtaacgtacgtcaagccatccatccatccatcggcagttcggcacccggccagccggcgggcgcgctgggctgcctgcggctacacgtacgtcgtaatcccgctctcccgcctcgcccgccccggtcgtcccgggctcccggccacaacaactacacatagacacatggcgcatgatgagccaggtttcgcgtacgcggactacttcgcggcggcggccggcgccgtggcgacgttcgtgccggaggtggacgtcggcggcggcggggaggagggtcttcacctctacggcctgcagccgcaccaccagcagcccggggtggagatgtacggggccaggggccacatgccgccggccgcgatgatggcggcgcacggcggcaaggccgcgctcggtctcgacgtcgcttctcccgtcgtcggcgggcacttcggggacgaccacctccggcaggctctccaggcgccgctgtcgctgtcgctccacgacgacgggaccgccgacgccgcgccgctggcgctgcaccaccaccaccaccatctcggcggcgtaccgcaggcgcagcagcaccagccgccgggggcgtggccacagccgcagcagcagggcgcgtggcacctgcgcggctccaggttcctgcgcccgacgcagcagctgctgcaggagttctgcaccctgcccgtggacaccgtcaccagcacgcccgcgaagccagcgagcgtggaggacggcgtcggctcctcgtcctcggcggcggccccgtcgcagcagataatccaggccatggatgcggccgagctgcagaggctcaaagccaagctctacgccatgctccaagaggtggagagaaggtaccggaggtaccgggagcagatgagggccgtggcggggtccttcgaggcggtggccggggagcgggcggcggcggcgtacacgaggctggcgcagcggacgatatccaggcacttccggagcgtgagggacggagtggcggcgcagatgcaggcggtgcgccgggcgctcggcgagaaggacgcggacgacggcggcgtcgtcccggcggcggccgggatgatggccaacaagggggagaccacgcccaggctgcgggtcatcgaccagtgcctgcggcagcaccgggcgtaccagaccggcgtcgtcctcgagagccagccgtggagaccgcagcgcggcctgccggagcgcgccgtctccatcctccgggcgtggatgttcgagcacttcttgcacccgtatccaagcgacgtggacaagcacatcctggcgcgccagaccggcctgtcacgcagccaagtctccaactggttcatcaacgcgagggttaggctgtggaagccgatggtggaggagatgtactcggaggagatgaaggaccccaaggagggcgcctgcagtaacgcgaacagcagcgtgaacactggcgccggctacgcctccgaggagctagggcagccgctggggcacgggggcgcctgtggtggcgtggacgagcagaagccgacgcgggcgcagctggtccacgacgccgggtcgctagcatcagccgtcagcatcggcagcagcagggaccagcagcagatcagcagcatcaacttccgcatgatggaccacctcgacttcgacgcgtacagcggcgaccccgccgcggccggcgggccagcagctgggttcggtggtgctggtgcttccggcggcgtgtcgctcacgctcgggctgcagcagcacgccgacggcgacccccacggcggcgtcaacatcgcgttcgccgcggctccgtcggccgcgcacgagttcctgttcatggcaggcggcggcgagcatcggatggtcgcggctggcgccgtgcacccgtcgtcgtcccacggccacggtcagttcgccgccagcatgcaaggcgacagcgccggtgtggcctcctcgcactaccaccggggcctcggcgccgccactgggttccagctcctccatgacctggccggctgatcgcattagcatggcaagggacggaccctgatgactaggccgatcgagcgctttaattggctttggaggttcacgcgcggccggttgacggggatgtgccaacggcagcagctagccggatggcattggcatgagcgcatggcgctcgcgcagcttgcgcgcttcggatttttgtagggtttagattcctctcgcttcaattcttggcacggtgtctctgtctacatgtgtatctgtatcgcttcggagaatgccattatctgccatggacatggacgtctcttgctccgcgcgaacactagcatctaagaatttttataaaatttactccctaaatcatcatataaaaagtcatatgagtaaaaattattttctatatatttatatccttcaacagtttttttaatattttgtatgtatattctagatatttatcctcaaaaatctgaagtaaagaatca

SEQ ID NO: 41910 - DNA, 2340 bp, Zea Mays
cccatgccgaagccaccagcgaaatgaacggaagaagagagcggagggaacaactgccgcacggcacggagacagacgcggacagaccgagcgattggtcggcgaccacctcacctccgccgccatccactcctcggctcgggctccacgctgttgatgggcatatgaacgatgtccacatctcgtcagatagatgatgggcctgctgtactacagttatgcagatggacattgctacaaccccatctcaaactatcaaaatttcgagaggcttttatatctccaacaaggcgtctttttggactgctctcagaccatggggatcttgtcctggcaactgctgagatcaactcatcacaagttgaatctcatagagctctatcggatacctgtactcaggcagtcttcaaaacgttttctactattccccgagtgaagtctttagcatggggatactgttctgatgcttttgatgactcaagttttaatgaaattctagtggtatcaagtgatgcttctatcacagtccatgcattctgccattctcgcaaaagcacactaacagttaattcaatgtctgatgctaaagagttgcatggggagtggaaagagtggcgccctactgaatgttcagtgttggaggatggtgagtcaggtccagaaaattggttttgttctttcctaactacagtcactgcgtctgtttctaatggaaaataccaagccagattgcccatgaaatctttattgcctaattcagcagaagttgtatcctttagcatatatgacattactctctctttcttgaaatattggtatagcaaatgttctctgaagactatggcggaaactgacagtgaatcaccacgacgttttcttagagcatcgtgcagttgtcagtgggagtgtctaaaagttttgtctagctcgtcatgttatttgatcggcttagttctgactcctaatgaatcagtacgttgtgaggcccatccatccaatgcggagtgtattttggttactgttctggagctaaaccactggggcatacagtggaactttgtggcagaccttcaggatgtatctgatggtattacgccaagtccaaaatgggttgattttcagttatcagatgtgtttcttgcctgccttaatacagcaggttttgttgccatttggaacgtgaaaactggtggtcttgtgacgtcattcagtgttcttcaacaatgcagaactgatctggagatgcctctgaggagctctatgtccattgtgacaaatttggacgagggaaatatccatgttgagaactttgttggcagaatgtttaagcggttagttttggcatcatattcttatcttcttgctgttgtagatgaggttggagtagtgtatgtgttctatgcggatgacatcttaaacttcaaagctaatgtgcacgaaaactttgatctgcctgttatgaatcagtttgctgattgtttttctatctgggaagctgctggtcatgagataggaagtctatcattttgtgctaatcagtccatacaacaagggtcacttagtctaaccaaattggttcctgagttctcagggaaaagcgatgatattgtcaggcctagagaaagaagaaaatatagatgcgatgaaaatgaagtggacagctggccaagtggctttgtcactgcagggcagatgaaagttggggcaggttatcgtcgcacaaattcctcttgtttctttaggaggataattcttcctccatgcagatcacagcaggatgtaattagcctgtgtccacttggactaactagaatttttaaaggttctattgcggatggaaacgagcatgtcaaaatttttcattccgagttgcttatgtattcatcttttcttggcaaaggagatattgatattggttttatggacgaaatgcttccatttaaaaaggattccacttttgtcggagattctgttgtttgctcctgccagggatatttgtatttaattacccagtatggcctttctgtggtccttcctccagtttctatatcatccttttcatctcaatgtgacgctatcaaattctggcaaatgggtcctgctgctggtagcacatgcaatgctctgaacttactatctgttgacaaatcagacacaagctggaaaacctggcaaatagaagtcctggatagagctttgttgtatgaaggtcccgcactagcagacaggctctgttgggagaatggatgggatttgaaattctctaggttacgttggctgcaattagcccttcattactcaatgattggtgatctagagcagtaagatcctgtattttct

SEQ ID NO: 41911 - DNA, 702 bp, Zea Mays
gctgctaatgagaatggtaaccacgaaacaggccatcagtcagtgatgcaaaaatttgaatttgaattcaaggaaccgaagtacaggagcatctgggagaagcgctagctgcacagctgagagcagacatcacaaatgaacccactatacaagagtgtttttatccatagtatcttgcgttattaggcggtgcggttggacatggatgtccatgtcctacgcgagtgagctgagaaccgtccgtcgtcttcgtcgtccctgttgattagcgctaagcgcgccgcgtagacctatagcgccaggagtgatgggttggttagattaatggctccggtgcagaggggctctgacgccggtgctccgcccgacgatttgaccggccattttccttccgcgtctggccctggccgagccgtcccggcccatgaccgaccgggatcacgtgccgccccacctcgcaccgctcgcgccccgatggccgccgagccccaccgcgcaccgcggaacgcgtcgcgcctggactggctccccggcgccacctgacccgacgggcccggcgcccgcgcgccgaggggaggctgcccgctgggctccagagagagagagagagagagcgcccagtgaggaggagcaggacaacgcggccgcggggccacgccgtcgcagcgcgtgcctccgtaccgcgcgcaaaaatatcgccac

SEQ ID NO: 41912 - DNA, 1129 bp, Zea Mays
tttagattcaatagtatatcatatttaacacttaaacccttccaccaccatctaatgtggctttataaaaaactctaacaaattataattatatctaccgatggattttgattctacagacaaaaaaatctgcttgcacgcttgtacatagtatatgcttacatattagtggttgtcgatagattattggtaataggtagttgggttgccggcacccacactctattcacattgcccttttccgcatcatctcaattctcatgtcggtacagccgagaaccgggaccgtgcatttctgggatggggctgctcttccttgagcggctcgagggggagggcgtgttcaggtgccggcgctgccgcgtggacgccgcctccaaggacgccatcatctccagggacttctacggccgcagcggccgcgcctacctcttcgaccacgttgtgaacatatgcctaggccctaatgaggatcggtatcttgtaaccgggctccatactgtgaatgacatctactgtagctgctgccaacagattcttggctggagatataaatggcaggagctctgcctaatcattaaaaggagagtccagaaaacacactgtacaggtccgaggaccgagacaagacaagacagactagcaaacacgacgtgaggaacgctcctaacagacccgtacaaagcagctaaaccactgcagcagccctaatactggggaacgtagctctcttgaaagagaaagcctacgagcaaagccagaaatacaaggaagggaagtacatcctcgagagagctagaatggtgaaggatgggtgacgatcatttggatgctcttacttctaacaccccagaagcgcaatcttcttgaactctggaaagattcagaactatccctcaatttgcatgcctcagaacatttgacacctaattggcatcccagttagctaggaagatcactggttgcagattctttgatttgtagaatattactgactctgaatacccttagcttgttagtaatggtaacatttggtgaaatattgatgattaggtgaattgaagtgaagctgatgatttatctgtagtaaccattattattcaggcgccctgtggacttgtctggttcg

SEQ ID NO: 41913 - DNA, 2233 bp, Zea Mays
ttccctcaccgctgctcactcacccccaccagtcagcgatctcacacagtaacaactctctctctctctctccacctttttcactcccgttgctggctgctttgctcctctgctctccctctcctctctctcctccgctgcctttatctcacttcgccgccactcccagtcccagtcgtccctctctatctccatctctctatctctgcactgcactgctcacagtcacagctatagattctagaagccaacaaaaacagacgggagcggagaatcgtgctccgggaaaacaagagaatccacctcctctcccctcccctccccttcactctccagatctacgccggcggcggctggtgcgtccgtgctgctccgcggaggcggtgctgcgctgctagctggtcgtccgagagagcccggcccccgaccgagcgatgggggcggcgccggtcctcgtcctgctgctgctggtcgccgctgccgcattgccgcggcgggcaagcgcggccaccgacgccggcgacgtttctgctataaatggactttatgttgcacttggatcaccaaagctacctggatggtctgctagtggtggagatccctgtggtgagagttggcagggtgtcacatgtaccggctcaagtataacctcaataattttcaatgctgcaaatttgggtggacagctaggcagcctggggaacttcacttcaataactgaaataaatcttagcaacaacaatatcggtggaagcataccggaagatctacctgtcacactgcagaatatctttctctcagataaccaactaactggaagcattccagtgtcattatcaaaactccatagtctaacagccatgtcactgaatgataaccatctagatggaaaactaccagatacatttgattccctcacagaacttgtaaatcttggtccattaccaccttcattgggaagcttgacatcactgactacattgcacatgcaggataatcaactatctgggacccttgatgtcttgcaggatctctccctcaaagatttaaatgtcgagaataatatgttttctggaccagttcctccgaagctgctcaacataccaaacttcaaaaatgatgggaatccttttaataccagcatagctccctccacctcaccctcttcacctacaggctcaccaacacaaacaccatcgtcctcttcatccccttcaggatctccttcaccatctaatgcagcatcaaactcttctagtggatctactgctcgaaatagcaattctacgtcatccaagaagaagaagccttcaaccctcagaactgttggatatgttcttcttgctattgtgctattcatagttcttgcgctactggtagtattttgcttgtccaagtatcaagaaagacagactagacgtgattattccatggctcaattaggtaggcatcagagggctgaggagccaaaaagcaagcaagcttcggtgcagtctagacatgatgccaaaaaaggtttatctgaagttcctgaaagaaagaaaccccgtgaaataaatttagctgtaccagttgccattgagaagcctcctgaaaagagaaaagagcatgtaattaatttggagcgaacagaatcagagatctttgctgcagcgcctcctccacctccacctccacctcctccacctccacctccgccaccaccaccctcaacaccgccacctccatctccacctccacgattgccatcaccacctcctgctgaaaaagtaactgtaaatcccattgtacgtccagtaaaaagagttaacactccgccaaggactggtccctcgacatctgcaacatccttttccgtggcatcacttcagcaatatacaaatagttttcaagagcaaaatttgataagggagagtagattgggaaaagtttatctggcagaacttcctgaagggaaattactggaagttatgaagattgataatgctaatggaagaataccagtagatgactttctagagttggttgcttgtatatcagatattagacaccctaacattcttgaattagttggatactgtgctgagtatgaacagaggttacttgtgtataaccacttcagtagaaaaacattacttgatgtactacatgaaggggaggatattgataatccattatcctggaatgctcgcctccagattgctcttcatgcagcaaaagccttagagtaagt

SEQ ID NO: 41914 - DNA, 2047 bp, Zea Mays
agacccgtcccactccaactccaggccatctccctacgcctcagacctcggtgcaaacctgccgcgaaaatagcagccgcccgttcgctctcccactcctcccgcgatgagcgacccgcggggccacgccgccggtcccgaccgtgacggggacgacccgctcgccgaggacgccaacagcgaggaagcgtggcagacgcccgagaaagagccggttgctgtgtcgaaagaggcggctgcgcggggtggggacacgaccccggacgccgaaccggagagcgatgacggagagggaggagtgggctccccggatcagatggagcccaatgcggacggggagcgcgcaccgcccgtggccgcggctgaggacccggaggggattgttggcagcgcaaaggtggagacgaacggcgaggacgccatcagccttgacgccgacggggaggaggaggacgacgatgatgacggagacgaggaggaggaggaggaggacgacgacgacgacgactccacccctgatgcgtctccgagggccgaggtgaaggtggagggcgaaagctccacggggatgacccagagtggcgccggccaccgcgtggaggtggaaccggaccccttcctcgacggtgatgactctgggacggaggaggagcaaggtgcgttcatggcggagctggagcgcttccatagggagcacagtctcgagttcaagccgcccaagttctacggcaagggcctcaactgcctcaagttatggaggcaggtcgcccacctgggaggccacgagcaggtaacggtttgtaaactatggcgtcaagttggagagactttcaggccaccaaagacctgcacgactgtttcttggtcatttcgaattttctatgagaaggcacttcttgaatacgaaaaacacaaggtccggactggtcagcttcagataccaccgcctggtttaccacagcctagtggtgctgaccgtgagagttagaagggatgctgcagcgcgtgctatgcagggttggcatgctcaccgccttctcacaaatggcacttatggggataacattttgaaggacaaagatacaatgccacttccaaatcgtgataaaaacctaagctttggggtgctcaagagaaagaaagcatctagtccagagtatgctctcaagtcgtcccgctcaaaaacaaataagtcacaggaagattctatggtcgttgacgttggagaaccagccgactgggtgaagatcaatgtgcggcagactaaagattgctttgaagtttatgcactagttccgggacttctaagagaggaggtgcatgttcaatcagatcctgctggacgtctggttatcacaggggatccagagcagcctgataatccttgggggatcactccgttcaagaaggtggtcaacttgccatcaagaatcgatcctcaccaaacatccgctgttgtcacgcttcatggtcagctattcgtgcgtgcaccatttggtcatcctgatatgtagatatgaaatcctgtttacttcagttttgttgactggcgatgcctcgtcatcagtgatattccttgatattactagggtttatgtcaattctgttgaggaaataggattttgtttgagcagatacatgatgtcaagctgacttagctgaaccgttctgtggttggatgctgattgctgctgttgccatctgttatcaccttgtttattactccctccgttcttttttatttgttgtggtttagtttaaaaatgaactagaggacgataaatatttgagaacggaggtagtattatagtagtggccataaagttagctgattcatgcatgtattccagtttcatggtgagattttatagagaaaggagatgttgttcgtagtagggctaatttgacattatgattacttattgttctttattatttttcttctgtattataaatgcctctctgggtcactccaggcgccttaatgttgcatttttgtgcataacgccggttcctatggtttatgaagctaattgctgtctctatg

SEQ ID NO: 41915 - DNA, 499 bp, Zea Mays
ctgtaatatacatgaatgtgggagatctctgggataatgagttcaagttgttgaacttgatagccttgttaagttacatgttacacgtgcatagccatctgagaccgttaatggcaaggattggtgtatctgggcacgataacttgggagggttgtcacaccccctggccgcggctcccggcgcccatgctgtgcccaagtctgccctgcgcctcgtcccctccacaccctggacgaaccccggcgaggagcccctctgccctgcccgacgcccctccctctacctcacctggccacggttccctcgcccctcgtcttcttctctgcgtgcgcgaccgacctcgggccctgctcgcggcgcgtggccgtgacgcagccatggttgagcgcccccaacgagcccccaaggtgtggccaggaggtcatttgtggcgcgcaggcgagcctggccctccccaagcgcagtctccatggccggcgagatctcctgctggccggc

SEQ ID NO: 41916 - DNA, 586 bp, Zea Mays
atttgcatcaacaaaggggaaaaatgcagcaaacaagataactaatagttcagattcagattcatatgtatctgtctatctccttgacgatgatgatcaaggaaatactgatgatgatgacactgaatcttatgagcagccacaacccctggcaattaagttatctagaagagctagaaacacaacccttgcttcaaagaagaagagaaaccccaacatggctccaggaattaggttcagcaagagagtgagggcaggtccacaaccagaggagcaatcataaaaaaggcttcactctacagagacagatgaccacaatgtacaggaaccaacagatgctaatgatgacataccaaacagccctactacacctggacttgctgatcatttcagcagagctgcagaggaagccatggcatctgctgctcatgacagtacaggtgatgctgaaggcaacaaccctactatagctggacttgctgatcatttcagcagagctgcagaggaagacatggcatctgctggtcatgacagtacaggtgatgctgaaggcaatgtagctagagatgaagaaactgaaggcaag

SEQ ID NO: 41917 - DNA, 591 bp, Zea Mays
ctcaaccttatcccctatacacagcacctcagctccctcacgcagcactccctgctctcccacgcgtcgctctctctcgctggacgtcatctcccagccgatccctcccatggctgcctctcctccatctccctccctccctgtgtggtgtccagccgatgctctctcccatggacgccctccccctcttgcagcaagtcagcaaccccatctcctctgccctccatccccagctcgcccctcaaccatggatactgccagccctggcactcgccctctgcacgccattgctctccttcctgcagcaagccccatctctactggcgctctaattttcagtcatcccgcatggccggcgtcctccccattttctacaggtgagcttatttcttactgttgattgcatggtgcatgtaagcatgagtgggtgtaatatatgtgtatatatatgtaagattggagccgtggttagagaagcgggcgaggttcttgtgcgacgcttcctaggtgtttgatgaaatgggcaaatcgatgtttgctgtttgaactgtgcatacagtttagagtgtggaactaatctagtgaagcaaa

SEQ ID NO: 41918 - DNA, 2355 bp, Zea Mays
atggaacaggaggccttgaaacacagccccaggtcttcagcttcaaagcttcactctccagacttaaggagttgctttcaggatgttgcctcttgaaaatgagattgaccactgaagttgcttgattttattcttgcaaggaggttaagtgaggggaattaaggagaattaggagagttatgggagttgtgcttctgggtttcttgggccagctaatcgaacggcgagcttctctgcggtggaagcaagcggggagagcatcttaccgctgcactgggatgagcacacatatcatacaattgttacaaggcctgtgttctgatggtttatggaggtatggtgtcttctggtcattcaaaagtgagacgaatgggtggatcttgacttggggtgatggatatgtcaataaaatgatagaagactggcaaatgggagatctatctgctagccccactgttcgtaagaatcagacaataccttcttcgtggtgcaagaaaagctatccattttgccccattgaggcagcactgatgagaatgcctagccatttgtaccctcttggagaagggattattggtaaagtagcacttacaggacaacattgctggatttctgccaatgagctttgttcaacagctatgcataagtaccaagaagactggcagctgcagtttgcagcgggaatcaagacggttctgcttgtaccagtggttcctcacggggttcttcagctgggctctttagatacggttttcgaaagtgcagtgttggtggcactcataaaggacatgtttcataagatttgtgatgcttcggtttctcatgcttctttatccactgggtctgcctactcaaataatttgagtctaccaactgcaaccctatcaatcaatcatccagatgttaacttgatatatagttctgctcagatcgtgaatgctgatcaccacagtttaacacatcccttcagtacatcggaaattccaatactagaagacatcactataggttcttacagaactattccaacaggttggcctaatggactgttgggcgataatggcaccattgggcatgaatattttgaaggcttttctctgacagatatggcacattggaaccaagagaatactcatggcagcactattgttgtaaatgatggtgcaatgctttcgaatacttcaattcattcagagtttcacggagatgtcatggtaatgtccagggaagaacatgagctcttcacgtggcgttgtaggctgaaacaagaacctacaagccctgctctccctcaactgaatgacaacagtgctgatctttatgtgcagcttgaaaccaacaattatgcggaattgttactagacacaataatctaccagactggtcatacatcaaacattgaatctgctccctcagctgagtctccaatttcatgcaaaacacaagttaaaaaagatcattcattgagggtcgatgaatcgccaatttctgatatcccaggtcgtcaagacctttcacctatatccataaatgaagggtttataagttgtgcaatgactgatggacgtgtggaaatcaacaagaccatacctgaagaatgcttagttgaaaatacgcacaggataaattcagctgaaatcaaaagaagatgcagaaaagttgagctccagagaccaagaccaagggacaggcaattaattcaagataggatgaaggggttgagggagcttattccaaatgcatcaaagtgcagcattgatgctctactggacaaaaccatagcatacatgctgttcctgcaaagtgtatccgagaaagctgagaagcggaggtgtcccatgccttatttctgctttgccgtgacgctgagacagattcagaatacattggaagacaaggaatcccacgatgagacaaagaagcaacttgaaaggtgcccactaagagtggaagagcttaaccagcctggccatcttctcatcgagatgttgtgcgaggactatgaagtctttcttgagatggcacacgtgctgaagggtcttaaggtgagcatactgaaaggagtgctggagtatcgttccgacaagttttgtgctcgctttgtcatcgagggttcggatggtttcaaccagatgcagattctgtgcccgctgatgcatctcctgcgcaggagatgaagtttgtgtgtcgttgaaatgttaccgagactcttcttactctctgtttgctttggcataaatgtacagcaaaataatggatggatgcattttttttagatcccagcgagactggaatgttgctatatatatatccatattcaatcgtgaacagcaaacaattcaatcgtgattcagc

SEQ ID NO: 41919 - DNA, 614 bp, Zea Mays
ggcgcgctcgcggcagcctgggcggcttgctcgtgacgacctgtgtggcacggcctgcccgcccgcggcgcgctcgcagcagcggcccgtggcgtggccagcctgcccgacgcggcggctcgcgacctgcctggcctctgcccggtgcggcagctcgccggcctgccagcgcggcggcgcgcggccagccatccccggccggctggcccggctggtgtggagcgtcgccccgacatggcacgatcctcgacacagcggccagggaaaggtcggctcagcccgcggcgtggctgtccgagccctgcgcagtctcgcagctggccagtgtggcacgcgtagcccagcacggctcggccatggcggctagtgcggccccggcaccccaacgcgagtccgaccgtcggtgggagcagccaccaggcttggccggctgaggcctcggtgctgtgcagttgtgggaaatggagacgattgtggccacatgagatcctatcgttttgaactatgaactagtacgtattcaatgtgtgtgcatcgcaaatacatttgatcctgttctacttgtggtaacttcgtaatcatatcgagtacatgttaataatagtattttgtcg

SEQ ID NO: 41920 - DNA, 4332 bp, Zea Mays
gacgcccaccgcaccaccccaaagcccacaggaggaagacctagctagacacctgacctagggtttcccttccttggtctccttctccagggccgggagggaacccgtccatctctgagagccgagatcgctccatctcccccacatgccgctccgggagggagccaagcgtgtctccagcgcgcgccactatgcccccgccgcgccaacacccgcgcccgcgggggcacccgtcccgccccaccgcccgccgcgatctgtctccgccgctggctccatatccactgcctccgcccgcaagccgccagagccgcttcgaagggccgtcgccgactgcctctcgccgcccgccccgcacacccatggcccagctgcagccgccgcttctgccaccgcggaggcttcacggacgctccgggattatatagccaacccttcaaccatggatatggcttataatgtcctcattgaccatgcacttgcagaaagtgatcgtagttggtgaaatttgtttgcactaaaacaatcaaggattttgtcttcaggtacattccaagggtgcaaactctgcgacaaattgatctgttttgtgcgaatacgattgcaaaatgtgaaccgatggcaaataatagagcagcatcttttgccaagaataatgtatcagcagcagctgcaataaattcttcatcccttgccccaccaatatccaactttgcttcagcatctcttgtgaagtctttaaactatgttcgctcattggttgcaaggcatactccaaagttgtcattccaatcaatagtcgcggcaaagcagtcacttccttcactttcatcatttctgaatagcaagtgaaaaagttgatgtgggtgaacctgtagatgatagcaaatatatatccttcgacattttaagctggcgatggcatgtgtatggcgaacggcagtcgtccttatctgccaaagaaagcagtgattttgtgggtcttcaagattttcatatacatggttttcttgaagtcggtgctgcagctcttctagttggggatatggatgcgaaaattaatgatcaacagtggaaatattctgttatccaggaatttccagatattgatttgttacaaccttcatcttctgccgcaagtacttttgcgtcatcacaaagtcatttaaaagcaataactgcttcaaaacgcatgagatcagctccaaatcaagtctggatgaacataccaataaacacattccagcctcgagcacggcctctttttcagtacagatactacagtgagcagcaacccttaagattgaatcctgctgaaatttctgaagtcatagctgaagtttgttcagaagcaacttcaaatgcaaatcagttgattgttccatcaagattgagcacccagagtcggcaaccttcagcagatgtggcattcagtgtccttatcaaacttgtcattgacatgtatatgatggactccgagactgctgctcctctgacactttatatgcttgagggtatgctgagctctcaaaagtcatcagccagaacgaaggctcttgatttgatcctaaatctgggggtacatgcacacctgctgcaacctatggttattggagatgcgccgcttatagataaaagtgaatctgtgaaccgttcttatctgagcaatgaatacggatcaagtataaatgaaccgagggaagcagaacctgaagtagaacagaagatcagtcctgctattgatcaatttgaatcatggcttcttaaaatgctttttgaggttctccttctcctagtacagatagaggagcgacaagagatcgtgtgggcctcagctttgagttgtctattttactttgtttgtgatggaggaaaaattatcaggagtagactgggaggtctggacataagggtggttaagactcttcttgagattagtgtggagcactcttgggcaaaagtagtgcacagcaagctcatttgcatgttatcaaatatgatgtaccaagtatcagatttaactcagaatggtgtttctgacacacattttgttcctgagcggattgatcttcttggtgggattgactacatttgtcttgagtattcacgagccaactcaagggaagagaagcgggatttgttctttgtcatttttgactacgtagtgcatcaaataaatgaggcatgcttggctggtggtatttcaacctatacttatgatgatgcccagccccttgcttcccttcttgcctttgctgatgctcctgaggctttctacatatctgtgaagcacggcgttgaaggcgtcggagacatgctaagaaaagctatatcagcagcattatctcagtctgctcaatatgaccaattgaatgtgcttctggataaggttatgaggaaacttgatggaactgccagcacattttccaggattgacaatgagttttcttatatgatccaagtaacgaaatcatgcaagtgttttggcagcattaaagatggatgtgatgatgctgatgtagcgcttagagccaggctttgctgggcaactttgcactcacttcttcactcacatatttcatcatataggcaccatggatatatttggttagttgaattgctcctttcagaaatcagtgaagaaacagatggttctgtatggtctaaaatccaaaagcttcaagaggaaattgaagttgctggtagccaagacctatcatgttcagaagtctctctgcctgtttgtatgctttgtgggcttctaaagtcaaaacacaatttcattaggtggggattcctatatgtgctggacaaatttcttatgcgttgcaaattattattggatgacaatgacatgcaagaccacacaactgctgatcataataaaaattgtcttgataaagcttttgcggttatagatattatgaatagtgctttgttacttgttgttcaaaacaatgagacggaccatatcaacatattaaagatgtgtgacatgctgttctctcaattatgcctgagaattccatccacaaatgcgatgcaagttaggggtcttcagtcccttggtcaactttttggttatacatctaagaacatcgatagtcatttggaaacccttgcatctcaccaaagtattggaaataagaatatttgccggagtgagacattgcaagatattggcatagatcaatctggtcaatccacttctttctgtgaagcatcaatggcagcactgcttctgagagggctcgcgatagccccaatgcagcttgtagcccgtgtaccaacctctttgtttttctggccattgatacagcttgaaggggcagccagtgatgacattgcattgggtattgctgttggtagcacaggaagaggcaaccttcctggtgctacatcagatatccgagcagcactccttttacttttgatcggtaaatgcacagctgatcaggaggcactgaaagaggtagaaggcaatgagttcttcaggggtcttctggatgacacagattcaagggtagcatactattctgccgcttttcttttgaagagaatgatgacagaggaaccagagatataccaacggatgcttcaaagcctcatctcaaaagctcaacagtgtaacaatgagaaacttctggagaacccataccttcagatgcgtgggatattgcagttatcaaatgacctaggagttcaatgataagatcgtgatgacatttcaatggataaagctctaagttagaatcactacttctggctgtgtttattgcagagaacctgaagatgttccgaactaagatgctatgtgaatcatgtaaattattgctttggccagatgcatgtacagatccatgaatttctttattctttgttagactagtcacagtccaagggagtcacagattaacaagataatctgatgatcatcctgtgttatggacacagtgcattgtggtttaccaacctggacgacttgacaaaggtttaagccaaggtggcgtagatgtgactccctacaattttgtattgcagaaaccgttgagatctgaggcaaggcattatatatattttttgggcgagacatgctcggttcaataaatatttgtgtgttcgctttgcatatatggtaactgatcagaggagtgtagatttgtattgcggagtaacaatgtaaatgttaggtttgaatatactgatttcgagatgatgtaatccttctatactagcttagcttccatgttggttgtttaatttcgataagaggttgtttacttttatatgctgtttggtttacatatttgtgacgtgatgaataaccgataa

SEQ ID NO: 41921 - DNA, 1237 bp, Zea Mays
tagatacttagatggcatcacaatgtgtgagctataaaagaatgcctgttttagggagaacagagagctgaatgctgttcaaaaggtcaattgcaatgttaacactctttttgaaacataatcttttcaaataaagctacagatgcttctatgaaaaaatgatgtaaattacttgtgacttgttctgtaaatcgtttcttagttgttttacaactcattcagggataacatggtggatcctgctgctgtctttgggatgctttttggaagtgactattttgaagattacgttggccagcttgctctagcatctatagcttcagtggaggttgaggaaaactcaaatagtcaagaggcaagagcaaaagttcaagaaaagataaaagaattacaaagagaaagagaacaaaagcttactcagagtctgaaggaccgacttcaatcatatgtagatgggagaaatgatgaatttgtgagctatgcaagcgcagaagctaggcgtttatccgaagcagcatttggcgaggctatgcttcacaccattggttatatttatgtccggcaagcagcaagagaactcgggaaaagtagaatttacatgggtgtaccttttatagctgaatgggttagagacaaaggacaccacattaaatcacaggtgctatttctctaatacaacttcaagaagggatgaaaaagatggaggggagtgaggacagcgaggagcaacttatgaagagttttgaggagaaaaaagatgccatgctcagctcgctttggaaaatcaatgtggttgatatcgagtccacgctctcacgtgtctgccaagcagttctgagagatagcatggtctccaaagatgtcctgaagctgcgagccaaagcgttgaaaaagctcggaacgatattccaaggcgcagagtctatgtaccgtcgtgaaaacagcctgcgcgttgaaacgagcacagaccaacaagccgcttcgtcacactgaagccacctgtggaccaccgtgtaggaatggatttggtgttttgtgtgtgtgtgtggctttcttctttgtttgtaattgtgtatgctatattaattttcttgtagaagatgtgaaacatttaacacaaagattttaactgctattgatgcagaaatataacctgcagctgccttttttctttcttgatggtagaattgtatttgtacacttatttgccaagtgtgttggcttcattgttcactat

SEQ ID NO: 41922 - DNA, 3144 bp, Zea Mays
ctcgtatgtccaccgctgaccgctcgtttgtcagcctagcaccggggtgcatgagcgcccagtatatgctacagcaccggcgcccctggccctgccgcctgcgccgctcgttgccctgtgcactccgcgggcctcgggaatggccaaccaggacatttatcggtttcttttgtatttggataacctataaaggtctcagcacccagtatgatttggttggcaaaggatgttttctccagaataatgaaagtttagcttctggttcattttattgtctggtcgatcttttttatactgtgataaaatggggaagcactcagctgaatctggggttagtatgttgttgcatggagacttggacatacaaataattgaagcaaaatgtctccccaatatggatctcatgacagaaaggatgcgaaaatgctttactgggtatggagcttgcagcaatgattgtgggaagtcggaaccaccacacccggacatgagaaagatcatcactagtgatccatacgtttcagtttgtctgtcaggagcaacggtggcacaaactcgagtcattgccaactcggagaaccctaaatgggatgaacacttctatgttcaagttgctcattcagttagcagagtcgagtttcatgtaaaggacaacgatgtttttggggcagagcttatcggcgtggcttcaataccagttgagcacatcatgccaggtgatttggtcggtggctggtttcccatttctggtcagtacagtaatcctatgaagccatctcctgagctgcatttgtctatccagtataagccaatcgacacaaacccactatacaaggatggagttggtgctgatggccatcagagtgttggtgtcccaaatgcatatttccctcttaggaagggtggtaaggtcacactatatcaagatgctcatgttcctgacaattttcaacctcatattgagatggatgatgggaggacatatgaacaaaacaaatgctgggaagatatttgtcatgcaatcattgaggctcatcaccttatctacatagtcggctggtccttgtatcaccctgtgaagcttgtaagggaatcaacaaaacctgttcccaatggaaacccagtcactattggggaaattttgaaacgcaaagttcaagaaggagtccgtgttatagtgttgctttgggatgataaaacatcacatgacaaatttctcttaaaaacagatggtctcatgcatacacatgatgaggaagctcgaaaatatttcagacattcaggtgtccattgtgtgttgtctcctcgctatgccagcaacaaacttagcattttcaagcagcaggttgtaggaactttgtttacacaccatcagaaatgtgtcattgtagacacccaagccacaggaaacaatcgaaaaataactgcttttattggtggtctagacttgtgtgatggcagatatgatacacctgaacacaggcttttcaaggatttagatactattttcaaggacgatttccacaacccgacattccctgttaataagaatggacccagacagccatggcatgatttacattgtaaaattgagggtcctgctgcatatgatatacttacaaactttgaacagagatggagaaaatctgcaaagtggaaagttagcgtcagaagagctgtgagttggcatcatgatacattggtaaaaattgatcggatgtcatggattgtttccccctcttcagatgaattaaatgcacatgtttgtgaagaaaaggaccctgaaaactggcatgtacaggttttccgatcgattgattcaggatctgtaaaaggattcccaaaacttgttcaagaggctgaatcccagaatcttgtctgtgcaaagaatctgcagatagacaaaagcatacacaatgcatatgttaaagcgatcagatctgcacagcacttcgtctatattgaaaatcagtactttattgggtcttcatactactggtctgcacaccgaagtgcaggtgctgagaacttaataccaattgaattggccataaagattgcaagaaagattaaggcaaaggaaaggtttgcagcatacattgttataccgatgtggcctgaagggaatccgacaactgccgctatgcaggaaatcctctattggcaggggcataccatgtccatgatgtacaagattgtcgcagatgctctacgaaaggagggtttacatgaaaggcatccacaggagtacctgaacttctattgccttggcaaacgtgaagtctcgaatgaagttccgacgacaggcaattctaatgagaactctgcagtgcgtttgtcccagaaattcaagaggttcatgatctatgtgcactcaaaagggatgattgtggacgacgagtatgttctcatcggatcggccaacataaaccagagatccatggacggctcacgggacacggagatcgccatgggtgcataccagcctcactacagctgggctggaagcggcaggcctcccagaggacaggtgtatgggtacaggatgtctctttgggcggagcacctgggcacagtgcaggagtgtttccgccggccagagtccgaggagtgcgtgcagcaggtgaaccagatggcagatgacaactgggcgagctatgtctcgccgcagatggcggatatgaagggccacctcatgaagtaccccgtgagggtcgagcaggatgggagggtggggccgctgcatgggcaggagagcttcccagacgtcggtggcaaggtgctggggacgcactcgtcgctccccaatgcgttgacgacgtgagtactgagttggatgtagctcgaagaagctcgaaggtggcaggctggtaaatggtgagctgaagctctgctcgtcagaatcactggacgtggtgcaacaaggggttgatacattggaaagttgctgatccgatttctagctttaaggctgtttgtatgtatatttatattgaaaaagcgaaagatgtgatatccaagatgaatggagactaatgagaaaatgtttgcttcaattagcttgtggttacaactgattatatattgaggacaaaaaccttcaaaaaacgatcctcttcacggttaataagtgcttgttcggtt

SEQ ID NO: 41923 - DNA, 1696 bp, Zea Mays
atggcgtccgataacctcagcagatccacgtccgtacgtgcctgtcttgtctccctcgccaaccgcgaatacgactccgcgcccgctgaagccttcttcttcctatattgtgctactgtaagagctgctgcattcgccaagggaaacgcggccagtttgccagcacagcaccaacacggccctgccggcatcgtctttctggctgcagcaagcaactggacgatgatggcttccaggcagtcagagaacaatgcacaagaagaaacatcaccattgacgactcctaacgccaacatagccaggatcatcccttcgctgcccctcgagaccaggtggccaccgttccctctccgacggtacgccaatttttggctgcctgaggtagcattgaaggaaggcgtccccggcgttcattcctgcttcgagccgagacccaccgacgtgttcctcgcaagcttccccaagtctggcaccacctggctcaaggccctcgccttcgcgacgctgaagcgttccacgcatccgccgttcgacgacgaccatccgctgcgccattgcaaccctcatgactgtgtcaggttcctcgaacttgatttcaaccagcagaaggatgagctcgaggcgctcccgtccccgcgtgtgctggccacgcacctcccctactccctgctgcccggcagcatcaccggcgacggagagcgctcggggtgccggatcgtctacgtttgccgggaacccaaggacgtgctggtctcctcctggctgttcacgagaaaggcagcgccggcttgtggggttgacgcccggtcgttcacgatccaggaggccttggagctgttctgtgatggccgctgtctcggcggcccacagtggaaccacgtcctccactactggaaggagagcgtgaggaggcctgacagggtgttgttccttcgttacgaggaggtgctgattgagcccgaggcgcacgtcagaaagctggccaatttcatgggctgtggattctcagaggaggaggaggagcgcggggtggtgagcgccatcgtggagctgtgtagcttggggaagctgagagacatggaggtaaatagaaatggaagcactttgttggggatcaagaacgaaagcttcttcaggaagggagttgttggggactggagcaagcatatgacgcaggagatggcgcagaggctagacaaggtcgtagaggatgcattgcaagggactggattcacctttgcgagcacagcatgatgaggcagtgcgctcatagtagttgcgaactacagaataatgccaaggtcaactcgttttattggtgttgctggttggagatcataccagtcatggtgagcattcttctttggtgatgaagggggaaatatggacatcatcttatcatttaacgaaaattgatttgtgtacaattcatttgtataactttgttacaaaccatatgttgtggcaccttggcacgccaaaaccatatgcattactgtgtaagatttgtcataaagccatgtatcatcattgatatattatcgattaatgtttggagaagctacaattgattgcaagcagacctgggcagattcctaagactatatacagtagcttacccatctacatactcatattcaaacttcactctatcaagagtgcagtctacagtgcggagctgtgcaatacattgttt

SEQ ID NO: 41924 - DNA, 2246 bp, Zea Mays
ccacgagacaggcataggcaccgtcgcacagagctgtgacttttttttaagcaccacagagctgggactttgagagggaggactcagcgagctccaaagccgacgaggataaagaggatcccggctccgcacgcgggagcgagaggatcgccggcgcaggatgtggtgcgcatcgtgcttggcgtccgcctgcgcgggctgcacctgcaacctctgcacgtcggcggcatcggccgtgtcccgccgctccgcgcgcctcgcttactgcggcctcttcgccgcctcccttatcctctccttcttgctccgccagttcgccgcgccgctcctcaagcatatcccatgattcactaaatttctccatgtcctgaaggcttaagatgcagaaaagtaatgtggagtgtccttttgctccacaaaatgaaatgcattccttcagttgaatattttactgtttcgtcgttcccatagagtacttgcagacagcagagggttttttctggacaacaacagcagaggttgctactagttgttgtcgaaagttctaatatttgcaattttgcaacccacaagtgttgactctttgctattataccacctcggtctatgatttgtgagtccgtctgtctatgatttgtgggaccaatggcaaagtggtgaagcccaatgatgatgatggcaaaattgcaaatcccttaaagttcggtgctgtacagaaaagacatctgggataaatgcgtttgatcaaacaccaccagaagaatggtttcaaatgaatgctgttcttcgtgtaagcctggggaacttcttgttctttgcaatattttctctcgtgatgattggtgtgaaagaccagaatgaccggcgagatgcctggcaccatggtggctggattgcaaagattgctgtatgggctgttctcattgttcttatgttctgtgtgccgaacattgtcattactatttacgaggtactttcgaagtttggatctggcttctttcttctagtacaggttgtgatgcttttagacttcacaaataattggaatgactcatgggttgagaaagaagagcggaaatgggaaatagctttgctggtagtgactgtggtttgctatctttctacattggccttctctggtgtgctcttcatgtggtttaatccatccggtcatgactgtggtctcaatgtgttctttatcgtcatgacactcatccttgcttttgcgtttgcaatagttgctttacatcctcaggtccatggaagcgttatgcctgcttctgtcatttctgtttactgcgcatacctgtgctacacgagtctctcgagtgaaccggatgactatgagtgcaatgggcttcacaggcattctaagcaggtttcaatgagtgctcttatactcgggatgctcactacggtgctctctgttgtgtactcagcagtccgtgctggatcctcgactacattcctttcaccgccatcatctcctagatctggagccaaaaacccgctactcggtgacgaggaggacggcaaaggcgatggcaaagaaagcgaaccgcgacccgtgagctactcctacaccttcttccacctcatcttcgcccttgcaagcatgtattcagccatgctcctgaccggctggacgagcgctgcatcagagagctccgagctgatggatgttggatggacgaccgtctgggtgcgcatctgcacggaatgggtcaccgccgggttgtacatctggaccctcatcgccccactgctcttcccagaccgtgatttctcctaggcacccacgcacccatagcctatgagttgtttggtggtgttagttgcgattgtgaatatgaataagccgaagctgggagctggtagggatctggtattgtctctgtatgctatctggcatgcctaatgtgatggcactggttagtacctgtttgtatggccttgtatagaatatatttcgaccgagtgtaggttgtggactttaaaagcagaaaaacaaaactgagcagaaaaacaaaactaagggtaaaatgaggaacactagcaaaactgaggataccagcttaaaaaccctatatcttaaggggtaagtacaaaaaataaagagacgtattttggttaagtaatatctcgattctctaagtctagatatgttccattcatacaattcatataaggtcttgttcggttaattcccttacccatggattggatgggattgaaaaaaataagaa

SEQ ID NO: 41925 - DNA, 2091 bp, Zea Mays
atctaacgaaagagcccccaaaaccttcccagaaaggcgacggagtcaggttcgaatcgaaatcggggtcaccgcggcggcggcggcggcggcgggtctactcatcagagactacagagcagggggtctcacgctccggcggcgggacgatggccatggcgccgtcctcctcttcctccggtggcggcggcggcgacggcgccaacgccgccgacgcgatggctctcgtgcaggggtacacggccgaggagctcgccatcgcgggggagttcctcaccacctggctccccttcctctctgccggcctctgtccctcctgcgcctcctcgctccgcggccgcgtcgactccctgatcacgcgaggccgcgcagctgaggaatcgccgccggtcgatcagattgagccgtcagggtgggactcggatccagcggacccgcagaaccttcctttcgagccgagtggttgggattcggatccgcccccacccccgccgccggcgccggcgccggcgccggtggagaaaccgaggatgtcgtgggcggacatggcgcaggaggacgagctcgccgcggcggcggaggatgacgcggcggccgcagcggccgacgagggggaggacggggccgaggcggggaggcccaaggtgccgctcacgagggagcagcgggaacagaggaggctcagtagcttggtgcgcaacaaggagttcaggtgctacgagagagttcgtggccagctcgtcaacatcctcgctggccttgagcttcatgccggcgtgttcagcgcagctgagcagcggcgaattgtccaatgtgtgtatgacctccaggcaagagggcagcgtggggagctcggagagcgcacatatacagaaccccaaaaatggatgcgtggtaaaggccgggtaacaatccaatttggatgctgttacaattacgctacggataagaaaggaaatccaccaggcattatacggaccattgtttctgatccaatgcctgacctctttaagactatgattaagagattgatctgtgctagtcctgaatggcaatggtgctgatgtagcaaaacattgtgtcccagcagtccctaccaaaaggatatccattacattcagaaaaatggacccagcaaagcgtccatttggctttgaagatgacccggaactacttaatcttgctcctctagggacagttgtacaagaaactggcatatcatcagatgaaggcaagggcaagctacctgacgtccaaataacaaatatgggcaaagcatccagaggcaagaggtctaaaggaagaacagctgctgggaaatatgggagcggcattcttggagaacagtctcctgggcatgcccaagcccctgcagtggaagtgcagtcactacggaatccgcatggccagcgtcctgtctccgcttcaagtgctgagagggaaaggaattctgctgggaggtcaagggaatcgagacatcaatctagtacgcttgtggtgcactcacaagtggacaatagcaggcagtggccacgtcggtcggcgcaagagaggtggcatagtaatggcatgagtttctctgaagatggtgtgggatccgcggaaaggagaccacgggtggagcatagacagatttcattgataaaccaaactataagcgacgacatggattccctgtcgctctcaggccgtgaatcaggcgaccagcctcgtgctagtgtgcggaccgtgtataacaagcccagggaggaccagattaagcctagatgattgagctcttgggttgctcgtgtctgcatactttcatgcgaagacccgatgacatcaaaaatgatatttactataaactgtattgtatattttcattgggtttcggtgtcatgaaagcaccaaaaagttaagcgtagaattcctacgtgtactgaatgaacttaattgagacgaaatcagttgcaatcgggcgcctgttctgtagataaaatctcatgtaattttgactgatgcattggtgatctggcttacaattcatttgcaatttgatgcaaatcctagctggactgtgttaccaactatatacaatgggattggcga

SEQ ID NO: 41926 - DNA, 885 bp, Zea Mays
caaaatactggaatggattgggaaagattcttccattgggagccctaggctctcctcatctcatttgtggttttctaaatttccttattgaagcagttcgcagccaaagttgaaagcttatatggatacaccaactctcttctaaggccctgcatatttccacaggctgtgatatgattcttgaaagatgacgactcagttcctgttgtcgatgattggggaggttgtgttggtattgttcaccgtgatgattgtaccttgattgtaccaagctggatgcacctcttcttgtgcctacttcaaccaccgtggagcacgtcattgacctactcctcagggagaaatccgagatggtggtggtgaagagcggtaacatgtacgaaggcagctcaagacccttgggtattttctccctcgccatgctgtggagtttcaccagcgactactcgtcggaatcagatgtcctcgacccaggcgtctcctgggcaaccaaaccaaaacaagatgtcgacacctacaatcacggctgattcagcagctagtttggtgtcctttaccagcttatagcaattgtagtttagatggttagctggtctgagtatgttcgagttgtcttatctgtatgtcagagtttttttctttttcttttttcttatagcaagtccgcatcgtgatgccgcgcaaaccagtaatgtaatggtcctccaattcgacaaggagggggcgaaatggttttttgtcaaaggaagccgctaggctgatcatgacctgcccgtggatctgtatgatgttttctgatgcacagagcaaaagtgacagtggagcggagattccggattcccgcccagccaccgcgcgcgcagggatatggtcctgagtcctgac

SEQ ID NO: 41927 - DNA, 2433 bp, Zea Mays
agaaccagaaccagaacaagaccggaggaaccagacgacgcaagggaaaggagagccaccggagcggaccgccaccttcccttctgccggcgacctccagccacggcgcccatggcgtcggcgaagctgctgtacattgtggtggttgacgagaacgcctcctccttccgatacacgcgctccctcctccatagcaccctccagctcatgggatgcaagccacgccacgccttcgagatcagccgcagggtgtttgatgtcatccggggtgaccaccagggccacggcgacacggccacctccgcccgggtacaaaggtacgaggtcgccgaagccaccccgaccgcaagcccccgccagttccagttcgagctatacaagcgccggaccaccgtcctcctcccaagggacctcttcctcgacctcgtcctcgacgccctcgccctctacaagtacgttgcccccaaccagcgcgccgatctcatgctcgcctgcaggattcgtgaacgaaaggaatctatcacggttcttctttgtggaactagtggctgtggcaagtctactctttctacgttgctgggaagcaggttaggaattacaactgtagtttctacagattcaatacgtcacatgatgcgaagctttgttgaagaaaaagaaaaccctcttctctgggcatcaacttaccatgcaggtgaatgtcttgatccagtagcagttgctgaagcaaaagctaggaggaaagcaaaaaaacgctcaggcgtatcaagcagctcaactattgattatgagaaaagtgggtctcttaccgaaaaagttgatgggaaatcaatcgggaagaagcaaatggccgttgaaggttttaaagcacagagcgagatggtgattgatagtttggatcggttaattactgcgtgggaagataggaaagaatcagttgttgtcgagggtgttcacttaagccttaattttgtgatgggtctaatgaggaaacatccttcgatcatacctttcatgatctacatctctaatgagggtaagcacacagagaggtttgctgtacgtgcaaagtacatgacacttgacccaacaaaaaataagtatgttaaatacatcagcaacattagaactatccaggagtatctctgcagcagagctgacaagtacctagttcccaaggtcaacaacactaatgttgatcggagcgtggcttcgatccatgccactgtcttcagttgcctccgtaggcgaagtaatggagatcaattatacgaccctgaaggaaatactattgctattgtaaatgaagagtacaaaaaccaatgtgtggctaattccatgagttccaaggggatgtttaaattgatccaacgtcttggatcctcaagaaagctcatggccatcattaatgtcgacggttctgtttctaaggcctggccagttgagtctagtggagatggaaaatgcagttctgacaacagtaataagaaatctgtggggaatccaatctatggacctctaaatattggaagagcagagtcagtcaatctgcagtttggcacctttggaataagtgcctggcctactgatacaggctgtacaagtcaagctggaaatgctgatgaatcatgggtaaatgctgctgaaggtagtagcagtcatgttcaatcatcatccggttctacgaagaagttggatggacattgtaaagagtgatgaagaagaggaagaagaagctgatgtccgtcctaattcagggagtgatgaggacctaagtgaagaagacaccatggagatcgatgaggagatggaagggtctgtggacgaggactgcaacaggtctgatgaggaatatgacgacctggccatgcgggacagtttggagaacggctatttaactgacgatggtgttttctgttctggtttaagcaactcgtcaagcggcaagttctttggtggcaatcaactaagccacagcacgccaaagaaaccccaagagaagttcgatgctggtgttcctgagacgtcacgctcttattctgctgcagtccctgctggtacaagtagcaagcggcatgctactaggaagtggaagcgctcgctcagtgaccccttccgttcacggccgcacagtgctccggaattggtgtcaggatgcaagggatcaccgcccgtgcctgtggctccagaggagaggtagccgatgagctacagaagacgtatcgtgttatgttttttagcataaattgcaaatgaattatgaatattgttatctgaggcatcatggatgtgaaaaaagtactatgcaactaactttttaaggtgttgattttgtaagaggatgtttggtgaaaggaccaagatgtccataggaattgaattaggctaatgtaattttttaataattaaattatatcaaatagttcactcgac

SEQ ID NO: 41928 - DNA, 158 bp, Zea Mays
taggtgatgaggagtactctaagtgttcctgtggctggagggcgtttccagttctggaggaggactagctaggtttatgtataagctttgaaggatttctaccttcctgcatttgcaataagatatgcactttgagtatatcaggacttgtaataaat

SEQ ID NO: 41929 - DNA, 492 bp, Zea Mays
agcgggtgcaccgccgagacgacgagccggcgcgcgagtgctaacgggggccaggggcaagcacaagtgctggagtacatcagacgacactcggcgagcacgtagcgaggcgcacaatagcgacgacagtcgaatcggcaacagagcgttggcgaactcgacgaacacgaccatggttacgtgctggcgcgggtaggacaacagtggttggcgagcctaaaagaggagcttgcacaacgataaccaacagggaagcacgcacgcgcagcgagagacaaaatacggaactggagctgagcacggccaagggagcagggccgagcacgacaaggagttccgaaaaaaatcaacgtaggcagcatacagttggaaaacagatcatcggagtcgacgagcacgtcgtggatacaacgtgggccgacgacgaggtccatgacgagcgttagggataagcgacggtgatgagctcggcaagacacaagggccgagcga

SEQ ID NO: 41930 - DNA, 316 bp, Zea Mays
caaagttgactgggagacgacagcctagacctctcacgaacacatcgcagcaacctccatgcgcctcatcttgcggtacctgttcttgacctgtggggtgtgtgagacagcaagagtgagctcatatacgttcatcgctcaacaagttgtggggaataatgtgcatgaactcgccaagggtgggagctcatgtgaagtgtaaggcttaccaaagagaatggttagagcggagcattgcttttaaagttggtcaaaattttattagcaattactaagtataagtaaataccaaacccaattaagtagcagaacagaa

SEQ ID NO: 41931 - DNA, 1215 bp, Zea Mays
ggcttgcggcccgtagggacaaggcccacgaggctacagtttaggcagagggttcttcggttcttccttcgccatcttctcagttccctccccacaccgttgcggcgcggcaccacctgaacccgaccaccgcccacaccatgttgtcccgattgccggcgacggtgagccttcttcgccggtcgctccgagaaccgcgcggcttcagctcctctgtgctggcttcatctaaggaaacggccgacggaaagctggtggcgtcggtgcttttcgagcgcctccccgttgtcatccccaagatccaccccgttgtctacgctttccaagaattctcatttcggtggaggcagcagtacagacggcaataccccgaggaggtcctcggcaaggccgacgcgaggggtaagggtgattatcatattgattatgtgcctgctccaagaattaccgaggctgacaaaacaaatgaccggaagtctttacaacgagctcttgataataaactttatctcctgctgtatggcaatgcttatggggctcctgatggaaagcctgtatggcattttccagaaaaagtatacgaaaatgaagaaactatgcgactgaggctgcattaaaatctgttcttgggggacttgaccatacatactttgttggcaatgctccaatggctcatatggcagttgaacaaacagattcaagtgtttcatcattcaagcgtttctttttcaagtcacaagtggttggcacaacgaaataccatgttggaaaatgcaatgacttcgcgtgggtgaccaaggatgagctgctggagtattttcctgagaacaaggatttcttcaacaagatgatcatccacattagataagatagctctgtaatcaggctatgggctatctgaacaattagcattttgtttcttgactggcgtacaagtgcagtgccactgttctgtcgtcacgagcagcattgccgaggaaccaccagggcggcgggcaattgacacatgcccattttgcctcttttttcttgggctggttatgttgtgtttggcagtgacatttctgtagcatgttgtcctctcttacctgctgtatgttcacgtattatcagtttgttgtacaccatggggaagaataataattagcagggcgacatttgattccttgctttgttatccttctcacttgctgacttctgccaagatgtttgtgg

SEQ ID NO: 41932 - DNA, 1655 bp, Zea Mays
ctcgctctcgctccctccacctccctccccccttgaccctcccagccgcaaaaccgcaggccgcatcccgcccgccgcccgccgcccacctgtggcaaccgccgcctacataaacgaccaatcgaccactcgccgaaccaagccacccacccaaaacccaatggcgtccaacctcctatccgcggtggcaatcgagaaggagacgccggagagcgagctgcccccgacgttcctccgcgaggacgggcgcggcgccgggtccgtgcgggcgcggttcgagtccatgatacggcgggtgcagggggaggtctgcgccgcgctcgaggaggcagatggcggtggggcgcgcttcgtcgaggacgtctggtcgcgccccggcggcggcggcggcatcagccgggtcctgcaggacggccgcgtcttcgagaaggccggggtcaacgtctccgtcgtctacggggtcatgccacccgacgcctaccgcgccgccaagggggaggccggcaagaacgaggtcgccgcggatggccacaagcctggccccgtgccattcttcgctgcgggtattagctcggtgcttcaccccaaaaatccatttgctccaacattgcattttaactaccgttactttgagacagatgcacccaaagatgcacctggtgcaccaagacagtggtggtttggcggtggtactgacttgactccctcatacatcattgaagaggacgtgaagcattttcattctgttcaaaagcaagcatgtgataaatttgatccaagttttcacccaagattcaaaaaatggtgtgatgattatttctatattaagcaccgtaacgagcggcgtgggcttggtggaatattttttgatgaccttaatgattacgatcaagaaatgcttctcaacttcgctacaagtgaaaccatttgctagaatgattggatggaattatttgtattcagaatgtgcggactctgtacttcctgcctacataccgatcatagaacggcggaaggacaccccattcaatgaggagcacaaggaatggcagcagttgaggagaggtcgttatgtggagttcaaccttgtctacgaccgtggtacaacattcggcctaaagactggaggaagaatcgagagcatactcgtgtcccttccactcacagcacggtggcagtatgatcataaaccggaagaagggactgaagaatggaaacttctggacgcgtgcataaatccgaaggattggatctgattagccgaagtttctttattcttgagatcttttgttagttttcccttgtgtagcgctaagatatcagaccacgtgtagtttctttatttcttttgtatatctgtaggatcgtgaacaaatctgatataattctgcagctgtttgtatctaatctgctgctcccccccttccccccccccccatgtgaatgagagaatcattgccttgtgtatctacaaaggcttcaggtgtatcatttacctcctgcctattggaaatactcactgatgcaggcaggtctgtatatacccatagtgcttgatgttgtgcatcaacagcaacaaatagtttaaattgtttagggccacaaaacatttacagtttcaacaattgagccttatcatattattaggaaataaa

SEQ ID NO: 41933 - DNA, 1326 bp, Zea Mays
tctcctccaccacccgtttctctttctctaggctcgcgcctgccccgccttcgttgtcgcgcctgccacctgctcgacgaatcgccgcttccgccccacgccgcgatgccgacgcccctcgccgcggcgctgctgccactgcccgcctctcccgcactgcactttccgcggccgcggcccggtccctcatggcgtgcgcggccggccgtggttagggcggccgctctccgcgccctgccacggcgcctcgagctctgtccgccgtgccttgcggcggtcgagagtaacccggccccgccacccttagctccgccaccgccggacgaggcgagcgccggctcaggcctcgatgcgagggccgggggaggtggcggtggtggtgacggaggtggcggcgctgatcttgggtggttgagggctttcccgcatgtgttcactgcgtcaatggcaaacttcctattcggttaccacattggggttatgaacggtccaatagaagatattgcaacccagcttggttttcaaggaaatccgttcctccaaggtcttgtggtgagcatattcattgttggtgccttttttgggagcttaggctcatctgcattagtagataagttcggctgcaagaggacccttcagatcgacagtattccattgattattggagctctcctgaggtacatttttacttttgcaattggtgctggaccagttaccggtatcattataccagagctcagcagtgctcggacacgctcaaaagttatgggcttcagtttcactgtgcattggatatgtaactttctggtgggactatttttcctggagcttgtgcacaagtttggggttggagcagtctatgcaggttttggtggggtctccctgctgacagcactcttcgcctacaatttcatagttgaaacaaaaggacgttcgcttgaggaaattgagatgtccatgagcagtgctacccctggcaagcaagagtagaacatctcaactgtatggacaaactgaacaactgacgggaggaatttaataagagaagagggggcctaatcccatgaatcttcagcagcagcagtttgttgcaaacaacatcaactcctatagataatgagcacaatcaaattcagcttttctttggtagcatgagaatcgttgtacaatattaaaaagggtgaagaaaacgacccttttaatttgttttttgtacatctgatgtatatattttacgccttctgtagtacgtaaaataaagggaacagatctttctgatattacttgattgatgaatttggaatattcgcatcctttgttctggca

SEQ ID NO: 41934 - DNA, 2056 bp, Zea Mays
ctctccctttaaatcgagcgccgcttcctctccgccgctttctctccccttcactcgagcgccgcttcctctccccttccatcgagcgcagcgcctgcgccgccgccaccactccgcaccgccgccagttccccacttcctccccacacccgaatcggattgaagccagaaggcaaggtgaagagtgggcttgggtaacggttgcaaagagatatccccaacagttgcagtcactcgcatccagtcggctcagctatggaggaggactcatcagcgatggagccgaataggctgcgcgaggccgaggcggcggctggggagctgaagaggctgcgcgaggccgggcagtctcagtacatgtaccggtctatcgccgacgccagggttgtcggcggccgggtctgcctcttcgccgtcgtctccgagatcggcgctaccgtccacagccgtggcacggatttcactgttacgttgagggtaatagatgaatcatacaagtctggaatatctgtaactttttttgctgacagcactgcactattgccttgtgtgaagtcgtgtggagatgtgatcagtctccataacgtcgtgataaagaaatatagagatttctttgtgcaatttgacaaaaagtactcttcattcgcgctgtttgaaggcaaaacgtatactgaatgcagtccatatcagacttctataagatatcatgacagcgaacacgacaaagattttttaaatcagatgagaacgtggctccctcaaggtctgaaggatttcacttcaaataattccgaattgtatttaatgaatttgaagtccgattctacttttgatctagtatgcaaggtttttcatgtacatgtggagaacaacaattcaatattttatgtttgggatggaactgatacccctgcagctgagtttccagcaattttggatgctgaggcagccaaatcactctctctacatgaaggcccccctctatccagggagattttatgtacaatgccagatttcggaactgtcctaaggattttttcagatagatttgtcaataaagtatcatatatgcaaaagaacatatattgggccaggttctggaacattacttgcaaacaaaactttggcatttggaaaggtactttctcggactccggtggagttcgcctattatcaaacaaagatgatagcgttgttgatcgtctaaagatgtatgacagccgcatcgccaaccgagttcgtcgtcggccgatggcaagcatcccctccagtgttactggtgacgcacaaattgagaaccttggtccgtgttgtggcagcacatccatgtgaagctagtttgctttcaactggtaactgtcatcttcggttgactcttgaggatcctacagcgagaattcatgcgtatgtccacaagaatgatttggtcggattctttggtggtggttttttgacagcagaagtgatagtaaaaaagatgaacatggtactgggcatcccggaaccacaaggcagcgtggaagttgccccctcgaccaggaatccaccttggatatggtgttgcttgatgtcatactatatggacaaaaacgatccctgggtcagcagaaagtaccggatctatagcacagccatcagggattgagcagagggatgctgctggaatgtgcaggaacaaacttgtaaatgaatgggacagatgctgtgtagtattggcatcttgcttgtagaagaggccatatgcttttgcaggtgcaatcagtgaatcattccatactgaacactgagaatagcacctcgggttcattctgtatgtgcctacactctagattgtcttttgggtgctcatcacgaaacgtgagcatatcttttggaaacagagacctgcgtttgattcctgtgcttgttatgttgtgattgatcattggggggaggttgagcttttgagccagtataaaaatactgaccggaccatcaatattattgatcattgggagtatgagtttttggacggtttctatttctgtattggtagatataaattttttttatccga

SEQ ID NO: 41935 - DNA, 6792 bp, Zea Mays
attgagacacagacagagcagctgagcaccgcacacacggacgccataccctagattggagcgcaccacgggcgccggcggccggcggcccgccaccggtgattgacgccccctcctcggtccccagcgcggcgagcaggctatttgaggagatgccgtcattgtcatccttactctctggctccaatactgcgagtgctgagcttcctctaatcccttgcaagctctgcaatggggtggtgattgagcgggtctccaaacaaccagaaaccacgtcgaggaagttctaccggtgcagagccaagaaaacggatgggtcttaatgtgattttttccactggcaagcgagctatgttgttttgttaatcgaggatgggtttgtcagtggtgatcgacgccttgagttgttaatgatcgcacttaatgatcatggcaaagccgttgaatctctaaccaattccatcagagagatgaagaaaaagctgtccaacctggagttagtgatggaagagctggataacgtgaaaaatttgatgaaggcagccatggttgaaattgaggaaaacaagaaatcgacagctgctgcattgaaactgatggagaatgagctgcaaaagctgaaagggtcaactaaagtgaaacctaggaatatggcacagtgttttctgcttttggcattgattgggtggtttgtggtgggacagatgaattggggggaggaagcatccagccgatttctgctgagaggctaatgaacataggatggacttttcaatagctagatgtaatcagaactggtttatattttctctgctaacatggcgtagtagccaggacactttgcttgtcgattattatttttagcaagatgttggtgtgaagttggaaaggcttcccacggtccgaagcccgtgtcactttccagagtctacagtgttgcgttctgaatgctagtgttatgttccatgtcccgtgtcactttctggagtctaccgtggtgctcctgctaagtgttgagtcggatgttgattttgggaggacccacgggcgaagggcgtgtcactttcatgaggtatagtgttgggttccttctcagtgtagcgttccttcaaggtgttgagttttagggtcccatgttgatttttgggaggacccacggtccgaagcccgtgtcactttccggagtccacagtgttgcgctctgaatgctagtgttaggttccatgtcccgtgtcactttctggagtctactgtggggctactgctaagtgttgagtcagattggcggatgttgattttgggaggacccactggcgaaccccgtgtcactttcataagttcatagtgttgagttctggaaggtagtgttacgttccatgtcccgtgtcacttctaggagtctacagtgttgcgttcctgatcagtgttgagctctaaacgatggtgttgcgttgctgatcagtattgagttgggcgcatgttgattttgggaggacccacgggccaacgacgtgtcactttcatgagttataagtgtcgggttccaggtcagtgttgggttctgaacgatggtgttgcgttcctccaaggtgttgagtttcaggggcccatgttgatttttgaaggacccacgggccgaaccccgtgtcactttcatgaggtatagtgttgggttccttatcagagttgcgttcggatatatagagttgtgttcctccaatctgtgctgggtttcagggttccatgttgatttttgggaggacccgcggtcggaagcccgtgtcactttccggagtctacagcgttgcgttctgaatgctagtgttatgttccatgtcccgtgtcactttctggagtctaccgtggcgctcctgctaagtgttgagtcggatgggcggatgttgattttgggaggacccacgggtgaagggtgtgtccctttcatgcggtatagtgttgggttccttatcagtgttgcgttccttcaaggcgttgagtttcagggtcccatgttgatttttgggaggacccacgtgttggagtctaccatggggctcctgctaagtgttgagtcagatgggcagatgttggttttgggaggacccacgggcgaagggcgtgtcactttcatgcggtatagtgttgcgttcctccaatctgttgggtttcagggtcccatgttgatttttgggaggacccgcgggttccatgttgattttttggaggacccgtggtccgtagtccgtgtcactttccggagtctacagtgttgcgttctgaatgctagtgttatgttccataacccgtgtcactttctggagtctaccgtggggctccttctaagtgttgagtcggatgggcggatgttggttttgggaggacccacgggcgaacgacggtcccatgttgatttttggcaggacccgcagtctgaagcccgtgtcactttccggagtctacagtgttgcgttctgaatactagtgttatgttccatgtcccgtgtcactttctggagtctaccgtggcgctcctgctaagtgttgagtcagatttgcggatgttgattttgggaggacccacggcaaacgcaggcttcccaaagcggcatggtcagttcgagctcgccctggggatgccgccgctctgcccatcgcagacgccgtggagcatcgacggcgacgtcgcaggacatgaggtcgcctaccagctggtgacccgaaacacccaggcggcccgccgccacgtcgagataacggccctgacggtgccgacattttggggcagcgggcattgcccggagccgctcgtcatcctaagaaagggcagcacggtggcctgctacggctacccccggagccactcgtcgtccatgaaaagggcgacgaactggcctggcaagatctggcggcgcggggatcgaatggacggacgacaagagcgagcgaagaagtcctggcggcttggtgagaaaatggtggcgctgggggcgatgggaacggaggtgcggatggtggcagcagtggagaatgaagcgacggcgacgtcgagactgattgtcgtcgtccgcggccatggggcggagcaccttccggagaagtcgagacttatacgattaaaaaagggaaccgcctcaccgattctgatgtcgaaggtaacctggtgccgatccgcaggggtgaagaagaaagccaacatgccacaggggaagagtaagaagaacgtggtgaaggagaaagccaaaaagattaagaagaacgcggaatcgagagccaaagttcatgaaaatacagatcaaattgagatcaacattagagaaggtgtttcaatttggataacaaaggctgcagtgcaaaaatgttttgagtttccccctggtacagataagaagctgccaatagatccaactacaaaaacatttgattcactctacagagtattgagtgtttcagaaaaaaaaatcaatgtaaagaagaagaagatgaaggagaatatgaaggagaagcaggttgaggaggagaagattgagatgaacatggaggagaagaagcagaatctggttgaggatgaaggtagtcaacaggaggaaagtgaagaggaggacggtgaagatggggaaattggagaggaggaaggtgaagatggggcaattggagatgctaaagtggggggagatggagacaaggaaagtgctaaaaggggggggataaaggttgctgtcagaagaaatgttttgactcctttgaacatcaatttgatgttacagaacatcaacaacgatgagattctcaaacttcttgttaaaagaaatgaagacactgatggtacagaaccgaatcttgacattgacctgattgtcagatgtttctttgcggtgagcagtgttgctgagtttggcaaggataagaagaaactgatatcagggtgtacaactgtgctaatggttgttttcttggaccatctcgtggaaaaccctttggatcctttgaccatccctaggatcaacttgtatacttcagattttatcgcagacctgataatggtacccaaggatagccctggccctgaaaaaaagcgtcgtaagactcaagatgaaaaagaagactagtaatgttataaagaatctcgctactctcaattttaagaattcggaggatacatgctatcatgaagattcagaaatggtgccaagtccagggagagcatcgccgattgtttgctacctacaggtcatatgcacacagatgtattttatttacaatgccaactgttgtcaaaggattggaaggataaagtaattcttagctggaaagctactcaagaactgattcatcaagatattggagttaaggagctggacaaggaacttactgcagaggttatgaacaaagtggatctggtttgtgctttgttttatattacagtagagttttttcagattgacagtagagtttgtgctttttttagatatttattcctatcattcatgccggtcactggtcccttgttattctttccactgccaaacaagagacatatatccttgactcctacccaaggcacagtggggtggccaaggatgttttaactcaactgcagaagtatttggataataaacacaactttgacatgtctaactacactgaccatgtgccacctgttcagcatcaaaaaaacaattacgattgtggctttcatgttttattgtatattgaagaattcatgaaggagaagatgtataaaatcaacaaaaaaatggtgttgaaattcagaaagcagctttgcatgaatctcttgtaccatcctttgaacagaataaatcttgtggaattcagaaagaagctgggtattacattgaaaagaaaacttcctggtatacttgatcttactattgaaggtgagaggagtgaatctgaggctgcagtgataattgaaatagagaacagagatgataagactctagaggatgaacatatttcagttgagaaagagtaaggtaaaaaagaagagcatgtactatcaactgacacaaagaatgacgaagcttcatccccatctgacgaagagcctgagcagagtgagtcatctgagcagactgtgtatgaaagatggatgattccaaaggatcattatcacctgagaaagagcaagctggagaaaaatatcctcaaacgaaaaaagaggttgggcaaagacaacatgtcctctcaggatatgatttctccagtgtttggcaagaggcttgtgcctgcaaacacacattttacctctcttaggaagttgcgaaaacacaagtttacgtctgataagatcaacgatgagatctgcaaacatatcttgaactacaatgaacgggagttgttaagtgtggggcagactaccatgactgggggtcagctggaaaagtacgtaaatgaaggtgacaatggtgataaaatactcagagcattcatcacatgcttcacttgtgatgaaaagttcaatcaagggaacatcacaaccgtcatcccgccacatgaagtatccgaagagggtgaactctccaaagttgatgctgcacaacttgtagaagaaatcaaagctgtactcaaaggcaccaatgttgcacgtgtacgcaaagacaccgaatccaccaaagatcccaaagtgaaagtctttcgaaacatgaggaggacatttatattttttcctttctacaagaatgaagaattgtttgtatttcatgtcgatacgaaaagactacccatcattgatgctctgttttgcaagatgtcatcattgtcgtttgaagatagatcctgactaggaaagtctatcatgggctgtctactcaaagccatgaaggattccggcttcatggtgaaaaaatatggtgattgtaggttcacagttactgtaactgaactcgaattcaaagatagtgcctcagcgctcataagttttattgagaacttcacttctaagttggacgacaatgccaagaaactgaaaaagggtgacaaggactggctggaaccttacaagaagtcgacagtggcataccttgtttgtcacactgaaaataaggtggtgttgcctgacgatattgtgaagtacaagcaaaacaagtgaggtggttgagtcgttaatgggtccagtggctgtgttttaagacttgtatcacactacttgtatggctttattctctgaagctgttccattgttgccgttagtaacaggtgttgcttttgtctctgctcagtgggtgattcatttcatccagagttgctgcaactttaatcagtctatagtgttgggttcctagctcagtgttgagttctaaatgatcgtgttgtgttcctaccaagtgttgagctgcacgacggcgtgcgcagccgcagccgcaccggcgaggagcgtttagaactctgttgatctacatagtgtttacaccggctcaacagagttctcatgttgatttttgaaggacccacgtgttgggttcctgctcagtgttgagttctgaacgatagtgttatgttccatgggcccttgttgatttcgagaggacccacgggccgaacggcgtgtcactttcatgcgtctatagtgttgggttcctgtctagtgttgagttctcaactatggtgttgtgttcctccaagaagttgagtttcaggggcctattatattgtctcagttaatgggtaactcagttaatcctatatattgtgtcagttaatgggaactcagttaatggtatatgttgtctcagttaatgggtaactcagttaatccagcatatcattgatgag

SEQ ID NO: 41936 - DNA, 2177 bp, Zea Mays
ctagtctgtcatatgtggacgctatgatgcatggacagtgggcttcttagggcctttatgggccaggaattcgtcgaagcctgaaggaaggaaaaaaaaaacctaaagatggtcgctgccaccaggtagtttccaggcttccacgtttcactccaccgcttgtttccagttaccaccactccacttctaggttccagccgtgccggcgccgccgcttgcgctactctgcgcgccctcgccgctgcttgcttgctcgcaacttagaaggtgacgccgcctgcccagtgcgagcacgcctccacttgcactgcgggctgcggccctgccgaatctggaaggtgtcgagaagaaatagatccttgcactccatgccgctatgatcagcgctggccgcagcaggcggcgggggcgggcaccggcgtccctgcccacgaccacgaccgctgcttcccgccggaccgagcactccatctcctgctgttattgtgactgcaagatatattccttaaacgacgccctcttcaatttggggtggaagtatgctagatatatgagagcatggttttctgtaggtgtttatctatctctcattgctttagtcagtatatccttgatgctattgtgggagtcaattggtgtgttttattttaggagtggattccttagtgcctggttacagaacctactgacttcaggtctcaacatatctattgtagacaccacaatcattataatgtcaacaatcctgtctattgtttttcatgagtttggacatgccattgcagctgcaagctctgtacagcatgtgtgatgataacattgttacttcctgtgatgttatatcctctctatgtgagtggtgatggcctcatggtaagtctacttctagttctatgtgtttacattattttaattttggcaatcttcacaatctaaaagtctgtcagaacaggtcatggaagtccctgaaatatctcctatgtcagaatacttgtccactcatgatgttattctttctgtggatggtctgaaaataaccagaactgatgattggatcaagattctgaaccaaggtactacagcgaaatctagggatcctgaattccttgaaggctctcatagatatgttgccactagttctaccaagggttattgcgtgcccgattcatggatagatgcaagcaaaaatctctggcagataagagacaagctgccttgcccagatgaactgatagccttcgaaaaagttatctgtaacgtctcaaccattttgacagagaagactagcataggtagtgaccagaaggaagttgagggaaaatattgtttgattgcgaaagatgtagtaaagcttagaagatgtggaaacggatggcacatgactgaagatgatgaaagtagctgtgcatgttttgaggatgagcactgtttggtacctgttctgaacccaggcttttcatggattgaggtctcctatgccaggccatactctttgagatgtttacaaaaaggaggaaatttgttatcatcacatactgcaaatagtaactttggacagagtccttgtgaaggatcttttgtttatgtgggtgatctgtcatcagcagcacgttcggttaggttatcccgctaccgacctcgatgggcacttctacttttcattgcagacatcccatatatcttggaaaatggtttaagtagcttgcttcatgcatctgcagcattggctgtaatcaattgcctaccggtgtattttctggatggtgaagcgattctggagactaccttaagctatgtagcttggtttaccccaagactgcaacgcagaattctaaaagtatgcagcgtggtgtggacgggtttattagtcattactttctcaagtatttgttattccacagtgctacattatggcgtatagcaaataacccatgtaattttgtcttgaacaaagagaagatcattttaatggaacatgccaactgtactctgtccattgtaaattataagttgttttgacttttatatatacataacttttgttaggctatcttcagtagactatccacgtactcatattcaagcttcactccttgaatagtgtagtctgtagtgtaaaatagtgttttaggtgactatatggataaactgttggatatgacgtatctacactaggt

SEQ ID NO: 41937 - DNA, 2084 bp, Zea Mays
gttacgacctcccctccctaaccaaaggcctaggtataaaaaccgaggccctgcaactcttcccccctctatttccctctccgtagccacctcatcgccccaccagttctccatccgtcgccgtaagataggagagagaggaagagagtagtcgcgtccctcgaatcgggcattcgccggtgtggagatccaatgaaaagtgtgggaaggagccttggacacagacgcacgtcttcatcgcataatcgagcttcgagggtaaccggagcaaacagaattgctcaccagtgtggcatctccattgcggatccgccctttgtcgtggccgaagcgcatcacgacacgaatctagcaacgaggttacgagaatctgaagaccaagttggtacttaggaatctcgagtctcaggcaagttatgcccttgatcacctttctttatcaaataatgttcatgttaatcattatgacatgctcaggttaatttgatgggacctaataggtttccctagcattgttatcccccaccttgcaaacagatgaactattgggtaaatttgctatttctctacctggttttgggaaattaatgttttattatgatcatgttccaattatgttgttgttttaattactgttcatgataagatcatcatgttaattggaacatggagaaccacccgggaaaacaatgctaccacaatggtggtatgggatgcccttgactgactaattaggaaagctagtgaaaaactaccttacccgaaaggggcaagggcggtagatgagctacgtatagggaggttctcgggtcaatcatgctacgatggtttttcggacgagggattcctatattgtccttctcagaaaccgtagcgaattttctgaagctagtggaactttgtaaaggccttgtagtggtaccctacctcatctcctcagcaaagatgaataggtagtcgtgatcccttggaaaatgggtaacacgatttgtgggtaaagatgtgcaacctctgcagagtgtaaaactggtatatcagccgtgctcacggtcatgagcggctcagacactcacatgattaatttatggaactaactttaatttgtcatatgcattgcattgtgggtgttgttattaatcttgatctcttatttaattgggtgggtatctacttatacgtagtaattgctaataaaattttgaccaactctaaaagcaatgctcagctgtaaccatctcctttggtaagcctcacacttcacatgagctcccacctttggtgtgtttatgcacattattccccataacttgttgagcgatgaacgtatgtgaaatcacccttgctgtactcacatccccccacctaggttaggaataggtactgcaggatgaggcacatgaaggatgctatgacgagttcgtgagtggtctaggccatcgtctccgagccaactatggttgctggattgttgtcttcatatgatttggtgaatttcgcgcctaggctaggtgtgacactctatctcagatgcgagcaaggagcataagcgcgagcctagccatacaacttcggtaggacaactcacaacatcacatctagaaacctccaggcccaactagaagaagagaggagggaacagatggacatggaggcgaggatgagggcggagccggaagcagagcgagtggctcgcttggaggatcaacagagaatggtggagatgttctagtacatgtagagccttggcgccgcacaaggttttgctccaccacctctgttgtttcctccagttgaccctgctcagttccatactcctgacaaccagcagcatcaaacaaccatcatggatcgccagcccatcgccgaaccagtccaaccacccacctcgctgatgatcttatgtttgttggtgttggtaatactttgtgagataacttggtctgaatttattgatgttggtaataatttgtgagatacttgagacctatgtttgtgagtgttggagacttatgtttatgaaacttgtttgatatggtgatatttgtgagatatatggtgttcgtgatacatgtgttgattctgtg

SEQ ID NO: 41938 - DNA, 1791 bp, Zea Mays
tgcttacccaagcgtgtctctctccctggcctcaatctccagccgccactcactaggagatcttctccttcacgccacctaacgtgccatcgtcttcacccggccgtcgtccaccctgccttctccagcttgcgccaaacgtgcgctctttgtgccgccttcgtgacctcccctagctcggccatggatgtcgcgccgcccttctcctatctctctgctcgaccgtgcctcttcttccttgagccacgcccggtgctcctccaccaagcctcgtcggcatgctctcctggcagcggtcggatctggcctcctgcttcccctctagtacgctctcgcttccagctcgttgtgcctctgtactggagttcgccggacagtgcccttgctcggcttctccaatgcgccctaccgccagcacccctctcttggtcatcccttcccctgcgcatgcgctgggcgtgtctcccagccgccagctcggctcctcgcttcaaccgtagacctggtactcctcccgtcgtgcctgtcctctgtgcgcacgcgccatcgccttctctagccattgtgctcggccgatgactcacttcgtgccactcaggggtggatctacgaccggggctgcctgggctgcagccccggtcgcggccagtaaagcgaataggctcatcacgcgtgacagcccagctctgcatccagccgcctagctctagccgtgtccagtccgtgctgtgattctgtgagcatttttcctaccctaaaccagctgccgccgccgcccgccagccgtggaggagccacccagacacccaccgcctacggcccgccgccgcagcacgcagcgctgctagcttggaggccgcagccagcccaccgccgcagcacgcagcgctgctcgcttggaggccggagccagaccgccggacggccggagcctcggagcaccgccgccggcccgccgccgcagcacgcagcgctgctcgcttggaggccggagccagaccgtcggacgcccggaggcccagaggccggagctagaccgccggacggccggagcccggaggcccagagcactgccgcagcaatggctgaactaccaaagtgtacactgctagtatttgctaatgatcggattcggagctgcacgtttcagaagggaatatagtagctcaagttgataggccatatatggctgaggacaatctggaagcatcgacatgacgccacctcatcgctcgcggaacgcgtggttagttgatggattaatcctgtatccgccactggtgccactgcttcggtgattgcactcagtcctgcgatgtcgacccatctcagttgtcctccagccctaccgtacgcctcgtgttgtcgatggcagcccatgacttcaacatcgacatataccaagagtcggcaattgcatgtgtgtgtggtggtttggtgaagatggagctatggacggagtagagagtgaatcccagttcgacgctcgtgacgaaaaaccaaatccaagaattattggcattcttgcgaattttgagccaggttatttgtgcggagtcccgatgtgtcgctcgccaagggcttgataaaacgactgaaccagaaatccattgccattcttgtgatatcgtgtcgacttggtcttggtaagaaaaattattgtttgtgttagttcggctgatgaatggagtaactagatatcttagttgtgagcattgatatggtcgcaatcgtgattggcaaatcagcatttttgtcgtgtaagctaagtttatgtttgaagatttaggt

SEQ ID NO: 41939 - DNA, 4488 bp, Zea Mays
cccacgtttcctcggctcctcgcccgcctctctcgtttattagcgctcgtaaaccccactcacttcttccttctcttcggccccttcctcggccgaaacctcagttgctcctccgcccgctcgaaaaccccaagtccccaatcacacatcgggccaccgccgcggcatccatggccgccgaagacaaagggaccggagaccgcgagaatgcagaccccaacctctgctccatcgccgacgcgtcgctgtctcacgagaacaccgaagacaaatcggatttggataccaagagcgcgccatctattcagttgcttcagccaaaaccgggggaaaacaaggagcctggttcacatgatatccactttaattctgcaaacacgacaggaaacagtgaagaagggaacaatactggaaagaaaagagatgttttcaggccttctgtgtttgatagaatatctggccaccgtgaccaatggtgcaatgaagacaccagactgaattcagattcccatcgaaatcaatggagggaaatggaaaaagaacatagtgatatgaacaaagtggaacagcactgtgatgaccccaagcaatatcttggtagccagcggagtcgaaaagagcgctgggttagtaacgaaagaaactatgaccaacaccatgagaataattggaattctcgctggggtgcaagtagtaaagattctcaaaattggcgtgaaaagtcaacagattcagatataaaagatgattactcctgtgaaaaagttttttcttacagtacatgccatgggaaagaaaaggatggtaccaatcatgagaaggttaatgaaagggacagtaatatttctcgatcgtggaactccagctattttgcaaaccgtggtgcaggcggtacatctgatcatctttttacggatccacagaagttatctgcttcatttggatacagtagctataggcaggaaagtgatagcccaaactctacaagttctcgcagaaggtttacatctgttacaagcagagtcaatagtcggtcttcacgaccattccatcttggtgtactttctgagaggcctgttggtccatctagtaactctgtgagatatagcaggataaagttgtttgaaatatatagaacaactgatgttagaaacttcacaatgccgataaatgatattggtaacaatgagatatcttcgttgtggcaagaagatcctatggatcctttagctctcattgcacctaatgctgaagaagcggtgattttgaaaggaattgaaaaaggagatatcacaaacagtttggcacaagcttgcaaagatggttctgatgacaaaaatattccaggcgtggcagcattagaacaaatgaaattaagtggaagagaagatcaaacaggaaacaatgaagaattcaatggtaaaatgaccattgatatcagaggaattcttggggctgctgatttgagggaacacttgaagtctgataaatctcctccaaaagaatctgagtctggtggtggtggtatccatgggccatgtgctgaatttggacatcagcgcaatgccttggaccaaggaactaaagttggtgatggtgaaaatgttaacccagaaaacctctctctgtactacaaggatccaaaagggtgcatccaaggtccttttcctggatatgacatcattggttggtttgaagctggatattttggtattgatttgctagttcgtgttgccagtgctccctgtgattctcctttcttattacttggggatgtcatgccacacttacgggcaaaggtaagggtgcctccaggcttcagcaataccaaaccaagaagtatgacagatgcctcacatctaggatcagtgtatcttggaacatctgattatggatccataaacaagaatggctgtgtaactgaagcagaaaattactttttggaggctccagtgtctagtaaaatccagaatcctagagcagcaactaatgttgttactggaggtatgaatgaatggaggtttgtttccggtgagaaagtgaatagtataaaccatcttgaagtacagaaggtgcagttagagacagaaaatacctttcaaatagaaggtgatgtcatatcagttggagagtcacaaaagaaagaatcagtacagtcaacttcacactcaacattcttcccgcaaatggttgacccatcgagtgaagccctccaacctcagaatattaacctgctctcaatgctgcttcctgcagaaaaaggacaagcaccgactgctacttctggattgtcacttcggtcaaataatgctgactctggaaatctgcatgctggtatgtgtggtatagatgttactcaagagatactaaatgtgcaccaaaatctgcataattctcagcaaataggtattgatgctcaacagcattacgttttaacacagaatcaaccaactttagcttgtttgaactctcaaatcacacagccagaaaagtttctcggtggaatatatcatgatcctcagttaaacatcaaccaacaacagtatctgctatcagagctacacttgcaacccctgattcctggagtccctgaacctcaatcctctctattgaacaacatgctacagctcaggcagcaggagcaacagcaacaatacatttctcagtccatacctcatgatcgttccatgcagcagctttatgattcttcccatgggacaatacatacttcattgtcatctggtgaccgtatgaagctttgtcttcaaagaacagaagagattcttgatcttgctctgaagttacctggtcatggtaagcataatctacaactacatgcaagtgtgaaattgagagacacaggaaatattggtttgtcggaaagttgcgctactgccctaccactgccccatgaaatgatgggtcatgcagcttggaaagaatgttctgctagtctcacacagggctctgcagttgttgatgctctttcacaaaaagaaagtattgtagactcaccatctaagaaaactccaagttatggttctaacgattatagcaagatgactgtttttgaagttacaggttttcctcaaccatttcaaggtcttcagaaaccgaaaagtgtagcatctcatatctcaaatgaagttcatgaaatggatatttcctctgtccatcctcattcatggaaacctactccaggtgttagggctaaatcagtgttggaaattcaagcagaggaacgattggaaactcagagggaaatagccctggaaaatacaaaggtaactacaacaacagcttccgggctatctattcattgggttgatttggttgaaacttctgggcaacagtttggagatcaggctagacctatgtgtgataaaaaaaatgacaatatatcacagagtaacagaagtcatttacatgatttatcggcaagagaggaactgataaagtcaaatgctaaagctggtgttatcataaacagtgctgatgatacatcttttcctcctctggcaccttctattactcagtctgatgctcatattcatgatggtgctgatttcattgagttcaagggcacaagaaagataagtaacagggggaagaaacccaaaggttctgcagttaaaaccccagcatcacatgcaaatgttatacctggaccagctactgatcctgcacaggtacgcgaaccatgttctctgagaaatattcaggtggaagaagaacaggaatcagctaatcttcagcaactagtaccagcatcatcccatgcaaaagggcctatggaccagcatattcatgggaacaattcatcctggcaaggttctgaatcacctccatcgaggggtaacgaattcctcaaaatgacttctcatgtttccagtcactccactcctaattcagaagagtatctgttttgggagcctcgtgagcatgcaaagcaagataagccgagactccaatcacctccgagttccgtggtcaatacaaggtctactgcattggacattcataagaaggggaagaaaggtacaaagctgagcacgtcagctttggggttcaaggttcagagcacccgtatcatgatgggtgagatcgcgcatgttgacgagtagatgtccagactggtatatatataaatttttatcatggtaggcgagcttcctgaagaatgaagatgatgacagtttggcggctgaagtgacgagaattcaaattgagcaactggcaaaggttttggttttcagcaggcttggttgtaacttgaaaatcgtataatgtttgttgctgggcggattttgtgcgaagcattgagcctggaaggttcaagattcaggtctaatttgcagtatggaatattcgagtgcttgcttgtgaccgtttcctgaaacagtcatctggtgtatagtttcctggaatctgatgggatcgtttgtcattaaaataatttacgtgcatatcaacattaacatttgccca

SEQ ID NO: 41940 - DNA, 306 bp, Zea Mays
aaaaggatgaaaaaactttgaagaaaagaaaattaagccctaagccgaaggtaggtgcttcaaagaaaaagaagactgcggctctgaagcgaaaaacgactgatattgggaatgaagctccttcaacacctcctgctaccgatgtggaagaaatcttaaaggtaatgactaaatctttgtctgtcaagctaagtccactagggccacatcagacaaagctttttcagaaggaaaaggagccttcaacagcaaagaagccagatgaaccgaaaaaacgaagaattattcatgtagttgaagttattg

SEQ ID NO: 41941 - DNA, 1974 bp, Zea Mays
cctacttcatagggctccacgcctaataaatagaccggcaccgctgatctcaatcaaaccgtcatcaggatccgccgccctggctcgctccggtcacgaccttgctgtacgttgttcctggcgaagctcgtctcccgccaagaagaagccacccagacgtgacgtgcgtcgacgctgcccagccaccgctgtgctcccctctgtcgtctctatccgtcgatctacacgaccacactgttagcaagcgttcatttgagatgattgagccacacttcatggaagatggatcgattgcttcaagctacaaggaaaagaggtcttgccagcacaatgatgattctaaaggggaacaagaaaaaccattcctttcagagggtgtctggtctcatatacattcctttatgcacattcgagacgcggggcgagctgcctgtttgtcccggtcttttctacagtcatggagatgtcatccctacctcatttttactgatgaaacattgggttgcaagaaaaacacatctcaagaaaacgaaattgcaagcaatttttacagtagagttgataacattctgaataatcattcaggcattgggatgaaggcactcaaaatccatgttcctataggttacactgcaaaggactcacgttatcttaaccgttggcttcagattgctatcacacatgggattgaagaactcgagctaatttttcctttcatggcaaagtacaaattcccatattcccttctacctatgagtggagactcaatcaaatgtcttgaacttagttgctgttctttttgtcccacttctaagtttggctggttaaaaaatctgacaaaattgtgtcttgatggtgtttttattgagggtgacgagttagagcgccttgtcttctctgcccttgctttggagaggttggagattagatattgtgatcgcatagtctgtctgaaggttccttccatgctacaacggctcacatacctagaggtttatgattgtgacaagcttcgtgttttggacatcgatgctccaaatataacttgcttcaatttcggaagacatcatacgaagacgaaactgtcaattggtgggggagtgtccaaaataaaagaattgagtgcatgcttcgacgatgcagtttattatgtccgtgttgaactcccgtctatgatggcaaacctcgaaactcttaccataaattcaatggttgagatgaatataccaatgcttcccagcaagtatctgcacctgaagtacttaaagatttctcttgcggcgtacacctttccttcaacatttgattatttttctctggcttccttttttgatgcatgtccctctttggaggcttttttcttggatgcatatcagcggaagatgaaacatgtttcgatcattacaaatcctttggttctgagggggactcctgaacaacgccatcacaagctcaagactgttgagatgaatggattcacttccgctaagagcctggttgagctagcatgccacattgctcagtgtgcaacatcgctgcaatccctcaaattggaggtccatcagagtgattttaagtgttatattccggctaataaacataataagtgctccccgctacctgtcgaggttctgatggaatctcgacgagcacacttggccatcatgacgtacattgagcctataattccctccactgtgaagttacaggttgtaggaccttgcagcagatgccatgcccttgaacagtagagtacgtactaccgtagtttcagtatttgggtcattagtaccctccataatattagaatggtttaaatatttatcgtcccacacgtgtgtaaagtattgtgacttgcacctatttcattttaattctaatgtctaagcatgaacaaacagtgatcccgttatttttgtcccacaatgtatgtaagttatccattgcattatcagttgcaaggattgaggcagt

SEQ ID NO: 41942 - DNA, 1951 bp, Zea Mays
caaatccgtcagaaataccatcaagaaaatactagctagactggaaccaatcgagaacatggcgtctcatccagcacatcgttccagcaaggcagctgatgaggagctgccaaaggcttcttcgacctttcacccaagtctgtggggcagtttcttcctgacctaccagccgccaactgcacctcagaacgagctgaggttttaagagaacgtgttaggaaggttttgaagggctcgacgactgatcaactaccagaaacagtgaatcttatattaacattgcaaagacttggactgggttactactacgagaacgagatagacaagttgctgcaccaaatttacagcaactccgattacaatgtgaaagatcttaacttggtttcgcagcggttctaccttcttcgaaagaacggctacgatgtgccatcagatgtatttctgagcttcaaaacagaagaaggcggcttcgcctgtgctgctgctgacacgagaagcttgttaagcttatataacgcagcatatctgaggaagcatggagaggaggtactagacgaagcgatttcatcgactagactccgcctccaagatctccttggacgacttcttccagaatcgccatttgcaaaggaggtgtcttcttcccttcgtacccctctcttcagaagggttgggatactagaagcgagaaactacatacccatttacgaaacggaggcgacgcgaaacgaagccgtattggagcttgcgaaactgaattttaaccttcagcaacttgatttctgtgaagagctaaagcattgctcagcgtggtggaacgagatgatagccaaatcaaagctgacctttgttagagatagaattgtagaggagtatttctggatgaatggagcatgctatgatccgccgtactccctttcccgaattatactgacaaagatcacgggacttattacaataatcgatgatatgtttgatacacatggtaccactgaagattgcatgaaattcgctgaagcgtttggcagatgggacgaaagtgcaatacatctccttccagagtacatgaaggatttctacatattgatgttggagacatttcagtcatttgaggatgctttagggccagagaagagctaccgtgtgctttacctaaaacaggcgatggagcgtttagttgagctatactccaaggaaataaaatggcgtgatgatgattatgtgccgacaatgagtgaacacctccaggtttcagcagagaccatcgcaaccattgctctaacatgttctgcatatgctgggatgggtgatatgtcgataagaaaggagaccttcgagtgggctttgagctttcctcaatttataagaacttttggttcatttgtacggctctccaacgatgtcgtatcgaccaagcgtgagcaaacaaaagaccatagtccctccactgtccattgttacatgaaggagcatggaacgaccatggacgatgcatgtgaaaagataaaggagcttatcgaagattcatggaaggatatgctagagcaatcccttgcgctgaaagggctcccaaaggttgtgccacagctagtgtttgacttctcaagaaccacggataatatgtacagggatcgtgacgcattgacctcttcggaagcactcaaggaaatgatacagctactgtttgtggagccaatacccgaatgacgaggctcgaagcttaattataagcaattattagatatattatgtgcttttggaaaaatatatagccacagtcttcttgaaggtcaggtcatgacgatgctagcttgatggaactctgtatataagcattattgtcataaaaataaaaatgaatgtacgactattgttgctccggtgcatagaacggcaaatagccatgtacgacgatagatgttcctcttgggttgtactgatactctaaaat

SEQ ID NO: 41943 - DNA, 382 bp, Zea Mays
tgattcttgcctttatgattttcacatgaaattttcttctatgagatcttacatggcatggttttcttctttcacataaagttgcgacatatctcaccacctacccataataacaatgtgcagatggtgactactcgccatatcaacctaggagccgctggaacttctggtggtggtaaccaggagggtaatcaagaagtacctcttcctccacctacaccatacacactcgagcagtttttcacccaatttctaggagctcaaaggaatatggagaatttgcaacgaaacatggaagtagagcttcgcaacattgctgataacactcgccatgggcaaccttaggacacacatggagtcaatcagtatagcagtttcaagg

SEQ ID NO: 41944 - DNA, 706 bp, Zea Mays
tgtgtttagttgaaaataggttttctaaaaccaaaacttttgttttgaaaatatgtatgtgaccgtatatacttaatcctgctccgataccagctgtggcagaacctcccaagttattgggcccacatgcacctgcccttgtctcaaagacctcagactactatacatgtgcactagataacttaacaggatctgtccgattgccccaaggacattggataaaccacttacaaccaggaccacaagattaagtaacacaaatcacacacaccaatatttttgcagcggaaatattattactaaattttacaagttacaaaaattttacattattttatcggagtgattgcaaaagtataagtttgaaatatatgctagctcaagtgaccatcctcaataagaagtatagaagggttacttagacttataagaaggccgagcccactggctacttaacaccatcagcagcagcacaaaactataacctgaaaaacaacagggaataaaaccatgagtacgaaattactcagcaagacttacccgactaaagaaaagactctcaagggtatgctggctagagagattcaaggtatggcttatcaagaatcaaagactctattttgcaaaaaacttactatgagtggatccttaaaaatccagttttacttgtcaggttaagtaaagttacctgcatctagagttcttt

SEQ ID NO: 41945 - DNA, 1256 bp, Zea Mays
acagtaggttcattccccccaccacatcgaactgtgcgcgcgctgcgcggtcggtcgctcccctcctctgtccgcgatctcggctggccgcctgggcttggccctcgccaccgctcccgtctccggttccggcggccgagccaggtgaacgatctctccagtccgcgacgatgaaggacaagcgtgggctcgaggacgccggcgacgggcgccctgatgccaagaggccgcggcctccggctctggccaggtgaggagccctccggattccacttttggccttttgggcgtgtttagcttcgtgatgcgcatgagtggggagcactagcgggagccctactgacttacagtattgtacttgtacacaatcggaaacttggttctggattactttcccgctgatcttttatggtagtgagcgccagtggaaatggccccggcccccgtgtgttttttctcgtctcccacttgtcttgggtgacctcaactcgagctggaatcatcatcttcagtggctactggtctgtgcttagagcagcgtttagggtggtgtttggtgcaggctgttggacgattggctggaatgaactggtttgctggatcgtgggatttggaagaaatattgatctttgttgtgtgcgtggtagattttttatgcagtagccatagtcgcaactcatggaaccatgtgcctttgcatggaatattcatagtgagtgctaccttgtccaaaatggaaagtatttgtatcgttactgtcgacctaacggcctacgtgttagttggacacgagtaataacgtcggcaaattcggtaacgctccctgtttatttcaatagtttaagtaaccgctgtcgagtgtgcattaccaggtaagcaaaggaatcaagcccagcatggttggttaaagggtgtaatactgtagttcagtgattgcgtgctcagccaacacaagttcaagttctattcaatatggatttgggtgcctgtttcttcttaatgtaaagtcacttgatttttccaagtttggtgtacgtttccaggaagtatgtaaaaatctcaagtgaaattagagcatggtagcctatgcaaacatacaatgttggtgagtatgagtctagatggattcagggacacatggatttctgtagtacagtaagtaggaatagatttatctgtgtaataatcagtgttatagttcagttacatatacagtatacctgtattctatttgcaaacgcaagttgaagattgaa

SEQ ID NO: 41946 - DNA, 259 bp, Zea Mays
cggatctaaaggataaagccgggtgcatctcatatgtgcgccaatgaagaacatcacatataatgacaaagtgtatagtgataaatgtcacaactaacataagtgtcattattacataatggaagtcttacaaaaataaatgataataataaagcgaactaaattttattctctggcgccacaaagctgactgggagacgccacctagatcaactcgtatgtttcattgtagggcggctcctcttcgaccacctgctct

SEQ ID NO: 41947 - DNA, 3054 bp, Zea Mays
cgaatattgaaatgaaactcgcgacagacaggtcgtcctctgctccgtggaccctattcctgcgattatctggttgctcacatggacggtgatccgtgatccccggtgaccaagggtgttgaatcctcatgcaggcagaggcagaaacactgcccgaggctgatgcctgatggtgcgatcccgttccctgtcgccatcgagttcgttttttcgttgcttgacagccttaaagcggcgcacgaatgccacgagccactgaggcggcttcccagttcactccaggcccagggcgcccggtcgccatgaactcccgctcctcctccggcggcgtgcggtccgagagctcgctgtcgttgggggagcgcctctgcgcggtcttcttccccgtcatcgccatcgccgaggccgttttcttcgccttcaccgactgcctcgcggacctctgcaccgactccggctcctcgcactcgcgccgcttcggcgcgggcgcgtcctcctccgccgccaggaacagtcggagcaaccattgccagccccaccacagacctttcctacgccgcgccactgcgggtggatggacctcccccaacctccgccagctcgcacgcctcgccgacgagtcccgatgcttctcggtgaacgaggtggaggcgctctttgagctctacaagaagatcagctgctccatcatcgacgacggcctcatccacaaggtgcatccaacaaaatccctcttcgattccctgtatctaccgtccatattcttgtcattcatgacgtgatttggggttaatttgaacatctatttctttgagtgaagtatttcttgctgtacttggaagatgcgattttttttgtttttttagcctgcggacaattgcctccttggctttaaatatggaagaaatagttacataagacctgggatagtgacactctgtcatccccgcatgattgacgagtatattaggccattgagggcgacgtgcaatttagtacacaaatccatctttaattttgcagggcatgcagtggattggattattttctgagggctggattggttaagacaatgtaatattcttctttttgagttgattggagaccgtcatgtgacaagcacacatgacaaaattttaaaagtttgtttgacagcccattaagattgctcgcctgaattttcccatattccgtgtgccattatatcctaggataacacctgcatctcggtatgcttggatccctgtatgcatgattgaagagtaggtgattgaggacgatgcttaacttagtacatagatccatgttgatttgttgcactacacgcaatggattggattatttcttgaggactgaattagctaagacgacatcttattcttctttttgagtcgattggagactgtcatgtgacaggccacatgagtgcattataaaactttgtttgacagcccataggatcacttgtctgaattttcccatgttgcgtgtgcaattgggtcgtaggataacacctgcatctcagtatgcttggttgtcatgttccttcctctgccataccaaggttgaaggttttgattggtgaagcatgtgatcacatttttttattaaactaacacagcagcaattttgtgtgcgtgtgatgcggttcaaaatcagagaaatatttttcagccttacattttcagcagcatcttctatgtgtgctgtgtgcacaatagtccaattagaaaataaaatatgaatgtccttgctcgttttgtatgcaactagacgaatggccaatgtcatattaatttttcttaaccattccactgctggatggttcttcatcaggaagaacttcagctggcactgttcaaaactccaagcggcgagaatctttttcttgatagagttttttatttgtttgatgagaagaaaaatggtgtgatcgagtttgatgagtttattcattccctaagtgtcttccaccccttggcaccaattgaagacaagatcgattttgcatttaggttgtatgacttgagacaaactgggtttattgagcgtgaagaggttaagcaaatggtaattgctatattgatggaatctgatttaaaattatcagatgacttactcgaggccatcatagataagacatttgaagatgctgatgcggataaggatggaaaaataaataaagaggagtggaaggaatttgcgttacgccaccctaacctgttaaagaatatgacactgccttatctgagggacatcacaaccgtcttccctagtttcgtcttcaacacggcggtggaagattagtcgttcgaattgaaggcaataaagcagtattggggattgcttgaggtgcacaaggttcctgaaacctgacggctgttggtcgccttcaaccactgagaatccgatgtgttctgagcatcaaggcagccacccgaccatcactcctgctataaattataatataaattataaggctcatccggggtggcagatcggcagcgggaacttagggggtgtttgggaacaaagtttttctacagttttgaaagaatactgcagtattctcaaatactgcagtattatatacagaatggtgtttggcaagctagctaaaatctcagtttttaaaactgaagtattgcaaatactatagtagttttaagctattctaaacttaagtctggacctcagtttttaaaactgcggtattgtaaactgcggtattgtcatgactaaagtatactgtagtatttcaaaaactttgttcccaaacagggccttacctgatataatttcttgctgccgttttttgcgcagcaatggattgagagttggtagctgtagatacatctagcttccattctgtacgtagggatccaggaactgtaaatacgttctatggaattgtatcggaaagttcctagtacgccagccagatctagaataagccagagcttgtttcttgcagtggttttcttgccctcaatgctctcttctgaacacgaacatgcttatgcttgtcaagactgcactgggttaccatgtcct

SEQ ID NO: 41948 - DNA, 391 bp, Zea Mays
acatgacctgtccggtgcaccacaggactatccggtggccccatctgtcaaagctccaatggtcgaaccctaacggttggatgacgtggctgacgctagggttgaaaacggtttcggaatttttcggtttttcgggtaccgttttcgattttttccaaccgaattcaacgataacggtatttttcgaaatcggaatcggtgatcagaattttatattggaatcggtatcgaaatcggtacaaccttctaccgactgtttccttcggttaccgaatttaaccggaatttaccgattttaaatttcggaatttttcgaagataataaaaaacaaaagtatttcaaaaaataataaaaaataaagtaggcagtcaagcccacacttcactccgg

SEQ ID NO: 41949 - DNA, 826 bp, Zea Mays
gtatgaagaaggattaaagctgaggccgaatggttcgctaggtttactctcccctcctcttccacggccgcgcctgcgacacccatccgccgccacgccatggccaagtacaacgtggtgcagaagaacaagcgccagtgcaatcaggaccgcaagcgcgccgcgcatggggagcccgggaccggcaagctcaagcagcggaccgcgcccgtctccatgtccggcaagcggaagaagaagctcgagcgccgcctcaaccggaaagaggctgcgatgattaaggcgctggagaacaacatgggggatgtcgacatggtctcagttgaagagtcttcagaagctgcaaagggcaagtcccaagtgaagttcagtgtgaagaaaaactcaagaatacagataaagagattaaagggcaaaggcaggaagaaagccaaaaatgcaaaaccacctgccaaggagaaagttgatgccatggtagaatgacagttgatgccatggtagcatgacggacaagactacatacatccatccctttgtatgttttctcagagtttgcagcatggaccgacctcaccgaacactggcgcgtgtctcttgcatcttctgcctgaatgttaaatagaagctacttaggcctggtgttaatgtacttcaaacatgaatctacctttaatagtggactatgcgaatttgttcatgttcttattgcgtttatggagatgcttcattgtgaatgtcggcttctatagtaagcaactagcataatcttatcaccccccccccccccccccccccccctccctccctccccagcatcggatggcaa

SEQ ID NO: 41950 - DNA, 2383 bp, Zea Mays
cgctgatctgctctctaggcggctcgctcgttactcgttcgtcttaccgcctcccaacaaacagcgagcggcgcgacctaagccgctctgcgcccaccggccagccggggcggagagggaccgaccgctcctccgttcgaagtgccggtcctgagtcaccggcgtcgcccgcatccgctgctcagctcgcccgccagcctggtggcgatcggcatcctcttttactccagaaaaataaagatcttctcgcaaaagaaaaaaaggaaaaaaaagagaaaatgtcaatgcactgcaatggttgattctgaaacttggatcagatagacactgatactcattctactcatcaaataagcgttgtcagatcacggtgctacacacactggttcagtgaatctgcaggtgctgctcatatggaaacatacactactgatgacgctcttacgctcatggggtttggaaagttccaagcacttgtccttgcatatgcaggaatgggctgggttgcagaagccatggaggtcatgctattgtcattccttggaccagtggtgcgggaagagtggaatgtctctccccaagacgagagtctgctatccagtgttgtgtttgctggcatgctaatcggagcttgtgcttggggctttatttccgacagatacggaagaaagactgttttattgctttcgactctgcttactagtggattgggtcttctaagtgctctatctattaactacttgtgcttgctggttcttcggttttttgtcggcataggagtgggcagtgggcatgtattttcatcttggttcttggagttcgttcctgcaggaaatcgtggcacttggatggttattttttcctttttttggactattggcacagtcttggaggcttcacttgcatgggctgtactatcagcattgagttggaggtggttgctggcattgtcttcccttccatgcttcctcttgcttcttttcttcagaatcacacctgagtcaccacgctatctttgcgcacaaaatagaatgactgatgcaaggtttgtcctggagagaatggccattgcaaaccaagcagctcttcctatgggagttctcacataccaccaagaaacaaaaactgaatgcattactcatgtttctgaggatgaacatcttattccagtcagagagaaggaacatacagataggaatgctattagttccaaatctggtgctgttgctgtattgcacaagctattatcacataacttgctcaaatcaactctacttctttggtttgtttactatgccagttccttcgcttattatgggataacattgctgacatcacaactaagtgatgtgaatagaagctgtaaatctgatctggtctttgaagtgcaccaaaataatggcaatctttataaagatacttttatcactagtttagcaggtttatttttgtctgctgttcttgttgattggtttggtcgaaaagcttcgatgtggtctatgatgttcgcatgctgtgctttccttggaccacttgtacttcaacagactgagttgttgacaactattcttctatttggtgcccgtgcatgtgccatggggagctttacagtcttgtgcctttatgctccagaggtttgtatcagggtcttatggcgtataatattagttatataacatgcttaattgatctgtaaaactgccatcaattaagaatcatagaacaggttcaataccagagtatcccatccatttggaattttggatctactcgttctactttactgatcgcctttttatgtgtgcctatggttctttagactctaaacatgctttgccagtttcgttggtcaagttgtgttgcagttgcagcagagtatgccttcagctaattcccttctttcttttctaggtgtatccaacatttgtccggtcaaccggtgcaggaattgcgaccgccattggtaggattggtggggttgtttgccctctcgttgctgtcgccatgctgcggagctgccatcagatggaagcactcattgtgtttgaggtgatattatgccttgctgcagttgcctgcatgttcttccctgtagagaccaagggccgtggaatggactgatgcaatatcaggcttcagcatctagatgagcttgtagttcatcactgtttgttttatgccatcattatgtacagagaatatacatgtaacatggtgtggatagttcctcaaaatatgtgcaggactttccaaatttgtaagacagattttgtactgaaagacagctggttctgtactgccaaaacactgaaagacagagttgtattactcctcaaaaaaaaaagaaaaaagaaaaaaagctaacaaaaaaaaaaaaaaacgg

SEQ ID NO: 41951 - DNA, 1227 bp, Zea Mays
agtataggccaagtgcttgaactaggatagaaagaactttagatgcaggtaactttacttaacctgacaagtaaaaatggatttttaaggatccactcctagtaagcttttctgcaaaacaaagtatttgattcttgataagccataccttgaatccctctagccagcatacccttgatagtcttttctttagtcgggtaagtcttgttgagtaattccatactcagggttttattccctgttgtttttcaggttatagttttgtgctgctgatgatggtgttaagtgccggtgggctcagccttcttataagtctaaacgaacaagtgaccgagggcacaggtatttagctggtggaaattgctgagaaggagctcattgaaggcaagttgtgcccttgatcacttatatttacccaataatgttcatgttaatcattatgatctgcataggttaattttgatgggacacaataggtcatcctagtttgactatctttataccttgtttaccactgaacttttgggtagtacctactattgctttatgtggttttgggtattaagatacacattattcatgatcatgcttttattatcaatttgttatttactgtttaggatgattggaacatggagcgaccactcgggaaaacagtgctaccataagggtgttatgggacgctcttggttgactaattaggaaagctagtggaggactaccttacccgaaaggggcaagggcagtaggggagtggttggtgtagggaggttctcatgttgattttgctacgatggcggtcagacgggggattcctgcattgcggtccctagaaactgtagtgggttttttgaagctagtggaactttgtaaaggcctcgtagtgttaccctatcttgcttccttagtagaggtgtatgggattcatgaccccttggcagatgggtaacatgacttgtgggtaaagatgtgcaacctctgcagattgtaaaactggtatatcagctgtgctcacagtcatgagcggctcggaccctcacatgagtaacttatggaattaaatttaattggtcatttgcatcgcattgtggtttattattaattttgatctattagtactctactttggtatatacttacatttagtaactgctaataaaatttgaccaatttattaaaagcaatgctcaactttaatcattatttgttgatcagccttacacttca

SEQ ID NO: 41952 - DNA, 1741 bp, Zea Mays
taatagtgatattttactgtacacttttttttttctacatagcaccgttttcttatattgaatatttttctatataaaactcactcgcagtaatcaagtcgagttgtaccttttcatttttaataaaatttctcagtagcctcctgatcttttaaaaaaaactcactcgcaaaaaaaaactttagaactcggatgtcggaatggctaaccatccactgactggtagggccgcataggatggtcgacttcggctctacatgtcgcctcccccgcgcacggtgagccgctgctgccggcgttgcgtacccgctaaccgccgcggacaaggccaccacgacgtcacagaaaaagggaaggggtcgaaatatccaatcgagacccaccaccgaacgagtccaaatccgctcgtctcccctcgaagtcactccctccagccctcgccggctccgcgtcctccggctctcccacccgagccgagaccacccatccaagcgcgcgcagctccggaagcgacagggccggacgagcgcctcccaaatttagcagccgcggagcgcgtgggcgtgggtccgtaaggagggtcgatggggtacctgccgtccctgagcagcaaggcggcgcacttcgtgtccgacctcaccaccgtcatcctcagccccgtctccgagcgcgagacgtcccacctccccgaggttgacgaagtgctagaaaatttggacgatgataaagattccgagcacaattccgatagccttgatggccctgacacatcttcctttagagcattcttgatctcatttttgtcatcatcgagctctaataacgattcaatggagataattcctgagcagaatggggacatgggttaccctactttaacacccatggggaagggaagcaagggaagaacgggtctgttaagtagggggaagcattccatcggaaaaatcattaacaaggcggcaaggattagtggtttcaaacaaacaactgcagagcctaaaattgacagggaggcagtaactcatactgaaccagatgcacctgtactggagcaccaggaaccaaaggaagttgcttccttcggtagtttgccaactatgtcggaaccatctgttcttttgtcagaactgatgcaaaggattctttatgcctctctcccggctcttgcccagggaaggaactgggtcttgctatacagtacatggaggcatggcatatctttatctactttatatagaaggagcatgctttgccctggtttctcactcttggttgttggggataaaaaaggcacagtttttggtggtttagttgaggccccattgcagccatctagttcaaagaagtatcaggggaccaataattcctttgttttcactaatttacacaatcgccctgtcatctatcgaccgacaggtgcaaataactactttacgatgtgctctaccgactatttggctctggggggaggaggtcatttcgcactttatcttgacgcagaccttttgattggttcaagttctaattcagagacttttaacaacgggtgtttatcgcattcttcagacttctcagtgaaagatgttgagctttggggcttcgtctacccttccaaatacgaggagatgctgacactctgccggactgagaaaccaggaatctgtcgatggaggtttcctataacttgaagtatgacgccatgtacagtcttacgccaatgtccaccgcacaatcctca

SEQ ID NO: 41953 - DNA, 376 bp, Zea Mays
ctccggccgcacagggatcttccctccctttctttcttccctgcgttttgtggctgttccttgctgttggctggctgaaggttgaagaaggtgtttgtgaggctgacgtgtgggcccaaggcgaagggaccgagagatgatgatcgtgcaagtgatgtggtgccaacaacaagatgcagttggtggacgacctgaagaatgatggacttaaccagtggatgcttgccaagcgagcacctcccccagcaaacactacccaagtgttaaattaaaggcaagccccggttttatgcataaccgtttatatatgctattttactacacttaatgtttgtaggcttgtaccgtgcacttaagtgtaggagttggttgaaac

SEQ ID NO: 41954 - DNA, 1386 bp, Zea Mays
cacagacggacagacccaaaggccaaaggtccagagcgctcgacctaggcgagtgggtgactgcttcaaccacgagcgcagcgcggcggcgacgccatctcccacggatgtagcttcgtctccttcccgttcgctgtcgtcgacgccatcatccacgggcacagcgcgacgccgctccataccgagtctgtgggcctgacaccaggggagtcgccctccagccctcgcccggctgcccctgcctatgcccctcggctccgaccaccgagttttggccaagtcgccaatcgctcagccattcagccataacgacaaaggtttgggagtattttcaacaggagttagttgaggttgatggagtgatgaaggctatttgcaaatactgtgggacgaagctgacaaggaaaaggaattcatgcacaaatagccttagaaaccatgttgcggatacatgtcctaaaattctagttgaggaccgcaagcgattcattgctacaatgagaaaaaagccaggagaaggttcatttgtgtttgaccctcgaaagactcatgagtgcatggttaagtggtgcatcagtgccgaggtcgcattcaacaagtttgatgatccgttctttgccccgtggatggagtcattgcaaccatcgtttagcggtgttgggccttagacaatgagaaatgattgtattaccatattcaagatgatgtggcaagagctaaggaatgagctacagagtcttaactctcagatttgcttgacatctgatctttagacctcaaatcagaagttgggttatctttgcttgacaacccactacattgatgcaaactttatcttgaaaaaagaagactattgcattcaaagttgtaaaatatcaccctctcgcatacaagcttttaatgagattgctgagaggtctggatttccttcaaaggctggattaattcttgatgttccaaattgttgcaattcgacacacaacatgattatggaggccattgagtacaaagttgtcttgaagagatatgctgaggaacaacttgagccttcaccagatgatgaagagtggacaaattctgaggcgattggagagtttcttgggggcatttgaggaagctacaaaagtattctcaacacatagaagtccaacatctcatttgtttttgcataatgtgttatgtattgtatccatcaagctctaagaaataaaaattggcaaatcaattgtgtgcttgaggatctagcactagcgatgtatccaggtgttggtgctcactggagtaatggagtcgaatgcttttggcgcgcttttttcctattgcgaattgtgttgttttactgtttgtgaggtcgttaagattgcaatgcgatgtggttttgatgct

SEQ ID NO: 41955 - DNA, 790 bp, Zea Mays
atatgtaggtcctaccaaaatttgattgaccaaatttggttgaacataactcaagttatgaattttttcaatttccctgctcatttgaaaagaataaacataaaggtttaaaggaaaacgactttgcatggggtccctggacttattcttatccgagtcgtttaaaccgtgcccctgaataactattcatatgtgtcactgacttaacacttaaccccctggccttttaccccctctaacccgcactcctccctcgcgtgaacagtaaccgaggaggaaaaagcggtggcgcggcttatcggcacagtagagggccgacaaagggtcgagtgaggtctgggagtctctggcgatcacgtcgaggtgcgagtcatcgtcggtggtgaccaaaggtgggctggccgcgtgcgcaggcggtcaggctcgtcggcggtgcgtgctccggcctgctcacggtggtagagtcaaatcaaagtgctcggggagcttcatgggaggtcaatgatgctgtgggtgcaaggaatttgagaatggctaaccaagtgatccggttcacgcgtggcggcgggcggtcgaagttcggcgaggttgcgctcgcttctccggtgaggcaatgtctcggctcaagcttgggaaagcttcacagcctctcggggaagccgtccatgggctagggcgaggctgggggtcgacgggaagggctggtgtaaggcccaaaatctgtataaaaataataataataaaataaatatatgaagaaaataaaatatcaaattcagacatctcaaat

SEQ ID NO: 41956 - DNA, 825 bp, Zea Mays
cggacgtgcctgctttctcgggcgtgctaggcgctatccatcctgagccgccataaccaccgcctgctagtgcagccagcaagccgctcgccacgcgcgcgacgccgtgtttggcccccaccgccgttcggccgccttccctgccgccggtccgccgtactcttcttcgctagactgctccccttctccatcgatcacttgctccactacgcgcaagacgcaaccgtgcctacggcctgctagtgcctaacttcctccccctctctatgcgtgccactccaggcgtcgagctcgcctctgcgggaccgtagcccccacccctcattggctctctgcgcgagcgtgatcgcgcctccgcatcccatgttcagtggagccctaaaggttgtgtttctacgaagatccaaaattccttggaccaaaagcttcagcttccaatagtcgttaagggccttgtactgcgaactctggacaaagtttcatgctgctacaaagtgctctgcatacctggtgagtgtttaatcaatctcggtgctgatttgttagttttctttaagagggagttgccgagctttctcaacaatagcgatcgtggaaggcgtcaaccagattgtggatgttgaaactattctatctacttttggatctaagttataggatatttgaacattttaatgtttgatacctggatgctttatgcttatatgtggatgctagaaaaagttgtgtacacatgtttttgacaaaattgtacgcacgatttggattgcattcaattgaatgatcattttattaactgatggtgaattaaatatgttataaaca

SEQ ID NO: 41957 - DNA, 2267 bp, Zea Mays
ctgctgcccttcgggatacttctccttccacctcatctcactttctctcccagatatgtttcatcttccttcgctttcctcctctctacattgctctggatgtatgcgtagcgcctgctacatcaccgaaaaggcatcgcagaccttcgatcgtatcagacggtggagagtaacaccagctcaaaaccctagcctccaactcatatacctgctgctcgccccgacgcgcatcaacttccgccgccgccccttcctcttcgtcgctcgcctcacgcctacgccaccacctctgccatggccccgaagaaggataaggccccgccgccgtcgtccaagccagccaagtccggaggcgggaagcagcaaaagaagaagtggagcaagggtaagcaaaaggagaaggtcaacaacgttgtgctcttcgaccaggccacctatgacaagttgctctccgatgtgcccaagtacaagcagatcaccccatccgtcctctccgagcgtctcagggcaagagcaagtctataatctttttttaacgcaggctacatcagtgagacattgcagctcatacgagtcttgaaagacgtcctgattccgatgaaagcttgaggcaagaggaggtctataatcacttctaaagtaggctacatcactgagacattgcagcccataatagaagaggtgtatgaggttcagctgctaatggtcctgtgattttgcatttctgccatcatcattatcatcatccttggtcaatacaaataccgttccaagggagtcacatatgttcactgtaattaattaaaaaccctatttttaagggcagtaaattaaatcagtgaaataatgaagcaccaatcatcttactttttctcgatacaatgttaacttcacttgaaatatgacttatttacttattaattttatatgttcattcgctatttgggatcgtgcaaacccatcaccaaaaactacgtgttctactgaacacagatatgccttttccattgaagacaatgcaatgttgttcttttcatcttttaatttccattgaaacaatatagtttatccgataaacaaactgtagtcagttttttaccccaatttttttcaagaaaatatacaacatagtatttaaacatgccccttaactgcataaataaatgaatgtacaagtcagcagccatattctatttaacaacgtttttatgtccatacacggtaatccgtatacacaaaaacataatttattgccacacatactatatatgtgttttacatatctacgaacttatatcggttacacagcctcacacaaagagcgggatcaaatctaggctactcaatctcaggtaagaaggattttcttcctcccattcttgaattgtcgtgatcctactttcttatactaaggggatattctacgttaatgtgcattttttactcatggtggttgttaatatttttttctaagaacaaaaaccttaagtgactacatgatgttttcttagtcctaactaataagttgcgcagttgctctagaattctacaagcttaggtacaataatataagttgttaccatattattatattgctaaggattcctaactgttttgatacttctgagtatcttgatttgttgttttcttcaggtgatccatgattaattgatggagaatttcttgacaagtttgacattgttatacttagcattgcatctcttaaaatgaagttgcatattcttctctggaaatagttctactttttaatatgtcacttcagtaactctacagaaagttttcatgctcatcatgctttttttcagttgtttattaatgaaaactgccgaaagagcagcaaacacattgtgttttatactatagactgcgaggattcatgtgaagtatttattgatttatagaagcatagttatgttaaggtatgttgcatacttaaacgtgattaacattgatttttaatgttcagagctagcacaaggtatacctttatgacctaagtattcctgtgcaaccacttgcaattgaagtatgttctgcctataatatatgttcattttcttcaaaactataaatggacatatatgcagttaaaatgttaaactcatcaatgtttcccttccatatgtttgcactgaaaaaatgtgtcataaaatgtgagaaaaccatatgttcaaaactataaatagtttactgaactatctcttatattatgaaatgtgtatgtatatgtacaacttgcttgaaac

SEQ ID NO: 41958 - DNA, 1752 bp, Zea Mays
gtctctcttcctcctcctacctcccagtcccacctttctttctttcttttttctttctttttgggtttctctttctcctggtccggtccgggagacctgctggaccagacggtgccgactcactgcaggcgttcgcttgacagccttcctattacgagacgagctcttggttttccgcagacacggactctaacaagcgagggcctgtcatggcctggcctgctatctgaggccgcggcggagcgtgacgacgacgaagtcggtcaggatgagccgcgaggataccctgaaagtgcagaccctcgagctcaaggtgaacatccactgcgacggctgccttaagaaagtcaagaaggtgcttcacaagatcgatggggtgtaccagagcacggttaatgcggcggagggcaaggtgacggtgtccgggctcatggacccggacaccgtcatcaggaagctgcacaaggccgggaagccggcgcagctgtggggcgccaccgccaagcctgccgtggcgacccagctcgagaaactgcagctcaaggatgccgggggcaagggccagggccagccgcccaagaacgcaggcggcaagggtcagccgcccaagaacgccgccggcaagggccagggccagggccagaagcagcagcagcccaagggtggagcgggcggcgccggcgccggcgcgaaagtggtggcgctgccgcactcgcagccgacgccgcagcagctgatgcagatgcagcagcagatgcagatgaacgggatgaagtttgctcatccggagctcatggccatgggcgcaggtcgcatgccgatgccgatgccgttcccggcggcagcgcaggcgcaggcgcaggccgccgcggccaaggaccccaagaccgtcaagttcgacctcccggggggcgaggagttcggggacgacggcagcgacctcgacgacgagttcgacgaactagacgacgtggatttcgaggacgacggcctcgacgacgacgacgacggcgacctgtacgacggccccgggatggtgatgaagcccatgggcatgcccccggccgctgctgccggtggcggcaacggaaacggcggcggcaagaagggtggcggcgggaacgaggtcccggttcagatcaatgggaacgccgccggcgtactactacccgatgccgcagcgccacccgcacgacagcatgttcagcgacgagaaccccaacgggtgctcggtgatgtgaggcgaggcgcggcggcggcctgcggggggctccggagaaagtgaaccaggcaaccagccagccagccaaccggaaggagggagctcgggcccgtcaggtcggaggcggccgccgtgagtggaagagtcgtcgtcggtatacatgaagaaaaaaaaaactagctatatgctatagcaccagccgtaacctcgccgccccatttcgttttcgtctttcccctagtttgttttcacctttggtactttttgtttcccttctctgaacaaagaaagagcggcatgcagcttcctcttccttgagtggaaggtaggtatagtggtaacaacaatgatagtggtgatgctagctgatggctgtcttccttcgcttctttctttcttgcttgcttgcttgcttgcttgcttgccccatatctaatgaatggacaatgtgcaagagcagtgcctctctctgcctgcctagcttgttgtgtgagagagacagagaagaatcatcatggatggaggtagat

SEQ ID NO: 41959 - DNA, 544 bp, Zea Mays
cccctttcgggtaaggtagccctccactagctttcctagttaatcagccaagggcatcccattaaacccttgtggtagctctgttttcccgggtggttctccatgttcccattaacataatgatcttatcatgaacagaaaataatgaacagataataacaagtataaaaatgagtgatgaatatctctatacccaaatccacataaagcaatagcatgaactacccaaaactttagtagtaaaaccagtggtgaaacaaggtataaagatagtaaaaatctagggtaacctattgggtcccagcaaaattaacctatgcggattattatgattaataagaacatggatgggtaaaagaagtgatcaagggcacaacttgccttcaatgagctcctgctcagctacttctacttgcggtacctcagaatccacagtggcttgctcgtctactcgcatcaacacgatacatacataatatagcataaatcaacatcacatcaaacatgtaaataaaatatacagtgaaactctacacattaaaat

SEQ ID NO: 41960 - DNA, 5901 bp, Zea Mays
gacaacgtcgtggaagttgggagggaaagcagccccttgtgtaatcaggaaaccaaaacgcacatggtcatggtcatggactcatggtcatttgtcagccaaaatgtaaaagagaaattaccaagccgttgagggaaaatggcttcgtcgtccagctgggtttctatccaatccatgatgtagtccatgtacgggcttattcagttagaggtgaatcgagagttattggtttacaagaagaacaaggaagctgccttgaatttcttagaagaggatacatggctcatcttatcctagctaaacagccggttgcagcttcaaagtgcctgcttgcataaactacatttcattatagcacatcatagagacagtacgagttacaataatcaattttctgtgctgcagaatgctacttggtgggaagagaatgtcaaagcgcctgcttgcataaactacatttcattatagcacatcatagagacaatacgagttacaataatcaattttctgtgctgtagaatgctacttggtgggaagagaatgttgatcaggagatgccgcctgcttagcaagaactgatgttgcacctgctggttggatgcttttctgatctagaactgggaatgtaaaatttgcccaaggagtgtccatgtcttgttgtatgtaaatgaaaaaatatgaaattacacacagagaagtccatgtacaacatataggacatgaaaatctaaaattcaatcaatcatattatttgatacataaattcatatatatttacctttttatgatatagagattgcaggggtgcatcaaattagttgttggtggctgatgtttgtggtgtgaggcatgcttgtgttaacttgttcatctaaacaagaactataaatgttttgtgtacactatggatcaagaatcacgtccttatttgtgtagaagtctgttctttttgtgtaggtttggtctggcttaagttctaatgtccttttactgtggacgatctctaggatatgcagcttgttaaaatgattttgattgcttcgttggtcacattagttctactatcaccatgctggcttcgttggtcacattagtttccttatctcatgaaccatttttggtaaaatgaagtcttcaatgaaatggatggctgctcaattctatttttattgctctcacaattcctattcccacttgtgtgaatgaccaagcgatgatgctatcgcagatggtgtggcatgagcctacaatttcattgtagttatgaaaactgatcagtcaatgatgatgaatcatacgagacttttttacttcagcatgttttttgataggggatgaattttcatgcggtgttatgaactacaggcggaggtgagcagtgggagcgtttgcgtattaaagtgcactacactacaatacttgtttttgtatgttaagcatttactttagcttaatcaatcttgtagtttttaatgttatctttgtcgtccatgcaagaggatctccattgtgtttcgcaagacgagagtcaccaagcacctgttccgttttgtgtagaacttcacgctcattcctatcccggatacttctatccttatccggatgatggtacctagcaacaatgatagtctgtcatcgacctggacgaatagccatagatctctctcaacaatttatgtgccgtcgcaacgcacgggcacctacctaggtcgcaggcagaagcagaactcacctccgcccggcccggctgtataaaaaaaaatcctctcacaccgcacacccgcatctctcccatcacagtgcgccacccgcacccaccaacgaggcaacgaaacccagtcggaagctagaccggcgacaagtgcagcgctcgccgcgatggattctgactacggcgtgccgcgcgagctgtcggaggtgcagaagaagcgcgcgctctaccagcccgaggtgcccccctgcctccaggtacgcaccgccgccgcacctgccccttactcctgctaagttccgtgcgtgcgccattccccgcctacgcgtacagatctgcggtctctcgggtcaagcggcgccagatcccgcattgtcctccggccggatcggtttgttccgtcggcgctgatatctacggttcaccgttcacctactcccgatctctttagccgggatcaggctacagtgcgtgttgcagtatcagctgacgctgactgatgtcgctttcgctggtgacactggatctgagttgtagtgaacgtcacatgtaaatcgtggcgctgtcctgtattttagatcggtctgcatgtctgactcgtgggaggatttgttttttatgctgtcgtgattcatctgttttgtagtgtctggtagcaattgcaactgagagttaactgacgaaattattctgtagcaatgatgatggacctatctacatgtactcacgggtcctataattgtaattgtggaggggcttaggcctaggactcggttgtcgctatcaaattgaccttcttatgtatggaatcgctttggaactcgtctatatgggtggactctcaataaatttctgcatcaaatcggcttttctcttgtttgggccttgggggcacttttgaactggttcctagacgggaagaattgtcaatagcttttcagaacagatttcttgtgtgtttctgttgagttagctcagttcacacacttgaggaacggatttattgactgtatgtaattcaggggactactgtcagggtggagtatggtgacgccgcaattgcagctgaccaggcaggcgctcatgtgatcagccatgcgttccctcacacctatgggcagccccttgcacatttcctcaggaagacggctgttgtccttgatgctaaggtcatatctgaacacccggtggtcaggtacatctttcgtgttcctgtacatgaaaaatcttttgcctcacaaaaatcatctctcaaagatctaatcccttatgttccaattgcagggttggcattgtcttctgtggcaggcaatccccaggaggccacaatgttgtttggggactctatgaggctatcaaggcccacaaccaaaacagcaaactcattggtttcctcggtgagtaatttgctacttttcagtaatcccctaggagcatcatattatctacattgtgtcacttaattccattttttttctgattagcatgtgcttcaatgcatgagtcctacaaataaacttggtgcatttgattgtcactgaatttttctggtaacgtctgttgttttggctcatactaataactttgtttggtgggagagggtctctaaaagagtccataggttcaagaggaggggtttccatagtgtcattatccttggagcttggtgcttgtggctctctcgtaatagggctgtttttgatggagtgagcccttccattaatttgacaaagaggttgtttctagatgagttgattagttggagtaaggcgggagcgaagcatttagacagtttgggaattattgtcgctttaaatagggtctcgtagggcccgtcaggcttccccttgtgggggaggcttgagggtttggtcttggtgttgtaattcggtccattttggacctttcctttcttaatataatgatgcgcagctctcctgcgctttcgagaaaaaaaataactttgtttggatcagattagcagataatcaaccacacataattgatgtattattttgcgtttagtcataaatatgaatgacatctgaaaatcttcgacccaactttcatgggttcatttcatccaaactagatttgcaggcatttcttagatttgcaatcctaaatcgacagcattactgttatgcatatagacacaccaaattttgggagacaccttatgttctgggctcctggccagtttcttggaccttagtttgtctggcccttgcttcctcttgcttgccagagctttgacatttagatgcatgctaacacaaattaaaattattttaatgttttctaacatattcgacctatgttgaaacaggtggatcagatggtttgctagcgcagagaacattggagatcactaatgaagttcttgcttcatataaaaatcaaggtggatatgacatgcttggtcggacaaaggatcagattaggacgacagagcaggtcaatggtgcaatggctagttgccaggctttgaagttggatgctctggttataattggaggtatgctttgttttttaatctatctactaagattttggtacagtgtacatttgctcattaaattttctattttcatcttatgaaggtgtcacttccaacactgacgctgctcaacttgctgagacttttgctgaggcaaagtgtgcaacgaaggttgtaggtgttcctgtaactttgaatggggacctcaagaaccagtttgttgagactactgttggctttgacaccatatgcaaggtgaatgcacaacttatcagcaatgtctgcactgatgctctatctgctgagaagtattactacttcattcgtttgatgggacgcaaggcttctcatgtggcattggaatgtgctcttcaatcacacccgaacatggtcatcctaggagaggaggtggctgcttccaaacttacaatttttgatattacgaagcagatttgtgatgcggttcaggcaagggcagaaaaagacaagaaccatggggttgttcttattcctgagggtcttgtggagagtattcctgaactatatgctctgcttcaggaaatccatggcctccatggcaaaggtgtttctgttgagaatatctcttctcagctttcaccctgggcatctgcactctttgagtttttgcccccttttatcaggaagcagctacttctccatcctgaatctgatgattcagctcaactttctcagattgagacagagaagcttctagcccagttagttgagactgagatgaacagacgtttgaaggagggcacttacaaaggaaagaagtttaatgcaatctgtcacttctttggctaccaagctaggggagcactgccttccaagtttgactgcgattatgcctatgtcttggggcatgtgtgctaccacatcatagctgccggtttgaacggttacatggccacagtgacaaatgttaagagtccagtgaacaagtggcgatgtggtgcggctcctatttcgtctatgatgactgtgcagcgatggtcgcgtggcccttcagccacccaaatcggaaagcctgctgttcacatggctagcgttgacttgaaaggaaaagcatacgatgtattgaggcagaattcttccaggtttttgttggaagatgtctacaggaacccaggtccgctccagtttgaaggaccaggtgccgattcaaagcctatctcactgtgcgtcgaggatcaagactacatgggcaggataaagaaattgcaggaatacctggagaaggtgaagagcattgtgaagcctgggtgctcgcaggatgtccttaaggcggcgctgagcgccatgtcttctgtgacggagacactgaacatcatgacctcatcgtccaccggccagactgcactgtgactcgtttggtgccgttttgtggtgcggatcagaatccccactttttccatggtgtcgattgacaaagttaggagcagtaatcctggtgccacacgggtcattcttttgtagcttcttgggagagttctgtcagttttgaattcgatagtttattatggagaggcttgttggtgagtttgagctcgaataatttttgaaacagacggattgcggaatcttaataaaccaaaatttgtgactgcattcacatttctgccagtcgtctgaatgagaaaaatgtgagagcgatctcttcatctga

SEQ ID NO: 41961 - DNA, 1047 bp, Zea Mays
gagggtcacattttacaccccgaatttggctttgttcaaaggaaaccagggcgtggtgatacaacatcgtccatgagctgttttgacaaaatcacccgctggagcgttgtaggaattcaagtggttacaaagtgtccaagtgggataaatcctctttctgtgcattcctcaacaggtgcattgctgtcacatatactggaacccttgtatttgtccaccattactattggacaattacctgatggtactcctgaacggttctctattaaaaataatatcaagaaggccctggatgctcgtctgtcctctctacccaccgaattgccacctcctttcaaaatgcagaagccaaaggtttttgaggcgcctgtaccaccaacagagtttcaacagattcctggagacgtacgcctcttgacatgcgggtactcgatttgttggaataaatccggtttgcatgaagttgtcttaggtacaactggtaggaaacaaggaacctcatcaaaggcagcgcacttaccctccaccgagtcactgctctgcaagaaaagactactagaagcatttgtgtctcttgagcatcctttggtggggcaactaaaatgcgaggagctatcttaccgggcacttaaggatacggctcatgaataccatcacgcgcttgagctcctcaggaaggccccattttttggctgctggcgagctaagcctacatttgttgattcgtttgcagtttcacggtgatgtctcgtgaactggtgaatgccatcgccctgtttctttttgtctgttgaaaaaacatactatctccgttccaaaatatagttctttctagccattttttctgtccatattaataaacatataaatagtctaaaatgaattatattttaggaccgagggagtaggtctgatccagctttgttctgtttgaatttgtatatgttggtggtccatgaatgaatcaaactgaacttatacgcgcgtgatgctgtcacttgattcgaagcactccctcccggcctccccgccccaggtatcggtatt

SEQ ID NO: 41962 - DNA, 3001 bp, Zea Mays
gacgcggccgccgagcagacgctgtcttggacgcatggagtatcgaagaggagtctgagatttgttctctgttcgtcagctatggaggagctgaagaacacgagcccacgaggcagcgcagggacaagaagtgccatattggagagatagctgcaaagtcatccgagcctagaatagccggttcaaaacgacgatgaaggcgttatccacgtcggcagaaattctccaagccgcccgatcgtgaatcaatggcattcattgcggtctcgatagcgtgtggaatacgactctcaccccctcgttccgaggagcgaggagcaggccgcctgcgtaatgtcgaagtactcgatcagcagcttctcttctcgacgtggcgcctccgccaccctcctccccgcgcgagtacctctggtctgggctccagcacgctgaattagtgcatcaaggttcatgactcagactgcatatggcactatcaaaacctgtttacacgaaacacggtgttatgaagtcaagttacaaatggagcatgttagcccaaataggaaaagaaagctaagtaccatagtaaatacattgttataatggtgtgcgccagaaaagaaaaaatttattaggtgcggccacaccctctcaacggcgtgtcacttcgcattgtggccactttgatccggatttagttaaaactctaaaagttggtccacgaagagatttggctaatcaaaggcacatcaggctgggatccagtcaattaaggttttgtcttacttacctcgggtgaagacaaggcttttttatgcactgaggttgctctcggttgcactgcagaaatatttaacatgcatcctacattatttggttactttatgaccaaggaatacttgatacagagaacgtcttgctctatcagagggtaccagctttaaatcaaaaaccaaatttcagagaaaaaaatacagatgccaatatcaatcttgggcccatctcctgtactgaaatcagcccaaacaacatggttccaagaaattgggtgtgctgtggcgaccgggctttccctacgggctggtcatcatttcgggagcgtcgtggctacctccggtgctgcggccagcgcgactaggccagatcgacccagcgcgatgacggctgtgcgcggcgtcctcggacatcgctccgccagctcaaatctccaagcgctcgagctcggaactcctccaaccggtcatcagctgccagcaatcgacctccatccgcagagcactcaccgaaaggtggctctggatatctcctgctctaacagctccacaaaaattgcattcaacacaggcgacaaacattcgagaacagaggtagtacaaaacatgtactgttgtacatgatatgctagtctataatcaagaacgatagcagacgccttcgcaacacgactcaggatacccgcacataggagctgctacagtgaactacctacgtcaaaagatggtgctggcaggattccgctcgaaaagatccctaggatatagtacgaccatagcataccgatgctaggtagagattcttagaccatttgtccttcacatgtttactagggaaattaattgtcctcagtgtctcttgggtttcatctgtaagtcgcctccttggtacacttaaaacgaaagcagcctgatcacaagtagcaggagctgcggttatccagtaacccctgtcccaccttttatgaattccctcgctgggatacaagaaatccagttcaaccacctggaaagtaaatgccaatagttcaataagaaacgaggttttaaagtcgggcgactagtcgagaagtcggtgcagaggtgatagtcgatctgaacgactcgactttctctactagtcgctcgactagtcacagcagttgagtcaggcgacttattcgggcccatgtataaaaatgtgagcccacccagccatctcaaccctggtaggtaggatgctaatggacaagttttctaccttatttatctatggatatggaatgattcatgacttgatgaggaccaagacaaatgatagagatcttgtgaggcatgcaactactctgtttgcaacatccttccttacattggctaatatgtgcaaacaaagacaagggttgaaaaatctctttgttagtaatgaatggtgtgagagcaaattgaagaacactgaagtaggaaatgcacgtgttgtttgtcactcttgcattttggcaagcagatgaagtaatttctattgttgataagaggtgggatagtcagatggataccaatctgtatagaacaacttttgtttttgaatccaaacaaattctttgaaactagagagaacaatagaagactttctattaagactatattcaatatttaatgatatattgtagaagatggagatagatgaaaatatactaaacaaggtgttttttagtgttccaggcgaaagggtctctaaccgagttggttatgtggtatgagtagcactcctcaggtccgacttcccgtgggagcgaactttcaggctgtggttaaaaaatcccctcgcctgtcccacgccaaagcacaggtctaaggctcagtcgcgctcattctcacatgggctacggtgccgctgtgtaagggtggggcaggggttcgggggttttctcgacctgcgtgaggtcttcttaatataatgtcgtgggggcggtcttatcccccgtaggtcgagttttttagtgttccaacatgtttttagtcttagcatatatagaaagttataataaaaatataatcaccgacttatgttcgactagtcacgactagtctcgactagtctactagtcggtagctgcacgaatcaacttgaaaacattgataagaaatatatcgtacttaacctaagtgtaaaaataaaaaactgaggagggactgatgaagtggaaaaaatgctacctgattagaaaacccagcattatgagacatgacaacagcccacctacttccag

SEQ ID NO: 41963 - DNA, 1153 bp, Zea Mays
ggattctatcacattactacatgaacaaagtatttcacaaatacttactatcaccacttgtcacgcatataaaatctagttaaatatacgcggattatatatatacccaatgaagcactcttcccataaatggaatcttaaacctatatttcatatgacgcaaatatgtcacaaacgttaacacaatcatatcgcatatatatatatctactaatattctttgcataaatctatatttaaaatctagacttcaacacctaacgcgaccacttcacaatcacctcactgcatgaaacgattggttgaacaacactaagtatagtcacaagatcatcacgactaacacacctagccaagccattcatcaaaccagctaacaaaaataataaatcaactcaccaaagctaaatccaacttgaaaccatgaaatcgacgatgcacctatactcgcttcccttttgtcttctggcgcgaacgcaaggtgcaacaagctgctaaaacgacgacgatgccggggatgcagatgttgatgccatggaggtggacacgaccgccacacaccgcgcgacgacaaaggaagccagagcgacaacggcgcatcgacttcgacactaagcaccggagcttgacgatgtcgcggcgcagcaggaaataacgacgccacgatggctagtgtgacagttgtgggcagcagggagactcgaggtccgagtagagtggacgcatggccagagcaccacaccgattcgagcagagagaggcttccggcgcgcagcaaggtgaagagggtggctcgcccatggatttgaagctgttggccacggtgaggctggggagaaggaaggggtgctcgcagcagccgtcacgtccgctgatgcaggaaggaggctgaacacagggtgcagggacgtggccgagaccgagcacgtccgctgataggggcacagcggagctgaggtgagctcgagcgtcgagaacagggacgggcaagtggggtcaagggcaaggcagaggtcaaagtcgggcgagctctgctgaccagcaacgtgaggaagacgccgactgaacctagagcagcgccaggggagcagagtgcgctgacgagctctagcagcactatggctaggcactggtgaagagacagtgcctccac

SEQ ID NO: 41964 - DNA, 1963 bp, Zea Mays
tcgtgtgacagggacaacaatgacctccaagacgagtggcagcataaccaccagcctgagcaccatggggaagctctcctccgtgggcagcaacttcatggcgtccgctggcagccgcagcaccagcgacggccaccaagaacttccgtccggacagcgtcctcggcgaaggagggttcgggagagtctacaaagggtgggtggatgagaagaccatggcgccgaccaggaacggcaccgacatggttgttgcggtcaagaagctcaactcagagagcatgcaggggtttgaggaatggcagctacagatgcagttcaatttctgctcatacatcactaatgcagagagcttaaaagaagcacaaaagattttgaaggttctcctgaccactgcacccgttatggttctttatgctttgttttaatgctgatgacctgtctgtcaatttagtacagatgcagtatatgatcgtcgacggcgtttctagctcctggtaagggagggaggcaggcagggtcgttcccacgtcagagcaaaactcttgcaccaagcctccaactccaagccaccatgtggccgaatttgattgctttttacgctacatggtggttgactagtcgtgacactagcctgctcatgcaagtctctaatttctttggtccttattttacagcttctgtttccaaattcccacaccgtgtatcttttctgcttagcttcaagatagatatatcccttcgctggagctgagcgggggctcccggtcacaagggtcattagtcgcatgacgctgcaacagatccttgctcgagcagttgggtatgacgctatattgaatggaagccatgtagtcaattttacagatgatggcagtaaggttactgccatattggaggacgatagaatatttgaactgccatattggaggacggtagaatatttgaaggtgaccttttggttggtgccgatggaatatggtcaaaggtgaggaagacactattcgggcactcagatgccacctattcaggttacacctgctacactggaattgcagattttgtgccgcctgatatcgatacggttggtgagagtgcaaatgagtacacagatgatgaggatgcaagctggaaagtccgtagggcatcatcaaagtgcctatctgcaattatagtgtctcgtcctgaaatgttggtgaagatgtttctagaggcttgtccaaagttaattgaacgatttcgggaaagagaagagaatgtaaagatggatatatttaacaccttcattgagctgttacgccaaactggtaatgttacgaaaggacaaggcgacatcgatgagtccagccctcgctggttgctgaagcaagaggtccaaaagttgtcaagtctatcaacaggcagttacgtgaaaaatcaatcaagacaaaggttgggacattttcagtactgaaggagcttgtggttgtattaccagactgtcttgctgatcattttggatcacttgttcctgggattgagaaggctttgaatgacaagtcttctacctccaacctgaagattgaagcacttgtattaacaaggcttgttatggcttcacattcgccatctgtgtttcatccatacatcaagtggatgaatatgcctgatcttctggaagttatagatttcaaggacacttttcttgatgccaaccatgttcagcaaagttttccagactaccaggagatgtacgaggatgcaagacaagtggcgactgatgctgtcggcagtatcggaactgtggcgtcgttctgtgtagagaaaagagtggtcgcagcgtacagggacaagtgtgaggctctaaggaaacagggcatccgaatgagaattttttctgcgtactggaattctggttctgatttcagcgtacaggcatgcatcagcagagcccacagacctgcattgacatgacaagagtccctcg

SEQ ID NO: 41965 - DNA, 1145 bp, Zea Mays
caaaaaaaacatgtgtggcgcgcaaattagtggctgccccaaataccagccgcgccgccgcagcccaaaaccctatctcccttcccgtaattccagtcgtcgcgctccacccaaaaattgatgccgccgccgccaatcgccgtccacagccgcgcgccctagccggccggttgcaaccgccgtcccagccgcgcgcccaagcaggccggcccccaacgccgtcgccgtgatcctattacctgatgcggcggcaccaaacctcgcaaggtcgaagcccgtacgccgccctttgtcgcccaccgcaatattcagaggtgcgatgaaaggcaaactgatagtgtcttgcccccttcctcctgagaggataccaagattctaacttcttttcaaggatgtctgagaaaactgcagctcatcacgtgcacacaatcagctacctagcccaaggtttgtatttaatcacgttcatcaaatatgatgggtatagatttcttgtttggtctactagtcaagcaagagaatgcccttcgttttgctgaggatgcaagtatgttctactcaaataaattactcatccaacatcctgtgtttttcgctattggtgtcatagtatgttctccctacaacattttattattgcagaccagttgtgctatggcacctgcctttagtgtcttccttacttcctattcatatggcgattctatgagtatggcacgagcagtagaagctataaaggtaaaattggccagctatgcataactatgaattcccaaacacttgttttgaccctttttgtttgaccatcattttttatttgcacgtgaactgctcaaattatatggtacaaatgtcttgggttagagatgtaagttttttctgaactactttgtttacatgtgttttcagtatgcaaatattgctatgtctcaatttataaagcaataaaaagtcattgttgtctatttaacacgcaccttctgtgacaatggccatttcgtcacaattaatggcgtcaccaaaatactacctatgacaaataaacactagttagtgacgtaatcataatgtcactgaaggcctaaaatgttgtagtgtattttgagtagcagcaaggtgtccttgagtagcagcaaggacacttg

SEQ ID NO: 41966 - DNA, 2090 bp, Zea Mays
tacgctttaccataatctaatttatataatataggatagaaataagtaccgtaagttgataaaacgaattttaattgggaaatttggatccataccattaaaagatcactattttggatccataccattactatctcacctacatgtgggtccacatgagtcaatgacatgtggggtctatggtatatatctaaagtttagattttttaatggtatagatccaattgttccattttaatttgggacactatagatgcatttttggcactattggagatgtcttaggtcctgggcatcctagctcgtgcgtctctcacccggtacctgctcctcggcgcctccccaaccaagcctccgcaccttcctcccgacgcgcccctcatggcgaggaggcgctgctgatgcctcccggcgtcggattggacgcggcggccacgacacctagccgcttgcggtggtgctcgccgagctctaggcgcctaatccgccgacgctgctcctcggatcctccccgagagattcaggcctcgtctcgtctcgtcctgcctagcagttcaatcgacttccccaagtgcccgacccctacaaggagacggagtggcgcgccagcggccacgccggcgaagagaggacgacagcgtgcaagaagagaaggcctgtgtcaggggcagctataggtggcaggtgcaaagataggcaacaagtgttcaacaacacgactgtggatcaattgacctgcatttcagcttttcagttgaggattaaagtggagctttaagaagcttgaaaattgacattatctcaataatacattgaagtgcaagatgccaaaaataaagaatctctctaatgcatgcaaagtatcattttctccggaaggtcccatatctgaagaggtgcttgagagagtccgtgcactgttagatgagataagacctctagatgttggcctagataatgaagcacaaattgcacgcaattggagtagtactacgcgtccatcaaatgggagacgaggacgtaatggggctaaccagttcactgctccaatcaaatatttgcacattcatgaatgtgaaagtttctctatgggtatattttgtatgccaccttcttcagttattccacttcataatcatcctggaatgacagtacttagcaagcttctttatggaagactgcatgctgagtcttatgactgggttgatgtacctgatcatcctattgatcaattgcaaccaaggccagccaagcttgttaaagattgtgaaatgacggctccagagacaactattctataccctaatgcaggtggtaacatccacacattcagagccatcacaccttgtgctctcttcgacgtcctttctccgccatactccgctgaggatgggcggcactgttcatacttccgcaagtctcaaatgaatcaaccatctgttgttttgcctgctgagatagatagcacacaagtagtttggttggaggagttggaggaccatcagcccccagaaggctttgttgttgcgagaggtatgtataaaggccctgtaattaggagataatttgctttggggcacagaatccaccaaactgcaaatcagctgaaagacgatattgcaagcatcctcaggtcatgtgcagcctacggtttactttgtacatgtcaaagtgacctgtgataattcaacagcagttttacaggacaagaatggatgtttttttgtttggttgcttttttaattgtgtcccactgctgtagtatctctgacctagttatggagctcttatcagaccaagaccgtggagcacctacttttgagcatagtctagcatattgtcatgatgtattgatgtactagggacatcaatggacaaccttttccatttggtgatttcagaaagagtttggttggggctaccattttgtctgtgtaatagcaccattactatttttgggcaagactgtaaattacgggggaggaactgtaataatatcgttagatttatcatgaaatatattttcacgatatacctatcatttttaataaaatcttaaacatcaatgttttttcataaactaagtcaaa

SEQ ID NO: 41967 - DNA, 2949 bp, Zea Mays
gtgctccacaagcaaaagaaccccaaagttccgtgtgaggtgtgactcgagctccctagatttcgattagaaaactcgatcagattcttttctttcctctcctccggaatagtttattccgctttgctttgggtccacgatctcttcttcgtctcctcctcgaggcagaggaagacgtccggcttcttgtatccgccttgttagccccacacaccgacaacctggactgcgcgtccacgaactcactcgccgaacagacatcattccccttaccccgacgtttgaaatcctctccagccgatgcatcctccccatcaatcttctccggttcgttgcattgcgtctggattggcctgcccctgctagattcagggacttcgcatccattgtgtctgatttcttctattcagagtgaattgcagaagtagactggtttcttcttcatccagtaagctcagtctgtaccctgcactgcaacaatggtgctaggcctccgaaccaagacaaggaaggattctgccttccatgtggatttcaatattctcatccaagaaatcagcccatggcccccttctgaatcgttgaagtctttgcgctccgtagtactcttctgggaaaatggcgagcgcaattcaggaaagacgagcactgttgcgccttcaattgggtcaggttccacagcagggaagattgaatttaatgagttcataaacttacaggctattttccagaaggaggggtcatccaagagtggaaagtggcagaagaacctgcttgaattgaacttgtatgagccgaggagggagaagctgaagggccagcatttggggtctgcaacactagaccttgcagagcatgcaatgtttcatgaggacaccagtgttcctgtgcctctcagttccaagagaagtttcaaaaacaatgcccaacccatggtttacctccgaatccagcctttggatggcgataactcaagcgtttcttcaagagatgcattatcacaagaggcatcagttgataaagattcaaaggaatttgtctcagcaacggtgagtgaggagtatactgaagatacagagtttgcttcctttactgatgaagaagaagcaactccatacctgtaccgctcgggtgtaactgctctcacaggtagcaatagatctcatgaatccctcaagggcaaggatatcaggttaactaataatgaaggtaccagctcatcgttggattctcaacatgaagcaacagtatcctgtatgaaagtgaggaatgaagaagttgaaaagtttccaattcaagtgcaaaagcaaaatggccatccagaaaatctgtctctctcatcagatttgcccagagaacaaagtccgtctcttccaccacacaatgcattcagaagtggtcgtaaaatgtcatttgcatatggtatgactgaatctaaccaaagacagtttggggagagaacttatagcactttaactactgatagagcaaggaatgcgaggttcagtatgagagttccagatgttaatggaagtatcataaataagaaagttgattcccaggatattgcaattactcatgagaataaggccagtgttgatgatggattgcaagtccaggaaccaatacgcatttcaaataatcgaaatgacaacaaagttcgagaactagaacttaaaattgagttgcttgaagcagagctaagggaagctgccgctgctgagataggcctttattcaataattgcagaacatggtagttcagtaaacaaggttcatacaccggcacggaggctctccaggcattttgtgcatgcactaaaaaactgttcaagagacaagatgggaagtgcagcaaggaacacaacctctgggctggttttggttgcaaaagcttgtggatatgacattgcaaggttgagtttctggttgtcaaactgtgttgtactgcgagcaattgttactgaaacttctaggcaatcgggcactgtaaatagcagcaattatggtgattataattccaaaacaacatacaggaaaaactctgcatcaatgtgggagtcacttaataggaagaaaggaaaattactttcccctgagtttgataactgggaagatgttgacacatttatagctgcactaaagaagatcgaatcatggatattttctcgaattgttgaaaccctttggtggcagacattcacaccacatatgcaatctgctgatataactggtggtttgagaagtactccaaatccaaaaaaaggctatggaaagattcctgttgtgggcaaccagcaacaagcaaccatatcaatggacatatggaagaaagcctttaaggaagcgtcagaacggctttgcccagtaagggcagctggtcatgagtgtggatgtctgcctatgttaaccaagttggtgatggagcagtgcatagctaggttggatgtagcaatgttcaatgctattttgcgtgaatcagatgatgaaattccaacagacccgctgtctgatcccataactgatcctaaagttcttccaatcccatctgggaaattcagcttcggtgctggggtccaactgaaaaatgctattggcagctggtctagatgtcttactgacttgtttggcatggatatggacgactatcaagaacttgacaatgaaggtggtgaaaatggctttggtgaatctgtaaagccattctatcacctgaatgcactgagtgatctcctaatgcttcccaaggatgtgctcatggataccagtagcaggaaagagctttgccctacctttagctcatcaatcatcaagaacatcctggatgtctttttaccagatgaattttgtccagatcccattcaaggttctttacttcaagcactagagttggagggggtatatcttcgcattaggctgctagtttcacaggaagggaactacagtaaaa

SEQ ID NO: 41968 - DNA, 1343 bp, Zea Mays
gtgattgcgtccgcctccttcaaccctatccacatctggcacagaggaaaattggctacggtacaaaacaccgaggcatcgatggactcttccaccagctgacagctatgatttcccctgctcacctcgccttcgccgccgccttcctcctcgtcgtccggtcgtcggcgcctggcgctgctgccgcccgcccgatcttcgatggcaagccatccccctccgaggccaccgccactgcgaggtggctcgccgcccagaacacgtggggtgtcctcagcacaatatcaagtgacttaagtggagctccatttggctgatgtttctgtagaatgaatacacgctgatgggcttgaactgtcactatttgggccatgggctgtatacttatagctgcatgtgtgttttcatttcatgttagtaatgctaatgccttatgtatttctcataattaaacttttcgactggatcatgaagttttcaataaaaagaagggacaactcggtggtatcaatttctacaatcatgaaaaaccacatggaagtagcaaattcttataaattataattgtcacgacaactcggtggtatcaatttctacaatcatgaaaacatgtatttgaggctgtctcctcttaatttatctcttatggtaaaataatagaaagttaaagagtatatttttttatcacatgttagatttaacgcagtacgattcatcagagaagaaaatccttccctttactcctctcccacaatagacataagttgaatactataacatatggtttacaaactattatatattgtggatgccacattgctgtactcgtttttttccatatgataggcatttgctatttttgcagttgaagatggttgaccttcagtcatctgaagcagatttggccaagtcagcactttttaccaaacatcctgaaatgaaggattggccaaagaatcatcatttcaaaatcttcaaaatggaaatcgaaaacatattcttgattgattggtttgggggtcctaaacccatatccccctcccagtaccttgaatttggaagaaatcagggctcattgatgtactcataagcgaagaatgcttcatcgatcaatatcccgtctgtgtatgctcttctcaaaaatgaaatccatattgcacatattgtaaagacatctctgtgcacggaataaacctgtagtgttattaaaatgaaatccatatggcacatattgtaaagacatctctttgcatagaataaagttttagtgttattattattgattatgttgtttaattatcacatcttcgtgaacaattactttacaaaaaagaagtctacag

SEQ ID NO: 41969 - DNA, 1930 bp, Zea Mays
cccttgcatggacgccattctcccgtcctccgttctcctcttcctctctctctcttctctctctctctctacggattgcctcacacgcatctcgcgtgcaattcaagttctcaggtactccgccgttgatgaactgcctccacacctgcggcgacaagaagacgctgaagaagtggtttttcatcgacaagacagtaggctaaatccagtcccagagaacaaattgaagcaccactccccaccgcacagcagcacagctcttctcttcaccgatcccgatggatatgggcagcggctcgtcacctgtcatcaccgatccgatatcgataagcccaccgctgctgggaggcttgacgtcgaacctgatgccgttctcggtcatgtccggaggctgctcctccagtcctagcatgagcgccagcagcaggcgtaaaatcgaggaggtccttgtcaatggcctgctagacgcgatgaaatcgtcgtcgcctcgcaagaagcacaacctcgccttcggacaggataattcgcccgacgaagatcctgcttacactgcatggctgatagtagccaacgcacagggcaggaggatcgctgtgttcttggattacgacggcaccctgtcgccgatcgtcgacgatcccgacaaagcgttcatgtcccctgtgatgagagctgctgttagaaatgtcgcgaagtacttccctaccgcgattgtcagcggaaggtcccgtaagaaggtgtttgaatttgtaaaactgacggaactgtactacgctggtagtcacgggatggacatagtgacatctgcagcagcacatgctactgaaaagtgcaaagaagccaatctcttccaacctgcttgcgagtttctccctatgattaatgaggtgtgttttatcttacagctactgcactaacaaactgcatttcttagtcgcagtacctcaacttgatatatctggaactctgttactgttcctagcgggtttccaagtgcctcgtggaggtcacgagttcaattgaaggtgcaagagttgagaacaacaagttctgtgtatctgtacattaccgcaacgtagcagagaaggactggaaagtggtcgcaggactcgtgaaacaagtcttggaggccttccctcgtctcaaagtaaccaacgggcgaatggttttagaggttcgcccggtgatcgactgggacaagggaaaggctgtcgagttcctgcttcggtcgctcggcctaagcgactccgaagatgtggttcctatctacatcggagacgatcgaacagacgaagacgccttcaaggtactgcgagagcgaagctgtggatacggaatcctagtctcgcaggtgcccaaggacactgaagccttctactcgctgagagacccgtctgaagtaaacctcttgtggtctttttttttccttcagtacttgcttctaccctgtcggcttcgttcggtctagtctggtgactctaatctgtgtgtctgcttgtctgtcacacaggtgatggggttcctcaattccttggtgagatggaagaagcacccgctgtgacgcaactgaaaacacaacgactgattcagaagccgtaaagcgactgtacttcgtgcggcggcaattttgtagagtttttggctcaccgggtggctcattctttcatgcgtttttattttttatttttttaactgtcacagtccttcgtcactgagaaataacaagtggttgtcccacaccctcttgcaactgtaatctgtaagcaagaggccctccctgttcggtctatatatatatattgaataaaaccgggacgcttttgccttgccctgaaactgcatcttccggtggtgttgattcggcaccaaagcgtgccagaacacaatagtatcatgcacttgaccgtgggatgctgatgctcgcggctaa

SEQ ID NO: 41970 - DNA, 377 bp, Zea Mays
cgtgcatcagcttagttaaacatcatgaactctgtattatgttctagactgggagcatgaaattaattccattagaactttgaagcatgcccattgacaaattttgttgttatggagcagacaccataccagattgccatgaaaaaaagagaaacccactttgattttctgagcttcttgaatcgaatacatagatgactccatagtagaccttcgtaaaaatctctcttggtcaacatgtactacatacattgagaaagtatacatgacagtggatttcatcgattcactgttttttagacgaaaggcttattgcccagcttgcattcaaatcttaacaatattattacaggggttaacatcttacaagagagcac

SEQ ID NO: 41971 - DNA, 3311 bp, Zea Mays
cgccaatcggctgtggccgaaccgtcgtcgaattctccccgtggcagcccgatcatggcgtcgccgccggcggatccgcacccgaagaaacgtagggtcgccgacgcccaggacccaagctcctcctccaatcctgcacccacgcggcgtccttcccctgctccgcctcctcccgaaaccctaggtgctgtggcgtcttcaacctcctccccacctccgacagaaaccgcatcgctgccgccggagggggtgaggcttcaaaagcttcgcaaccaagaggagttgagaaatgtcttccagcgctacagccgtatccgcaagtacatacaggagcataaagacggcggcctcacgcccgagctggagcaggactatctctacctcatctccgcctcccgaggttgtgaaagtgtacagtgttttctatctttgccaatccctcgatttgcctcacgctgtcctactgcactcgaggcggcgactaaagttaccatcaacatgtacaattgcaacatggccactgtaaagagaggggaggatttgaaaagtgtgccatacaagacagctaaagcatgtatcattggcttaacttacatatgctctgcagcatcttctgaagaactcaagtcatctgttatgaaaggaatctgctctgtcgtttatagaactgtcctctccttcttcatttcaaccttggaggggaaggatatctatcgtatggactatacaaaacgtgcaatgcttcaggaccctgtgacgttgttagacactttaaaattggagttggacaatgctaagcaaccaacaattgataatttgtctgagctgggagctatttgcttgctttgcacattccttttgttcccagagaatatactagaagcctgttttaagctgcttgattctgcagaatgtgatgatgtaaaaggagaagggttataccttttaaatcagctgacctgtcatctgacctgtaatgctgcaaatgatgctatgggtgataagatcgatgagcagtgtcctgtgatggaaggaaatttgtccgacaccaataaatttgttgattcaaatcctgttgtttcggaaaatgccatggagccaaatgagtgttacatcacaatggccatctctaggcatccatttctgagacgttggatattatcaaggtacaagaaattatgtgattcctgtaaacctgccgtggtttctgaggtgtcatcttgtttgaaagttttgggctctttgtcagaaccttccgatgataaaagtcacacgggcaatgagtcatcagtgctggagaaacttgataacaatgtcagagaaaatatgcgaccagatgaactaatttcttcatctgagcagggagcacttgcaaaaactgagagtgtcgataattatggaaataagttttcacagaataagaatgtggacatggttcgttctgataatcagaaatctgatgagctcacggacgcaaaattggatgacttcaaaggaggaactgttgtctctgatgcacagcatcaaggttcaagatctgatttgcttatgccaaaatctgtgtatgattctgctggaggatctacatcacttacttctccaggacaacattttggaagggcaaagcatttattttctgaaccatttgatatttatggcacttatgttgcgagggatgtgatttcagtttcaaaggaactttgggttggttcactgggaaatagagcaactgaggcactagtcagatctaagtttgaggagtttggcccattagtaaattttttgttctatccatccagaaaattttctttagttgagtatagaaacatattacatgctgtgcatgcatgtggatatatgcagggttcatctatttggggcggttttcttcaagtaaagtatttagacaggcttataggtagtaagggagttattcgtggtatagctattggtgaaagccgtcatgtttatgttgctaaagtcaagaataaaaaagacaaagatgaggtctttgatgatttaaagatggcagggctgaagtggccatctgggattactgatattcctggagaaaatgctttgcttcttgaattcgagacggcagttgatgcagctactgcaaaattctatattaggcaccaagctcgtccaaatgtttgttccagggatatgaatctacctggtcatcaacttttggtgcaaaatatagaccactcagtccctgacatcgacttaatcaacgccttctctcaattcggtgaggtcatcaggtggcaaatcaatagggctgatagtaactgctttatagtttatagatcacaagatgctgctgcccgtgcgaaatcacacttgcatggagcgcggtttgggttgaagtcaattagtattgaatcaaggacatacagtgcaggatctgttcatgataaaacagtgtcacctgttgctccgttgttaggccagagtgttcctgacaacagcgtgcgccatgagatcaggaatccaatagtcccaggatatcatgcaggatatgcagcaccaggggatcgacctatttatggtccgccacctccaaatacaagcagagctccacaaggaaattttccttgccctcctgtttccacacaccatggttctgtgatgccaccgccacctattcaaacctcttttgttcgtcctatgtatcctggtccagggagtccctgggagaacactactccaaatccaccgcccttcagccacgtttctcctcgcatgatgcctggaagtaacttccgtgttaatccagcttctcttccttttgtaccctcttgtgttacccctgtttcacagcttcctggaggatcagcacagcattctgagaaaatgccaccatcactacctctgccaactgtagctcccccaccatttacacctctagatatgccaccaacacaccctccgccactacctatttcccagccaccttcagtgccgccacccccaaattctcctcctccgcaaccttttgctgattcgtctgactcacaaaagccaagttctcatcctcaatggcagggtcctcttttaaaaagtggcttgcattactgcagaatctatgcaagcagaatagagtttggatgcctgcagatatgaaaatactgtttctgaaccggcagaatggccttcagcgctagatgtgacaaagcgcacagctttccagcatgtgaagacaactttcaacaatacaccgcctaataagagagaggtctgccggctcgtgccttgttcaaatggtgatcagagagggaaatgctgtcatcatttaatcaagc

SEQ ID NO: 41972 - DNA, 710 bp, Zea Mays
tttttttattctgtactcactgaatggctttctgattacatttcaggttcatatggcctgtgtaatgcaagggcgtagagttggagtggcatactatgattcagatacacgccaactttttgtgttagaaatctgggaagacagcgttggggaatttcctctgattgatcttgatggtaacggtgaggctcctgttgtgaagctcacgaaaagctcaacattcagctatgagcaagcctggcacatattgatctacttgaaagttgcagctatggatgatggactaagtgcaaaagaaaggatatgctttcttaattccatgatggatcttggaagcgatgttcaagttcgtgctgctggaggtctcctagcaatattagacaatgagagacttcttgacaccattgagcagatggaaggtggagcatccattgcgatcgattctgtggtacagatctcattttatcctctgatggagataaattgaacacactgatgtgttgagatttaattatatcttctgtcatgggctgggcttatggccccagatggcagtatgccagatcagatccgaccttatatactgctgctgccctggccggccgcccgtacccaacagattgcccatgacaactttcagtggcagtctagtttgtaatcaacaaaattatatacataatttatttcctactttcaaggatatagttact

SEQ ID NO: 41973 - DNA, 2015 bp, Zea Mays
tgcacatgggagggagttcttgaaactgtagctagaagagtaacaaagaagaatgaaaccaaagataacaagtcatttccttttaaggaggtcttcttggatcgatctgagcaagaagatgttcccacattgattgatcggaaggacaatgtttttatcatatcaaacccaaagtcaaaataccctgtgctgcagctggaccttagattgatatcagatcttgttgttgttatcgtgtctgctacatgtggtggaatcgcttttgcttgccttgggcaacctgtgattacaggttatctacttgcaggatctataattgggcctggaggttttagctttgtcaatgaaatggtgcaagtaaggttgaaacggtagcccagtttggtgtgatatttctcctgtttgcattgggacttgagttttctactgcaaaacttcgagttgttcgtgctgttgctgttctcggaggaatgctccaaattatgctgttcatgtttctttgtgctatgtggaggcaaaacaaaagaaggtgtttttgttggtgtgcttctctccatgtcttcaacagctgtggttttaaagtttctgatggaaagaaatagtatcaatgctcttcatggccaagttacagttgggacacttatattgcaggattgtgctgttggtctgctgtttgcgcttcttccaattttgagtggtacatctggccttcttcacggagttgcatcaatgacgaagtcgttggtggtattgataacgttcctgaccattctctctatcctctcccgcacgggcgttccttggtttcttaaactgatgataagtctgtcatcacagacaaatgaactataccagctggcagcggttgcgttctgcttgttatttgcttggtgtagtgataagctgggcctgagtctcgagttgggttcatttgcagctggagtaatgatatcaacaacagaccttgcgcaacatactcttgaacaaatcgaacctatccgcaacttattcgctgctcttttccttgccagcattgggatgctaattaatgtccatttcttgtggaaccatgtggatatactccttgcagcggtaattttggtgatcaccgtaaagacatttattgttgctattgtcgtaaaagggtttgggtatagcaacaaaacatctcttcttgtcggcatgtctcttgcacaaataggagagtttgcttttgttctcctaagccgtgcttcaagtatccatctcatcgagggcaagctatacctgcttcttcttggaaccactgcactcagtttggtgacaacccctctgctattcaaaatgatcccagcagtggtccacctcggggttcttttgagatggttttctgtcgataccaatcaggtggagctgggcctaaaaaatgatgtcctccgcattgatagcggcaagcgcataaatctgatagtccaaggctcacatgactcatgacacatggcacactgcaagctacttttttgtatggcttgagtttacaagctctgtaaagtgttttcacctgtattgaagagtttgtagcagatatacaagggtggaggcaagagaactcaactcagatcttgctcatagggtgagatcaatcctcccccatcatggagactgcatgggcagttgggtttgccgtttttgagagcagtgtgtctaggatgattggtggagtgagtggctgtcgaccccaaatgagggtctcgtgtaacataagaatgtatgatggttaattgattggatcagcatgataggatctaggcgtgatcgttatgccattgtatcctttcagcaaaactgtgtatcctcgcaacacgaaagtgtgtacaacagtatccatcagatcacgaatttcgttatgtaaccatatactcgtcctagttcatgattttttttcacgcgaggcttctagtaacctgtctatatatcactttgttggattcaggctcacaatgatgggtgtgcctcaacgaattgattgaatccat

SEQ ID NO: 41974 - DNA, 1082 bp, Zea Mays
ataagaccgttgtcggaagtttgtttcatttcatagtgatgaatccgggccacatttagagcgagcctcttttagaaatgctcttacgtacactttatatacctatgtcttcttcttggagtactgttccactaatttcatattctatttcaagctcgatattagtgcacaattgagtagcgtatcagatcgcctgaccggatcggattccgatcgaacagacaacgaacaaacacggctttagtttcgaaatccggagaagatgcttcaggcgggcactgcactggtagtcctcctttaacagagcccgcacatggctgattgactgttcttatcctggttgcgttggtgactgactgactgactgctcaggccaccagtcaagaaactgagggctcgaggcaacggctccggctggtctccgacgaccgacaacaggtagaaaaaaaaaacaacacggcggcgcacaaacgcacaccgctcaaggaatcggagagagcaaaccgtctgcgtgccagacgcagacgctcgtactgtagtgcgtggtacagctttttgtttactaggccttggctcaatttactaggcgccccgtcaatggctctagctcactcgggggtcgggacggacgacggccgccaaatgccatggcgccatcaccggcctgtcgtcgactcgtcgtccacgtacacggccgggaccgttccggcgaccgagaagcggtgcggccgcgtcggcccctccctccctccctccgatccgtcgagatcaggccggccggcgtcggcatgcacgtgatactgtgccatcaggcatcgttgagacaccggctgcccctgctgctcgacggcgtaaaaatgtgcgcaggcaggacgcgattcattattagggcctctccatatagctttctctactactccttaagagtatagtgtagacatccacaattcacctggtgcacggttctatctgtgccgcggatgaaaggttgcgcatagcccgctcgaccacacccctgccccaccctacgcatgcccgccagaatcgccgcaggcactctctaccccgacgcccgccacccg

SEQ ID NO: 41975 - DNA, 721 bp, Zea Mays
gggctgatccaatcccttgtttgagctaggatataacctgagtgaagctgatgcatgaaagccatgtaggctagtttatgtgttgctggcacactgtgaacacatctccactgcatgttgagctagtacagtgatatctgtcccatgttcagttgtttaaaaggcttaatcgagtgaagttttcctccctgccctgaactctacctacagaccactgtaaagagtatgaaattcgtgtattcttgctggtgtaaccccctcccccagtccttagctttgctctaacccagaaccgagtgcatcaagccctaggtggtgaccacaactgctgatcccccacttcaccatggccagatttgatgccaaaatagttgctgcagtggctgaggaaacaaacctaccctttgtgacagcagagaacaaagcttcatccaaacaagtggatgcgaatcaagcaagattgagtgttttaagtgtggtggtcatgggcataaacaagctgaatgtccaaatcatcgtactattattgcccttgctagcggttcttatgattcacaaagtgaagaggaggacgagtttaccaatgtatttgcagattttaatcttgacacttgtgagtattaagcagaggatggtacatttgagctaggtctgaattgtttagcgattcaacctattccaacttttgctcacaatgacatgttacaagatgttatttctc

SEQ ID NO: 41976 - DNA, 3854 bp, Zea Mays
gttcacccctgacccccatttcgttccttccagatctccccgcccccgcatctcgcccgccagctaccggcgagtgggcgcgcgcccgccgccgccgcgatgtacctggcgtacgggtggccgcagtcgatccctctggacccggacgactcggaccgcgtggtcctcctccgcgtgctcggccgcctcctcctcgccgtctgtccggcttcgcttcacctctggtccgccgcccaacaccgggtccgcctagcccgctccgatcgctccccggagtccctcgccacccatggccacaacgcgcacgccgcgtggagccccgacgccaggaccgtcgccgtcctgacctcttccttctacctctacgtttacaaggttcagcactcgggaaagcaactgatcgtcggtggcaagcaggtcccggggctttgcctggctagtatatccctaatcatcaccgagaaggttcctctcgccaatggcgttgctataacgagcaatttcgtgtgtgacagcaaaagcatgctcctcggactatccaatgggcatgtgcaggtcgtgtcctggaacgctgagttctcagacagcttcaagcttggttgctatgtgtgttcatctgagaaacctactgctgccgtagatgcgttggtgtttgatcctcccagtttgcgagaaagctctaacgcaaggcctgctccttgctgcacaggcaattcttctattgtccatgttgagctgtcggtgaagctgagattgctggttgctttgtactcaggctgtcgcattgccctctgtactattggtaagaagggattaaggcagcctggcagcaccagagtggagagatggttggacactgatgatgcgatgtgtacttctgtggcttctgagcaacagattcttgctgtcgggtgcagtagaggtgttgttgaattgtatgatctagcagaaaacacacgccatatacgaaccatttcgttgtatgattgggggtattcagtggaagataccggtcctgttgcctgtatatcttggacgcctgacaattgtgctcttgcagttgggtggaaatttaggggacttactgtatggtctgtgtctggatgtcgattgatgtgtactattcgtcaaactggttcaaattctgcctcatctcctatggtgaaacctagcgctctaaaatttgagcctcttatgggaggaacatcacacattcaatgggatgataatggatataagttatttgctgtcgaagaaagcttgtcagaaagggttcttgctttctcatttgccaaatgttgcccaaacagagggctttcaggcacaacatattcccaccaggttctttatggggaagatcgaatccttttggtgcaaccggatgatgccgatgaactgaagatattgcatcttaatgttccaatttcatacatttcccagaactggccagttctacatgtggtggcaagcaatgatgggatgtacttggcagttgctggctctcacggactagtgctatatgatttgcgaaataaaaggtggcgtttttttggtgatgttacacaagagcaaaagatccaatgcaaaggcctattgtggatgagaaaaattgttattgtgtgcaactatgttgaatcgtcaaacacgtatgagctcctctttttcccaagatatcatcttgattatagttctttactctaccggaaacaactgcttggaaggccaattgtcatggatgttttccaggattatatattagttacttacagtccattcgatgtacatatctaccatgtggtggtctcgggagaattatctcctgctagcaatccagttttaaagctttcaacattgcgagaactttcaatcatgagtccaaaaagcccacctgtttcaatgcgcttcattcctgaacaaaatgacaaaggagcgctgacagaagatactcatggattttctgatcttttgtcccagcaaccatcaagatgtttgatcttgcggaccaatggggagctttctgtgcttgacatggacgatggacatgaacacactctcacaaattcaattgaactcttttgggtcacctgttcgcagtttgaagagaagggtagtcttatcaaggaggtttcatggcttgattacggtcatcggggtatgcaggtgtggtacccatcacatggagcagatcgttttaagcaagaggattttttgcagttggacccggagcttgagtttgatcgtgaggtgtatcctcttggtcttcttccaaatgttggtgtggttgttggtgtttctcagagaatgtccttctcaactgcggagtttccatgctttgagccttcacctcaagcccaaacaatattgcattgtttattacgacatctccttcagagggacaagattgaagaggctttgctcttggcaaatttgtccgcagaaaaacctcatttctctcactgtttagagtggcttctgtttacagtatttgatgcagatatatcaaggccaagtgcttcaaaaaatcaggcttcacaaaaagttgattctcccaagaaatctcttcttgagaaaacttgtgacctactacggaattttcctgaatatatggatgttgtagtcagcgttgctaggaaaactgatggacgacactgggctgatctgttctctgcagctggacgatccacagagatgtttgaggaatgcttccaacagaggtggtacaggactgctgcttgctacatactggtcattgctaagctggagggccctgcagtcagtcagtattgtgcactccgtttgctacaagctacacttgatgagtctttgtatgagcttgcaggggagttggttcgcttcttactaagatctggaagagattttgagaatgccacttcagactctgagaagctatctccaagatttctaggctattttctgttccgttcaccttataagcggcaatcttctgatttgaaaagagcgccatgctagctatttgatgtctggcaaggagctttctaaactcgtcgcttttgtcaaggggactcaatttgatcttgtggaatatctacaacgagaaaggcaagggtctgctcgtctggagaattttgcttctgcactcgaactgattggacaaaagctccaaatggatacactgcaaagccgacttgatgcagagttccttctagctcatatgtgttcagtcaagtttaaggaatggatcgtggtgctagctactttgttgcggcgtacagaggttttggtggatctctttcagcatgatttgcgattgtggaaagcatatagcattactctacagtcacatgatgtattcagggaatatcttgaccttcttaatatcttggaggaacagctttcgtctgtctctgatcttacattgcagaatggaccattgtcatgaatgctggacggtgacactgattgaaaaaaacaactgaatacggcgttttagccttgagttaattaacacatacggcgggaccaggaatctgatgtaaatagattattcagggtgtttttctctttgagcaacaccccgaggtgctatggcagttttttgtacagtgatcagctaagcacctattgttgtatcattagtttgttgcagcggagttgagtctgcattcttcgccttactgtaaatatgtgctgcgcccttaacattgtaagccatataccattctgagcagcaagttcttttctctgttccatagaatcgtgtttaaagctagaagcctagaacatgtagatagtcttcacctgatgtttgtagactccgagatattattaaaactgacactatgatttcttaattgcattttttccatggcata

SEQ ID NO: 41977 - DNA, 578 bp, Zea Mays
gtctccagctgttgtaggtgagccaggtggtgaaataagtctgaaacatgctagcagagcgactcccggcgacaaggcagttcagcgacctctttttgatgctccttcaaagcttgcgaggcatttctctaggcctcttaccaaggaacaaatggaggcaattatggagctggcaactcaggggaaggaaaaggaagggaccaagaagaagggcagcaaggtgacaccgctcaaggctcctatcatcgaggctgctgagatgctctgagttgtattatgagatgtgtgggttgttctagtgcaccatgttatgtcgccggtgtacttgtctatgggtcgcccgggatcttttgttgactgctttgtgtagcaggttgttgtctgggcagtggtgtttgtttctttggctggcattgtctgtgttttagtctaccttagtttctgttgtaagtcgctggttgtttgcttctagaagtgtgttacggacggtggaaggccggttggctcctgttttcctttcctatcctgtgtaccacttgtgtgacattatttgtttaagtaggggagctgtttttgat

SEQ ID NO: 41978 - DNA, 2379 bp, Zea Mays
cgacttaagagatttagctattcatatgtgtggattatatataggtttaatagttactacttcaattaaagtatttccagtcctaaaggaaagaatctctaagcatctgaaaaaaaataaaactctgagccgtccaattcccttcaattcctatctaaccaaacaagcccttagttgatttttttttgtttttagaaataacaaagcatggttgattaatggaagaaattagcacaaaatatcgctttcatggtcaagttttccttatcccgcaggggcagggcactgggaaggtgcctggaagcagccctcatatgctagctggagctgaaaccctatctataaagaaggctgaaggctccacacatacaactccgtagagctccctgctttgttcagacttcagagcccttcctcttgtgtccgtgcaaattggtgatacttgaacagggatctcctccatattagtgagcaggatgtataatcctcccagtgggcaggacatgtcctactacgatcatgtgcagaagcgccatgaggagaagggctgcctatatgcatgaaggaggaatcttgtattgagacttgatgttaaaagcttatccggagttcagtttcagaatattggttggtttagttggatagaaagaagtgtggagaataattcacaagtatactcctggccacacgggttcgaaacagcctctccgcgttgtttgcagagaaagccttactttggtttctgtgtcacaagatcagcctaacatgaacgagaataccttggaaagaccaaactaggaagtcatatgcaacatacaccttcatacaaaccaattatttggaggtctcgtcttctactttgaaattgagttaggaataccagcctaggtatattagtaaatattactcagcagcaacttttgaaaagcggtttgagttttcaaaagagaaaaccatgtacagtttgaggtttccagaaaaaaattgagtaaacatgaactgggaagatatccctcccatatggaaattaagggaacatgcagttctgagttctcctaagaaaacctcctaaagtattcttcgtgctcgctttcctcttggaccatgtgatgtgagtgagttcacggcattgctagttttcctcttctttattagtctttatttcggcacgtccattcaccctttttctttagcatctggccagccaaacagagcaagggtccatggctatcgttttcaaggtcccctactgggctataaatccacgacagcgaggctgtggtgcctttggctcatgtgaatgatcaaacgggaaatgtcaatttggttgttgctagttgctggtccttttcatgtgacatctgccttcgtctagatgcgatgtttgtccttggttcacatcgcttctgttggaacaattatcctctcgaccttgagcttcagctaatgatttagcctgttcactgcgtgctgctgcttctgctgcttcgagacctgtgagtgctgcctcgaggctatctgctgctgctgctagttctgcttggagggcatgggcgtccatcatcgtggagatgtggccatgcgggacacccaccgccgaataaaatgctgtacttatatgcacgcacgttagaaatgcattagtgtctgtttgatgtgatcttttgtgtgtgtgtgcgcgcatcttcatttgcactggaaaatgctttattatttgtgaaggtctgtaaatctgttgtatgtatcttggtcagatgaactctattattgtgccatatatctcgcttgattggacaaatcctttcgaagtttcctcttgtccttgcttaccgatggcagggttagaaggagagagttcgaaaaacaaaagtatttgtgactgtttatttttcggatgcgtgaaagctgcagtaactttatgttggaatgcaattcctgctgtcaccagccatacgcaaactcaggcagatgtgtttctgacagatttgcatcatcttaactatgcgctaataatttgatataactgggaatagactagctgtagttaggagtcgaaacgagtccagccaaggctcgatcaagccccacgagtcaattttctagagtcttgttgtcttcatggaagggtcttaagggacttctctgaaacaaggcggcttcaggagtcaattccttataaatttttattatccctcggtggaaaaggtcgaaacattatagaatagcattttgatgagatatatgagagagactagaagaaaactaatgctttccggattcatgaaacagttgctggcgcgcacattatttcctctcagttcacctttatattgtaattaagattctatttaaattcattggttctcaggttagctagct

SEQ ID NO: 41979 - DNA, 674 bp, Zea Mays
atcggctaagtacacacaaggtagtgtcacaccaagaaatgtaaatacaacagaaaaagttgtaggtctagtgcattcggagaacaagtgagaaatattttttttcgtgacttccctacgaagcagacacaatccttggtaaagatctaaacaaagaaatataacagtgagcgctagcacttaggaacaaacatgactccgctatggttggtggttaaattccagatggctgaatttgcacaaacggctcaatatttgtttcggattaaaaagtcggctgctgctgcaactgttacgaaatcttcggcggtctcacaagatttggcaacgctgtccgtcattcatgagctcccgtccgggcggcgggcggcgacctggtgagacgtcggcgagggaccggcgaacgagcagagcgggggcgtcgcggcgcgggttaatgcgagagcgagaggccagcggaaggcggggacagcaggggccgcggcacggagcactccagggcccccggcctgccaccatgtcgcccgtgcccgcggcaagccagcgacgcccccactcttccggtcgccttccctcgccgcggaccgcggtgccagcgtgccgtgctccgcacctgaccgtgtcttccgtgatttgcttttaggacacggcacggcatacacgttgcatttcgg

SEQ ID NO: 41980 - DNA, 2627 bp, Zea Mays
atacatactgcgcgttgcaagctcccacttcctgaggaacaggaactccatgagatccgcggcatccgccgtcccgttcatctgcacaaaaagaccgtaatccttctttttcctctcctccccatccgcggagtgtaaatcgtctctcgctagcgcgttcagtagaaaccctaaaccccgcctcctcccctcgccggggtaggggctacgggtgtcaacgcccgccatggacgcattccggaagcaactggatgtgctcatgggcgctaaccgcaacggcgacgtcgaggaggtgagccgcaactactacgaccgcgacgtctgccggctcttcctcgccggcctttgcccccacgacctcttccagctcacgaaaatggatcttggtccttgttctaagattcactcgcttcaactgcggaaagaaagcgaaagcaaagggaacagagaattttgacagagaactcgaggatatgatagaaaggctcattgtggagtgcgacaggaaaattcagagggccctgaaacgacttgcggatgacgatgccaaggctgctattgcgatatccgtctcggaggttactctgacggatgacatactgcagctgtcaaaacagatcaaggaaaaaatggtagaagttgatgcctttgattttgaagggagaactgatgataaaataaaggcccaggaagtagtggaagaactcagaactaaaagagctgatatgcaggctaccctcttgcttgatgcttttaacaaggacagagcttcattaactcagcctgctcaacctcctcaagtggcggcagcgccaccaccagctccacccgatgctcgtactcaagaaatgatcaatgaaaagcttaagaaagctgaagagcttggggaacaaggcatggttgatgaagctcagaaagctttggaagaggcagaagctctgaaaaagctggcgcgacgtccggagccaccttcagacccttctaaatatactgccgctgatgtttggattaccgatcaaaagttgcgcctctgtgatatatgtggagcatttctgagtgtatatgacaatgatcgacgtcttgctgaccattttggagggaaactgcatctaggctacatgctgattcgtgacaaacagaaagaacttcaggtgctgagtgtaatgtaccgttttctgctttaaagagttactctgttttgggccttttggcatctgtgagttttcttatctcaagagcctcaaggttctcaccttccctctatatattatttgattctcacattgccgggcactatggttattacgatagtcattacaggaattagtccatgtcgcgtgattggaatctcatgcgatgatcttcatacctatggctacaacagtcactgtctgttgacaaatgtaagcataggagcgtgcggaccatggtatgaaaaaaatcatgtttacttaattgtgacaaactgctcatgtgtctgcttagtatcgattgttgggcagaagctggaggttgcctttttactgcctgagccatattatgtagaccaggtgacaaataatactggttaagttatcctgaaagcacacttcttttgccaacattttgctgtaagtgacaacttgttctgttttctatctgctacctcctccataagtttgcaagttacattttgctgaagcaaccttgcctgtaaagtatcgcccgccctatcttttggaacgttgtctctgattttaaatatgccaaaatatcattatctgtactgtcaataaacaaaatacactgtggcatcttgcaggagcagagaaacaaaaggaggacaggcaaaactgaagatgataggcgatctagagagcagagcaaggatcgaaacggcccgccgtccagggatagagattcagaaaggagagacagggttgagtctcgagatggaagaagagattatgatagggaacgcgataggcgtcacgatagggaccgtcgccatgaccgcgaccgggatagggattatgaccgctcccgcggatatgactcaaggagaagagagcgttcacgctccagggagcgcagcaggcgccatgagagatactaaatgttactccatggctgacagattttggattgctggcgtctgttctggtttgtgttgtgctttgtgtcttatcttccgaagtttcctgttcctgctcgagaaatccgaaagccaatctgcgttctgcatcatgtcatgtcctagtgtcgtactgtttagttatatgccgagaacatctctttcatcaaatgaatatttggaaacaccaacgcacttgacgctaaatgggaatgaagtgtggagtatttaaacgcctctgaaatcaaatgaaagttgtacttgtacgaatctcttccacaaattgcactgtatatgcttgtactgttgcagatttacgatgggtttggactgttctccatccccggagcgcgctcaggctcgacgctacctagctacggacctttatttttggtacctgatgaaacatgatggttttaggaggcgcggtgtttctctggcgaacgatggccggacgtccattttcgagaaccacaagacaagaaacatattcaaaaaaaaaaaactcaacaat

SEQ ID NO: 41981 - DNA, 413 bp, Zea Mays
tcttgcttcgtgtagatctaggtcatcgcgtcgatgtctttgtttggctggtcgtagagccctcgctctaggtttgtctagctcctccttggttcttctagctccggtatggtttcctttttgcgcgtagtggcggcatctgatgcatagttcgacggtccctcgcgttgcttcggtatgtcgtgttcctctcatattgtttcgtctattttttggcctattgtagaattgttttgtttgtttcccgttttctttgaaatatgaactgttgattttcatgtagactccaactgacagagttaaaacaaagatgaagcttcaccttatagagacagtcaggtgtgctttgcattgaatatttgtagccctttctattcttcatcctccccacagtggtggcatttgaataggca

SEQ ID NO: 41982 - DNA, 2581 bp, Zea Mays
agagccaagtgtttaaataatgcactaagattcgttacttgacgaagttgatgaggcggcaattgaaaaggaagataatggaaagatggaggacatcgattgcaatcatgacatccggattcatgaagatttgggtcatgtatgccgtgtgtgtggtatgattgtgagaagagctgattcaataattgattatcagtggaaaaaggcttcaaggagaagaacgaatggctatggaggacattcaaaagatgctgatgagatagattgtggtactgttaaactgtctgaagatttcatagtcgcagatattgctattcatcctagacatgctcggataatgaaaccacatcagttggaaggtttcaactttttggttaagaatttgattggagacaagcctggaggttgcattctagctcatgccccaggtacagggaaaacatttatgcttataagcttcattcagagcttcatggcaaggtatccatctgcaaggcctcttgttgtgctgcccaaagggattctaggtatatggaagacagaaattaaacgatggcaagtgcaggatataccagtgtacgatttttactctgtcaaggctgaaaaaagagtagaacagttgcaaatcctcaaatcttgggaagacaagatgagtatactatttcttggatacaagcagttctccacaatcgtcactgatgatgggggcagcaatgtcacagctgcatgtcgagacaggctgcttaaggttcccaaccttctgatacttgacgaaggacatacacctagaaatcgggagactaatgtactcgaatcactaaatagagtggaaacaccacgcaaagtggttctttcgggtacacttttccagaatcatgttgaagaagtgtttaatatcttgaatctcgttcgcccaaagtttctcaggatggaatcatcccgtcctactgccagacgtataatgagtcaagttgaaatagttggtagaagttcgaaagggcttgctgatggcgcattcactaaggcagttgaagaaaccttattgaatgatgagaacttcaagagaaaagctcatgttattagaggtcttagagaactaacaaaggatgttcttcactattataagggtgatatcttagatgaactacctggcttagtagacttcagtgtgtttttgaagctcacacccaaacagaaagacattatttataagttggaagcacatgatcggttcaaaagaaatgcagtagggagtgcactgtacattcatccatgtctttcagaactttcagaggttaatgctgagcatagggctaacacctttagagatgatttagttgatagtctggtagattctatcactgtgagagatggcgtgaaggccaattttttcatgaatatcctgtcacttgctaattctgcaggagagaaagtgctagctttcagtcaatatatatctcccatgattttctttgaaaggctgctggtgaagaagaaaggctggcatgtggggaaagagatctttatgatctctggtgatactagccaagaagacagagaattggcaacggaccattttaacaactctgctgacgcaaaaattatgtttggttctatcaaggcatgtggggagggtatctccctcgttggtgcgtcgagagttgtcattctggacgtacacctgaacccatctgtcacccgtcaagcgattgggcgtgcattcaggcccggacagcagaagaaggtgtttgtgtacaggcttgtagctgccgattctgacgaggtaaaggtccatgagacagcattcaagaaagaagtcataccgaagctgtggttcgaatggagcgagcactgtactacggaagacttcaaacttggtcaaattgatattgatgactctggtgacgaactgttggatactaaagcaatccgcaaggatatcaaagcgctgtatagaaggtgagcttccctccttcccttacaattgttttgcatgctagttgcctcatctagtgcctttgtaggtaggtaacaagctttgtggccactggacaccatgtacatattgcagtgctgaccgtcgagctgatccttaaactgaagaaagaggtgacgggtgttgcggtggctacattgcgcggtcattcccagctatatccgtggaatggcggcttcttttgttcgtagtatgtgccaacttggggcagcagtcagctgatccccagacacatttctagactcttttttaggctcaagtttctgagaattaacctgctatggcgtttagccttaagtaaatatttcgttcgcaacaataataacccagtaaacctaatttgttcttgtgcgtttgtggtggtggttcttgaaatttacctggcgccttcttcctgggctagatgctatgcaggtgtcacaggttggtttgttggcatgtagaatcgggaaatgctaatctcgaaagctcgtagtttccttttcccccccgggtgacatgtttattcacctcttactagttaccacgtccatttccaactataagatatgatactttggcttttgaagatacattacttttatt

SEQ ID NO: 41983 - DNA, 4937 bp, Zea Mays
tcccggctttgaagatagtgagtaccctaaccatgtgtataaactctcactacaacacatatagccttctatgacgaataccttgtgacaatagatcaaaatgtcataagcctctcctacttatgacgtttcgtaggggatgattgactttagtgatgaaaagtaaaaatttgtcattaagaccaatgcaaaatcgtcataaatatgaaaggtgtcacatttgtgacgaacactctttcaatcttatgacaattaggtagtgtcactatttcatgacaatgttggtcgtcataattctcatgtgaatttcctaaaaaagcaaaaatatagacgccactacaaataatgaaataaatcaaaatgattatgaaataagtttgaatatgaaatcatgtttaaataaaaattgattaagcttgaatttcccacatgtattgttctataaatatattactacagacttagatctaatatattcatgagtaatttgttatataaaaatagctaaaatgataatcaaactataaaataggaacaatttaaaattaaaaatttggagaaaacaccaagcaaacaatgcaaaaatgacaaaaacaattttgaaaataaattttttgcagaaaacatgaacccacatagaaaatagaaacaactttaaaataaaaaatttagagaaaacaccaacccacataaactaaaaacataaacattttttagaataaaacctttggagaaaaccctggacgtagactaaaaaatagagagttaaaactaaaaaagtaactattaaaaagaaatgaagaattgaacctaggacctgctacttattaaatcacatggctaccagtgcgccacaaacaagagtgtgattaatactttgatacagtacatattattacgtattattgacttttgtgtggtctcagctccacgtatccatccagcgccctgtacctcaacaacaaattctttcacgccgccgcaattgaatcaagaggcagcagcctccctctctcgtgacatcgccggtggtaccaatttgggcgccattgagggtgactacgccacctcgcctgtgccctcgcactcgcaggtaattgcggtggtgccaatttgggcggcagtgcagctggtgacgcctccctcgtagctccacccacaggttactgtcttgctcagatctgccctcattatagaagcaacatcgacttgcgtgcccacgacacaagctcgtgtcagtgctactgccaccatccctccacagcacagccacgctgcctgcctcatgtgtcactactgcgtcctatcctgccacaccggatagaacttctacaagatggatagatcttggatcaaagacagactatttagcgatgcacatttggatggggtcaaagagttcatgaatttggtttcacaaagatttgataagaatgaggaggtactatgtccatgtcgaaggtgtctgaatcgagttcatcaacataagggggaggtgtatgatcatttacttattcatgggatgactagcacatacactagatgggtacatcatggagaaccatttgaggctgaaattaatgaaaattatgatcatgtagatgaatatattggtatcaatgaggatgacggtatgaacgagaatgaagaagatgagcctgataatagaattcctgatatgattcgggagttgtacccaactaatgaccaaggtagagggaaatctatgtttgcagctttattagaagaaatgaagcatgaactttaccctggagcaccttacacacgtttttcttttttggtgaagttacttcatatcaagtcattttatcgaatcagcaacgttgcattcactgcaatactaaaactattatcatcagcattcccagattgctctcttcctgcatcttaccatgaagcaaagaatgttattaatgcgttaggacttggatatgactcaatccatgtctgcccaaacaattgtgttctatttcgaaaggaatatgcaaaacatgatgaatgtctggtttgtggtgcatcaagatggaaagatagtacagatggaaaaaaacatattcctgagaaagtactacgacattttccaattattccaaggttgaaaaggttctttgcttccaaaaaaatatcagaggagacacaatggcatttattgaagaggaaggcattggagaatgaactaagccatccagctgatggtgagacatggaaagattttgatagaaaatatgagtggtttgcaaaagatggaaggaacattagacttggtcttgctactgatggtttcaatccatttggcaaaatgaactcttcatacagcatgtggcctatatttattattccttacaactttcctccatgggagtgtgtggagcaatccaacttcatgatgggactactcattcctggtccatcatgtccaggaaaggatttagatgtttttttggagccactcattgaagagttgcaagagctttggaaaggtgtctctacttttgatgcgttgacaggaaaagattttgatctacatgctgttgttatatggtgcattcatgattacccagctttgagtacattgtcaggtcgagtcactaaaggttattatgcttgtgtgcattgtgacaaaaatccatgctctagaagaataaaaaataagatatgctatattggccatcgacgtttccttccatgggaccatatatggaggacaaagaaatggtttgatggtaaggaggaccatcttgaaaaaccagaggaatttagtacagacgagttgatgcagcagttggagagggtcaaggatgttaggccgggacaacatcctcaaagtaaaaagagaaagcgagaagtagatggtcaatgttggaaacgaagatcatcattgtgggatttgccttattggtcaaatttgaagctacgccataaccttgatgtgatgcacattgaaaagaatatatgtgagtccattattggtacatttcttggcattattgggaagacaaaggacactattaatgctaggcttgacttggaagaaatgagcataaggaaacatttgcatttgaagcgtgatggaaattcctacactgttcctcatgccccctatgtaatgaataggagccaaaagttagttttttgtgacttcttgagaagagtaaaatttcctgatggaattttacctgttgctatccgaggaattatgcatagggatatatacgaagcaattgccgaattaggtaaattatttcaacaattatgtgctaagactctaaagttagatgttttgcatacaatgaaagctaaaatcccagtcattttgtgcaaacttgagaaaatatttcctcctgctttctttgatgtaatgctacacctagctgttcatttgcctgatgaggcaatccttagaggcccagtacaatatggatggatgtacccagtagaaagacgattgttgacattgaaacggtttgtgaggaacatggcaagacctgaaggatccattgcaaaagcatatgtcgctaatgagtgtttgacagcatgctcaagcatggagttgatctacttggagcaccaaggcttacatatcttgaagataattatgacagaatggtttggatatacaaggaagagttagcggatcaaggaactccttatgttcaaaaaacccatgataagcaattttctttctggtttaagaagcatattgcaaaactacgttacgtggatggagaagacattagtgatgacctatttgcattgtcatgtgaaccggaccttcgggttcgaatattttcagcatgtcttgtcgatggggttcgatatcacactattgaccaaataattgagttgcgttataactcagatatgtccaaatgtcgcacagtggttctatttcgttgtgactggtttgacacttatagcaagaaggttagaatgaaagatgatggatattttagaagcatcaaccatggtagttgttggtacaaggatgatccttttattctatcaacacaagcaacaaaagtattttacttggatgacactaaacactgtgaaagctggagaattgttcaaaagtttacacataggcacttatggaatgtcactgaaaatgaaaatgaggaaacacccatgggcttgggactatcataccaagatgaaatatgtgcaggttttcatgtacaagtgaatgaaggaaatttgaatgatgaagtaccggatagtgaagattgtcaccacgtcaatacaagtttagttgatgagtttcgtaaaccaaggcaagacaatgtgcaaggagacgggacaagcgatgatgaagatgaaactatatggcaatatgttagtgatgatgaaagtccaacaattcttgtcgaggatgatgatgatgatagcgatgccgagtaaagactagaaagttgatggtggaagcgttgctgacctatatggatcttggtcatgaaaatggtgacccacatggatattgggtcactatgataggatggtggcaattagtgtgtgctaggatattaaattttattctagattttgggatgtcctaggtcttttagctcggacaaagtctatgcttgtgtcaaatatttttatctttctctatatgtctacagacgaagaaattataatatgtcagaactataatatgaatgagcaccaattcattgattttattcagaaatcatagtatccctttttcctgggcatatgtttcacttaatattgttttagtgtaggctgagtgaggaattgaggatgcatgcagtatgaatatgtgtaggcaatctgaaattctgaatatgtgcacgcaatctaaaattctgaatatgtggagataatctaaatatgtgtaggcaatctgaattgattttagtcttctggtgatattcacttgtgccattgaatat

SEQ ID NO: 41984 - DNA, 5187 bp, Zea Mays
ggcaattacagccctagatagccccgcccgcaaagactcaacaatcctcaacggccctccgccgtctgggcccactgctatggcaagaagcgccatccgccgtgccgtgctcgccgcccccattttgaagccgtcgctctctctcgcggtctcacactctcacccaaggccggcatcccgctcggtgactgtgccgttcatttccgccgcgtacacatatctaacagggaaccactttgaaacttgaatatattggcgttgctatagtggagtaacatggccttctgcactatgtataccattcatctgtccgtcatagttttgttggcagtcacctacatgcatgtaccagttactgctatcatcgttgttccaacctctaattgttatacatttgataatgaaagccgtcttgttgattttgtatccatacaatcatgctcttcactatgcaccatgtactttgaaactagatgaaattctttcatgttgctctcctaagcagctttcagacacatctgattggaaatgttttcgaatataaggaacagggctcacctcgctctgatttggttgtcgaattctgcaaagatgtgcagaaaagatctcaagagagaacgcatttccccgggtggtcaaggcctctacgtgctagacgatccgctgtccagcacctattaagggaagcaagccaaatgaagaatttgcacttagggggcgcccaactcttccatatcctttcacccggctcaaattccacagagccagccaagaaacgttggtaagctgttttaacatagtactcccccgaagcacctggaagccaacggaaagcatcaggtactccaggttgcaactgaatattctgtgttaagtcccaaattattaagaattcgacaatcacttctgtcggtaaactgccagagatgtcaccaacccaactgttatccctgagggcttgctgaactgttttccttttcctcattcgtattgaaactctatttaacagggaaggggcaatttctgagatacattggccatgcagccaacggtcagtccaaaatagcgttccagcaccatcccccactatggagcatagtgaggctgagaacatggcaatgacattaggatggacttgtacatcaaactcagcccaaggcctgtctggctgagttttcttgagccacaaccacctcaggttcaatgcccaaccaagaatttcaagattgtgtattcccaaacctcctagacttaagggtttacataccttattccaccccacaacacaatggccacctctgacatcctttctgcccttccacaaaaaacctcttctgattttgtcaatagccttgaccacccatttagggcaaggaatcacaataaggtgataaatagggatggcagtgaggacagatctgacaagtgttcgagaaaaaaaagatctgacaagtgttagtcttccagcttggttgattaaaggagccttccaacctggcagcttgttagcaactttatcaataagttccaaaaacacatttctaggcattttcttaacagaaagaggaaaccccaaatatttgcaaggaaagcctattatgttgcaagggaataaagattgtgcctcaccaacacattgatcattacattggatagggagtcatactgcatttactggcattggtttttaagcctgaggcctcccaaaaatccttaaaatctccttgatcactgtgatctctcttctgtttggctgtaagaaaagtacaacatcatcagcatacagggacatccgttgacaatttccatgtctcaatagaggcagcaacagtcccctttcttgtgcttttagaataagtgaatccaaggcatccattaccaggatgaaaagcattggggacaaagggtccccttgtctaagccctctatgatgcttgataatctcccctggttccccattcacaagtactcttgttgaagaagagtacaacattttagaaatgatgctgcaccaaacaggaccaaaacccaaatgcctgaagatttcaaacaagaagggccaagataccgagtcaaaagcttttccaatatccaatttcagcaggatacgggacaccttttgcctatgaatagcccttgcagtctgctgaaccgaaataaaattatcatggatgcttcttcccttcacaaaggcactttgattttttgacaccagaacagggagcctaggtgcaagtctggtggccaacagcttagttacaatttttgcaaaactgtgtatcagacttattggcctaaaatctttaacttccaaagcctcattctttttaggtaataaggtcacataagctgaattaaggagatgcagtttagaaatatccccatgcagcaatctgttaatagctgccataaaatcacccttaacaactggccaggcctttttataaaatctcccagtatagccatcaggcccaggggctttgtcagatgggagggccttgatagtattccagacctcctcctcactgaagttttggtccagatcatgtaagttcaaggccggcctatggaaggcatctagatttagagtagagtccctgtaagatactgtcccaagaagatgattatagaaatcccacactgcctcttttttatcttcctgctcgaacaataatctgtccccgacctgcaacttcccaatgaagttttttctcttcttatacctggcctgtcgatgaaaatatgaggtattggctgttggaatgtgaaccctaaccctaacaggggttccttgacgacccatttggggcactgaagagctataaaatagtagatatgggctgccgaaagcactgatttaaccaaggttgtcctcccagctgggttaattaacgcagctttccaaccaggtagcttatcagccaccttatcaatgagctccagaaaaacacttctaggcagcttcttaatagaaaggggtaaacccaaatacttgcatggaaaatccacaacgttgcaggggaacagatcttgtgcagcaccgaggtcttgctcaacacaacgaatggggtcaggctgcatttgtttatgtttgtgacaagaccagaagcctccccaaagatcctcagaatttctttgaccacccgccgtgacttcgttcctgttgggcttcaaatagaccacgacatcatcgggttaccttgaatttggacgctttgttagtcctcactcttttctaactggttcaggtcctattgactatattcagaaaatgcataatggagatttagtgcactgtgaaactacattccacaagatgggtcgtacagcacaggtaaacatcatatgtggacattgctcgaacaaagtgtgcaaagacgagcgacagttcatctgaggcaacctcttcgccacgcaataaccctcattagcgtgccatgtctgaaggacagtctcagcgctcggtcgcctcgagtgcgcaacactggcaggagaccaaggtcgcaatggtagaggaacatgagcgagcagcggcagcgactgcaacaacggcggcgagggcggcaaggctggcggcggtggaactggtagcagcaagggcggaagtacaagcaacaacgacggtggatgcagcacgtgcgacagcagcagagctcaaggctctgcgcggcagtagcaccagcagctctgcctctaccgacggcggcaccaacgccgagttcaggctggcaagggacgcagcatgagagcaggcggcgtagtgggcaactgcgcatccccatgggcgcggtggcgacagcccaaacaggcgcaaacgcatcggcgggcaagcatatcatccgtcccacacttgtgagcgactagtcacatgaaaaacctacactacacaagtcttccaaattctatcacaaggttcaaaggttgaaattcaaaatgcttccgaatcaatctactaattcttcgtgcaattccattggaaaattggcagactagttaaaagcaccattcttatccaacaagggtcatcagatgaacaaggatgcatttgcaacatatcttaccatgaacgaatgtgcagggtgattgtcgaactagctattcgttgtgttaaaagtggtcccagagtatttaaaggtttcacggtgggcttccatccccgctcatcagaaattgtttataatggattcactcagcctggatttgaacaacctcaccatggatttagcttccagactgagcagattcatgtgtctctttaccttagcgccaagtcctcactctcaggccttgttgggaaaccgaccttcaaggttaatccagtgaaagggcttggtgttacacttgcaggatcaggattcaatgatgccatgcctagtaccctgtctcctacagttttgaatgtggattggagatgtgaaattgttcgaaccagtccttatgaggtccatatttttatccctgtggagggctatgacccaattgaatttacactaacgaaaaaatgtggttacagacaagaaaaagagagtgatcccatgaaaggctgggcaaaatttggaattgtttcttgcgtgttcattgtcttatcatgcatactttgttgtggagggttcatctacaaaactcgcacattgcatttgatgcgctgcctggtattgcggtcttgtctgccctattggatgctgttgggagaccaagaggctacttgcctgcagttaatcctaatgaaaaccatgcaagccatgcatcttgagagcacgtggttggtaccacacaagtaggaagtagcacaatggataaatcatagggcatatgggccaatgtgaactaatgggtatattctgaggactgtttcctgtatgttttcattatatattcaattaatctagtctctactttatcagacataattcgttgacacatccagcatcagcctacccaagaaattttccctctgctacaagcaagtgagctcatggagcgttgctaattatcgcactattagtgtagcttttatgcacaagttctttacatgttcaaaaatgaaaagcatatacaccatcctttgtatcacgctttgtaacatttaatatcttattatcttgcagtagagtaggatactcaaaatttaattgagctcgtagcatagagcttacgtgtcatcaacatcagaaaagtcaaaagata

SEQ ID NO: 41985 - DNA, 843 bp, Zea Mays
gtgggccctgttgtccagatgcttcttctccccctctctcgtaaccaccgagcaaatcactagctggagtctgttacatcttcgccgggttggtgattcagccagggaaggggctataaagcttgggctccgcaacccctcgctgatccccaaatcaaatgtcgccggtgtgttgattgggtggtgcctccatggtgatagtcgagagagagagagagagagagagagaaaggccactgacatcgcaagtcacccaggtcgccgcttagaggctaggaagaggtcaaggggatgctctagcacgtgtggattgtgtaggtgggagcttatggctgcagaggccttctgtgctggccagttttctcaccgtagcgacggcaccaccgtggaacttctgtgcatcgtggacaacttcatcgctaccctcgctgttgaagcgagatcatgaggaacccgaagcccaaacttggggaagtacctggaatcgcaagtaaaaggcaagttgtgtccttgatcacattctttggcctaataatgtttatgtttttgataatcaccatggcatgcttaggttaaattgacgggacctaatatgttaccttgttttgtcaccctacacattgcatacagatgaattatttggtagtcttgctactgctctacctagttttgggattaatattatatctgaattatgatcatgcttttaacattattgttggcttaattattgttcatgataagattattgtattaattggaacatggagaaccactcgagaaaacaatgataccacgagggtggtatgggacctccttggctaactaattcgaaaaggtagt

SEQ ID NO: 41986 - DNA, 289 bp, Zea Mays
gttggaaagcaagagctaagaaatcaagcaaaacaaagcaggcgtaccaaatgtgctcggggtgagttcttatttatacgcccagcgcaccccaagttggagggccccgcctgtcattgactgttgctattctagcaaagggaaggtgttttttcggaccttcggcttagggccttcgtccatatcgcaatctgaattcgtcattctaacaaattaaccttgcgaggggctactgttgggggccttcgtcttccaaggtcctcaaaaacaagatttaacaatgtttctg

SEQ ID NO: 41987 - DNA, 649 bp, Zea Mays
ctggcatctctagctgcacttcacctccatgcagtgcacaggttcagtgacatctgcccttaatctgtggctataaaacttggtccagggaagttttcctccctatcctcaagctccagccagattgcagcgtgtgtgtgtggtaggtcttctgtccacacccatgttcacctctcccctgcccaagtttgcccagtcccagggtctggtatcccattcctctgtcagtggtgaccatgcccactgattgcctatctctccgtggccaagacgtctcagggagtgaccagcccgcatgaccctcgttccacgttctcctaaggtgaggaagcgacatatttttgttgcttttgctccaaggtggtaccaaatgaagaaaaacaagactgaagtacgggaggacttggtcgtccacataggatcttttacttaaaacttatcgggaggagtttgtgcctcccttggtttgtaaaatattactactcagcactcgttttatagctctggtctgtaataagtaacttgatcttactttctaaataaatgtaagtttatgtaattgcttccgcacttctataactccgatgttctgtaatgtctgcaagacgggtgagacgttcctggtaaggtaaggaaagataccgagctt

SEQ ID NO: 41988 - DNA, 469 bp, Zea Mays
aacgaataggtccatcgccgcgcgacagcccactccagccgcgcccagccccgtgaacatccttcctctatcctataccctccagctccagccgccgccagccgtggaggtggagccgcccacgcccagaccccggagcaccgctggagctcgcagcgccgctcgcccggagcacggaggccggaccgccggacggccggagcactgccgtaggtcgcaggcccctcgccccaccggcgcccgaagtccagccgccgactcgccgactcgcaggttgtccagccgccggccgccgactcgtcgttgtccagccgccgaccgtcgactcgttgttgtccagccgccgactggtcgttgtccagccgccgaccacgcggtgaccgtgagcccgtgagcctgtgaccgtgagcacgtgagccaaggagaggtcgtgctccgccactggggagggaggtggtggggaatggcg

SEQ ID NO: 41989 - DNA, 1946 bp, Zea Mays
cagcagacttgcgtcgtcgcggagggctcgcgtcggggtccatctgaacatccgccagaccgccgccaccatgccgcaacctaccgccgattcgagcaccatggtcgccggcgagcatcagcaacaacagcaacctgccaccgcgcggatctcctcctcctcaaccagctccggaaggctcgtcactccgttctggaaagagaagtatgagagggacgcgaggaggtactgggacatcttctacaggcgccacgaggacaagttcttcaaggatcgacactacctggataaagaatgggggaaatactttaagggacgagatggagaaaagaaggtggttctagaggttggttgtggagctgggaacacaatctatccattgctttctacatacccagatatttttgtccacgcctgcgatttttctccacgagctgtcaatttggtcaagaacaactaaccgagaatgtggaaccttcttctgctgacattgtaacgatgatctttatgctctctgcagttgcaccagataaaatgcctatagttctggagaatgttagaagtgtcttaaaacatggtggccgtgttctttttcgggactatgccttcggtgaccttgcacaggaaagactgatgtcaaagggccaacaaataagtgagaacttctatgtcagaggtgatggtacgcgtgcatattacttttcaaatgaatatctggtagatttattttcaaaatgtggacttactcttgaggagatatgtgtgcacaacaagcaagttgaaaaccgttcactggagctggtgatgaacaggaattggatccaagctaccttcaccctaaattcagctagtcctcaaggtccaaatggtcaacacgatctccttgcttacgaaggagaggatgataaggtagttactgacacatctaagaagaaaagcagcggtgaagaaatcgatctttctgaagatttttgcaacatgtttgggacatcacacagccttgatgaggtacaaatcattggggtgaaagcaaaaggccacgacttcaaaataagaatgctcaggaaggaataccagcacacctgcagatcaactggcttaatgctctgggaatctgctcaattcatgtgctgtcttttagcagagaacccttcgatcgttgcaagcaaaagggtcctggagttgggctgtggctcagctggcatctgctcgatggttgctgcaagtttcactccctttgttttagctacagatggggatgaagaatcactggacctccttagacaaaatatctcctcgaacatggagcctaatttgctgagcagaatcatggttaggaagttattctggggcaacgaagatgatatgaaggcagtccgagagcttcatggtaacggcgtgggttttgattgcataataggcaccgacgtgacatacaatcctgatgctatactccctctcttcaagactgctaggggagtgatttctgagaaagctaacgaggactcggtacctgctctcattctttgctacatccagcgacgagttgatgaggactccatcctttctaatgcaacgtcccagggtttcaggcttgtggacaaatggataaatggagttcacgagagtaacggtaccatcagttcttggttctctggtaatgatgtctgcagtgctttccggcatacagtactttcagtactgtacttcgagctgtgaatgctgctatgcatgtgcaaggttactgtataacctgaaggatttttgtagcagctgtatcaagcaacggcaaaccaactttgaatctttaggccttgtttaatgatttcaattttacgtgaatcggactgtactggaatggattgagatagattttgacttctatggatttaaattgacttagtgccatccaatccatatggattaacggtgaaacgaataagccc

SEQ ID NO: 41990 - DNA, 3339 bp, Zea Mays
ctgaatcctcggatgacatcggggagaagccggagcgggcgatcgatcatactcataggaggcctcctccgagtattctgagtcaccgaagtcctccaaggtaggactcggagcgcgcttgcgcttgccgtcggcgcgacgaggcccaaccccctgccccatggtcggttggaaagggagggagtgaagaagaagaataaagtaagtgatcaatgtgcaactgaagagaatagccggggcaaagcaggctatttatagaggctgggggtgactgcccacttcctaccccattcgtcgaacggtcacaagaattaaataagcaattcaagccgcctgaaaatgagtcaggcaataggcgccaacacgacaccagttggacctaagtcaactgctcaggcaaatgattacacctctcggtcacatcaagttactactccaggacagcgcagtaaacactgtgcataccaagacacccctcgggcacacccattgggtgtgtcgcccagaattttcaaagattttatgaagaagagatatccacaaaatatacgcaatgaatgtaccacgacaaaaggaggatatcggcttagatggaagcaagtccaaatatggctactaaagtgcaagtctcatcaacaaaagcattgaagtacagagcagggtgatgtccagctgagaaccatctgcctcaacgagccagacatccaatccgtcaccgatcaaatttatttcagacctaacaaggcatggacagatggcattgtttgaatatatattcataaagtgaagacaaaatgttgatttctaaagcataagatgaagacctttgaatgaattaattctaaaatccactcaaagatcgggggctacacccgttgggtgcacctccagtaaacccaatagatttatagtcccatgaagtcaaaatgctgatttctaaagcataagatgaaaacctttgaatggattatttcataaatccactcaaagctcggggtgcacccaatagatttaaagtccgatgaagacaaaatgctgatttctaaatcataagatgaagaccttataatggactatttctaaaatccactcaaagctcgggggctacacacattgggtgcaccgagatgcacctaatagatttatagtcccatgaagacaaaatgctgattttaaagcataagatgaatacctttgaatggattatttcgaaaatccactcaaagctcgggggctacacccaatagatttatagtcccatgaagacaaaatgttgatttctaaagcataagatgaagacctttgaatggaatatttataaaatcgactcaaatctcgggggctacacccaatgggtgcaccacccatcgacagagcagaaatcaggccatataacaaacccataagccagagcaagatctttgggctgattatttcaaagtcaactcaaagattgggcgcttgtggtggacagatatctcctaggtccactagaaggcgaaaaggcctcgcgcggggcctcaggccagttaccccgcaaggccatcctttcgtgggccgggctagagctattggcggaatgggccgacctgagaaggcaatggattcaaccccaagcaatccgtcgaatcgtgcgctatccaaagaaaccatccgactttcccgcgcatggtgtcctcgaatatcggggcagattagggatgagtcggcggtgttttcgggagatcagttcaatcggttcactattatttaggaggcatgtgatcatgatgtacatgtggagtgccctacggtcgtgtatataaggcccagggggtaccccataattttcatcaccatcgacctatctcattagcttttctccattcaggagataccacttgtaaccaccacatacagatccaccccaggaagtagggtattacgcctcttcaagcggcccgaacctacaaaaaatcgtctcactctctctctcatacgaccagcacgaacaattgagttacaatcaacagcaccgtcctaaccaaaagcaccgcaagggtaaccctgggtgtgcggtcgggctctaaacaccgacagcgatgccatcgctagtcgtttctaaaccacctcccgagcgtgaagtttcaatccgaagggcaatactcgaagcgaaaactaagatgatgttagtagagttcttaccgagaattgtacacgtaggatctttgtccacggtgttcagagggtccgcggcggcgcatgcgctccgatgtgcgattcttgctatctcggtctccaatctcccctaccgaggccatgattacccttcagatgatgccatggaggccccagaccaacgttcacgctttgaaagttgatgcaggcgaggaccttcaatggcgcgcatatccatggcgtcacattgctcagtgagccatcgctcaagcttcgatgtccgttcgtcgaattggtggtagggatagtttccccgcgtccatgcgatagtccgcatctacttcatggactctagcgaccggcatatggaggaacgacattggcgacaggttcctttctctccttggaattggcagctcacggggcacgacggcgtttggctcgatggcacaagatggatgagggcacgagtcagtatatatagtcaacgaagggctaaatcactacggacgaggatacgtgctaattggaactctagggcagagtttcgtcgttctgttacgctgacataaaaaggggataaggagaggagacgatgtatccgacaggtggggccctaaggtagtgaccacagtcgcgcgtgcggcgtcggggtgtcaggttggtgagcggcccactcgtcagaggtcctgggctcaggataagatgatgcccagcgggctcggcctgccagtgccttgggcgcgaggatgggctggccgagtggtggactggcgtggggaggaattcttggccgagatgtaagggattcagccaagggaggtgttgggaccatgcttcgtcgccgaaggtcctgcagaaaggaaacagcttcggctgaagctgcctagatgtaatgccgaaggtatcattcatgaagcttcggtattacagcatgtccgaagatgagggatcaaaccgacttaaagatagaatgactttttagtccataagggtctgagtcaatgttgtaaacttttatgaggggcatggttgtaattcttgacaggctgtgccctgtgcctataaatagtgaacagtatccctttactgttcacacattcctgtaattgctaacgcatcactcgagaattattgtttgtcaaggcaaaggtataaatgtacctaaatgttgtattcaaa

SEQ ID NO: 41991 - DNA, 1042 bp, Zea Mays
cacggcgggctagcccggcacggcctgtttacctctaagcccgttaaacccgttttttttacactaaaacgtgcttaccggcccgtttagcccgcttttcggcccctgcatcaccatcattcataggctgccttcctgcctgctgatctcgcacctcaaacccacacacagcagcatcagaggttgagatagatggccagtctgtggaagaccaaggttctgcctggcctcaacaagatcttcgacaaggatggcaagaaggctgcagctgcaggcttcttcaagtccttcaacaaggaggagattggcaaggagattgaggagaagaaggcagaactggagcccaaggttgcggaggcttatgaagcatctcctcctgaggtcaaggctctgttcaaggataagaagccagtcaagatcagcaagaagaactcgactgcagttaccaagttcctcgatgagctggctaagattgacttccctggagccaaggtggtgagcgaggcggtggccaagtccggcgcctcgcccctgtctccggcgatcaccttcatcttggacaaggtcgcaccgtacatccccaaggaggagcccaaggcggaggacgcggtggctgaggccacttcccgggaagtcgccgtggaggtggaggatgccgagccggctatagctgatgcagcggccgagacaccatcggaggcgaagaagggagaggaggaaaagccggctgccgaggaggcggcgccaccggcagcggctgctactgaggagaagtaatactccgatccacagccatgcctctccctacgtagctgcagcagagtgaaaagtgattcagtcagtcagacatacacacttgcattggcacgcattattcatggacatgtacgttgctgcgccgtgtgtgcgtgtgcgtgtgcgtgtgtgtgggggttctttgttttttattttggggcgattgttacaaatgtgtaattatttatatcgatatgtttgtttcattgatggaccgcatttaataagacaattctttcttgtgtat

SEQ ID NO: 41992 - DNA, 1864 bp, Zea Mays
cctgggtccagtccagccaagataatcttgatcggtccaaattgaaaaaacagactccggccacagccgagacgagactagcagcagccgcttgctcagatcggcagcttcggcggcggcggagatggcgattcggtactggccgatggccggagcagccgttgggttccgcctcgtcctggttctcttcggcggggatctccaccttgcctctcgccctgaggtctccacccccctcacctcccttcgccgcctggcggaaggctactggctgaagcaagcgtccgtgtcaccgtactccggttctatgtatcacggttccccattgctcctgtctgttcttggtccattaactagtagcaggcctgacggacatcatgctcatatttactgcagattttctagcagccatgctcatccgagcgactgggcatgaactcgaaatggcacggaacagaagtttgaagtcacttgacctcacaaaggcagtaaaggatacagttaatgtaagcgctggagatgttgcttctctcatatatttgtggaacccttgggcaatagtcacttgtgtgggatcatgtacatcaccaatcgagaatctaatggttgtaataatgatctacggatcctgttcacgtctggctcctcttgctgcttttggatatgttatggccacacacctctctctttatcctgcaattctcatagtaccggtcattctgttgctgggttatggtctagatgctcctcctccaaaagtatttgttataaaagggtcaattgccagaaaaagtgatgtgtcagacaatgataaaacaagcagacagagagttgttcagcagttttcatggaaaccagtacttcactttatattttggctgttcatctggtcgtgccatgtgttgttattgagcagcgtgattttgaagaaagttggtggcctccacgagatgtttgaaaagacgtatggttttatacttacagtgaaagacctatcaccaaatattggtgttttgtggtacttctttgctgaagttttcgacttctttagaaatttctttcttatggtattcaatatgaacatcatttttatggtcttaccattggccatccgattgaaacatcgtccgtgctttcttgcatttgtttacacggcaattgtggcaatattgaaatcttatccatcggctggagattcagccctgtatcttggtcttctgggcttatttgtcaacgaattagcagaaatgcagttcacattcttcttgttttttggatatattggagtctccctacttagccctgtcatgcataatctgtggatctggaggggcactggtaatgcaaatttctacttcgccactggtttggcttatacttgccttcagactgtgttgctggtagagagtgtaagttcaatgataaagcacgacagaaagttaaggctacttgttacaagctaatttggtcctcataatcagaagctcaagtggtggacagctccgatgcttgcaattccctacatggtgctcttgattcttgaacacaaacagctcctcatcttggagttcgtagatgtaggtcatattcgatgtagcatgttgtactgtagaccccacacttgtacaatactaggaccgcaactctttcaacaaagacaaggaacacggtagggctcgtccttggtgactagtacgtagttgtgttcgctaccgagaattgttgtggatcctggctgtgatgttcagtgatccagcttggttgaactgccctcacgtacatttaattccgtcagtctgatggatcaacaaggaaaccaacatttgaacgtttaaccaaactgatatctaattttcgtttcttc

SEQ ID NO: 41993 - DNA, 2045 bp, Zea Mays
ccattgagtacttctctgtgcaatgatagcatttcccctttgcacgcttcgtcgctaactcttccggtgatagccgtttgaatcgaggtcgaggcgaacaactaccttggatgctgtgttgttgccggcttccttgactaccaaactattcctagcagctctgtatcctcctctttttcctgcctccaattcccttttttcataggcccttgtcaggttcatggcgcactgcaaattcctgggagcttataatttgacatccgtgtgcaggggttccctagacctgccgtgaacatgctgacctactgcatggtagtaaggtcattgcaccggcacagaagaagtgagaactgtcgctggtattcctcgacagtgccaatgcgctagagatcatttaattcggccaaggggctggagcgaattggtgagtcgaatcgaaggttggtgaagtcaacgaacgttgttgtcgtgttccagtgcgtagaaccattccgccgccacaggtatagaatgcaattgctcatcctagatcatgatcgcccacgctagaatgattaaaaaatggattagaaaaatcacagataatctaacgattgttaagttattatagagtgggtgacgaatattattgctctacacacaagatgtgaatccaagatccatgtgcaacttatatgttttcttataaaaatattaaaattgtttttaattaatactctatccattcttttttatttgacgacgaacggtccaaattagtcaaataaaaatttggaggtagtgtattattaatataccaggatttattcggtaccataaagttactaaattttggtatagattcaactaaacttaaatttatttgacgaaaaacaagaattgcacttttgtttggtatagatttgactaaactctttgattctggcccgctgccgccatctccccatcacactaccattgccatctcgccctgaggttgcgatcccctcggccgcgaccctgcctcagtgcctcaccccgggccgcatctcctgcgctcgtgctacgaggacgggcgagccgcccgtgccgcaggctatacacccaagagcaaatgaagaacaagtgggttgtatcataccaagtggaagaataaggccaagaatagcattgatacctacaaaatttgcatcgtcaaggtgctgaatcaggttttgggcattgtcatctcatctcctcaacaccatgtccatcatgaagctgtcacaggaggccgcctgctacaagaatcccaccacttcctgtgcttcgctctccccagggaccacctagacttaatgaggagagtggagatcatcccgatgatgatgcgaggtggaaggctcacgggtttgacctctcaggttctgaggtgcttcagcacggagatatttgtcagcagattatcattctatacgacagaggaagaattcaaagatattttttcaccatttggcaccgtagaggaagctcgacttatgagagaccaccaaactggaaggatgaagggatttggttttgtcaaatattcatcgcaagcagaggcagagaaagctgtcaaggcaatggatggcaagattctacgtggaagattgatctttgtggagatggcaaaaggacacgaaagcaagtaggacaccctccccacgagaggatttcactgaacatgaaacatgagagcgccatcagcttatgccagatggcaaatatcccaaattctcaattgatgttgcaacttatatacaaagcacaagttaattttagctagcttatctttgataacactgctaccttgccatctgaaaggttgccgtgcattggtatccgttgacctgtgtaagaaatgttggcagctctgtgccctacgaactagcctggttgattaaccaagatctgttcaaaattaaagccagtaaaacatgaatattgttaaagatttcagcaatgaatcgttgagaaaagattgataaagacgttctaattataatatactcgttagcctttaacgagtgggtctagttagcctt

SEQ ID NO: 41994 - DNA, 723 bp, Zea Mays
gctgactgtgaagcaccggacggtacgacgctgatcaccggacagtccggtgtgcaccgaacagtctggtgcacagtctgcggaactcttcgctctcgggtttttccctggctacgtcggctataaatcaccggacagtccgcgcaaggcgtcggatagttcggtgctccagccgtgcaacgactatctaccacgtcgacaagagccaacgataacatggtgcaccggacggtccggtgtctcactgaaaaggaaaccagccaatcaggggattctctaccgcgtcctatgctcgtactattcactgtccggttcgccaccagacagtacggtccaccgacgaacagaaggcaagaattgcctaccaaatggagttccaacggctcctagctgccttggggctataaaagggacccctaggcgcatggagcagaacaccaatcctccattgaacattctaagacgcctagactccgcaaacgcgcattcggatcattgtgttttttattttgagcacttcttgagtcgtgaactccctgtgttgtgtttgtgtgctcatctcttgacttgtgtgcgtgggattgctgttattctagttcttgtgtgtgtttctttccctcccttactcttgtgcttttattgtgatcaacattgtaagggcgagatgctccaacttgtggagattcctcgcaaacgggaaaagactgctatggaagaaaactg

SEQ ID NO: 41995 - DNA, 1640 bp, Zea Mays
  misc_feature (1640)..(1640): n is a, c, g, or t
ctgcaagtcaccgagatgacgtccttgtcacgcacgctgtctcggggcgggccgatgcagtcgccaggggctcgccgcatccaaaggacgcagactgctgtgaattttggtgagcccatgtttgacagcgaggtggtgccgtcgtcgcttgttgagattgcgcccatcctccgtgttgccaatgaggccggttctatgcattcgaaaaggctcacaggttagatccgacttcaagtggtcgtggtgtccgacagttcaagacagctcttctgcagcggcttgaaagggagaacgagcccaccttgatgggaaggggacaaaagagtgatgcacgggaaatacagaccttctatcatagctattacaagaaatatattcaagcactccagaatgcttctgaccaactggatcgtgctcaactaaccaaagcctaccagactgctgctattctgtttgaagttttaaaagcagttacacaacaacatgctgttgaagttgatcatgagatattggaagctgctgataaggttaaagagaaaacgaagatctatctcccttttaatattctccctcttgatccagacagtggcaatcaggcaatcatgaaatttcctgagatccaagctgctgcttccgctcttcgcaatacaaggggtcttccatggcctaaaacttatgagcataaagttaacgaggacctcttggattggctgcaagctatgtttggctttcagacagatagtgtttcaaatcagagggaacatttgattttacttcttgctaacatacatatacgaagaaatccgaagactgatcaacaatccaagttggatgacaatgcactgaatgatgtgatgaaaagattgtttaagaattacaagaaatggtgcaaatatcttggtcgcaagagcagcctttggttgccaacaattcagcaggagatgcaacaacgaaaattactgtatatgggcttgtaccttctcatttggggtgaagctgcaaacttgcgttttatgccagagtgcatttgctacatatatcatcatatggcatttgaaatgtatggtatgttagctggaaatgtcagtgccttgacgggtgaatatgtgaagccggcctatggtggtgagaaagaagcctttctgaagaaagttgttacaccgatttaccataccatagcaaaggaagctgaaaggagcaaaagagagaaagggaatcattctgagtggagaaactatgatgatcttaatgagtacttctggtctgctgactgctttcggcttggttggcctatgcgagctgatgctgacttcttttgtcagcctgatgaaagaaatgaaagcacaaggatcagcaaacagaagggaaaggtcaacttcgttgagctacgctcattttggcacatattcagaagttttgacagactctggagcttctttattttagctcttcaggttatgataattctcgcttgggacggaggttcactagccagtatttttgattatgctgttttcaagaaggttttgagtatctttatcacttctgctatactaaatcttggacaagctacacttgatattatctttaattggaaggccagacgaacgatggaatttgcagttaagctgagatatgtn

SEQ ID NO: 41996 - DNA, 1971 bp, Zea Mays
gtcatccgcgcgcccccgctctcctccatctgccgcgtgaagctctcccgaaaacctcctccacatcagcgccccccgccatgcccctgtatctcgcctagcacacgccgcgcccacgcaggcagccgtggatctcgcccccaccgtcgagcttccatggtaggcatcctcttccatactaggcggccatggcatgaacccatcccctatccgcgcccccatcgcacgggccctaatcctagaatggtgccttcctccttctctgtcgcctctgccctactcagaccttcgagacttccactggcgatacacacccactagggaattcttagaccaacatgaggaggaagaaatgcctcatgttattagtgttacaccagacgtacaagaggccattggacgggaatgaggagctatctgcaaactatcttcttgagcaagctggtgaggaagattaagccagagtagttttcgtatgctgcattgaaacaggcagatcctattaacaactccgcattggctctctgccccagccatggacccatgacatcggtggtttcgcgcacctcaaagacatgggtggggaggcatcgcggctgctgcacgccctctagagaatgcttatcgatcatcaggtgcattcaattacgctttcggttgctgcattgagaaatgaatcagtcgaactgtgaaccaactacttgaaatttcacgtgatgtggggtatagtggcaatgcataagcccacatggagcactgggtcttcgaggtgacacactgacattgcaactgaacacacttgtctatgtggctatggctacggtatacatagagtcgtacattaggtagcttattcaatcaaataatgtccggttttgtcatgaaagtgataataatcttctatataaacttggtcaaacgtaagacatttcacttaaaataaaaccagaacgtctctctttttcggtggagatagtattaatataatttcgaaaattctgatctgcgagttggtactttgataattcaaatccatgttgccaaaagctaactgatataatactttcttcaacagtaactatcatactatctgcatcttctatgatctattaaagtacctcacaagagatccaattaatgattcacacctgcaagataacacctgtagtggaaatccagttttctggtgtgagtctaaatatttcagaaacaatgaaagcatagaagaaaatgctgcagtaggacaatacctaattatcatgtgcatgcccctagaccctccatttttctcttagcgaggaagcagaaaaccaaactcaaatacaagaaatattagtcaatacaaagtggccaaatttctcgagacagaaaaagacaggtgggatgtagaaagggacttaaaagttgaaaccattggccccatgtactgcggcaaaatatttctcttcttctggcagtacagtagcttgcatcatatgtgacatcctctttatagtacaggaagtcaagaatagcccgagtgctcagcacatatgctacatgctcccaactacattaccccttctttgaagtggcgagcaaagcgagaagtttgagtggggcccaaaacctgagtggggcctaaatagaaacctacttactaatggacctttatagctacaatgaataagataaaaactccactgaaaccagaaaattgagtgggaccccgtgccccagtcagcccaacgtgagcctacccttgcttctctgctcagacatgcacataaactgaattcgtctcatttatttatgtttaaggtgtgtcgtttattcacttgctccagctgctgctatcaccccaaccaaatcaattttgaaggccgaattatctaacaacatttccaaagggaatatttcaagttcacctacacggccgcaccttctcccgaacaacgtggagcaagcaatcatttcctgtagaataatatg

SEQ ID NO: 41997 - DNA, 2164 bp, Zea Mays
atcgtcaccgcagaaaagaatttctgtttcccttcaatgagatggagaatccgagaatgggataagaccgcgccgcgcgcgctctcctctccgccactctcaccgtcgcctgccccgccatgacttccttgctgttgccgccgccgcaggcggctgccgcagcgtacggatgctgccactgtctcctgctcgcttctaccaccgtgccggcgaggagtgggtgcgtgggacgcgccagcagaatcacgctcgcgctccgctgcctcccgattaccgggctgaggagtcgaaaggttgcgtgccaagcgacgactgagaccgagcccgagggcaatggcgacgaggaggataagaaagagtttggagatgatgcttcatcaccttcagtttataatgttgcagaagcaaatgggccgggagaaaatgactcgagtttagacaataagaaagatgaaaccacgaatgcagaagcagcactgctgagctccggcgacacggtccaggacatggatgcagatgctacttctaccaatggcatacaagaaaatgtggaagttattgaagttgctagtggatctccattgccaggaatgaagcttgatgattctgtcaggatccccaaggctacaatagacattctaaaggatcaggtttttggatttgacacattttttgtaacaagtcaggagccttacgagggtggagtattattcaagggaaatcttcgtggtaaaccagccaaaagttatgagaagatcacaagtcggctacagaacaaatttggtgatgaatataagctttttcttctcatcaacccagaggatgagaagccagttgctgtggttatacccaagcagacattacagcctgaaactacagcggtcccagaatggtttgctgctgctgcatttggattagttaccatcttcactctgctacttcgaaatgtacctgttctacaggagaacttgctatcaacatttgacaaccttgagttgttgaaagacggactatccggtgctctagtaactggccttataataggggtgcacgaaattggacatatccttgctgccagggaaagtggaatcaagctcggcgtgccatattttgttcctagctggcagataggatctttcggcgggattaccagaatcgtcaatatcgtccgcaaccgtgaggacctactgaagctagcggctgctggaccattggccgggttttccttgggattcgttcttctgctgctgggcttcgtcttgcctccaagtgatggccttggccttgtgatagatccaaccgtcttccatgaatcgttcctcgttggtggtctcgcgaaacttcttctcggagatgttttgaaagaagggacgcagttatccataaacccgcttgttctatgggcctgggccggtctcctgatcaacgctatcaacagcatacccgctggggagcttgacggcggccgcatagcgttggccatgtggggaagaaaggtatcgtcccggatcagcagcctcgccatcgggctgctcggggtcgcggctctcttcaacgacgtcgccttctactgggtggtgctgatcttcttcctgcagaggggccccattgctcctctctccgaggaaatcacagaccctgagaacagctacatcggcatcggtgctgccattttgctgtttgggcttctggtctgcctgccctacccgttcccctttgacccgtcgcagttaactgatatggatttcaacttctgagaaaaggaaaccaaaaaaaaagcagttacaactcaccggatgagatgtatttaacctgtcggctctgtattctgctgtgtcatcttttgctccattgctccttgtagtagccaataaaagcagagctttcttgtgtaagcttgcctgttgtattagtaggatgctcgatcagagtagaatatagatgttattttggctgtaactgttacctgtcagttgtggcttatcaacaataggttccttgtcagagtatgatctatcagattcatacgcgatacttagcgttttggataagaataagcagacctaggacattgtgcgattgttgtgccagagccattcaaactgatactgctactaccttatataaaaaaaaatactcctgcttaatttgtttaactacacat

SEQ ID NO: 41998 - DNA, 1885 bp, Zea Mays
attgtattagggagttgctatgaactaaccctaatcacacacactcctaactcccatcccatcccatcccatcccagccgccacagctgctgctcgccctctccctgtctcctctctctttccagccacggtttccccttcccccatccgcgcgctagggcacgaggcaaatctgtggccctctcctagtctcctgaagtccgactcagccgtctcccagctcccgctcgctcgaactcgggttggggaggcacggagtcactgaccccttcgcgttaggcggtgcccttaccggctcttcgtctaaggtgtagtcaagctgccggccacgcccggcacccccctatccagtacaaggccttctccgagatccagtacaaggtcgtcgtctccaagatctgaccccgacgctagtgaggagggaagagtgggtggacgaagtgggggaggatgagcgaggagaggccggtgccgcggcgggagagcccgtggggtctgcctgagggcgacacgcggcagcccaaggctcaccgctgcaacgaccgcgccgaggacgtcgtccaggcttgctttgaagggaacccattcaagacagttccaggcccatttaagctcttctggcaatgcatgcgctcaaaacctggggaggaaccaaccgagccctatacctacctgcagctagatcctccgagaagggtggaagtgaatctggagcaaacaggaagtgaaccttgaacgagcatgcctagtttagcatctcgtgcctatttgtcttcacctttcgagcagactttttcctcctagggatcacatcatgtgagcacaaagctgcatatgtttggatgtttatataatctacctaataaaccgtgatccccagagctgcctgtccaggctgccaactccttgaaatttgctgatgctggtgtaagaattgtgcccctttcttctgataaatggtgcacgcccaagtccacatgccgccagacatcagagctagtgcatctgaatgcttccactatgggtctaagcagcagtatttcggtccagaaaaccttgtatgaggttttatctgtgagcgaagacgctacgtatgatgaaattcgtgcagcatacaggtctgctgctctgaacacacaccctgacaaggcacggacacctctcgagtcatgtgttctttccggtgagcaacaggaattttctagtgtgcagaaagcatgggaaatcctacgccatcctacatctagagcagactacgataagcagctgcagtcatccagacagaacatcgagatcatcgcatctgaagtccaagtcggggatatgatcattgagagcactgccgatgccgatactgtagagctgtcgtacccatgcaggtgcggtgattacttttccatcacttcgtgcgagcttagcgggatgggaatttccgtcagtggagatggagatggagaggtagagctgcaggcgtccgattctccgtcggcttccgttgttctgggctgcggctcttgttctctcaaaatacggttggttttatagatggaactccatgatatatattgtgtgcggctcagcaatgctcactttaaactttagcagccaccacatgtttctcaaacactatgcctcctggtctgccgaaatcaaaatagtgcagcttaaccttgcctgttcctatttccgggagagatgtcgagtttgtaacctgatggtggttgcgttgtgataaatgacgttttttgaccgttgttatcagctaaccaccgctgtcgaatccagctgctgggaaatccaaagttgttccggtggtggttattcggtagatgagatcttcagttaatgttgttttacaggcccgatttaatggtcccatctgcca

SEQ ID NO: 41999 - DNA, 954 bp, Zea Mays
gttttaccacaaagactaccgtgtctggctaacaagagcgcctaattccgcacctcttgtgaaaactccacttcactcaaaacatctaccactaatgtgaaggccattttttgaggcactttcacatggatgtttaattaatttactactttaagaagcaatcccagatccacatccaattgtgcctccctgtattctgtatgatctatggagattatgttgtatcttcatggatccacaacagctcaacatgtagctaaaaatcagctgcatcagaaatattaagcaaatcagacatgcgggcctatcaacttatttctggtataaaaaactgagatccttaaaaaagaataaaatattttacttttgctgcagcctgctggactggaccccgttgtgttcttccgatgatcaatcagtcaatcacaaattcaaaccatacaaatcaagtatgtttttattttatattacggtgaaatgatactagaatttcaatgacatgttacacaatttttctttgctcaatatccagcagctcaatatctagcgtgcttttggaagtctgttcaaggggtggagtgaggagaagatatattttgctcccacatacaagtactcttgcaattcagattcttatgctggagagactgccacatcaaagaaaaagaggagaaccccagcctggtgtgaaagaatactatggcatggagatggcactacagcagtctgtgtccttaagcaaatcacaaaacactgcactagaccagtgaaccatacttgcatagctacggcccatggctaactactattattgttatgacatcaccggtgctggggcggggcccaaatcatcgattaaagcctaggtttttgtgtgacttgggaacacaatacctcggaacctttctaaaggacgctaagttatctgttcctcgaggaaatttcctgtgacca

SEQ ID NO: 42000 - DNA, 3185 bp, Zea Mays
cggcttccctgccttccactacactcgcagagtcgcaggcagtcactttgcggcgagacgcttgtgtcgctcctttccaccctcagtctcagtcctctcatgatctcattccccaatcggcgacatttccagcaatttggtagtttcccacgcaggctgcgcgcaagcaaccatcccacccctcttccgcggcagtccactgcctcccggaaaatcccacctcgctccgatccaacccgtccccgcaaccagcgcagccgccgcgacggggtccgactcccggccgatctcccgcctccaccagcgccacggattgccagcatttccccttgctacctgacacccgcagagagctaaaatagctctcctggctaagcaagcttcccggggcatgtgccgataagtgttctacctggaagggcatgattctggagtttccttgagaaagggagtaagtgctcaaggatggcctcaagggctatcatcaggaggaggaatgacattctacggcacactcatgtgcctattttgtccccttcattcactagcacaattgggcaaggacaatttgattgtgaggttgatcatcaaagatctgtatgttacttttcaaaggaaagtttagcagattctaatcatgctatggcacattgtactttaaataagcgaaagctttgtcatctcagtagcggtttcgcatggcatccagcttgtgaggtttctcttcctacttatggttctagagcacagaactttgtattcccattgggagtcaggtgtttcctgcagtcagtccgcaccacatcaaacacaactgcacagggtcaagttcatattatggacaagaagagtgaggatgagaagcagaagcaacaaaaaaaggaggcatcccctgaagaatgtgatcaggcagtggaaggattaagcactgcaaaagcgaaagcaaaagctaagctggaggaagtgcaaaagactgaccaatcagtggtacagaaattatgggcaaagcttcttggtattggccctgctttacgaattattgcttcaatgagcagagctgattgggctgcaaagttgaagcattggaaggatgaatttatttctacactgcagcattattggttgggcactaagctactctgggcagatgttagaatctcatcaaggctgttagttaaacttgctagtggaaagagcctcacaagacgagagaggcagcagctcacacgcacaacagcagatctattcaggctagtaccttttgcagtttttattatcgttccattcatggagctcttgctgccagtgttcctcaagttgttcccaaacatgttgccatccactttccaggacaaaatgaaagaagaggaggccctaaaaaggaaactgaaagcaaggatggaatatgcaaagtttttacaagacactgctaaagaaatggcgaaggaagttcaaacatcacgcagtggagaaatgaaacagactgctgaagatctggatgagttcttgaataaggttaggaaaggtgggcatgcctccaatgacgaaattttgagctttgcaaagctatttaatgacgagctgactttggataacatgagcagcattaagaatgatgataagatgattcaagctgagggtgtggagtctctttctgaatatgagcttcgacaagcatgtcgtgagcgtgggcaccttggtttgttgtcaacagaggagatgcgtcaacagctcagagactggctggatctatcactcaatcattctgtgccatcgtctcttctaatactctcaagagcttttactgtatctggtaaaatgaaacctgaggaggccgttgtagcaaccttatcttccctgccagatgaagttgtcgatacagttgggactgtactgccttctgaagattctgtttcagagaggaagagaaaattggaatttctggagatgcaggaagagcttatcaaggaagaggagaaaaggcaagagaaagatgacaaggcaaaactggaggagccaaaggctactgaagaagatttggctttgaaggaaatgactgagcctactgttagggagaaagaggaactaaagaaagcaaaaacccacgataagaaagagcagctttgtaatatcagtcaagcattggctgtgcttgcatctgtttcttctgttaccaaggagcgacaagagtttttaagccttgtcaacaaggagatagaactatataataacatgctcgcaaaggagggtacagatggtgaagaagaagccaggagagcgtacaaggctgctagggaggaatcagaccatgctgcagaggcagctgtgggagaaaaggtctcttcagctttgattgatagggttgatgctatgcttcaaaagttagaaaaggagattgatgatgttgatgctcgaattggcaatcgctggcagctgctggatagggactgcgatggcaaggtgactcctgaagaggtagctgcagctgcaaattatctcaaagacaccataggagcagaaggcgtccaggagcttatcagcaatctttctaaagacaacgaagggaatatccttgtggaagacattgtgaagctggcgtcacaaacagaggaaaacaacgaagctgaagaaactgcacgatgatttggaatagcagccacattcttggctcttaaaactcgacggtccattccttttttaaaaggaaccgcacataataaagctagttcctggcagtctcatgcaaaaatcaccaagcaggatggtcattctttttgttctgactggcggctgcagagaaaattgtatcctgctgttgaaagatattcatttatacagttaagtcccagcacaaccgatcgttaggttaggaattctgtccgaaatggcaacttgcatttcaaacgtctgccatgaaaatgagaataaattcggcgggctctacagatttttcatctattgtctgaacaaaagtataggcatcaaataagtatctgggtaagtttatactatttgaataagaatcagctggatttgtttaaattcttaacaagaccgttttagcagtttgactatatggtcaatcaaaacactattttgtattgtatattgtactatgtgcacttttgcagtgagatttaaatatgggtatagagatagataagctactagagatagcctaaatg

SEQ ID NO: 42001 - DNA, 608 bp, Zea Mays
ctatgtgactaggtgatgtatgatgcctttggtgttaggctacatgcaggaaagcaagcaaaggtcttgaaccagattgtgtatgagcttccattagaacatccactggctgaaacaagaccgctgcgagagctactagggcacacacctccacaggtatttgctggcggagtgcttggatttgcagtagccacatttatagcgatgatcgctgggcttggtagttgactccgcatttgaagaaatggtcaacattcacattgaagttctggaattcaaattggacacatgtttcctagccagcttatgatagataatgtgttgtgtataggtgtatttaatatgcaaattgttgtcaatttgttgaagagaaacttgcgtcattcttttgtagttaatcgacgagtgaactatatgttgtattcgttcctgtccaaagtatttggactgattgaaagtacctcttgataaagcattcatgagatttccgcacagccattgcgattgatttccaaacctcatgttcaagtgcaacatcatcaatatgtgagatattgaggatccatatttttgccgagtgtcgaattggattttcatggaaagcaagg

SEQ ID NO: 42002 - DNA, 409 bp, Zea Mays
gtatggtctttatccttttcagtcgttatcatacttgagcttcatcaacatgttcagctgaagtcctttggcttctagcttcgtcgcccactctttattttccctcgtcctgttataagagaagttctccatcccaatgctgaagcttcctgtaattattcataatcatgatgaaaacatgtggttaatcacatttttttaggaccttcggaagaggaaggccccccaacaagagctatcgacaaagttatttgactgaggggttagcctttgtgaggacatccttgcaagagctccaacaagaactaggagaaagcttatacacttctcgatacctcggtaaaaatattaaaagtgtcgaacaagagtttacatctctatcgatctttagcttttacatttatattat

SEQ ID NO: 42003 - DNA, 1837 bp, Zea Mays
tcgcagggctcctagaaaagagaaagtagacgaccaaaagaaactggagaaaaagagaggagctcaaaagcaagatgacaacagctatcgccattgaagatgtgagaagagaagtgagaatattgagttctctgacaggccacagtaatttagtgcagttctacgatgctttcgaggatgaagataacgtgtatatagttatggaattatgtaaaggaggtgaactgctggacaggatattggctagaggtggaaagtactctgaagaggatgcgaaggtcgttatggtacaaattttgagtgttgtatcattttgccatcttcaaggtgttgttcaccgtgatctgaaaccagagaatttccttttctcttcaaaggatgaaaactctcccttgaaggtcatagattttggcttgtctgactttgtgaagccagatgaaagactaaacgacattgttggaagcgcatactatgttgctccagaggtcctccacagatcttatgccaccgaggcagatatgtggagcattggagtaattgcctacatcttgctctgtgggagtaggcctttctgggcgcgcacggagtcgggaatcttccgagctgtcttgaaggcggaaccgagttttgatgaggccccatggcccactctcacggctgaagctaaagattttgtaaaaaggcttcttaacaaggattaccgcaagagaatgacggctgcacaagctctcagtcatccatggatccgtaattctcaacaagtgaaggttcctttggatatgataatctataagctaatgagagcgtacatcagctcgtcttcgctgcggaagtctgctttgagggccctagccaagacgctgacgacggaccaactcttttatgtgagggagcagtttgaattgctgggcccgaacaagaatggttacatctcattgcaaaatctgaaatcggctctagcgaagaactccacggatgcaatgaaggactccagggttgtcgattttgttaacaccgtgtgcgctcttcagtacaggaaactggatttcgaagagttcgccgcttccgccatcagcgtctaccagatggaagccctggagacctgggagcagcacgcgaggcgcgcgtacgagctgttcgacaaggaaggaaaccggcccattgtgatcgaggaacttgcgtcggagctcggacttggcccgtcagtgcctctccacgttgtcctccaagactgggtcagacacgccgacgggaagctgagcttcctggggttcatcaagctcttgcacggggtctcgtcgcgctcgatcccaaaggcctagcattgtacaccatccatccatcgtcgttgttgttgtagttgtactgaagtaaagctgttgtgtagacgagtgtacagatgaggatagggaaaagaaatgaacatgatggaagactggaagggccgtaagatttgcggctgctgtttgtcaatgccaaattgccattgcctgcagctgcagtagctgtgtctggctctcctttgtccgcgccatcagagaacaggagcgtcgcagcgtgctggtggacttgcttgcttgctcgtggtgtgtacgagtacggtgccgtggatgcagcggtgtcgccaccgcgcgtggttcgggagggggcacggcgctggtcccggaccgacgtgcgtatggcggaggcggagcaggtccgatcaagatcagacgccgggtccggccggtggggtgggggcactgacagccagagcggcaggaggaggaccacacggccgggcacccaacctctccccgtgctagagaaaagagtcgaactaccccctagatagaaa

SEQ ID NO: 42004 - DNA, 9409 bp, Zea Mays
ccaaaagcccccacaaacccctcgggcctcgtcccctccgcctctcgccgcgcggcttccctgatgcgctcgccccccgccgcggcctcccagccgaaaccctagctccgattcccataccgatggcggccgtggccactgcgcgcgacgtggaggaggtcgtccagaagcttcagtctgatcgggccagagtccgcgacgagggggtgaagctgctggggacatggctgcagggtgaccgcgctgcgtccttctgccgcctcctcggccgcaacaccgtcaggttcaagcccggccacgggaaccttaccggagggcattcactacatttgctctcagttgctaagcaactttttgttcatatttgggaggtcataaaagatggccctagccttcagttagagtacagcataatccttagacagcttctaaatgtgaaggagtaccgctatcagatgaaacctcgaacatatagcaattttgtatcactctacatgaagaaggttgctagtgcttttgatgcaaaattcagcaatcaggcgagctccaaggatgaatccttccgctgtacattgacacttcatgttctacttgaaaacccaccaagtgattaccctgatattatgcgggaggagagtttgttcataacctacgtgaaagttcagctgaagattgccaggaatattccagagattttggaaaaacttattgatgtcatcattaaggaactagacaaaaatgttaacactggacctggacttctatggtgtgaggcaccaagagatgagaaagctgtgtccttaaggtgtttccaagaggaatggatggatctctctgctactgttttttatctggcctgcaaatgcacaacaaagacagcaaacagggagaaaaggatgaagaaagaacacattatgaaccttatcgttgatggcctttttagaggatctttgttttggtttgaaatcctcttccgaggagtggttctgtttgttttctgattcacaagtatggatatcatctagagaaatctttgctaattagttggtttgaagcaagttgcaaagctttgagaagtatcttgatccatgcaaatgccatacgttttcaggattcactactctggcttctcaggacattcaaggagttctccacagtgctcatgcttgacactagggataaagtgcaattttgtttaacaaaaggcgagatgtcaattgttgaagattgttggcaagccatatggaattcccttgttcacgcatttccgttgttaagcagcatagatctagttgctgattcagctctgattttgctgggtggaatgatcatgcgggaccaagttcatacatcatttctatcagaagatacatggaacctgcaaatatttaaaaaatttccatcgccgtctgctctgtattttgttgcctgttacttctcgaggataggctttcagggtgacttatccaattctatctttgttcggaagactctgctaaggtcaactttggagttaattcattcaaaggaattctctcttttgaatgaacaaaatgttgttatcattcctgaagctattttctcgctgtgtgctggcttttcatcaccagtaattaattcatcggatatattgcaactgtttggtcattgtaaaattcattccaagatgtctcttgaggatgataactgggttcttaaagatgaactaccctactctgtggaagctttgtcagaaatcactctggatacttgtaccaaggttatgtctcataaatgccaccttatacatcttccggggactatccagcaaccaatgctcctagagctcatggaattcatgaaaggatttgtggcttcaaatgagcagtttgagaaagtggacttgaataatcttgttcttgtttgttctcttctctgcaatctgattcattgtgcattgttgtcaaggaccatggaagaaaaatcttcacttttgcaagaaacagtagattatgtcaccaatattttaaaacatattgtgtcatttgttgtgaagaagaatgatgaactttctcatggtcttactaacataagttcagcattggatacaatgggctctgctttctcctcaatcaagagcttactgtcttctccaatatttaatctgtcaagagttgataatggagtttgttctgttgttatcaaaagcattactgaattacttgatgaactcttggtggcaatttctcagctgttttgtcagatctctagtttagtgagcaattttgatgcagagagtactggtaaaatgctaccaacatctagtatcaatttagaggacctaaatcctgttttggactgtaaaagtagtgttgctgatatggatcttgatgtgatggactctagtgaagtagattctgtcacagctagtgcgagtggaagtatgggtagcttcttacgacctttggaatggaagctagatctagtttgcattatttcaacttttttctcagtttcatcacttcatacatgggaaattttgtacagcttggtggataaagaaggtgacgtgaaggttcgccaggccatcttgcttaacctttgcagaaacatctccgcgtcatctaaaactgtatctttagtggtccattttatagttgatatgagggacagaggtgcaagttcattacttggacctgcagagtgcttaactcacatacatgctttattaaaagcgttgatagctatccatggtggacagaatgctgatggaaagcaaccaggacgcgaagtatttttcagtgagaaccaggatatcttatttgacttgttaaatagggctacagacataagttctgtagattggttttctcgcatcaagttcattgattgtgtctcctcctttgtttgcctgttccctgatgttgcccaggatttgatcggatgtttgcttgacatgctgcatgatgctgattaccgtgtcaggttgtatttggctaggcaaatcgtcgtgttattccaaacatgggaagggcacaatgaattatttaatgatgtttgctcaagcattggtgccaagatggtgaagttctcaaatatttctccagttacagctagagaagtcttagctgttggtccacaatctgttctcgtaattgaaactgctctcattacactagctcatttggctgtgcatagcgaggatgttgaagttgagtgtttgttcatgatttctgctgcggctgctatagagccttctcagcgagaattagcttttgcgttatttgattccatttcaaggaggcttggttatgcttcaagaagcaagtatctggaccaagtgatgggcccgattctttttcgatgggttgcttgtgagatgaatctaatttcacttgttgaggtgcaagaaatgtttggttatggatctgctgagccaaacaactttgttgaacattgtagttcatggcttctccctttcctcattctcaggggtgatggtgctgatatgaattggatatcgaagattttatctcaacctttgtcaatcattatcaagagatacttcgttccaatctttggaatgtgcattgctgtcagatgtggcacagggccagagaaggacttagctgaaactgtcttatgtgaatcagttttgcagcttggtgaaatttctgaacttgagcgtgatgatctcattaaaaaacacatggttgcgatcgttgcctttttgctctctgtttcttcatctgctcatgggccacaaattccatatttttccaagaagaatgttgcactttcagtcagaatggttgttgatggatttgtggacacaatggatgataacttggctgatacagttgttagtgataaagttaatatatttcgtgctgacagagtttttaagttcctgttgtcgatacatcagcaagttgcagatgccagccattccaggcacatgggtcatcgtctttgtgcaattgaggttttaatagatgtacttgggcacagagtggttcttgagagcacttgcttctatattatttctatagtggggaactatattcagcaaaaaccactgcaaggccagtgctgtaatattttgtctaaattgttggctgcttttgatggaaacacctctgctgaaaccctgcaagtgcttggcagacagcttcaggtagtagttccaaaattaattttttcctgcctaattaatgagaaagaagaaagaagtggtactgaagattcatcaagagttctttctttactccatcaattgacagtggagattgatcctctgctttatgattacataagagagttagaaccacttcctgatcttgattgcttgaaagatgtacaggagtttcatgcttcactttctgcctcacattcttcaaggaatcagttcttaaagtttgttaataaggctccttatttaccaccagaactatttttgttgagtcttcgtgcgtatcacaaaaagttatttttgggagaaatcattcgtagaagtgacctatctgcggctgatacaaacatggttagctgctggcatagtgacccagatgtcatttctgctgtatgggctcttgttgacatttgtagctcatcatctgtagcaaatgaagcttcttgggtgcttgctgattttatctctagggctggtatatctgatgcacatcaagtaatattccgtctgccaactaccaccgaaaattattctttacaactacatactggttctgcttccaaggaggataaattatccacaaactatggtatttctgatgatgttctggttgggcttttgaaactcttgaagacttatttatctgatgaatctgttgaaataatagatgctgcttcacaaacactgaggggtattctgtcaacagcacgggggctcaatgctctgcagtttcttgattctcccgataggtctttactcatggttcattcgagaggggtaaacattcagatagttgaacagactatatcacaaatggaacagtgtgctggtgtttcacttgatgatgcagatgtgtgggacactgatggtcgaacttgcaagcaatggctgtgcacccttgtcagctcacttatttgccactgtgaagataccatcttgagactctgtaggagtattgtttttgtcaaagttaaggctgctgagcttttgctttctagtactctagtgaacattgctggcaatgttgattctaatactgccatctgcaaattaatttcaacaaaggttgagaaaataattttttccgactccaatcattcattgaagtcaatccatctgtttctggatgcactgaatgtcattagatctttttatgttgctgaaaaagccagaactttcccttctaatactctcaaggatggtagatctgctagatcaaaaagtcgatcaccagtgacaaccccatcatcatcatggaagaaggtatactggctttctgttgattatcttgttgctgccagagctgctagtcgatgttcatgtgactttgccatactaatgtatgttgagctttggtgtgaggaacaattcaataggctggtattaggacctccagagttttccaatgaagagttgttgccacctcatgttgatctgttggttgctgcatttactcgtataaatgaaccagacagcatttatgggctcacactatctaatgagatagcgtctcagcttattaggtatgagcatgaaggtgattggagtagcgcacttgaatactatgatttacttgtaaggtcaatgccaaaggaacaccttggcactttaactgggtcggtgttgactggaccatctaccgtgtcttctagagcagaagatacaatgttgaactggaaaatgcacaaaggtcttatgagatccttgcagaaaactggatgtagtcatgtgcttgatgtctactgtgaaggtttatctcaccaaaaggggtgtcttcaacaagacgcggagtttattgatatccaatatgaagctgcttggagggcaggaaattgggatttctcctttttcgttccatattcttcttggtcttcaacccgctctcgaagtagctgtcttttcaatgaaaatttacatagttgcttaagagctctgcagaacggtgattctgaggagttccatgcaaaactttgtcaaactaagatggatcttgtcttggctttgtcaaacactagcaaggagagcacgaaatacatccactctaccatccttaaattacagattctagatcatgctactatggtttgggacctgcgttggaaccttaatcccaatcaaacttcaaaatctcctgtaaccaaggaattttctcacatatctactgtccctaaagggatacagttggagttgttggataaagagtggaacttaattatgttccaagcagaacggaatcttgatctatttgaaccttttctggcatttaggcgtgccctccttaagattttaggttgtgaagaacatcttgtaaaacatttatttcaatctgcttctgcgctccggaagggattaaggttttctttggcagcggcagctttatatgaactcaaagaactttgttttcacagagatgagagcactatgacaaatacctatttgcttgcacggcttgaagacgctaaattgctcagagctcaagggcagcatgatatggctattagtcttggaaaatacatactacagaagctttctgacaagaaaaacctgtcagatgtctatcgattagttggcaagtggctggctgaaacaagatcaagcaactcaagaactatcattgaggactatttaagaccttctatagatctctctgaatttgagaagagtacagataaaaggtacatgtccaggcagtgtcgaacacatttccatctagcacattatacatatagtttgttcagaagctatgaggaaagactctcatctaacgaatggcaagcagctctgcgattaaggaaatacaagactagggagttggagatactgattaaaagactgagaagttcatctaagggtgtgaagactgattactcagtaaaaatccaagagttacagaaacaacttgcacttgacagagaagaagcagagaaaatacaggatgatcacgataatttcttaaatctagcacttcaaggctaccaacgttccattgttgttggtggcaaatatgacctacaagtggtttttcggttggtctcgttgtggtttagtcttttctcaagggatcaagttgtgaaagcaatgttgaaaaccacaaaagaggtccaaacctacaagttcataccactggtttatcaaattgcttcgagacttgggagcaccaaagatgctcaggggtcatttaactttcagattgcgttagcttctcttttgaagaaaatggctgttgatcacccatatcatacaatattccagcttttggctctagcaaatggtgatcgtgtcaaagacaagcaaagaagtagaagttcttttgttgtagatatggagaagaagcttgctgctgaaaatttgttaaaggagctatcttcctgtcatggacctctgatttgtcagatgaaacaaatggttgagatctacattaagttagcagaactggagaccaagaaggaggacactaacaaaaaaattccgctgcccagggaggcccgcagcattggtcagcttgaactagttccagttgtgactgctaccgttcctattgatcctagctgtcgttatgaggaaggctcctttccacatttcactgggttggctgactccattatgatcatgaatggaattaatgctcccaaagttatagaatgttttggctcggatggtaacaaataccgtcaacttgcaaaatctggaaatgatgacctgcgacaggatgctgtgatggagcaattttttagtttggtaaatacattcttgcaaaatcaccgagatacttctaaaaggagattgaaaatccgtacatataaggttgttcctttcaccccaagtgctggtgttgttgaatgggtaaacggtactgttccactaggcgattatctaattgggagtactagaagtggtggagcacatggacgatatggaattggggactggacatatcttcaatgcagagagtacctgatgagtgtaggatatatagtcggtcttggggatcgccattccatgaatattctcatcgaccaagacacagctgaggttgtacacattgatcttggtgttgcatttgaacagggtctcatgcttaaaacacctgaacgggttccatttcggttgacaagggatattatagatggcatgggtgttactggtgttgaaggtgtgttcagaagatgttgtgagaaaactctctgtgtcatgagggcgaataaagaagcattgctcactattattgaagtcttcgttcatgatcctctatataaatgggcactctcaccactgaaagccttacagcgtcaaaaggaaacagttgatactgattcatgtttggatgactcccaagaaccttacgatggcaacaaggatgcagctcgagctatacttcgtgttaaacagaagttggatggatatgaagatggcgagatgagaagtgtgcagggccaggtccaacaactcatacaggacgcggtggatgttgatcggttgtgccaaatgtttccaggttggggaccttggttgtaagctccattgaaagggatgtaaattttgatcgaaggcaagagcaacttttttcactgcttatgaggttttattctttggtgtgtttttttccctcaccaccctgtcaacattcctacaaagtacagcaaacggcttttggtaccctgtaaattgatgggaaggcaaggacgacatttgagtgcaggtgggttgtaccactcctgttttagagcatgtccagactagaggatgggtgattgcatagtgaggccacagttttctttttttgttgagcttcattaataccccctctgtctaaaagtcctcatcgtttaagcgtcccgcaccaagaccaaggatgcccctccgcattgcagccgctgtgaagttaattatctggcgccgttttgtattttcaaaacacgcatatgtaatgtcgcaaaaattcagctgcttcgatggttggccggccataggggcggtatccatacatcacaccatcgtgcagcgtacattcagctgcttcgacggttgcataccgtagtttttgttcaggatttactttgtaaagaagtgaggctgttttgtcatgtatgtaaagggcttgtttcgatgtagcatgaaatacgaagaattatgatgcatttgaatataccgtgctcccctgagcaaaaaacaaatcaacagaagctaccacctggccgccacgctcagagtcgtcttggctgaaggatttcttgggtg

SEQ ID NO: 42005 - DNA, 3562 bp, Zea Mays
ccccgatcccgcacaacagtcccgctccagatcgcgccccgaaaccgtcgcccccggcctcccctcgcctcactcgattctggctggccacaaactccgccccctgcccctaccccgattatgccgccgtcgtccgatcccacccgcaaacgctgctccccgcctcgaggctcgtcggaacggacgcctggatgtcgcggctgcaacccaccgccgcgcagggaggctccgccaccagcaactcagaggatgcgcggaggccggagggcatgggagatccgccacctcctcctcggcccacgacaaaaatggcgtgggagatccgccacctcacctcctcccattcccgcgcccgcgcccgcgcctgatatggaaggtccgccgaagggactcggacgtcgaggccatggctgagccgcaccacttctccccctgcctcgcgcgcggcggccgagatggtgatggctgggttgttcgggatggtggtcctacctgccctccctgctatcctcgccccaaatcgacgagaatcatgcagcccaaatctaaggtggaggcgcctgcactgtcgatggaggtgtcgagtctgcgatggtgtctgtagatgggaaggcatggtgtgcagcggcagcggccaggtggtgtcgctgagcctgccctcctacaggctcactggcacgctctccacggccatcgggggacctctcgttcctgcgtatgctgaacctgagctccaatcggttccgcggggaggtcccagcgaccatcgttcgccttgcgcatctgcaggcgctagacctgagctacaacgccttcactgaattccagagctgcgattcccgaggccatggagcagcagaaaatatcaattgccaaaagcagccattacaatagtactcattttagggacttcatttcttgcagctgccaatccaattgcaggatgctatgactctcttaagtgatcatgaacttacacattgaaatactggtgggcctcgagaggccaggaggtggagaggagttcaacaagtactacatcatgtctgctctcctatccgtggattggtgagtgcaaacagcttcctgctaaaagttagcacggaatcggttgatacttattgatggtgcctgaaatatcctatagatgtctttagtagaggatccaaataatggcctgcaagggtttcttgaatcggatcgcacaaaactccatctgcttcagaattgagctaagcgcatcctaacatcttgactcctatatcgatcaattatttctgttactcatttgattctttagtttcgtagagggaggaacatcgtgccatcgtgggatgcaggccccaaggaacaccagatattttgaggaaatatttatgggtcatttgattttacttatgaggtttagatcaaatgatagatgatgtcccgcatgattttggaattgcatttgtattgtataaacctgaatataaatgtcattcttaaatttgtgaagtagtctgaatgtctgatagcatcaaaaattggtgaagtagtctgatagcaacataaactataattaattgagatcttattactcacactagatcttgctattattaatcatggtacaacactgtcctcgatgtggttatgatcttctattgtaatggcactaacttcttatcaggaaaacatcaaaaacaatttggaaacaatttatttggacagggagaacctgggtgggttttcggattgtgcaaactgattatatgttgctaagtgcaggacatttgggaatttttctgagggtgaaatggtgccttttggaccctaaactatggagagattagtaggatgtatggactctttgtttcaattatgtggtaaatcagtttagctgaaaatagagtacttttaaaggcataaatactcctatttctgtacttgagatcacatttatcctgatataggttgccattcatgatatttctaggttgcacatatgttccaagcgctaggactgaaaggatgccacttgctattttgctgaattataacctatgcttaatatagatgattcttcattaagtgaacaggtagctgacccacattcttgctgaattataacctatgcttaatcttggatccaatcaacaaacaaataagtgccacaagcaaacccaccctgagaaaaatacagtgcttttctttggttccacattcttggtttccaatgcatgtttctcttcttttgatatactgttttcttttaccgacacatctctatctttatatgtgtccaaagctccaaaatgaaatgatttagtgcttgcactgaaaaaggaacattctgtatgctaattctctaaaatgtgtatggctgaaatcgatatatttgcaacatacgaatgaccttttttaacaatttgatggagcagaatggaggataatctaccagttaatgtccgggaatatcaagaacttgctaagaaattaattctaaaaaaagtcattacacgctaagaaaaataatgtgcaagctactgaatttacaatcaagcaagggtcgaggagtgggagggagggtactgggccctaaaggagaagtaccgaaccgggctaaacccgcaggagaaggtgaagctagagaaggagcccatggggcagttcgtggatgacgacatcagggacctgccaagatctccatggaggagatcgacgccgccaagcccaccaaggacaacgtcgacgtccgcctcaagtggctcggcctcttccaccgctacaagcaccagtgttgttgttgctgttggtaggagcgaccccgcgagcgtgacacagacaaagcagccttcggtgccagttcagaccacttatctggtctcaaggttcttcatggccttgactctcaaagatcagagtattcttgtcaatggggatatcaatgaaggcttgcttcgcctttgtcacaagcttcatcgtttaaggaaagaatatgcatacacatttgaaagcacaagcttatcttatcagtgttctgaggttagcaggatcttgcaaggttataaggttgttcatgacataaagaggtttgttggtcataacttatactatatgaagattatgggagtcagccctaaattcacattttctgcaatctacagattcatgtaaaaaagttcaatctacaacagcatttcctcaaaatgtctaacagacttgttttcttcaggctagggacccaggggctacacatcttataactgaaaaacacatgagcagtatgttgttaacacttttttttcttgttcgtgtttcatagatagaggtatataatatggagacgaataatatttaaaccattagagacccatgtaacaataaaacagattgtttagctattatgctcactcaatatggagatcctcaagtatcttagaatcagttgggcaaacacaaatttacagtcatagttttctttgatggtttttacaaatacttggtttgcactattgatgaaaacatggtattgtttcaagccaaccttgagcattcatctgagaagtttgaaaatgtt

SEQ ID NO: 42006 - DNA, 4486 bp, Zea Mays
cctgccgcacttcagttctctatcccattatatttttaggaatgaaatgatgaagtcctgattctcttacgccacctcgggataacacgttcattcaaagccagagtagttgaaagttcattcaaataaaaaaatttggacggctgaatatcgaccatcaacaaagcaacaaaggaaatggatggcaacgacgaaccagatccccctacttctcatgtgacttctcgtgtaactgatacttgggcatttactcctcaaagaaagatttcatccatgactacccacaaaaacgttgcactagcatgaccgattagtcccccaaggtaccaatgaatacaaataattcactatattaattagttacaatgactaacaacattaatacttagtctgttgcctctaacattacagtgacctaggtctgcatctgtactttccacgacatgttcaatctccttctacggccatgtctagactttccacatcggactcatcaagtgtgagccaaaagctaacatattctccagcaaagaataaacatgagaattaaacacaatccgaagaatcaacaagagtagacgtaaacgatgcaactagaactgatcccaagaatcaacaagagtagatgttgtccgcaacacaactagttcacactgccgacagccttagccggtatggagcttggcctcgagtgtaggcccccaggaatgtcaggctaacaccaagccaagctgggttcgtcttctacatagtctcgtttgccaatatgcgatggaccccgcgctggcgagggaggtcctggccgccatcaaggctgacgccgcgggcgctctcagtggatttgcggtggcagtgatgctgttcgtggccagggtgccgaggttcaacgagggtgccgtgagtgtgctccgggatgcggtcgtggtgtcccgccgggattaccgaatgtcaaggcggtgcaagtggttgccggattgtatggaaggggaatatgcacgggccactcaatgtgtcgagaagggaatactaaaatctgtcgacgagagcattgttggcagggagcatgttgtgccaagcattgttcaggtggcttttcgcctgttagaagtctcagaaggtgatcaaggtgaggaagctggcttaggtgaaggagtaatgagcaccgaagaaataggcattaatatgctcaaatcattgtttgaggtccatgaaatggcacggactgagataattgaacagtgcaagttccggattctctcggcaaagcctcagcaaagtgtgccagttctcaggttgattggatgcttgattttgagtcatccatttccaatgctggaattcattgcacatttaaaggagttgttggattatttttcttttatgaatgacaagatatcaactgctttgatcagttgcatcttgccactcacaaagttcagccgtgatctgaaggattacgtaatactggttgtaagaaaggcgatgttcaagagggaggacatggttcgaattgctgctacaaatgctataattgagctgattattgcagaaaacaagaaaaatgaagccaatccttttgaagattcaacaagtcagccaagctctagccaacagcctgaaacacatctagagtttggtaggtgtctctttcaggaactaagtgggttgcttcggagatgtctctcacatcaggccagtgtcaaagaggtcttgtacgagggtcttatacgtactgctatctctgatccagctgtttctgacaatatccttgattttctctggcctcacttccaaaactattactcagaggatgcagaatgtcctcttaaaattggttcatgcttcaaagtagagcatgccaaactatgcattgtggaacctttagattgtctgctgtcatgtatctcaagaattctgcaaattaagcaacatagtaaatgtgaacgaccacgtgatgcatattggaagtgctttggttttgctgcttcacaagataatgaggttggacgagcatcatcaagtgatttattcgtgaaagctttatcaagcatccaaaagtatttgaggatatccctcacagagcagagaggacaaagccaagaagctggatctctttcttcaccatcagagatggctcattgtcataactttgctatgcttggaatcattgaggtttttattgatttttctgcttcaaaactggagaaagcctctggcaaatcgaaggaaatgatagaaaaagaaatcgtggagcttgttgatgcgcacagtggctttgagaaaaaaattagcagtggtagggaaaggatagcacggagaagagcaaatgctggtgatgctacagataagcacaccaacgaacccagggagaattctaatgcttcattgcagaaacatcatggaaacaggggtaaatttgctgattcgagtttgtatgaactttcggtaatgtgtgtcaagcagtgccatgctgataactacaacaatgttagtcaacattctagccaaactaaattgaaccagagctccaatttgacatcctttgtactgaaagcctttcttgaattgttgaaatcacttgcatcaaagcacagtagggacttcacaataaagctgcatggagattttaaaaagttaagccagccaataatgcagctagtatggtgttttctgttagacccaattcaagaaaatggtggaagcaagaagaacatgacccaaggaaagaaaaacactgagtgcaaaaaggatcagttatatttggctctgacatgcctaaaaaaattccttgagccaagtgtttcaggagaacactctagtgatatcattgattttctaatatctttggctccacctaatatagaggatacaatgggtactggggatcttgacaataatgataccactatggttgaagatagaagcacaagaaatgtccatgtgattttgaacatactgaagacgttatatgccagacttcttacccaatcagttttacgtgaatctgaggctgtaattgaattgattctgggtatttcaagaaaactgcaacttgaacgaaggcatcttgttggaaaatgggctacagatctatgtagaaagaaaaccatgcaaagtcctagaatggcacgagagatgttaaaactagctatacatcttacaccagctccagatgacatgattcttgtttatgaggtgtctactgagttgatgaatttaatgacctctggagatgatggagattcttctgatacatttcatatcattaactgtaaaacaaagagctcactcgctgctctctctcttcaaatggttgagtcatctcttactgaattggattggggctttggaaagcttaaagcaatgcttacattaggttatgattgtgctaacattgatgaagatcaaccagcagatgaaataatgctaaggttggctttggagaaagcactctactcgagatcaacattagtagttcaagtgctctcttcctttgcacatatgagccctatggatactcaagcagaacattttctgaaattgactgtcaagttctacaagcttttaactcgcatgtcaaagtcccagattgtacctaaaggctacagacaatccattccaagcctcaagtttcagaaactggcagaagtaacttgcaaaatgctcaccgctcccctttatgattttgtgtttcaacagaatcagcaaatacccataaagggaaacctcgccaaaattagaagagaaaccaaatgtatccctgatcttatttttcagattgaggattatgagaagtatttaatacagctaagcaaactaactaaggtaaaccttttgaggcatgccaaacgcagtgtagcaagagacttccagataaaagataaatctgggggacaacaggaagatgatcacattccagacaatgctgcagcatctgataacgaggctgataaggacgcaatgggtccaaacgcaccagttgaatcatgtgctgacgatgctcaaaaatcatatgctgacgaaaatgcatcatgtgaaagtgggcatgatgaggatgcaggaggtccaaacactccagcagaagcagatgctgatgaaatcattaggtctagcattccatatggtagtccagtccaggagtctgaatctgatagagaagaggaagaattattagcacggacgaagagagctaagacaaaacaagttgtgcaggattctgatgaggatgcagatgagtaggtttttaaacattatcaatagttcaattttcgaagcgtctattgtgggcaacatcatgccaaggtgtatatacataagtttttatgggttatcttgctgattatagacgatgaacacaagagatgtaaaatatatggttttgcaaaaattcttgtgggccatcatgttgattatagaccatgcacagaacatatgtaaaatactttattgtaaattataagttattctaattttctttaagtgaaaa

SEQ ID NO: 42007 - DNA, 1250 bp, Zea Mays
gccttttgttttgtttcctatttcctttccttctcgtgtagcttttcggccggcgaccgcgacctgaccgtccgccactgcgcacctgccggcgtctgggcgacgccccgccgccagcctgccaccaccacgacgcctgcaccggaatccgacactgtctcaaccactccgtcgtgcctatccgaagctcaacggcggagcccggtgggatagggcggaggcgctgaggcctgagggggagactggacctgggctgcacgaggtaggctgtgcggtggcggaaggaatcaccgatgagcgatgcgcaggcgacaggggatggtccgcgctgcgttggctgcggcgggcgcgtgaagacgctcttcgtgcagtactccccgggcaacatccgcttgatgaaatgcgataagtgcaaggctgttgctgatccctacatcgagtgcgagttcatgatcatcttgattgatctcgtcctgcacaagacaagggcgtaccgccatgttctgtttaataagctgagcatgggatcatccgttgacaagggaatactttaccggtctactttgatacacattgctcttgacacatgtatccttagaattcataatttttttctttgatttggtttactataaactgtctgcccaacttaagcagtccatgactatgtaatgtaagtcagaatatctttttcgaaaggaaacagagctggtggggcttcttccaggagcattttctcaacagtttccaattgcactgaggttgttggcgatgcattattgggaaacatcgtatttatattcatgttactcctgggagtgcgattttttctcaaattatctttcgatattataaggtatagggatattctgttcgctgtcatcatttcaagctacttcaagttgtttcttttcacaatgatggtttgggagtttccgtcatctgttatattcattgttgagatgtttgttctctcatcaaacgttgtagccctgagagttgtctcgcagtttccaagagcccactgtttcgcggtctgcttactagcgcacgcagcaaaatacttgacccagcgatggatccttggaacgccatgagagcctgaactcgtacagatcaatcatcctggtgcttccagcgacgtctatagctgcagatgtgctccagtggagcctaccgctacgcgctaccactttgtgttggacacttgaactgcaatgcacatgcacagtcacgggcacagatagtct

SEQ ID NO: 42008 - DNA, 1893 bp, Zea Mays
gtcgtcgcggagggctcgcgtcggggtccatctgaacatccgccagaccgccgccaccatgccgcaacctaccgccgattcgagcaccatggtcgccggcgagcatcagcaacaacagcaacctgccaccgcgcggatctcctcctcctcaaccagctccggaaggctcgtcactccgttctggaaagagaagtatgagagggacgcgaggaggtactgggacatcttctacaggcgccacgaggacaagttcttcaaggatcgacactacctggataaagaatgggggaaatactttaagggacgagatggagaaaagaaggtggttctagaggttggttgtggagctgggaacacaatctatccattgctttctacatacccagatatttttgtccacgcctgcgatttttctccacgagctgtcaatttggtcaagaaacacaaggacttcaaagctgaccggataaatgcatttgtttgtgatattgcatcagaacaactaaccgagaatgtggaaccttcttctgctgacattgtaacgatgatctttatgctctctgcagttgcaccagataaaatgcctatagttctggagaatgttagaagtgtcttaaaacatggtggccgtgttctttttcgggactatgccttcggtgaccttgcacaggaaagactgatgtcaaagggccaacaaataagtgagaacttctatgtcagaggtgatggtacgcgtgcatattacttttcaaatgaatatctggtagatttattttcaaaatgtggacttactcttgaggagatatgtgtgcacaacaagcaagttgaaaaccgttcactggagctggtgatgaacaggaattggatccaagctaccttcaccctaaattcagctagtcctcaaggtccaaatggtcaacacgatctccttgcttacgaaggagaggatgataaggtacaaatcattggggtgaaagcaaaaggccacgacttcaaaataagaatgctcaggaaggaataccagcacacctgcagatcaactggcttaatgctctgggaatctgctcaattcatgtgctgtcttttagcagagaacccttcgatcgttgcaagcaaaagggtcctggagttgggctgtggctcagctggcatctgctcgatggttgctgcaagtttcactccctttgttttagctacagatggggatgaagaatcactggacctccttagacaaaatatctcctcgaacatggagcctaatttgctgagcagaatcatggttaggaagttattctggggcaacgaagatgatatgaaggcagtccgagagcttcatggtaacggcgtgggttttgattgcataataggcaccgacgtgacatacaatcctgatgctatactccctctcttcaagactgctaggggagtgatttctgagaaagctaacgaggactcggtacctgctctcattctttgctacatccagcgacgagttgatgaggactccatcctttctaatgcaacgtcccagggtttcaggcttgtggacaaatggataaatggagttcacgagagtaacggtaccatcagttcttggttctctggtaatgatgtctgcagtgctttccggcatacagtactttcagtactgtacttcgagctgtgaatgctgctatgcatgtgcaaggttactgtataacctgaaggatttttgtagcagctgtatcaagcaacggcaaaccaactttgaatctttaggccttgtttaatgatttcaattttacgtgaatcggactgtactggaatggattgagatagattttgacttctatggatttaaattgacttagtgccatccaatccatatggattaacggtgaaacgaataagccc

SEQ ID NO: 42009 - DNA, 676 bp, Zea Mays
cccctgcgcggacgcggccccggcctcagccccggtggcggcgcgctgccccaccggccccggcgcgagtgggcgcgacacgacccccacccgatggcgcgggcgaggcacgcggccctcccggcggggcagacgcggcccctggccacagcggcgacgggcacgacccttggccccggcgtcggcgggcgcgacccctaggccacagcggcgggcgcgaccgtcccgacccctgcgtgggtgccacggccccgttcgcatgcgtcgtacgacggcgcgcgggcacaggcacggcggccgacccccggtctgcgctacggccgcggcctcagcatgcgacgacgaagccccattcgcacttgggcaacatcgatctttagaaattataaaggaaatgtgtctatcgtacgtaggatttttttggtgatcgaagcccctcttttccttcttgccagcgacatattcttcttctttctacaacagcaacttctctctgttctcgcgagtactgctgataacaagctcatcgattttcaattgttgcttggttttaggaatactgctaagtgatactggacttccttggtggtttgcgttcatccattcaagatggaggctccaacacatctcttcattatctgtgtctgtatttatctgtgtaatggcagtatggtgc

SEQ ID NO: 42010 - DNA, 784 bp, Zea Mays
aagccactctagaatcgaacggtgtgtattgttctccagtaatgtagggtaggcagagtccggagcatcaccgttcactggataattcgctcgctccgctcgatgcccgcttgtttgcggtgaagcctccggcgaacagccgtagcggaaacgccgcccgagatgtctgctccctccgccccaccccgcacggtgatctgtgtgggcgacgtccacggctacatcacgaagctggagagcctctggtccaacctccaggccgcactccccgccgacgccttcgccaccgcgctggtcatcttcctcggcgactacaacgaccgcggcccgcacacccgcagggtcctcgacttcctcctcgcgctcccgacgcgctaccccgcgcagcgccacgtcttcctctgcggcaaccacgacctcgccttcgcggcgttcgtcggggcgctgccgccgccgcccgacggctccccgttctcggccacctgggacgagtacatccacaacgaggagcacgaggggtggttccgcgggccgggattcgagggcatgcacgtgcaggggaggcggtggggcggggtcatcaaggagaggtggaaccccaagaagggcctcccgtacaagggctccatctacgacgcgcagcccaccttcgaatcctatggcgtcgcccatggttcctctgttatcaaccaattgcaatttgccatggagcctatcgtacggtttactattctgttagagttgtggtgagcttccaaaatgcgggcatgtcgtgttcatatat

SEQ ID NO: 42011 - DNA, 2533 bp, Zea Mays
gagtcggccttaggtgtggtgagcgggttggttattttgttagttggttgggtcggtaagctagtctattattcctgttagctaaattattagatggatgaagcgaatgatgcattcagtaggattaatcgatgtcgcttgtggttagctgatttttgtttgtgtggtgaaattagctctagtgtagcactctccggatgttcgttaaaatgagtgaagtatagatcatcgtcgatttgctattatcaaatcgttttggtcttggtaaggagatgggttattcatgatagttggatcgttgaataaattagtgtgttagtgtgtgatccttttatttagcataaatgcgcttgaagattatggctagatccgttgttgtgttggtatgctttgccgtggcaatatcattgtttttagaattataaagtagtcaagtcggaggctgaggtatagaattttgatgcaaatttatgtgaaaaatattggtaatcatgagtgatgtttgattaagtcaatgatttgctctgatagtcattatattctatatttagtaatagattagatgtcatgaatgaatgttgatcattactcgagtattttaaagtgaatagcattgacaagggtgtataccaatgttttaaatctttcgtggataaaaatactctcacaagattatatgttgtctgataattgccaaccaactagattgaatagtgtgatgccctattcggttagtgtggaattcaagttagtctataaacacgatctaaaaggttagtcaaattatttctattttttgttctaagtcatgggtgtccggtaatggtgagccgaggtataattaatctttttgtgttctgggctacctaataaaggtatatgccttgttcataatttaatatttcttgatatttgagttagatctggataagctagagaagcgagattatggtgcttagtcatttaccgatatctagcgtttgctccagagtgttgcaagggcctcaccattaattcttttatttcaattttgtgtagcatcatattatctcgcgccattcctctgaaggttcatacatgcgcattttgcatttcattaggtgcgctagttgagcacttgatgcgaagggccagagctgagtcaaccacaagatgatgttaagcatgggcttcttcgcaaggtgatgctgatggatgaacataaggatggatgacttgaacgagtaccaagacaaagtatgatcgtcaagtggtcatctgctaacaacactaacgtagtttttatcccaagcaagccccggtgtatttgccacctccttctgttttaaaaagttttatcaccttgaatgatgcatgcattaggtgataggagttgtgtgatcaaacagttgatgcatttccatccttgattaaaaaaccctaatacctgttttatgaaaatttagtgatgcttagccctgcttattaatttaggattgtttttaaaagatgatgtgtaacacgggatatgggagtttgtgaaataaaaggactttgtgatgatgaacccagtgtggccacgatgatttcatcattcaagtcgggtacctctctcaggtatcaagttttgggaaataatatgaaatgtaggccagacgttgagcaagaaagtttgcccgtctgtgtcgattaaggacggttcgatgtaggcctgttgtgttggagactttgcaactagccacatgcttcggtaagcctgaacttggctattccatacgtgaaaagaaaaccgcgcactgggcgtgggagatggtgggagtagcgtgtaccctcctggctagaggctggacagaggagtactatgctcccgagtagtgcagaccggttcacgttgtgcaggatctgtgggaacaattaacatatgcaagggttaagtgctacatatgtcgtgtggttagggatccccagctgggtataatcggttcgaatcgtcgttgctcctcggtcatggagactcttccctccgaccactcatcgtagttaataagtaaactaagaatatggtaaaagaaagctagaccaggacaagtgaatgctctaaatttgtaaaatctagattcaggaaaagtacttaacttgtgatgttaaatttttgcataaggatccactactagtaagcttttctgcaaaaatgagtctttgaaatttgataaactttaccttgattcccgacaaaccagcatacccttgagagtcttttctttagtcgggtaagtcttgctgagtaattgcgtacccagggttttatttcctgttgtttttcagggtgtcattttgttctgttgtggatggtgccaagtgctggtgggttcagccttcttatataagtatatcccttctatagtttctttaatgtggactgtcacttaagctagcatgtatttcaaattttcaaatattctataacattttaaagtgtaatccttttgaaacactttcttttgtaatcaactctgatgatatatattgtaacccaattataatttgtaactag

SEQ ID NO: 42012 - DNA, 452 bp, Zea Mays
cttggctggacgccccctccccctatggcagccatcctccattgcttcctcccccaagatctccccttacgcagcaaggatcgagaaaaggaggggcacgttgaattgaagaggaagagaggatcaaggagatgttcttccccatctcctcttgaagatttcttggggaaaccctaggtatggatgagatccttgttcctccctgtaattataggcttttggaggttgtggatcatgggaattaaaggattagaggttggatttgatgtggggttaggttttgatctcgaatttagttttctgcagaatggcagattcgacagtttctgttcatgccagttttccgtggtcttagtggcctcaaaaaaataaaaagtctatgtatgagtcgtagataatttgtagatctttccgtggccgcgaagaacacctcaatcggacatccgaccaga

SEQ ID NO: 42013 - DNA, 1370 bp, Zea Mays
attcaggtggtagctcaattttgtaagcattatcatttatcttttggagaaccttgaatggaccatcaccccgaggagataacttactcttacgctgttgaggaaagcgatcctttcgtagatgcaaccatacaagatcttcgggctgaaatgtaacctttttctttcctttgtttgtgtgctttgcatattgtgctgatttcttctcaatattctttcttgtctccgcatgtaaccgcttgataaggtctggtctttttgtggcatccaagttaacttgttctagtaatggtaaaggcaaaagatccatgggagtatgcggtttaaacctataaactatttcaaatggacaagaatttgttgtggaatgaactgccctgttataagcaaattcaacatgcggaaggcagtcttcccaaagctttaaattctttttcaacacagcacgcaacatggttgacaaggtacagttgacaacttcagtttgcccatccgtttgtggatgacaagtggttgaaaataacaactttgtgccaagcttagcccataatgtcttccaaatgtagctgagaaattttgtatcccggtctgaaacaatagtctttggaactccatgtaaacgaacaatctccctgaaaaacaaatcagcaacgtgtgaagcatcatcgctcttatgataggggataaaatgtgccattttagaaaagcgatctacaacaacaaaaatagaatccctccccctctgagactgaggtaaccccagaacaaagtccatagatatatcttcccaaggtacatgtggaataggtaatggagtatataaaccatggggattgaggcgggacttagctttcaagcaaacgatgcagcacccagcgtgccgctggacatcacgtcgcatgtgtggccaaaagaaatgatcggagagcatgtacaatgtatttttgacaccaaaatgacgagctagtccaccttcatgtgcttcctgcaaaagaactggtcgaatcgaacaagctgggatgcatattttgttagttcgaaataagaagccatcatgcacataatatttatcccaaccttttccatcaatgcaatgagagaaaggttctttaaaatcagcatcagtagcataaagtgttttaatgaattccaaaccaagcacttttgtatctaattgtgtaatcaatgcacatcttctagacaaggcatcagcaacaatgttatctttaccacgcttatgtttgacaacatagggaaacatttcaatgaactcaatccatttagcatgtcgacagttcagcttgccttggcttttcagatatttcaaagcttcatgatcagaatggattacaaattctttagggaacaag

SEQ ID NO: 42014 - DNA, 519 bp, Zea Mays
cgagagtcctgagctgctcatggccgtgagctcggctagtataccagttttacactctgcagaggttgtaccttgtacccacaagtcgtgtatcccatgtcgccaggttttgcaaagcccttaaacactaccaaggtgaatggctagggatccactacgatgcctttacaaagttccactagcttccaaaaacccgctacagtttatgggaagatcacttgcaagaatccctcgtctgaccgtcatcgcaacaaaatcaacccgagaacctctctgcatgcaattcccctactgcccttgcccctttcgggtaaggtagtcttccactatctttcctaattagttacccaagggcgtcccattccacccttgtggtggcacgtgtttctcgagttaagttccatgttccaattaaagataatgatgattttgacatgaacataaataaaatgacagaacaattggaacatggatataataaaatattaacccaaaatcatgtaaagcaatagcataact

SEQ ID NO: 42015 - DNA, 3282 bp, Zea Mays
cctcctccgtctatccccacagccgccttgcctccattgtctctccactcccttctcttccctctcacctcctaaaacctccattgcccgcgcgcacgagcgcccgcgtcgaggactccagctcgtgtgtccgtgcgaacgcgcggttttcttgtcacgaactgtcgctccggtcaggggattgaggaggtggggcggcggcggcggatttgtcgggcccgagattcccggacaaggagaaatgaagtacgtccttgtcaccggcggggtagtgagcggcctgggcaagggcgttacagccagcagcatcggcgtcgtcctgaaggcgtgcggcctccgcattacgtccattaagattgatccttatcttaacactgatgctgggactatgtctccattcgaacatggtgaagtgttcgtactggatgatggtggcgaggtggacttggatcttggtaattacgagagatttttggacattaaacttactcgggacaataatataaccactggaaagatctatcagtctgtaattgacaaggagaggaaaggggaatatttgggaaagactgtccaggagtggatcgagcgtgttgctaagataccagttgatggcaaggagggacctgctgatgtctgtgtgatagaattggggggcactataggtgatattgaatctatgccatttattgaagctttgggtcagttctcttatcgtgttggtcctggcaacttctgcctggtgcacgtcagtctagttccagttttgaatgttgttggtgaacagaaaacaaagccaacccagcatagtgtacgtggtttgaggggactcgggctcaccccaaatattttagcttgtcgcagtactaaggaattagaggaaaatgtgaaggagaaactctcccagttttgccatgttccggcagcaaatattatcactttgtatgatgtttccaatatctggcgcattcctttgttgctacatgaacaaaaggctcatgaggctattcttaaagttctgaatctggaaaggatggacagcatcgctcgagagccaaagttagacgaatggattgcaagagctactatatttgatacccttcatgacactgtgaggattgctatggttgggaagtacactggcttatcagattcatacctctctgtgttgaaagccctcttgcatgcatctgttgattgccacaggaagcttgttgttgattgggttgcttcaacggatcttgaggactccactgcaattgaggcacctgattcatataaaactgcgtggaatttactgaagggggcaggtggaattttggtacctggtggctttggtgacagaggtgttcaagggaaaattttggctgctaagtatgcccgtgaaaaaaatgtcccatatcttggtatatgtcttgggatgcagatcgctgtggtggagtatgctcgtcatgtcatgaatcttactgatgcgaacagcactgaatttgatccaaataccaagaccccttgtgttatttttatgcctgagggttccaaaacacacatgggtgcgacaatgcgattaggatcaaggaggacatttttcaagattgctgattgcaagtcttctaaattgtatggcaatgtcacttatgttgatgaaaggcatcggcacagatatgaggtgaaccctgatatggttccagagttcgaaaatgctggacttcagtttgttggcaaagatgatactggaaggaggatggagggctaattgcggctgcatctggacagttggatagggtcctgcaagaccgctgcactggtcatgctgtttcagagaaacatgttctgagcaacggctcatatacacccgcaatacaccaaaatgggcacccaaagaagctcccaaatggtctatcaaacggaacatactatggcaatggcaatggcgtgcatgcttaggagcatcagtggatggatcgaggatttgcaactttttgcttacagatttgcgattcctaatgcatcagttttgtcgtggctggcttgactgactaccatcatggtcgctcgagaaacaaaaagttcctgtgctcgatgtggactgtctggtagggatagtgctcgttcggtggtttctagcgaagcgcgagatagtggtttctgtgttcgccgatctctaccctcttctgtaagcaaatggagcagatttgggtcagaagagtttacatgctgtacatcctaaagaaaagctgaatgttttggttgctcaaattaggttttcagtgaggtctagagctgatgcttagaaatgcgcagcagtgcaagagagtatttcgaaattaagcaagtctgtattttgaatttggatacttttttttgtgcttgtgcgcaaataagttgatgccctgcttcatgatcatatcaatttgtcttccctctagcgcttgcttctccggagagcatctcgaagagatcccaaaatttaatgtcccaataccagagaattaggatcttctttccagaaaaaagtgaagagatcctaaaattaaatgtcccaataccagagaattaggatcttcttaaatctcttaattcttaaatctcttaattccaaaaataggtgaatcatctctaacagcttccaatatattctcaaaaatgcaatgaatagagccctgcacaactgtatctacggccatcgttcacaataatcctccctgcgccaccaaagttgcctcgcccagcaacctccgtcgttgctcacgtgtatgcagtcatttgcttgaataccggcatcaaaggatcaccgtcgctttaaatttagctaatattagaaaaaagcgtctccaataaactatgtaaatagctttttaaatttagtggctctatatgcttccaacttcgttctctatttttggatagtctgctttactgttcctttagtccttaagtttactgagtctattggattatcctacactttttctgtaaaatctatttccaagggtatctaaatcagtaaatttggctatctttaggtgctggtaggcaagctgaaaacatataagctacaaacatccaaaacttcaatccatataccacgataaactctttgtgtcaacaactagaccttgaaaaggtttgtataattgttattcttacaaccatcgagaacttaaaaaaaaatgaacgttcttctgtcaacaactataacgtcaaaagatagaaaaaatataaaactgaaattctatcaagagagctgaaacattattctgtaaggaacaaggctcggtattc

SEQ ID NO: 42016 - DNA, 2093 bp, Zea Mays
cagagcgcatccatctccctacctcgagcccaaatcgatgtccagacgccaacccgtccccgccgccgctgcgaagctggaggaaggggagcatgagctgagcatcgtcgacgcgctcctcgaggtgttgtcgggccgctgcgagctgcgacggacctccttcggctctcggcgcctgtaccggcgctttagcttcacctccatgggggcgccgccacagggaagacgcgtgcgctcctcctcgctctccgccaagtgataaattttctcaaatttgttgtgaatatggtggaatttcttgattaatgtcttggcgtggggattcagttgcctgggtaccagatatagcgatgagcgaaatttaaggtgtgaatcccaggtagcagattcacaggaaacttttggggccttgatattgattccctaatgtttgttgggattgctttcatcggttttttctttgttggatcggtcactaccttggcgtatttaggccccagagaattgatttttcaggttatatctgatttgactcaaggtagggtatgtgtccacttctttttcccctgaactaaaattcatgtttacatttaggttttagttacaaataatgatggatatttgttgctcggaatttctataaaagaattagaaacagtgcatgtttttttatctagatcacatacatgcttacagcttatatacccattgtttgcattgtaaaacaagaatatgtaagccatatagactcgtgatgagattcactcgctattgtctgttcttcagatttcttcatggcttttcagtcctagacacagcaacccctatacttttcttgaactaagtttggaaggtattctacaaaagtagtaagaggattaggttccttaataccttcagattcatgcaccgcactcatatttcatgttcgaaagtggaaactgctcctttggctggtcttgtaacatattctgacaaagaaatgttcctacattgtatgaggttatatatgctaggctgctagcaacctttatgttaaccctttcatacttctgttatagtattcattaggacaacagtcactcaaaatcattacttcattttcatttatcatttgttactctgatctcatatgggctaccttttttggaaataatgctggtgagtttcaaacctcattggaatctattcagaattcactagcagatgggttgctaaaactgacagaacaagtaacttctgacaatcggagtattgcatctttatctatatgtatgcacatttggttgaaattctatgcagtgtcaacagaagtatcgccttgcaaagtatataccagactctcatgctaaaggttttaaggacgacaagaaagtttgagtgattccctctcgaacatggattatgtaccatattctgaaatgtgtttagaggattgcaaatcaatgaggcactaaagatgcaactggaagttcagaagcggctacacgagcaactggaggtatttgaaggtgtttgagataaataatgatgctaaaatgaaaaggacaatgcgacgtcccctaccatctggtcgtgttagttctacacatgctgccatgtgggctacaagtgcaggaattgcaggaacaactttgctggcctctcgaaggttagcgctatgtcgtggtgctccactttaaagatgtgcatgccacgtctacacttcccgtctctgattatagattaggtctttactccctgatgtttagccagtgcgtgctgttacccactaggtctagccgtagtcagtgactgcacaaccacaacccgctcttgtgtattttgcgtttgcggatcgcatcgcatgttattttggtccttctatattcatgctacaaggctgcaaactgtggtgctcatacatttatgtaaccagtaacctataacgactttgatgtatattatattttgtaacagtgaacttgactatcgtagatatgtagcttgctggaacgattttttagtgtacgactgtgctacaatgactgtagcgcccggtagggcgctgccctattctagtagaaataaaggaggaagtcccttgatatata

SEQ ID NO: 42017 - DNA, 9363 bp, Zea Mays
ctcctgtcgattcctccctcttcttcctcctcgtccctcccaaatccccgaacccgagcgcgcgactccctcccgcctcccagatcttccagaacccgctacgattcgggcaatccgccggcccgcgccctagtaggtctccgcgggcgggattggttgatgcctccccgcctcgcgtgaccgctgcccgagggctggaccggagatctccgcatggatcacaggggcggcggcggcggtggcggaaacaagaaccgcaccgatctcctcgctgcagggcggaagaagctgcagcagttccggaagaagaaggggaagcggggtcccggcaataaggccgacgccgatgctgacgcggaggccggggagggggcgcccaaggcggcggaggagtctgtgcccgagccgaaatcgcctgttgggttgaagctcctcgccggggagggcggcggcgggagcactccatttgaggaagcggagaggtctcaggcggagcagtgcaacggtgaggggcctggtaccgcggagtccagctctgtggagagttccaatgcggtgcaagaacaggagacggtgcaagagcaggagacggatgatgtctccgatgcacatcatgtcggtcctagtgagcaggggatttcggagcatcctgaaagccagacagctggtggcagggatctatcacttcaggctaccagtggagacagcattggtgatgataatgtaggacgagctcagctgggtgatgtggatagcatggagctgaatgcttcttctgaaggtaatggagcagatggtgattgcaatcaactaggggaacaccagcaggtggaaatggatgctgttgaaaggccaacaagttccagtttcgaagaattcaccgagttgccaattcattctcaaggcattgaagccgataatatccacggtgaaggggctcaggaaatggtgatggatgtttctgggaggccattagatggagacatacagcatgacatcgagcccacagcttctgctgaaatagatgccgagactgcacttgaagagtcaactgttgcagcttcaattgtgattcctgagagtactgcaagaggtactgagtacgaaagagacactgggtatgaaaccgatggagtagacaaagaggctctcctagaagatccaagcatggtgcatgtaagtgatgaagctgtcactatagatgatttgagtgttcaggccaagccaacagcatcagcggatatgccactttgtgagcagaagggggatccagctttatctagaagtgcggtattgcaaggcattatgccacttcacttcgaggatatacaaaatcatatgttctctgcaactctgtcaagggattttctccagttgcagctagatgaggctgctggcctttattcagattttacacaacagtcttctgacaataccacacagctccgggtactgctaaaagaaactgaagaaagcaaactagcagttgacagagagcttcatcaatgtagacatgagctctccaaggtgaacatagaaaaggggcaacttgaactgaccatggcttccttgaaagaagaaatcaacactagcaacacgaggtgcacatatttggagagtgagctacattcctccaaggagagcacagaacaaatccacagtgaactagctaacagcagattgttactggaagctctgcaaaaagagaacatggagcttactgcaagccttgcttttgagaaagaagccaaaaaagaagttgaagaacagcgggaccatctatcttctgataacaggaagcttttatcggagttgtcaggtcttgagcttagcttagcttctgtgaaagaggaaatggatgctagcagtagcagatgtaatgtttttgagtgtgagctgcgttcctccaatgagaatatgaatcatactttgacagagttggcaaattgccaggctttattggaaacattacagaaagataatttggagctgtctgcaaattctgcctccgaaagagaagcaaaaatgaaactccaagaagacaatttgtatctatgtaatgaaaagggcaagctttcttcaaatttacgtgaactaaatgacaagttggaagtttcgtatgccaagcataagcagcttgagtcacatgtcaaagatacagaaacatactttggacaacttaccgagcagctaattgaggaaaatctgtacacaagtattagcatcgatatttaccaatctacaaccaaagacttagacactaagtacaatattgtgctgggacaattccagaatattatgcgtcaagaacttcatttggactcgtctgaagtcactactgagaatgctgaaagagccattatgacccctagacatgatagccatggtaataatcagtgtttgcttaatctggtaaatgcgaatgactcatgtaactcaactgctttgctgtcgctgaagggccatctagaggtggcaaaaagtgatttgcataaccttgaaaagttgctagagaggatctcctctaggtctgatggacgtgttctggtatcaaaactcattaaatcctttgagtcaaagggaagtgacgatgatactggactgtctgagggggagcatgataatttacaaaagtcaactcgggagatgctatcatgcctaggggagaagtttatagcaatgagctcagatattacaaaaactgaagaatatttggctgaactgtgtaacaaaattgaactttacgtcaagtctactgtgcagcatgatagagatagacaatgtactgttgttcttgaggccaaaatggatgaacttgctggcaagctgagcaactacaaggagacaattgacaatctgcacaatcaggttgctattgtgcagcaggatgcaaacagtaatgctggaaagctcattgatcaagcagaactgttgcagaaggatgcggtagaaaggatttccattcttgagaatgagagaatgtctttatcagatttactcagtgaagtaacaaacaagctcacctctttgggagatgctgtatttcctagtggttccagtgaaattgaaggtctcaatttctgcactttgagctgtgtggaccttgttgctagatcatttcaaagtcttcaggagaaattagaggctgctcaaatagataatgctcagctcaatagttctctggtggagctcaggaaggcaattggtgttgctcaagagaggagtgaacatgcagatggaattgtcaagaaactgtatgattccctacaggaacttctatgtgattcacttggaagttcaaatgaatttggggccagatatagtgttgaggaaccaattgaaagtcaatatggaagactcattgcgcatttaaagaatttgttgcatgaccaccattccgcgctgtcaactaatgctgaacttgagttgagtctgttaagtaaatgtgaagaagttgaggagctcaacatgagatgcagttctctattaaaaaaattggatgaagtttgtattctaaatgaggagcttaagtcagcttcttcaagtaaaaacgtcacactggataaactacacagtagatgccttactgtagcagaaatgttggcttcatgctcagcaaatcattcctcgacagttcagttgatatctgatattggtgaaggatctagcaaggaagatcatattcttaccacccttctcccatgcattgaggcggacgtggcttcatgcatcgagaaatttgaaaatgcagctgaagaaatccgtttgtctaagatatgcttgcaagaaatcagcatatttgaccagatttcatttgaaaaatggtcttaccccttgcccacattgattaaagaggaagttttaccaaagatatgtgatttgcaagacagattcgaccagctcaatgcactaaacattcagctggaaactgaagttgcagtcctcaaggatggcatgaaagagctggatgaagatcttggaacttcgcgatctgagcttcagaaaaaggtttctgaacttgaacagttagatcagaaattttcatctgtgaaggaaaaacttagtattgctgttgcaaaaggtaaaggtttgatagtgcagcgtgacagccttaagcagtctttgctggagaagtctggtgagatcgagaaactcacacaagaactgcagttaaaggaaacattgctgaaagagttggaagccaaactcaaatcctatacagaagcagatcgaattgaagccttggaatcggagctgtcatacataaggaattcagctacagctctaagggattcatttcttctaaaagactctgttcttcagagaattgaagaggtcttagaagaactagatttgccagagcaatttcattctcgagatattgttgaaaaaatagaactgctgtcaaagatggccattggcactcctttcactctacctgatggtgataagggatcctctgttgatgggcattctgagtctggtgtggctatgaatgtcatagacgatgagcagaactcaaattcaaattcagtatctgatgaagtaaagagcaaatatgaggaactgaataggagattctgtgagctggctgaacagaacaatatgctggaacaatctctagtggagaggaacagtcttatacagaaatgggaagaagtccttggccaaattagcatccccccacagttcaggatgttggaagcagaagataagttagcatggttaggaaacagattcttggaggtggaacaggagagagattcattacagttgaagattgagcatcttgaggattcctcagaaatgcttattgctgatctagaagagtcacataaaaggatatctgaactcagtgcagaggtggttgctataaaggctgagaaggatttcttttcacaaagcctagagaaactgagatttgagttccttgggctctctgagaaagttgttcaagatgagtttgttagagataaattgcgaatggatctatctgaactgcgggataagttcgctgaaaaaaccgaggagagcaggcactaccatgaaatggacaccgaggtccacaaactgctgaatttggtgcaaaacacattgcaggatagcactaactctgaaatttcatctggaggcatttctgctgtgttgtgcttgggcaaaatgctgaagaaacttttagatgactatggcactcttctgtacaagtcgactgaaggcaattttgccgagagagacattcagttagaggatatcaagccatctaaggatgcctctaaatcggacactggtgcatacgagaaagagatggaactaaattctttaaataacgagttagatcatgctcacaacaatctggccttagcgcaacaggagtgtgatgaagctgtggagaaggcacaatcactaatgatggaaattgagaccttacatgctcaaataagtaaattgcaggaaagtgatgctgaacaaatgcaaaagaaagagatggaactaaattctttaaataacgagttagatcatgctcgtaacaatctggccttagtggagcaggagcgtgatgaagctgtggagaaggcacaatcactaatgatggaaattgagaccttacatgctcaaataagtaaattgcaggaaagtgatgctgaacagatgcaaaaatatcagtcgcttgtccttgaactagaaagtgtgggtaagcaacgggacaatctacaggagcggttaaatcaggaggagcaaaagtgtgcctcattgagggagaaactaaatgttgctgtcagaaaagggaagggtctagtgcaacacagagacagcttgaagcaaactatggaagagatgaatgtagtgatagagaaacttaaaagtgaaagaaaacagcacatagaatcacttgagaccgagaaatcatcgttaatggatcgattggctgagaatgaaaagagcttgcatgaaacaaaccagtacttgagtggactattaaatgctttaaatagagtggatgttgctcgggaatttgatatggatccaatcaccaaggttgaaaagatggctaaatttttccttgacctacagtcaacagtggcttcatcgcaaaacgaagtgatgaaatcaaaacgagcaacagagctgcttcttgctgagttaaatgaagctcatgaaagggctgacaacctgcaggaggaattggtcaaggcagaagctgcactttctgaatcttctaaacaatacattgttacagaatctgcaagagctgatgctgttcgtcagcttgaacttattatgcatgcacagtcacaaacaaggaggaggcaagcagatcatttgctggagttaaactccaccagcagtcaactaagagaagtctgctttgaactttcacactgtcttgttaatacattcagtaaggatgtggaccttatctgctatgtggtgaacttcatgaggtcttctggtaaattgatggatgacacaaatacgatggacataccgattgcctctaaacatgttttgtccaaccgcacaaacaacaagaaggctcatattccaaatgctcctttggaaattaagacggatgatacggatgacagtcagtttttgcatcatcttgctattgcatgccatgctttatctgattgtgttaaggactgtaatgatctcaaaagaaacattgatgagcatgacttttcagttgaacagaaagcaaccgagctatttgatgttatgtccaccttaaagaataggttcacttctcagcataatgagttggaatctttgagagcaaaatttgttgaactacagtcagagatggaagaaagagacaaggagattatatttgcacaaaggaatatgagcttgctatatgaagcatgcgcaagttcagttgctgagattgaaggaattagtgatatatatcctggtaaacacagctatgctgttgaacattctgcagatgaatgtataaaatcaatcgttgaacagttagttatggctgtaaaaacttctcagaacagtaacgaaggtagcacaaaggagctgaaggctattgttcttgagttgcagcaggagcttcaagctaaagatgtccaaattagcacaatcagttctgatctatcatatcagttaagggtggctgaatcttctgcaaagcagttctcagttgatcttgaagatgcaagaatggagctccaaaatttggagaaacaagttgatgtgttgcagaatcagaagaaggatttagagactcaattaaatgagcttaaaaatatggaatcaatggcaagtgaacaacatggaagaattgagaaattgactgatgaattaagcagaaaagatcaagaaattgaaggtttggtgcaagcactcgatgaagaagaaaaagagcttgaaatcttggagaataaaagccttcagttggagcaaatgctgcaagagaaagaatttgccttgaagacctcagaagtttctaggaccaaagctttggcaaaacttgcaacgactgttgacaaatttgatgagctgcatagcttgtctgagaaccttcttgctgaagtggaaaaccttcagttgcaattgcaagaaagagattctgagatctcatttctgcgaaaagaagttacaaaaagcactaatgaactgctaaccactgaagagagcaacaaaaattattcatctcagctaaatggtttcatgaagtggttagaaagagaactgttgcagttcggcttccattctgagagtgccaatgattatgattacactcaatttcctgtctatatggatatgttggacaaaaaaataggatctctgatagccgaatcagatgatttaagggttacagttcaaagcaaagattctttactacaggttgagagggccaaaattgaggagttgatgcgtaaatcagatggtctagaagcttcattgagccaaaaggattcccagatagggttacttcgccgggacagagcatccaatcagcagagcagatctataaatttgcctggcacttcagagattgagcaaatgaatgacaaagtaagcccagctgcagttgtcactcagattcgaggcgcacgaaaagtcatcaatgaccaagttgctattgatgtagagatggagaaggacaagccttttgatgatgaagatgatgacaaagcccatggtttcaagtcattgactatgtcacgctttgttcctaaattcactcgaccggtatcagacagaattgatgggatggtctcaggcgatagattgctcatgaggcaaccgaccttaagactcggcgtcttgatatattggattgcactgcatgctttgcttgctagttttatttgaactctgtaaagttgtagcgatgttctgggcgagtgactgtacagtactcttgtgtctatagcaagttatctaaacagaagcagattgcactaataccgtgattccttttgaaaatgttaccgaatactttagccgtattggcagctgcgagacatcttcaggatgcatttcacccatcatcctggtgcttgatcctgtctagcttagtttgtgttcaattgatacaaatggtggaagagaactgaaggaagcagcagcaaagaaccccctgtacatacatttttgtttgctctattctttgcttttagaaaaagatgggagggattctacatgctagcgactactgactacactatatggtacaggattacagatgtagccatctcctggcgagtgactgtacagtactctgtgtctatagcaagttatatctaaacagaagcagtttgcactgataccgtgattcctttcgaaaatgttaccgaatacttgagccgtattggcagctgcagaaatcttcatgatgcattttcacccttcatcctggtgcaaatcctgtctagcttagtttgtgttcaattgatacaaatggatggaagagaactgaaggaagcagcagcaaagaaccccctgtacatacatttttgtttgctctattctttgcttttagaaaaaagatggagggcattctacatgctagcgactacttactacactatatgatacaggattacagggaagtgacatgtagttttggaagttagggttttgggatggtagcaggtcatcccctcccttgagttggccccctcaatcccatcatgccttctaatctttttcgtttacatgtataacacagtgattatatcatttattgtaatccacatagtgtgcaatgggggagcttgcacattttattaacgtcaagtgaagcctgagtgctgaaagttcatgtcaggtctgatttggggagtgcgttgagccctggcgtatgctgtgaggcttcagcggttgttttgctactgttgc

SEQ ID NO: 42018 - DNA, 738 bp, Zea Mays
tctttcttacgtctgcattattgacagaaaaggtttagtacgtggatttaagatccatgacggtgccactactcaacaaaaaaaaataaaggaaaaaaaagaagaggatggactgaaatgggccgaatgaacgtggaccggacttggggaggcaatcgaggtcttgaaatcggttggaacctatgcttgccggactgggctcagattattattatttcgatgcctccgtgaaaaacgaaagaagccgatcatcggctcatcgccgcgtccaaccaggtgggtggtggtagacgaaggaacgccgtgcggcggagtacgccgccggcacacacacacatctgacgtgctctcgtcccgactcccgcggatctgttgcaggcacctgacctccacggtgatcggcaccacgcgtgcgggggtcctggtctcctggacaccccagcgcgacggtgcgagcgaggtgacacgggaacgggcggaggatctgatctcacgtcagctgacgctacggcggtatgtgttgagaaaccctaatgaagggttatgtgggtaaataccggctttgcccctgaggggtctcacatctctatataaggagtctgtacacctctttatattacagagatcaaaaagaggccagaggtccaaccctatatccagtgtctcgtgtgtttcttctgtcgtgcttatgggaagagagacggatcatctacagcttcttgcgcctctactgctgac

SEQ ID NO: 42019 - DNA, 266 bp, Zea Mays
atccccggacagtggagacttgagctccgacctacaacctaagtcaggaagtgaacattatgaataaaaatgatgttgtattgatgagatggtgaaattagactagatgcaaacagagtctactaatatttaatctgacgttaaaacattgaaagtaaggactcacattagtaagctttttctgcaaaagtatctaagttgattcttgctaaaagcctctccttgattcctaaatccagcatacccttgagagtcttttctttagt

SEQ ID NO: 42020 - DNA, 502 bp, Zea Mays
cccgtacggtcgtagccgctttctctgcctttcgttcatctcgtcgtcgggccgccgtcctagcgtccaggagatccggacgaacaccccctcgccgccgcaccaaggctccaggccaagcgtcgcgcacaacgcactagttgcagacttgcgcagtgcaggtcgcgccgcaccaaggctccagccttcaggccaagcatcgcgctcgcgcactagttgcagcttgcgcagtgcaggagcacatcaacacatcccgtcaccgctacaaggattgatcaagcattcaaggttccagctcaagagtccagagaagtgtgtacacgagcacaaaaaaatattccaggtttgtggccacatgctcgcctaatcgcctacaggctacagatccttgcctagctccagccactgtccattgctgtcagcaccatgacttcctcctcactgcctcaaagttcaggcgacgacgtcgacacaagaagtggcagccaacaggaaacattgt

SEQ ID NO: 42021 - DNA, 1083 bp, Zea Mays
ctagaaatttgctttgtacgaccttaaaatttctactgtggacatccaactgtgtgcaatggttctaaaattgtttttgcaaatggatctcaagacccatggcgccacgcttctaagcagaaatcatcagacgaattgccatcatacctaattgagtgcaagaactgcggacactgcagtgatctctctggatgccctcaagctccttcaaacattgaaggtgattcatccaagtgctcacctcccgaagctctgaacaaagtaaggaaggagattgtcgatcacattgacctgtggctatcagaatgccaagagcaaggacatgacaaggagccatggctgggaagcagatggagcatagctgctatttgatcaatctgtgaagctataagcatgtgctgctagagtaaccaaggcaaatatgctttctttttcttgcagcactgtggtttatcgtttcggcaaacaatgtgggctgctgagtaagaggacatatctggtgcacataaaaaattggtgcacatggtgcatatattaaattatcaccactcattttagatctaacgtctttagttgatcattcaatttacaaataacaccttccaggcttccaccactacacaccaccacgttggagggtgcttttagcaaaatataccaaacaactagaaacgttagatctaaaatgagtggtgatgatttaatatgtgcagcatgtgcaccaatcttccatgtgcattagatatgttctcgctgagtaatccacctgtggcgaataaataaagcagtcagttctcagtctgtcatgatttcagggcctgtttggaatgcgggagtttttatttttcctattcctactctccttttttttcttctgtaaaattgaacagctctttacaaaatccctgcgtgattcctacgaattcctgcgtttcaaatatgccctcaaaatgtgagcgatgtacacacggatggcaagtttgtcgatatacatatatgcatctgtcgcatgccctttagcatgagaaacgattgcgatgtttctctgcccttggtgctaattttctgaataaaatctgaaag

SEQ ID NO: 42022 - DNA, 577 bp, Zea Mays
tgtgccttgcccttgcgtggtggtcatgcagtggggaggtcagaggtggagtatattagttttgttttcccctgcgataagtcctagtaaagccacaaatagcccattgcttgccatgacagttgaagcctagaactgaaacttgtggtgctctcgttgcttccatgacctgctcactgtgcctcaccattcttctatacatgtgttaacttctccagccactcctgtcgcccagttgctttgttcaagacagatgctcgacatcgtcctcctgtgtagtgacctcggccaccagccccttcacctcacagtggccagaacgtagtcgtgccaccacaattcatcgccgtgtttagtttcatcgtcgaccagccaacgtacgtctttcccaagcagtttcatgtacccaccgagaacttggactgtcagagctcccagcagaaggagtgtaaattaaagatgaagtggttgtggaagaggagtttgttccagtgcttgttcatcaagtggatggagctatctaactggttattgggtagaagatctagaatctcttcactacaataaggcaagcccc

SEQ ID NO: 42023 - DNA, 2421 bp, Zea Mays
ttggattcgtccccaattctctgcctccgccgccaggacgacggcaaatccgcccacgcaaaatatcagcccaagtgcccatcgcccaagcttcctagctcacccgccgccacccactagccaaattccccatccctctcctgccgccacccatcagccacatctctccctcctactccctctccggcagccatcatcagacaagatccctcccccaccatcgagccatgtcgagtcgagtgcatcttctgcaagcacggccatcttacgaaaccctagctggctcgaaggaccactactgtccggcgccctgaacaacttggcatgatgccgacgaagggtggagcaaacaaatcacaatgacatcgggtagtagatccaccattgcatccctatgaagaggagcgccttagacaatgtatgaggaacaattcgaggttgcaacaacttggaattcctgctttagtcagcatgtgtgggaacataaattccatctctaggaacaaaaagccaaataacagggataatgaagattctgaatctgagtatgatccttcacatgacgattctattgaaggggatttgtttgaccatgatgatcataataagaagggctcaaaggacactaacagaagaactattcacatggctcctggtggaatcaagcctcgaactaagagagtttatgcagagcaacatactactagaaatacaaggtcaaagaaaagcattgctcagcctgacacaagtctaacacgaagtgacatctatgtgccaccaccctcgctatctcatttgacccaagttggagaagttgctcgtagcattgaaaaccatagaaagactagtgttgaagctaatggccctacccaggttgacaacacccacatggccaatcgagatggctttgaccaatttgatgacaacatgaccaaccaaggggaaggcattacccagcctggtggaaaaggagtaaatcagcatagagaaaggggacttaatatgggacttggtctccaaaggatgaaccgagctcggcgtggcaaactgccaattgtcattactgaaggaaggataaggcctgtggcaccaattgttgctgcaaagtttgcaactgagtgcaacattgcagttcggaatcatgtgcttgtgcttaagtcatggaaggaatacgagaagcatcctgggctctttaaattgtttacagcaaaacttagtgcaaagtttgatatcaatacagaagatgcgctagttaaaaatgcttgtttccaaatgatgaggaatgcactgcgccaacaacgatataagctgaagaaacaatattttgacccttttccgctacatctagtgaggaaaacatctcctatcaaatcgacaagtgatgaacaatggaatgaccttgtggaacattggaaaggtccaaaaaatatggcgacatgtgaacataacaaaggcaaccgaggcaaagttaagttccatcaaacaactggatctcgtagctatatggttcatgtagaaaatttgggggacaagtacatggatcaagaacctgatgcattggatctgttcaaggagtgccactacagtaagaaaaagcaaggctacacttccactgtacaactggctattactcaaatggaagacaagcgatctacaccaggagaaggtgaacaaccaatgtctacgactcaggttgtagctgatgtgcttgctgagaacacaaagaagaatcggtttcttcaaaatgtgggaatccaaaatgcacgacctagatctagtgtacaaaatattgaagcacaacttgaagtagagaggaaggcaaatgcagagcttcaatcacttgtcagcatccaacgtgagcgcatggatgtattattaaagcaagtgcatgaagcagaactggtaaggattagagagcaagaagagatgaagaagaagcaagatgccatggatgctcaacttgagcttatgctaagtcagattcaaccaagttaaagctaactagtatggggtgttaggctttgttggtacttctcttttgctgatgctattgcattctattgatggataaatacgtttcaatccattttttgtctattgtgctgctagagtagctttagcggcatgtgtggtgtgttggagtggcttacgtgtcagtggttggatacttgctgtaatgacatgctattggatacttgcatgtaatgacatgctggagtgtggtcagtattttttgtgatgagatgctggattaaaatctgagttgtgatgtaatagaattcaacattttgtcattatgttctggattataattaatatatatttaaattattgtgtttgcaaaagctgcgaagctgtccatgggctagaatgttaattgtaatgggctgaaacaaaatgggcaaaaattgcaataaaaag

SEQ ID NO: 42024 - DNA, 2697 bp, Zea Mays
catgactgtgctactcctttccgaccttctcgtcccagtcgacgaaaacgaacagcccctcgctttagattgccgcaagttcccccattcctgtagatcgccggcccctcgctcggctcggccatgtcggccggctccacggcgtccctcctcgcggccgtcatctgccttgccctcgccgtgcttgctcccgtcgttcctggagatggtgccacattggaatcagttccagaccttgtgaaggcaatgtacctaaacgttgaaagcttcccttgtgtgaggctgttgaatctttctggtgaaattggctgttctaatcctggaagtgagaaggtcattgcaccaattgtaagacttagaaaaggcagtgatcaattggttcaaccatctactattctcctttccttagatcagatgtcagatttctttctgagggtatccaatgatccagaacttcaccagaaggtggcaggtgtattggttgagtcaaatggtgtcaacaatgacttacaagagctgtctcctgatagaaaatttccacaagatgattttgcaccctactcaaatcacagccatgattggaatcctgctggatcaggtatcatgtggaacaaatataattttcctgtatttctactttcagaagagagtacaaacactcttcaaaagatttcagaaaaaaatgagaagactggcaatggatataaagcaaatgttgcagaattcgaccttgttatgcagacaaccaaagctcaaacacatgattcagcatcctgcctcaaagaacaatcatgcttgcccttaggtggacacagggcagtgtatggacttcattaccgccacttaataacggatctacagagcatccgaaacctttaatattggctattgcgtctcaagactctgcatcattttttcgggaccgtagtcttggttcagattctcccatatctggattgattgctttgctcactgctgttgatgctctttctcacattcatggtctaagcaagcttaagaaacaggtatgatatgactactgaaattttgtttgttagtcgcttccataatattatgctggatattcttttctatcttacttagagcagcttgtgttcgctgtttttaatggtgaggcctggggttatcttggtagtcggaaattcttacaggaattagatgaaggcgctgcttctgtgaatggaattagtagcttaaagattgaccaggtactggagattggttctgttggcaaggctatacttgaggaatatccatcattttatgtgcatgctgaagggaatccatcagcttcaaaggaaatattagatgcactgcaaagtgccagcaagtctcttggttctgataatgttaaagtaaaacaagcagcttcatcaaatcctggtgttccaccatcttcattaatgtcattcataaggaagaacatgtcaacttctggagttgtgttggaggattttgattcccacttctccaatagattttatcatagctatctggataactctgtaaacatcaattcctcgtcaatagctgcagccgccgctttggttgcgaggtcgatgtatattcttgctagtgatgactcagttgttgaccttataacactaaacactataaaagtgaacgtttcattggtcgaagaacttattggatgcctgcttacttgcaatcctggtctttcgtgcggccttgtgaaaagattcatttctccaagcaatccctgcccaagtcattatgttggtgtttttctggatgacccatctggcacgcagcttccttcatatgcagatgacacgtctcggtttgtatggaactttttggcagacagaactaattcagcaggcaataaaagctcatgtactggaaagtgtggtgatgaaggtgaagtatgtgtaggggcagaggtggagggtggaggtagatgtgttgtatctacaaccaggtatgttcctgcttattcaactcgggtgaagtttgaggacaatgcatggcacgttcttccagcgaactcgtcagatccaatgggtgctgcagatcccgtgtggactgaaagcttctggaacactattggcctcagggtctacgccgtgcaagatccagcttacgattggcttattcttcttgccgggctcggaatcactgctgcatcttattgcgctgtacactttggcagagcatacatttcaaaggtggcgaagcttgactgaagcgtcagtgagctgccccactgataatgggtatctagagctggaaatagaactaattaggctggcaattcgtagaacattagcagcgcatgagacagggtgattaagctgcgagaaagccgcaataaattatgagaaccaagcacacccgaagcaagtcctccatcattatgcggacgtccaggtcgatgtaatattaatgaaattgtgaccgtgttacgttttgtgttgaactggtactggtaggtaggttatgacacgcctctagctctagttggtggatgtttccggtaacgtgtttttctgtttgtggatcctgcctactcagttttggttgcgtataagcctgcccctcatgaatcctatgagtttgtgaacaccaactattatactggtgacttgcattcgcatgatgattggatcttgtatcgtgtttggtttcgccgctccagttgccactgtttgggct

SEQ ID NO: 42025 - DNA, 3225 bp, Zea Mays
gaggcgacccgtaacaacgcggagcgtcagcctatagccgtcgctcccgtgtcccgtccgccgtcccccttcctctcgtattcgcttcgccgcccaacccactgtgcaccgctgccttcccgaccgttctcgccgccgccgtctccgcgcctgccaccccgcgcgctcggccaccggcgcccacggtgcggctcgatcaaggccagatcagaacccgccccggtccgcgtcacgccgatattttctgttttttggtacggatctagggttttcctgctgcggattcgttcgattcgctcatggccgctgggcgccatgggggttacagggactacgaggcgagggagcgggagctcgacgcggaggcctccaggaggagcaaggagcagcaccaccatctcggcggccgccaccgcgacgtggaccgccaccgcgatggcgggcgcagcaggggtggcagagactttgccaacggctacggtcgccgacgctcgccgccaccccggagccggctggcgggaaggcttggtgaccgtgagcctggcgaggtgctgagcggtagtgcatctgatgactccggtgggaggccgcatagagggagggagaatggcgtgctcagttccggcagggagggtgatgtgatggcagtcactgatgactccggtgggaggtcgcataggaggagggagaatggcgtgctcagttccggcagggatggtgatgtgatggcagtcacagggatatcttcgccgagcaagaagaggaaattctcaccgataatttgggacagggatagcccaaagccaccacattctgatgcagccagggacaagaaagctgtagaacctgtgccttctgagctccctccgcccccgccgttgcctccacaagaccacatcacactgaggttggctgtggagaagtcacttatggatatagaacctactgttggtacagagagtgctgtgcagttgctggaacatgaggtgaataaggtgacagagcaggaagaggagtatgcaacaatgaggaacatatcgacttcaagatgggctggtgctaatgatgatgatgatgatggggcagctccagtgaagaagaaaagtctgtctcctgcagactcctctgtggcagggcagtggaaaagagcaagtccagaacctggtgaagtatctggaggaaggacaatgtctaggtcatctgactctgggaaaatgagtaatgatgagaaagaagactttgaagcaaatgaagatgactatatggatgtcgacaagggacatgctagtgacagtgatacagaaaaccgtatgtcagatactgactcagacaatgaaatacacagacctgaaacccctgaaagagagaaggcaccacacaggtgtatcaatatgcttcaagattgcagaagtgttgatgagtttgagaggctcaacaaaattaacgagggcacatatggtgttgtatacagagcaagggataagaagacaagtgagattgttgcattgaagaaggtaaagatggagaaggagcgagaaggtttcccattaacctctcttagggaaataaatatcctcttgtctttccacaatccttcaattgtggatgttaaggaagtagtagttggaagtagtctagatagtatttttatggttatggagtacatggaacatgatcttaaaggtgtcatggagaccatgaaacaaccatatacccaaagcgaggtaaagtgtttgatgcttcagctgctagaaggtgtaaaatatctacatgacaattgggtgcttcatagggatctgaagacctcaaatcttttgttgaataaccgtgggccccagaattgttgttaggaacaaaggagtattctactgctattgatatgtggtctgtgggctgtataatggctgagcttcttgccaaagaaccgttattcaatggaaaaacagagtttgaacagctagataagatttttagaacactcggcacacctaatgagaagatttggcctggctatgctaaattaccaggtgtgaaagtaaattttgttaaacaaccgtataatagactaagggataagttcccagccgcttctttttctgggcgaccaatcctgtctgaagctggttttgatctattgaacagactgctgacttatgaccctgataagcgcatatcagcagacgatgctcttaagcacaaatggttctctgaagttcctctgcctaaatcaaaggacttcatgccaacattccctgctcttaatgaacttgacaggcgttccagaaggtatctgaagagtcctgatcctctggaagagcaacgtttgaaagaactgcaagggaacataggcaaccatgggctttttgggtgaactagaagcacttgattgggtctgcaagggaacataggcaaccgtgggctttttggctgaactagaagcacttgattgggtcctgtccgtcctaactgttatgcttcacactgaaatcctgagttcatgaggttagatatcttctgaggcttggtaccggtttaaatggataaggtttctccttgtggcccatcatagaaattttgttgcaggattaacgcttcatccagatcgatcataaaagcaaatataatctacctgcatcataaggtgtggcgtgttggcttttattggttacaccagtttcacctttggaacttctctatgtaaaatattccagattggtacgttgtaaacaatgtccagtgtgttggatttaaatttaaaacgaaacatcatcattattagttttctttatgctccttgtgccttttcttttgatctttgcgttttgtttgcaagagacaaaagaagcgcaggggaaggatgccttttgctttcatcaggaaatcaatggcattaatacaacttagaagctaagctgtggctgcttcaagataggaagcttgatggctgtcagcttattgtacctaagtgactaaattttgtggagggccttcaaaagtgttcatctcttactagtgaaccatggtgggattgccgagccgttcggctaaccgggctagccgataattggtggtggtcggctccaccttatcactgttttggattttgaatttggtaaagtttgtaaattttgaaaacttttgatgacattttttgtataaatactatatattatttgaagattttctgctgaaaccaaatttcaaaatacacaacgaatttcaaac

SEQ ID NO: 42026 - DNA, 868 bp, Zea Mays
atgtcgagggggccctggccagacctagagggggctatgtcaccaagcgcaagcttctatacagcggccaccatgctcccacagaccacctacttcatgaccgaccccgacaagatcatcgacttccccatccctgggcccccctccttctccgctgcctcagaggctaccactgtcgcagcgcccaaatggatgcccacgcccgcgttttatcggttcatggacaaaacaaacaacattgtatatactaacaggtcaaacaatggacttcagaacacagaacaacaaaagatatccaagtatatcaacacacatgttacagaggctttccctatgagaaaagcaggaaagtttggtaacgaaaattgcaagaatattgtgaaggtttctaagtctgttgattctgcaacagcctcaagttttgcaccatcttcactataatgtttcaaggaagttgagaaatggagtgaaaatgctttgtggagtgtatctgagcttcatgttggcgatgagaagcagactggttctaacaaatctgatatggtaataataattcttcctcttgcaacttatcatctgttataacaccacctaagatttcagatttctaatgctttattttaggaaagagtactaaaagggtttggagcttgtgatgcttttgtggcttctaggctcaacgcccctaatggacaagttggtggtattacgtttaagtcttcagacattgcccttctaatatgattgttcgtaggaaagaaagctcctctggattttgcctcaaagactagcttgcagtttgtttcattgtcaccagtcaagtggagtcaaggtttcctcaattgcggatgctcgcttgctgctatgt

SEQ ID NO: 42027 - DNA, 2229 bp, Zea Mays
cgctacccttgggcccaaagcacacccgaccctaccccgcagggtggcggcgcccaccccacccgcttgtcctgtcctccgctccctcttgaagagcgtgccccgcgccccgccataaagaaacatcgagcaacgcgaagaaagctgccgctgcctgcctcctgctagcagttgcagcccccgccgccgcggaggcggaggaggtgaaatcaaccgcggttgtccccggtgggcgcaagcgaggccagcaggtcgcggaagtcccaattcccagctgcggccctccagtcggttccgtgccgcgccggtgccgatgcggatcccgcggcggaagggcggggccgggccgctcgctgtcggggtgcccagcaggcgggcacaggtggccgcggtcttcgcgctcgccacgctgctgggggtctccgtgctctacgacgccgcccacatcgccgcctcgctgcggaggcacggcggcccgacggcgtacgccaagctctcctcctccgacggcgccgcctccgtctccggcgtcgcgagggaggaggtggcggccgtagagacgctcgcgccgccggcgagggcagtggggtctgacggcgcggatcggaccgacccgcccccgcacgagcagcaggaggaggccgaggagggcgcggcgaagcccggtgcctccctgcagcaggacgcgccgctgaccgaggaggtggtggaagggggaagcgggggccacggcggcggcggctcgcaggagcaggagcaggatcaggcccaggggacctgcgacctgtacaagggccgctgggtgtacgacgagtcccgcgcgccgctgtacaaggagtccgagtgcagcttcctcacggagcaggtcacctgcacgcgcaacggccgccgcgacgacgactaccagaagtggcgctggcagcccgacggctgcgacctccccagatttgaggctaagttgcttctggagaagctaaggaacaaaaggctgatgtttgtgggtgattctctgaatcggaaccagtgggagtccatggtgtgcctggtccagtcagaggcaccatgggacaaaaaatctctcgtcaagaatggttctcttaatgtcttccatcttcaggagtacaatgcaacagttgagttctactgggctccgttcctagtggagtcaaactcagacgacccagacattcacagcatcagcgaccgcatgatcaagccgacatcgatcgcgaagcatgcggcaaactgggaaggcgtggactacctgatcttcaacacttacatttggtggatgaacacaccgcagatgaaaaccgcacggtggatctttctcaaggaaacacgtaaagtacgatgaaatagagcgtgtggaggcataccggaaggtcctcaagacgtggtccagatgggtagaggcgcacattgatcccaagagaagcacggtcctattcatgagcgtgtcaccggtacatatgcagctggggcagccccaacgccgtaaaatgcttctccgagacgcagccggcgatcaactacacgaagaaactggaggtgggcacggactgggacctcttcgcggccgcccagcgcgtgacgaggtcgatggagaaggtgccggtgcgcttcgtcgacgtgaccgcgctgtcggagatccgcaaggacgcgcacacctccgtgcacacgctgcggcaggggaagctcctgacgcccgagcagaaggcgaacccgaggaagttcgcggattgcatccactggtgcctccccggcgtgccggacacgtggaaccagttcgtttatggtcacatcgtgtcgagcccgccgccgccgcaggatcaacctcacagataacaacagctagaaatacttctcgtgcatcagtgtgtttgtggtcgacgccataagttatttctttttcccctaatagtaggtttagaagcctatgctgctggactggttcacctgagcatctgttggaaggtcagatcgcactagtgtagccaaaaaaagcagcagtaaatgtggttgtttgagcctgaggggaaatgcgcgcttctgtgcctcgtgtttctacctggcacgtgtacataattttttaccagaatcattcgtgaaattgtttctattcgtgtcgaaatatttctcttaaaaggtgccagaaatttgctgcttgtgtcatgtgggtctgacctggttgcctcgctgcacgggaaaaaagtgaaactgaatcta

SEQ ID NO: 42028 - DNA, 1102 bp, Zea Mays
ggaggatagatggctcatggctgccatcgtctaggctcaacatccgaaagacgggccatggtcggtttccttcctcaccccagcggcggacatctatccgaaaataggccgcacctcgtccgctttgctccttgttcatccttcacctgctgatggcggcagcggcgcggccatccaacgccactcttctcgcgcgcctccgggacggcacggccaagttcgagctgctggatgactctgcgtttgcgcttgcgcacgcgcccccggcctggccccgacttcactgctttgccaggattgccccctcgttgaggggtgggtggtcggcagcgttgaacaaggtggagcattacggggttcagagggttaccggcgatggccggtgcatgtttcgagcgctggcagcttgtagtccgatttttgcatctttgatttggagagttttagaagggcttggtgcagttgtgaaagtcatcaggtcatgggtttcaagcagcctctccatttttatggaggaaggctaaaggaatggcaaaaaacaaggggattcctttggccccaagggaggaggtagaagatgcagatgatttacggatggcagtgaaagaaattatatgtgacagcgagactgggcggcaggagtacgaagaagcagttatagcaattactgtggagcaatcattgaaacgctactgccaaaggataaggaggcctgatttctggggtggagagtcagaattcctggttttgtctagactgtgtcggcagccaataattatttatattccagagcgtgagtaccatggtcggggtaatggtttcattcctatagctgaatatggtttggaattcaccaaaaatacaaagcagtggaagaaaaagacaccagtaagactattatacagtggaaggaaccattatgatttgcttgtgtgacatagttgcagagcaatgtatttttctagtgcccgtcgtcataccatggttgtattattttttgtttttatacctgtgcttgtgccccttttttgagccaccaatggaattgattcagttatccaaatatcagtttcgaaatatatatatttctcgtttgcatgct

SEQ ID NO: 42029 - DNA, 1754 bp, Zea Mays
cttctcaacaagaaagcaaattccctgtccgaatcctcattttccacgaaccaaaatcactatttcttatatattctattccctctcctctctgcaccgcccgccgcgccgagcacgcctctccctccctcgatccagatccaccccatacctccgcggcgccaccccttcccgctccttctagccggcgtcggcgcgggccggagatctgttttctccggtaggaaaaatcctattgcgatctaaatatgggttcgaaatcggtagacgaggtgctcgacgccgccgccgccggagtccattactccgcactccgtctggacggccaggcttccgcaacgacgtctggcctggagaacggccaccaggagccctttgtcattggtgttgctgggggtgcatcgtcaggcaagagtaccgtgtgcaagatgatcattgatcagctccgtgaccagcgtgtcgtggttgttacgcaggagtccttttattatggattgacggatgaagaattagtacatgtccataattataactttgatcatccagacgcatttcatacagagctacttctctcttgtatgcaaaacttgaaatgtggcaaagctgttgacatccctaactacaacttcaagacatacaaaagtgtcccaaatgcaaggaaggttaatccttcggatgttattattttggaaggaattctagtttttcatgattcacgcctcagggatttgatgaacatgaagattttcgttgatacagacgctgacgtacggttaacaaggaggatccatcgtgataccattgacaagggtagagatctcaaagctgtgttagaacagttctcaaaatttgttaagcctgcttttgaagacttcatcctcccaacgaagaagtatgctgatgttatcatcccacgcggaggagacaatgatgtggcaattgacctaatcgttcagcatattcggactaaacttggacaacatgatcttcgtaaaatacaccctaatctgtatgtaattcagactacttatcagatacgaggcatgcacacaataataagggatgctgccacagcaacacatgatttcatattttatgctgatcggttgattcgattggttgtcgaacatggtcttggtcatcttcctttccaggaaaagcaggtcatcactccgactgggtctgtttacactggtgtggagttctccaaaaggttgtgtggtatctcagtgatcaggagtggcgaaagtatggagaatgcactacgtgcatgctgtaaaggtataaagattgggaagattcttattcatcgggaaggtgacaatggacaacagctcatctatcaaaatttaccaaaagatattgcaaataggcatgttctgctgttggaccccatattgggaacaggaaactcagcagttcaagccatctcccttctattaaagaagggtgtacaggaagcaaatatcatatttcttaatcttatttcagcgccccaaggagtgcatgtggtgtgcaagagattccctagaatgaagatcgttacttcggagattgagtccggtctaaatgatgatttccgtgtcgtacctgggatgggcgaatttggagacagatacttcggaacagatgaatatcagtcatcgacgccatttttctgtgacgataaaaatcgtgtcagctattcccccttcctcttgcccctcgtaaggatgctcatacgaggtttaagcttgcggtcgagtaacttcctg

SEQ ID NO: 42030 - DNA, 910 bp, Zea Mays
attctcctccttgtgcatcctcgcctccaccgaaagattgtgcgtcgtgtgaggatgggagggaaaacctgaacccgttcgaccatgggtggggaacgcgtcgccaccatcgcctggtgctcgcggggcgtttggggaagcttgccagcgtgccctgaccctgtgtagtgaggtcgttgggcgtgtggccgtctggtgtgtgcgaatcttcaccacgtcgatccgccatcgtcgccgagactgcctggcgtcacgtccgtgccccctttccgccttctctgttgataattcctgttccctagctgcgtcacctcccttggtcggtaggagttcaccccacgcccgaaatttgacttgcggtctctgaaattgctcgccggtgtggtgatttcaccatgaaatcgccctcccgtagccggaactccatactgcggaacgcggccgacgaagccatctgtgtagttcccaatcactcacatttcattttgtgctaatcggggctggggtttgtcaacgggtgatggggcgtgggggggttccggcgtgttgcgcgaccgtggatgggcggcgccgccgtgtagagacgtccgaggacgaagacgcgctcgggccgttagattggcattggacgattacgattagtcctcccaggaaatgagtctggatggttagatcgggatcgggcgacccagattaagtccagcgtacctcttcgtccaactggatcttggccgtagatttataatccgatgcatgtgaatgaatcccgataatatagaattcaagccattgatcttgatcctgcagctcaaatttaataccagcccaacctccccttgatctgttctggaccgtacagatctaatccaacagcccatatccaccgataccctttcgcggcacatttttc

SEQ ID NO: 42031 - DNA, 2028 bp, Zea Mays
atcctgttctcgaagccgtctgaccttgcccctaccccgctcattatcgttgcgacgttggcccgtccgacatgtccgatctcgctcgtcgtgacaacgcgacccatcctcgacggccagtgagcccatgcactcaaccaatgagatgatattggaaaaaaggaacctatcttgtgagattcagattcctgttgcatgttctgctgtcgatgccctcaaattactggatcacattattgaagctgctagagtagtgtacatggacgaggagatgatgtcggtccattctctgcgaggaatgaacttgaatctctaaatcttttgttgaaaacaatgaaaaaattgcttctaacttccaacacggctgccaaggaagtactgcagatactacatgatgagatagttgttaagctcaaatctgttggaaagtctgacaatgcttggatggttgttcaaacacagaaccatgatgctgaggattctcttctgaaatggggggagcatcttggtattaaatctagattgcagatagcctattttcagggagctggaagaggaatgatagcttctgaaagtataggtgtgggggatattgctcttgaaattccagagtccctcattatatctgatgaacttctttgtcaatctgaagtgtttctttcattaaaagattttaataacatcacatctgagactatgttattattgtggagcatgagagagcggtataatctaggttcaaagtttaaaccatattttgatacgctcccggcaaattttaatacaggtttgagttttggaatcgatgcacttgctgcattagaaggaacccttctttttgatgagataatacaggctaggcagcacttgcgccagcagtatgatgaattatttcccttgctatgcacaaatttccctgagatattccggaaggatgtgtgcacatgggacgattttctgtgggcatgtgaactatggtattcgaacagtatgatgattgttctaagcagtgggaaattatcgacttgcctggttcctgtcgctggacttctgaaccactcggtatcccctcatatcttgaactatggtcgagtagatgaagctacaaaatcgttgaagtttcccttgtctcgaccctgtgatgcaggggagcaatgctttctcagttatgggaaacatccagggtcgcatcttcttacgttctatggattcctaccaagaggagacaacccttatgatgttatacctttagatcttgacacatccgcggatgacgaggacatcacagctcagtcttcggcgactacaagccaaacaactcatatggttcgtgggacatggctgtcgacatccggaggattccccacgtatggcctgccccagcccttgctgacctatctccgtgctgctctaggctgtgaggtagacgaacccgctgcagaggctgatatgaaggaaagcgacaaggtggtgctggagacaatcctgtccatattcagtcccatgcttgaagcgttgttgcctgagcaagatgatcccaaccgggagagcgccagttgggatgtgaagcttgcatcggactacaaagacctgcagaggaagatagtatcgtccatcgtcacttcctgtacctcagccttggaaaatctgtagctcttgctggatggaagtgcttcactgatgaattgcaagagcacacgccctgggggccctgttggaatgcctctgctggcgtgtagatggccaagctattgcagcaactgcaatctgtgaccatctctacaaaccgaagctgctcgtcgtgagttgcttcatccgaggaatgcggagacacggggtcgtgctcccgaggctggcttgtgtgattttatccgcacctgattgttaccgcatactgtagttgcgtttggtgaaagaaagctacttttgagctagttcattgggagccaaacttgctttttggtgaacgaaagctactttggaactaatttcgtcgcaatgtggttgtggtccatgtgctcctgaaat

SEQ ID NO: 42032 - DNA, 453 bp, Zea Mays
gcatatcatgacatacatatatctcactcattgcatttattagattgcaacctcactgatggagagtacatgctcattcccgagcaaggagctatccacgaggaagaccaggagccaactcccgagcctgccacagaggatctccccgcagccccagcatttgaagccaagccccatttttatgcataaccagtacacttcaggacatggtagacggtgtgacttggccttccaccctgccaccgggctgggcgatcgagtgggatgctgctccagcaggagaggagcaggagaagtagtgggctaggccttgccctattcctcatcattcggcgttttcgactatccgctgccatttaaattatgaacttatttcagtttacctaaaaactccgatttatgtaataactctagtaccttaatttccagtttcctgctttattgtattctctc

SEQ ID NO: 42033 - DNA, 3240 bp, Zea Mays
cgtgaccccgctggaaggcttggctcctgtgatacgcctcccccactcccacgtcccacccccacacacgctgctcacagcgtctgtgtgcgtgtgggtgtgctgttgctgtgttcgttctccctcctccgaaccacctccactccacctcacgggggttttggttggggttttgctcgctcccagtcccacaaggaaccaaccggagagcgctcaccagcgacgcccgccgcgggggctgacctcggcgtgcatggtagtgctcgaatcgcgcggcgccgcggaggtctcatagaagtggaaagatcaaacaagaatttgggattgttaattcataggatatggctgatttagtttgtgctctatgcgacaatggaggtgaaattataagctgtgaaggcaggtgtctgaggtcgtttcatgcaactaacgattctagtgaagactgtccaaccttaggatacagcaggcagcagttagatgcggcggaagtttttaagtgcaagaattgtgagtatggaatatatcaatgctttgcttgcggaaggctaggctcagctaaaactaatcctcccgaggtatttccatgtgcttcttcaacttgtggtcacttctatcatgcgatgtgtgttactcagttactcttccctgaaaacgaggccaaagcaactgagtatacagcaaagatagccagtggggcaaaatttgcatgtcccctccacaaatgtggcatctgcaagcatggggagaacaaagaggatagggagctacagtttgctgtctgtcggcggtgcccaaagtcataccacagaagatgcttgccaagggaaattgtctttgaggacttcactgagaatggtcaacatgttttccaaagggcgtgggatgaccttcttcccaacaatcgcatcttgatatattgcttgaagcatgatattaatccagaatatcgaaccgccacgagaaatcatattaagtttcctaaggaccctactgctctcaagaaacccctcaattgtgtcaatggaatgaacacaaagacattgaagatacgacgtcttgaggagcttccttctgcgccattgtctaatgttaaaagattttcttactcagtgaaaagttctactttaagcaatttgaggaataaaagaaggaaagtgattgtgcctgaagaaaaacctgtggttatgacaaaactccctgagattgacagtgacactgagatgagaatgtatgagtttgcacaaaaagcgtcagctggtataacaatggatgatgtgaagaaaaagctagtggtaccatcaacatatgcaccaaatctgcagaatgctgataacattacactggaaaatgtggaaatatatgttgaggccgttaaaggtgctctgcatatgttagaaaatggtgcatctatagcagatgccaaatctgtctgcccacctaatgttctgtttcaacttgtaaagtggaagaacaagttgagtgtagttcttgcaccatttcttcatggcatgcgatacacatcgtatgggcgccacttcacaaaactggacaaactccagctgatagttgataagctacagtggtatattcaaagtggtgacacggtcgttgatttttgctgtggttcaaatgattttagcttgttattgagggaaatattggaatcttctgggaaaaattgcttctacaaaaattatgatctcatccaaccaaagaatgatttcaattttgagagacgagactggatgactgttcaacctgatgaattgcctacaggatgcagactggtcatgggattgaatcctccctttgggactaaagcctctcttgcgaaccagttcatcaacaaagctctcactttcaagccaaagcttataatactcattgttcccaaggaaactgaaagattggacaagaaatacccaccatatgagctaatatggcaggactcagatcagctctcgggaaagtcattctatctacctggatctctggatgctgacaacaaggtgatggagcaatggaatgtgtcacctcctccgctttctctgtggagtcgtagtgactgggctgagaggcactccgagattgccaaatcaatggggcacatctcgaatgaaattggtgacttgcaaagggatctggctgcatctatacataccacagagcacgtggaggcagatgatgcaggggttgcaggcatgtctccatgtttactagatcagttgttgtctgacacgttccatgacccaacaacttctccaggggactgctggaatgataccagcggccgatcacggcaaccatgcaactacgaaacagcaggacaaggaaggggcgatccaacctacaatcatacaacagaaagctgctctgatatgagcatttcattgtcggagagtgatgttcagagaaaagatcaagctttgccaatgccagagcatggaggcaccggctctgatatgagcatttcattgtcggagagtgatgttcggagaaaaggtcaagcctgggatgctgttggaagtgcatctgcagggaaaccaactgctgatgccgattacgatgaggtaacatcagcctgtggtccgtatcatttctcgggggttgcgggcaaacaggcagctggagttgagtactggatgatacaagactcaccagtcctggaggaaggagagctgagcgatgcaccggctgcggcgggcaggcctgcatctggcacgcgtcataaaccgacggaacacacgccagcagcagcaacacccgaagctgcctcctggtggagtgggcagctggatcatcactcgcggtctgtggccgctaggcataatgccagaactctgccaccaagaaacaccttccccggactgcgcttgcggcaaggatgcaacacctctcgtaagttcctgccccaaggcatgggctatgacgccatccatgaagggccatcgaatggctggatcgaggaagaagactactagtataggtgctaatgtgcctcgccctcgcgttgtcttcacaggtgtgagctagttaattctacggccggctttaggagtatgctgctgaggttatgctaacgttggtagagtcggttctgcggtctgtcattggatcagtattttcgttaactgttgcattcatgccctgtatctgtttctgacgaaacatcttaccatggacttgattgcctttgagcctgaattatccaggatcgatctttcgttgcctgctata

SEQ ID NO: 42034 - DNA, 557 bp, Zea Mays
gttcagattagctatgacccacaagacaagtctgccttcgtcgtcctcaaccctcgtagtcatagagcatcagaggcgccgctcctttcggatctgggcgaggtgagctgcggcgccggacgtcgcggggaagaggatgaactggatcgggcgcaagatccacctctacaatgtcaccatcggcctctacatgctcgattgtaatgtgaagactcttttccaagaggggaactaccttgggcaaggcagtacataaccattgtcaaacaagatctgcttatgatcatttgccccatgtaattccatgtgtttaattagttgttaactacttaactgaggagctgagaagaagtaatttaagcaagtgttacagtgtagccatcgtctgtatcttccctggaagccaatagtctctagtgttaatttcaatggaataaaaaaaatacgttgtgcaagttttgattaatttttttttttggttagttgtttccttgctttgctggcctgcggactttacttgtaccatctgttgagttgatcactgaagtacgaatcag

SEQ ID NO: 42035 - DNA, 3362 bp, Zea Mays
tccttcgcgctggaaggatacatctgtttgctggtgccatcagaatgaactgccgctttcagtgacatgcatgcgatgcatgcttttgcttttcttcaatggtgaatgctgagccatgctcgatgggtggaattatggattacggtgttggtgtgggcaccaaatcttcaccacgcagtatggccattgagaaagctcaggaggagctcaggcaggagtctgatgttcgcgatgaatggaggagagaattggaatttctagagaaagtatgcccgcaccagggaggcaacccattggatttcaattttgcacatctggaaacggtcggtgtacactctgcttctctcacaaatcaagtagaagcacaaactgtgataagtgacgcgaaaggtagtttttctgcatcacctcttggagattcggtcgagagtaccgacaaaccaggaggttccatgtgccgcgaaaccaacacagcagacaatcttatgcttttgggtggaggtaaaaatgacattgcagaagaaaaggttgtaaaaagaggaaccaaaagattaaatgcagcacaacccaaacattcattgcccagtgacggtcacaaaaacacaaaaaagcctgctgcttctggtttgtcacacctcggtgtcaaaagccaggcatatgttcggcgcaacaggtcaaagccaagtagggagagcgggaatgtcacatctattagatcttctatgatccctgctaaagtctatgagccaaatgatgaaaaggttacagcacagaaaaacaatgcagacgatcatggtgtattgtccgtttctagtataaaacagtctggacctaaccgtgacattgcaccaaagagtatagcttctgatgaccatgcagcaatggagctggatggcattcaaacaattctcgaaagtgaatgtgtggtgaacgacaaagtaaacaaagctggcaataataacaaagctaaacagttgtcatcaaatgacacaaatcatgatcgtttccttgttgggtgtggtgagatagctgctgaagtttcatctgcggaaacccctgatgccaatttaaaagttgttataaagccatgttattctagtgcatctacatatgatgagaaagagtcatgtgctgttcacgaaaaggctgatgatggacacctggatgaatgtatggcccatatccgtgaaggggaacttggtcacagcaggacacttccttgtgttgtagaagcttctacttcacacaatgatgtagtgggcccatcttgtgaaggcactgtgaatattgttgatgaacatgcagatggggacatcaatactgttgcagggaagattgattctcatgaagacctagatagtagtagacattctaacatgattctcaaggtaagtggcacatcgatagatttcagcaggcctgcttctttgaaggaaagttctgatcttgtacgacctgaagccagtaatatttctcatgtgaaagatgaaattgaagtttgtaacagtgcaatagttgcacagaaagacacagagtgcttgtcttctggccgcagcatgaacattgaggaaagtccagtttcggttaggaaaaatagctatgttgggaattcaaactctgcacatcctatatccgtaggcatcgatttgtctgatgccttgtctccaccaaaaaatgatgaatctaacgtggagagtgagattaaaaaatatgagaacctgaataagatggaaaagaaggcctatgaagattctattcttaaaaatgctcgcgttatagaggcaaatattaaaaaggctggtcaacgatctccctgtaacattgctttagagaagaggagaaagagtcactgggattttgtccttgaggagatgacttggatggctaatgatttcatgcaggaacgactttggaaaagtgtggctgcagctcaggtgtgccattggattgcctctgatgcccacgccaagtttgaaaaagcaagcattctgaaaaagcagaaagctgttataaagatcattgcaaagggtatcatgagtttctggcgttcagctgaggctttacagactgctgacaggacagctaaagtgatgccacacaattcaactatgctggaggagatagatccttcgggagtcaaagcaggaaaagaacagggtcacaattcactggaagcgaaagaatccagccagcaacggtcacagattcatgattatgcagttcgatttcttgaatataatagaacagctgatttgcacgtgttgcctgaagctccaccaactcctgacaggctgaatgactttggagtcttgaaagtgtctgatcatctctcagaagaaagtctcttttatacagtagcagcacctggtgcagtgctggcatacagggactctctggaatctcttttcatgtatcacaaggaagatggcaatgctgagctcaacgatgactatgaggcatctgcgtgtgattctgttgcagtttgttcagatttgccccaggagaatgcatacgaggaggatgaaggcgagacatgtacttttctttctcctaaagcatatgttggtggttccatatcgaatatggttcacaagaagaaacatgtaatgccacaaaggattagccttgctaggccatatgaaattggtacctatgtgccttatcaaccatgcatggaaagcaagtcaaggaaccaaccattgttatcaaatggcaaaagacctacttctttccttgcaattcctccaaagcgcacacgcacagctgcaaggcaacaagttgtaagcccgtttcatgctggtgctagtgtaccgccccaagatttctcaagtggcaacacaaactcctaccaagatgatcaaagttcattgcatagtgagtctttgccgtggaggaacatggattttgaatctacagttgattctgatagacaactgccttatgatgctggtgaaatgtgcactaaagtcaacaacaagaaaaaactgaagaactcaggatacaaaattgctcaaaatgcagccaatttgtatgtgccaacttctgcaaagtttcagggccatatttatgatccaagaaagcaaatgcaagttgacttggttaataaatatgagcaggaatatctcaagaagagaacagatgtgcaccaatatggttcaaatggaaacaaagttgcatatggtggtcaacatgcttctaagaagcttaaaatggggaagcaagggatagatatttcacaagaaacttctgttgcatcacagatgagcaacatggcacatcctgctagatttataaagatcattgctaatagggatcgtgggagaaaatgcaaagcactaaagataacacgcatactgggttga

SEQ ID NO: 42036 - DNA, 3818 bp, Zea Mays
gtcagctttctgcatgatggtgattgctgatattttgatccttaaataaacaccttttatttgcttctctgcagagaacgaacgagggagcgagcgagatggatatggcaggccgcagcaggtgcaggtgcagcagccatggacgactcctctggctgcttctcgcgtgctcgtgggtggcagccgcgagaggccagcaaacagcacggactgatccagccgaagcggcggcactgagcacgatcctggggcgatgggggctgaaggcgtcgccggggtggaacatcagcggcgagctctgcagcggcgtcgccgtcgacgacaccgacgtcgacaacagccccaccatcaacccgagcatcaagtgcgactgctcctacgacgacaacaccgtttgtcacatcaccaaactgagagtgtatggcttgaatgttgtcggccagataccagccgagctggagaacctcacctatctcagtaacctgaacctgatgcagaattatttgacaggtcccgtgccttcattcatcgggaaatttcccatgcagtatttatctctggctatcaatccgctatctggaacacttccaaaggaacttgggaaccttactgatcttatctcactgggcattagcttgaacaactttactggtgaacttccgcctgaactgggcaacttgtccaaactggagcaaatatattttgacagctctggcttcagtggtccattcccttcaacattctcgaagcttaagaacttgaagatcctctgggcatcggacaacgacttcacaggaaaaatacctgatttcattgggaacctgactcagttggaagttctgagatttcaaggaaattcttttgaaggcccaatcccaaaaagtctgtccaatctaaccaaattgacaaccttacggatcggtgatgttgtgaatgggagctcttcattgtcctttatcagtaacttgacatctttggatgtcctgtatgcgacatactttcgctgtaaaggtactgtttcatatcttggcagtgtagatggtactgacattggttatctttctacaggatattaagaaattgcaggatatctgatactcttgcaacagtaaatttttctaatctagctggattgaccttattggacttgagctttaacaatctcacaggccaaattccacagtccatactgaacttggacaaccttggattcttgtttctcggaaataacagcctttctggaagcctgcctgatattaaaagcccttcactaaacaatttagatttttcttacaaccagctctctggtagctttccttcttgggctacccagaataatttgcaattgaacttggtggccaacaacttcattcttggtagcagcaacaacaggtacttttaaatatatagccttccgagagttgtattttttaattgagagcattaaccttcttattttcttgaaatgagcagcattctgccttcaggcctaaactgtctccaacaagatattccttgtttccgtggctctccggaatattcctccattgccgtagactgtggaagtaacaaatcatttaggggcttagataatactttttatgaaatggatcctacaaatattggagctgcatcatattatgttactggtcaaacaagatggggtgttagcaatgttggaaaatttaatgaggccccaaatggaagttatacaatagatagttccgagcagtttcagaatgcactggattcacaactgttccaaacagcaaggatgtcaccatcatcgctacggtactatggcattggacttgagaatggaaattatactgttgagcttcagtttgcagagtttgcttatccagaatcacccacctggcaaagcactggaaggagagtttttgacatatacatccagggtggtctgaaagaaaagaatttcgacataaggaagacggctggtggaaaatcatatgttgcagtatataagaaatacaatgcaactgtgtccaaaaacttccttgagatccatctcttctgggcaggcaagggcacttgttgcattccaactcaagggtattatggacccatgatctcagcattgagtgtgacaccaaattttactcctactgtgcgaaatggtgttcccaaaaagaaaagcaaagcaggggcaattgttggaatagtaattggtgcttctgtcttaggactagccgccttagctggaatctttatgctggtacagaagagaagaagagcagcacagcagcaagaagagctttacaacatggtgggaaggccaaacatcttcagtaatgctgaactaaagttagctacagataatttcagttctcaaaatattcttggagaaggcggatatggaccagtttataagggtaagctacctgatgagagggtaatagctgtgaagcaactttcccaaacatcacatcaggggaaaagccagtttgtgacagaagtggccacaatttctgctgtgcagcaccgcaatctagtgaagctatatggttgctgcattgacagtagcacccccctgctggtctacgagtaccatgagaacggaagccttgatcgagcactctttggtgacagtggtacgatccttgactggccaactcgcttcgagatcattttaggtattgcaagaggcctaacctatcttcatgaggagtccagcgtgcgcatcgtgcatagggacatcaaggccagcaatgttctacttgacaccgacctcacgcccaagatttccgatttcgggcttgccaagctctttgatgagaagaagactcatgtcagcactaaaatcgcaggcacgttgtaagtgcattgattccacccttgcacatattgtgtatatagctgcgaatgctgatctgactgaatatcctcctatccgttgtcaagtggctacctggcgcctgagtatgcaatgagaggccatctgactgaaaaggccgacgtcttcgccttcggggtattggcaatggagactgtcgcaggtcgaccaaacactgacaattccttggaggaacacaggatctatctctttgagcctgggagctgtacgagagggaccaagcacttggcatcctggacgcaaggatcgaagaatccgacggtgaagaggcagtcatcagagtcatcaatgttgcgctcctctgcacgcagggttcgcctcaccagcggccaccgatgtcgcgtgtagtgaagatgctcaccggagacatcgaggtgcctgaggtggtgaccaagccaagctacatcactgagtggcagcgcaggggtgggaacagcagctatgttaccagcggctactctggcgacacgaccggggagttcagcgtgcagagggagacgactgcgcctctcaccccgtcgccggcgatgactggagtcatcgacgacgggcggtgatttgatcgcaggctgatgcatgctgggtttggtttgatctcaagggaaaatctttgaaccatagttgataaagcgcggtgcgcggagaataagagtcagctttacatgctacttggctgggttaatgatagatatcatataacataacgtaatgtaatgtaatatgctacttagctaggttagtgatagatacgatatgatatgccatcacagccttggcgttcaccgcctctccacagtggcggatctaggttttttatacaggatgtaccgtaataaattttttatatgcaactgtatatacagttttatagtagatttgataaaaagtttgataaatagatataatgtttagcaatcaacagttaagtacgaaagttgca

SEQ ID NO: 42037 - DNA, 2316 bp, Zea Mays
cccatccagccattcttccgttaatgctcggcccacgaatccgaataatccccatcctgaaagaaaataaggacaaaagaaaacaaaaggaaaaaggaaaggacaagtgctcgaggttcttgctccgctcttctttctgcttgctcatcccagccccagcccactgaaactctcgaatccgcggccgccccctccgcgatcccgacgtccgtccgccttgctcgaactcgacgctctcttctcctcaacgcgctgcacctcccccccccctcccggggggcggcgcggccaccggggccctctagcgcggctgggctgattaggtggagtagaatggaggcccggccggagtgggatctacgcaagatgagggagctgcgcttcgttgtgttgcttctggtgatatccttgccgtgcttctctgcatccgatcgccaaggagatgctttatatgatatgaaacaaaaactgaatgttactggcggtcagctttcagattggaaccaaaatcaagttaacccttgcacatggaattctgttatttgtgacaataacaacaatgttattcaagtcactttggctgcgcgaggattcactggtgttttgtcaccaagaattggcgaactccaaaatttgagtgtcctgtcattggctggtaacaggattactggtaccatacctgaggagtttggcaatctatctagcttgacaagcttagatttagaggacaatcttttagttggagaagtaccagcttcccttggcaacctttctaagcttcagctgttgatactgagtcaaaataatttcaatgggtcaattcctggtagcatagcgaacatttcaagcttgacagacatacgcctggcatataataatttgtccggtcagatacctgggttgctgtttcaagtagcacgttacaacttttctggcaatcacttaaactgtggacctaacttcccgcactattgtgcatcgaacacatcctatccgagtggatcccataactcaaaaattggcttaatacttggaacagttgggggaattttagggcttattatcgtgggagctctgtttctaatctgtaatgcaaggaggaaaagccatctgcgggaagtttttgtggatgtagcaggcgaggatgatcgacgaattgcgtttggccagctcaaaagatttgcatggcgagaactgcagattgcgactgataatttcaatgaaagaaatgttcttggacagggaggttttggtaaagtgtacaagggagttcttccagatggcactaagattgctgtaaaacgactgactgactatgagagtcctggtggggaggctgccttcttgcgtgagagcgcttgttggtctatccatttatgcagaatttgagtgttgcctaccgcttaagagattttaagcctggagaagccatcctggattggccttcaaggaaacgggtggctataggtacagctcgtggactggagtatctgcatgaacactgcaaccccaagatcatacaccgtgatgttaaagctgcaaatgtattgcttgacgaggatttcgagcctgttgtcggcgattttggcctagcaaagctagtagatgtgcagaagacgtctgtgacaacacaagtccgcggaaccatgggtcacatagcacccgagtacctgtccacagggaagtcttccgagaggacagatgtttttggatatgggatcatgcttcttgaacttgtgactggtcaacgggctattgacttctcacggctggaagacgaagatgatgtgctattgcttgatcatgtaaagaagctacagagagaaggggagctggactccatcgtggacagcaaccttaaccagaattatgacggcgaggatatcgagatgataatacagatagcgctgctctgcactcaggcatcacctgaggaccgtccatcgatgtctgaagtggttaggatgctggaaggcgagggtttggcggaacggtgggaagagtggcagcatgtggaggtgacaaggaggcaagaatatgagcggatgcagcggaggtttgactggggagaggattcgttctacaaccaggaagcgatagagctgtctgcaggtagatgataatctgtggaaacggatggttgtaaatgcgcaacgaagtggtgcctgctgtgccgtatataactattatttgtagagtagctattagatagatatgttcataagattattcaaacaaacttgctcggcgatagcatgaatgtggatgaaattagatgcataaataaataaatggaagtagagatgaaagtggtaa

SEQ ID NO: 42038 - DNA, 6620 bp, Zea Mays
attgagacacagacagagcagctgagcaccgcacacacggacgccataccctagattggagcgcaccacgggcgccggcggccggcggcccgccaccggtgattgacgccccctcctcggtccccagcgcggcgagcaggctatttgaggagatgccgtcattgtcatccttactctctggctccaatactgcgagtgctgagcttcctctaatcccttgcaagctctgcaatggggtggtgattgagcgggtctccaaacaaccagaaaccacgtcgaggaagttctaccggtgcagagccaagaaaacggatgggtcttaatgtgattttttccactggcaagcgagctatgttgttttgttaatcgaggatgggtttgtcagtggtgatcgacgccttgagttgttaatgatcgcacttaatgatcatggcaaagccgttgaatctctaaccaattccatcagagagatgaagaaaaagctgtccaacctggagttagtgatggaagagctggataacgtgaaaaatttgatgaaggcagccatggttgaaattgaggaaaacaagaaatcgacagctgctgcattgaaactgatggagaatgagctgcaaaagctgaaagggtcaactaaagtgaaacctaggaatatggcacagtgttttctgcttttggcattgattgggtggtttgtggtgggacagatgaattggggggaggaagcatccagccgatttctgctgagaggctaatgaacataggatggacttttcaatagctagatgtaatcagaactggtttatattttctctgctaacatggcgtagtagccaggacactttgcttgtcgattattatttttagcaagatgttggtgtgaagttggaaaggcttcccacggtccgaagcccgtgtcactttccagagtctacagtgttgcgttctgaatgctagtgttatgttccatgtcccgtgtcactttctggagtctaccgtggtgctcctgctaagtgttgagtcggatgttgattttgggaggacccacgggcgaagggcgtgtcactttcatgaggtatagtgttgggttccttctcagtgtagcgttccttcaaggtgttgagttttagggtcccatgttgatttttgggaggacccacggtccgaagcccgtgtcactttccggagtccacagtgttgcgctctgaatgctagtgttaggttccatgtcccgtgtcactttctggagtctactgtggggctactgctaagtgttgagtcagattggcggatgttgattttgggaggacccactggcgaaccccgtgtcactttcataagttcatagtgttgagttctggaaggtagtgttacgttccatgtcccgtgtcacttctaggagtctacagtgttgcgttcctgatcagtgttgagctctaaacgatggtgttgcgttgctgatcagtattgagttgggcgcatgttgattttgggaggacccacgggccaacgacgtgtcactttcatgagttataagtgtcgggttccaggtcagtgttgggttctgaacgatggtgttgcgttcctccaaggtgttgagtttcaggggcccatgttgatttttgaaggacccacgggccgaaccccgtgtcactttcatgaggtatagtgttgggttccttatcagagttgcgttcggatatatagagttgtgttcctccaatctgtgctgggtttcagggttccatgttgatttttgggaggacccgcggtcggaagcccgtgtcactttccggagtctacagcgttgcgttctgaatgctagtgttatgttccatgtcccgtgtcactttctggagtctaccgtggcgctcctgctaagtgttgagtcggatgggcggatgttgattttgggaggacccacgggtgaagggtgtgtccctttcatgcggtatagtgttgggttccttatcagtgttgcgttccttcaaggcgttgagtttcagggtcccatgttgatttttgggaggacccacgtgttggagtctaccatggggctcctgctaagtgttgagtcagatgggcagatgttggttttgggaggacccacgggcgaagggcgtgtcactttcatgcggtatagtgttgcgttcctccaatctgttgggtttcagggtcccatgttgatttttgggaggacccgcgggttccatgttgattttttggaggacccgtggtccgtagtccgtgtcactttccggagtctacagtgttgcgttctgaatgctagtgttatgttccataacccgtgtcactttctggagtctaccgtggggctccttctaagtgttgagtcggatgggcggatgttggttttgggaggacccacgggcgaacgacggtcccatgttgatttttggcaggacccgcagtctgaagcccgtgtcactttccggagtctacagtgttgcgttctgaatactagtgttatgttccatgtcccgtgtcactttctggagtctaccgtggcgctcctgctaagtgttgagtcagatttgcggatgttgattttgggaggacccacggcaaacgcaggcttcccaaagcggcatggtcagttcgagctcgccctggggatgccgccgctctgcccatcgcagacgccgtggagcatcgacggcgacgtcgcaggacatgaggtcgcctaccagctggtgacccgaaacacccaggcggcccgccgccacgtcgagataacggccctgacggtgccgacattttggggcagcgggcattgcccggagccgctcgtcatcctaagaaagggcagcacggtggcctgctacggctacccccggagccactcgtcgtccatgaaaagggcgacgaactggcctggcaagatctggcggcgcggggatcgaatggacggacgacaagagcgagcgaagaagtcctggcggcttggtgagaaaatggtggcgctgggggcgatgggaacggaggtgcggatggtggcagcagtggagaatgaagcgacggcgacgtcgagactgattgtcgtcgtccgcggccatggggcggagcaccttccggagaagtcgagacttatacgattaaaaaagggaaccgcctcaccgattctgatgtcgaaggtaacctggtgccgatccgcaggggtgaagaagaaagccaacatgccacaggggaagagtaagaagaacgtggtgaaggagaaagccaaaaagattaagaagaacgcggaatcgagagccaaagttcatgaaaatacagatcaaattgagatcaacattagagaaggtgtttcaatttggataacaaaggctgcagtgcaaaaatgttttgagtttccccctggtacagataagaagctgccaatagatccaactacaaaaacatttgattcactctacagagtattgagtgtttcagaaaaaaaaatcaatgtaaagaagaagaagatgaaggagaatatgaaggagaagcaggttgaggaggagaagattgagatgaacatggaggagaagaagcagaatctggttgaggatgaaggtagtcaacaggaggaaagtgaagaggaggacggtgaagatggggaaattggagaggaggaaggtgaagatggggcaattggagatgctaaagtggggggagatggagacaaggaaagtgctaaaaggggggggataaaggttgctgtcagaagaaatgttttgactcctttgaacatcaatttgatgttacagaacatcaacaacgatgagattctcaaacttcttgttaaaagaaatgaagacactgatggtacagaaccgaatcttgacattgacctgattgtcagatgtttctttgcggtgagcagtgttgctgagtttggcaaggataagaagaaactgatatcagggtgtacaactgtgctaatggttgttttcttggaccatctcgtggaaaaccctttggatcctttgaccatccctaggatcaacttgtatacttcagattttatcgcagacctgataatggtacccaaggatagccctggccctgaaaaaaagcgtcgtaagactcaagatgaaaaagaagactagtaatgttataaagaatctcgctactctcaattttaagaattcggaggatacatgctatcatgaagattcagaaatggtgccaagtccagggagagcatcgccggttgttgcttctgtacaatctcataagaactttgttgatcatgcagatttagaaattgtgccatctcatgagaactctgttgatctacatagtgtttacatggcacatgtattggaaagaagcagacaaagcatagtagtggacatattggactacaatatacctgaatctacttttgcagattgtttgctacctacaggtcatatgcacacagatgtattttatttacaatgccaactgttgtcaaaggattggaaggataaagtaattcttagctggaaagctactcaagaactgattcatcaagatattggagttaaggagctggacaaggaacttactgcagaggttatgaacaaagtggatctgatatttattcctatcattcatgccggtcactggtcccttgttattctttccactgccaaacaagagacatatatccttgactcctacccaaggcacagtggggtggccaaggatgttttaactcaactgcagaagtatttggataataaacacaactttgacatgtctaactacactgaccatgtgccacctgttcagcatcaaaaaaacaattacgattgtggctttcatgttttattgtatattgaagaattcatgaaggagaagatgtataaaatcaacaaaaaaatggtgttgaaattcagaaagcagctttgcatgaatctcttgtaccatcctttgaacagaataaatcttgtggaattcagaaagaagctgggtattacattgaaaagaaaacttcctggtatacttgatcttactattgaaggtgagaggagtgaatctgaggctgcagtgataattgaaatagagaacagagatgataagactctagaggatgaacatatttcagttgagaaagagaagttgcgaaaacacaagtttacgtctgataagatcaacgatgagatctgcaaacatatcttgaactacaatgaacgggagttgttaagtgtggggcagactaccatgactgggggtcagctggaaaagtacgtaaatgaaggtgacaatggtgataaaatactcagagcattcatcacatgcttcacttgtgatgaaaagttcaatcaagggaacatcacaaccgtcatcccgccacatgaagtatccgaagagggtgaactctccaaagttgatgctgcacaacttgtagaagaaatcaaagctgtactcaaaggcaccaatgttgcacgtgtacgcaaagacaccgaatccaccaaagatcccaaagtgaaagtctttcgaaacatgaggaggacatttatattttttcctttctacaagaatgaagaattgtttgtatttcatgtcgatacgaaaagactacccatcattgatgctctgttttgcaagatgtcatcattgtcgtttgaagatagatcctgactaggaaagtctatcatgggctgtctactcaaagccatgaaggattccggcttcatggtgaaaaaatatggtgattgtaggttcacagttactgtaactgaactcgaattcaaagatagtgcctcagcgctcataagttttattgagaacttcacttctaagttggacgacaatgccaagaaactgaaaaagggtgacaaggactggctggaaccttacaagaagtcgacagtggcataccttgtttgtcacactgaaaataaggtggtgttgcctgacgatattgtgaagtacaagcaaaacaagtgaggtggttgagtcgttaatgggtccagtggctgtgttttaagacttgtatcacactacttgtatggctttattctctgaagctgttccattgttgccgttagtaacaggtgttgcttttgtctctgctcagtgggtgattcatttcatccagagttgctgcaactttaatcagtctatagtgttgggttcctagctcagtgttgagttctaaatgatcgtgttgtgttcctaccaagtgttgagctgcacgacggcgtgcgcagccgcagccgcaccggcgaggagcgtttagaactctgttgatctacatagtgtttacaccggctcaacagagttctcatgttgatttttgaaggacccacgtgttgggttcctgctcagtgttgagttctgaacgatagtgttatgttccatgggcccttgttgatttcgagaggacccacgggccgaacggcgtgtcactttcatgcgtctatagtgttgggttcctgtctagtgttgagttctcaactatggtgttgtgttcctccaagaagttgagtttcaggggcctattatattgtctcagttaatgggtaactcagttaatcctatatattgtgtcagttaatgggaactcagttaatggtatatgttgtctcagttaatgggtaactcagttaatccagcatatcattgatgag

SEQ ID NO: 42039 - DNA, 1513 bp, Zea Mays
tttgtttttagaaccgcaagcatcatttccagttttaagattaaccaaaaatttcaacgtcagcaatattggacaacgggttcagctagaaagccctaaaacacaagtgttcaaagcaaagcaaagcatagctatagaagatgccaccggaatttggacattcagaccacagaaaaatactgaacttcagccgcagaagacaggtctcagagtggacaacgcctactcccagccttgggcagtcggtggcggggctgcttggtcccaaccagtaggagcaaccagaggaggtacagtgccgtccaccacaggtgcaggggccccagcttgatcccagccatcaccggtaggaaccggagctgcaaccaatattgggacagtaggagcaacaggcggcgcagtcacatcagaggtccactggtcaccaccccactgatcagctccttggtaatcagtgattgcggcaaactcaggggcaacagcagcttcctcctcctgctcctttgcttcctctgggtccctgtagaagaacaaatccacctgcaaacaacattatcatataagaatgccaaggttataagtctggactcatcacatctccaatgtcattttgaacgacatcataagctagcatcataccatgacctcccacttgtgcccagggaggatagtgcccctcatctgcagaaccatcctggccaaaagccagaacaggcatccaatgctgttcctccccttgttgttcgctgggatgccgatatcgacataccgcatgggagagtcagtatcacagaaggcaatggtggggatgttccccagagcagactccttaattggctgcaaacaatcaccaccataacaattagttcaccatcacactgcagggtccactcactaaatatttctgaactttgaaactgaaattctgttcacctgatggtcagtccttgggtcggtaaggatgagcagccgaggctcgctgaaggaggtctggagctggttagtgaaggtaccaggggtgtgcctcccagcgatggcatgagcgccagtgtactgagcgaacttgaggacagcacgctggccataggggcgggcggactggacgatgatgtcctgcgggttctcgatggcaacgataaccctcgctgcaagctgcagtttctcccatgtcttgccaaggttgatgatgcagataccgtcggtgcggcgcttaaaggcatagcgctccatctggaaatcgcagttcttggtgccaaggtggacgtcggcggcgagcatcatctgtatgtcctgctccttctgggacagcgcacgcaccgcgcctccgcctgctgccgctgccatgactgacggggatgcgggtggtcagggctggacgagcgaagcaaggggaggagggagggtcgccgcctcgctggatcgggatcgggctctgacgctctgtgtcttgggagtggcggctcggaggtgcgggagggatctcttatctgcgacgcctcgaaaaccctaggaa

SEQ ID NO: 42040 - DNA, 4885 bp, Zea Mays
cgaatccttcggttttgtattcttcgcttcctttcgccttcctcttcgcctctctctcgtgttctggcgtcgccgtcgccgctggcgcgagatggtggagacgcggcgaagcgccgcggcgaagcgctcggcggcggtggtggaggaggagaagggctcgctggcatcgccagcgctggagcccgcggaggacgcgccggcgggtcttggagcgggtgacgatgtcgcgtcgtcgcagcccccgaagcgcgcgaaggttgggtgcacggagtcggataccgcgaagccgtcggtggcgccggctgccggcgctgttgcgggtccactgcccaacacggctgggctgcaggccaggaccggcgccatggacaagctggaggccttcttgaagtccaaggaggctcagtccaatccggccggtcataagcaggggactaatgataaagatttatcggcgaagatgaagagagtcatggatttgtcggaggatatatcggagaagataaagagaagcaaggataggttggctgtgttattgaataagccggctgcaggcaccagcaggcgtcaggagccctggtgcagactaatttcacaacattccatggctgtatttgatgcgacgtttggctgcatttgttgggacgtttggctgcatttgttgggaaacttcaatgttccatacttccattgttatcgcttttatgcatatgctactgtataaaagtaggatttaagcaccctaccctttctatttacggtgcgattttcacaattggtcatggagcgcatcatgatttcagactggatgaatcatccactgcctcatctgtttgtagactgaagcaagctaaggtacttaagttatgtttgcttattccctgcatttgatcttcttttattcttacgttttgtattagcgaggtgcactccttgaaatctttgaatccaaagttgttcgtgtaaacgggaaatctttggacaaggctgccaaggttaccttaaatggaggagatgaaattatcttctgttcaccagtgaggcatgcttatatatttgagcaacttcatgaggagaaatcaagcacttcagtgttatcttccacttgcacttgcagtagtatccagctggggcaacactcacatttcaatgatattcaggatcatgtgtcatctaaagggcgcaaagcctcatcctttctctttggaagaggtctatcagcagacccacttaatatatgtaaaacgacggagggccggagccagtttatctctgaagataatatatcatctggtcggtgtcagctactaaaggaggatttgattaatgcaacggttgatgtgagtgacatctctgagtcatttgatagttgcccatattatctaagtgagcataccaaacatgctctaatgtcagcagcatttgtacatttacattgcaagaactacttcaagtttacaaaagatatatcttctcttagtcaacgagtgctgctatctggcccaacaggaactgatatgtatcaagaatatctggtgaaggcccttgcaaagtattttggtgctagattgctcactatagattcttccatgctgtttggtgggcaaacttccaaggaatcagaatcatacaaaaagggtgatagagtgaggtatattggctcaggcattatccttgatggacagagccctccagattttggttcacagggtgaaatatttcttccttttgaagaaaacagatcatcaaaggttggtgtaaggtttgataaaaaaattctgggaggaaacaatcttggaggcaattgtgaagttgatcatggtttgttctgttctgttgattctttatgccccgacattccaggatgggaggttacgttcaaacatccatttgatgtgatagttgagtttatctctgaagaaattcggcatggccctttaatcctttttctgaaggacacagagaaaatttgtgggaataatgattcctatcatggtctgaagagcaagctaaaacattttccagctggcgcttttataattggatctcaaatccagcctgacaatcgcaaagagaaggcaaatgttagttctccttttctttcgaagttccggtacagccaagctatacttggcctcacattacaggacattgatgggggaaatgataataataaagaaacatcaaaggcaataatgaagcatttgatcaaacttttcccgaataaagtgacacttgaggcaccacaagctgaaatggagctttcacggtggaaccagatgttaaaccgagatattgaagtccttaaaggaaatgcaaacatttcaaaaatacgctcttttctaacaaggcttggattggaatgcactgaccctgaagcgatattggtcacggatcgcattcttacaaatgagtgtattgataaaataattggttttgctttgagccatcaacttaagaactgtacaaatccagacccccctttgggtagtgtgcagtttgctctatccagcggaagtcttaagcatggcgttgacatgttgaaaagtatccagtctggctcgaagagcagcaccaaaaggaaatcacttaaggatattgctactgaaaacgaatttgaaaagagccttcttgctgatgtcacccctccacatgaaattggtgttacctttgaggacattggagctttagaaagtgtcaaagatactctgaaggagttggtgatgcttcctttgcaaagacccgaacttttcaaccgaggacaacttatgaagccatgtaaaggaattttactttttggcccacctggtacggggaagacaaatgctggctaaggctgtggcaactgaggctggtgctaatttcataaacatatcgatgtcaagcatctcttcaaagtggcttggtgaaggagaaaaatttgtgaaagctgtgttttcactggcaagtaaaattgctccaagtgtaatttttgtggacgaggttgatggtgaatttgccagatgcatcaaataggagaaaaattcttagtgtaatactagccaaggaagatttggcagacgacgttgatctagaaactatagctaacctgacagaagggtactcaggcagtgatctcaagaatctgtgtgttactgctgcacaccgtcctattagggagattcttgaaaaggaaaagaaggagagagcttcagcagaagcagaaaatagatcattgcctccgtcacacactagcaatgatgtccgtgcattaagaacaagtgatttcatacatgcgcatgaacaggtgtgtgcaagtgttccctcggattccagtaacatgagcgagcttgtgcaatggaatgatctctatggagaaggcggatcaaggaaaaagacaacgctaagctacttcatgtagcttaggttataaatatattgggagaagtgccctggcacaaagcagcaatagttggaggcggtgcagttggaaaaaaaaagctatgctcatctgccagacatccatatcaaagagaattgatggttcaggtggagcggaatagaatggaatggaatagtatacatacacatggttgctgcctctgctctgggccatgcatcatgcatctggacaggacggctatcctggcttgcagttgccctatgcagttttgagtgcaatggtcaccatctgtgaagcacggataccacagagatcctggccccaaccactcttttcacaaatggagctgaggacctttggagttctaccaaaagtgatcttaaatctttgttctttgactttccgttttgtgaacggaaggccccactctgctagtatggattgttgatcctccgtttctctggtactgactgaactgctcatacaaaactcgttcaacaggcagaaatgctgcctggtggccttctagagtgcttctttgacgccgcagagagcacatcaaaaaaaatgtgtttgtttcgaacgatttgtgctgcattccattcacggcgatatcaggtgccgttgtttgtgtttggttccgcaatcaagggagtgaaagccattagcacatccaatcaaacaaatagcgatatctctttcactgtaccagttagcgctggtctcggatgctattaacattgctgttgtctgtctcggaaccaaacaccgcctaactcgtcggctgttaaatatttctgaactgaattactgcacttggttggggtttcatgcttatcaagttggcttatatagccaacaatactttgtgcagttctgcatcctctgcctgcttatgcgcgatctcattggctgagcggtacgaagataaaacggtagctaatccgaagcgatggcttctctttttctttctacggtattttgtctctatgaattacagttacagcagtcagaacagctgatttaaaaccgcagcgaaaaggctgattgccttgcccatttttgggtgggtggaggttaatacagatttctgtaatttttttactttaatattgtttgacatattgtgcaaggcaaatgatttcctaatgatttgttctacttgatattgtaatccatattgacctatatgctatgctcagttccttagagcatctccagtacttgatattgtaatccatattgacctaggggaaaaaaaggagaatttaacctgatgacactggtggactatgctatgctcagttccttggaacatctctagtagttttgtaaaaaaatctctctaaagacagatgtaaggagttgctacataataatagggagtaaaaatatctgtactctcatgtagtctttatttttagttaccaaatattataaattatgcctgctgaaactcctctccctcacgttatagaaagttttatgtttttccaatcaaac

SEQ ID NO: 42041 - DNA, 739 bp, Zea Mays
cgaagatggtgtgggcccgaagggaggcaggacagagaagtgtttgcacaactgactctgaaaatcaagcatctgtcagctgttctacacaagaaggataaacattctagaaaggggcttcaggagatggtccaaaagagaaagaaatacatgaaatacttgcgaagaaccgactgggactcgtactgttttgttctatcaaagctggggctacgcgatgtgcccgagtacaaagctcctgattacaagagcaaagcaaccactaaggccaaatctaagaagagcaagagcaagaggagaaagatgaaggcataggagcggtgaacaaacacaccctttttggtcttgaattgcatggctaggaaatgattcgagaagatggatccatccaatcttacagttttttttttgactcgaagctgtttgtaataaccatctctttggaggccacggtttttccttgttctgcttggagcggcaaccttcctgtaagttttgtaacaactgatttattatattatttgcttttgagttctcccgctcgatatgccttattatgagggaagggaggaacagatacgacgatatgataccattacgtcatcatcagtttgtagctttgccagttttttttgtttgacgtaattttccagaattcttgtataagaatgcttgaacaatcttgctagctagcctagcgaaacaatcaagtagaaattcttctattttctattaggcc

SEQ ID NO: 42042 - DNA, 1194 bp, Zea Mays
cgcgttgctaccaccgcggcttccttctctacccttccctcgcgtcgccatcgcaagagtatctcaactccgcctcgagacctcccccctcgctggtctcagccatggtgaaatattcgacggagccgaccaaccccaccaagtccgctaaggccatgggtcgtgacctacatgttcacttcaagaacacacgtgagacagcttttgcccttaggaagttgtcactcaccaaggccaaaagttaccttgaggatgtgatcgcccacaagcaggccatccctttccgtaggtattgtggtggtgttgggcgtactgctcaggctaagtctcgccactcaaatggtcagggacgctggcctgtcaagtctgctagattcattctagaccttctcaagaatgcagagagcaatgctgaggtgaaaggacttgatgtggataccatctatgtgtctcacattcaagttaatcaggcttagaagcagcgacgcaggacataccatgctcatggacgcatcaaccataacttacatgtcctccccatgccacatcgagctcatcttgtcggagaaggaagagccagtgaagaaagaggctgagtctcagattgcaaccaggaaggcttagagaaggggctctatcttctgtgattggcttagtgagctgaagtcaactaaggtgtatgagaaatgggctaaaaagatctcagggatggagccaccaacaaatccgctagagaggagagcgaaggttgagcggaaaaaacagttcaactccatcctctcgaacatcatgtccaagtgtgactccaaggcgagcagctcagagcccacgaaagaagagtttgagcaagcgcaacagaggctggagagcagaagggccaagaggcgcaagtgatgctgctgccagccttcttgccctatgctgaacattgtctgaaccttttggtgtgacctgaatttaccagcatgcaagtgatggttctaagacccagttttagcgtgtcagagtgtgtgtcatatctcttgtcctctcacggtacactatgttgtatggttatcggttatcaccttgccgagagggaagctctatttgatttgaaagtatcatgacatattttaccgcgacaattatcattacacatttcttcaagttatgttgcaagaataaaaattggcttcagtttcaaaattacta

SEQ ID NO: 42043 - DNA, 405 bp, Zea Mays
gctagtaaccggtcgccggccgcccggaagagatgaggggcacgcaccggcgagctcgtgctgctgctcggattggctttggcggtggaaccggcgtcgttttcatcagactccaccagcgggcgtttgctagctcgtccgtccctggccggccgggtcccgccgcgccgtgctgctcggattggatcgcatgcttccgatcaaagtttcgtcgtcagggcagcacagaggcaggggccctgctggaatcggaatcatgggtcggagcccggggcagggctcggcatcattgcacgtagctagcggcgagagcaatcgatgggtttgaattcgatgcggtgcgggcgtgggtcgagatcagtcggcctcgcgagtcgagtcacgcaccaactgattggtacgacc

SEQ ID NO: 42044 - DNA, 2455 bp, Zea Mays
ctcatcagggaggcttgtctctgtgggctggttctaagcgtaagcgggccggccagcacttatgccgccgccaatcccttcccgtgctccgcaaccgctgagtgagaagaagagatggccggcaagggcgatggcccggctatcggcatcgatctcggcacgacgtactcttgcgtcggcgtgtggcagcacgaccgcgtcgagatcattgccaacgaccagggtaaccgcaccacgccctcgtacgtcgccttcaccgactccgagcgcctcatcggagatgcggccaagaaccaggtcgccatgaaccccatcaacaccgtctttgatgccaagcgtctcatcggcaggaggttcagtgatgcgtctgtccagagtgatatcaagttgtggcccttcaaggtcatttctgggcctggtgagaagccaatgattgttgtccagcacaagggtgaggagaagcagtttgcagctgaagagatctcctctatggttcttatcaagatgcgtgagattgctgaagcttaccttggtagcacgatcaagaatgctgtggtcacagtccctgcctacttcaatgactcacagaggcaggccacaaaggatgctggggtgattgctggccttaatgtgctgcgtatcatcaacgagccaacagctgcagctatcgcctatggtcttgacaagaaggctaccagtgtcggtgagaagaatgtcctcatctttgatcttggaggtggtacctttgatgtctccctcctcaccattgaggaaggaatctttgaggtcaaggccacagctggtgacacccatcttggtggtgaggactttgacaacaggatggtcaaccacttcgtccaggagttcaagaggaagaacaagaaggatatcactggcaaccccagggctctccggaggctgaggaccgcttgtgagagggcgaagaggactctgtcttccactgcccagaccacgattgagattgactcgctgtatgagggcatcgacttctactccaccatcacccgtgccaggtttgaggagctcaacatggacctgttcaggaagtgcatggagcctgttgagaagtgcctgagggatgccaagatgctccaggacttcttcaacggcaaggagctgtgcaagaacatcaaccccgatgaggctgtcgcctatggtgctgctgtccaggctgccatcctgagcggtgagggcaatgagaaggtgcaggacctgcttctgctggacgtcacccctctgtccctgggtctggagactgctggaggagttatgacagtgctgatcccgaggaacaccaccatccccaccaagaaggagcaggtattctccacctactcggacaaccagcccggtgtcctgatccaggtctacgagggtgagaggacccggacacgcgacaacaacctgctgggcaagttcgagctctccggcatcccccctgcaccccgtggtgtgccacagatcaccgtgtgctttgacatcgacgccaacggcatcctgaacgtgtctgccgaggacaagacaacggggcagaagaacaagatcacaatcaccaacgacaagggccgtctctccaaggaggagatcgagaagatggttcaggacgctgagaagtacaagtctgaggatgaggagcacaagaagaaggtggaggccaagaactcgctggagaactactcctacaacatgcgcaacacgatcaaggacgagaagattgcgtccaagctgccggccgatgacaagaagaagatcgaggacgccatcgacgcggccatcagctggctggacgccaaccagctcgccgaggcggacgagttcgaggacaagatgaaggagctggagagcctctgcaaccccatcatcgccaagatgtaccagggcgcgggtgaagacatgggcggcgctggcggcatggacgaggacgcccctgccggcagcggcggccctggccccaagatcgaggaggtggactaagcggtttgttgtcagtcttgagtgtgctgcagttgctggctggcccagttgctgccgagagttatcgtcagttggtgcggtgtgtccgcttaaactttatttgtggttggttggtacttttgtggtggttatttttttggacctcgtgatagtcggtcggttcaatgttatcgcggctactggcaaaccttaagtgatacggtattcttcttttcggtatttgtttctgcatactgctggctcgtattttgtttttgagcttgcgattctttgttaatttcaaccttttgccagttaggaggccattctcatttgattgtttaccacaatttttaggctgtcatgttatgtggcatttaatgaaattgataaactcccacccagaatagctagcagcttttgttgggtcctggtttttcttgtcctcgaagagttttgggagcaaaacggtttctttata

SEQ ID NO: 42045 - DNA, 2387 bp, Zea Mays
aaatttttcttgaagttaatggagccgagctacatcacgtccgccctccccctctctctccctctccctctctcgacgacacaccaggccaccacgcacatgctttgtcccatggatgccgaccacctcatggtgttcaagaccatgctcgccgtcaggtggtagtcccggcgagcgagatctccccactccaggctctctcccatcgctcgctgccgcctcatgttgtttgcggccgtgctcgccaaccgcggcacggaggcgtcgatccgaccgggagcccttcgcaatggacaaagccttcctcctctccggcaatgagggcatcgtcggctcgtcgctaacgtgagcacgtggcagaccctgctgcccccatccttcttcatcttcactaagtgaggaactctctcgacccccttccccacccttcttgtcttcggagttcggatggctggagaacacggtgtttggtcatggcttctagaaggtggtgttttgcatttaaaaaggaaaaaattggagcataatccaaagctttgtttgcagatggggaagaggtaggagtagctcagcagtaggatggagtggccaggacagctcggtgcccacccgtcttcatcgatcgggaccctcttcccctctagcgagctattcccagtttcgagaacaagattaaaatagcttcgtaggcttttatgtggtttagatttgcatatctatctctcaccattaaagcacaaccagatctggtagcttcagctccaaacaacaagaaacactgagagctgtgaagagtctgagatggcttatgtaagccccgcgactgatgatacatcaacagatctagatactgacgagaagaaccaaatgggactcccttctggaaggtcatcagcttcaagtgcggcttcgctgcatcagcgccaaccgcaatcagacattcatagtcatgagtaccatcagctttctcttttgcttatgttagccagcctgacttctattttccacccccttgtatgtctggtggacacgcagatggccaaaccagagtaccaggctatggagaccggacgagagtccaaggagaccaccccgcgattcgtcaacgtctccgggatggcgaagccgcaacccgacgcctccctgtcctttttgttacctccggacgccgctgccgaggggctgcatgacatgattctgaatgctcgcgacgaccttgatgttttatctccgtggtcggtgggggcgtcggcgtgtggtgtaggcagatgagggaggcgacgatgttcttctgtggtgacccatcgacgccgcagtgggtcgaccaacaccatcaccacatggagattcacaggtatgtatcctggcatgcagattcaccggtatgtatcccatcatctctattctatgcaatggtttgttgaactttttttattcagggttgcaaatggatctacattattgaagagatttaggaaaccatcaccgaacaacaacctattagaggttcacagttagttatgcttcttttcaattgtgctgggaaatattgctgaaatattctatcctgaaaaaaggttcatcaccttatcagaatgtattgcccctaaatatcgtttagttggtgattgttaactcaattttcacaattaaatatgcttgtgtacaatgttactttgaaatcgtatgaacatgttctatcctattgtcattcagtgtactcaacatgcttacgatatctgcactgtggaccagggctctcttctgaagcagctagcaaacaagagtatcagtggtggtgtagctgttgttctagctgaaacgaacaagtaagagatggagatggacatagcaaagctagaagttggcttcatgggaacatctgtaatatgtaggagtgacgctcctctaattctagcagacttgaggaagcctcgacaaacctgaagtttgaacgtatgacagatgacatcttggttacttttgtggatggacatcttggtcgcttttgtggttggcttttgtggatgcgtgaagctacaattgtagttgtgtaagatttatgtgcataactatgtgggttgcatcagctctccgtactatgtatatacctcccgcgtagctgcctacctatccctaacttgcgacccataaacgtagacttcgatcctataatcttatttgggatcagtttcaggctgtaatagccctgaccgtcttactatggaacacgttaaagtatggtctaaaactttaatgcggattatgttcggtctatctatgtttggtctcatagttgctttgttgctccccgcgctaaacggttttattggagacttaatcatcctttgctgaattttaatatagcatatataattgtttgctca

SEQ ID NO: 42046 - DNA, 2235 bp, Zea Mays
ccttcattggcctcatctctccctccctccttgacccatctgcgacttcccctgcattaaggatgacctcttctctctaggtcttacaaccctagacgtggaatcaggatcagtgtgcacggggaaccagcaacggcagcacgtacgtggaaccggcaccgacgaattgcacggggcagcagacaatcgtcgcctccttgactccatccgcgaccttcctccatccgtggtgccagcaaactgcacgagaagacctaggtcaggtgactcggtgctagccacactattacaagatgcctcctagtcgtttgcaggttggaacaaaaacaacagaaggacataaccaagcaggaaacacattacatccatatgaagtgcagcgccttagacaagttatgagaaacaatgcaaggctgcaacaactgggaattcctggtttatgcgacacactgccaaaggcatattcctttcatcacaacaaaaataagccaaattttacaaataatgaagattcagaatctgattataatccttcatcaaatgacactggtgaagaagatttacttgatgatgacaatgttcagggctcgaaggattataatatgaggactacaaacatgtctaatggtgtaatcaagctacgcactaaaagacttcttgcagagaaagaatctattagaattacaagctagtgaccctgctctatttgacgagtacacccacatggctaatggaggtcattccattgctcgccctgatgggcacaacctgatgggaaacaaagataatgtaaacatccaagttgatgacaacatgaccagtggaggtgaagctagcatcgagcctagtgtacatgtacaactaggtgaaaatgatcgatgggaaaggggagttaatatgggacatggtctccataggatgaaccgagctatgcgtggaaaactgccggttgttattcctgaagggaggataaggcccgtggcacctcttgttgctgcaaagttttcaactgaatgcaatattgcagttaggaaccatgtgccagtgtacaagcattggaaggattacaagaaccataatggcatgtttaacctatttacagataaacttagtgcaaagtttgatatcaacacaaatgatgcaccagtccaaaaggcttgttcccaaatgatgaaaaatgctataaggcaacaacggtacagactaaagaaaaaattctttgatccttttccactacatttggtgacaaaaacatcaccaatcagatcgatgagtaatgaagagtggaatgatcttgtggaatattggaagagcccaaaaaggatggagacatcacaaaagaacaaagataaccgatccaaagttaaatttcatcaaacaacgggatctcgtagctatatggttcatgtagaaaatttgggagataaaaacattggtcaagagcccgatgcattagatttgttcaaggagtgtcattacagcaggaaaaagaaatgttacacatctaccgtgcaacaagctataactcaaatggataacaagcggtctgcaactacagaaggtgaaaaatcaatgtctgcaactgaagttgttgctaatgtgcttgctgaaaatacaaagaagaatttgttccttcaaaatgtggggatacaaaatgttggtcctaggtctagtctgagaaatattgaagcacagttggaagtggagaagagggcaaacagtgaccttaaatctattgttgatgctcaacatgaacaattggatgcattgttaaagcaaatgcaagaaactgaagaaaataggatcagggagcaagaggaagtgaagaagaagcaagctgagatggaaacaaagatgcaacttgtgttgagtcagattcattcaagattgagatagtatttatgtcatgttgacaactttttttgttgttgcaacaactttctttcttttttatggaaccaactataatgttttggatatgatgtggtgttctggttggatagtctttattgtttgggattgtccatgtgaagttctagttggatatttgaatttaaatattgatattttgtcattataattgttatgttatgtgctgattgtgcttttgatgtgagaatgaaattattgaaaattattatgggctgtagttataaatggtcgataaaatttctagattttagccttggcaaaaataattaaactgaataaaataaatgcacaaattaaaatcaa

SEQ ID NO: 42047 - DNA, 1892 bp, Zea Mays
ctctacgcttgtccaagcccgcgccctgggattttgcccgaagctcttcgcgcccagtcgatctccccgctccagcgccgcgcgcaggcttctccctccctcctccccgcgctcaagcccctctccctgatccttatctctgcgcacgcaggctatttatcccccgcgaggtcatctcccttcccctgctgtagagctcctacgcgcgcgctccttcccttgcctctctgctccccggcaagctctcctacgcgcgctactcctccctgccccagccgcgcccggcctgcctccctgcgcgtcgtggtgctccagcccggctgctcagcgtccatcttcctgcgccttgctttagctcatggcgcgtccctgcccctcccatgatagctccctagctcggatccctcccagccgcggctcttcggtttggcgccggtccaagctccggctcgtccagctctcttctctggcgcccctggctgagctccctcccatggcgcttggccgcccggctgcctagcccagcttctctgctccccttcttcctctccctgttcgccggctgaaccgcccagccggagcttcactgctggcgtgctggcttcctgtcccctgcacgcgcgttctgtctgctccagctcggtgtgccacgcggacctttctctcccctgctcatgctcggtctccagctcgtcgccatggccaccgcacctttttcccctagcgacatccagcaggccgacgctcagctcccagctcctgcgcgtgtccctcctctcagcccagccgcgtcgctccctcagctcgccgcgccgtcgccttgctgctcgccctgcgctctctgctcaccggtcgaattctctgcgtcgcgcccagccttcagctcgcggagcactctctctcggtctctcatggccgagcttctccaccagacagcgcccgtcctagccaccaactcttttcgcccggatccgtaactccctagtacatgtcggctgattcgtgcgctggggagccgttctcagttgctcgccgtggtcgagccgttctcagttgctcgtcgtggtcgagccgttctcagttgctccccgtggtcgtcgcgcgcctgcgcgtagctcgcgccctactagcccctgctgcgggttgtcgagctctctgcgcacgcacaactcgctctttctttgtttgccgcgcacacgaaaattctctgctcgcaatggcgtgtcgagtttccgcgtcgagctcctctcttgcgtgccggtcatcgtctccgagccgattcttggctgtcacagtatttttagttatccggctgcgtcggtagttgtcaagtgtgtctgttgccgtgaactcgccccaggtgcccactctgtctctggtccgcgcttccttcagctcggccagacagggcattgtttcgtgctgtgcacgagcagtttcctgctcgccagcgtgccctctcggctcactcggccttaattcccaacgcgtcgtcaacctcgctggttgccgtcgttcatcgtagcgtcgtgtatgcagcagccccagatctatgcagctctaagtcactcttccgtcgagtcgtcgaacccatcatcccttgctcgacccccacctcaccagctcgctccaaaaacgatctcgtcgtcgttccgcgagtcatcaaaaaaatccccaaaatcgggtgaagacgaaattagcagcgtggtattcaccaagtgcgtgacaaaagctcggatatcctacgcgactcaagttcgactcgtcagaattattcagtcgaggaaaagatctttagcaattgattaccgaagaaaagaaggcccctagatggcgtcaaccggaaccgtcgtcgtgcttgcgattatcgcgtcgaattagttaggaagaag

SEQ ID NO: 42048 - DNA, 349 bp, Zea Mays
atttgctgcgaggatgtattcgcttggtggaaacagaattacagagtagcagtagcagggaagacagtagcgagaggagaagaagaaacttgaggaagaagataaacgtagttctgttacatcctgcctcctccgtaggtctcagcgagcgtatatcttcaggttctccattctgggccctggaatctcacattggccttacgctggcgtgttccccttctcagcccagctgtagtagtctcctcttgaggcccaccagtctccacattgctctgttgctgctgtagctcctcggacacggctgcttccgcctgctgcacctggaggtcttccgaagtcgactcgcgtg

SEQ ID NO: 42049 - DNA, 4928 bp, Zea Mays
caaggtgctgacattctgggataaaggggtcagagtgcagctgaagggggatggcgtaggaagtacagaggtattgcaagtgtcagctgttcagctgagcaggtggatgaagggaaatgaagtgtgggcttttgtgatgctcgaagcaatacaggaggaaggtgctaaaaaggaacaggaaccgctgaggcagatacttaaggagtttgaagatgtgtttgctgtgcccactggactacctccggttagaatgtatgaccatcatataccattgctcccagggtctattccggtgaattccaggccttataggtattcacctttccacaagacagaaattgaaaggcaagtgacagagttattaactgcaggattgatagtacccagtgccagtccatttgcatctcctgtattactggttcagaagaaagatggcagctggaggttttgtattgattatagaaggttgaactccatgaccatcaagaaccgttttcccatgcccttggtggatgagattctggatgagttggcaggaactcagtttttcacaagtctagacatgactgcggggtatcatcagattcggatggcagaggaggatgagggtaaaactgcgttcaaaactcatcatggccattaccaattccgagttatgccttttggcttgacaaatgcaccagcaacattccagtgtgccatgaacacagtgctagaaccatttctacggaaatttgttatggtattcttggatgatatattgatctacagtccgagtctggaggagcactacaaacatatcaggagggtattgtccaagctcagagaacagaagtttttcttgaagcataagaagtgtgtatttgcgaagaaagagctgagatatcttggacatattatatccagtgaaggggtcgcgacggaccctgcaaagacagctgctatgctggcatggcctagaccacagaatatcactgagttaaggggatttttggggcttacagggtactacaggaagtttgtgtgtgggtatggagttttggcacgacccctcactcagctgttgcaaaaacagcatggtttcaagtggaatgatgaagctcaagcagcatttgaggccctaaagaaagctatgacgactactcctgtcttggctctaccacgatttgatcttccttttgtggtagagacagatgcatgtgacaccggaatgggggctgtgctcatgcaacaaggaaagcccatagcttatatcagcaaggctttaggagaaaggaatagacacctatctatctatgataaagagtttttagccttaattcttgctgtggagaaatggaggccatatctgcagcggagtccttttgttatcaagactgatcataagtcacttacatttttaggagagcagcaacttcagtctgagctacaaaggaaagctatggcaagattaatgggccttcagtttcagatcgtttacaaaaaaggggtagagaatcgagtagctgatgctttatccagggtgggggctatgatggagttggctgttctttctgaagtgcaaccagtgtggattcaagagattttgaattcctatgagacagatgctgaagcccaggagttaattactcagctgttggtgcatagtccaaatgaacaagggtttagcttgcagcaaggtattgtcaggaaaggtgaccaaatctggatagggtccaactctgcccttagaaccaaactgatagcagctttacatgacagtgccatgggggggcattctggcatacatgcaacttatcagagagtcaagaaacttttctggtggaagggacttaaggtggatgtgactcaatttgtgcaacagtgcttgacctgtcaacaggcgaaaccagaaaggactcatccagcaggactgttacagcctcttccgattccacatggcatttgggcagatgtcacaatggactttatcgaagggttaccaaagtctgagggttatgacaccatcatggtagtagtggacagattcaccaaatatgggcattttcttccactcaggcaccctttcactgcccagggagtggctcaaatatttttggatcaggtggtgaagttacatggacctcccaagtccattgtgtcagacagagacaagattttcattagctctttctggaagcacctgtttcaacttatggatgttaagttgctgttttccactgcctatcatccacagactgacggtcaaagtgaacgggtgaatcaatgtttggagacatatctaagatgtgcagtaaatgctcagccggctaagtggaagttgtggttagcattggcagaattttggtacaatactacttaccatactagtctgggttgtacgcctttcaaagcactatatggatatgatgccccgatgttggcgttacctcaatctggtgtcccggaggaggggtcagtaacagattggctggctgacagggttgctttctcaactcatctcaaagaacaactcgctcgagctcaaaatcggatgaaacaaatggctgatcggggaaggacagcaagagagtttcaggttggggagatggtgctgctcaagcttcagccatatgctcaaaagactgtggtgaaccgtccttgcccaaagttggctttcaagttttttggtcctttcagagtgttggctaagattggtgcggcagcttacaaattggatcttccagccgatgctcaagttcatccggtgtttcacgtttcccagctgaaaccttattatccatcatatactccagtttttacttctttgcctccattggtggacctctcaagaactggcattgttcctgaagaaatcctggatcgacgtctagtgcgcaaaggccatcaagctgttccacaggttcttatccgctggtctggtgtgccagtggaatcagcaacttgggaagattactatgtgttgaagaaccgttttccagacgccatcgcttggggacaagcggattctgaggcccggggaattgtcatgtctgagcagtaagtactctctagggttgggccgtgggccgggtttagtgtcctaatctggtgttatgggtttatttggagtctgtaatggcctgttaagagaccggatatatactctgtacttggccagttggcaaacgacgatcagaataatccagagaatcatatccgtaacaaactcacctcggttgttgcgactcgctgacgctccgacgaactcacgtcccggcggtggcgcgccggcggccacgggttgtctcacatcagccctagctgcgcttgccctggttccagcagctcgacgccagcccctctcaatcttccatcgctgccgctcagcttgtcccagccccaacgccgaccccctgttccctctagcttcgacgtccgtcgagccctgcccctaccccatggtcggcctacctcgccggtgaggccctggcgctacctctcaactcgccctcaagcctagagtctcgttgttcccctcctcacgttgatgctgcagcggggctacgcctctcccttttgcagtacctcaccactatttcgtttgttgtcggagcgaaatccgtggaatctgggtgaagaagaaacagaacacgtccgtcgcttactagctactaggtgaaaggattgaatcggctgtcgttgtcgtttagtgccgatcgagtcaactttagtcgtggatgttgacaattggaaatccatgtagcaaataaatgattttggaactgggggcaggtcagagtctagagcatgttcattccacacattggaggtggatttccctcaattggagatattgacaaattggaaaaaaaatgtgacttgacctgtgctgcaacaaccttaaactaggaggggattctaattcttcatctctaccaacaatcctctcctgttactttttaaaccaataactttttcatgtttttgtgcagatgcacacatccttgagccaaaatagaaaaaaatcatagaagagttctttggctgtcacgtgattcaagagtattaatgatatacaaaagtttgctttatggcaagttaggtaaccacaaattttgggcaatgacagggacgtgcagtggtggtctcttaaaagaattttgtgtccagtgtagctatttccactgcaaactatcaaatcattacaaactgctgggaacatgctccatcttatcgaagcatgtatcttgagaaagttgatcgatacatctgcttatttatggcctggttatgttgtaccatctgggactttaaaagatacagctttgccccaagaatccccttggttaaactttatgaaagtgtctcgactttcaggaccccttattgatgctctggtcgcatctcctgcttcaaggtgtttcaagctctgcaaggtgaggtctgttcagtttggccagaaaggcatctcctacctgaacacctacgacggccgcacaatccgctaccccgacctgctcatcaaggccaacgacaccatcaagatcgatctagagaccaacaagatcatggacttcttcaagtttgacgtcagcaacgtgttcatggtaaccggcgggaggaacaccaggcgtgtaggagtgatcaagaactgggagaagcacaaggccagcttcgaggtcatcgacgtgctgcttggagctttttgcatgctatgtctagttttctcctatttgttgtacaagaaaacataaaatggaattcaaatttggtggtcgcaaaagtgtggagacttgaattcatataaagttaggcttaacattagtgcaaaaagttgtattttagtttagatttagagtacacttatgtatgccttgtttgacaatacttatttatgatatattgaatggtacctattgtaattgtctattattgtaggatattcg

SEQ ID NO: 42050 - DNA, 538 bp, Zea Mays
gtaaaatgcacgcaaacttaaaataaggatctcgagtacatgttctcgtcgtttcatatgtgactcttttgtagtcatttttccatccaaaatcatgcctttactcgcttggtgcaagctgatgtttctattccactctgtatcatcttggagaccatgtcgttattttatcaacctaacctaggaaagccatgtccaatcattttcttgaactggatgcctttggttttctcatatctttcgaaggcataccaacttaatcttatgattgttttccctccgtatctaatcaaatactaatccttaatcttataatctttgcgataggcatagaaatatgcttggggctaaaataacagtcttccatcgtactcctttcatcaaatttaggttatggccatgtcttattcgtatcattggccatgatctatttgactctctactcataattattctgacaggtagagtctctttgtatattgtcacccttgctcaatccatttgtctcgcgcgagatgtcttattggttacgtctggt

SEQ ID NO: 42051 - DNA, 443 bp, Zea Mays
ctcgtcctctttgctcctcatttttcgtctagctctccactcacgaatacaggcgacagttagttagggtttgcccatctgccatccgccgtccatccgcctgactccttcccaccatctccgaccatcctttcctccatctctagccgacgatttcgaccatctccggcggcttcttcttctccggccggcggctggacgcaggtgctagaccaggcgatggccagtttctgcttccacacgatgttgttcttgctgcctagaacaagacccctgttgctgcttccacacaacgtcgtccccgctacaagaagacatcattcgtgctgaaagatgttgttcctgctgcatgaacaagacgcctcttcagctgttcctgctgccaaacaacacccggttcagaacaagagtatggaaaatacaagcacactgtggaactctcg

SEQ ID NO: 42052 - DNA, 1829 bp, Zea Mays
atatcggtcagtttgccatcagaacaaggagaaaaaaaggttccggtcttcatcccttccatttccaaaggacgacgctctcaccattcacgaacggcgactgcggatcgatcgtgcgtcgtctcctgcgccggcctctcttcaagtcagccaagggtcgttttcctcgcttcactgagtctctcacaaacactaatcgaaatttgatttattaacacacatggcgtcattttcaagttcccaagcagcccacagattctattgattgtgggtgtctttcagcatctgagggtttctaccagtccaggttacacacaagcttcaaattatcgcaaaattcctcttacatatctacatctcataccggaccaggtctcataccggaccagtttgcttggacttattacgaaacttcttttactcagctggagcttccatcaaaacataaaaatggaatacactttattacctgatttagcaccgcataagatacatgcaaagattcaagtacatgtatctagaaagtggcttttccgaggtgctactgatagtggaccactacaacatgttgatatggttttgtctgatcgagagggtaatgctatttatgctgaaatccctggaaatttagctgaacaaaaagcaacaaatattgaagaaggaggagtttatgatatcaacagattcagagtgtgcgcagcaaaaactgttttcaaaatagtggatggggacaaaatgatccaattcacatttcataccatagtaaaatgtgccacaagccctccaacaacatttccattatatgtttatcggctaacatcatttgatctaattgagcctcatgttcaaactacaaataactttgttggtgtctacctaagtggtggtcctgcctgtagatggtacttcaatccaacaattccagaggcagaaccttatcttaccagccagtctacaaaaagaattgtgttacagcttccccaaaatttacaacatcctccagcgatggaaacgaagccaattgtcgaacataaatccctctatgaacttcttacagttaacccatatgatttcccggaaacaggatttgaatgtactatcacaatagcagaaataccagctgaacacaaatggtggtttccatcttgcacaaaatgcaataaagcaacaatccctcacactacaggttatcactgtgaatcatgcaattgggatggatacaaatttaaatacaagctcaaattcctggcatctgatgaaacagatattgcagaaatgttttgttttgacactgtagcaaggcacatcgttgttgcccaaacgtgttccgcattaattctattgttgctgcacatgggagacaacgttctttaccaatgcaaataggaatttctgatcaacaaggaccatcaacacctcaaaacaaatcaaaaccgatgttattggaagactctccatctacaactttggaaaaattatctactacaactcctacaactgtagtaaggaagcttctatattccgaaactgacaacacgccgaaaacgcactcaatttcttttactcaattatcttttattcattttaagatttatgcaaacaagagtaatatcaatagcccagaaaaagatgatggcgataaggaaaccgcacagaacttcgatatatgcagcttgatacaatacccactaacaaaggaaaaggaccagcagatacaattgaatcgccacctaaaaggttcaaacaagggacgatacgcatcggaaaagaaatggacatcaaatcctccgagaactaaagtttcactcagatcttcgtcgaccttttga

SEQ ID NO: 42053 - DNA, 2410 bp, Zea Mays
ctcgtctccccctccgtttccagcctcaaactcttgccctccccccggcaccacactagcctagtgagaagtgcagcagcagcaccagcggcagaagtgttacttagttgctcctcctacctgtgctgctgcgcaggagcagagcctgaaaggacgacggccgtcggcgtaaggggagcgagcgagcgagcggccatgaagtacgtgctggtgaccggaggggtggtgagcgggctcggcaagggcgtgacggccagcagcatcggcgtcgtgctcaaggcctgcggcctccgcgtcaccaccatcaagatcgatccatacctcaacaccgatgctggaaccatgtcgccgttcgagcacggggaggttttcgttttggacgatggcggagaggtggacttggaccttggaaactacgaacgttttctggacatcaaattgacccgcgacaacaatataaccacgggaaagatcttccaggctgtcattaacaaggagaggagaggcgactacctagggaagaccgtccaggtagtgccgcacatcacggatgagatacaggactggatcgaacgcgtcgcggtggtcccagtggacggcaaggaagggcctcctgacgtctgcgtcatcgagctcgggggcactataggggatatcgagtcaatgcctttcattgaagcgttaggtcaattctcgtaccgtgttggacctggaaacttctgtctcgttcatgtcagtcttgttccggttctaaatgtagtcggtgaacagaaaactaagcctacacagcacagtgttcgagggcttagagggcttgggttagcgccggatgttttagcatgtcgcagtactgagccattggaggaacatgtgaaggccaagctttcacagttttgccatgtcccggtctcaaatatagtgaacctccatgacgtgacaaacatctggcacatccccttgctgctaagggaccagaaggcccatgaagcgattctgaaggttttagacctccagtatgatggaaaggtgcctcgggaacctgagctaacaaagtggactaaaagagccaccaagtttgacaagttgaagactccggtcaagattgccatggttggaaaatacactggcctgtcggattcctacctgtctgtcataaaggctcttttgcatgcatcggttgctatggaaagaaaacttgtagtcgagtgggttccttcctgcgacctggaagattcttcagctaaagagacccctgaagcccataaaaaagcatggaaattgctgaagtccgtctcacggaattccattccatcccagggcgcagatggcgtactcgtccctggagggtttggggacaggggagtccagggcaaaatcctcgccgcgaaatacgcacgcgagaacaacgttccttatcttggcatctgcctgggaatgcaaatcgcggtgatcgagtttgcccgctcggtgatgaagctacgaggtgccaatagcacggagttcgatccagctacgacgtcaccctgtgtcatcttcatgccagagggctcaaaaacccaaatgggagccacgatgaggcttgggtcgaggaggacctatttccatgtcagtggctgcaaatctgcgaagctgtacggcaacgccagctctgtagatgaaagacatcgccacagatacgaggtgaaccctgacatggtcccagactttgagaaggccgggcttcagttcgtgggcaaagatgagagtgggaaacgcatggggatcgttgagcttccctctcacaagttcttcatcggtgcacagttccatcctgaattcaagtcgagaccagggaagccatctccgcttttcttagggctgatagccgcggcgtctgggcagctagaaccattgcttcagcgcagcaatccgacaacgaaagcatgttcgatcagtaaagtcccgaaactgaaactgtaccccactgggcctgtgaataatccactgaacagcttggtgaacgggtactacccaaatgagaagagaaggctaagattcagcaagcccccagctccagcgacacatggttccgacatttttaacgaggaacgccttccagtccgttgaagcgagctagccatagggtggtgaggtctagtgtgatgttgttgttgtttttttctctttcctttttttttggcctggaactaaggcgcgaagtgttttgagtagcgctagtagagcctggaagaagttatctaaactatttgtacattatggaagaacttatctaaggactgaatacacaaatgcttggccatgattgctttgttgccacaatatgaacaaccacgctcagatgaagagtattggtgttgttaaaaaatgccagtgaaattgttgttgttaatgtttgtgcctgtgttgccct

SEQ ID NO: 42054 - DNA, 1109 bp, Zea Mays
agacgattaaccacgaatgaaccagcttatgcctacatcatatttcaaaatgtgaacctccaaagtcaataaccaatgctaattatttggttctttaaacagtgtgtgcgacgtgccgctacttcccactccccttgatgagcatcaagcacctgcattgagtaatgcaagagtgagatgaaacatctcagcaagcaaattgttttgatgagatatttaaaccacaaattgaatcaatcaacattttaaaggaatcacaattaagatcagaaatacgtgtagatatagaactcaatagtcccaatataacaaataccatctcatttcctcgaacaaccacaaaaggttgtataacacttccctgcgtcaataatacctgcaaatatcacttcaatgtatgcataggaatgcagtgtgtaggtcctttgccttcatacctatgagagtataaaaccacatcatttgcaattatcaattcaatgaatgcatatgaatgcaatgcatatgtcatatgccttcatacctctaagggtatgaagccgcatcgtacccgtcctcgggcaacgtacgatgataagttgtaccggtacggtcggaccataggtcacgacaaaacttcagatgcaagtgaatcatgcaatgtatatggcatgctgcatttatcaatatacttcacttccttcacatacaataccaacctcaaatactacttcgtttaccttcagatacaatacaaaactcaaataatacttcgtttaccttcagatacaatacaaacctcaaataatacttcatttaccttcatgggtgtgaattaatctcatgggtcatactcgaatcataaccaacatcaatatatgattgagcatcagtataatacaagcaagtaaagcatcaccatagagttcaattatgaaagaattccataattctgaatattagagtgtaggtgataaaaaacaagtcaaaacggtagcaaccaccgctacattcacttgccttcattgaagaagaaaagtgtactaggcatgatccggagtgtagccacctgctagcgggtataaaacttagtacaaatatttcacaaacatttgccaacaatcaacaaa

SEQ ID NO: 42055 - DNA, 1860 bp, Zea Mays
cttcctgccagaaccgagcggagatcatctggagccgggtcccggcgattaccctgcgcggcgccaatggagcccgaggcggcggtgttggcacagctgcagctgcagctcctcgtcctcgtctctgagttccgccatctccgcgagcgggagcgcggcgcccgcgaggagctccgagacgccggccagaggtgggaggcggcggcggcggaacaacgtagggaggcccgggagctgcgcgtggaggtggcctcgcgggacgactcgctacggaggctcgaggccaggataaaatgccttgagaatgagaatgagcagctggagaaaaacgaaaacaacttgaaagaaagcatggatgtgctgcttcaatccagggaggctttcataaaacactatgaggggttttagcttaggttctgaatcaaccttcaacctgtgcatggaagcaaactgacatttggctcacataccatgttcgtaggcaggactctacttgttctatgcagtggacaatccagctgaaggataaacagattgctgtaatgtcagagaaattgaattcacatcttgttttgtttagttcggtagaaaaggaagttgctgctgtgaaacaagtactaggtgatgtgcattgtctagttggtgagaaggaaaatgtagttgctgacttgaaggataaagtccaaaggatttctgtgcttgagaaagattttgtagagaatcttaatttcttggaaagcaaaatcagtgcataccagcttgaactccgtagtagggcgaggatcatatatgagttaaaaaatcgccttcaggatgagaagcttaacagcagttttcagccccatctggaagaacttaataaaactttgttggtgaaggattacgctattgatagattaacttcagagaatcaggcaatgcgtttggaacttcataacatggaaattgctttacagaaatttcaagatttattcagtagtattgggcatgagggaatgaatagtttttcagcaatttctgaaaatcaggacgtacaggatgtgaataatgaacaacatgaaagggttccaggtacacaatgtggtctagcaaatgagcataccttggtaactgcagttgtcaaagaagccaccacacaaaatgtagatcaccagttggaaactgatccaggcagcatgcaagtacaaagcccagtgcacttcaagtctggtgcaatgccatctccggagctagtagctgcaaatacagaaaaagctgacagccttcttgaacccaatgtagacattggcatgggcagtttatctcctgcacgaccaacagattgtttgaatatggatcttgacacggagagtcagtcctgacaatgcaatttatatcccttcacacctggtattcggatacgtatatttaacaatctcgtagttggttgtggagcatattttattattttcttgtagttgatcaactgtcttgtgtgcgtagcctgtttagttagccactaaagagatagatcaggtagtgtaaagagcatcttggctcatctctctaccgccacaatgtccgagattcggatggcagctcagctgatgagaccgaggagaaagaaatgatagctgtcattgtctcttgggataaatctgagggctcttattggaggagatgaaaaaaacagactcttaaaaataggaggggctctcaaaagaaaaatagagagctatatttcgagggctgttgctagactggagatgctctaaggtgtatttgttttttggcttttgttctaagactgtctccaacaacgttctttatattcatcctctatatctgtcttttacagtcttctaaaagattcttttctct

SEQ ID NO: 42056 - DNA, 1243 bp, Zea Mays
ctccttttcccccttcctccctctatggcacgcggacccaccccacggccctctcctccccctcgcgcgtcgcgcggcagtctgggcacaacacgccgccgccgtggcacggctcgcccagcgccgagccggctgcccgcctgaccgcctccccacctcttccccttcctcgcaagtggagcaccaggaaccgtcgtgcccctccctcttcctctcccccactctcgctccccattgaggtcacgccattgatgacgttaatggccgccgccgaccattacttcctctccggcgcgctctctctcttctctctctataaaaactcaatgccacacccatggacacttccctcggccgccgagctcgcccacgcctctcctccctctttgtcgttgtacttcgccgccggccgaccttggctcgccgtcctcgacgttcgtcgccactagaacacctctgtccacgtcctcgccaccgactcgagctcggagcgccactatccacctcccttgatcgcctcatccaccgccgtccggaactccactcgctgtcagcccctgagcgcaagaaacagaggggggaagaagctgattttgtggtagaagatcagaatacgttcgaggacgatccacaggacacgtttgagtaagatggtgcgcactctccaaacgacccgcgtgaacaccaacggtatccctccacccaggcaggctcctttctaccagttgtggtggaagaagtcccggtggagcaccaccttcatgtggggaatggagtgatcttggaggacagctctgaggagattttggcaacacacactccattgtcagagtctcatgcctttgctgctggagcttcatcttcagtaccgccagtgccagcacctcaagccccgactcctataggcgatgatccggatgattctggtgatggtggagacgatgatgatgagacaaatgagagcacctagaggggggtgaataggtgatcttgtaaaaaacaacttaacaaaacaaacttggactagtattagattagtgaaagctaaggccaagtttgagagaggagtatgagcagagaaaacttcttcacttaattgctcttcacaagatgagtattaaacttagagcaattatgaagtgaatagaagtagagagaatcgcacaacaataaagacaagtgacacaacgattttatgacgtggttcgatcaagtagaatacttgtgtcacacccggttttag

SEQ ID NO: 42057 - DNA, 3592 bp, Zea Mays
caccgctccgccccaccatttgaccccacccgtcattccagaatctatttcagccaatgatggcctcggaccgagtagagagcaccgcacgggctctccgtccgttccattcgcccgtgcgcgccatcaccgccgtcgccatggcgtcgctcaagactgccaagaagcaccacgcgcgcctcaacaaccccttcccgcgcgccgtaccgacggccgccatccacgacggcgacggggccctgcgcctgtcgttcgcgtcgacctccaagctcgcccacgcgcacgacttccccgtggggacccgtttccgcctccgctgggacccgtcccgcggcggcgaggtctcgctgtccagggttcctccgtcgtcgggcggcggcgcgatgtgggagaccgtccccggcgtggcgttcctctccgtggcctccgtggccaccgaggccgacgagtgccgcggctccttcgcgctccgcgacggcggcgcccgcctcgtccccgatcgccagcacgtcgacaagatcagggctttctaccgctgcgacgccgaggcaggcggctccgagcccgacctgctgcgcgccgccgcattccggccgtccgacgcgacgcggttcccggtgctggtggtgaccgggctcgtgtccgccgccaagaaggccggcgcgtcgccgtcgtgcacctgctgcgggttgcgcttgcgcgcggcaggtcgccgcgcccggagcgcggcggcggcggcgaggcccgtgctctcggcgcggtactggatccttctcgaggagaagagcgacacgcaggttaggttcagcgtcaagatcggcgactaccaatggacctgctcgcacgctgaccctgccaagtcgcccccggcgacggcgacgaccacgaccacgaccccgaggctccaccgggccagcctgcggcttcgtctgtcggcgcgcgtccagcgagccaccacgagcaagaggacgaggctggccccggccccgagccgtgagcgtgaggaggcgtcggcgctcctgccagcgcccgagcgggcggaggagcggcggccggaggagttcaaccgtgtgttcctgacgtatgcgagcagccgcgacgagcggttcttcgggttcggcgagcagttcagccacgtggagttcaagcggaagcgggtgccggtgctggtgcaggagcaggggatcggcaggggagaccagcccatcacttttgccgccaacctcgtcagctacagtcgtagaggagacaaagaaaattcaaatttcaagattaaacgctgcatgagttggtccttctcgatgcagcaccacatgttcgatgggttggacttgtgcatgtggtctgcgaaaatatcgacgtagtttctagcagaccctttcagcaaagaagccgttcatgaacctacaaggatttaccttccaaaacaacaagattgagacagtgtgtgggcttgaaacgaacagtttcagcaagcaaccgtggggcctttatcgtttgtttgttttgaagcttttgctagtgccaagtggaaaactcgtcacatcgacaacgatttgtggcgtctacgtacttgcatcagtttcttgcgtctgtgtgcttgggatttagtattatgtcctttttgtctgaatttatttgcagctagatttagtgtgtccctgatggtttgttttttctttaggtcaggaggaaactggagcacgacatatgccccctctccgttctacatgacctcaaagatgagatctttgtacctcgaaggatacgagtactccatcttcgacctgacgagacctgacagggtgcaaattcagggacggatacttgacggcgactcaccgacggagctgctcaccagctacacggagtcaaccggacggccgccggttcttcccaggtggatcacgtccggcgccgtcgtcggcatgcagggtggcacagacgccgtccgcagagtttggggccagctcaaggactacgacgtccctgtctctgcgttctggctacaggattgggttggccagaggaagacggcgatcgggtctcagctctggtggaactgggagctcgatgatgcccactacaatgggtggaacgatctagtagacgacctccgcagccacggcatccggacgatggcttactgcaacccttgcctcgtgccggtacatacgttacgtttcgttcacggatcatgccagagaaggtgccccgccgcccccgcgtgctttaattgtgttcttgttcagatggacgagaagcccagcgcgaagaggcacctgttcgaggaagccaggaagctgggcatcctggtgagggacgacgccggcgagccgtacatgatgcccaacacggcgttcgacgtcgccatgctcgacctcaccaacccggcagcgcacgcgtggttcaagagcaccgtcctgcgggggatggtggaccgcggcgtcagcggctggatggccgacttcggcgagggcctgccgctggacgcgcggctgcactcgggcgaggactccgtcgccgcgcacaaccggtacccggagctgtgggcgcgcgtcaaccgcgagatcgccgacgagtggagagccagccgccgccgtgccgcggcggagagcgacgacatcgtcgacgacgacgacggcctggtgttcttcgtgcggtcggggttccgggagagctcccgctgggcgatgctgttctgggagggcgaccagatggtgagctggcaggcgaacgacggcatcaagagcagcgtggtgggcctcctcagcggcggcctctcggggttcccgctcaaccacagcgacgccggcggctactgcacggtggacctgccgccgttcctgcgctaccgccggagcgaggagctcctgatgcgctggatggaggtgaacgccttcacggtcgtgctccgcacccacgagggcaacaggccgggctccaactgccagttctactccagcggccgcacgctggcgcacttcgcgcgctgcgccaagatgtacaaggcctgggagttctaccgcgcgcgcctcgtcggggaggccgcgcggacggggctccccgtggcgcgccacctgttcctgcactacccggcggacgagcgcgtgcaggcgctcacgtaccagcagttccttgtcgggacggagatgctcgtcgtgccggtcctggacaaggggcggaccgcggtgaccgcctacttcccggccggcgccggtgcgtggaggcacgtgtggagcggcaacgagtacgggaccggggctggggtgcagggcgggttcgaggcccaggtcgaagcccggatcgggtacccggccgtattcgtcagggccgggtcgtccgtcggggaaagatttgtgagcaacttgagaaatctcacggtgttgtaatttcggtaaatatacgtaactagctatgtgcgactaggctacaaatatattttttgtttatttttaaatattaagatatatgtggtctgatggttagccttaaatttttggagcagagagatgtgggttcgagtactcgttctgcactattttttgcgggctctggacgtagagagagtgtagccatgtgtcaacattag

SEQ ID NO: 42058 - DNA, 1202 bp, Zea Mays
ccacattcccatccacattcatcccccaccaccgatccatccacccactgatttccttatcttcaccttccttgcacaattcacccattctctcatcatttccctcatcaaccagcgctcccacataccgaacacacttcctgtggtctttagtatctcccctcccactgtcgccgcagtcgtcgccgtatagcacactatcttcgcttctgggatatctatagagaaacaactcgatcgatcgatcaagaagaccggcgaggctctagctccagaccgacaatgccgtacgcagccacaaggacgtcgccgcagcagcacagccgcgtggccagcaacgggagggccgtggcggcgtgcgcaggccacgcgggcgtgccggacgaggtggcgcggcaccacgagcacgcggtggccgcggggcagtgctgctctgtgatggtgcagtccatcgcggcgccggcggacgcggtgtggtcgctggtgcgccgcttcgaccagccgcaggggtacaagcgcttcatcaggagctgccacctggtggacggcgacggcgtcgaggtggggtccgtgcgggagctcctggtcgtgtccgggctgcccgccgagaacagccgcgagcggcttgagatccgggacgacgagcggcgggtgatcagcttccggatcctgggcggcgaccaccgcctcgccaactaccgctccgtgaccaccgtgcacgaggcggcctcagagggcgggccgctcaccatggtcgtcgagtcctatgtggtggacgtgccgccggggaacaccgtcgaggagacgcgcatcttcgtggacaccatcgttcggtgcaacctccaatccctcgaggacacggttatcaggcagcaggcgatggcggcaccggcagcgccgcacaacgaccacaaccacagctgatcgccgccgggcccggccggctggacaccctcgcagtgggggctgccggtttcttcggaggcttcatctgccatttatgatgttttctttcgccgttggtattctatagtttcaccaataagaagaataggtactgtgaactttttaaaggttgaggttgttcgtcttccctttcttaaactctaaaaacgacaataaagtattgtatgatacaccaccaataatattaagaccagtaaagtagtatagttctaatatatatgtgtaagtttgtgtat

SEQ ID NO: 42059 - DNA, 690 bp, Zea Mays
tatctcaggttctctactatgtgtaatctcgtatcaagattaatgagtatcgtgatcgtataattttgaatcctatcaacccatatggcaaggcaaagaaaattacagtggacatcatcctagattttacaaaatcaaaggagcaaccagacatggctgtcatgatctaagatacttcaacgtgattggatcgaacccagacaaatgactaggagaagctccaagggccactttgtcaagggtctgtgcaatgcacttactggtgcatgatttactggaggttgtgcacatgaatgtgccacgcattggtatgtgggttggagttgaagcaggtaattttcaccaacattggtatgtgaactggagttgaagcaggggagagcagtccaaggcaaatttgccatgttggagcagtcacaggagccaaggggctgcagtcacaggtcctgctagccaggatggagcaatcataggacctcctagcagtccaaggcaaatttgcgaggtggagtagttgcaacttctgaaacccacgtgataacatgctcaagcgttcgtatgataaaaaagaagatggcacataatcaaaagaagacctcctgttttgtgtttgtgaacctgtttgtatttttttgaacttgttttgtgaacctctatctgtaaacctgtaaaatctgaagtcgtgaatat

SEQ ID NO: 42060 - DNA, 1835 bp, Zea Mays
ttgaaccccgccctccaccgccaccatcagctcgcatcgtcgtcttcgcagataaaaaataaatgaaaccgaacggaaccctatcgcgagttcatcctggcgctgtctgttctacgccgtcgcggtcacctccagccctagcgccatctgctctgtacccccaccgctaacctcctcagctctggcctgcccgcgctcctcctcgttgcctggatccggcagcccctccatgctcatccgcccctttcccgctctctcctcgaccggctcgctcccgcttgcaaccacccacaccctgttctgctccagagacagtcctggcggcgctgaaggaggagacgcagcagcggatggatgacgcatcgattggaggtcattggtggccactcacgcctcctcagacctcaccctcacttcgtcgtcagcgcaggtttggccaacggcccccgaccggatcgcaggtcctcctcacggtgaggcacagagtcgagccggacatcacaaccatgaccatgaggcatcgtcgcagcagtcggagtcatttttgctgccccctcccgacacctgtaaattttgtatgccttcacgccgtgaagccacatttgcggccattggcaatggctgtatccactgtttcgatccatatatttggtgatgtcccttcttcacctcttgttgggctgcttcaggacaaaatcaataactggagggagacatctcttatattgacatccatccttttcgctgcagttgtgttctggttcattggtgtgtctgaggctgcacaagatgctcttgatcatcttttcaaccaaggccacaatctcgtaacagaaaatgagatttctgatacctttactaggctggttgaaaggctaccacaagtggtacttggaagcgaggagacaaccacactttcacatgctaggatgttgttggctctgaccttttatgctggtccctagtttctgataaatcatcttcactgttctcctgtattgctgctcgtttctttgattgtttgggtttatgcataggtcatagctcacagttttctggttccatggacaagctaattgtatcaaagccactatctatcgggtatctttattcagttgctgagttgaagagtggcgcctattctaaagatacaactaacatatctctgcatgccacgtcaacatttgcagcctccaaaatatctgttatccatgataatgctttgccaaattcattacttggtacagttgaatatgagttgccccatgtgcctccatggtttattcatgctggtatccagaagctttatggggttcttgctggaataattagacttgttggcctatcaacagtgtcaggaaccgggccatgttgatgttcaaaagagttgtcagaagttcatgacatctggtatttattatatcttcttttgtagtgggctggtgtggtctgcttagcagcaggtagcactacaaccagcaatgtatggatgaattgaaggtagtaaagaacgcatgcaatcttatagaaactctacatcttgaaactggcatgattgacaaagaagctggatgcatcctttggattggtgtcttcttatcatcaagcagtaatgtgaagcaagttcatttgttgactaagaacagatgagcacaaatcagtgaagagttcattgcactagagatggaggatggataggtggtagatttcaatatggctttgatactattgtttctctttacaatctttgtacataacaagaaaaatgacgttgtatgtggatactattgtaattcaagaatttatttctgaataataaatatatttgtttataa

SEQ ID NO: 42061 - DNA, 524 bp, Zea Mays
acactcggaccccaaatttctattcgcctcagcggagcaaacggttgggttcgcccccaatttcctccatgtgtcgccgcatggcccctaccccctgctccaactctcactgccgcgggaacctgccggactccgtcaccgctcatcccctccatcagtctaccagctagacgcggttccttcactaaatctgtctcccgctcctcgccactccacccccgcctggtcgcaccactcctccagccagccctatcgttggcgcagctcctcgcagcctggcctcttgcctcgtcgtcgtctccctatcggcccggcccctcgcctctccgtagctgccgttgcggtcggcctaccggtgcaggagaggaggcgcctgaatctaggctaccaccaagtcgtttcgatccctgctgatgatcgcttatctgctcacggaaaggagacagattcatggttaaacatcatggggtgcggcagcgacttcatggggtgttcgaccgcttccgacgcgcaaagcgaacgac

SEQ ID NO: 42062 - DNA, 1038 bp, Zea Mays
ataccagagcattagacgatcgtactttgtgaggcgctggtctcttgcacagactcggagcaagataggcctagctggttacaagccaagaacaagtagagcggtagagggaaaatatatctggagagggaaacaatggcgggcgaggagggtcttaaggtcctcggcctgcaggtgagcccgttcgtgctccgcgtgtgcttggcgctgaacatgaaaggagtgagttacgagtacgtcgaggaggacatatccaacaagagtgagctcctgctcaagtccaacccggtgcacaagaaggtgcccgtgctcatccacaacggtaagcccatctgcgagtcactcgtcatcatgcagtacgtcgacgagctgttcgccggccggccgatcctcccaaccgacccctacgagcgcgccactgctcgcttctgggctgcctacgccgacgacaagcgtggtacggcatggtgaaggcccaggcggaggaggagagggcggagaaggcgaaggagacgctcgccgccatcgagcacatggaagtgaccttcgccaagtgctccggcggcaacgccttcttcggtggcgactccatcggctacgtcgacatcgtgctgacgtgctcggctccttcttgttctggttcgaggcggtgcgcagggttttcgacctggagatcattaacgctagcaagactccgctgttggctgcgtgggcggagcggtttgtagggactgtagaagcgaaggaggtggtgccgttgcccacggcggacatggcggtacagtacatcaataagcttcatgcccccctgccgccgccatgagttcacaatgagtcgtgtaagtgtaaccaagcagggaaaaaggtaaatggtgcggtgctttggtccaaattccaaccgaataatgttcaaagcttatattgataggcttgggttgttgtcatcaaatattgtggttcagtcgtctcctctgcaataaatataaatatgattattactttctttgccgtaaaatacttatccatattctttttttc

SEQ ID NO: 42063 - DNA, 1146 bp, Zea Mays
tagcgtcgccgctcgctcgccctcatcccccaatcccctaggcctccacttctccgattggggcgatttcatggcaagcgggcatagatccgacggccgctctgtcctctgcgcctccactgccgctctccttgtcagtcgccaatggccaggaggaggaggaagggtcggccgggccaccgctggtggccatggcatcccagtgtgccccgcccttgcctcctcggccacgcgccgccgcgccgttcctcctcggccacacaccgccgcacgcccgtcctcctcggtgcgccgccctcaccccctcggtgcgtgccgctgcgcgcccgtgcttcctcgcctccacgcgcgtcctgctgagaccacagagcgaagaagccccagcctcctgtagctggtctgcctctgaccctctcctctgcgcttcccctgcgtcggccctgctcgtagcttggaggcggcggcattctccggcaatggggtgcaaggcgtgcgacaagcccaagcccaactaccgcaagggcctgtggtcgctggaggaggaccagaagctccgcgactacattctcctccacggccacggctgctggagcgcgctccccatgaaagccggtaccaatgtcaagatagctgccattccttcaagcgtcgtggttctgacttcagagacctttgactcaattgtccttgatgagttttatgccccatggtgtggtcactgcaagcatcttgctccgatttatgagaagctggcttcagttttcaagcaggacgacagtgttgtgattgccaatcttgatgctgacaagcacactgacttggatgaaaagaatcacagaagtgattctctcgttgtttgacagactgtaaggacttctgcttactttccgatgccaaagatttttggaaattagtgttgaactcatttgatgcattggtgggacaacccttggctgcaaatgcagcacaatcaacttgagctaccttgggttgagtatgatagttttccaaagaattggtgtcagtcatcaactgtctctcgtgctgatttctggcaagaagttcaacaatgtccatggggaagtcgtctatcacattctgtttctcgtgcaccttctgctttcctttcttattctttggtatatt

SEQ ID NO: 42064 - DNA, 1224 bp, Zea Mays
cccgtcccctccgtcgaaccaaagctcgcgagccgcaaagccgcggcgacaaccacttgtttaagccgcgacctgcgtcccagcatcagtcagtgcatcagcattcatcgccccctgcctccccttccattcgccctcctcccactccaccagctcctgcctgcctataaacccagggccgccctttgactctccttccctgtccagtggcggggccgcttcccttgcgttcgcggagagtctgtctgtctgtctagctagctagctagctgccgagagcgtgaggaggaagggggatccatggcggcggagaacgaggagaaggagacggcctgcgcggggtacaagcacgggccgccatgggtgttcaaaggcagcgcattgtaccagctgcatttggtgaaggcgtcgacggcgcgggccttcgtgccgcgggacctccgcctggttgaggccttcggctacacgctcggcggcatgttcctggcgcgctaccacgacagccctgccggcgaattcgacgagctcgtggtgatcgccggcattgtgtggaacccgccgacctcctgcgcgctggggaggggtgtccgggtgcgctgcacttgctccgcgtggccaacttgctgccctgcgcagctcagctacagcctacagccgcccgtggtttcctactttcctccgtcttcgaaatgcagcagttggatggaactctgaatagtggtgggctgccagggtgctggtgaacagcgtcgaagcctgccggcacggccgcaaggaggtaggactgccaagccatgtcgccacattctcgtcaaagaacgaggctgcttcgcttggggatagaccgttggctagaccaaacagcttcctcaacatgctggggatcgggtcgacagccttcgagcaagggaatggccgcgagattgaggtttcagagtccaagggcggctcgtctactcggcatctgtgcaacatcagcctgccatttaccggatcacataaggaccaccagtgggcgggcccagcaatcagaatgtcactcccgagtttcagcggacgtacagtggaccatcctgatcttctcaagtactcctgtcaagtagaatgcaggtgatgacaaaaaacaaaactctgtgaacgtcctgggctagtgagctatccattgatggcgtacgatctacccgtattcgacgcactgttgacatgtttccttccacagggtgc

SEQ ID NO: 42065 - DNA, 1110 bp, Zea Mays
ctcgccaggaaaggaaggcacggacggacggaccactaccgcgacatcactcactccgccctctacacctcgcgctcccaccgcccggtgtcagatctcgccgccgcgatgggctccgcccactcgtccgtctccaccactggcggcgaagacgaagaagacgacgaggatccgtccgcgtcagccgtctcctccgcgggcgcacaggcgccaccgcccgctctgtcgccgtcgccggtccgcgtgcccccggcctccgcgtccaaagtgctggagcaggagcccgaggtgctgccgtgcctcgccgcggactcgccgctctcgccgcagccctcggcggcgggcaccccgcgcctcctcgcgggtcccggcatcaaggtctgggacccctgccacgttctcctgcccccgccgccgccgtctccgcacgcagggaggcaggttgacgccgcggccatcgaggtcgttgtggtcagccacggcgagtgcgcagccgcgatgcgcccggaccttgtcggcggccggtggccggccacggcgctcacggcgcgcggggagcgtcaggctcgcgcgctcgctgtgttcctgcgctcccgcggcgccaggctcgccgccgcctatgcgtctccgcttgaccgtgcgcgcgccaccgctgctctcgtctgtcggatggctactgctgcatggtttagctctgcaagccattctactgaaaatatcatcaaaatttctagcctttgttggtacctatctgtcatgtttgggcgcacgtacactaggcgtcgccgagccagggacgtgcgccgtgcgcaggagcgcgccaaacagctggccgacgttgagaaggaaagaggacgctgagaaggaaagaggatcagcgcatgactgagaaggaaagaaagggaaggaaagagtatcagcgcaagaaggaaacaaagaataaggaaacaaagaagaaggaaataaagaataaggaaacaaagattagcttgctattttagtcctaaattagaggagcctgctgctttggtcagttggacctcaggctatttatatcgtgtaaccgtactcagtcaagtcaagcagaaattaaaccaatctcgcctctct

SEQ ID NO: 42066 - DNA, 1484 bp, Zea Mays
ctgcatgtactaaaaacctctaggcacgttaatgaagtatatcctaaggtgctcgatgctttagtcgaccttttctgcaggtcaaaggtttctgcagatgttcgtttggttggtggctggcttttccggcaactgctgccccatggagaggaagagttcactgcttttcatctaagacgactaaaggattcacacaaggattgtagctcaaagctttctgaggaatctggaggatgctggtgtgacatgcttcttcctattgttaaagaagcttggaggaactgcaagaaaggcatcttcgccaccaaaaggatccaaatctattattgtacccatggatttgtgttcatttgaaggtgattcttctgttgccatcgcagaggcactctatgagatggttaagggttttgtgctgcagcatcaagttatactcttctgtcttggagaaactttcacagagctacctcctatttaccctctggttgatttgcctataaatactagggcaagcgctgcagattttggtggttcagttcctaaacctgggcttgaagtcaacttagtcgacgctgttccttgtcgaatagcatttgagaggggcaaagaacggcacttctgctttttagccatagctcatggaacttctggttggattcttcttctagaagaattacctctaaaacgggaacgaggaattgtccgtgtcatggcacctttggcaggatctgatccaagaatagatacaaagcatgggaagtggttacatctacgcattcgcccttcttcggtcccttttttggacactgagaagcataaagcgaagacaaagaagtatcttgttgatgggagatggacccttgcttttagggacgagcagtcctgtaaggttgcagagagtatggttattgaagagatgaaactccaacgaggtgctgttgcagagcaattgaagccattggttgaatttgacatgcctgaggatggaatgcagcacccccagacttcacatgaaaccccttctgatgatggatcatgactaaattttcatcaagtgcagtgttgagcttctcaattaaggagacatggcaacagatggccgcaaaagtgccgcattgaacatttcaagcatgctggcaggaaaacccaccatggcaagtcatcgacaattctgtacattacattgggagattagagatgtctccttgttaacacacaactgtagagtttcgggccgtcctgagttgaactagctggataggattctttgtacaatagtttgtttctctccttgcccgttgtaaccttatatatcacatcaaaacccattctttgttaagtttcagggcacagttgtgttgtgcacacgaaatgtttaaagaaatttgcagttagtcatacctgttgtcaaagcaagccttgcctatgtggtaataaaatgtcagatcgataatttttcttggaaatatgaatgttcatggactgtt

SEQ ID NO: 42067 - DNA, 2087 bp, Zea Mays
gacaaaagggaaaagaataactgaaaaagtaaatcgctcaaaaaaaaaggaaaataaaaaaaaaatcgtagagagttcgattggcagttgctgagcccgagcgcgccctccggcgccgacaagccgggaccccacctccgccggcggcgatgggcaactcgcaggcttcgccggcgtccgcctccagctcccgcttcgtcatggcctcgagggccttcccgaagcaggagctggacggcctccgcgagctattcgcctccctcgcagcgcagtcgcggaccggcggccgcgccatctcacgccccgtcttcctcgaatactaccaggtccgggggcgattaggcgacaggctgttccagctggtggcgaaggagagtggcgggagcgatggggtcacgttcgaggatttgatcatctccaaagcaacatatggaaggggaactcgtgatgaggtcgatgaattcatttatcaactatgtgatgtcacaggagatggcgccttaacaaggtctgatttggaatcagtcttggcgtctgttcatgaaactgtatttgcaataaagaaggaagctgtcgaagtttccaacaatagaccattcgaagaattcctcaactctgcagtgttttcaaaggatgttgaaggggtctcagggaagtctatgtcattatcagactttaggaactggtgcactctcttgccatcattgaggaaattccttggaaatttgttgatgcctcctgattcagaccaggatttgaagtaccactgcttcattatcctgaaaacatctgtactgatacgctgcttctaaataaagagtatgcctggcatattggaggaggtttctcccaacatgaggtgcaagagtggaagcttttatatcatagttctcttcatggacaaagcttcaacactttcttgggcaaagtaacgaatggggatgctcagactgttctgattgttaaagatacagaaggatcaatttatggtggatatgcttcacagccttgggaaaggcacagtgatttttatggtgacatgaagacattccttttcaaatgctatcctcaagcatccattttccgccctactggagcaaacaagaatttgcaatggtgtgctgtaaacttcagctctgagaacataccaaatggtattggatttggagggcagccacatcatttcggactctttttatcagcaaattttgaccaagggcactcatttacgtgtagcacatttaccagccctcccctttccaagacaaataggttcaggccagaagttattgaatgttggggtatacaaatgagaggagcacaagatgaaaaactggagttagtcaaggggacagtcctcgagagattcaaggaggaccggaacatgctgaagatggttggtttggcaaatgcaagtgattaagtgatagaggatcacaatgatgtacatgatggagagtctgtacatcacatgttcataaaaataatcaaatctgagaccatgtttctatattctactgttcatattttgtcactcaaaatattcatctggtccacactttgtaacaattgaccagtcgtgaaggacagccgagccaatgttgcgtttgatctcaagaatgacgtcatccaagataagatggtctcatatgagttcatcccattaactttaatgggatgactttatcctttctgttgtactaatgtgcttgtaagatgagaaagtatctagatctttagtggttttggtgattaatgccaacacaagattattgtaactaacatgtgtgtttacaaagataaattaatgttaggtcacaatgatgaaaatgatttgggcagtcttttgtcttgatgcctctgattatgatttcctaaaattttcaaatgatgaaagataaagttaaagatggactaattctaagtatcgtttagagttgagaaacacttagaataatttagaactttgtttttatttaaccgcactataaatgaggtatgaattaacagtctgatctagataagtcaaataagtttagtatgatacacactaattatctttagctttaagtggcttaggagaggcc

SEQ ID NO: 42068 - DNA, 1175 bp, Zea Mays
aaaaaattcagtcagaaacagacacgaacacgcaccatgggccgcgctttgcaattcgtgcttttaggtgaaggcaggattctgctgaataatctcggaaattgctgggggtggatcgaaccaccagctagctttcggctaaaaagacgttgtaaacgcgctggacaatccgagttccgccatggaatctgcttttgccggccatgccattgccaggcagtcccagctgtcagcacaacaccgctcgtgctgtttctatccagaacggcctggacccatctgcctgtagacctgagctcacattcttcacacagcgaaacagaccacggtatcctcttccatgaacgggcggagtcaattttcaactacccaccttagacacccgcagacgaatctcacgaagaaacagcccgctcgcctgacttgaacacgccttccacgccttggacgtcacagtagcaggtagcagcttgccgatcaggacaggtcctctaggagcaagatccccaggccaggccaccctcttctagaaatatctacaaaatagcagcgaccccatgaacaggggcccccctcaattgacagcacaactgtgaatgcatacatcttggcctatcactgtcgaggtaagactgaagggaggccagacgcccaaggcactgaagcaatgcatgatatgacacccatctgctcctagtatcgccgtccccgctgggtggaggtggaattggaaggaaggaacctgaagatgcacggcgcggcggtcttcgtggtgcagaccggcagtgcagtgcagtgcagggggctcatccgcgcccaagttttggctcgagaagctgtgcataccgatcgccgcgtctgtccgtccactccctctgcgtctgtgaatgtgtgccagagtgaacgtgtagtgtcatcctgtacatacgtatggaacacaacattcgtgcttcggcctcctgcagccaatgcgatccaggatgagccgtgtgccaggtgcttgcgttgcctcgtcggcccggaattgtgaatatgcctgtcacgtgcgggcggaggtggcaaatgggcatctctaaatttggtgtttatcctgctttcaagtggatttggaagccttttcctcttagctaaaacataagatcgctcttttatcttctgttaagaatttaagatcg

SEQ ID NO: 42069 - DNA, 2209 bp, Zea Mays
caccagcccaccgactggtgttagtgtgttacgggcttacggccgtgttcatcttgctgctcgcctgctctccccgttccgtcctgcgaggaggagatccgcattccggagggaaacggcgaagggtctcactcgatttatactcgtgccgtactgctgctgctatcttctctatccccattactcgtgcaatggcgaggaggccgtagtgctaagtggagcagcggcaggcagcgcagcgcaggccaacgcggaattgctcgctgctgcggtccagtggcgtggcggcacgcgtgtcgcgttccatgcggcactagcgcggcccctgagatccatccgcagcagcaggcatgtcgcgcgcgttgtacaggggcgtgtcggggatcggcggcaagctggcggcggcggacgaggcgtacgcgtactacgaccccaaggagcccagcgagaacagcattggcggcggcttcggccggggcggcgcgcggaagcggcacctcgcggacgcggcggtgaaggtcggggtcctgctgctggtggcggccgcgctcgtgggctcggtcgcgtgggcggggacgctctacgcggggcgcggcgcggcggcgcgcgcggccgccgccgccgcgcaccgcgggtaccggcggctgcaggagcagctggtcgcggacctgctcgacatcggcgagctcgcgggcggcggcgcccgcgccaaggaggcggaggtgtgcccgcccgagtacgaggactacgtgccctgctactacaacgtcacggacgccgtcgacgtctcggatctgggcgccggcgtcgccataagctacgaccgccagtgcacgcgcgacggcagggtcacttgcctcgtcgcgccaccgcggagctaccggattccggtccgatggcccagcggcaagggcttcatctggaaggacaacgtgcggattagcgggcacgagttctcgtccgggagcctgttcaagaggatgatggtggaggaggaccagatctcgttcccgtccgacgcgcacatggccgacggtgtggaggattatgcccatcaaattgccgagatgattgggttgcgtaatgagttcaatttcaatgaggctggagtcaggacagtccttgacatagaatgtggatttggtacctttggggcacatctttttgagagagatctcttgaccatgtgcattgctaactatgaagcatcaggcagccaagtgcaaattacactagagagaggcattcctgcaatgattggttcatttgcaacgaagcagcttccatatccctatctttcctttgatatggtgcattgtgcgaaatgcaatatcgaatggtacaaaaatgatggcattttcttagttgaagtgaacaggcttttgaggcctgatgggtattttgtatggacatcaaatttgaatacacatagagccttgcgtgacaaagaaaatcaaaagaaatggacagccattcgtgactttgctgagggtctttgttgggagatgctgtcacaacaagatgagacaattgtatggaaaaagacaaataaaagggactgttacaattcgagaaaatctgggcctgagctatgtggccatgatccagaatcaccatactaccaaccactaaacccctgcatatcaggcacaagaagtcagcgttggatccccattgaatatcgtaccacctggccatctcaggctagacaaaactcaacagaattggacatacatggtgtgcatcctgaagtctttgctgatgatacctcaagctgggactccatggtgcgaaactactggtctttgctatctccacttatattttcagaccatccaaagagacccggtgatgaggacccacagccaccatttaacatgctaaggaatgttttagatatgaatgctcactttggtggatttaatgctgctttactgaaggcaggaaagtctgtatgggtgatgaatgttgttcctacagatgccccaaactatctaccgctgatatttgaccggggttttatcggggttcaacatgactggtgtgatgcatttccaacttacccaagaacatatgatatggtgcacgctgatggttttctatcacttcagaagaaccacaagcatagatgttctactcttgacatattcttggaagttgaccgcatcctacgaccagagtgtttggatatgtgtgattctaatctcta

SEQ ID NO: 42070 - DNA, 2277 bp, Zea Mays
cgaacaaagttggacccagccttgcctctccccgtggagaattcaaagctccgccgtgtcctcttctggataccggaagtcgtcgccgtccttggaatggcttggcttccttcgctaggaggttttctttctttccggccgactctgtttcttcgaaccttgctcttccagtcagtcgtccttggctcctcttcttccccacacaaacacaacggaatagtcccgaccatactggaaaaccggcgaacttggaaagcaagtcaacaagagtatggcgtccatggagagcctgatcgggatgatgaaccgcatccagcgcgcctgcaccgccctcggagaccacggaggaggaagcgacttgcccaccctctgggagtcgctcccaaccatcgccgtcgtcggaggccagagctcgggcaagtcctctgtacttgagagcattgttggcaccgattttcttccccgaggatcgggaattgtcacgcgaaggcctttagtgttgcagctgcaacagacagaggatggatctcaggaatatgcagagttcttgcatatgccgaaaagaaggttttcagactttgcccttgttcgccaagaaattgctgatgagacggataggctgactggaaaaactaagcaaatatctcctgtccctattcatctcagcatctactcgcccaaggttgtgaacttaacaatgattgatcttcctgggttgacaaaagttgctgtagagggacaatctgaaagtattgtgcaagatatagagaatatggttcgctcatatgttgataagcccaactgtattattttggctatatctccagcaaatcaggatattgcaacttctgatgcaattaagctctcaaaagaagttgatccaacaggtgaaaggacgttcggtgtgttgacaaaactggacttaatggacaaaggaacaaatgctctcgatgttcttgagggaagagcctatcggctgcagaatccttgggttggaatcgtcaatcgctcacaagcagatattaataggaaggttgacatgatttcagcgagggaaaaagaaagggaatattttgaaacaagtcctgactatgctcatttatcaagtcgtatgggttctggatatcttgctaagcttctttctcagcatcttgaatctgttatcaaagcacacattcctagtatcacagcgacaatcaacaaaactatagacgaacttgaatcagagctggacatcatagggagagctgtggctgctgatccaggggctcaactgtacaccatactggacctctgccgtgcttttgaccgtgttttcaaggaacatcttgatggagggaggtcaggtggagatagaatatacggcgtgtttgaccataagctccctgctgcttttaagaagctttccttcgaccgctacctgtcggtgcaaaacgtgaagaaggtggtttcagaagcagatggctatcagccccatctcatggcacctgaacaagggtaccggcggcttattgagaagggcatcaactatttcagaggaccagctgaagccacggttgatgcggtccacgttgttctaaaagacttggtcaggaaatccataggggagacagagcaactcagaagatttccgacgcttcaagcagcgatcgcgaccgctgcaaacgaagccctggagcgattccgggaggacgggcgcagcacggcgcttcgtctggtggacatggaggctgcgtacgtgacggtggagttcttccggaagctccctcaggatcctcctgctgatgcgcctgctagcaaggctggaggcaagccttcagcggagccggcggctgcgccgcctcctgaccgctacggtgacgggcacttcaggagcatcgcctccaacgtgtcccagtacatccggatggttggagacgagctcctgcagaagatccccaaggcagctgtccactgccaggttcgcgaggccaagaggtctctgctcaaccatttctacgtgcagatggggaagaaagaggctggggagtttgggcatatgctggacgaggacccggcgatgatggagcgccggcagcagtgcttcaagaggctggagctgtacaaatctgccagggatgaggttgattctgtggcatgggggggcagcagcagataggtcagtggaagcattgtattcgtagggatattcttgttgtatatacaatacaattctatatatattacggtattacatactctaaaaacaaaaaatgatataatttataataaaaaata

SEQ ID NO: 42071 - DNA, 228 bp, Zea Mays
atggcgaacatttcgtcgcccgtgacgaagctgctgaggctggccaagtacagggttgtcggacggagggaggttctggagtccggcgacatggcagtgctgttgcggaatgcgaaggccggggacaaggtgtcggctcgagcgctgctgcacctcatcctcgacggcgacgaaggggacgcctccaagaaagcttgtaggtactgatcactgcacattcaactccac

SEQ ID NO: 42072 - DNA, 275 bp, Zea Mays
ctatactgtctaccagacagtaagtaggtcaatgtttgccgtgaaatgatggacaacatgggatatccaaagcttgaacttggcttgtctgcaatgacaaaggatcagcttgcagatagccttgcctacaacagcttgaaggtttttatactttggcttgctattttgtaattttagttacggtaaactatttttgtggtaattcttatcgttactatttgttcacactttgtttgccagggcttaattctaagcaaggccctgaaggcccaaaa

SEQ ID NO: 42073 - DNA, 550 bp, Zea Mays
catagcgccctgctttgtttactgctcgtcgcgcgcttggaatccttgctgacgctcagccccaccgtgcacaaatgtggttccgtcgccaagccaccgtctcaaccttgctgtgcaggccgttgtgttgtctctgtcggtctgctcgccgtggcatagtcgtggaacttcctcggcgccgcgcgcgtcagatcgttgggtcgcgtcctgctcggctctcatgccattgattttggctctggtgtgggctcttctctggtgctggtcggcctcgccgtcgttgttgtgaccgcgagtcctgttgtctccctgcgccaatctctgcctatgctcgagccatgccactggtacccttgccgtggaactgttcgtcaccatgctcgacaagctctagtcgcgcacgcgaattttcttcgcttggccttaattctcatcgcgtcgtcaattccgccggttagcgtcgttcgtcatcgcgtcgtgtgtgctcgtcctcgccaagatctggccctgcgagctccacacgccttggctgcgctcaccgtgtcctccg

SEQ ID NO: 42074 - DNA, 3764 bp, Zea Mays
tttctctctcccacccaaccctcttccttccaccccatccccgcttctctctcgcctccgcttcgctcgcgcgagagggggccgacgacggaactctaggattcgcgcccgcccgcgcggccaagccaccaggatcgcgctccgcggactcgagggcgctagccaagctccagggcgcgcggatcgtgcaccgggcggggccggttaccgccgccatgtcatcgctcacccgcgacatcgtcttcctcgtcctccagttcctagacgaggagaagtttaaggagaccatgcataagtttgagcaagagtcggggttcttcttcaatatgaagtactttgaagcgaagggccatgctggggactgggatgaggtggagaaatacttgtcaggtttcaccaagatagatgacaataattattcgatgaagatcttctttgagattaggaaacagaagtatttggaagcgcttgataggcatgatggagcaaaggctttagatattcttgttaaggatcttaaagtcttttcgacattcaatgaggagtcatataaggaaataacacagcttctcacttttgagaattttagccactccaacttcctccacctagtccatctttagctcgttggctgacgaatacagccgtcccttcatctgttcagtctgctgttgtagcagcctcgtcaatacctgttccacccaatcaagttgtctccatgttgaaacgcccaactataacagactatcaaagtgcagtgcctgagcaactaatgaagcgcttgaggcctggtggacatggcattggtgagaccacatatcctactcccattcctcaacgtgcatggtcaatggatgatcttccaaggacagttgcttgttcattgtcacatggatctaatgtaactagcatggattttcatccaactcgccatacactgcttctagtgggatctgctaatggtgaatttacactttatgagatcggtctgcgtcaaacattactttcaaagccctttaaaattctggatacaaatgcatgctcaccacaatttcagaatgctgttgttaaagacccccccatgtccattaatcgagttacctggagccctcatggagaattgattggagttgcattcacaaaatatttgatccgtgtatatgcatatcaaccaccaaatgagacacgacatgttctagagattgttgctcattctggaggtgtaaatgatatagcattctcacgaccaaacaagcaactttgtgtggtcacctgtggagatgataaactgataaaggtatggaatatgcatggacagaaattatttacatttgaagggcacaaggcgcctgtgtattctatatgtgcgcatcacaaacagagtattcagttcatcttctcaacttcccttgatggaaaaattaaggcctggctttatgacaatgtgggatctagggtggactatgaagctcctggcaagtggtgtactactttgctatatagtgctgatgggactaggttgttctcatgtggaacaagcaaagagggagactcatatttggttcagtggaatgaaaatgatggatctatcaagaggacatattctggattccgtaagaggtcagctggtgttgctggtgtagtgcagtttgatatagctcagaatcacattttggctgctggtgaagataacaagattaaattttgggatgttgataataataatatgctgatctgcaccgacgctgaaggaggcctcccagctcttcctcgcttgaggttcaataaagaaggcaatcttcttgctgttactacagtggacaatggttttaagatacttgcaaatgctgatggactcagaaatctacgcgcattaggtagcaggcctcctttcgaagcatttaggctacaatacgaagatgcttctatgaaggtctcaggtgctcctgttgttgctaccatatctcctaacataggccgaatggatcacttggataggaattctcctgcaaagccatctcctatgctgactggtggcgatacagcatcaagaagcatagatataaaggcaagaatctcagaagaaaagtctgataaagcaaaagcttcggaactaatggaggttctaaatccccaacaatgccgtgtagcaacaatgccagaaactcccgatcaggctagaaaggttgtccgacttctgtacacaaattctggtgttgggttgctagcactagggtcaaacgccattcaaaggctatggaaatggagtcgaaacgagcaaaatcctagtggaaaagccacagccagtgttgtgccacaccattggcagccaaatagcggtcttgtcatgacaaatgatacatcggataccaatccagaggaggcaatcccatgcattgcactctccaagaatgattcctatgtgatgtctgcttgtggtgggaaggtttctttgtttaccatgatgacatttaaggtgctgacaacattcatgccgccaccaccagcatcaacatttttagcatttcaccctcaagataataacatcatagcaataggaatggaagattcaaccattcacatatacgatgtcagggtagataaggtaaaaactgaactcaaaggacatcaaaagaggataactgggttggcattctccaccaaccttggcgtacttgtttcttcaggcgccgatgcacagctctgtgtgtggaccaatgacacctgggaaaaaaagagaacagtctcgatacaaatgctagctgggaaggctccttcaggaaatacacgggtccagtttagttctgaccaaaatcacttgctagtagtacaagagactcaactagccatatatgatgcatcaaaaatggagaggatctatcagtggataccgcaggacacattgtcagcttccatatcccatgcatcatactcatgtaacagccagctagttttttctgccttcattgatggtaacataggtgtttttgacgcggagaacttgagattaagatgccgaattgcgcaatcggtgataaacagcaatccacatgttcaccctcttgttgtcgccgcacatccgcacgagccaaaccaatttgcggtggggctgtcagatgggttcgttaaagtgctggagccattggagtccgaaggaaaatggggaacacctgctccggtgaccaatggcacccccaacggcaagacaccagcttcgtcgactacgagtaaccctgctacggaccaaatccaaagatagattgtatttcctaagcattcttctgtaagggctagtttggcatccctatttttctaaaaaaaattattttattaaggaaattagttcatttttctttgggaaaataaaaattccttagaaaaatgctgttgccaaactagccctaaactttctaattacaccgacttatctgtatgtgcatgctgttaggatgtcattgccatttgttgaaaaaaaaagatagaataggttcaagttcaggtgtggttagttttcagatagagatctcttccagatactaccctagtttttttaaggaaaggctgtagggaaaatccctacaacatgattttgttaaataatgaaaggaaggggacaaattagatcaagaaaagaaaaatgattcaaccggctatcgagaatttagccacaaagacaccctaagcctctgaccgctattaaacctaagcatttgcaacttcagcatgtcattgaagctgtccttccaagagaggaaagaagtggc

SEQ ID NO: 42075 - DNA, 2633 bp, Zea Mays
cgatgtcgctccctcttctccccgtccgatccgatctggaaggagaagaaggactactcgacggcgatactagagaggaaaaagtcaccgaaccgccttgtcgtcgacgaggccaccaacgacgataactccgtcgtcgcactgcaccctgacaccatggagaggctgcagctcttccgcggcgatactgtgctcctcaagggtaagaagaggaaagacactgtttgcattgtccttgcggatgaaacctgtgaggagccaaaggttcggatgaacaaggttgtccgccagaacctgagggtgaggcttggtgatgtggtttctgtccaccagtgccaggatgtgaaatatgggaagcgtgtgcacattcttccaattgatgatacagttgaaggcattacagggaacctgtttgatgccttcttgaaaccatacttcctagaagcatacaggcccgtgaggaaaggagaccttttccttgtcaggggtggaatgagaagcgtggaattcaaagtgatagagactgacccttctgaatattgtatcgttgccccagatactgaaatattttgtgatggggagcctattaagagagaggatgaggagcgtcttgatgaagttggttatgatgatgttggtggagttagaaagcaaatggcccaaatcagagagcttgttgagcttccactacgccatcctcagcttttcaaatctattggtgtgaagccaccaaagggcatattgctgtatgggccacctggttctggaaagactcttattgctcgtgctgttgctaatgagactggagcctttttctttctgatcaatggcccagagattatgtcgaagttagcaggagagagtgagagcaatctcagaaaggcatttgaagaagcagagaagaatgctccatctatcattttcattgatgaaattgattccattgcacccaagagagaaaagaccaatggagaagtagaacgtcgtattgtttcacagctactgactcttatggatggactcaaatctcgttcccatgttattgttatgggtgctacaaaccggccaaacagcatcgatcctgctcttagaagatttggaaggtttgaccgggaaattgacattggagttcctgatgaagttggccggcttgaggttctccgtattcacactaagaacatgaagctagctgaagatgttaatttggaactcatttcaaaggatacccatggatacgttggtgctgatcttgctgctctttgtactgaggctgctcttcagtgcattcgtgagaagatggacatcatagatcttgaggatgagacaatagatgcagagatattgaactcgatggctgttacaaatgaccatttcaagactgcgcttggaacaagcaacccatctgctctccgtgaaactgttgttgaagtcccaaatgtctcttgggaggatattggtgggctggagaatgtcaagagggagctccaggagactgttcaatatcctgtggaacatccagagaagttcgagaagtttggcatgtctccatccaaaggagttctgttttatggtcctcctggttgtggtaaaaccttgttggcgaaggcaattgccaacgagtgccaggctaacttcatcagtgtcaagggtcctgaattgcttaccatgtggtttggtgagagtgaagccaacgtccgcgaaatttttgataaggctcgccaatctgctccttgtgtcctcttctttgatgagcttgactcaattgcgactcagagaggaagtagtgtgggtgatgctggaggcgcggctgatagagtgcttaatcagctactgaccgagatggatggcatgaacgccaagaaaactgtgtttattattggtgctacaaacaggcctgacatcattgatcctgctcttctgaggccagggcgtcttgaccagctgatctacattccactgcctgatgagcagtctaggctccagatcttcaaggcctgcctaaggaagtcccctgtggcaaaggatgtggacctgaatgctcttgctaagtacacacaagggttcagtggagcagatatcacagaaatttgccagcgtgcgtgcaaatatgcaatcagagagaacattgagaaggacattgagagggaaaggcggatgaaggacaaccctgaggcgatggaggaagatgaagtggacgagattgccgagatcaaagcagctcacttcgaggagtctatgaagtatgctcggcgcagtgtcagtgatgctgatatccgcaagtaccaggcgttcgcccagacgttgcagcagtcccgtgggttcggcagcgagttccgcttctcagagcagtcggcgacagctggtgctgctgcagccgatccgtttgcttcggctggtgctgcggctgacgatgacgatctatacagctaggtgtcctgttgggttggttctgggttgtgcaatatcagtctcatcagtcatctgtttaaaactctgattatacttagacacgggatgtcatgcaatgatatttgttttccgtacatttggacgttgagataatgcctgtttattttatgccatactctccatgccattttatgaatgattgtttgtcattgagtatatgagtc

SEQ ID NO: 42076 - DNA, 3897 bp, Zea Mays
gaaaaaacggaggaaacgagaaggccctcctgcctgccccttgcttcctcccgagtcccgtactcccgtggcggcggcggcggctgctcgacccgcccgcccggccgccatgtcgatctgcgggtaccactccccacgcttctccgaggatattacttggctcccgcaatggcttcagccgtatagcacgccggtggttggcgagcaccggaacaacagtaccgccgtttcatcgctttcttgccagaattgtgcgtttgtcgggcacccttcgcaggagcatcaggattgtcagaacgccactgatggttatagcggcttcatcttgcacttgtcaggagatgaggacacggtggttagttcaccggtcagcagcaatgtgctacctttctctttgcgtgtgtcttcagaaagtgccgcacaaccttccctagctgaaggcagtggcaatcctcagataccaaactctggtacgtgcaatggtctatccgagagcctctgtgcagatggtgaagaacaagaggtcaatgctgtctcccagaatcagtttgaggctaacgatcctcaggttgatatgccgacaaaagtggctcgcaaggagatcagtatacaacctgatacaatcagacatagaagacatggtttcaatggtggaaaggttgatgttcgaaagcttcgtaatgttgatgtaaatgatgcgattgaactatcgattgctgcatctgaggccatggttattgcagagatgatacttgatgattctcagcctgataaatcggctgcagctgctatagaagctgctctacacgtgaaagaagcccggaagcaattctactttgaggagccacaacatgcttgtggatcctcagaaggtggtcttgatgagattgattggcttgcagaattggatgagtctgaaatggttgacgcataccaagatgttgctctgtccctcatccacattgcttgctcatctcaagatcataacacaggtgatttgaagcaacaaaattcccatcctacttgtcccccatgtgatgcagacacacacatcttatgggattcttcttctgagaggcaaaataaaaaatggaacagccaaaatgctgatagtgatgaccatgtatctgattcttttccaaacaatcagtcagcaggtgtgccaccaaatgaaccaactccatgctctgcctctgtaaagcaagcagctctatgtaaaacaatttcatgttcaagaaataagaaaactgtcctccaggcgtcaactcaaaacaatgctgcttttcatggaaccttgggagctcttgcaacataccaaaatgttcataagaaagttgcaggagttgctgcacagacgaatgttggtatgaagaagcgtgtaaaaggtttgtttgaggaagaaaatagctacatttctgattcaattagcacagataggcgctgtcctacttctagagcatcatccatggaaattgtcgcctcttcaagggcatctttgtattgcaaagctgaaggtttacttgaagaaaatcatcatcctggaactgaagagttgtgttgccaagtagtatgttctagcttgtcacaagtggatcctttatgttccattgttccatgtagcatatcttgcgatgaaggtcccagtagccaggctcctgtgtgcaaacagagtgaaggccatgaaggtcccagtaaccaggctccttcgtgcaaaaagaacgaaggcaatgaaggtcccacttgcctgacacctgaacgcgaacatagtaaaaaaaaggaggaagaatttatgcataccaaagaatttcctatgatgcaatacctggatgaggaggctggtccatcttgtgtgcctttagttaagccagcagattctaatgttccattccggcgaaggaaatacagttcactaaggccatttagcacaatagcaactaagtcaaacatatttggaagtacatcaaattctaatgctgatgttccagtttgtcagcttgagagattcacacccattgttctaaataagaatgtacagcgtgtgcaagctgccaaggaattcatagaaaatagtgctggggctgaaaatttggaagatttctctgcagttcggaagcagacatattatcctcaggatggcagtgaggatcaaatcagggagctacaggtcccacgggaagtctttccgccaacagagaatttggttgttaaacagcaccttaaaagaaaaagggtccaattttcagaagcaaagcgtagtagcagaagaaccaagaacaatagaaggatcctgactaaatcaagattcagtcgatcagatagcagaacaggagagatgcttgagaccagagagtacactgataacaaagaagacacatttcaaggagtagagtttctgttgactggatttcctaaacagaaggaaaaagaaattgagtccctaatacgaaaatctggtggctatgtactttctaaagtgtcaccctttccacttgataaaagaaagaacatggctgagtttccaagctggaatcctcccatagtactttcgcctaaaaaggtgtcaacagctaagttcttatatggctgtgctatagatgcctggatattgaatcccatttggctcttcgattctcttcaagccggcatcatgctgccacctggaaagtaaggtatttaattcgacaaaggaatgcccagaagcataattcatcattcgaccgcccacttcacccaaaatgtaatacattgatatttgatggagtaggattcttgatccacggcaaaatcagcttctgttcaaaattttccaacattgtcaagcatggagggggccaagtttttatatctcttcagggattagttcaaagcttgaaggatggaagtacatcgcgtggaatcattcttattgcaaacgcggctagtgcgtctcgtcatctaacccattgtggtttggagcatgacataaatacagcgacagcaagctggatcatcgctagtttattttctggtaaattgattccattgaagaaagatcgctgtgcttcatttcgccgaatcaagatgccattgttccaacaaaagcaacatgtattttacatgagtcaagagatatgatctctgctgcatcacatagctacaataccatgggaatctcaaatacttctcactgaaacatgactgctatgcattcactctgatgaacctcttttaaaagaagagtttgtcacagcatttttttgtcactcagaaatccctctgttcagcaccaaggtcgtattcttttgtcacttcacaattgaaggggaagctaggaaatagagcattcttcaatcatggatttacggcgccctatcaggctacagctgagaaagggttagttactgctcgaggtgagcaaagtattcatcttccagctacatcattctggaaacttggtttctcaacaacatgacaagtgatccaacaacatgacaagtggatcacggaaggtttgaaggggattgagggggaaatgaactaatttcctcctcaattccctctaattttccgtgatcgctggtcaccaaatcagctctaatcatggcatcataacacaattttgcagtccagaatcaactgtaagcagttccttatatgttgtagattgtagcatgtaaatcgtaaatagaaataccagatgtaatccccctcctcacccagtttgtaatcactaacctgcgatgcgctgactattaagcccttgttcggtttcatggaaatcgaatgggattaaggcctggttcggtttggcctggaacggcctggaagattgcttgctccatctgaaattattccacctggattaaaactggaagcaacccagaatgctgttcgcgtagacccaatcctgaatgaaac

SEQ ID NO: 42077 - DNA, 1659 bp, Zea Mays
atggggctgggggctgcgatggcactgggcgacccaccggcggactacgcatccatcgcggcggtggggctgtttgtggcactcatgtgtgtcggcatcatcgtcgggcacctgctcgaggagaaccgctggatgaacgagtccatcaccacgctcttcatcgtgttaagccaagatgagacaccattcttgtacagcctcgtgtttggtgaaggtgttgtcaatgacacaacttctgttgtgttgttcaatgcaatccagaactttgatcctggaaatatcagcggtgccaaattactgaacttcattagcagtttcctttatttgttcggctccagcaccattcttggagtagcttctggacttcttagtgcttataccattaagaagttgtactttggcagcccggtaaagtctatcgctttgagcaacaccattttagccttggtgctggtttcaagagctgcttttgttttcccactatcctttctatcaaatttgaccaaaaaaactccaaatggaaagatatcttttaggcagcaggttattgtttggtgggcgggtctcatgagaggtgttgtgtctattgcgttggcttacaataaggcgtttgacttaatgtttccaaggttctgtggaagtgcgaggcattttgggaggtgtgcgaggcattttgggagggacatcatcatgcccaacttgaagtcgtccgtgaccacaacagcgagcgcggtggagtacatggatgaagtattgaaggcgttgccgctagggatttttgaagcactaactgcattccccttctccccttctcccttcctgctgtgcgaagccgtgccccaaaccctctaccatcttatttcagttcccactctctaccatcttccaggaaaaaacactagcaatcttacatgagttccaagttttgcaggtcgttgctgtttgtgaatgtggtttggattatgacagacttcagttctgtccgacagatatgcaaaaaaagtactttgagaaacaatttgagttggctgaagcagtaaagctgcccattttcttcacatgtgtgctgctggtgaagacttctatgaaatcatgacacaaaatttgcacagattccctggtggggttacacattccttcactgactcaacagaagatcaggataggctactttcttttgagaagatgtttatcggcaagttcttgaggtagtggcgggaagcaaagaaatttctgacatagaaggcctgagtagaactctgtaccacaacacatgcaggctcttctttcctcaggatcttgacgcgtctactaatgcgcagcttgagagtggtactgccgtccaggattgctgatgtcagagtgattttttttaaaaaatgtttccttttggttggcgtttggtttcgtacaacttccaatatgcctatgaaatgtttttggtcttataattttccctcgctgccaattttgccatgtttcatgagcctgatgacatgtcaggcaagtcctgactatgtacaagtaccctactgagactatgccctaaaatcatttagggctgagcatgtacaagtacagtttgatggctatgttgttcactacaatcaaacaacaactaagctctatatctatattttatacaaatttttaaattcc

SEQ ID NO: 42078 - DNA, 1466 bp, Zea Mays
cttgctcttgctcttgtattcttgcttatactgtgggccatgctcgggaactagggctgaagattgatgcagtgccattgtgccaataagcaagaaaggcccactaaagggcaattgacgctgggcggcgacggcggggggagactgagcggccgaggagccggtgtggcatcggtgcatcgcagcggcctgaggtcgcgagcagcacagcagggtgcgccaggcgccgacgcggtacggggcaccgcgcgacgcgtgagcgcgtggccggtctcagcaccaagacgcatcaaagccggcgctaggcagggcactatcgcgctgctgcgcagctgtgcctgcgctggtccctggaggattagtgacagcactcaccaatttgtgttttgcagaattgggagaaatcaaataacttcacaacagatcaggaagctttagagcttggcaatggagatgagagcccgggaatctgtaagcatgtcgaaggatctaactggggaaatcacaccttttgccactgccctacatgatgtgttcctccactcccattgctcatcatgcttcaccaagttacttccacaaaccccttgtgtcatgtcttgcatgacatgctgttctcttcgatactgctgttcagagtgcttacgtgcggattcagtggtgcatgtttcctctggtgaatgttgcttttttgtggatcacctcaagagagcctccccttcctatgttactgaaggaacgagtgatttgcgtgctgccctccgccttctgtgtgtgcttgagatacatggtcttgtttcgcctgattcaatcaatcactacagtagaattggtggactttcagcaagtggtattgaggaagctttgaaggaaggtgaggttattgctgagaggatactggaggggagcttattgatgtcatctgctagaaaatcgagggcacagacttgtgttattttttcagacaggcttaaacttgagaagatggcattatgggcagtgattatcaatagcgtcgaggtgcaacttagtgaagggttagctttgggagttgcagtgtatggcccgagtttctcatggttcaaccatagttgctttcccagtgcttcttaccggtttgtactggctccaaggaatgaagactgtgcttcacagaaatcaaaatccagtgtagtccctgctagcaaaggagttgcagctgatgtgtggcatgcttggcaatacgaagatcattctactcatgcactgtgcaaatatggcccaagagttgttgttcgttgcataaaaccaattaacaagggagatgaagtgtgcataacatacattgatcttctccagaccagggaagcaagacattcggatttgtggtcaaagtataaatttatttgttcttgcaggcgatgtattgcatcaccagagccatacactgatcttattctgaatcaaactgaaacccactgagaaag

SEQ ID NO: 42079 - DNA, 2467 bp, Zea Mays
aggctctggaagacgtcgaaaagcggtccagcctatccccgcggtctggggtcaacaacagtacaccgtaccagagcttctcaagggtgccagagacggagaggagaggaggactcgaggaggaacaaggagagctagccgctagcgtccccttcttcccgctgcgcctgcgcgtgcctgcctttattcgctttcgtgccgttttgcatcctcccagaagctcgcatcggatagcagctgggtccgtgccacgcgcgcatgctttgtggatagggtagcgaacccggccggcccccagtacgtacgctggattattgcgtaggcatctatccgggcgttgcttgcatggtcgtaggagtttgggatcttgtttagcttgatgctttgatttaattccttgtgacctgtaattaagcatatcgtgagagtggtggtggacggacgcggcggcgcggtgagcaatgcccgtggaggtggcgcgggcgtcgtccggcgtgtcgcaacgtcgtcgatcgcgttggtagcgcagtagtgccgtagtggtaccgacgccggccaaacatgccgtgtgcgacgtcgtgctcctgctgcgaatcttgatcctggcgccccacatgctctcctgcttccggctgccgcggccggtcggcggcggcggcggggacgcggaccagcaggccgcggcggtgtctccccggcgggggccgtcgctgccgttcgcggcgagcctgttcgctgcgtccccgtcgacgtcgacgtcggggcgcgggaggagcgcgtggccgccggaggcggacggcatggagaagaagcggtgggacagcatggagtcgtggtccatgctgctggacacggtgatggggtccggcggcgaggggtcgtcccgggacagcgggcggcgggaggagtggatggccgacctgtcgcagctcttcatcggcaacaagttcgcgtcgggcgccaacagccgcatctaccgcggcatctacaagcagcgcgccgtggccgtgaagatggtgcgcatcccggagcgcgacgaggcccggcgcgccgagctcgaggagcagttcaactccgaggtcgccttcctctcccgcctctaccaccccaacattgtgcagttcatcgcggcgtgcaagaagccgccggtgtactgcatcatcacggagtacatgtcccaggggacgctgcggatgtacctgaacaagaaggacccctactcgctgtcggcggagacgatcctgaagctggcgctggacatctcgcgcggcatggagtacctgcacgcgcagggcgtgatccaccgggacctcaagtcccagaacctgctgctcaacgacgagatgcgcgtcaaggtggccgacttcggcacctcctgcctggagaccaagtgccaggccaccaagggcaacaagggcacctaccggtggatggcgccggagatgaccaaggagaagccctacacgcgcaaggtggacgtgtacagcttcggcatcgtgctctgggagctcaccacctgcctcctcccgttccagggcatgacgccggtgcaggccgcgtacgccgcgtcggagaagaacctgcgcccgccgctgtcgagctcgtgcccgccggtgctcaacaacctgatcaagaagtgctggtcggcgaacccggcgcggcggccggagttcagctacattgtgtcggtgctggagaagtacgaccactgcgtgaaggaggggatgccggtgacggcgcaccaggagctcaggctctggcgctccttcgccaagatcttcaggacgggctgcatcaccaacaacctgtccataccggtgcatgcgtgatccatctccatccttcttccttccgtaactgaagtgctgctgctgctgctgtttgcctaggaactactgctctgctactaagtagtagtgtgtgtgtgtgtgtcaaacaaatggcataaaaagacgttgtcggccgggaactaaatgtaatgtaactcgatcaaatttgtaaattataaaccactctgatctgatcatttaaatccaaaagaatcgacgcatcgggattcggaacaggcagaacaaccatgctacatacagatacagtacatggaagacaatcgaatgctatgctatacaccgcgattgattgattagtagcaatagcaagcagcgtccagcatcacaggagctgctcgtagcacaggtccagcgtcttcttggcgaagaactggttcaccttctgggtggggtggaaggagtcccagaagaagtacttgtcggcgtcggcgcacgtgtgggggctcttgtcgttgcacaggtaagacatctccaccttccccgtcgcgcagcagccctcctccacgttctccagccctgccatacatgccatgccagtcagcccatcagcaggtcgtcgtattgcattggagatcgatctctctctctctctctctctctctctctctctctctctc

SEQ ID NO: 42080 - DNA, 1852 bp, Zea Mays
gccgcggtgactccccgagcagaagaacccgatcgaacgcggccgtggcgactccccgagcagaagaacctgatcgaacgcggacgcggcggcgactccccgatctcagatccctgctgcgagcgaaggaccagcagtgttcgattcgagcagagatggcggcggcatgggcggggctggctgtgttgctcgtcgcggcgcagttggcatcagcggcgcaggtcacggcgccagcgttcctgtgggcgcccaaaaactacggagtgacatacctgaaaatgggtcgagcaattagtctgtggaaacacatgcaaacaatggtaaaggagaaagccccggtgatggtgccgctagaatcactgaggtaaattcgagcaccgctgtcaaaaagaagaagaaacgcggtgaccgccagcagcaggatggcccacaacttaagaagttgctacacagggtcaccagccagcagttggaaatacttgaaggtttcttgagcatatgcgcacaccctgacgacatccaaaggaggcagctgaatgagtcgacgggtctttcggtacatcaagtgaagttttggttcgagaataaaaggacccatgtaaagcatctgagtggaagagaagagaactacaggttgaaagcggagaatgaaatgctgaaggaggaaaacaataggcttattaggcaggaacagagcaatgctcctgcccctgctccctgtcccagatgcattaatgatgcggggcacctcctgctcgagaaagaagttgaacggctgaaggcgcttaaccagatgctgcagcaagagttgcagctacaaggcacggatggtgaaacacataggcactcatctctctcagatctcgtttactggagcatcaaagtgtcaactgcttataacccgctttgcttctaccagctctccttcacacgctcagagttttccatggcattcccctacgtttccacatcagtcaacgagaaactagaggactcgttgctatccagctttgccgagaactacaacaatggtttcggaagaaaccgcatcacctacacagacacgtgtaccggtcaagatctgaagaaataccacaacatggatgccatcaatgacctggtagtgtcaggggtagcgtcaaggagagtcaaccacccaagtggacaaaccgatataatcgtcttctgtagcggcgggttcgagaatccaggcactgcgaaatcaaaaggttaggttaaatactaccgctaattgttgttccacttccgattgttgtgccgaaagctaaatctctacgacgatgacgacaccgtttggttttcttgagatcccttcgggcctgccgctgagtaggcatctcgcggagaagaagactaacggcacaaaaactgtccagggcgaaaaatgcgatggcgagtgcctcgtcaaatcgagtctcctcgaaggaactttctttgggatagtgcttctcatcatcttgatatcaggactcatcatcttgtgagatactgttctatatgcatggtacttgagttattctacgctactactgacatactaaattggagccttggagtctggagaaaaaaaagggggtggctgtattctcaaggaacatgagaccactcagctctggagtgaatgaaggacgtcgtctatggaagtcagacatcacctagagctagggtgtccattcttgacatgtttctcttagttataggtggatactgtctagctaggaacaaagtcttgagggattgatggacgcatgcatcttcgattcctatgtgttgtattactactcgtacaatctccaattcttatgaacttatgtatttggactgtgaattt

SEQ ID NO: 42081 - DNA, 2647 bp, Zea Mays
ctttcgttttacgccagcgagtgaagaactacttcctccctcccttctgccttctcccctgccccctctctcatcactctcagatctctccctccccctccctccttcccttcatctctctgaattctgcacacctcgccgtccacgcattccgcgctcgccctcgcggatccggcagccctttcttcgccgtcgttcttgcctccgctgtcctgctctcctggaggctgctgttgggtcaccagtggctggactcgaccccgcggcctccggggggtgggttcgctggatggttatcgcctcctgatccatccggaccccggatcctctgcaaaggcaccgcctttgtgggttgggttctctgcgcccatgcagaagggtttggcgcgtcggcggtgaggcagggctctggtttagttcttgcgttggactagtccggagatgcttcgtggaacggggtacgggggcggcgatgcgcggaggcgggcactgcgctcgtcgcggcggcatctgccggggtggatctggtggcttctcgggatcttcctcctcgtcgggctcatgctcttcgtcctgcaccacaaccaaaaggagcagttccggccgcccgtcgtgaactacatgttgtcgtcatatgagaaaaaaagtgaagccggtagcaaatcatatcaattcctatagttctgtttatagaaaagtacttttgcattcaaaggataatggttcagcgatccaggaagtccctcgtgaaaaagtgaatttctcagaagaacttttgagcagcacatcatttgctcgccaattagtggatcagatgactctagcaaaggcatatgtcatccttgcaaaagagcaaggtaatcttcagcttgcatgggagcttagttcacagataaggaattgtcaaagattgctatctgaaggggcagttaatggaagagcaatcactaaagatgaagcccatcctataataagccggctagcacggttaatatacaaggctcaggactctcactatgatatcagcacaacaatagtgacattgaagaaccatgccttggcactagaggagcgtgcaaaggcagcaattgttcagagtgctgagtttggccagttagcagcagaatccttccccaaaaatctgcactgtctaactgtgaaactgacagaggagtggcttcggaacccgaagcataggagtcactcagaggagaaccggaattccacacgattggtggataataatctgtaccatttctgtatattctctgataatgtgctggccacttcagttgttgtcaattctacggtctccaatgcaaatcatcctcaacagcttgtgtttcatgtggtcaccgacagaatccattttggcgcaatgtcaacttggttcctcataaatgacttcaaaggttgtactgttgaagtccgctgcatagatgagttctcgtggttgaatgcttcttcatctcctcttgtcaggcagctatctgaggcggaaactcagggttactattactcagctggttccaagaatcctgaaagagaaacaaaattccataatccaaagtttgtttctctactgaaccatttacgtttctacattcctcagatacttcccaacttggagaaggtggtgtttcttgatgatgatgttgtggtgcaaaaggacctgactcagctgttctccattgagttgcatggcaatgtcattggagcagtggaaacctgtttggagtcgtttcatcgatacagcaagtatctaaatttttcgcaccctaccatcagctccaagattgatccacatacttgtggatgggcttttggaatgaacatttttgacttgatagcctggaggaaggcgaacgccacatcgttgtaccattattggcaagagcaaaattcagatctattgctctggagaacgggaattcttcctgcaggccttttgacattttacggcctggtggagcccctagaccgcagatggcatgtcttgggtcttgggtatgatgtagacatagatgaccgtttgattgagagtgctgctgttgtgcactataacggaaacatgaaaccgtggctgaagctggctattcgccgttacaagtatatatgggagcggtatgtgaatatctcacatccgtatgttagagagtgtatgttgcaatagaaagcctgcaaatctctgtatgttcttggatggtgttgaagctgtttcctcacacgaggctgctttcgagcacattgtatgagggaaaggttcagaggtagtagaatatataccagtcatcaaagaagtcaactgttaagtttctttttctttttgggttgggggaagattcattttgagatgaaaataattcctttgcagagtttacatacaaatctggactgggaattttagcagtctaaccagatacatctggatagatattgtaaaagagatacagttggatcaatgagcattttttctttgagatttaggaagtgcaaactgtgagctcaactgtgcagggtcagtggtgctgcattcttttagtactatcttgttttatactggcgaagaaggttctgcctccctacttgtataagtaactgttttagtttgtgctctccatacttaaaggctctgtttggaagcgac

SEQ ID NO: 42082 - DNA, 2976 bp, Zea Mays
cgcttcagcttgcgcgtcgccacggcactccccgctgctctcagtccccaaccccagcgcggaaggcagagctgactaccatttccgttcccacgaatgctcccgtgactaccaccccgctccaggtagcaaagctgcggccggcgagggaggtaatagggtttttttggtctctgcgactacgacgccggcatgggctaccaccacctcctactctcgccgtcggtggcgcagccgccccgtcccgcccttctccctccaccccgcggccgccgcggcagcggcgtcgggcgggccaccgcagtatttgcctcggcgtccagcaccgctcgctcccccgctgcggacgacgccacgcggaggagggccgtgctcctggtcggcgtctcggtgctcccgctcctccgcctccgcgacgccgcggcggcggcggccagggcgcagctctcctcggttgatctcgtcactgatattcaaaaggctgatgtaactcagcctgaggagccttgggaagaactacatcaacctgatgagcaaggacaaccagcaagaaatccacttgcaggtctcctaaatgcaattgcagttattgcttctggtgttttcgctggacttcttggtacttctcaacaagaaaagaaggctttgcaatcgaccatctcatctatggagaccaaattggttgaaaacgaggcagcaatgtcgatgctaagggaaaactatgagaaaagaatattggatgaacaagtaaaactgaagaaagaagctagaaagtttcaggaggaggaagccttcctgcaagatcagttggcttcatctagaagaaccgtaacatctttaactgaggaagttcaaagggagaaggagctagtagagcagcttaaccttgagatagatcgacttaagagcagtattgcagaagcagaggaagacaaacatttgtctgaaggcaaattgaaggaaaatatggaagtgcttgatattttgtatggcaaggtaaatctgcttagccaagaggtaaatggcaaggacgaacacatcagggagctgagctcatcactttctgccaaggaaaaggactacgagaacctaaatgtgatctgcaatcaagccaaagaggacctagagcaggcaaattcccaaataaagcaagtggagaaagatgttcgtacagctaaagatgatctcaaatcgaaggcgtcacttattaactcactgaatgagaaagttcaaacattatacactgaaaagggtgaagtggaagaaaaactaagtgctctagtgagtcagtatacatacctgaaatctgcttctgaagagagggcttctcacgattctgaactattagttcagaaagatgatatgctcaatcagcttgaagaaaaactttctgctgcattaagtgactctagcaaagacagaactcgaattgccgagttgaacaatgaattggtcaccaccagaacaatactagataatgaagttgttgccaataaaaaattgtcagaccttgttcagttcactgaagaggcactaacaggttccagaaatgaggtgtttaaactctctgaagagcttgacgcagtaaagagatcaaatcaggatttgatgactcagatttcaaaactaacagatgaggccagtgaagtgaggcaggctctggctaacaaaatagagcaggcagagtcagtttatgcaactctttcagatgagctggcgtctgtaagggaagtacttaaaaagtcagaaggagaactcgagatcacctcgaagcagttagttttggtttcagaagcacatagtgaccttaataaagaattgctggatgcatataagcagttagagtccacgcaaagtgagctagtgaaagagcgtaaaatcaatgctactcttaacatggagcttgaggctttggtgaaacaatcagtgatagagtccgaagcaagaaaaactcttcaagtcgacttggatgaggccactagatcactaaatgaggtgaataagagtacactctgtctgtctaagcagctggaaacaactaattccaagatttctgctattaaagaggagaaagatatgctgtcaaagttccttgaggaacaaaagaaaagtacggttgaagctcaggaaaacatggaggatgctcagaataccataaaaaggcttgggactgagagggagagttttgaagtaaggtctaagaaacttgaagaagagttggccacagcgaaaggtgagatattgcgtttgaggagacatattagtacaggtgggtctccgaacacccaagttctttcggaagcaggtgcagcgccaattagcagtcgagcactgaaacagcaacccatgaatgatcatgttcaaaatatcaatggtgctgatgctgtagcgtcacgttcgcctaaacggatttataggaggaaacgcaaaccagcagcataaggattatctgaatgccaaggggctagtttgggaactccatttttccaaggatttttaatttctcaaggaaaaatgaactaatttctcttgaaaaaaaaattccttgaaaaaatagggttcacaaactagccttaaaagcaaaagctggcgttctttttattcctctattattcaccttgttataacatcttgtgaactcccattcttcgaaaggtagacctccttacagtattatcttcggtggtgctggctcttccgcgcatccctactgaaaccgagaaccttatgtagtcacatacggtttgatgggatttagaatccatgttaccgtgtgacctgtgtacacctttaactgagttggttagatgatctaagtagcattaatgggtacaaaacaatttttttgaggatcgactcagccgaaactgctttggccgtttcttaaaaccggccaggctggagtagtgaaatttcaactttctcattgtattcgttttgtcaaattgattgaaaaaaccatctcgtttggagttc

SEQ ID NO: 42083 - DNA, 620 bp, Zea Mays
ttcaagatgtcgcgctccgtaggtcataggtcgagttgcagtcgacccggagactgcatctcgaccgagttccacatccttctccaccttgggtgctcacggggggttgtgatgcctttcgcacggcacatgaggtcgccgaggtgctgcgagtgcagcttgctgaggtcgacggccgcgtcgttgccttggaagcagagctcgatatactgcgccaccgctctagccagcttcttgattaagttggggcccatggtgcctctttgatcgagcacctggataacgcctcgtgccacgttcaggacattgtagactttgatgttcactgtggggctgtggtgacgctgctcatggcagaggtctgcttgggctacaaccttcaagatctcattggtcccccttcgtccttctcggatgaagggttggaggacctgctggaaggctacgacgacatagctagccacgtcgttcttagggtgtctgttcacgacgtcgtccgcgctgcacgctaactgtggcgtgttatgccttggcactgtccttgtgacaataataataatatatgcaaatacttttgctttctaatttctagcgtcgtggggctttcgaaccccttctcc

SEQ ID NO: 42084 - DNA, 2251 bp, Zea Mays
aattattcacatgctatgtccttagctgaaacaataatgccttcgatgtttatcgcatctaaatcagatatatgcactcagggagtgtttggtttaaataatcactacatccaaattgagtccaaattgaggtggtgagaactgagaagatagtgagaagatgatggactaattcattgctcacaccaaacatcctatcagtaaagttggaaggaagatgacaacacaagtagcaagtaaatggaatccaaacagcttcgacgtctggggccagaggagagcatagcctcgatcgcgtcctctccttcgacaaggccgctatgtcgtcctcgctggagttgaagccccaaggaacttcgccttttctggcgcgcggctgaggagctccttcttgagctgagcgagcgtctgcgtcagcatgccctcaggagaagatgagcaggagcccatgctcgaacgcctcccgctgtgcggccgtgggtggagcagcgccgtcgcggacgggctctcccttcgccgccgccgggtactcggcgctccatccaggcactccagccacccccaccccttcctccgccgccgggtactcggcgctccatccaggcgtccccgccccgcggccgcctgctactcgttcgggcgctccatccagcgttctccctccagctccagtctccggcgcgatgaagatcgcggtggaggggtgcatgcatggggagctggacatagtctatgacacgctgcgaaggctcgaggaggccgagggcgtcaagattgacctcctcctctgctgcggcgatttccaggctgttaggaatgagaacgatttacagtgtgttagcgttccacaaaagtatcgtaccatgaacacattttggaagtactactcaggagaagcagttgctccgtacccaaccatctttattggtggaaaccacgaagcatccaattatctgtgggaattgtactatggaggatgggcagcacctaacatatactttttggggtttgctggtgttgttaagtttggaaacatacgaattggtggattgtcaggaatacataacaaacaccattatcatttaggacactatgagaggcctccatacaataaagatactatacggtctgtgtaccatgtaaggcattatgatgttctcaagctcatgcatttgaaggagccgctagatgtattcttgtcacatgattggcctctgggcattaccgagtatggaaactggcagaagctcattagtgtgaagaagaactttgaagatgaggttaacaatagaacactaggcagcaaacctgcagctgaattactgaacaagctaaaaccaccatactggttttcggcgcaccttcactgtaagtttcctgctgttatccagcatggcaagaatggacctacaacgaagtttcttgcacttgataagtgcattcctgggcgcaattttttgcagggatgagcagctcgacactcaagaagaccggcaatgggtcaggagcaagttgaatactagaggagctaagccttttgattttgttcagactgcaccatctttcaatccttccagtacaacatctaaacagtccataacagtttgctgcaggaatccacaaactgagtcttttcttcagcttctggaactcccatatctgctggactcatctaaatctgagatgtttggtagaaatgagtcaacttctcagacaggaaacacacttgataatgaagatatagagctaccagatgaagatgaggatgctttagaagatgacgagtgaaggacagcacttttagacaagtaccattgcacctatcatgttggttgcagggtttgcgatagatttcattgtcttttgtagattgcaatctatatatctagacgaggaactaacatgtactagattgtattgtcatagctgcttttttgttggaggacgtttgtggatctagagggtgatctgttgatcacaatgccaactctttggtgtttagttcatacagttttttgaactaactacaattaatcagtagactagatgcatccggtggaaagtgttaacaaaaatatcatctactagcaaggtagagatcagctatatatataaaacatatatttgaaatctgtgtgggtaactactagcccgagttagttccttttttaagctgaaaatacagcaggggagactccccagtctccactgtaagttttattaaataaaaggaaacaagaacaacactgta

SEQ ID NO: 42085 - DNA, 2651 bp, Zea Mays
cgctaacacgggtgcccagccgccgcagtctttcgaactgaggaaccctaggcccagcactcggcgacggcggcgcgccaccggcgacgggatcagcggcatcactcccctccttccccggcgcggcggcgccccgcacctaggccctagcactgcagcactcgacaacaggatcagcggtcgcgcccccctcctccttccccggcgcggcggcgccctgtagctgcagatctgccactgtccgcctgccggtcatggagcacctccggtggcgccccacagtgaacgagcgcgacttcattgagtgtgcgctccagtctgacctccgtgttgacggccgccactcctttgacttccgcaagctcaagatcaccttcggcagggaggatggctcgtcagaggtgcagctcggggagacacacgtgatgggctacgtgaccgtgcagctggtgcagccataccgtgacaggccgaatgaggggacgctggccatattcaccgagttctcacccatggccgacccctcctttgagcctgggcgtcctggggaattagcaattgagcttggccgagttattgaccgtggcctcagggagagtcgagctgttgacatggagtccttgtgtgttgttgctgggaagcatgtctggtctgtgcgtgtggaccttcacatcttggataacggagggaatctcattgatgcagctaatatcgctgcattggcagctttatctactttccggaggcctgaatgcacggttggtggggacgatggtcagcaagttacagtgcatgatcctgaggttagggatccacttcctcttacgatacaccatatgcccatagctgtaacatttgcatattttggtgaaggtaacatcgtggttcttgatcccacatacaaggaagaagcagtaatgggagggaggatgactgctatagttaactcaaatggggatgtttgtgccattcagaaagctggtggagagggtgtcatgtcaagtgttatcatgcagtgtttaagaattgcttcggtaaaggctgctgatataacaagcaaaataaagaaagcagtagactcatacaccaccgagaaagccctaaagaaagtaaaacgtttgccaacctcggttcctcagaaaattaatgtcactaatgtaactatggacggcaaaggtgatggtgaattggaaaagcaatctgtgcagatgcatagtgatgttcagcagataagcaaaggtgatgagaaccagcaaagtataaaaaggaattcacccttgactagggaccgaattgcaaaacacaaacaaacatccacattcattggtggcccatcaaattggtagtgattgggacccatattctaaaggagttacattaagatccctcaaaatttctgatttgccgggtactgttaacattgtttacatgttatgggttttcttcttgcatgctaactctcagtaacacctctgtgatgtacttgcagtcatttttttggttggcatttttggtgctcattgatgattaaaatatggcatgccattctccactgtttctgctttatagccatgtttttaggagggcagacctagtgccggagaggctcccacatgaagtgggtctggagaagggataaaccatggcaagccttcgtccacaaatgtggagaggctgtttcgaacaagctctcgccactgcactatgcctgcccttcaaattctgttgtctataaattgtgattcccttttatacttatttttttagggctggtagaaatactacataaatctgtgttcctttaaattttgatgtctataattctgcctcctgccagtctagagtaatccttcagatttcagtcattttgatttgacatgtgtaacctgatgtaatcgttcttgaggaatactttgccaagatttgttctctcttgagtctggaatcacttatttgcttcgcatgatgtagatccaccaactatggtcaaggccagcagccgtgaggatgcccaaccaatgactgaatcatctaatgctgaggtgaacacatcaagtgctgtggctgctggagagtctgagtcccatgaaattggatcgccgaagagtctaaaagatgctatcaaaccaaaacataaaagaaagaagaagaaaagtgacaggagttagtttagttgcaagcctgtaattttgtatgccccagataaatcaacgacagtctacaacacctcaaactcctgattgattaggtttcatccggggtgccatacatgggttttttgtgtgttttcaatcgtgactggtgctagtagtgacaggcaaattttgtacaagctgtagaattgtattttaggaatggttcagttaagctttcagtcaactttgcagctagttctgtgatgcgtgatgtcccagcactcttacatttcattgtactgctcaccgttaatcttccattgtccaaacggtcgtaaggattgccatatttgttccaacagtcttcagttgtggtctactggtcttagcttgaaaacaacattaaatcttgtctttgctacttctttcagtctgttttcgtgaggagagtaaattaaaactgtgcataagtgtaagtttgaaccataatcgttggcttcaaacatatattcagac

SEQ ID NO: 42086 - DNA, 933 bp, Zea Mays
tctacggctctacggagggataggtcgctcttcttcctcactgagagaccatgagacgggtcgagacgacagcggcggatgcaccccacgacctccagtgactctcccagtcccaggctcccagccccccttcctcccgcctccgcgagaccgcgatggcagtcttgctgtggcggtgcatatgcgggccccaacaatccttcagtaagaatcgaggcgcatccaccccttctcctcttgctggcaggagatccaaatactcgggacaatctgtgaaagcaatgcccatgcgtttgttaacggttggaaagaagaggtctcgggggacacaactccttgttgaagaatacaaggagaagctcggtcactattgcgagttcgaggacactcttatcaggtccaacccaaagcttacaagtgatgtaaaggtgcaagttgaagcagaagacacggctatgatgcagcaactcaagtctgacgattttgtagttgtgctggatgaaaacgggaaggatgtcatatccgagcagatagctgatctgattggggatgctggcaacacaggatcatcaaggctcacattctgtatcggtggaccatacggtctcgggttacaagtgcgagagcgtgcagatgcaacgattaggctgtcctcactagttttgaaccatcaagttgccttgatagtcctcatggagcagctctacagggcatggactataataaaaggacagaagtatcaccattaggcctaagtgctatcatcattcgctgctgtatgtaggacttgaaaaatggaagactgcattaataaatttgcaggaaaatttctgcgtccagtgaagaaatcaagggaagatgctactcaaactgacgatgatgatgaaagctaattctatgctgcttcacctggggctcctaccgaagagggct

SEQ ID NO: 42087 - DNA, 4671 bp, Zea Mays
ctcagatctccccgacctgccaccacccgcgagccctgcacaacatcactgctaccttctctgtcgatccctcgatctccagacaaccccgctcgcctctctccctgctccggtccccgcccgcctctcgctcgcgacaactccgccgcagcacgcggcggccgcggcgagatgctccgcctgcgggcgttccggccgacgagcgacaaagtcgtgaagatccagctccaccctactcacccctggctcgtcaccgccgacgccaacgaccgcgtctccgtctgggactgggagcaccgccaggtgatctatgagctgaaggcaggtggcgttgatgagcgtcgcttggttggagcgaagcttgagaaacttgctgagggagatgattcaaaaggaaagcccaccgaggctattcgagggggaaggtttccttttatgatgatgatgttcgcttttggcaacattggcgtaattgctctgctgctgctgaggccccaactgcagtcagtcagcagtcttccacgttcattgcacctgcaccttcgacacgaggaaggcactttgttgtcatttgttgtgagaacaaagtcatatttttggacttggtgactatgcggggccgtgatgttcctaaacaggagcttgacaataggtcacttctttgtatggaattcctctctaggacatcttctagcgatgctcctcttgttgcctttgggtcatctgatggtgtcatcagggtcctttcgatgttgacatggaagcttgtgcgtaggtatacgggtggacataaaggagcaatagcttgcttaatgacgtacatgtctgcagctggtgaggtacatttagtttctggtggcagcgatggcctgctgatattatggagtgctgatcatatccatgactcacgtgagcttgtgcctaaaattagtatgaaggcccatgatggaggtgttgttgcagttgaactttctagggtgatggggagtgctccgcagctcattacaataggggctgataaaactttagccatatgggatactgttactttcaaggaaataagacgcattaaaccagtgcctaaacttgcttgtcatagtgttgcatcgtggtgtcatccccgtgcaccaaaccttgatattctaacttgtgtcaaggactcacatatttgggccatagagcacccaacttattctgctttaacaagaccgctctgcgagctgtcatcactagttcccccacaggtccttgcactgcataagaaactgagggtttactgcatggtggcacaccccttgcagccgcatcttgttgctactggaactaatattggtatcatattaagcgagtttgacccaagagcacttccagctattgctcctttaccaacaccaacaggcaacaaggaacattctgctgtttacatagttgaaagagaacttaagttactgaatttccaattgtcaaacacagcgaatccatcccttgggaatgctggtgttgcatctgatgcaggaaggtcaatgaacaattcaatagaacagttgatagtaaagcagaccaagaagcatatcagcactcctgctccccacgattcctattcggtcctttcagttagcagttctggaaagtatgttgcaattgtatggccagatatcccttcttttgctgtatacaaagcaaatgattggtcagttgttgattcaggcacagggaagctttttgcctgggacacttgtcgagacagatatgctctggtagagagtgcattggccccaagaatgccacttgttgttaaaggtggttcttctaaaaaggcaaaagaagcagcagcagctgcagctcaagcagcagctgcagcagctagtgctgcttctgctgccacagtgcaagtgcgtatcttattagatgatggaacagcacatgttttgcagagatcgattgatggtcgtaatgaaccagttattggattgcatggtggtgctttacttggtgtcacataccgtacatctcgtagaatcagtcctttgacagcaacagctatatcaactgttcaatcgatgcccttatcaggttttggtggaagtggatcatcttttgcatctgatgatccattttcctctaaggaagggcctccacaaaatttccaactgtacagctgggagacctatcagcctgttagtggcctacttgcacaacctgagtggactgtgtgggaccaaactgttgagtattgtgcatttgcttatcagcagtatatagtgatttcttccttgcggccccaatttaggtaccttggagatgtttcaattccctttgcaactggtgccgtttggcatcgaaggcagttatttgtgtctacaccaacaacaattgagtgtgtctttgttgatgctggagtggcagcgattgacattgaaacaaaaaggataaaacaagaaatgaaagcaagagaagctcagagtcgggcagctgaagagcatggagatttggctcttatcactgttgaagctccccaggttactgtgagtgaaaaagtatcattgaggccaccaatgttgcaggttgttcgtttagcctcctttcagtacgctccatcgataccaccatttatagtaccaaagcaatccaagttcgatggagatgattcagtgtttcagaaagaactggatgacagaaggtatgctgaagttgctgtcgctggaggaggtgtgtctgttgcagtaactcgcttccctcctgaacagaagagacctatcggacctcttgttgtggttggtgtaagagatggagttctctggcttgttgacaggtatatgtgtgcacatgccttatcactcagccatcctggtataagatgccgttgccttgcagcatatggggaccctgttagtgctgtgaaatgggcaacgagacttggcagagagcatcacgatgacctggctcagtttatgctgggtatgggctatgccactgaagctctccatttgcctggaatatctaagaggctggagttcgaccttgcaatgcagagcaatgacctgaaaagagcacttgcttgtctattaacaatgagcaatagccgagatgtgggacaagaaacagctgctgctgatgccactgacgttacccagattcttagtttggcagtagctaagcaagctaagcaggaaagtcttacagatgccgtgcagggaatagtgaaattcgtcaaggagttttttgaccttattgatgcagcagatgccactggtcaatctgacattgctcgtgaagttttaaagagattagcggctgcagcttctgtaaagggagcactccatggacaaatgctgcgaggcctggcactccgtcttggaaatcatggggagcttactagattgtcgggtctggtaagcaatttgattacagctggccatggacgcgaagcagcatttgctgccgcagttctgggagataatgccctaatggagaaagcatggcaggacacaggaatgttagctgaggctgttttacatgctcaggcccatggtcgtccatcattaaggaacttggttataacatggaacaagatgctacaaaaggaactggatcacacaccgactgtaaaaaccgatgccgccgccgcattcttggcttctctcgaggatccaaagctcacaagcttgggggaaactgagaaaaagcctcccatcgaaatacttcctcctgggatgcctcccctatctgcacctccgatcgtgattaaaaaggctggagcaaaacctggtctccctaatgcagcaaaggcgtcaaatgggcctataggtgctcctatggctcaaggtgctcccatggctcatggtactcctgggccacaaggagtccccatgaatcaagttactccatcacagggcagtcatgacgaggcaaggccatcagatgctacagtggctgatgcagctgccgcggttgcagaaggtacagcagctcccccggctgcagaaggtacatcagctcctccggctgcagaaggtacagcaactcccagcagtgaggaagctaaagcagcacctggtaatgaggaaggcacatcaaatccaatcaacgaggaagccacagcagctgcagtttcagttgctgcaggcagccctgactctgctgctgctcctgcagctgatactagctcggacgcacctgctgttaatcccacggaagataccgtctctgccccctcaacggaggcaccaccagagttgacggataagccatcttcagcagaggcatcgttgccacctccacccagtgtttctggtgtataaatatttctgattctcttttagcagtgtgccgaattttctgtattctggttcgttcgttccaccacgcgcgctggtataggtatttgttgcctgtggtatacagatttcgcagacgccaggcagtatgtgagtagctttgtacatctgctgtctgcgtctcacgagaacgtgctaccgttgtgtcactgacactgtgtggccatatcttatgttgttggtgaccacagttcaattcttgcttgatgagttgatcgagctgcaccaccaatatccctgtcttggacgaccgattcgtctcttgcggaatctaacgtaactgctgaggttcgcaaaatgtcttgttgggtcatctaacttgggaatctgtgcg

SEQ ID NO: 42088 - DNA, 944 bp, Zea Mays
gtccgattgtgcgctgtcgcagcctctgccctctcccagcccgctcctccatctccggtgagacgcgaattgaatcgcatcgaatccatgggcagctcctcgaataccaacacgagcggcggggccagcgacaaggaggagaagaagaaggaggacaagatcaaaggcaaggactcgtcggggccatccttcaaggagaacgaaagggtcctcgcctaccacggccccctcctctacgaggccaaggttcaaaggatcgaaaaccatgaagatgaatggcgctactttgtccattatctcggttggaataagaactgggatgaatgggttgcaaatgaccgcttgttggaattgacggaggaaaacgtgcgcaaacaacaagagcttgataagaatcaggtagttgacaaaacaatgaagtctggacggtcaacacagcataaaccaaaagtctccaatgcggatgcaaaagctgataaagatgacactaagagtctcatttcagtgaaggggaagaaacgtaaaagtcagcttgggactgagattcaggacaaggaaaaaagatcatcacatagtctactagtgttgcagtttcctttgccactgaagaagcaacttgtggatgattgggagtttgttacgcagatggcttgtgaagctaccacgatcacctactgttgatgatattctaaagaagtacttggaacaccgggcaaagaaggatggcaagataaatgactcctatgctgagattctgaaaggattacgctgctactttgataaagcattgcctgcaatgcttttatataagaaagagcgagatcagtatgctgaagaagttaaaggtgatgtctcaccatcaactgtatatggagctgagcatctattgcgcctttttggagagccttaagtttatggaggggaaaaaagcaaaatggtctgcc

SEQ ID NO: 42089 - DNA, 1723 bp, Zea Mays
aactgtctaaagcacttatgtgcactagccacaatgaatttttaagtttctcctgaaattaacttagtgatgctacttaattttaaatactcggggtagccagtaatattcatccaaggcatgtaattgcttactaaacatataatataactataggaacaaagcatcgattttatcaaacaattataattcgtcataagtaacactaataatattattgtttagacattttaaaaatgctaaatttaaactccattcactaatttaccacacttcacataattaacatctcaaacctaacaatagcacccaacacgactactccaaaatcatgaaaataatcacatcgcattcatcgaactaattcaataatactaaacgcatccattcatcaatctaataattaagctaacagaaatatgaatcggtttatctaggactaaatttgacgcgctatccgtgaacacggcaaggattctggttccgcccttgtgtcgagcacttggtgaacatcacgctgctagcttcgtcttcactcgacttgggatttcttgatgacgcacgggacgatgatgacagggtcgagcacgacaaggagttccgaaaattgacgcaagcagcacacaattagaaaatagatcatcggagtcgacgagcacatcgtggacacaacgtggatcgacgacgaggtccatgacgagcgtcgctttcagacttcattttcttcttcaaccatagctccatcctcactcccatacacacgcaggcgaggcaaccacaaaaggaacttgacgacgatggcagacacaatatagacatgatgccagggcgtcgagctatgcacaacaatcacgacaaagctgactgtgagctagataacgacgcggtactgagtggcgcgcgtagggttaagcagaggaggaccattccggtgagcaagaggctgcacgcgtgtaccacggctgggcgtacgctgggcgaggcccgagcagaggagcgcaacagcaaagagatgagcggatcggcgcagtggagcagaggtgagggcgcgctacaggggagcagggaggagtgctcggccatgggggatgtgaggagccgggggcgagctgcatgccgaggtggcgaacgggcgcatggaagacaggagctcgaagccgagcgtcgtccagggatgtgagcaggaagtcctgggcaccaagagagagtcgtaggggaggagctcggcaaggtgcgacggccatgggaaaaacctcggtggggtcgcggctcgacggcgcccgcagccggagcaagcaccagagacgagcacgacggggcggctaccagcgaaacccatggaggcgtccagggagaggagcggtaggtgtcgtcacccgctggagcagagagagaaggacagccgggcagcatgggagagctggagatggccggtggcgcgagcagggaaggagcaaaggccgagcttggcggccatggcgagcaacaggagggtggccaagctggagccggcgcgcgcagggaggagctagggagaggggcgagctcggtactagaaggagcgtggagctgggcgccgagcggcaacagggaggagatgggacggcacgcaggggagcttcagggcgcgcggtttggggaagacagagcgcgcgcagagaatatcagggagagggagagagataatgacaggaggagagaaaaaatctccatggcgcatagg

SEQ ID NO: 42090 - DNA, 258 bp, Zea Mays
tttacattctacacaggttacacatctttacccataaaatgtgttccctttgtcatctcgggttgatcagacccgtaaacactaccaatgtgagtagacgagggtacaatgctaagcctttacagagttccactagaggagagaacccgctacagtttccggaccgaaagcagtaggaatccatcgtccgaaaagctaaacagacagtccgacctgaggacctccctacacctacactcctccaccctgcttgcccct

SEQ ID NO: 42091 - DNA, 1479 bp, Zea Mays
cttggcttctcctatcccattctaaaatctctctggcgaagaggaacgggctcaaggcgagctgttctcttctcctgtagaaagcgtttctacccctggacctcgcaagaatcctgtactgtaccaagatgagaaagccttcaaatggatgcaaggagagggatgtgatttaccaccggaatgatcacacggatgacaatgggaagcatttcttcaagattttgattggtgatttccataaaagattggtcataccggttaaatttgctaaaaaattcagaggaaaagtagaaagaaatattaagcttgaatcacttggtggttatacttttgatgttcaagttgcacagaatttgggcagaatcatgtttcaatctgggtggaagtcgtttgttagtgcccatgacttgaaaatgtttgacttgttggtattcaagtatgatgggatgtctcggatgaaggtcctgatatttgatcctagtggttgcgagaaagtaccgcctttttttgtcacgaaaaatgctatgagtggtggacgaaagagagaagaaccccaagaaccccttgacatttcaagcagctatgctgatcttcccatgaaaacaccagagactaaaaagaaagcaagaaagcaaagagacaggagtaggatcaatattagtccatgtagatccatatccaactcatcaggaggaatgagaagttcagaagacgatgaagcacattctgttccaagttgcatactcccacgaggcaccatccttgatagtatgcagaggagaaaagtgaaagagagactccgagctatttgttctgaaatcccaatctacgtgtttgtcgtgaagaagtcaaacatttttggacgatctcaagatatggtcttctccagaaaatatcctgatgtatgtctcccattcaagagcggagcggtgattcttcagtgtcatggcaagagctgggaagtgattcttgaggttcggaaagatcaaggtgaatccaaaaggcttcgcattgggtgggcagagtttgctcgtgacaacaatttgcagctgggagatatctgcctctttgagccactgaagaccatgaagtacaccatgaatgtgcacatcgttcgcagaagagtgagatctgggaaatgatttctgctgttctttgcgacttttgcagcggtagccgttgacagtagtgcttcttggtttgataagagttgctaatggtcatgtcagccattattagtgccaacttttgcagcagtgatattaacgatttaacgcttttatgcttgggaggctccaactcctttcatcctaaaataaatatcattctcgcatatttttagttttaactgaatatacataagaaatagttaagatatgtagtgcagaattagtattagactagtggattatatagtggtatagataaatcactgatttatatttttataataaacttattgaggatataattattgct

SEQ ID NO: 42092 - DNA, 1657 bp, Zea Mays
tatttatttatttatttatttattgtgtttgtgtatatataagggcggttatcatatcttggcgagtagcagctgcggacttgcgagcccaggcaggagaggactcgtccacatctattccttccttgttcggccgcccttcctcagttggggaaggacgacccaagacaggaggaggaggaggaggaggaggaggaggaggaggaggaggaggaggaggaggaggaggacagtgccgccatgaccggaggaggggaggagcaggggaggtcgctgttcggcgtgtctctgacaaacaggcctaggtggcagcagttcatgatctgctcctcgggcttcttcttcggctacctcgtcaatggcatctgcgaggagtacgtgtacaacaggcttcagttcaggtacacagctacggctggtacttcacgtttgtgcaggggttcgtgtacctggcgctgatacggctgcaggggttcacggtgaagcagatggtgaacccgtggcggacctacgtgcgcctctcggcggtgctcatgggctccaatggcctcaccaagggatccctcgccttcctcaattaccctgcacagatcatgttcaagtcaaccaaggttctaccggtgatggtgatgggagccttcatccctggtctgaggcgcaagtacgcgttccaagagtacgtgtcggccgtgatgctcgtcgtcggcctcatactcttcacgctcgcggacgcgcagacgtcgcccaacttcagcatggccggcgtggccatggtgtccggggcgctcgtcatggatgctttccttggcaacctgcaagaagcaatcttcaagatgaacccggacacgactcagatggagatgctgttctgctccactgtcgttggccttccgttcctagcggtgcccatggtgttaacaggagagctcgtgacggcttggacttcctgctcccagcatctgtacgtgtacgcggtgctggtgttggaggcgatggccacgttcgtcggccaggtctccgtgctctccctcatcgcgcttttcggtgcagcaaccacagccatggtgacgacggcgaggaaggcggtgacgctgctgctgtcgtacctgatattcaccaagcccctcacggagcagcacgcgacggggctcctcctcataaccatgggcatcgtcatcaagctcctgccggagaacaaggagagacgcccgcgccggctgcccaagaatgacgacgacgacaagccccgggagagcagagaagcgggggaggaaacagcatgactgctgctatagacccgacacccgagcaaagcagaactgacgccagctcgatcagcaaccctagaagaaattctcagtcctccaaaacagcaatcccaggaggaggatgggatatacatgcaggatagagcactacatacagtaataataacctttttcctcgctcctcccctcgcttttctcatgtgctgtggttaatgttaattgtgcacttcgctctaacatcttaagctttttataaaggcaagggccagaggtctgaattctaattagcgcaatatctaaggtcttgttcagttattcctatcctatgtggattgtatgagattaaaaaaaatttataaaagattttgacttattcaggattgaaatcc

SEQ ID NO: 42093 - DNA, 881 bp, Zea Mays
caagccagtagtgaaagccgccgggcagggcggcagtataaactagtgatagccactagtggtagtggcgtctgggtctctatatatgtacgtctgccatcatcccatccctatccccccgatcactctttcactctactccaaccactccgcggaatcgtaccttacccagccttcttcctcgtcgccgggctcgccgccagccatgtcggcggcgttcaaggcgttcctgaatagcccagtgggccccaagacgacccacttctggggacccgtctccaactggggcatcatcctcgcgagcgtggcagacacgaaaaagcctcctgagatgatatccggcaacatgacaggagtgttgtgcgtgtactctgcgctcttcgtcaggttcgcgtggatggtgcgacctcggaactatttcctcatggtaacccacagctgcaacgagtgcgttcagctctaccagctgtcgcgctgggctagggcgcaggggtgagtgaggcttttctggttctttgagaagaaagaagaggagaggcccaagagcgaagattgaccgacggcccggccctaaaccatacaatactacaatgtgctcggttgtaccacaaaggcaatatttgatgcatgtattgtaacgtgaaaaaaagcctcggttatacatgttgtaggttcatctgcggatattgaactatgaatttccgagcataaagcatcaatttccactgccgtcgtttctcccacatttaaattatataaaaaactaaaattatacataaatgaggatttgaattatgactattgattctaaatcgttcctcccacattcaagttataaaaaaactaaaattagacataaatgatgatttgaattatgatta

SEQ ID NO: 42094 - DNA, 1068 bp, Zea Mays
cctggctcctagcagccgccgccatcccttctccctctccctcctctcctctagcttctctccctcgcttccctcccctgcagcttcctcacgccatgcttccggacccgcgccaagccttggccacgcagcgagcgcccaacccgacgcagccgcgacaccgaccctgcccctccctgcactcgacgcgcctggagccccgccagccgagtactgtgaagcgcgccaccgaccggcatccagacccgcgtcgagccccagcccgacaccccggcttccccgcgtctacgcagcagcgccctgctcatccgcaagaactggcagcgaagcttgtcgttaaggagatattaatcatgtggagatgcagaggttagctagatctctacgtcagtgcttgatttgatttgtttaacttcccatggattgacggagaggaagcaaaaaatgactgtatgggagaatatgcagaaagctgaagcagaagcagccatacaaaaccttgtgataaaacttgaaaagaaaaggccatactcgctagagaggattttcaacacccttaggtctggctctcggaagacacaggtggtacgcagtacatcaaccgcaaatcagaatcagcatatttccagaactatcaaaacggcgccaaacctcagcaagaacggtcaaatgagttcattgagtggatgcttcagacaagatctatagcatggatcataatctggattgtccttaagtttttattgtgctaggggaacataagaaagtatgtagagcaaaatgagaggagctgttgttaccctcaattctttgtgattattgtgctagagtgatgtagttgtttggctttttgaacaatagctggagtgatatgaaacattagtgatctagttgtgaatgatattataattgtgatggttttgtgaatatataattgtggtgcttttgtgtttatgtgatggatctatgactgtggtatactgattaactgtgtatgtctttatgatttgtgtataaaaatctgtgatttatggtgcttaattaaatgtatattattattaataaaaa

SEQ ID NO: 42095 - DNA, 356 bp, Zea Mays
ctttgccccaagcgactaagcagtggccaccgagcacatccttacgtcctttccaaagaaagccacgtctaatcttgtcaatggctttgatagcccacttaggtaaatccaatgccatggcgtggtatataactgttgccgtgagcacatgttgcacctggatggctctgccagctcgagtcatcaggtcggccttccaattaggtaagaggtctgcaagcctatcgattagcggttgcagctgctccttgcttagcttcctgagggaaagaggcagcccgagatatttaagaggaagtgtttcaactttgcaaggaaaaatctgggttaccatttccatgtctaccggagagcag

SEQ ID NO: 42096 - DNA, 2194 bp, Zea Mays
cgccccccgagccgagcgttcccctcgttgccgcgggccggccggaggtaggattccttcaaattcccgctgcgtgcgacggcacgccggcggtcgccgctatgtccccctctctcgtgctggtgcactcactcccgctcccttctcgccgcgcgctccccatccagctgccccgccgcctcgcccccaaacacccgtcccagtggtcgctccgcacgcctcgacgtctcgctgtctttgccagggcttcggcgtccgttgtggtgtcgccgcacggcgagggaggtggtggcacggcggcggggcggaagagcacggggtataggaaccggttcctggacctggcgcggctgggggccgtggcggagggcgcggcggaggccttcttccgcagcgagatccggcggcggctggccgtcactgccgcgctcatcgtgctcagccgcgtggggtacttcatcccgctccccgggttcgaccgccgcctcatcccagactcttacctcagcttctccgcgctccctgcagatgaccttggcgatttctcctcagaattgaagctttcttttttccagctggggatcagtcatcaaatttcagcatctattgtcatgcaggttctctgtcatgttcttccatcacttgaaaagctccgcaaggaaggattagatggccatgagaagttaaaaggctatatgtgtgtctagttgtctatctatcttgaaccatggtggctttctttgtggtttgcaactgtggctgcttttactgtgtcatgcttttccctgcagtattcagtatatgctgcaagttacagggtcaagcatgtaattataacaagtcttctgcttgttcttggtgcaatgtcaatgacatggatttgtgacaccattacagaatttggatttggacatggctcatctttgattatctgtgtgggaattttgactggctacacagatacactacacaagatgataactcagttttcagggaatttttcctattgttggccttacatcttgggagtagctggaatttttatgatactcaccatgggggctgtgttggtgactgaaggatgcaggaagataaagcttcagtactatggattcaaattagcatctggtgcagggaatgaaagcagcccagttacagaggttgagccatatatccccttcaacatcaatccaactggaatgcagcccttgcttacaacctcatacttactagcttttccaagtatcatggccagtatttttgcctcacccttttgggaaaacttgagggaaattttgaatccaaagacttcaactggtggtagtccctgggtttattacttgacatatgctttccttgtcttcatcttcaatatttttgatattgctaacttacccaaagagatatctgattacctgaataagatgtgtgcgagggtaccaaggataaagcctggaagagcaacagtagactatcttacaaagatacaaacatcaacacgtttctggggaggtctactgctaagcttgcttgcaacttcctctttattgcttgaccgatatctcaggcaaataaatgaagggtgggctcaattattgagcttagaagatcatatcaagcgtacaatgtgatgccagcactgagcaaagttttgaggagatatggtgcttaagagtatgtaagctgatacgttggtgatgatggcaccatccactagctcgtggtgttgcaaggtcgattggtctttagaaacagcatggatatgatgagaagtttaccgctcaagcttctgttagattaaaaggtggaaggaacatggctttacaatcacatcggactttatcgacaaggtgaactgaggaagcaacaaacatgcccaacaacatggctgtgtgtatttgttggaagtgatctaaaatcttccatgtcctaatcgccatactggatcacatagctaatctgttgggttctataaattctccaccgttcaaatgctccgaaaggaagggcctttggataagtttctctttttttccctttttttgtttgggtgtgcacacattgttggacgggctgtagttgaatgagtagagtgtacgcctcgggctgaagatgagtcggattcaacgacgaacatttttgttgtgcccgcgaatggccaatatttcgctttcatgtacaactctgatcggat

SEQ ID NO: 42097 - DNA, 2866 bp, Zea Mays
tctagaaggcggggctctccttctgcagaaaaagagagagaattaaaaaatattcctctacaaataggtaagtgtaactaaggaaagtaatcctctgatcctatcgctaccaccttcaacccggtgtccttctccttcactcctacttggcactttgacagagacaaaaaccaaacccgcggcgcctgtcgtcgctccttcgttctcgccgctgccgcactcccgacggccaccttaacaagcctctggcggaggaccaaatactctcgcgatcgccgtagcgccaccgcgtcgcccaatccgttgggagccgtcgcgcgatgcaggcggacgagcaggcggaggcgccgcgccgcgccaaggaggccggcaacgacgcctaccgcaagtccttgctcgaggaggccgtggagcactacaccctcggcgcgctccttgaccccagtgacatcgccttcctcaccaatcgcgccgccgcctacctccgcatgggcaagtacgaggagtgcgtgagggactgcgatgaggccgtgaagcgcggcagggagctcagctccggcagcgagctgatcgcgaaggcgctgtctcggaaggcgtcggcgctgctcgagctcgcgtgctgcgccgcagactacgcaccggctatcggcgccctcaagctgtcgctggccgaaaattacagcgaggagacgctcgagaagctcaacgacgcggagagcgtgaggaaggaggttgaggaacaggagcgattggatcaggaggccgccaaccaatgccgcgaggaaggcaatgaattttttaggcagaagaaatacaatgaagcagcaatacaatacacacgagctataaaaatgaacccaaaggatccaagagtaagcatattggttgttaccctgattttccttctcaagtaaaggtaattccagaacactagtaaagtagtactatcttcagtcaaatatagatgattttcaggcaagaaaacaagaagattataagccaactgtcccatgtctaaacatcaagtaaatatgactggaggtggtacccttttttttttttgaaatttctaagatttctgataaattgaattttttcattggtaaaacatcattaatgataactcttattttccatgcaccttggctgtaaaaacattctctggagttgactttttttttcctttggcactccttgttgtagtaatttgtttagtttatgactgatcttacaggcatttagcaacagagctcaatgccacatccatctgggagcctttcctcaaggtcttgaggatgccgagaaatgcattgaactagatccaacttttctgaagggctatgtgcgtaaagctaaagtccagttcctgatggaaagttatgaaaatgctttggcaacttacctagagggtctgaagtgtgacccaaataatatggaggttctggatggcttaagaagatgtgcagcatgtgttaagaggtctaatgcgggtgatgttgagatcgaggatttgaaatatgttgatattgatgaattgaaatatttctcgggtggtggtccaaacactgtacaccagcagaggaggagtggggtgatgacttctgagtgtcaatgcaacaccaaggacattgacgagtcatccgccgagaggctgtacgacgcagtgaagtacaccacggacaacatgatgctgatccaggtcccagtgttaggaacaacgaaggaattctggtgattatctgacaaagcgactaggatcagcagaaaacttgcattgatactgaggagccaccactccgtcggcaagtacctagctgctcctctgcaggtgtccaacatctggattgggagcaatgggagtgtcaagctaaggggggtcagtttcactggtcaaggcttcagcactgagcgtgtgagagatgactacaaacgcatgtccaggatcctgatggcgttaattactctctcgggtggggacagaagcaaattgcctccggactacaaagagttcctcctgctcttggaatcggacacccttacaatggaagatgaattcttgattgtaaacaatgctgcactgctgcccataaaaaaccgcactgaggtctttctgatgctacacgatagaattgtcgattatcttgggagtacggacaaaacgaagaagaagaaaaagaagaggatactctctagtcttccctacaaggaagactggctagatactgccaaggcaaatacaaaaatcaaccagtgggttgccaatgttcagaacgagtacagagcgactccacatgatctgctgcggctcaacagaaatgtaagaagccacatgcatcgctacagcgacggtgacgacatcgaggaagttctgtattgcgaatggcccgagctgctcatggtcatgcagaagatgttgcacttggaaggcgagctcgaaggcactgacattcagaacaagtttggctaggcgtcctacttaagctactgttcttcgatcgagttcaggggccgaaagtttatgctggtggagtgatggtcgatgtaagtttgtcgctctcatcatgaaggtaaagctggatcagctttataaaatgtatgctaaaatgtaaagtaaactttaaaccattctatctgagaaggtcttttcttaatacaataccgggagtatgtctcgtcttgcttgtaaatcgtgcctgggtatctggctgtaggtttgtcttgcttgatcttgtgaggatgctgctcgcgttccttggagatcaagcatgcaaacgtctgtaaacaacatccttctcctcttactgaagataaagctggaccagctttataaaagtattatgaaaaatgttgcattaaaactctaaac

SEQ ID NO: 42098 - DNA, 1635 bp, Zea Mays
tcgtgcgggtgcggcgcaacgagcgagaggaggaggatgacggcgcccaagcccggcgggggagcggtggcagcggcgcgggcggcggcggcggggcccaggacggtgctcatcacgggggtgagcagggggctgggccaggccctggcgctcgagctggcgcgtcgcgggcacgcggtggtcggttgtggccgttccgccgagcagctccgctccctcgaggtagagatcacatcaccatcgcgccacttccttactgttgccgatgtcccagtggagctgattatcgtctcagactatggactagaacactctgtgcatgagttgctggagcattctccacattgaagaactggtttccaccatattaaaaatggggagatgagagatctgacagcagtatgtccgagctggcaaaggctgttttggaaaagaagcaagttccagatattatagtaaacaatgctggtacaataaacaagaataacaagacatggaatgttccagtggaagattttgatatggtggttgatacaaatatcaaggggacagcaaatgtgcttcgtcattttgtaccacttatgatagcaggagacatgggattataattaatttaacctctggttggggaagatccgctgctgcagaggttgctccatattgtgcttcaaagtgggcgattgagggcttgacacgctccttggctaaagagctgcctcctggaattgcagccattgctcttagccctggtgtcgtgaatactgacatggttacttcatgctttggaagttgagcagcgttatatcaaacaactgaaacatgggcaccgaaggcagctacaatgatactaagcctttcactggacgataacggtgcctccttgactgtatgaagtggtgaaattttgtgctcaactgattactgatgggggtctctatatttttgcgagattatggtgatgtaaaatagtagttataatgtgtgtgcactctgatgtccctagctgctgcctgaacgttattgtttagccttacctctatggcctatgcacatgctcttctttcatttgatgttcagatgggggagtaatgtggcgagaaaggtgccgggcggagagatagaagcacgcgttgctttgtttttgtggtgtctccacgcatggtggcacgttctgattgcggccttgaagcccagcccgggtacgcgcgcgtctgatacagcaatcaattgggcggacgggcatgatgcctgttgcgtcgctctgctgttcccgtgagcacttgaatacttgatctattggctccaagtatatataattctgcatcgcaagaggcaggcccgcagggagaattattttttaatttctgctgttccaggaaggtgaataaggccactctcgcgtctccaatggtctagattggagttagttgaattaattttttttaattgatgatgaacactctaaactgtaagaggattggtatggagccaagagatagtcacgtacgttttgacgatgcatcctcagtatgaaatgatgttctcaataggtcagagctggctcatgctgttggagacatcctcagtaacggtttcatgtgttaaagactcatgcgttggaaataatgttgctac

SEQ ID NO: 42099 - DNA, 722 bp, Zea Mays
gcccatcggagcagtttcgcgccacgactacaagaaaaaaatgagcggcacgcggccaacagggaagcttcgcgcgcgccatgggagagctggagatggccggcgagcacgcgcgcgcagcaacgaatggacaccagggcgtgcgcacagggaattttggctgggcgcgagcacagggatcgagcttgagggcgagcaccatgggaagcagaggagctccacggcgagctcgagcacacaaaattcgagcagaggtcgcagacaaatccgagggagagaaagagaagcagggagggagccgagcaggaaatcaatggaaggacgccctgctcaccaccgcacgtctccacatggcaggacagccaacatgctgaccaccacggccagacccgcgccgctggcctagagcacgcacctggcgcggattgctcctcggtctgcaatcatgcggcgtggagaggagcaggaacgcgcgcaccagggagctgagcggctgaagacgaagctgcgggaggggcggccattggagaggagcttggaaaactgagcgccgtggaagatgagcgtcggccgaggagggcgcggtccgagcctgaagtcggttgagtagaagctgggaactgacgtcgaggggatagaggttttaggcaaatcccagggtgcagcttgaggtggaggacgagcacagccatggacggaaaggagcaggggcatgattcggc

SEQ ID NO: 42100 - DNA, 5013 bp, Zea Mays
cggacatggaatgctctcccgtcgagacttcagcgccgccacctgctgctttgttccacgccagccgcggcgcattgctgttcttccatgccagctaccgctcctctcgccagctctacaaggggagggttgaaatggacggcgcctgcttcgtgttaccgcaacgaacgtctcgtgcacaccaagtgtgtgtgtgttggggggggggtttgcaaggaacggggattacgccgtcattcggatttggaggaatggagccgccctgcatcttaacagggtccaatgtggaacaagcatagcttgcttaaaccatgcatatatacagtagcaaacaataacaaaagacaggagacacgattgagcaagaacacaaaaaacaagaaaggatcaaataaacaggagattaacaacaaaggagtttgaagaggtcgattgggctggggctctaagcatggaagatgacagcaggagggtggatacgatgcagatggggagcaacctggatgggagcttgctgcggagatcatcatcatggtgggcatcgagaggaaacaatgcattctggtggccagcgagggaggacgacgacgaggaggcgctgagatgggcggccatagagaagctacccacctacgaccgcatgaggaaaggcatcctgacagcagtgggtgacggcatacaggaggtggacatccaagggctcaacatgcaggaaaggaaatgcctcatccagcgcctcatccgcatccccgaggaggacaacgagaggttccttctgaagctgtgtgaacggatggagagagttgggattcagaacccaacaatagaagtgcggtttgagcatttgaccattgacacagagatctatgttggcaaacagggagtcccaacatttaccaacttcttctccaacaaagtcagggatgctttgattgctttgcacattatctcaagtggtaagagacctatatgcatccttcatggcatcagtggaatcgtaagaccaaacagaatgtctttgttgctaggtgctcctggatctgggaaaacgagtctacttctggctttggcagggaaactcgactcaactctgaagatgtcaggaagggtgacttataatggacatgccatggatgaatttgtcccccaaagtacatcggcatacattgggcagcacgatgttcacataggtgaaatgacggtccgtgaaacattagcgtttgctgcaagatgtcaaggagttggaacccgttatgatatgctcactgaactctcaagaagagaaaaacatgccaaaattaagccagatcctgacattgatgtttacatgaaggccatctcccaggaaggacaagagaacttcatcactgattacgtcctcaaaattttgggtctggatatctgtgcagatataatggtcggagactctatgatcagaggtatctcaggaggacaaaagaagcgtgtcacaataggtgagatgcttgttgggccagctaatacactattcatggatgaaatctccaatggtctggacagcgccactgcctatcagatcgtcaactctctaaggcagtcggtccacatccttggtgccactgcactcatctcattgcttcagcctgcacctgaaatatatgagctatttgatgacattgttctccttgctgagggccagatcgtgtaccagggtcctcgagaaaatgtcctcgagttttttgaggccatgggtttcagatgtcctgataggaaaggtgttgcagatttcctgcaagaagttacatctaggaaggatcaataccagtactggtgtacaagagatgaaccatatcggtacatttcagtaaatgacttcgtagattccttcaaagcattccatgttggccatgcattgcagtcggagctcgagctgcccttcgatcgaaccaagaaccaccctgctgccctcacaacatcaaagtttggtatcagcaagatggagcttctcaaggcatgcttttgtagggagtggctgatgatgaagaggaactcatttgtttacatcatcaaaatagtgcagctcataatcctaggaaccattacaatgacggtcttcctgcacacaaaaatgcatcgacacagtgttgaagatggagtcatctttctaggtgcgatgttccttggattagtcacacatttgttcaatggttttgctgaggttgccatgagcattgcaaagctgccaatattttataagcaaagagataatctcttctatccatcatgggcatatgcattgcctacatggttgatcaagatcccaatatcattcttggaatgtgctgtttggactggcatgacttactatgtcatcggttttgatccaagcatcgaaaggttcttccgccattacctactgcttgtactgataagccagatggcatctggtcttttccggcttcttgctgcagtaggaagagagatggttgttgcagacacgtttggctcatttgctcagattgtcctgctgattcttggtggattcttgatagcaagaaataacatcaagaaatcatggatttggggttactggtcctcccctctgatgtatgcccagaatgccatagcggtgaatgagttccttggcaatagttggcaggtcgatagggcagaaaacaatgacacgcttggtgtccaaatcctaaaggcacgcggcatttttgtaggcccaaagtggtactggattggtgttggagcattgcttggatacatcatgatcttcaatttactctttgtactgttccttgactggcttggcccacttagaaaaggccagactgttgtttctgaggaggaactgagagagaagcatgtaaaccgtactggtgagaatgttgaattggcgcttcttggaacagactgccagaattcaccatctgatggaagtggagaaatctccagagcagacaccaagaacaagaagggaatggtacttccatttacaccattgtcaatcacctttaacaatatcaaatactccgtggacatgcctcaggaaatgaaagacaaagatattactgaagaccggctactactgctgaagggtgtaagtggagccttcagacctggaacccttacagcattgatgggagtcagcggagcgggtaagacaactctgttggatgtgttggcaggaaggaaaactagtggctacatcgaaggtgacatttacatatctggatacccaaagaagcaagagacctttgctcggatcgctggttactgcgagcaaagcgatatccactctccacatgtcactgtttatgaatccctcctgttctcagcatggctccggttgccacctgaagttgacttggaagcaagaaagatgcatgtggaagatgttgctgaacttgtcgagctcattccactgagaggagcattggtggggctgccaggagtgaatggtttgtctaccgaacagaggaagaggctcactatagcagttgagctcgttgccaacccatccatcatattcatggacgaaccaacttcgggactagatgcgacggcagctgcaatcgtgatgaggacagtcagaaacacggtcgatactggacgaactgtcgtctgcacgatccatcagcccagcatcgacatctttgaagcttttgatgagctgttcctgttaaaatggggaggtgaagaaatatacgtcggccccttaggacacaagtcatgccacctaatcaaatacttcgagggtttacaaggcgtgaagaaaatcaaggacggttgcaatcctgcgacatggatgttggaagtgaccaccgtagctcaagaagccattcttgggtgcaactttgctgaagtatacaggaattcatatttataccggaagaacaaaattttggtcagtgaattaagcacacctccgcctggatccaaagacttgtacttcccaacacagtactcacaatccttcatcacacagtgcatggcctgcctatggaagcaacacaagtcatactggagaaacccatcatacactgcaaatagaattttcttcaccgcacttattgccttcgtgtttggaaccatcttcttgagcttaggcaagaaagttggcaagaggcaggacctgtttgacgctttgggatccatgtatgccgcggtccttttgattggagttcagaatggcctaaccgtacagccgatagtagatgttgagagaacggtattctaccgagaaaaggctgctggaatgtactccgctctaccctacgcttttgcacaggttgtaattgagatcccacacatcttcctccagactgttgtgtacggtctcatcatatacaccttgataggcttcgactggacagtccagaagttcttttggtacatgttcttcatgtacttcacgttcatgtacttcacgttctacgggatgatggcagttgccatgacaccgaacagcgacatcgccgccctagcttcaactgcgttctacgcaatatggaatatctttgctggcttcattatcccccgaccaaggataccgatatggtggcgatggtactcgtgggcatgcccagtggcttggacactatatggacttgtggcttcccaatttggagatattacagatgttaagctggaagacggagaaatagtgaaagatttcatcgacagattctttgggtttacccatgaccacttgggctatgcagccactgccgttgttggtttcacggttctcttcagtttcatgtttgccttctccatcaaagtattcaacttccagataagataagaacacatctcaaacggattcagctgtgattactgattacgctcacttttgtaatacaaggatacaataaggtgctgtttggtccgcatatttgtaatatgatgggtaactgataacattaaatcatttttatttaagtttaaccgtaatcggatgtcacactagaaagtgatactggtatactcaaacttattaccgttgctatttaagcatgaatcatt

SEQ ID NO: 42101 - DNA, 778 bp, Zea Mays
ccctgctcacaggtgcacatttatctattgccctggacaaagaaaaataaaccaggatctagtaaccttatcccagtagaaatatcaagtattggatcactttgtgcttagccacaagtgatgttcccagctgcttttcttttgtttgcagtagaagacaaaatggatattttggctatggggaagggaccaaattcagtgtctctaactggtgctgtgaaccagaccaggtgcagtgactgtagcatggatcaggttgggggataaagaaaaagatctttacctctcggctgctgtaggaaatatcagtttggattcatttaagtctgcacacactagagttcttatctgttggtttactgtctacagaaatagacaaatcagataattggatgttggaatggcccaagttcagtgtttaaattgaggctgggtgctggtattgtatgagcaccctgggatcactcctttgctgcatgcttgacatgttcactagtctggtgaccatgccacccggttccctcacctcgccgtgggcaagacgtctcagggagtgaccagcccgaatgaccctcgttccacgttctcctaagagcacctagaagaagtggtgtttaaaggaggagtctactccagtggctgctaatcaagtggaggagccatctaactgggtattggatagtaggatctggaacctcttcactgcaataaggcaagccccggtgcatgcaaccccttccttgtattttaaaaatacttttatacactttaagtctag

SEQ ID NO: 42102 - DNA, 511 bp, Zea Mays
cgctcgtgctctctcgataggacgacattgaggactaccgtgccgcggcaacccctccgaagcggtgcgaggcgctaccttccaagatagcggacgtgctgggctgctggccggcgcactacggaaggtcgggagcacgagtagcgggtggccaccaccgtccgggccctggacgacgaggtcgtcgttgccgtcgatcatcgcctcagcggaggtaggtgcttctccccgccccagcattggattaaagtccacgttcaattcattttcgttgacggcgagatcatactatctatgtctgtttaaagagcggtgaagaggcaacggactctatttgcttgagtggtttcacttagatcccattcaaagcgaagttcacttagttgagaaatgctagcgctatggatcggagttggtccaaaagctagaattggagaagattcgatcagatgatatatatgcatggagttggatcgaaagacgatggtgatgcattgatgctactactgct

SEQ ID NO: 42103 - DNA, 2083 bp, Zea Mays
gcttagtcccctacgggctacagtagtaaggatgactgacaatctggtatcaagcatggagactgcagctctggccgacgaggatgcatcgccgaagaagacgaagcagggcggcttcaggactatgccattcatactggcaaacgagatctgcgaccggttcgcgacggccggcttcaacgccaacatgatcacatacctgacgcagcagctgcacctgccgctcgtggaggcctccaacctgctcaccaacttcaacggcaccgcggcattcacgccggtcctgggcgccatcatcgccgactcccgtgccggccgcttctggaccatcgcggggggcggcgtgctgtaccagctcggcatgctgggcctcgtcgtgtccgcgctcgtccccgcgctccgccccgcgtcctgtggtgccactggcgctgcgcccccgctgacgtgccagcgcgcgaacggcgggcagctcgccatgctgtacggttccctgctcctcaccgcgctcggcggcggcggcatccggccctgcgtcgtggcgtttggcgccgaccagttcggccagcgcggcaagcgtcctggcggcgagcagcagtggagctacttcaacctctacttcttcagcatggggctcgccgttctgctggcgctcaccgtggtggtgtacatccaggagaacgttgggtggggctgggggttcgggatccccgccatcgccatgttcgtctccgtgctctcgttcgtcgtggggtacccactctacgtgaaggtaaagccccaaggaagccccttcaagaggctcctgcaggtcgtcgtcgcggcgtttaagaaggggaaggactccgtgccggaggacgtcggcttgctgtaccagaacaagcagctcgacgccccagtcgccgccgacgggaggctgctgcacaccgatcagcttaggttcttggaccgagcggctgtactgacgacgggagacctttccgactccggcgagccgaacctctggcgtgtatcgacggtgcatcgggtggaggagctcaaatccatcgtccgcatgctgccgctgtgggcagccagcatcacggcgatcgcggccgcgtcgcacaacttcaccttcgccatccagcaggcgcgcaccatggaccgccacctcaccccgcgcttccagatcccgccggccacaatgatcatcttcaccacgctgaccatgctcgtcagccttgctctctacgaccgcgtcttcgtccccgtcgcgcgccgttacacggggcggcggtcgggtggcatcacctacttccagcgcatgggcgccggcttcgcggtgtccgtcctcggcgtcctggcgggcgcgctcgtggaggccaggcggcgccgcgtggccgcggagcacggcctgctcgacagccccagcgcggtcgtgcccgtcagcgtgttctggctggtgccgcagtacgcgctgcacggcgtgagcgacgcgctctccacggtggggcacatggagttcctgtacgaccagtcgccagagagcatgcgcagctcggcggccgcgctgttctgggtcgccggctccctcgggaactacctgggcacggtgctcgtcacggtggtgcagagcgccaccagaggggtgtggctccaggacaacatcaacaaggggaggctggactactactactggctcgttacattcctcttggtgctcaatcttttctactacatcgcgtgcttccatttttacaccttgaagacgttcgaggtggacgccggccgcactaatggtggagaacggcagccggaggctgcggagccttgccatgtacaggttggaagtttgtagtgagagaagctttcagggacctgtttgctgggcgtgtcaggtagggtagatgtagatctcacttccggtttctgcactcctagaaagtggcaagtctcgctgtaattgacatgtgactatgttttagaactctgctcaatgattctctagctcccagctctaatgctctataattatctagctccaagagtcgattttctaatagagtgattatgagtgattatctagcagaagtgaatctatttgacg

SEQ ID NO: 42104 - DNA, 1827 bp, Zea Mays
tggtaccctcttgtcagatagaacgccagaagcttggcaccacttcatctgccctgctttgattatatggctaacatcttcatcaatatcctcgtctctctgtatcattgtttttcctagaggcactacttaacctttcaaactaacatttccttcctcatgtgtagtagcgtcgaagtcacatctcatatatttggttctagttccattgagtataaaacctttggatcctagagtctcccgtcataactcctgttttctatttctcatattcggctatcatcaactagcactacatcatccgtaaaaagcatacaccaagggatatccccttatatgtttcttgtgacctcgttcatcactaaggcaaaaagggttctttaaatgatgttggaagtgtagatgtcttctcttggataagctgtttggatcttcgcactctcgctgtgctgacaaattccaccctgtccagctcaagtgatccacataatatatctttccattacttaatacctgaaggaggcaacgataaattgtcctacctcaagctaaaagtcttgctacctgattcagatctcactgttactagtcagaagcaaatcaaggacaagctaaacgttgccactccagaaggaaattttctttggttattccacactgaattgtcaccctttcttatcgcaaaatctcagttgtcgaaaaagagatttgtttatatcgctgcagattccatcataaagggcaaagtcgaagatcttggtcgcatggaactaggcggttacgccattggcgctgttgaagattgcagcaagcgtctcagcgattatatcagtatggatgttcttagtgccatacaaagagcgggagctgcattcagttgggtgcctaaagaaccttataacgaggatgcatgcctacttgattttgacgtgctattgatggagcctcgcaagctggagaaaaccctgattacttccatcatgtggtgggctgatgccattcgtttagccaatcaaagggacctgattagactggccgtaactctgtccttcaatggcaagtacacgaggctaccttcaaactggaagcgcgcagatgatgacaacgctgatatcctcaacttcgatggacccaagaacgtctgttctgaagatgggcgccagcatgagcaaccaggctacggcgcaacctggcagcaataccttcatcagaaatctgaagccatactgagcacctaaataacggcacttcgccggacacaaattttccactgtcaccgagtggaagctgactgttggtattgacctgtaaaccctccatagaatgcattttgtactccagtactctattccagcacagaggaagcatgctctcgcttccgtatgtataattcaggatacaagagattttttttttggcggctgacgccggaaagttttcctggttccagttcagtttactcttttttttccatcgtagaacctcactaaaagcctaaaaggtggatcaattaccacgcccatatgagcaaatattgtattaaactgtatgataattgtgcagaaccatgccatcttaccgaccgcccactgcatccttggctccttgctatgcctggatccagcagtacccattcctggttggaattgacgagtgcgctagaattctattttgcttcaataagtcatgtggctcgatgcatcatatggcttggtgcaagaaaatcatttgttgttcttaaatgattttggatatcattggacactacaggagggtcaaccctgagcggaatttcaatctcctcaggttccagcaagacttgtaaca

SEQ ID NO: 42105 - DNA, 2493 bp, Zea Mays
tttttcctctacgctaccagtctaccgctagcctgcctgccctcagacttcctctttcttccccttctcagcctttccctctcttctctgctctttgcatctctctcttgttcctcccttcctctctctaaaaaagggttctgatccctttctagaagctcctgggtttctgttgccgacccgagctccccaggggcgctcaggaggcgccgagccggcgaccgctccggcggatctgaggagccgccgcggtcgctttgcctccggttccttgtaaactattgattgggaaacactctgaagaagagtttgttggctgcataacatctcctgaagctggtttgaagtttgctgataggaaagatcatgggcgctctctgtgatttctgtggggagcataggtctatggtttactgccgatcagatgcagcatccttgtgtttatcatgtgaccgtaatgtgcattcagctaatgctctttctcggcgtcatacaaggacacttttatgtgaccggtgtgcttcacagcctgctatggtccgctgtctagcagaaaatgcctcgctttgccaaaattgtgattggaatggccacattgcaggatcctcatctgccggacacaaaaggcagactataaattgctattcaggatgtccatcgtctgcagaactttctagaatatggtccttcgtttcagatattcctaatgtagcacctgagccaaactgtgagcaaggaataagcatgatgagcatcagcgacagtggtgtcagtaatcaagataatgctgcaggggacagtattttgttagatatagctagtgcaacacttgtaagtgatattggtacttgtgacaagcttttggtaggttcctcttcaggagctggagtgaacctacttccactggctactggtcaaacagaaacagctggatctgtggattccacaccagataaggttccctatacgccagataaagatatgttcagtaaggacagcatatatgaagatttttgtgtggatgacgctgaccttgctttcgaaaattatgaagaactctttggtacctctcatattcaaacagaacaactctttgatgatgctggaatagacatttactttgaaatgaaggaagcacctgctgggaattccactgagcagtccaagctgaagcaacctgcaaatagcaatgcggtatctgccgactctgggatgtcgaaccctggagtgaaaggtgattccagtgtttgtacccctttgaggcaggctaggtctagtctgtctctttcctttgctggtttgactggtgagagtagtgcgggagaccaccaagattgtgtggtatcatcattgcttcttatgggtgagcctccttggcagcctcctggccccgagggctcaattgctggaggtagtagagacagtgcactcacacgatacaaggagaagaaaatgagaagaaagttcgacaagaaaatcaggtacgcttctcgtaaggctagagcagatgtgcgaaagagggtaaagggtcggtttgttaaggctggtgaagcatatgactatgatcctctctgccaaacgaggagttactgaagcatatgatctttatccagttttaaattagcaaactgcaaccaaggctcgttgcagctagaacaaaagcactggcaatccaagctattgggccaaactgtgccttcgaaaagaaaaaaaaaggagaaagctgtcggcatgataaaatatagagaaatatttggatgttgcagaagtttttgagtgaggatcctcctttttcctcctgtacagtggttggaagcggtttgagtctctccatcttttgtgaattagcctgaatccagctaaacagacttgttgcattttgatctccattctgcatttctgctgactgccatcagtctacgtacacgggctggcggctgcggtgtttttggaggtgttcgtccagattagacaagatggctagatgtgatctgtgaaatatccttctattataataatgtaaaatttgctgggacctggatgtttctgctattatcaatgtgcaaataccaggtcgtagccaaactggtcgtcagtttgttctttttaagttggtgatggaacccatccaactggacagtggacaccaactttctgtgctcattctgtccaaaccaacctccaaactgactcgatgttagtactatttgtattatgtgactcctgagcaagtgagcttgtgctcaaacctcaaatacgtcctcttgtaccaaaccacgatattggagggtaaatttttgacctgttcctttgttgttgaaacttctggttattttggaaaaaacaaatgtggaacactgctttgtggcttttctgttctgcactgttgtactcagtcttgcaaattagaagacgatgtggcatttttagacatagttatgtatttagatatatactatgtctaaatacctggtgaaagaaatgtatctagaa

SEQ ID NO: 42106 - DNA, 1880 bp, Zea Mays
tccactccgccgctcaccggcaggtccattccgttcggccggctgttccccaccacggcgagcgcgagctgcgctgccggtgtcccacgcggtgactgggactcggcgaggcagcggtcccggcgtccacatcgcgcgcggcgaggcaagcgccaagcgaggcgtcggccagcccgctggtccagctgttgctggattgctgctcgagcttggcgaggccagcccgcagtccgccacccgctcgttcagccggttcctctcaccgcgctgccaccgatggcgacgaacctgggcgtcttctgccgtgctccccgaccctcgcccgcgtcaacggccgccgccccctcgcagtccctctctccctcctccgcctccgtacacattccccattcgacccagcgcggccgcctcgccgcagctccaccactgccacgttgtgtagctagtccaaccattgctaatgtgaaagaccaaactgaggctgaagttgcaatggggtacacaatgactgaaatctgcgacaaattcattgagttcttcatgtatatgaaaccagaaacaaaggactggagaaaattattggtgtttagagaggagtggcaaaggtatagagggcacttctacaagcgttgtcaagtgcgcatacatattgaggctgatccctcattgaaacaaaagttggttgtacttgctagaaaagttaaaaagatagatgatgaaatagagaagtacatggaactcttcactgagctcagagagaaccctgctgatattaatgccattgttgcaagacgacggaaggatttcactggggacttcttccgccatcttaatttccttgtgaatgcttataatggccttgatgagcgagatggaatagtcaggcttggggctaaatgcctgtctgcaattcatgcatatgattgcacactggaacagttggatattgaatctgctcagttgaagtttgatgatatactgaattcctcttcactagatggtgcttgtgacaagatcaaaagcttagccaaggctaaagaacttgattcatctctaattcttctcattaacagagcttgggctgctgcaaaagaatctacaactatgaatgataaggtcaaggacataatgtatcatatttatacaactacaaaagaaagcctcaagagcatctcacctccggagatgaagctgctgaagtatttgctgaatattgaagagcctgaagagagatttggtgctcttgcaactgctttctctcccggagatgggcgtgaagctaaggatgaagatgctctatacacgactcccagcgaactccacaaatggatcaaaatgcttctcgactcataccatctcaacaaggaggagacggattttatggatgcgagaaagatgagcgacccggtgatcatccaaaggctaaccttgctgaaggagatgatcgaggaagaatacatgaagcggtatatacatcctgaggaggaagaagaacccatggacgacagctagcaccagaatgctctgagcgaagcgagcctgtatgtgtaacgccgactcggaacaaacggtgaagatttagaagggacattctaatcgctgccaacgttgacgatccatataagtagtagatagccgatgccctgctccttttttttacgaggcgatggatggtaaatttgtagcatggcaatggcatcatcaggaatgagtataaagtgcctaccagtgaagacatagcttacatgtatgttggattgatgatggtgcaaaacttgagaacttcccgcagaagtcacaacatgaagccaccttttcatactttttattgcctcaatctcttgtttcgctcaacacttttttccgtaaggagtgcgttg

SEQ ID NO: 42107 - DNA, 431 bp, Zea Mays
taaaaggagagatatgggaatcatttggatgatatactgaactgggttcctgatcacatgggatggaagtagaagccatcagggaaataccatgtacaaatgtgttgagtaatgctttgaaaaacacatgattcattaagtgaaagaatagttagagatgccgcaagtagggatgaaaacagtttcagaattttttggaattccgaaaaccgttttcgatttttttcgatcgaattcaccggtaacggtattattcggaaacagaatcggtatcggaatttttgtatcggaaacagtatcaaaatcggtatgtcattttaccgaccgttttgtttggttaccgattttaattggaatttaccgattttttctcggaattttaccgaaataaaaaaaaccatcggcccatgaaaccaacaggtccgagcagg

SEQ ID NO: 42108 - DNA, 1960 bp, Zea Mays
ctgtcacctaaaatctaggatatattattcccccaaaacaaacactaaccggccggcccaattctcacgcgctcgccgcctaggagcattcacgttggtggcgggcggtggctcggttcctctcctccaccgcacctccaagaatccacctccacgactaagctgacggctcggcggcgccatggcggttcaccggctccaaccttccctctctggcctacagtgctccaccgcccggtcgccagtgctcctccatgggccacggctgacgggtgcacgcaccgatggttggtgcaggcaggagaggtggatttggtggacctagattcgatgtgcagagagcgacttggaggtggctgacatcttcaagcactgcaacatgcagttacaactactgttggccatacagggaaatgctgggcctattataccaattgttcaaagcatggaccttgttatttttccagcacttgacattcgagtgaaaaatgtcgcagggacatattctcttgaacataaaggagaaaattatctcttcgcacatcagacaaggcttctactctttcagaagaaagtcattttcaagagaatcttgaacaaaatgaccagatgtttaggcctggttggaaggacatttttcgaatgaatcagagtgagctcgaggctgagattcgaaaaggtctctcgagattctactcttgatccaaggaggaaggcctatctgatccaaaatctcatgaccagccgttggatagctgctcagcagaaatcaccacaaccaagcgtcgaaggacataatggatgtacacgacgacctggatgtgttccttcgtaccgagacccagggaaacaaatatttggctgtgagcattacaaaagaaactgcaagcttgttgctgcatgctgcaataagctattcacttgcatattctgtcacgataaagttagtgaccatacaatggacaggtatcttcaccacaaccattcattttaccgtccacacctttcctgctgagggatgctttcaaggatttcattttaacatcgaaccaatatcaattaagcatggcattttatttggaaatagatgtttgtggtggtgccatggacctgtgcgtcccttgtgaaatgaattgattttttgtcattgaattttctaactgaagctttttcattcgtttgattcacttgagctcccttaagttgtattgtattatttaatcataaatgccatccttcctcttatagttatataatcaaatattagttttaatcctatctgcatggtttacaatgtattgggttgtgtcattgtgtgaagaatgtttggtggttagtctgaccacatgtgttagctgaatatgagtgccgagcagtagcatgcatataagttccactgcattcaatatttacatttttttcttatttccaggtaactcaagaggtccacttattgactcttatgaccatgtaattggtgttaatacaactacattaacacgtaaaggttggtagatctggaaggtcttgatggtctaatacctgtctatgagtacgaaagaaaaggcgggagaagtcggtctctgcagcatcgcgcgtgaaaaaaaatcagccaattccatgagcattgatgttgtcatgacttcaaggagagaccatgctaagaataatgcattatgacatttgtcaggcttacatatcgattgtttgatatggatagatgtataggtttatgaccaatccagttcaaagcaatttgagtacaaaagaaataaggagcaggaaagctctgtacatcttgcattttgctgtttttttgtcgaagtttcaatgtctgtcgcgtgacaaaatatagttgtaatttatattttggcatgcacgaaacatgtgtatttattcatttttgaacgaaattttacgtcaaatcctctattgcgttatatacgaaattttaacgcgg

SEQ ID NO: 42109 - DNA, 3619 bp, Zea Mays
agcaaagcacactgagaaatcttgttggagcgcagttaatgcatgcacacagagctccgtccgtcactttcccctcgttccattcatggagaatatgctccacctagccccgtcgtcccaggcccaggcattggccttggaccgctcctccgtcttctcgcgtgagcacgtgccgccggccgtctccgctgtcacctccctgccagttatcgacatgtctcgcagccgcgacgaggtccgccgcgctatcctcgacgccggcatggagttcggcttcttcctggtggtggagcacggcatcccagaggaggtgatgcgcgacatgctggaggtgtgcgaggagttcttccagctgccggcggcgagcaaggcgtacatgtactcggaggacagtcagagacccaaccggatcttctccggcacaacctacgacacgggcggcgacaagtactggcgggactgcctccgcctcgcctgcccctcgtccttcccggtcggcagcggcacaagggacgactggccgcacacgccccagcggctgaggggtgtcgtggagcgtttcaccgctctgacgagagggctgggggtggagctgctgcggctgctgtccgaggccatggggatccggcccgactacttcgagggcgacatcagcgccggcgacgtggtcctcaacgtcaaccactaccctccgtgccccagcccggagaagacgctcggcctgccgccacattgcgaccgcaacctcatcaccctcctcctccaaggctccgtctatggcctcgacgtcgcctacaggggagagtggataaaggtcgagcccatgcccggtgccttggtcgtcaacttcggccagcaactcgaggtggtgaccaacggattgctgaagagcgttgagcaccgcgtggtgaccagctcgacgctggcgcggacggcggtggccacattcatcatgcccaccccagactgcctcatcggcccgtcaaaggagttcctcgccggggacaagccaccgtgctaccgcaccatcaggttcggtgacttcatgcgcatgtacaacactgtcaagctggggtcatccatcaaccagactacagatcttaagaatatccagaagaagatatgagcatatttatttaccagagagatcgtccggccagcaggggtcctccaagattttattcctttaataaaacgtacgacgagcatatttatgtcaagcaataaaacgtacgacggacaacttttaaaaatattattattaatcggaggcagcatggacgccattcctttatgagatatgctaaaaaaacaaatgtgctgaaatatctcaaagatgagagacatgcatgtggcgatatatgctgtggtataatctaatcattattgtcgttagtatcactgggtttatttctgttttaaaaacaattacccccatgtgcgatattagaaaataatgaaaaatacataacattttaaatttatttctgagctatccacgtatgtcacaatagcacaacggttcattttcgacggcgacggccgagtgggggtatttctatctcgtgactctgtgcgcacagagaagcgagagggcagatgcctccgaagccggtgccgttcgagaccttgcacgggggattggcaattatatttttagagagcgtctacgcgactgcccaacgtctgtcattgtcttcatcgctggttcctggcgtcttcatctcgatcggatgacaagagaagttggacaaggatcaggatcctcggagcgcatgggagggtaagatcaatacagttcgttactgttttatattctgcatattatatatgtcgtatgtagctctgttctatcgtattataatatgttatatctgtctgtcttatttttacagtcatcatgtttatattgttatctgtttatttccagttgttccataataatccatggaccatgtttatatacttattttatttatatgatttacatgcttcatatgctttgtgttctcatgatccatattgttatggatatttttgagatcacgttttctatgtttgattatctattatatgtcatcatcataatgtgaatttatggaattaaaataatacggaaaatgcctatatttctaacaaatactacctctgttcttgaatatttgttgcatgcttgttcattttgaactaaaacacgataaataaaaaagaacggatggagtattaaattaaaataacactatttcaattctttgggaagatccttcgccactagttgctggaggtaattttctcttcgagaatcgttctatcatatacttcttataaaatttgtcaagttaaattactaattgtctacacctgtacaccctaagcaggtacatgcacctgcagtgatgacctcaaccagcagagaccaaaataaacactcaaatataaactaccagctttgatcgtcgtttagttaatttatgaacttacttgtacctgcgatcaccatggacagacgtccacttgccagccaaaaccaatcgatacaggacaacagaactgcaacacattggaagtccaagggtcttttggattgacttatatggtgggatttattccacttaacttgagaagtcaagaaatggacaaggccgtgccacacgcgcgcgcgccgccgccgccgccggccgggcccggacgtggcgtggcgtggcgaggcgaggcgaggcaggcgagcgggcgtggtgtggttgtgttaatttttagtactcactaaccgcgttaacctttcagttgcctgtctcttcgtcagccgagtgactctgtctcttcgtcagccagccgagtgacccttctccttcagctggccgactcatggcgtgactcggcgagtgctggccgactcatggcgtgactcggcgagtgctgaccgacccttggcgtgactcggcgacctttctccttcagcttccctctgtgagaggataaatagaggagcacccctgtcactcggtacacgagagaaaacacttcttttcagactcacagtccagccgccgagtgagggtatttccatctcgtgactctgcgcgcacagagaagcgagagggcaggtgcctccgaagccggtgccgttcgagaccttgcacgggggatcgacaattaggtttttggggagcgtctacgcgactgcccaacgtctgtcgttgtcttcatcgctggttcctggcgtcttcatctcgatcggatgacaagagaagttggacaaggatcaggatcctcggagcgcatgggagggtatgatcaatacagttcgttactgttttatattctgcatattatatatgtcgtatgtagctctgttctatcgtattataatatgttatatccgtctgtcttatttttacagtcatcctgtttatattgttatctgtttatttccagttgttccataataatccatgaaccatgtttatatacttattttatttatatgatttacatgcttcatatgctttgtgttctcatgatccatattgttatggatatttttgagattacgttttctatgtttgattatctattatatgtcatcatcataatgttaatttatggaattaaaataata

SEQ ID NO: 42110 - DNA, 2371 bp, Zea Mays
aaaaaaccgacagcgacagggcaaggagccagggccgctccgctccgctccgctcgtgctctgctcctgctctctctctctctcggcgtcgattgggcgaccgccgccgcctcccccaggtcttcgctgggcccgtcgccggcgccgagcacccaccaggtacatggtagttgctttttgctgggtgagtgatatgcgtggcacatggctttatgtattgtttcttttcaatcagtgagtgatatttcttgaattctcttaaaacttcattaggatctttgaggtttgatgcaacagctgaagtttagttttctatttataccactggaacttcgtcccgttcagttcctgataagctaagtgcttgtccctgaaatagaatttgtaatcaacaaaccagtcacatgtttgttgcattcttcaggatgaaactgagcccgctatgtattctttttcactgtttataattgttgtttcctaatatactactgtgaatgcttgttctttgtttattttcgtatattgttaattcctaatatacataatttccccaaataacatgataataaatatcggaaaagtggagaactgaacgacaatgtttagcgcaatggtgaacagtgctttatagttggcattaatcttagttcctacatgttgttaatatgtagtctatatactttgattattttttattgattacaaaatattgggaggaccataataattttgaaaaaaatgcttggattgtttctgaggatttgggcttggaaaggcgtaagaaatctgaaagtttcttgtgttgggagaggactaatgggttacattagggataaggttaatcaggggcaagttttacttgataatgtggacatcaagacgttgcaattaaagcgacttagagaccagatcggattggtgaatcaggaacctactctttttgcaactacaattcttgagaatattctttttggcaaacctgaggcgacaaaggcagaggttgggtctacgactacttccgcaggcgctgaaccgcgctggtggcaaggctggaaacaagggtgctgaagctgctcttacttccattgagatggcctctctgttccggcatcacttaggctgacactttgcatattctggtttctatacacgaggcaagacatcatttcttcctatcaagagtttcggctaatagagcttttctgccgtggctagtataatttattttcaattctgttggttcggtgctgatttgttgctttctttctatgagatttgaaaagctcacaagacatgtttctaaacctggcacaatgaataattgtcaccatgaggtcatgaataagcacaactgtcacggcgtgtgctagggcagtggggctgtcgccaaggacatgcagcttgtgaagcagtgctggagccgtccccatcgccgagcagctcgtgagggtaattcaagcacgctaatgcagtctggtcctacaatagcgatccttggtcttcacctacatcttcacctaccgaacatcaggtgttggtccagtgcaacctgctgtcttcgagctctagcagatcgccttgccttgcgtagccgcgaccacgccggcgctgcagcactacagctttacctcaccgggtttagggtcctccgaccaagccgcgccgacctccactccagcttagaccggcggcggatgcatgcctttctgtcctcgcgttcggatctcagtgtcccacgctgtcgtgccgtctcagtcatccctagctcttcctcgtccgtaccgtgtgtcacagcaaactcttcttcggtcctggcgctcgtctcctcgccatcgttttacggattcggcgtcgtcgagtttcacctcgctgttacaacgtcctggtcttttggagcttcggcaaattgttgtcctgctgcattgtcgtgtggtgctccctactccctagtccctacctagtggtgagttggcgttgatcctgatcttcattttgctgtttccaatcaatttagcacatttaccatagttgtgtatgtcgatatggtgctcgacgtgttgtgattgtcctgggattaagagggtttgttgttggccgtcgcaggcaagttttgcctggtgcagcctaccgtgtgggccgagccgggtccaaatcggattaagaagattttttttcatttatctaataaagatataccttgtgaatttttcctagagctacatgaagaagtaacagttgtgaggtaaattctgttaggctcacaaaaatgggttctctaggttaaaatagttttagggattctcaggcaagtccttaattttggataattaaaacttggtttttataggattatatgagttttagttataaa

SEQ ID NO: 42111 - DNA, 2033 bp, Zea Mays
ctcttcccaaacccatcccgccgttctcttcctgcttcgttcttctctccacccgtcgctcctccctcctctcggcgagggagacccccctctcttcacagcgtggattattccattcttcgtctgccgtttgccgtggcgcgtcatcgatggcttgactctgatcgtcgtcggcggtgttgctgttttccagagctccaagatcgacaccgacagcatagcacctcctgcgtgcatggagttgccccctggacgggacaaggcttcctttgccggcgtgcggtgtggtggaggcctagcttgttgacggcagagcacagcacatttgcaggctgtagcgcgcgccacatagatagtagacaggcgaggggcgatagagcagtgtgcgcgactagctagctagctagcttggggcagccgaagatgctggcatgcattgcgtgctcctccaaggaaggcgcagaggacggctcccgtgccgcggccactacgacgacgcctcacggcaaagaagccgtcaagtctctcacctcacagctcaaggacatggtgctcaagttctccggctccagcaagcagtgcaaggggacggccgggacccagtcgttcaggagcagcggggacaggtaccgccgcccctaccccggcttcatcgacgacacaggcttcacgcccgcgagcaaggttctcggcgaggactactacccaaggaccgcattggcgggggcagcaggcgccgccggtggcgcgcgaacggcttcgtcggatacgttggacatgggcaggagcaaccgcaagagccccgggagtagcggctggattccgggcaccgacgaggcagcggcgggcggggacgatgtcctcgctctggaggacgccgccgcgcccagggagtggacggcgcaggtggagcccggcgtccagatcaccttcggtaccatcccgaccggcggcaacgacctcaagcgcatccgattcagtcgggagatgttcaacaagtgggaggcacagcggtggtggggcgagaactacgaccgcatcgtggagttgtacaacgtggtgatgttcagcggccggcagcaagggtgctccactccggtgtcctccgtcgacgacttggcgctgagggactcgtcctactcccgtggcggctcgacaagcaggggcagcccgatcacagcgccgccgccgccgccgccactgccgccggtggcaagcaaagaaccgatcacccggagcgcgtcgtacaaggcaacggcagcagggtcctcctcggcaccgtacgcggccgcgcattccaccagggcggcagcggcatacttcccgtccgcggccgtgcccgacccgtcggaccacgtctgggcgcaccacttcaacatgctcaactccgctgctgcggcggccggcacgtcagcggcgatgggcggcggggccccgtcgtcctacgacccgtcgcgcgccaccacgtcgtccagggacgaggcctccgtgtccctcagcaacgtgagcgacctggaagccacggagtggatcgaggaagacgagccgggcgtgtgcctcaccatccgcgagctcggcgatggcactcgcgaactccgccgcatccggttcagccgggagatattcggcgaggatagggccaaggtgtggtgggagcagaacagggagagaatacaggcggaatatctgtagcaagcgatcagacactgagctgatgcaattttcaggcctgatgggataatcaaatatgtttgtgagaggatagattagggagatgataccgctatatacatggtgaaaacaacgtgaagggggaaactgtgaaagtgaaagaaatggtacctgtccttagttgcctaaactaataataagtttgtacatcgttggtacaatggtaccgtgtctggtttaaagttactttgtactgtacgtgtactgtacatcttggttccttcggtggtttaatttgtttttttaactctgtccatttcttgcgtgtttattacgtcctaactcgcaagtatatattcttt

SEQ ID NO: 42112 - DNA, 423 bp, Zea Mays
ttgttgatgttttccacagcttgcaacctgatcccttctaaagcatctttttccacagaataatcagcttcggaacctgatgctgccgaagctattacccttattgatccggttttagcttcttctggagttattgcttcgtcaccaaataataacttgaatggggtaaagccggtagaccttgatgttgttgtattatggctccacaccactttggttaactgatctggccactttccccttggttgattgaaaattgacttcattattcctgtcattataataccattggctctttcaacaagtccatttaactccggatgtctgactgatgcaaaatggatcttcgtaccaatttgaccacagaaatccctaaaagcttcggagtcaaactgtgttccattatccacagtgatagccttt

SEQ ID NO: 42113 - DNA, 2722 bp, Zea Mays
cgtcgcgcgaccgcaagtacacgcgcacgcctatacctccgtcgcctttgcctgccttggcgttacggcgtagggagggagggatggtgcttttgcctttccatgccgcctatttatagaggcaatcaggcaacacacagcaagcaactgagcatcacaacagcagcagcgagaaaagaaagaaagaaagaaagaaagaagcggcgtctggccaccgtaccccgccggccggagatcagataacaagcaagcgccgcaacgcacgcgacgggccggccggggaggcgtataagtacgggcgcgtcttcttccgccgctgccccgacatctccctctctcgctggtgcgagagcgcgcgcgcaagcaagcaaggagcgtcgtgtctagctagctgagcacctggttttggagcatggaggacaacggtgccgccgccgccgccgccgctcccgcgacgagcatgcctgccgagaagcgtgtggcggtcatccagggggacgcgccgccggagccggcggcggggctactgccctgcgggccgaggaagacggggctccacctcttcgtcatgaacatcaggagcgtcttcaagctggacgggcttgggtcggaggtgctgcgcatcgcggtgcccgcgtcgcttgcgttggcggcggatccgctcgcctctttggtggacacggcgttcatcggccgtttaggttcggtggagatcgccgccgttggcgtttcgatcgccatatttaaccaagtctccaaggtctgcatctaccctctcgttagcgtcacaacgtcgttcgtcgcggaggaagacgcgatcatcagtaaggccgtccgaggaaacagcagccaggaggaggacgtggagaaagcctcccacgtgggctttgatccggagaccagcaatctgcatgcatctggccctgcaggtatggcagaatgcgtgaactcgtgtatccctacggagtgcgcagcagatccctctggcaggcaagggcggtgcgagaagaggtacgtgccgtcggtcacgtcggcgctaatagtcggttccattctcggcctgcttcaggccgtcttcctggtcctttcggccagattcgtgctcaacatcatgggtgttaagtccggatccccgatgcaagggcctgcggtgcgctacctaacgataaggtcccttggtgcccccgctgtgctgctgtctctggccatgcaaggggttttccgggggttcaaggacaccaagacaccgttatacgctactgtggttggcgacgcggcgaacatcatactggacccgattttgatgtttgtttgccatatgggcgtcactggtgcggctattgctcatgttgtttctcagtacatgataacgttgatactgctgtgccggctcgtccagcgagttcacgttatcccacccagcattaaatctctgaaatttgggaggtttcttggatgtggattcctgctgctcgcaagggttgtcgcggtgacgttctgcgtcacgctggcggcgtccctggccgctcgccatggacccaccgtcatggcaggcttccagatctgctgccagctctggctggccacgtctcttctcgccgatggattggccgtggcaggacaggcggtgcttgcaagcgcgttcgccaagaacgacagtaagaaggtcgctgccgcgacatcccgtgtgttgcagctgagcattgtcctgggcatgggtctcaccgtcgtgctgggacttgctatgaggttcggggctggcattttcacaagcgacgtgcccgtgatccaagtcattcacagaggcatcccgtttgtcgccgggacgcagaccatcaattccctggccttcgtgtttgatggcatcaactttggagcgtcagactacagatactctgcttactccatggttgctgttgcgtctgtgtcgataccatgcctgctgtacctttctgcgcataacggattcatcggtatatggatcgcattgacgatctacatgagtctgaggaccatagctagcacctggaggatgggggcagcgaggggaccatggacgtttctccggaactgatgatggattggcttggaactgatgatctgcggcacactgctgacagataaggctgcgccgcgctgcgcatgcgcctctcatgtagcatcagcgaagtatagtacgtgttctgctggtgtttaaagcttcggatatcggaggtagatgtagctatgggactatcccctcctgatcgtctgacttgtggccttgcgtggagagtttacgttgctccgttgatttatgttgtatcatgccaggatgtcagtttaataccatacatcggtaaagtgtctctctagtaactccattcttttctccttttccccccctttgtgcaagctatttttttagctgtttgatgagaccttgcaagaactgttttactgcgtggaagcagcaaaataacagcgataaaagagacgtgtagtaccagagtccctctgagtgccagtccaggatgctttgataacgttaaccagacaatttgataacaatccatactccactaagcatatagtagtgtatacccgaaaactcccatcagttatttgtccctcactccctctctatcggctttcaaccaataatcaggaacacataatgctgaaagaacacgaaatccttctagtctttgacagcatatagccgatacatcttgcaaaaata

SEQ ID NO: 42114 - DNA, 1725 bp, Zea Mays
gtaagaaaagagagagagagagaagtaacgcgcgcggagaagcaaactgaaaacagcacccgctcatgcgttcgcgctgcacacctgtttgctgtttttcttctcccgttcacctcgcgtgcgcgacaactagggcgaccgccgacgctctacgtccagctgcccatgtcttcgtcgggctctttgccggcgacaggaacccacaacaccaggtcaacaccatttcatgtaattcatattttgggaaacttcatgaggatttggtctgtttactccttgtatagctccttatccaacagtggagattcaatagttggctttatcttcagttgtcttgtacccagttcaatcatattcttggtcttacagaaaccttggagaggccggcctttgcccaactcacaggttgttcctacagttgtcaatggaggaatcatggcattctactttgtcttatgggtgctctactggcagagtatgcaggtgctgttcttggagttctctctgctgctttatatggaaggaaagttaacatctggaaaaagatagctttggaagtgaaccaattgagaaggcaagacaaacatttggagtgaaagaaatggtggtgccaattaccgctgggatcttatctgctctgaggagagtattagctcggcgtgtctctctcaagaatcaacttaaaaggcggctccatgctataactattgcttctgctacttgttttctttttccgtttgccatgtgggatacaatcctaggctcagcgtccgacagcatagttaaatttcagctaccaaattgggcatacttgagtactgttttgttcggaatggtgcttatattctatgtcgacaatgttactgaagaaaagttgcatctggtcttctcttctccaaggcacttaatggtttcaacagggtgcatcatcgtgttggagatagtgtaccaaatggatttctccctttttggatttctggtctgttctgttattttgggattaggtatttttgaaacaacctccttggaacgctcaaagaaaagccctttggagacccatgaactatcgaatggggtgttccacaatcaattgccaattacagaacttccaagctgaagaatatatgacctggctgccacatggtgaatggccgcggttgcacacctcaaaatcagtggctcgattctttgtgcgaaggtttagaaccacagacagaaagcacggatatttttgacctgcaaatttgtctttgtgatcttccattcttgttggccacctgcatcctgtacatgccaactactcccagccccagtagatgtgtatcggtatcccccttggagatattgcaattgtcacagcatcctgtctcccgacttgggtagttgcgaaattttgcttttctcgcttggagacgcagatggttaaaaggcggctgttttgactgctgtagctgtggtgcaatccacaggaataaaatattgtagaagtagtagaagccggtatggattaaagttgtgaccgaagtgcattgatacatgtaagtatgtgacccgtccatgatatgattaacatgccgactttatctttgacctgtccgtgactgcaatcagcgagtctcctgcatgctcgacagaatgcacatgtaggcataccattatgggaaatggtttgaaccccttgattaataataaggtgtttgatttgaggagtgagttcatcatcta

SEQ ID NO: 42115 - DNA, 1182 bp, Zea Mays
gtaaggttggaggacttgagaaagtctatgagattgggagaatattccggaatgaaggcatttctactcgtcataatcctgaatttaccactattgaaatgtatgaagcatattcagactatgaaagcatgatgaatatggccgaagaaattgttactcgatgtgctatggctactcatggcaagcttaaggttgactatgagggaactgaaatctctctcgaaagaccatggaggagggagaccatgcattctcttgtcaaagaagcaactggaatcgactttaacagctttggacaagacgttgaatctgctaaaagagctgtgaggggactgccaggtttcgttgtagggaacagtgaaagtacttcactgcaagcctgttcatctgttggacatgttctcaatgaggtgtttgaaacatttgttgaatctactcttgtacaaccaacatttgtccttgactatccagttgagatatcaccattggcaaaaccacatcggagtcatgttggccttactgagcgattcgaacttttcatttgtggtcgtgagattggcaatgcgttttctgagctcacagacccaattgatcagagaagccgttttgaaaatcaaataaaacagcacaatgctaagcgtgctgcaatggctaaggaggtcaaatctaccgagggtgaaggcgacgacgattactcgtatgaagtttctttagacgaggacttcttgacttcattggaatacggaatgccaccggcatcaggaatgggcctcggtatcgaccggttagtaatgcttttgacgaactcttctagcataagggacgttattgcctttcctgtcttgaagattcagcaatagatccccttcattctgtgaagaggcgtggctgctgaagaaaacaccagcagccttccttttgtgcttggttcagtacagcaggttttatatctgctgacctttttatagctcatagatgtggccatttattatttgatgatgtaattgagatgtactatagttcagagtccaagccgatattaaaaactttatagatgtttgaataataatggaatccacattttacaattaatgtgctgcaaaacagctatctccactggatactctgattcttcagtgacatggttgccttgaactaccatttaagagattctttggtcta

SEQ ID NO: 42116 - DNA, 1523 bp, Zea Mays
atatgtagtagatgcctaataagaagctatctgcttctgcaccaccgtttaatccatctccaccatctgtacttagcccactttctggcaatgttggtctcccgccaccaggtgccattccaggagtagcaccttggcctgtgaatgtatccctgcatcctgggcattcaactatggtgccaagtggtcctcctttgtgcacttcccctcatcatttataccctcctgctccccgatctcctaatctcatgcatcctgtgccatttatttatccaccatatagtcaaccacaggtggttccaaacaccacatttcccatgaacactaatatttttcggcctaaccattatggatggcaaccttatatgggcccagcgccatcagaatttgtgccaatgtcagcatggtcaagtagccatacaattgacttcattcccacaccacatgttgttgatcctatttctcaatctttagcagataagcatattcaatctgatgcagctgttgttagtataggcccttcactggacagtagcgctgtagtggccaaagaggagatggagactcctgcagtggcagtaagtggcaatttgataagcaacaaacatgatgatcaagataaacaattaaaggatgccactagaattgaactgagtcctgaaatgcaagaagacaacaagcatgatgaaggtagtttcaggatatatgtaaaggggaaaagccgtcggaaacaaactctgagaatcccaataagtttgcttaacaagacatatgggtcacgctcatttaagcttgtctataacaaagtagtcagagagaatgacatcttcaggccttcaagtgtgtcctttgctgaagttgtttcatctggcaactaggttatgcaaattctaaagcatctaattatgacattagtacccaaaagaaaattgtcatggatctccaattcaaatgtactgaaatgaagttattatttggaaggcagcattattctcataccatattccagatatgaaatcccaccactcgaaactattcaaaaaggataaatattttttcatttcaaatacggtaccgacaatcctgtgtagagtccagaaaagatgcaaggaattttgtgagatccagaactaataggagatggaagtattacgaataataatactagactgtctagacaggctgaattttcttcaattttgatagattaagagaaaggaatcctcttcaatttttggagctcacttttgggcttttgaagccgagcctttagattttgttcttttgttacgctgcggcacctaataaatgacttgccttctatgttttcgagaaacttacattattcttttttatataacaataatactgtctattcagtaaagctgcttgtttgtggatgcgatttgcccccccccccccacccacccacacacacaagcgccaatttgatatgattaatccatatgttttgaatttgaagacttagtgtcacgtttactatgaagtgcaaactgcatcgg

SEQ ID NO: 42117 - DNA, 1634 bp, Zea Mays
gacgggggagaatgttgccgagccacgtggcaatctatctcacagcctgaatcagaatcagcccgcgcctcccctcccacctccactcgtttcgctcctctgaatcccccccgggccccggcacggaattccccccggcacaccccccaaggccaccggacgccagcagccccgcccccgcccacacctacgtacgagcgcaatgctggcggcgtccctcaggccggggccttcgctcgcggccttccccggtaccgcccagaggagcccagttcctttcctccccttccctgcccgcctccaccaccggcccgtcctcctctccgcgaccgccgagggaaccggcgcccccgccggccagggagacgcctcggctgccccgctcgacgaggtgcgcctgccgcagttcgctgcggactgggaatccgcgcgcgcgtgcaaggaccaggggaggatcttctcgctgccggtgctgagggccaacagcggcgggctcatcgtcaggttcaactccctgcaggggttcgtgcccaaccctctcctcagccccgcgcactggtgtaaagaccccaaaaggcccatccaagatgttacgaaagacctagtaggaacgtccatttctgtcaaggtggctgaagtgaatgaggaggaaaagaaacttgtcttctctgagaaggatgctagttggtcaacatactcttcccgaataaagattggcgacatctatgatggaattgtgggctcagtgttccactatggtgcatttgttcacctgcgatttcctgatggattatatcatcttactggccttgtacatatctcggaggtgtcttgggatcttgtccaagacgtcaaggattttctaaacgaaggggatgctgtcaaggtcatagttgtgaacattgatatgacgaagtcaaggatagctttatctatcagacaactggaggaagatcctttattggaaacattggacaaagttatccctttggaagctgatcaatcacctaatcgaatgatgtctccttcggaagttgaacttctgccaggacttgatggtatatgcaatgaactattgcaagaggatggtataacagacgtacagtttgggcgccaggcattggagaaacgtgtcgtttcacaagatttagagctttggatttcgaatgttcaagctaaggacaacaggttcacacttcttgcacgagctgggaggcaggaagtgtatttgaccacttccctagaccaggagggcataaagaaagccgtgcaaagagtgctggggcgtgttccttgaacccgacacgcagcgtgtagaaaccgattttctaactaaagcattacaaggaatcaaaagtacgagcgaacagcctgaaacatttgccactgtcagtctgtcacaacacccggctaaatttttctctgttggatactacgacaaccaaaaatctgtaaatatttgcagtcctacacgagtaggttaggcaccttgggccctcccttcaaactaagacgttgctaagcagtggttctgtgtatttgctggggtctgtcttttgatgccatgtgcacttgtcatactgtgacttcagttcactgcttgcacttggctgaactcccgaggtaacttgtgt

SEQ ID NO: 42118 - DNA, 2097 bp, Zea Mays
gtcaagacgggccacgtcgtattccgccgcccagcagtgcgaacgatagtccacctccaccagtactaccaccaaccaaaacctccactcttcctcccaccaaggcaccaacccgacgcaaagccgccggctttccccgatggcgacggcgatgtcagtttcggcggtgtccccgcccgccgcggcggtcacgcggccgcggacgatggtctgcgtgccggcgacggcgcgggcgccgcgggagatggcggcggagctggccgccgccgccgcgctcggcgctgacgtggcggagcttcgcctcgactgcctcgccgggttcgcgccgcgcagggacctgcccgtcatcctcgccaagccccgcccgctccccgccctcgtcacctacaggcccaagtgggaaggaggcgaatacgaaggcgatgacgaatcacggtttgaggctctgctattggcaatggagctgggagctgaatatgtggatgtcgagcttaaggtggctgacaaatttatgaaacttatttctgggaggaaacctgataactgtaaacttatagtttcatcccacaactatgagaccactccatcgtccgaggaacttgcaaatttggtggctcagattcaagcaacgggggctgatatcgtgaaaatagctacaaccgctactgaaattgttgatgtggcaaaaatgtttcaaatacttgttcactgccaggtgccaatcattgggctggtgatgaacgacagaggttttatttctcgggttctttgcccaaaatatggtggattccttacttttgggtcactcaagaaaggaaaagagtctgcacctgcacagccaactgctgcagacttgataaatctgtacaatattaggcagatagggccagacactaaggtctttggtataattggtaaaccagttggccatagcaaaagcccaattttgcataatgaagctttcagatctgtgggtttcaacgctgtgtatgtgccatttttggtggatgacttggctaaatttcttgatacatactcttcaccagactttgctggcttcagttgcacaattccacacaaagaagctgctgttaggtgctgtgacgaggtcgatcccgttgccagggacattggagctgttaacacaattgttagaagacctgatggaaagcttgttggctataatactgactatgttggtgctatatctgctattgaggatggaataaaagcatcagaatcagaaccaacagatccagacaaatcaccactggctggaaggctttttgttgttataggggctggtggtgcgggaaaagcactagcatatggggcaaaagagaaaggagcaagagttgtaattgcaaaccgtacctttgcacgagcacaagaacttgccaacttaattggtgggcctgcattgactcttgcggatttggaaaactaccatccagaggaagggatgattcttgcaaatacaacagccattggaatgcatccaaatgtgaatgaaactcctctatctaagcaagcactcagatcttatgctgttgtgtttgatgcggtctacacaccaaaagagaccagacttctccgagaagctgcagaatgtggagccacagttgttagtggtctggagatgtttatacgccaagctatgggccagtttgagcatttcacgggcatgccagtggacgattacaaattccgagcaattgcaagttcattggacaatcctaacaccatgaagcctcgtctgtgagagattcatccatgcccacaaacttccttgtttttcctttttagattcggattcagtgatcagtttgcctctcagccattgtaaattaatttgatgttccgagctgaaacattttggtgtgccttatttgtatcagcatgaacagcagtcatcgtgggtttgaatcagtctcttagcatttgcgttccaagacttgtctcgatttgtcccttttctaggtatcactaaggacttatttagttgtgtctggatcaaaacgatcaaaacgcggattgaatttccttctatttaattttgatttagaccccgttcggcaagctaagattcaagtcaga

SEQ ID NO: 42119 - DNA, 1140 bp, Zea Mays
aaaacaaagaaggaaaaaagttcagagcaagcagggaagacctccctcatgacacagcagaaaactagcaacaccgacgggagcgggagtgcgcgcgggcgacgacgggagggcagttggacgcgatgaagggaaatggcgagccgtactccctcgtcaaagatacctagcaaaggggagcagacgacgagctggatagagaagatatatagaaagcgagcctgttggatacgattttaacatgcttttctattttttaccgattcttattagtttagcgaggttgttggagttgttctaaacaagacagagacataccatgttgcatgtatttgttttgcttagtatgcacgatacagttgaagatgatacaaaacttttgtggtgctcatataggagaactttttatttatctattcatggattgtttcctatatttgcatccacatcggtctgtactgatctgattaaataagtcaaggttttttttcatttcttttagtgttacttttaatttgctttcacttataaatggacgcttttgcagcccgaggttacttctgctaccgttgattttaaggaagcaagcgcagtcgtgtggacaacagatgaggccaaggggacacaaggttggcagaagcagtatggagagaagcttgctaagcaccttggcacttgcggatttgagtctcgcctacaagatgatcaacgaacgatcacgtgaagttacatgctagaagccaaagagtaaggtgaagccgaaccgatattgaagttcagatcagatgtcaccttaatggtcaatttataccaggatatatgttaaatattttgtctctatggattgcagttgtaggattagtctcggtgcttgtctggtggcataatactacatacctacctttcacatgatctttagctagattgtttcgaataggatgatgtcctaaaattgtaggtgtaggccactgttgcgaggaaggagtttgcggctgggctattgttaaatccggtcttcccgttgcttcgaagatataaagtgatactacctctataactcaaaataaatcgattttttaaactcactatgagtcagattgtcttaagcttaaccaactttataaaaacgtaacaacatat

SEQ ID NO: 42120 - DNA, 2047 bp, Zea Mays
ctcttatctcttctcgcgactcacgaaggaggcgcgacgtgcgcgtgccgctgtgctgcactgctagtgttcctgcgcgccgtgctgtccggcccgcccgcgccgcgcaccgatgccgccaccgtcttcctcgcgctactccccgggccggctgctcgccgcgcgcccggcgtccgccaccacggtggggagatgggcgcgcttgtcgtgctcgctgtccatgaacgggtgcgcgccgggcgccggggaccgcggcgcggtgtgcgtgcgcgagacgcgggcgctgccggccgcgccggcgccgcacgacgcagtggggcggctcagggccgccgtggacgcgctctggtccaacgcagcgccaccggccgcgccctccggcatcatccgcatcgaggtgcccatcacgcagcgggtggacgccgtggagtggctgcacgcgcagaccacgctgccccgctgcttcttctcggcccgggcgccgttgcccgacgcgcccgccctcgccggcaacggcaacggcaacggcagtgtccatcggcagcagccggtgagtgtcgcgggcgtgggttcggcggtcttcttccgagggacggagcccttttctctagctgattggcgcgcaatcaagagatttcttccaagggactgtccactggtccgcgcatatggcgccatccgtttcgacgccacgagtgacgcttccgttgaatgggaggactacggctcattctacttcgttgttcctcaagtcgagttcaatgagctcgaggagagctcagtcctcgcgacgaccatcgcgtgggacgactcgctctcatggacatggcacaacgccgtggaggagctccaatcgactctgcgaaagatatcgccttgctcttctgttcaagcgaacaaggccagcctacagacagccatcgtaagtctcaatcatgtcccgaccaaggcgtcttgggatcttgcagttactaaagctctccatatgatcaagggcaggcaaagagaattggtaaaggttgtactggcaaggtgtagcagatacattactgacacttgcattgaccctgtggaactgctggcttgcttgaaggctgagggccaaaatgcttatcaattctgcatacagccaccgggtgctcctgcgtttgtcggaaatagcagcaactatttcatcggaagtacttgaacatttccagcgaggctctagctggtactcgggcaagagggaagacaagggcagatgactttcaaatcggtcaggatttgcttctaagtagcaaagaggacatcgaattcactatagtacgggacagcatcaagaacaagctggagatgatctgtgatgaggtggttgtccatcccagcaaggctctgcggaaacttccaagagtccagcatctgtcagcgcagttagctgcgcgaataaggaacgaagatgatgagtttgagattctaaacaccctccatccgagtccagctgtttgtggcttgcccactgaagaggcacgccaattcatacgggattgtgaaatttttgaccgtggaatgtatgctggtcctgttggctggcttggaggagctgagtgcgagttcgctgtcgggattagatcagcgttacttggaaaaggtcacagcactctggtgtacgccggtgcggggatcgttgaaggtacaaacccatcttttgaatgggatgagcttgatctcaaagcatctcagtttgcaaagctgttgcggtaccaagaacgacctattcgctaccaagaggctgaaaatctgggaacggtgatctgaatagagaagtacagaagaaactagaaagtcatcacaaagttcggcattcatttagcgagttatttatacaattgtttgtttgatatagtaagctagaagggggattcagttggatttgtgtaattatggaatccagaacagcggcagtgctgaaaaatacattgattgaacctgaatgggaaattgttcaatgtaacaaaaatatgtttacaacataaactatttgattgaatcagtgcgtgaatgtgac

SEQ ID NO: 42121 - DNA, 8740 bp, Zea Mays
taagactcgatcttctcatttaaataatctcgaggagctgtgggcacttctaaattttttgttgcccaatatttttaattcgtcagaggacttctctcagtggtttaacaaaccatttgaaagtaatggtgataattcacctgatgaggccttactttcagaggaggagaacttgttgatcataaatcgtcttcaccaggttcttcggccctttgtactcagaagacttaagcataaggtcgaaaatgagcttcctgaaaaaattgaaagacttgtaagatgtgaggcatctgcttatcagaaacttctcatgacaagggtggaagaaaatcttggtggaattggagccgttaaggttcgctccgttcacaactctgtcatggaattgaggaacatatgcaaccatccatacttgagccagcttcatgttgaagagattgagggctacctacctaaacattacctaccatctattttgaggctctgcggaaaacttgagatgttggacagattgctgcctaaactcaaagctacgggccatagggttctacttttttctacaatgacaagattgcttgatgtaatggaggattacttggtttggaaaaagtataaatatcttcgattggatgggcacacttctggccatgaaagaggagctcttatcgataaatttaacgatcctaattctcaagcattcatttttcttcttagtatacgagctggaggtgttggggtcaatctccaagctgccgatacagttatcatatttgatactgattggaatcctcaggttgatctgcaagcacaggctagggcccacaggattggtcaaaagaaggaggttcttgttttacgtttagaaacggtccgaactgttgaagagcaagtcagggcttcagcagaacacaaattaggtgttgctaatcagagtataactgctggtttttttgacaataacacaagtgctgaagatcgaagagagtatcttgaatcactcctacgtgagtctaaaaaggaagaagcagctccagtgttagatgatgatgctctgaatgacattctagctcggagcgaagctgagattgacatattcgaatctattgacaagcaaaggagagaagaagaaatggcagcttggcaaaaggtggttcaggatggttcaactagtgggctagaccctggagtattgccttctcgtcttgtaactgatgatgatctgaagcccttctgccatgctatgaaactttatgagccatcaaatgtgaaaacagtaaatgtgaatgtgaggaagaagggtgaacttgggggccttgatacacagcactatggaaggggtaaacgagcccgtgaggttcgctcttatgaagaccaatggactgaagaagaatttgaaaaactttgtcaagctgattctcctgaatcatcccaacctggtggcatgtcgaaggatttggatattcttaataaaggcattaagactgaaattcttgtggagagttcaaaagaaccagaacaaacgaagatggaggcatccccaactgtcggtgactctccaccagccaaacggcggagaggtagacctaaaaggtcagatgtttttgtatctcctactgctggtctgactgatgctgtcaaacaagacacaggaaccacacaggacggtagttctgctacaccagcaagtaccatccactctgatgcaccagctactgcaatcaattcagctgtttcagatgttaatatacattctattccaccagctgataccaagaaacaagagttcagtactgataccaaggtttccagttctgtttctgttttggaaggatctgtgccgaatgaaattggtacaccattacagagtgttcataatgtagcagtttctgcaccaccgcatcaatcagctaggggcaggaaatgccaagcaggagaaacacctcgtaggcgaggccgaaaaccaaaatctctatcttcatctggtgtagatgatgttagtcttaacccaaccttttcaactgttagtggtgtagcagacactagttatgttccttcatattctcaggtctcatcacaaggcactgctgtggcactggcaggaatccagaaggattttgtgacagttaagttggatacattgttaccagatagtggtaagggtgctcctcctgttaatgagggagataaaggtgctactgttacaacacctgtggcaaaagatatatgtgctgggactgtgacaacatcagacaacactgtcaccctgacaccaaatactcttaaggaaaacattggattagttcaagtggcatctgcaccttctatgctcgtggcttctgaagaactaatgaaaatagcacatgttgcggtggccgataagcctgttgagaagcaaactgcttcacgtcgccgcagaaagaaaacatctagtagcgaggatactggagtcagcactagacaaagatcagctatgaaaagatcttactacaacacctctgttgccgttgatgatattggttctgctgtgatcccaaatgaaaaatcaggaataacgaaggaaagagatgtcagttcaattcaaagtacatccaatgaactaccaaatattaactcaccattgtatgagaagtctggatatgattctcaaccaagcacacctatagctgtccccatcaatgaagacactcttcctagtggttttgacacctgtactaattctatgataactcttgccacatctgccaactctgctgaagatgataaaccagttgatttgcaccttaatgcacctgtttctgttgattcccaaaaccaagaacaacacatgacagggaaggaccatttggcagtgtgttctagaatctttgctactcagttacagacggacactgcaaatcctgctattgatcataaaccaggaactgcccagtttgaaccatctgcttccttgccccagaattcaggcaaggatgctactgcactaccttctgaggttgacagtgctgctccaaatagggcatcaagcaggaggaggaaagggtcaactcgagaaccacgcaccagaagtaattctgcatcagctgcaagtgaacgtcgtgcccgacttactggattgaagcaggcagaggacataaagaagttagagatgtcagcaacgccgaccacaacagtgtgtatttcatcggtagagcaacagggagctgcttctttaagtgcgaagattaccaatgcttctgtttctgaaggacagaagaatcctggaaattatatgccttctgccatttcaattcccgtggggagccatgttctgggcctgggcgcaacaagtattgaagaaacaactgccactatgataactcaggctcctgcagtttcaaaatcagaacgaagaaaacttccaggaggcagtcaacaaggtattatttattctactcagatcatgatcaattttcttggtccagatgagaagagtattcagtttgagagttcagcatcaaaaacaaagatggtatcagctgtggaaccagcacctgcaaatgttgaatgcatgcaaggtactgaagttaatagttcagaacagacaatagtttctgctactgaaccagcacctgcaaatgatgaacacatgcaagagcaaccaacaaatatcgtttcatctgtggaatcagaaccttcaaatgatgaagagcacacaaagcatgaagtgtttcttgcgactactggtgataatatgcttgcttctagtgcaggaactgaaatattgcgggatacagttgagcatgctgcttgccagccagaagcagtatgcacagatggaactgcaaggcagtctgaattgtcgcaacttgatagaaaagcctttcatgatgcctcatataaatacactcatgggtccactaaagatgatggtatcttgcccagtgaaggtacttctgttgatgttactggttctaagcaggatgatgtgaacattgttggcacacaaactgatgatgtttctcggggttctagtcattttccagttattttacaatcaactgagtcagatcggcctccaggtcaagtgaagaatttggagagtaggatggagcaggtgaaaacagaagaagctttggttaacagttctggtggcaatcaaactcacagtctgggcgatgaaccttctcataatacatcattagcaagaaattctccctcagaacactcgaatgagcgttgctctgatcaagtaattggtgaaaatttcaaaagtaaagaaaatattgttgaagtccattctggcattaatactgatggccccgatgaagctctgaatgcattgcacacccaatctaaggaggccagcatgacagatattggtgtacctactgatggtgatagatgtgaaggtaaagggactagtgtcgaggtctgtgctgacatgaatactgatgggcctgtggctacccaggatgcttcgtccacgaaatctgataaagagtcctgcatgatggaatgtggtgtgtctaccgatggctgtcccacagtttgcaaaacacacaatgatctccagggtcatgtatcttgtgaagaaacctttgttaggactggtggtgatgacacaacccatatcaccaatgcaaattatggttctaataatgaaagtgaggccaccattgctagtcctgttgaaaccacacaaaaactgatggaagggagcactgttattgtgtcggagaattctgatttaaataagcaatgccacacattgcatactagaaatgatcctcctgcaaataccctgttgatagttgagtctaacaaagttacttgtgatgctgaaattgtttgtgctagcaggttagaatcttctggcattgaggctgaaacagtgggtatccaagagtcagctcttactgattttgagggaacaaaaggaactggggatttgggtgacagaactaacagtcaactgcatgatgatgttcatgggacatcatgttccacgatagctcttgtatctgagaaagaaccttccgaagatcttaccaccggtagccattcagaagcatctaatttacttgctgctgtagaacaaactcaagaaactactgttgagaaccaagagatcatagatgcagtagtgtttatggatgcctgcaaggcagaacctgttggtgattttactattgctaaaggagctgaacagactgtagaaatggttcattatgttgataagcaatctgctgtattagactatgttgagacacagacaaaacgaacttcggtttgtggttctacgctaaatgaatcccctcaggctgcagggttggaagaagactgctctgtactgaagcatggtgatcctacttcatctgagcttcttactgtagcacctaatccaatcggtgaaacttctgttattcaagtggaaccagaggcaagaaactcagatggatactgcacaacagaggctggcagtgctttatctgaaactgtcatgggattggagccaaataaagaaactgcggttccaatgcaagagaatattggagaagctaatgataattttaataattgcgaagcacacaataattcggagattcatgcatttgaagtgtcgatggaaacgcagtcatcagaagtcaaggaagtatcttctattcagtctggtgcagcaaatttgagcacacagacaactgcactgcctgatgtaacaggacaaaccagtatggcatcgactggagaactagtatctacaaatgaacacatacacatgcaaggcactgaaatcaattcagagcaacaaacaaagatggtttcacctgctgaatcagcacctgctaatgatgaacacgtgcaagacattgtgattcttagttcagaacagcaaacaaagatggttttagctgcagagattgacgcattatgcgtccaggagactgcaattattgatcttgggggagcaagaggaacagttgacctgaatgacataagaacacaggttcctgcattacctggaagggatgtgctagatgtggaggcacatattttggagcaaaaaaaaacatcttcaccaggtgatgaaattaagggttcagaacaagcaaaaatcgaatcgattgcagagatcgaaacagtgggcgtcaaggagaatgtcattgctgatcataaggaaacaggtaacaacagtggcgtaagtatacatgcgcctctattagttgaatctggacaaaaggcatcacctggagttgaattgcgtggtattgaggttgatgctcatgttttggaacaagcaaagatggtttcagctctagaaccagactctactccagaagtttgtgctgacaagttagaaccttctggtgctgatgatgttggaatgattgttgtccaggaggctgcttctgttgatgatcacaatagagcacaaggtggtgaggctcattgttcagaacaaataaagatggcttcaattgcacaagcggtgtctagcatggctttagtaggatattcttcttcagaagactcaatggtggatgctgctgcccgagtaactgatgctgattttgtggatagtaaagcagctggtgtttatcgccaagaaactatgcctactcaaaccacctctaccctcccagagaacatggattctcctgcaactgctgctaccatggttgaatcgaagtttgctgcctcgtctgagcacgttgcaggacccgagccaattgatgaaacttctgttatgcaagtggaactggcaacaagcacaggggatggatgtgcagcagatggtcacaatcttgtttcatctgaaactgttgttgaagtgaagcttgctcaagaaattgttgttcctagtccaggtggtagcatagaagctaataatacttctaccatcagcgaagtatacaaagatacccagtctcgtgcatctggtgaagcatgcaatgatggtcagtctcatggtgatgaaaatatgaaacttggtgaagcttacactgaactgcagctggcaccttcctctggtgaggaggccatgacatgtatgtgtagtgagctgcccagccaggaggtggaggctccaagcagtgaccctttggagaataatgaagaaacgaaaaatgaagctgctgctcaaggatcagtaaatgaggattctgctcctcgtgctgaaaatgcaaagattgatgaagctgacacagaacaggaactgcttccatctggtgaggccacggtagacgaatccagcgagctactcagccaagacgaaaaggtggctcgtaaagatgcaaagatggaagagtctgctgctgctgctgctgcacagagacagctaactactgaagttgctcatgcaagtgaaaacgcgaaacttggtgaagatggcacggagctgcaactgccaccaccttcaatggtagacatatctagggagcaactcagccaggaagtggaggttgcaagctctgggccttcaggaactgatgaaactgctgagatgaaacggctaaacactgaacattcacctggtgatgaaacttcaaaacttgttggaactgatctaggactgcaattgtcaccttctggtgatgccatggtagatatatctaataagccacccagctgccaagacgtaaaggaggccccgagcagtgacattttgggaaatgatgaaaattcagacaccgagaagactcctgctgccttgcatggacggctgaacaccgaacttgctcctagtggcagaaatacagaatttagtgaagctgacactggaaaacaagagacacccgtgtctgctgaggctatggtagaatcatcgagcgagcctcgcagccatgaggcaaaggaagctccaacccctgacctgtctggggatgatgaaaaagcgaagtcagcaagggctgctgttgttgcggaactttttggagatgcaacagaaggtggttcggatcagccattgccgtctcctagagaacaaggcaaggaagcagaggccgatggaggcttttagagtaaagttgcaaatattgtatcaagagatactagaatccgtgtaagtaagaactgctaatagtgcttttagttgtaactggtgtaagcttctactcagaatcaaaagcgacgtgctgagattacagcaacagtggcctacggcagtttactactgttttgtgcaatattgctgctgagttttgttgagacaggcaattgatctgtcatctgtctcgtcttgcatcgaagttggcagcaccatggtgaggtgctcccgccttaacctggaagcgctgacagagggaagaacaatactctctggtttcctaatgttttcctgttcactgttttgatttgatgctgcattgcagtagtgtgacttagtaacataatggtgcgtttggatagacggacataccgatccagaatcatctgaacctaaatattgagtacaagcttagattatctgtttggtctgctttatgtctgggtgcaatgctctctgatttctggacggagtggtaccgcaatccaaacagactttaatgtttgggtgcttcaggtcataatcaaccatctaatttactttgcaaatgaatgtttcaaactggactgctcaagcctaccaagtttaatggtccttcctagtattgaatccttttgagtctagcccgtttcctcatttgaattttcactgttagtgtgcctatacttgcctcacgtagaattttgaaagcttatggttgggtgcgttgtactcgac

SEQ ID NO: 42122 - DNA, 4341 bp, Zea Mays
cctgaactagaattctacaacttactgtcagtatgcatggttctgaaatctggacactaaaattctgtaacttcaacttcttaaaaaaaaaggaaatgtggaacctgcccttcaggaaataaggtggagaggtgtaggataggcagttcattaccctatagtctctgcggactgaagggattcttttaagagatttgcacattccacaccatgcctttgcacctaggttattcaggctgaaattgaagcatcatttatcatcccaaagtttgccatgaaagttcccatgtatgaaggccactatgacaaagtttgtgcttacctaaattttgtttctattatatacatataaaaaataatgaattttgttctaacaatacactctatgcacagcacagaaatggggcaaaagcatcttacgtcaattattgtttgttgtaaagtcacttttggcaatcgagacagagatggaccctaaaagcttggacaacataagagcatatctaaaagactagctaaatgacttattaagctaaattttgactaatcatcaacaaaataactctccaacagactacctatctgactcgctaaactatctgactcttcaaattggcttactcaatagccaaacctgactcttcaaattggcttactcaatagccaaacttggctagccacctaactagccaaactagaagtgaaatgctacatataaaatgtaatccctacgaagaaataaatagagagttaaatagagagccaaaaacaaagaatctctaagattcagatacgtggctcgccaagccaaactgcatgctgcgcaatgcgagtgagtagagtagggaatggggtgggggtgctcatattgcaaaactaaacagaccttggttctccaaattgtccgctttgccatggttcggaagcctctagttaggattcgtgagagcaaaatcgagcacttgttccaaatccaagaaaaccgccgtgcgtccagatcgaacagcaggaggagtgcggtgacagagacagcaaacatacctgtatccctcctcctcctgggttcctggcaaggtgaggagaggagactggagagaccgactggagcggggagaggagaggagtgaagactgaagagagtgtggttgggagagaagctgccgcgtcagccttctggtcaggatcagctttatccgggcaaagccccactgcagccccagaaacagaagaaaccgttaagagtggtccatgaccatgagcgtgggcgtggctagtgtgccgcgtccgtggatatgacgccgacctctcttctcttctcccctctcctctctagccgtagtagctagcaagccgaaggctggagctgcctgcctgaattctctcgtttctctgcttcttcctcctctcccgcccagaaccagaaccaggaagcatcgcgagccaccggcgagccctcgtcgccgccaggacgtgcaccgacgaccgggtctctgccggccgctggcctttctacaggtcttcgccgtccgctggggctaagcaagctagcttgcgagggagcatatatggtcctccgcgtttcatgaccttcatgaggtgttccgcggccgtctccgacggcattgcgctgcgcttccccgccgagggcagggccctccgcggaggcgtctgcgcgcgcgggcgcgggctgctcgctctgggttcccacaggagcagcagtaggagggcgaggcgcaggcacgtggcggtcttcgcgaggcggcggctcggcaagtggcagcggccgtggtggaggaccttcttcgcggactggaacgacgacgaggagagcctggccgggttcagggaggacgacgagctgctggaggagattggggccgaccaggagctgtcggagaaggccaagttcgaggagtggaggcggaaggccgaggccattgttgagctgcgcgaggcccagcaggacgcgttcaacgccgaggagcggtcgtgggaggactggaccggcggtggcggcggtggtggcgcgccggagaatggtggaggtggggactggggcggggaggccagcttgtcggagcagataaccgatgatcctgcggagatcgtctgggataagggcgtcgttgaggttttcagaggtactatcgatgaggattacgaggatatgctgttcgaagatcgagtttttatgtatgcctccacgaactcggccaaattcctagcattgctgatcgtggttccgtgggtgatagattttctagtgcacgactatgccatgatgccctttttagagaggtatgtccagaaggtgccgcttgcagctgagttacttgatgtgaggcgcagccagaagctgcagatggttaaggacctgaacatcgagaaggcaagataccgtcttgaagtagagatcggcaaatctcccccgctctctgatgaggaggtctggtttgagctgcgggaaaaagcgcttgagttgagggacgattggaggctagaaaaccgacaagcttttgcaaatgtatggtccgatatggtttatggggttgttctattcctgcttatctgcttcaaccagagcaaagttgcgatgctcaagttcacaggatataagttgctaaataacatctcagacactggaaaggccttccttattattctagtatcagacatccttctagggtaccattcagagtcaggttggcatacaatggtagaagttattctcgagcattacgggcttgaatccgatgaagcggcggtcacattttttgtttgtctggttccagttgctttggatgtgtacataaagttttgggtatacaaataccttccaagattatcacccagtgtgggcaacgttctggatgaaataaagcgccactaaggaatcatttggataaattattgccttggaggtattcgatgggtatatttgcttggcatattaagttttcatcaaatctgaagggcgtccttcgtctggaaaggccttgcctagaatgcctgcctggccacgccatcaatcagagtgtccggctgttcgggaggactgggaattggagaagctaaatttctagcattgctgattgtggttccgtgggtcatagattttatagtccatgactatgttatgatgccctttctagagaggtatgtccagaaagtgccacttgcagcggagttacttgatgtaaggcgcacccagaagctgcagatggttaaagccctaaagattgaaaaggcaagataccgtcttgaagtagagattggcaaatctcctccactttctgatgaggaggtctggtatgagctgcgggaaaaagcgatagagttgagggatgattggaggctagagaatcgaaatgctttcgcaaatatatggtctgatacggtttatgggattgttctatttcttcttatgtgcttcaatcagagcaaagtcgcaatgctgaagttcacaggatataagttgctaaataacatttcagacagtgggaaggcctttcttattattttagtatctgacatccttctagggtaccattcagagtcaggttggcatacattggtagaagttattctcgagcattacggttttgaagctgatgaagcggcggtcacattttttgtttgtctggttccagttgctttggatgtgtacataaaattttgggtatacaaataccttccaaggttatcacccagtgtgggcaacgttctggatgaaataaagcgtcattagagattttttgccttagaaattcactatgatctgcagcaattcactcctcgtttgtccctttcagtcttgggatgtccagagctgttagaactgaaacctgtcaacatcttgaaggcttcagaaaatagaggcaaacagagttgcagggtcctgaaaccgagacgtcctatcaatttatgttgataggcctagggtggtattatatagtgatgggtatttttcaccgactccaccggtggagtttactagcagcaacttgaggcaaaaatatctcttgtttacatggttttatctcttgtaaaataagaagttggatgattttgcgcgaaatgagacggaacgtgctgacggtcgtctgttctgatgaccaaccaagcaaatggcaggacagggacaactcccagcaatgtttcccttccctatcactgattatggtgtttgttctactatgtagtgacaagttttttttttgtttgttatttcttttagttgccttcttgtatgattgagactttgcttttgggatctgaactgacgattagctgattgtattgaatttgctttgctatgtgaggactttgctaggatcctag

SEQ ID NO: 42123 - DNA, 3008 bp, Zea Mays
taccaattctggaggatggttttgttcctcatggtataatggctctcgcgcaacatgctactctagatgtgtggtcatatcctgattcatggtgttcttatgccaatccaatcctggaaaggtcgcatatattcattgacatgctaaattgctacatactcccttcgtcccaaaatagtatttgttttagctcttgctttttgtctatattcaaatggatggtgatgaatctagacacatatataaaatatatacatcaagtgttgtatgaatctaataattatctaaaacgaattttaatttgggatagagggagtagttttttgtttcaggatataaatgatgtgagacttcgaaagggaaagcgcctaatatgttcgattgtggcgtaccatgacaattctttcatattgaataggaagatctgatagatctctgaaacttgcttatgtttcctttcctctccactgtttagagatatggatgatgataacacaagtaaaatacaggtgtctccgtccgattccttcaaaagggtgttgagaacaattttctgacatgtttctatatttacaataatttaatatttcgttattcatttctattttgttttcaatagttggagaaaaggctacatgttttactattattgaatagttctgtagctcaagcattcataacacttctgcttgtaattttgtatgttagtaaaattatttgccttagtttagttattgaattctaagtttccaactaccctttaggagtatgtggaagagtgccaacagaaaagtgttatcttggtgctcaaacaatgaacatatttattttgtgtctttcctttccaaatagggaatgcctcctagaatttagggaagctgtgtcaaccctgatatttgctgccatttggtatcctgatttacctaaactttgtgacctaaggcacatattcgcagagagatatggaaattttgttgagcattttgttggccaggaggtctttgcaaaaaagacagtaaagttctctgtgttggacgcgatggggctctcatccaaacctctccacagaggggtgaaacatgacatctcttgtctgtctcaagattcgtatggtccatacattgctgcgtcatgtatggataacatgtaaattcagaccttgacatcggacaactaaaatagttttcatgtcgctgatagatactgattttgaccgtatgccttccagaatctacttgtacagtgttctccatatgaacaagggtctcataaaggtttacactagcatcaagataagagtcttttttcgtcaaggtcactgagtggccatctggggttctcacttcatatataccttagtatatagataatgtcgtaacgcatgagcacttagctattattaataatttgtgagccgttgcaacgcacgggtacctatctattatgatggcgaggacaactccattgccgctaagagtcaaatcaagtttgagacatgacttcaagttcttgaaggtagagaacttgggaaatcaattggttcaacaaaaaggaaagcccaagatagaagtgtatgaaaaggacaggaagaagggtgctggggctttaacaactcatgctagggttcagtaatgttcttccaatactactagcatatgttcaaagtcaccaagctcctgacaagccagttctgtggattacccataatgcaaaaagttttgatgtccctttccttaaccaagagtttgacagaagttcagcccaggttcctgaagatcatttggctatttgtcgatagtctttgttcagtgaaaaagtcgaagaaaacaaaaggtatgtcattgtacatctaggttcctctaatcatataatgtctactcgtaccttgttaagacaatactgatagctctttcttggtcattttaatactgcagcctctttctattcatacagtagtagtagatagaaagtgtttctgtcgcaatgtgtattaattcaatatcacaactcaactaatcatattttattgcaggcgataggtttctgtcacaagtctaatcatacagtaattagaaagtgtttctgtcacaagtctttcttcatgcaggcggtcggacttgggtacaaatctgtagcacactttctaattgccaagcataataacaaacaagtgcccactgatatagtgcgagagccagagcagcacgcctttgcacagattgttagcttcttaggtacttttgatatctgattacagcagtcgataggttgagagtttgttgcttcattcatacacgcgtctaaggttggatcgctcatgttccttcaaaagctcaatggtattcagaagtcagtaggtcagaatggtgcaggtaagctgctactggattgaatacattactactataaaaagtacactgcagatggcaaaaatgaccggatatgaactcagatatgttcctttcactttatttttcttgaaaatattaaccactgtacttcgaaaacttctctgttctttggcacagttgaacctgatacatcatgagatataataacgtcagtggatttgtgggaagatggtggctcagatgatggatatgtacttgttaagcaggaggatgttgttgatgagatgacttcatttatggctgcatgcttggtgtcaattaaaaagaccaaggacctgccccctgatcaacttcaaaaagcgcttaggaagacgttttcagctgaaaagaagaaaagtaaaatccggaaggcattggatggaactaaagtcatttataatgttgcttcatggggcgccactgctgttggcagcataaagcttgagaccatttgtttagtctatgcagatgagttcgactgctaattagcagcgcctcccagtcaaaagcagcatgtgtattgtataactgtaaatattgccttgatttgaacaaacttgttttttgtgctagaactttatttcacgaacttcatatgatagaccctactgtagagta

SEQ ID NO: 42124 - DNA, 2062 bp, Zea Mays
cgaaatcacttctattaaaaactagcaaaccctacctcctcttctccccttctcccgacggcgccaccataccgcctccgccctcaaccctagccgtatcgcgccctcgccctgcctccagccccgcgcagtatgctgctcgctcgtcgttggctactcgcctgctcccatgctccctccggatctgctgctctcggggatttggcgcagcggctttgcgcctccacacttggtcgccggcctcctcacctccacaagcccacgtcatcgccgtctcctcttcgccatcgccccgctcgcctcctgtgccaacgacccgaccaacctcgccgccaagcagggccacaccggtgagctccccttctgttgatgttgtgggagcggatcgaaggcccggattcgtttggggtttgctttttatggacgggactgggtagaactctttgttgtcttcagctgataggctttactcttggcatcattcggctggcctaggctggaatttgtttgacatccggagcttcgaagttcaacttgttggcattgactgggtgggctgtagatggaatttttcgagttctgcaattcagttcacaaaggggaaatagaaatggttgcgggtgatcccaacctgctgacagttctaactgttttggtatgttttaagttgattcactgtcagctgatgaggttcctaccataacacttaagcaaggaatcctgtacacttctctcctggtgtgaggtgctatgagcatgtgactctaaatctactagtcctagaatggattacagttgtcaggaatttttgttgggactgtgatataaaaaagttgaaactttcatagcttacctgccgagaatgcattgttgaagttgcaaagatgtatgtctaagtttattttcacataatagtatatttttttctattatcaagaattgtttctcaatacattcatgagttggaaattgtactgtgagcctttctatattatatagtctagctagctctacaatagagctctagtacagacagaacacatgctttcatactcctatggaatagtagaatcaggtagcagaattaggtgttcattaaccatgcaaataattaattcaagttatctaaataggcccttagtttataatgctgaaagtataaaaagtgttccactctcaataccgagaataggaagactccaccatgtatatgtgttcttatcaggtgctcttctttcccgataaaataaaaatcctttgcttcaatatgctacatgatactttgtgtatagataaaggaatacatccatatgatgttcctgggagttagtttgatgtccatatactccatgcttgctgattggaaaggaaactagttatttcgtttgaagtcatatgctgcttggcgtcattctaatccaagtagctgaggggtcaacagtggctaacttccctgtcactttattccaaagagcaaaagggaatcccaccctagctgtgatattttccctggattatggttgtccaggaatcctacatggagtggaatttatctccgggttaattaaccttggttgccaaactagccctcaatgtgcgggacaagaagggaaatactgctttgcacatagctacacggaaatggaggccccagggatctggaataacaggagcctgatggttgcatcagtagagttgaccacttctcagtattgcgagatgcatcttacatggtcaagaagataattcctattctgagctacttgctcgtgtacaagtctccttatcatgtcctcctttcaagccagtctattctttgcttgattcatcacgggtgcacattattgtaattagaatcttcagagtactcgaaggatagttaaagctgtttagctagtccttcagattactgaaaatatagttaagaacatttgtattttgctatttcgatttccaacagtacaactattgagtacaactattggggatgattgtttatgtgatgtggatctatcattgtgcaatactaattaaatttgtatatctatgtgattatgtgtat

SEQ ID NO: 42125 - DNA, 548 bp, Zea Mays
ttttgtagtcttccccaacaatagctcataaagttttatcttacgaggggggtatttatgcgaaacttttcaggtttgtatcatctttcatttgcctgtggccaggaagtggatggaagcaggcggtcattggaaggcaggaacagggggctttgcttggtgttctttggagaagaaagaagagcaaagaaatgggaggcttgctcttgtcgcatcaccaaacctttccaaattctttgcaagcttccaaccccggacctctctctcttcacaaagacgaccacaaaaacctctatttgcttgacacctgatgtgcacttcctctgctctccgcgacaatgctttccacactcatcttggtcggccgtcatcagatcagaagccagtgattttattttcttgttcaacattgggtatactgacccatcggttatttggtttttattttcttgttcccagtgatggtatatattaactatgctaataccaatgtcctttgacgagtataacaatgtgctgaggagctttatgttagaatttatttgaca

SEQ ID NO: 42126 - DNA, 380 bp, Zea Mays
caacgccctctctcctccctctctctataaaacccaacgccgagccctagggattcggttcccgatcatcgagctcgatccccacacctcctcctcactactcactgaccagagcgccgggggagcccctgctcgccattaaagccttaccgctgtccggagtttgtcgacgaccacctgacgacgtcctctacttctcctcgtcgacccccaccgccgaaacctgaccccttggatgaccctcgccggttccccctgctcacacgacatctctatgtagagaacgcaagaaccagaggttgaagaagttgactgtatggtagagaaaccgaattcatttgaggaaaacccgcgaacacttttgagcaaggcaagtggat

SEQ ID NO: 42127 - DNA, 488 bp, Zea Mays
ctcaagttctagctaaaggagtatggattccttgtgctactgctgatgtaaccctcttctctgtcccaagatcgagttgctccagagcctggcacaccatcaccagtgtggtgaccaagtccacccgaatgctcatctcaccttggccagggtgatcggaacagggttgtgccgccgcagatgggcgccacagacagcttcaccgccgaccgggtgactcacgctttctccggccgattcctcgcgagcaccgaagtttaggtgatcaggagtattcttggtgtccctgtggctagaagatgcttctagttttgaaggatgattagttaggtgtgtttgtgagccttggaagggttctgccttcctggttttgtaattaagttatgcatttcaagttctatcaggacttgtaataattctttctatgtaataaaacttgagctttggaaatgtgaagaatgtttgtaaagtcttccgctctatctccg

SEQ ID NO: 42128 - DNA, 412 bp, Zea Mays
tatggaactaagtgcttttggggcagaggcatgttgatctagtgagatcttgacccttggatgaagttacttaaggagttttaagcttttgattgagaccttggttggggtaattccctggtttacctaagtgatttcaaattggtcactttaatcgagcgataagaaataagtgtattcttgtcatgtgctttagttgtagtgtttctgttctccacctctccttgtgagagtttgcattacatggcattcattcttatatacacctatatatggttatgtttagaaaacgaagaagagatcgaagtgaccgaagagaagacacaaccaccttcggattctcaggccggaaattgtttctacttcgatatctgcgggtctgagactgactcgcctataaacaaaggcaagc

SEQ ID NO: 42129 - DNA, 3949 bp, Zea Mays
gtttatcgataataaatatggagctgatgcagctacgtgagacatgccatactgataccacacattggcgtattttggcagcaactccccgcgcgcagctttcttaaaccccgaaaaccaaaaataaaaatccccctttcttctcccccgactcccctcttccttctttctcgtccgatcagagtcacttccacctagccgccgccgccgccgccgctaccagagtcaccgcggccgctgcttctagggctgcgccttctcgcgcctccggagccttccctgctccccgcgatccccgctgccccccatccccacccccacaagcttccttgacctgctcactccaaacgctgccgccatggcggagaagctcagggatctgagtcagccgatagacgtgacgctgctcgatgccacagtcgccgccttttacggcactggatctaaagaggagaggagcgccgctgatcagatactacgtgatctacaaaataatccagacatgtggctacaagttgtacatattctgcagaattcccagaatctcaacaccaagttctttgcactacaagtacttgaaagtgttatcaagtacaggtggaatgcattgcctgttgaacaacgtgatggcataaagaattacatatccgatgttattgtgcagctttctagcaatgaagttacctttcggcaggagaggctttacgtcaataaactcaatattattttggtgcaggtcctgaaacatgagtggcctgccagatggtcatccttcgtacctgatcttgttgcagctgcaaagagtagtgaaactatatgtgaaaattgcatggctatattgaagcttctaagtgaagaaatttttgacttctcaagaggtgaaatgacacaacaaaagatcaaagaactgaagtcttcacttaatagtgaattccggctcattcatgagctatgcttgtatgtcttatctgcaacgcaaaggccacagctcatccgtgctacattggcgacactccatgctttcttatcatggatcccaattggattcatttttgagtcaccgttgctggagacattactgaagttcttccctatggctgcttatcagaatcttacacttcaatgcctaacagaggttgcagcacttcagtttggtgatttttataacgtgcagtatgtgaagatgtatacatttttcatgattcagttgcaggctattcttcctcctgaaaaaatcccagatgcatatgctaatggttccactgaagagcaggcatttatacaaaatctcgcactcttcttcacatccttttttaagaatcacatgcgtatactggaaacaactcaagaaaacagtgctgctttgcttatgggtctcgagtaccttattggaatttcatatgttgatgatacagaggtttttaaggtctgcttggattactggaatgtatttgtcttagagctatttgaagcacacaatgaaatggaacctgcagcagccgtaagcatgatggggcttcagacgcgaatggttcctggaatggtagatgggactgtcactgctgttcatcagaggagacaactttactccgcttcactctcaaaactgcggatgctgatgatttgtcgaatggcaaagcctgaggaagtacttattgttgaagacgaaaatggcaatattgtacgtgagacaatgaaagacaacgatgttcttgttcagtacaagatcatgagggaaacactgatctatttatctcatcttgatcacgaggatacagagcaacagatgttgaagaaactaagcaagcaattaaatggagaagactggagttggaataaccttaatactctctgttgggctattggatcaatatcagggtctatggtagaggagcaggagaatagatttctggttatggttattcgtgatttgctaaacctatgtgaaatcacaaagggaaaggacaataaagctgtgattgcaagtaacatcatgtatgttgttggtcagtatccaagatttctcagggcccattggaagtttttgaaaactgtggtcaacaaattgtttgagttcatgcatgagatgcatcctggagttcaggatatggcatgtgataccttcctgaaaattgttcaaaaatgcaagcgcaagtttgtgacacaacaggtgggcgagaatgaaccatttgtttctgagcttctgtccaaccttgctacaacaatcgcggatcttgagccacatcagatccatacattttacgaatcagttggccatatgattcaagctgaatctgacaacactaagagagatgaatatctcaagagattgatgagccttcctaatcagaagtgggcagaaataattggacaggcaagccaaagcattgatatcttgaagaaccaagatgttatcagatcagttctcaacatcctacagacaaacacaagtgttgcgagctcccttggaccacacttcttcccacagatttctctaattttcttggacatgctaacagtctacagaatgtacagtgagcttgtatcaagcacgatcgctgaaggaggaccatttgcctcaaggacatcatttgtaaaactattgagatctgtcaagagggaaaccctaaagttgatcgagacttttgtggacaaggcagaagatttaccgcacttaggaaagcagtttgttccaccaatgatggatcctgtccttggtgattatgctagaaatgtacccgatgcaagggagtctgaagttctgtctttgtttgcaacaatcattaacaagtacaaaggggaaatgcttgaggatgtgcctcgtatatttgaggctgttttccagtgcactcttgagatgattactaagaactttgaagattatcctgagcaccgcctcaaatttttttctttgctccgtgcaattggcacccattgcttccaagcattaatccagctttcaagccagcaattgaagcttgtgatcgattcgattaattgggcgttcagacataccgagagaaatatcgcagagactggccttagtctattgttggaaattttgaagaactttgaggcttcaggattccaaaatcaattctacaaaacctactttttgacaattgagcaagagatttttgcagttctcacagacacattccacaaacctggtttcaagcttcatgttttggtgctccaacacttattttatgtggttgatagtctaactgagcctctatgggattcttcatcagtaccatatcaatatacggataatgccacgtttgttcgagattacaccataaaactcttaggaacatcatttcctaacatgactgtagctgaggtgaccaagtttgtggatggccttcttagttcaaaacttgatcttccgagcttcaaaaaccatattagagatttcctggtgcagtcgaaggagttctcagctcaggataacaaggatctatacgcggaagaggctgctgcccaaagagaaagggagcgccaacgaatgcttgccattccggggctgattgcccctagcgaattgcaagacgagatgactgggaatggactagtcagttttgccgcaggggaggttcctggaaccgctgttgggtcttcagcagctgtgcttgcctggatgtgttaacagcggctcttaacattgatttgctgtctcatcgacaagctgtgtatcgagaaactgttcggtatttctgccagctgtggaggcacattcgaaaacggaatagatttttttgttttttttgtgtgtctgtgtgtgtgtgtgttagggtttagggttcaataggtcgatccttactgtgttggtttgttagaaaccgcctgaataaacttagaatattcaacttagaataaacttagaataaacttgatggcttatgtaaataatctattaataaaatacatgggtttttatttaaaa

SEQ ID NO: 42130 - DNA, 961 bp, Zea Mays
caatctccaggcctaggaaaaacaaccccggaccgcgtgcgtttcgcttccgcccctgctgtttctgtttcttggcgttcaccccctctttctctcgtggcgacgacgacgaccgtcgccttcccctacgcgctaggtgccagggtccgtcgggtccttcgctggcgacgggcaactaccaggcaacctagtggtgtgttcgggaacgtttccgagggcgggcggcggcccccagtggcgaagatgatccgactaccgacgtacgcagcaggaggcgtccgttgccatcttcttctcctttgagtatatgatactagcaacatccacagtatcaacattcgtgaagtatatattctatattatgtgcgctacagaaagatcacttccaacatgaatgaacgctttccagatgctacatcagaagagctcgatgtgagtgatgctacatgtattatttgccgtgaggaaatggctacagcaaagaaactgctcgatgggcatctgttccatgtgcattgtctaagagaaacaggagaacaggctgaagaagaggttcctctacggcttctccatgggagcttcagctccacaggaaggattctctctactgggacggtgccgtgctgcttgccccaatgtgcaagggttattgtatattaacaaccaacagtagtgtcgaaggagcacaagatgatgtgtgagcacaaagtggccagcaagaatggagtcatggaacatcggcaggaggggtgcgacagcggcaaccgatgtatcccttggacaatctggttttgacatgatgcaaatcaatgtgctgtacattgtattctgcacttgcacagattgtttggctaattacaggattatctcaatgttttggtttggatttaaagtacacttatgtatgaaatatttattggtactcatctatattatattaattatattattattaaatata

SEQ ID NO: 42131 - DNA, 1595 bp, Zea Mays
atggcctccatgggattggattttttttttccaacaggaacgtgagcggtgagcaaccctaccccaggcccagcttgcgcgctctctctctctctggacgacgacgcctacgccagggccccaggtcgctgccgccctacgccaggtccccttcgccggcgacgagcaccaggtctgttgttacttctctggtgatggaccggaattcagatcaaaactgaaagattggaggagcatataccagtttgagtgtaaatagaggatcttccttatgtttgatgattagctcattgagcaacatacagcaacagatagctacaaatcgtggcatatgactccaaaatggagtgcatgctcttcaaatagctacagagaactaccttcacatgaaaatggagagtgcaaatcaaccttaacagagtcagtcccttcacctacaagctgttttggcttgcacactgcaaacacaatgtgctccttatcttcacaaaagaaggatggtaatgtttataaaagaaggaagatggataaggattcaaattctcctataacatttgaagatgctaaagaaatggcaacccaaagttgcacaatttctgatgaccactcatcattactgctacccattatctcctcagaggcattgcttttaaattcaacagcaggcatggcaggtcctatcctagattgtgaggagcctgctgatgttccattggagccaaattctggtacagatgatagatgcttcatttcaaacatgtctccaacttccatgactccagacaaaaagaatgctgctgaatgttcctcatcgaatattggccctacagaatcaattaccgagcatatttcaccaagggatctttgcattgccatactgatgaaagatggactaataaatgaatcaagaacaagaatggcacataaagaggaattcactgacaatgatgctaaccctttgttggcatgcaataattgtggctgcttggaacattcattgaagatgctgatatgcgattcttgtgaagcaggatttcatttgtcttgctgcattccttgtattaaggagctacctactgatgaatggtattgtgctccatgcttgtgtaagaaacccaagagtctttatggcaaactctcagagggcaggataaatccttccaggaatactaacacaaggcctcatgggatgagtcacatagagtacatgctgaaggatgctgaaccatatgtaactggggttcgacttggtagagattttcaggcagaggtgccagaatggtctggtccatcatccagcagcgatgtttactttgacgagccctgtgcaattgattctgcagaactaactacatttaatttgtgcaaaatgagtaatcaaagtcattcttccattggtaattggatccaatgccgtgagaccttgaatccaggagattctgacaagcaagttgtctgtggaaaatggagaagggcacccttatatgttgtacagtcagataattgggattgtttttgttgtcttctttgggatccagtccatgctgattgtgctgttccacagcttggaggaggatttggaaaacttgggcccc

SEQ ID NO: 42132 - DNA, 281 bp, Zea Mays
agctgcgccgagcgagtctatccatctgaagatacattgttcaccaaaagcaccaccgaccggcccagacaaggggctcagcactctcccacctccccagctttgagggcaggagtcacctttcttcctttctttttattcttcgttgtcttcgcaatgtcttgatttatcagctccaagattgcctccatatgcttcttggggagaggttttgtgaaaatacttgccatctgttcaagagaatcatcgaaatcagcacggttagaggaactagagcaagc

SEQ ID NO: 42133 - DNA, 303 bp, Zea Mays
cgtcgctagaggcaactaacgtgcccggccacggtgtgggggaggtttcatgcgtccgccctactctgacgagctgcgcaacgttcctcgatacaccgagacgatgccaaaggccacgattgattcatagtggaccggagaaccccaaagccatgctccaggatcgaacaatcacctagccgatgtacgctccgcgacggtgcccgcgttcttccccacggaaattgggtacggcgattctgtgattccgagctaatcctaggtgcggttcaagcagagggttctgcgactctggtatctgta

SEQ ID NO: 42134 - DNA, 1611 bp, Zea Mays
ctagcccacgcgactgccagatcggagcgccaatagacagctcggcaccccacccaaaagtccaaagccccaccagctctgctcagccaccaccatcctcctcttcctcgaacggtcgaaccgccgaaagcacgcaccccgccgccgcgtaccctcccctcacccgctcaccatcgccggccgccgttcggcgcgacgcggattcgaatccggaaagcgggcgatgggggcgaagcgcgcggtgctggtgggcatcaattaccagggcaccaaagcggagctcaagggctgccacaacgacgtcgctcgcatgcgccggtgcctcgtcgaccgcttcggattcgacgagtccggcatccgcgtcctcatagatgacggctccgcgccgcagcccacgggggccaacatccggcgggaactcgcgcgcctcgtcggggacgcgcggcccggggacctcctcttcttccactacagcgggcacggcatacggctgcccgccgagaccgggaaggacgacgacaccggctacgacgagtgcatcgtgccctgcgacatgaaccttatcacagtggagggctacttgacaagaccaaggagcagattgggcacagcaccaagcagaagcagaagcagacccagacccagacccagagccgggaacttgaggaacggtctccttctggcaccagcttccgggaattcctcaaaggtactgttcgggaagcgtttgagtctcaaggaattcacctgccccaccgtagccgtagccaccagcaagggagcggtcacggcgacgacggtgaccaagagtcgcgctacatcaacacagccgatgcccacgtcaaaaaccggtcgctacctctctcgacattgatcgagatgctgaaggagaagactgggaaggacgacattgatgtagggtcaatccggctaacgctttttaacctcttcaaagacgatgccagcccgaagataaagaagttcatgaaggtcatgctgaacaagttacagcaggggcagcacggaggcattgtgggcttcatgggcgctctggcacaggaggtcctgaaagccaagctcgatggcaaggaagaagaagagttcgacccggcaatgaaacagcacgtgcacagcgatcaagaggtgtacgccgggacgacggcaagggtgccgagcaacggtgtcctgatcagtgggtgccagaccgaccagacgtctgccgacgcgaccacgccgaagggggtgtcctacggtgcgctcagcaatgccatccaggccatcctcgcggagcgtgggacggtaacgaacaaggagctcgtgctgaaagcgcgcaagatgctgtcgaaacagggctacacccaacagcctgggctctactgcagcgatgagaatgccagtgcggcttttatatgctgatgatgattcattgggtttgtcctgtggattgcaatatttgtattttgtctctaagtgcatgtgagttggactggtggttatgttttttcgctgagatttgggaatgtatcgtttctttcgcaggatgacattctttgaggatattagtcatttaaacataaaataaattttattttaataaagcacaaaatatac

SEQ ID NO: 42135 - DNA, 2076 bp, Zea Mays
tccgacaggaaaagaaaagggaggacgacggagtcgctcgccgtagatcggatgagaacagagatggactgctgtagataatgctacacttttccggggttttctctctctctctctcccgcgagctgactgacggctcctttatctcctcccgcgtgcatcccccagctactcgtcattcttatccgcctgcctccgccctccgccaccgctacctttatagctctagcttccttcctccattccctcctcatgccttcgtcttcgtcgtcctgcagccccgcaatagagcatcgtacttcatcgttccacttacatcgtttgttcgttcgttcttccgcgtgatctgcttgggagttgggggcaatggaggcctacgtcctgttcgcgcgcgccaaggagcaggaggaggacatcggctgcccgtccgagtcgtccgcggcgcgttccacgtcctcgtcgtcggacggggtggacctcgccgacgacgccagctcgtccgggtccacctgccacttcgagatggcctccctcatgacgcacctcccgatcaagaggggcctgtccaagttcttcgccggcaagtcgcagtcgttcgcgtcgctggcggcggtgggcggcatcgatgacctgcccaagccgccggcgaagcggctcaagacgtcgtggagctgcggcgtcggcctcgaggacgcgcgccgcggccctccctccgtgacgaccgccaataagcaggcgtccagcagggcacggctgacgccgtcggcgctcggctcgacgccgagaaggctggtgcgagcgcggccgcttgtaacggcgagaccggaggcggcggccgggaagcccctgttatttgcatagggggaagggattcgcctgcctaccaagctaacatgttacaaaggtgtccttttttcatggatttgacccagtttgcaatgcatcatattgaacacgcttgataaatgtgctgccgatagttttagaggtcttagtgatgctacgctgactattgcctaggagtacaagtacacaaaattacaaagacaaggtgagctcccctattctctacttttttttttttgaacaagcaggcactttcttgccgtttttttgctttttgactttttttgaaaaattttcacaactacacactttctagtttgaattcacgaaatgaacctttactcggcgccattatcattgacgtcaaggtcacacgtctcaacgtcaatataaataacgtccagatctagctctggtaagtcgatctggcgcctatatggcaggatgtcagcgccgtggttattggtgccgacctccttttcaagaaacggcggctcggctcatatctcaacaagtggtgcgcgtggctcgtatgtgttatatatatatattagtatatctatgtatttatattaatataacatataatttattaatattataatatatatattataggcagttgttcttgcttcgctacggtatttttctataaattggttagagtaaatttatttggtttctgttgtaacttagcaacatatataatgaaagggaaatatggtcaaaccttttactaaatgattttggtggttgaaatgcccaacacaaataattggactaactagtttgctctagttgatcatttcacaggtgcataagttcatctacaagtattctaaatcgactgtccggaataccgtagattatttcggacaggagaagttttttgggaaaatcacccaagcgcggactgtccgggcccttgcggtggaccgtccgcgacacccaagtggcctcggacaggaacactgcataaacggaagtcaaacactgtggatcgtccgatggaaaagcaagcaccgtccgggaccagcgcgaccgttcggtcggcacaaccaaaaaccccgaaggtgacaggttcggtaaaatgaattatagcgtcctcacggaccatccggggtacacgatcggaccgtccgcgactgcctttatctgacatctgacgacacatttaatgcattatagccgttgatagagtcgttactgctgaccgttgggattcagtcg

SEQ ID NO: 42136 - DNA, 1745 bp, Zea Mays
tttacggttcttaccctgtcaagttgcgggaaaaactgagctctccgaggtcagaagggagcgagcccggtcagtcccagtgggtctcttcccttgcctggatcgccacgtatttatggcacaagccacgcggtcttcttcttctcctcccgcggccattgcaggtcttgcagcaacgtctctctcctctgggcggtgggcgctcgatgttcttggctccttcacttggacttcgccccgtcggcgtccactgatcaattgatcatctgcagctttcacagaaacagtaaagttgctaaaaccaacagagtttttgatttctgagtgcgatcaccatgaagttcctgattggtctcttcaaacccgctacttgatttcttgctcaggtagataagctaccagcatctattttgcgtatctgaactccaaaaaggagagctcgaaactacagcaatgggttgctaccctgtgttctggaggaagaagaactccagaagccaggttgtgcagcttgaccaagacatcccaatcgcgggcaacgtgaaaatctactcgtccaaggagctgaggaaagccacgggaaatttctgcccgggaagcaagcttggacagggttctttcggccgtgtatacctgggaaaactgaacaatggcgagaaagttgccatcaaggtgctctcctcagagtccaggcaagggacaaaggagttcttgaatgaactgagtgtcatatccaacataactcaccacaaccttgtcaaactgcatggctgctgcatcgacggaggccagaagatgctggtctacaactacgtggagaacaacagccttgcacaaacccttttcggtaattcccgcagcggcatcagatttgactggagaacaagggtggagatctgcgttggcgttgccgatgggctcacgtacctccacgaagaagtccgtccaccgatcgtccaccgcgacatcaaagcgagcaacatccttctcgacagaaatctgagacccaagatagcagactttgggctggcgaagttcttccctggcaacatgacacacatcagcaccagagttgcagggacgctaggatatcttgcgccagagtacgccatccgagggcagctgaccaagaaggccgacgtctacagctttggtgtactgctgctggagatcgtcagtggcagatgccacactgatcccacattacctcttgacgagcagttcctcctagaaaaggtctggacactctcggagtccgatgatcttgagagcatcatcgacggtaccatggagcgcgatttcgacaccgaggaagcacgtcggttgctgaaaataggtcttctgtgcacccaggatagccccaagatcaggccctccatgtcaatggttgccaagatgctgaagggtgagtgtgatgtgagtgaaaagatcatgcggcccagcctgatcacagacgtcatggacctgaaagtcaggacagtagagccgatccagttcagtttatccccatcgatgtcacctgcgctgagcagctcactggtgtccacacttgcattagctggtagcacagttgtagagagccgctgaaggaactagttaaaggaccaggttcctacaaaaaatggtttgttagaagcagcatgaattgtttttttgtttgtgttttagtacattgtaaggttgtcagtttgtatatataacatcctagtttgattatcgagattagagattttggccatatgaag

SEQ ID NO: 42137 - DNA, 1838 bp, Zea Mays
tagagaatagagtttacatgtgaccgtgtctccgtaagcgcccgtctgtccgtccgaccgtccccgcgtcggcgcgtcccgcacaccgcgctcccgctcggccgctcctgcctgcgcgctgcagcagctcggctgctcgcggtcgcttgtcccgtgcgcccggcggccggctgcttgccccgccgacctattcggctgcttcctgcttgagtgcttgtcccatccggcggcccggctgcttctgcttgttcgcttagtatcaatccaggctctgatttggtggctgaagctctgtttctccatggcgcttcgtttcgagatattaggaagattcaatcgcgcccgcgcagctcgcttaactcttcccccactttacttgtcaaacaccactttttatgcctgttggaactcaaggtacaataaaagggttaaccactgaccagttagaggagataggttgccagattatacttggaaacacctaccatcttgaattacgtccagggtctcaacttattgatgatttgggtggcctgcacaaatttatgaattggaaaagggcattgctgactgactctggtggtttccaaatggtttcgttgctgcatttggctgatattactgaggaaggagttacgtttcagtcacctgttgatgggaagcccatgctcttgacacctgaggaatctattcatattcagaacaatattggagctgatatcatcatggcacttgatgatgttgtaaagaccacaattactggcccgaggataaaagaagctatgtatcgcaccattcgttggattgacaggtgcatagctgatatgcaattggtggtcttgctggtggcgaagacaaggattcattttggcgtgttgttgcccaatgcactgctggattgcctgaaaataaaccacgatatgtcatgggtgttggctatccacttgatattgtagtatgcagtgctttaggtgcagatatgtatgactgtgtttatccaacacggactgctcgttttgggactgcacttgtgcctgagggtgtcctaaagttgaaacataattcaatggcgactgatgaacggccaattgatcatacgtgttcatgcatggtctgcaaaaaatatacgcgcgcctacttacattgcctggtcacaaaagatgctatgggttctcagctgctgtcatatcataacttatcatttatgatgcggttaagtagagacctccacatgtctattcttgaaggacgatttccagaattcgtgcgaggattcttgagggtgcagtttccaacgggagacgttccgcagtgggttcgcaacgcgatggaggtcgctggcattgacatatccgagtgctgtgcttccaccaatgtctgacaccaagcgtataggggccacctttaactgtaccggttgactgcaaatggagttgtgccgagttaagactcttcggcaagcaaaagacgacgacaggctttcacaaagaagtttttttccgtcatacatgtagggtctcacacggattcagcataggattttccaatagtatgctgaagcttggcgacaggttttgttagtgttttgtgttgtgtttggaaaccgcagaggtatgctatgctattcttctggggtctaggttatgcttcgtcttaatcactggatgtgatttttagtggtacggtcagatcaaaggaaggtgtacccaactctgacgaatattttttgttataacgaaaagaatgttatagtccttgcaatgatctgaacctgactggctgactgggtctgcagcatgcagcagctggaacagtccagtcccggcgtgctgctgctg

SEQ ID NO: 42138 - DNA, 2628 bp, Zea Mays
ttatgaaacaatccaagttcagtgccttggctgggtttgagtgctggcgtgggtcaaaagagcagcaccacgtgtatacctcatgttgtgttggcgcccttggagctctcctttgctgtgttctggccagctcaagaaccactgcatctgccccctataatcagtaccttgggctgccgtattcagtgaagatttcttccttgccctcaaattctagtcaaagttcactgtttgagtgtgcagtccttgtgtactgctggtataaccctctctgcatcctaggtttgcctgtcccagaacccttctccccatggactagatacgctcacttccccatggactagatacgctcactgacacacccctttcccttgcttacatattctgtaatttggggctagttattttggagctcctcactgcccttaaattccagccaagactctttgcatatgcgaggtgttcctgatgttcttaagtctacacagcttcctccctagccaccaaaatttggtctgtacagaggctgggcacaccatcaactgttgttgtggtgaccactccggtcagtttgccgccttgccgtggccggagcgattcaagaagggtcgtgccgtcgtgatctagcactgcggacagcctccacgctggccgagcaactcgcgctttctccagctgttagacaacagccggtattctcctgaaccctgtatgcttcgtgttatttcagagttcagaacagagttctctccaggttcgtcaccgtttccagccgcttacaggagtatatatatatctccactctctttccccttttacaagacaagcataatctctagttaactactccactcaggtccaccaatcctgacattaggcctaatcactctgtggctgcgtcttctgggtcccacctccaccggccctggttctcctttctcccgctcagtgcacggaccgccagtgatgctgacatcccctcctccttcagtagcagcttgaccccaagctggtgccataggaaagcgttgtttgatagcctgttcatcttcccaagttgctagagaatctggccagcccgaccacttgaccagcaattgtgtgaccaccttgttgccttttttatacaagcgagagtttaacacctcctcaggtacctgcaaccctgtggacaaatctggaactgagtcacatactggcgtacgagctcccactgccgactttaactgtgagacatgaaacacagggtgaacagaactgcccgctggtaacgccagttcataagcaacactattcacttgacgaatgatttcaaaaggtccgaagaaccgaaaagcaagcttttgaacagcacgatcttcaactgttttctggcaatatggctgtagcttcaggaataccttgtctcccaccgcaaaaactctctccaccctccctttgtctgcctgttttttcatccgatcctgggcacgttgcagatgaagcttaacttgttgaagcataagttgtctagtctgcagccaagtcgataaatcaggtactgagcactgctctgttggttcgagtcccaattgagaaggcgtgtgaccataaaggacctcaaatggggatttaccaagagacgtatggtaactggtgttataccaaaattccgcaagtgacaaccacgaataccattgtcgaggacaggcatggacaaagcatctgagataagcttccacacattggttcacacgctcagtttgcccatcggactgtggatgataagcactactcaaacacagtttggtaccagcaagccggaacaactcttgccaaagtttacttgtaaagataggatctctgtctgaaacaatggaagaaggtaatccatggagtttgtatacttcggaaaaatatagcttggccacggtcagagctgtaaatggatgggccaatgccagaaaatgagcatactttgaaaacttatccaccactaccatgatacaattataccgatgagatgtaggtagacctgaaatgaaatccatggtcaccacctgccaagcatgctctggtataggcaagggtaacaataaaccaggatagcggcttctatctggttttgcctggagacaaacagaacaagtactcacaaactccttaatttgacttttcattccaggccaactgaacacagacttaatacgtcgataggtaactgggaaacctgagtgacccccgactgcactgtcatgaagggcggtcatcaccttcaactgtaatgcagaatcatgtcccagccacactctgcctttatgtcgaataatcccagctgtcaacgtgaaagggtccatggaatgtccagtagccagagattgcaacaacttgttagcttgttcatcagactcataccctttggtaacctcagccaaccaacttggtactacagaggaagtggccaaagcatgtagctgcaaggttatatcatcatagtgcagatttggtcgtctggataaagcatcagccaccttgttctctactccttttttataaacaatagtgaaattcaaccccataagcttggttaatgctttttgctgccaaggagtagttaccctctgatcatctagatgaatgaggctctgc

SEQ ID NO: 42139 - DNA, 1961 bp, Zea Mays
atccataaaaggcaccattaaatctttggctattagcacgcttctcccctcccaaaccccccatctcagcgagggcccagtcggctagcgccgcatccgcagccgtcgacgcagaccctcttcggcagccgcgcgtcccttccccgctcccggtgccatggactgcgcaaaggggagggcggtggcggacctctacgacgagctgatggtggagatcttctcgcgcgtgcccgtcaaagacctccgccgttgcacgtgcgtgtgcaaatcttggcgcaacctcatcaccgaccccctctaccgcaagaagctgccccagaccctggaaggcttcttccacggcgtcgtcggagggcctctcagctacggccaattcaccagcctgtcggggagcggagtcggagaacgcgtgactccggtcgacccttccttctccttcatcacggcaatgctgcctggcgtggagcgcatggtcctcttggattcttgcaacgggctcctgctctttgggtgcacccgggaggacaagttcgggtacatcgtgacaaaccctgcgaccaaggaattgatgactgtgcccgccagctccggctcttgtcctcctccacctccatttgaatggggcatcgatgttggggaaagatacgcgcacacctttctgatgattaaccctgctgtctcctcgcacttccacttggtccagatctgggagaatacggcggaggaggaggtggaaacggtgcactcttactcgtctgaaaccaaggcatggagtgacaggtcaagcaagtgggggcgaggtgaagagggcggtgaatgggagctgtggggtgaatccgtgattggattcaagtgtggctgggctttggtcgatggtctgctccattttcttgccttcgatcttcagaaacaagattatgtgataattgcagtggatggggaaggggaaacttgtaggatcatcggctggcatggtaaggatgtggtagcaattgtttttattggtcaatcccaagaccatctacactgcatctgtgtgaatgcggaattagatcaaggctctcaagtgcgcttcacgcggatgtcgatctgggttcttgaggactatgatacacaagcatggatcctaaagcacaatgtgagctctttgcagttctttgaattactgagtcacccagtcgaagacttccatattgtggccattcatccagatcacaattcgttcatccttgttcagcactggaaccagaaatttgtatcatataacatggatactcaggaactgcgtggtctctgcactcttgaaaagggctatgtggtggttattaccccttacataccctgtttcttggagtcatctgttcttgccaccaaacactgaggttgttgtttctgggggacttctctgcatgttcaacaagagcttgatcatccaagtgttgggcaaactagcggtgtgggtaaatctactagaattaggtggtgcaaagttggattacatgtctttaggtgatctagtctgatgatgctttaatgtcctttcgtaatgctttgagaaagctgtttacaggacaacatggttagttccatgatatatcagtgaaaaagctgtttacaggacagcatggttagttctatgatatatcaaattagatcacacttaattgctggccaatataggtattagcttcggtttatattgtgattattcaatattgaatgcacacctatggtattaccctgtgtgttcagcttgttggcttttcccctctgtttttttcttcttaatataatacttcctctgctccaatttataattcatttgactttttatcctaagtttgaccgttgtcttattaaaaaaatcataatttattgttaatctttgacgtgatattgtttagtatataatatactttaaatgcggctttgaatttttcatttttttcgcaaaaaaaaaa

SEQ ID NO: 42140 - DNA, 134 bp, Zea Mays
cttttagctttgttgtttacttttgtgacttcgaactaatttatgtcttctaccgcagctgaactatcccctccccagagccattcaacccactggccaacccagagacaaggaaaacaatagaaattattaat

SEQ ID NO: 42141 - DNA, 4249 bp, Zea Mays
agtttggtgcggcacaccacaaggaagagcacagaaaatcccaaattcccaccacgcaggtcgcaggcgcacccgtctctcccttcttcctcctctccctcttctacacccgacaggcacaggcacaggcacaacgcatcgtccccctccctttccagcgccccaaccacaaggaacagccgaacaggtcggggtcaagccatcggaccttgattccgcttgccctcctgctttatcccgccgccgccgtcgtcgtctcaaccgcccactccttcctctccctgccgctcctgcgaatcgcgaaatcggagacccccggaccgccctccaatgacgaccatgagcgacgatggtgaccgcacctgcccgctctgtgccgaggagatggacatcactgaccagcagctcaagccatgcaaatgcggttatgatatttgtgtttggtgctggcaccacatcatagacatggctgagaaggaggaaacagtgggccgctgccctgcatgccgcacatgctatgacaaggacaggatcgtcaagatggctgccacttgtgacaggacagtggcagagaaaaatgcagagaagaagcacaggacccaaaaggttaagccaaaggcagcaccttcagcagcagcaacatcaactgtagaatctaagaagcatctggctagtgtcagggttatccagagaaatctggtgtatataattgggctacctgcacatttatgcaatgagagcgtacttgagtgtagggagtactttggccaatatgggaaaattttgaaggtttcagtttcccgtccgactgggcctccctctcagcaggcatcagcaaacagcaatattagtgtctatattacttatgccaaagaagaagaggccatccggtgtattcaagctgtacacaattttgtcttggaagggaaagtgttaagggcatgttttggtactacgaagtattgccatgcatggctgcgaaacatgacatgtgggaatccagattgtctctatttgcatgatgtaggcagtcaggaggatagttttactaaagatgagatcatctcagcatatacaaggactagagtccctcagatggcatctggtgtttcgcaaagacgcacaggcactgtgttgcctcctccaggagatgatttctcttacagtgcggtggtttcagccaagcatacatttaagaatggaacacttaataccaccagtcagcccagactttcacctccaaacagtagttctgggaggtccacgcttccatcagctgcctcatggtatgatacctctaaaagtcttctgctaccttttttccatgcactgatttccccccccccccatttttatctgcagggggcagcgtgatttgaatgccaggacaacagctactggagcgacatcgtcacaatctcatacaaaaccaaaatcagaatcacaaagtaatccattttcaagttcttcagtattttcctgtacaaaaacaccctcttcatggaatgatgatacaagtacagcagcaaaaatatctgaaggacagcaactgtcagaaaaagagtctagaaccttgcagccgtataagcctggtatttcaaaggaaacacaagctttatcatcactggagtcatcactggacatagacttctcaacaataccttcagcttggaatgacgatgacattgtagtaccagatgtgatgccaaaaggaagtgatgaaaatcaagttgcaaataaaaatggtgagctaacccatccagcatccaagtcactggttttatctaagaaagacataaaaatgaacattaccagcaaaactccttcagattttgtatcaagtccagcaatatctaaatcagatgtaagtactagtgatggtgaccactcactcaccaatattactcctaaatgccttgcttcaaatgctgtagaatgccaatctagtcatactgctgtggagaaaatgttggaggatattggatccaaggacactgacatggagaagctatctgctcagatatcttcagtaacattaggtggcaacgacgagattcagagtatggcaggaaatcaacaaccagatgtaatgccatgcacatctgttgatgtgctcatggatcagaattttggcagagacctagctcatcccaatcctgacgagctcttattgccttctgaaaataaggatagtattgtttcttgtcaatatagttctgataagcgtcttgattggagtttggagatgcaaaattgtagcgttactcctttaaatgatagaatggactctgcactgctcactgacaaaattcatagtagacagctggatggttcagagcaatcatcatattcatcatttgttgaatttcctagtacagtggatacctcattgtggaatgatacagaaaataacgctgcattgacgattgacaatataacttcttcacagatgcagccagggttttcttcaactgataacacttatgccttgctaaatggaggtcaagatgggctagaaactgtggtactggtactgagcagaatttcagtttgctaccccagaattctcgaggaaatatttaccagaatggccttgcattccaatctctagagaatgaattttcaaacaataactctcctggtgtattagatatggcaactactggtacatcgatgtctaaaatatctgcccccccaggattttcggcaccaacaagagtaccccctcctggattttctactgcatttccatcccaggatagtttgaaccccactcctgtgtttccttctggaattttgtgccatggcgggtctatcccccctcctagattctcttcattttcttctggaatttcaactcaggaagtgtctaagcctcctactagaccgccttctccattttcttctagattttcatcacaggacggtcttgacccctcttctagattccctttttcttctggattttcatcacatgatgggtctaatcagtcgtatggctcaacgaacccaggtttgtttcctgcctcttattttcctagaactagtttgatttctcatcatgccttttgtggtgcttcgcagaaaatcttctccggggtactgttcagggtggcaacagtaatcattatcaatctcagtttggaaggcactcaagtgacatggagtttgatgatcctgctatattagccatgggcaaagggctgatgcctggaattggcgattcagggctggagatgaaaaatactcctgcttttcaagcacagttgcaaccagcaagtagtgatccaagatttcagttacatgtacagccaaatgtgcagtctcgtcaaaacatgagattcacagaccctatgcaagatggtttgaaccatatgaacgataattacctggcatccagatttttagctcagaaccagggtcctctatctccttatgtgcagattccgcaacaacccagaaactcgcaggttataaatggtcactgggacgggtggagtgatttgagacaagggaataacgctcctatgtcagacatgtccaggatattatatccaagtgaagtgaacaagttgcatatgctgggttcaaatgatgtccataacagagcctttggaatgtgatcgtctcctgggataatgtgcgactttgagctgacatgttcaacttggggcgttttgtgcaagtaactggttgcacaacacatagtatacctgaggtggttaatggtgttgtgctcatgagctggcacacgactatttattgctgttggagttgaccaaaatgaaccttagttttggtccatccatttggaattaccaggttcattctcgtctatgatttgtgaagcttgaatgaaaagaaagattacgtgcctgagaagaacaaggcagctgaagttgaaatagatagagatatgtctattatgggatgtggtgtgacttgcgagcgaaagagatgaagaagattaggtgggcttggcttgatggcagcttgttttttcttgtgtcttgtacatgatgatattggtcggtggttgtatatgacttgtgatcgacggtggctgcattaacctgtagtggttgcccttgctccttcctgcctgttttgtttgcagctcctcctgttttgcatagtttatgctgattaagggaattggtgaaagtctagtgttacccatggtataataatagggaactggtttctttgttagcattacttcatttgtctaaaaaaaatccgttaaccg

SEQ ID NO: 42142 - DNA, 808 bp, Zea Mays
atggcggcgcaggagggcggcatgaggctggtgtcgcacccgatcgcggcgcacgacgggcggctgccgcggcagtacacggcggaggggcagggcgccaagaaggacatgtcgccgccgctggaatggtacggcgtgcccgagggcgcgcggtcgctggcgctgctggtgcaggacatcgacgccgaccccatcgtgccgtggacgcactgggtggtggccaacatcccgcccgccaccaggggcctccccgaggggttctccggcgccgcgggggcggggccggggcgcgaccagctcggcggactgcaggagggggtcaacgactggaagcagcccggctggcgcgggcccgtgccgccctcccacggccaccgcatccagttcaagctctacgcgctcgacgacgaggtgcacctcggcaacaagggataagctcatggaggcgatcgacgggcacgtgctggaagaagccgagctgatcgccgtgttccagggagtcgtcgccaacaactaacacacacactcagagatatctttgttggcgtgctttgtatttgcttgtgtggctaccatgtaattttgatcgaataaaagggaacttcacatgtgcttagcttattgtgtgacgaagagtacgtcatgtgggcagctttacgtgctttacgtacgttaagagtaggggtgggcacatttttacccgaaccgtaccgaaccgtaccgaaccgaaattttggttttttcggtagttcggttcggtttcggtttttgtatctcaaaagttcggttttcggtatcgtaatcggtt

SEQ ID NO: 42143 - DNA, 2760 bp, Zea Mays
cgagccagattcgtcagcaaccaacaggcccgggccggaccggccaaccagatccatcctcctcacatgccggccgagtccggagtccagcggcgccggcgacccagcgcggatggcgtttccaattccaaacgagcgaccgcccacgcgcgcccggccgtaaaaaaaccggggtcagcgcgtggactcggccgctgggaggatgtatcgcaaattcgcaatcgaatcggcggccacccggcaccctgcctgcctgtcgagtgtcgacactgtcgtgtccggttggcgccccagcgaaaagcaaaagaaataccggaagaaactgcctcgtgcctcctcctctcctcgcttctccctgtagagaacaggccgaggcgggcgagtgctccagtacacctcgagctacataccccagctcgcacggtccagctctgagctccctcctctccacctccacgcccgatcgtgaatcgtcacttgctctgcaacggcgagagcgccatctttgctgctacccattaactcaggcgggcattccgtcgagcaccttccgttcggcgccgggtggcgtggggagcgagtcctgccgggttgcgtggtccgttgcgtgaacgggcgacagttgctgctttcccgggggcgctccttgatgccgctgttgtggcaggcgctgggttctagcggatggaatgcaacagctcctacgcgctgaagtcaagaaggttcgttgccgtagctgatgcgggatttgaggatgctgtagacggcgccagcgattttggagatacgatgagtctcgcacacaagcagaaggttgtcggggaaaccgtggagacggaggaggagcaggaatttgtttggaaatctagcctgctctcctacaaggatgatggtgattccgttcttccagcacgcatcaacatcaggagagacacctctgcctggcaaaatgaacccgaggattgacaggtctggaagcaatgaaacaagcaaggtccctagactgggttccattgttgggacagccagcatggctggatttggcaaggcagtggagattctagacacattaggctgcttgatgacgaccttgagctcagatggtggctttgtttccaggaccaagaccaaagggtgcaaaatatcaattcttgcttttgaggttgccaacacaatacttaaaggtgctagtattatgcaatcactctcagaagacactgtcacatacttcaaacaagttgtgcttccttccgaaggtgtacagaatttggtgtccagtgagatgagtgaattgatgcgaattgcagctaacgacaaaagagaggagctgaaaatattttctcaagagattgttaggttcgggaaccgctgtaaagatccccagtggcataacctggatcgctactttgtgaagttagaatcagaaaatgcgccccagaagcagttgaaagaaacgtcaatagcagagatgcaaaagttaatgagtcttgttcaacgtacaactgatttgtatcatgagctgcatgcattagacagatttgagcaagagtacttctctaggataaacggaaagggtcacacagatagaattgaaaaaggaggcaatattcaaattgtgaaactggagttgaagacccaaagtagttatgtaaagagcttgaagaaaagatctctttggtccaagacgttggaagaagtagttgagaagtttgtagacattatgcactacttacatgttgagatcaacaatgatttcggatcttctgatggaggtgtgatgaatgccgaatcaactgagagctgtcaaaggctaggacctgctggacttgcattacattatgcaaacattatcattcagatatacagtattgtttctcgatcagggtatgtgccatcaaattcaagagatgcactgtaccagggattgccaccaaggatcaagtcagcactaccaaataaattgagaacgacctcggtgcctcaggagctcactattgatcaaataagggctaggatggagaaaactctgaaatggcttattcccatggccgtcaataccacctgcgctcgaggtttcttgaggtttagcgaatgggcgaaatcagggactgagagggttggtaggcgaccgggtgtagcagatcggattgagacgctataccatgctgacaaggcaaggactgaggactgcattctagagttgctcgtctggctccatcacctcgtcagccagagtaaccggttggcaatgcaaaaagtcactgaccaatgtatctaaccaaaagtcaggaattgtcatatgggccatcacatgctagcatcgcacggcgacttctatccagaaaaaaagaggctgggtttgtcgagtggtccaaggtatccaaaattatatggaaaagaggggacatcaaaattttctgatccagcttgctggttgttttcgtctttgttattaggttgtagatggaatctagagttgttcttgccatggaggtcgtgtgtttttcttctttccatggaggacgtgcggtttttcttgtccggatacagtcgggcatgcagcatgcttatatgtgctccgtacattagctgagtaggtgtagtataagaagagccctttttttttcttctctttgatctgcttgttatttgtaagtgtagttgtgacaatcacattatacaaagaaaacgcacgtcatgtcagtgcagtgaaaaacaaacaaacatgaatctcttttcatatacatatatctgccgtcg

SEQ ID NO: 42144 - DNA, 1251 bp, Zea Mays
atctgttccgttgcgtgctcctctctcactccacggtccacgactgccaccagcgcttcccgctttcccagccacccgtcgcctccgcgtgtcgccccatccagccatcagttccaccccagctgcgaatccggcgcgctactaaccgccgggggaccgaaatttccccagccgcaagtttcgggaccggaacaacaatggcagcagcagccgtcgcctccagttccaccccgcggccgctccggttggcgcagcgcggggcggtctctgcgcacgcgtcccaccacgtcagcgccccgccccaccgctcccgcaggccgcggctctccgtctcggcctcagccggggtggaggggaccagcgggtcggagcggttctacttcaacttcaccgggttccccttcccgctcggcccgttcctcaaccgccgcaccatccgcaccgaggcggtgaagggcagcatatggctgttcgagcaggagcaggcgctgggcttcagcagcgtctccaccaacatccgcatgacggtcatcaagctcaagtccggtgggctctgggtgcacgcgcccatcgcgcccacgaaggagtgcatccagatgctcaaggagctggacgcgccggtggagcacatcgtgctgccgaccttcgcatacgagcacaaaatcttcgtcgggcccttctccaggaagttccccaaggctcagatatgggtggcgcccaggcagtggagctggccaatcaacctgccgctcgagttcttcgggatcttccgggccaagccgctcaaagatgaggatgacgccacgccctgggtcgccgaaatcgagcagaaggtgctcagctctccggaagttgggattgggccatatgtggaggtggcgttctaccataagccttcacggacactactggtgaccgatgctgtcatatttgttcctcaacagccaccggagtgtatcagcaaagaatctctgttggcatctgcgaagaatggactggcagtgaagctattgagcaaagggaaggaggttcccgatgaaccagttgttgacaataagctaaaccgtcagaaagggtgggagagaatggtacttcaaatactatttcttggtccgtcaaatctacttgagccaaatgcaagttttgctcaaatgtcgcaaaaattgatcgtctcacctattgtcaagacgctcgttttcagcaaagttccagagaaggctgcagtgcagtgtgcacaagactgagggtgag

SEQ ID NO: 42145 - DNA, 1957 bp, Zea Mays
tctaaacacacatcatttgtattttgtagcaatatagttattacaaacagatggggcaaaagatgatggccggaagactatcataacacagtgaataatatgccaaccgttttattacatccatcaataaaaagatacagaccacaacagtggccaaaaacaaaataataaacaagaaagaaataaagaaccaaaaaagcgacttggttatccatagattttagattttctccccctttttggcagcaaggaccaaaaacgaggagagagagagagagagcacatgaatcaataccctccgggaggaggataggaaggatagtccggaaaaaagtccgcatcatgtattcctcgaatgatgagtcccgagggggctcatcaccagagggaaaaccagatgtggaagacataccctaatgaggaggagggggaggatggtggtggtaaccgaagccagaaggcctcgggtcaccaggaatgggtccctgactcgggtagggaggaggaggaaagtgaccggagccggatggtctggggtcaccgggaatgggtccctgacccgaataaggaggaggaggaggagccgaggtatagtaggattcatcaaactcctcggcttcatcctcaggagtaatgaatggcacaccaaattcctgttggtgccactcattaaggttcacagggaaggtgggggttggaggcgaaggggacccaggaggcaggggatgacccgtggcggtggcataacgacgaaagtcctcatgtagcacgtcagtccgacgcctatgcacagactcctcgattgcccagtcgtggcacatggcaaaggagccaaaaatgcccttggccagatgaataaacaaccccccccgccatgaccccgtccctgacattgacctctacctctcccgctgtggtccatcggacgtgatgcagcggcggcgcgagaggaggactcatgatgaggaggctaaggaggtggctcatcagaagaagcagggcctccagaccctgaaggagcccgctttatacgagcagttgggatcctcgatgccctcgcaacctgcgtgcggggggtgtcgaaaggttggcgccactcgtccccgtcgaagcaccttctccgcaggatatgctccttgccaggaggaggatggacctttcgacgacgaggtcaaacctccatcgtctgacgctcccctcatcaccggtctccatatgcatctggcgaccatttcccgggggccaaatgaacctcaggtcgacttccctttgaagggggtggactcccttcaacgcttaaggttcacaaatcccactctcacatccagacatcctggtttccaggaccctcggttctggaacctttttcaggttgacttttataattccgtcatcatgtctaagaagcaccgagtcgttagacatcgtttcattgactaggaggggtgtgagaatatggaggatgctgacatgacgtcagctctctgtaacttagagagaaaggggttgaaaatataatgactatggaatacccctggaacgacgaagtagtggctcagttctatgccactctttgggtaaagaaagttgatgaagaagttgatgggtatgactacccagttatgtagttctttatccagggggtctggcataaagttagctaccgtcgttttgcccacatcttgggcttctctgatgaagatattaagagcaacatccttaaagtccatgacattaggctgcccatgcgggaagaaactgaatttattcatatttctatagagcgggaattttggatcactgccaacatgcataggtactataggtaccttaaccctttgtccaggatgatcgttctctcgaagggtggaaatcagatgaatgtccttggggagagtcggattctccttcttctccttgctccaaatagtctttcccgcataaacgtgtttgacat

SEQ ID NO: 42146 - DNA, 4711 bp, Zea Mays
tttcagcttgcgtttctcctgctccctatccgacgtagtgaatcccttcccaggcaccactcgccgacggaacgcctcccttcctaggcaccactcgccggagcgcatcccttcccagccactgatggccctgacccgccagcgcgcttccctccccaccgttgacggccccgacccgccggtggactgcgctcctcatcgaccagcgtggccatattttgcatttgttcctgtttcagcttgtgagcaactgatactactgtcccggcccatcgttactggaccaagaactttgagatgtgtataataccctgtgtttcctctcactcatgctaatttcctggtgatgttagaaacaagaataacataaagggtgttgtcccagggtacgagcaaggaagggacttcaagaaatacgggtgggatggaagttgccttggtatcaactgtattgaaggttttggggacgaagttagctcctcttgcactcaaagagttgagctctaaagcaggtgtggccaaagatcttcaggaactccaggacctagttgaggagatcaacaattggttgcaaacagttggtgataaagaccgatcatctaaatggctcaaaaaattgaaagaagttgcttatgatgctgaagatttagtccatgagttccacatcgaggctgaaaaacaagacagagaaattactggtggcaagaataccttggtcaaatacttcatcacaaaacctaaagcaactgtgactgaatttaagatagctcacaagatcaagaaaataaaaaacagatttgatgcaattgtgaaaggaaggagtgactatagcacaatagcaaatagcatgccagtggattatcctgttgagcatacaagaaagacaattggagaggtgccattgtatactattgtggatgagacatcaatatttggcagggatcaagcaaagaatcagataatatctaagctgatagagactgatagccaacaaagaataaagatagtttcagtaattgggctaggtggctctggtaaaactactctcgcgaaacaagtatttaatgatggtaacattataaagcattttgaagttatattgtgggttcatgtgtcaagagaatttgctgttgaaaagcttgtggcgaagttgtttgaagccattgctggtgacatgtctgaccacctcctattgcagcatgtgagcagaactatctcagacaagttagttggaaagaggttcctagctgtcttggatgacgtttggacagaggatcgtgttgagtgggagcgattcatggtacatttaaagtgcggtgcacctggaagtagtattttactcactactcgtagtagaaaagttgcagaagcagtggattctagttatgcatacgacctaccactcttgtctatggaagatagctggaaagtgttccaacaatgttttggaattgccatgaaagctctagaccctgaattcctacagtccgggatagagattgtggagaaatgcggaggtgtgccccttgcaattaaagttattgcaggcatcctccatggaatgaaaggaattgaagaatggcagtccatatgcaatagtaatttattagatgtccaggatgacgaacatagagtatttgcatgcttgtggttgagttttgttcatttaccggaccatctaaagccttgttttctacactgctctatatttccaagaggctatgtaatcaacaggtgtcatttgatttctcaatggatagctcatggcttcgtcccgacaaaccaagctcgacaagcagaagatgttggaattggctactttgattcccttcttaaagtggggttccttcaagaccatgatcgagaccaaatttggtccacaaggggtgaagtaacatgcaaaatgcatgacctggttcatgatctcgctagacaaattctacgggatgaatttgagtctgagatagaaacaaacaagcaaataaagagatgcagatacctatctttgacttcatgcactgggaagcttgataacaaattatgtggcaaggtccgtgcactctatgtttgtggccgtgcactcgaatttgacaagacaatgagcaagcagtgttgtgtccgtaccattatattgaagtatataactgctgactcattgcctctgtttgtgtcaaaatttgaatacctggggtatcttgaaatatccgatgttaactgtgaagcactaccagaagctctctcgcgttgttggaacttgcaggcccttcatatattaaattgctcaagacttgcagttgtacctgaaagtatcggcaagcttaagaagcttagaactctggaactgaatggtgtttctagtatcaagagtttaccacagtctattggcgattgtgataatcttcgaagattatacctagaaggttgtcatagattcgaagatataccaaattccttgggaaaattggaaaatttaaggatacttagtattgttcattgctttagttttgaaaaactttcgccatcagcatcatttgggaagcttttgaacttacaaactatcacctttaactgttgcttcaatctccgaaacctacctcagtgcatgacttctttgagtcatctagagatggtggatcttggatattgttacgagcttgttgaattgcctgaaggcatagggaatttaagaaaccttaaagttttgaatctgaagcaatgcacacaattgcgtggactaccagctggttgtgggcagctaactcgtttacaacagttgagcttgtttgttattggagacagtgccaaacacgcaaggatctctgagcttggtaatcttgataagttggatggtgagctgcagattaaaaacattagatatgtgaaagatccaagtgacacagacaaagttcgtttgaagaaaaagattggcatccggaaattgtcgttggattggtattcaagattggaggttcagcctgatgatgtggaagaagagttatcattaaatatggagaaggaattgcatttgctcgacagtcttgaaccaccatcaaaaattgagaagctgagaattcgtggctaccggggttcacaattgccacgttggatggcaaagcaaagtgactcttgtggtccagcggatgatacacacatagtaatgcaaagaaatccatctgaattctcccatctgactgaattagtactggacaacttaccaaacttggagcaccttggggaacttgtggaactgccactggtaaagatccttaagctcaaaagactgccaaagttggtagagctgcttacgaccacaacgggggaggaaggagtggaagtgctatgtcgtttccatcacgtttccactctagtaataattgattgccggaaacttgttgtgaagccgtactttcctccgtccttgcagagattgacactagaaggaaacaatatgcagttggtttcttcaggatgcttcttccatccacgtcatcatcatgcatctcatgctcatggtgacgagtcttcatcttcctcctattttgcggatgagacgggtactcacctcgagagacttgaacttcgtcggttgacaggatcatcatctggttgggaggtgctgcagcatctcactgggcttcataccctagaaatatacatgtgcacagaccttacacatttacctgagagcatccactgccccaccactctctgtagactgatgataagaagttgtgataatcttcgtgtgctgcctgactggcttgtggaactgaaatctctacagagtctggacatagactcatgtgatgctctccagcagcttcctgaacaaataggagaactctgctcactccagcacctccaaataatttctatgcctttcctgacttgccttcccgagagcatgcagcacctcacctcgcttcgaattctcaacttgtgtgaatgtaacgcgctgacccatcttccggagtggctaggcgaactctctgcgcttaaaaaactcttgatccagagctgccgtggccttacatctttgccccgctccatacaatgccttactgctctcgaggaattatatataagcggcaaccccaaactgcttcagatcagtgcatcatattctaaggaagacaaggatggccaggctccgacgacattcagatcacatggcttgacaggtcgacatacaaatccccgttccatgtagtatttctgcagggacaagagtcttctctcttgaactctacagctgcaaccgttccgatgttgcaggcctgacgaccagcattgcagtgaggcccaagagttcgatctggtccggaacatgctcatcgtcgcagtagaagaacgctacaaggatgctggtaaacgtctaagaaaacaccatgtaaatatggaggccttttttttgctgaagcgcatgaagcttcggcaaacatctaaagaacaccatgcaaatggctgtggtgtcctgcgattggtctacgcgatgtacatgtgcgcaagctgctttgaagagaatttaaccaccttgaattttaggtacccatacagttcgctcatgtattgatctggcgcaagcttcgatgaacattttttggtttcatgtggttgatatgttgcttgagccttgtcagcttgacgattttttggtttaatgtggttgatatactgctagctacatcaccgctgtttgtcttcaaatcgg

SEQ ID NO: 42147 - DNA, 2965 bp, Zea Mays
ccataccccatgctcttctgcttttcgaaaattacaatcacccaccttccaataaaagcgcacacgccttcgtgcacctccccggtctctccccctttcctctcccttcccccttcccccgcctccgccatcgccgacgccgacccccacaccggccgacgcgcgagccccggcaccatcttcacacgctaattgatggagatgggatcttcaacgtctccggattggagaacttcatgaaggatgtcagattgggtgaatgcgggctgtcctatgctgttgtatcaataatgggcccgcaaagtagtggtcacagactaccaaaggatgatacagcatttgagaagcaaagtgcattgtttgctttggccgtttcggacattgtgttgattaatatgtggtgtcatgacattggcagagaacaggctgcaaacaagcctcttttgaagactgttttccaggcaacatttgaggtcatgatgaggttgttcagtcctcgcaaaacaacattgttgtttgttatacgtgacaaatcaaggacacccctagaaaatcttgagccaattctaagggaagacattcagaagatatgggatgctgttccgaaaccccatgcccataaagaaactccaattagtgaatttttcgatgttcaagttgtcgcactgtcgagttatgaagaaaaagaagagttattcaaacagcaggtttctgatttaagagataggtttcagcattcaattgcccctggtggacttgctggggatcgtcgtggtgttgtcccagcttcaggtttctcatttagttcccagcaattttggaaagtcatcaaggagaacaaagatcttgatttgcctgctcataaagttatggtggctactgtacgttgtgaggaaattggtaatgagaaagttaccagctttatagctgatgaggaatggcaacaatttgaggaggctgtccaacatgactttgttactgggtttgggaagaagctcagcagccttctggatagatgtttatcagagtatgacatggaggctatttattttgatgaaggtgtcagaagctcgaaaagacaacaacttgagtctaaactgttacagcttgtcaatcctgcctatcaatctcttctaggtcacttacacactagaactttagaagcatttaaggagtactttggcaaggccctagaaaaggagggatttgctgttgcagcttgcaattgtactgaaactttcttggagaagtttgatagaggatctgaagatgctgctattcaacaagtgaattgggacacctcaaaagtgagggataagcttagacgtgacattgaggctcatgtagcttcagttcgggctgctaaattgtctgaactttgtgcgaaatatgaggcacaacttaccaaagctctggtggaaccagttgaatctcttctagattcagccagtgaagacacgtggccagctattagaaagcttcttcaacgcgagacaaaaactgctgttttaggtcttgaatctgctgtgtcagcttttgaactcgatgaagcaactgagaaagaactgcttgcgaagctggagaagcatggaaggagtgttgttgagtcaaaggcaaaagaagaagctggaagggttttgattcgcatgaaggacaggttctcaacattgttcagccgagatgctgactctatgcccaggtctgtgaagttgctttctacaatggctgcaattcggttggaggaggatggtgataacattgagaacactctttcccttgctcttgttgacacttcaagacatgggactacagataggagtatccaattgtccgatccactagcctccagctcatgggaaagggttgctgaggagaagactttaattacccctgtgcagtgcaaaaatttgtggaggcaattcaaagctgaaactgaatatacagtcactcaagccatagctgctcaggaagcaaataagaggaacaacaactggctcccacctccatgggcacttgctgcaatggctatccttggattcaacgagtttatgacattactgaggaatccgctttacctgtttgccatatttgtgatttatcttgttggaaaagccctttgggtgcaatcagaaattggcagggaattccaacatggatttcttcctgccatcctttcactgtcgacgaaatttgttcccactgtaatgaacatcctgaagagattagctgacgcgggtcaagaacctgcagcagcccccgagaggcaaagagagatggagctccaaccaaaatccaccaggaacggttccttatacagcaatgtgacatcggcagggtcatctagcgtaaccacttcggagattggacctgaatattcaagcccggttgtgcaatgattttgctgatctttagctttttggctggaaacatactctagcagttgagaaaaacagggtgcctcaagaacgtacgaagattttggtgccttgcagtttttgtaagcttgcccttcccagactgattcaaggtggcactgcccctcgttgttattcaaggaattttggggctggcggggttgtttgtaagagcattgtaaaataacttgtttcattttttggtttctgtaacatgaatacatgacatgtgatagttgtatataagatctgtggactgggggcgtatcagcgcattctacacagctaagggttgcatagttgcgagaactgaagcatgtaaatgtctttaaactgccatctgattgagatgcagtagtactgctgttctggaataagacatgtctgcttttggggaaaatgattcaaaaaatgtttcgtttgaactcagcgtctgctgaaaatgaatttggttcccgacccctgttctggttggccgaaattcacaagtttggtgttctttttgtgtactgtccgtacaataatacagtccaggcaaaggacaccagacg

SEQ ID NO: 42148 - DNA, 951 bp, Zea Mays
attttgcaccatcctcgacgctaaagtacccaggtcaggtagctggatcgcacttcttcccaatccatcaatcgtgttctcgcgagccagaggccagagccatggagaagagccgggtgctggtggtgggcggcaccgggtacatcgggcggcggctcgtgagggcgagcctggcgcaagggcacccgacgctagtcctgctgcggccggagatcggcctggacatcgacaagctccagatgttgctctccttcaaggcccagggcgcgcggctggtggaggcgtcgctggaggaccacgcgggcctcgtcgccgccgtagcgcaggccgacgtggtggtctcagccatgtccggggcgcacatccgcagccacaatctctccctgcagcataagctcgtcgaggccatcaaggaggctgggaacatcaagctatattctgtgatgaagacgatgttgcaacgtatacaatcaagtctgttgatgatcctcgcgcattgaacaagacactatacataagaccaccagaaaacatcttgactcaaaacgatgttatctcgaagtgggaaaagctttccggaaacgttctggagaaaatccacattcctgcagatgaattcttggcttcaatgaaaggtactgacctggccaatcaagccggagtgggacactattaccacattttctatgaaggctgcttgacaaattttgaaatcggcgacgatggagcagacgctactctgttgtacccagaggttcagtatacccgcatggatgagtacatgaagaggtatgtgtaacgctaaattgaactgttggcttgtccgaacgaattcatatatggtggtggttgtatgtgatgactctttcagattattgatgctatgttgtgtattacctagtctcggtatttcatatttttaatattattcgcagctcctttgtttgattc

SEQ ID NO: 42149 - DNA, 1743 bp, Zea Mays
taagcacgactataatccctaccgagctatcctatccctatcccctcttttgctttccttcccccgcctgctcaattcttctcgtgctgtcacccctttcttcaatcgcctcccgattcccgcggggctcgcagatcccggaaggacaccccgccgcccccgatgagccgccaccgggtcgagacctgcgactcgtggcggcccccgcggaagaaccacgccggtgcgccgccgctcctccgcgcggggcctcggctcctcgccttcgcctcgctctccgtccgcgacggcggggactccgccgcggccgtcgccaaggcggttgaggaggcggttgtcgtacgatccgatgaggtgaaggaggcggtggccggggaggagaggaagaagacgaagtcgacggagcgcaggctgccccccgcggcgcagctggtgagccatccgctcgcgctgctggcgctagtacccaacagcgccgcgatctttgccgcgggggccgccgcgggcactgtagccaagaccgtcaccgcgcccctcgaccgcgtcaagatcctcatgcagacgcatagcgtgcgggtggcgggagagagtgccaagaagggtgttggatttctcgaggctatggcagacattggaaagaaggatgggcttaagggttactggaaaggaaaccttccacaggtcattcgcataattccttacagtgcagtgcaactcttctcgtatgaagtttacaagaaaattttccggagaaaggatggagagctttctgtatttgggagacttgccgctggtgcttgcgcgggtaacttacccactggatgttctccggctcaggctagcagttcaatctggacacagcactttatctcaggatgaagaaatctgtaccagagaagtacaagaatagaccagaaacatctctggcaaccgctcttctttcagcaacatttgcaactttgatgtgttatccgctggacactgttaggagacagatgcagatgaaaggcacaccatacaatactgtttttgatgctattccaggcattgtggagcgtgacggtctaactggtctttatagaggttttgtgccaaatgcgttaaaaaatctaccaaatagcagcattaaactgaccgtgtttgacacggtgaagacactgatagctactgggcagaaggagatggacaaattaattcaagaaaatgaggagaaaagaagctaggaaaagagccttggtcaatcttgaaggctttggtagaaagcatgcctcgttgcacactccatatcgctatgtttcctcgtttgctggtgacatattttaggatctaggcagcgcatctttctgttccttttcaaatagatctagtttccagtgctttccgtagcatccacattcatagagatagaggttcgcattgagttgatctctttatctagtgtcggtagcattcccctacagatcttacctattctaatagaggatagtgtatcaatgtgaccgccccagattccttaaatgtaattatacataatagccagaacaatcaaatgtcatggagcacaggagcatgttctccttgtcaatgaattagcatctttgatttaaagaacatattgggtgtctcgtacatcacaaaccgaaggccagatttgctttggaatggttccatccactttagacttcggctagcatgaacttttggttgtgaagccagtttgtattggaggatgcaacaaacgaa

SEQ ID NO: 42150 - DNA, 1805 bp, Zea Mays
ctaatttcctgcgttcgggccggtagcgctagacgagcaggcggcgggcgcggccctcgtattcaattccgtcaccactttctcctcacgccttcaacgtctcgcatcccatcccattccgtcccgtcctcccccattccatcgtagtaccaccgccggtcgtcacccacatctcaagcttcgtctcatgtcatgcaacgcagcgtgctataatacggcgccacacaatcacagccccggccggtcggctcgcgctacccctatatatcgtcctcattctcattccctgaccactgagtcactgaccacctccctccccggccggccatctctcccgagctaaactgtggcaggcagctagctgttacgagctagctccgcgcgcgctaggcggcgtcacgtacgtgctgtgatcaactgtctagttctccactcgacgcggacaccctgacccgcgcgcgcgccgtggccatggtcgccgccgccgggcgcaggcggcgccgctgcgcggccgccatcctcctggtcctgcccgtcgtcgccgtcctcgcgtcgtcgtccgcggcggcggacgggtcgttcataacgtgggacgacctcagcacgccgtccgccgccgccgtgcagggcggcgtgaaggcggccagcgggggaggcgcccgcgagctggacacgatcgtggtggcgcaggacgggacggggcactcgcgcaccgtgcagggcgccgtcgacatggtgcccgccggaaacagccgccgcgtcaagatcctcgtcaggcccggcgtgtacagggagaaggtgacggtgccgatcacgaagccgttcgtgtcgctcataggcatgggcagcggccgcacggtgatcacgtggaacgccagggcgtcggacatggaccgctccggccaccaggtcggcaccttctactccgcctccgtcgccgtcgaggccgactacttctgcgccagccacatcaccttcgagaactccgcgccggcggcgccgccgggggccgtggggcagcaggcggtggcactgcggctgtccggcgacaagaccatgctgtacaggtgtaggatcctggggacgcaggacacgctgttcgacaacatcggccgccacttcctctacaactgcgacatccagggctccatcgacttcattttcgggaacgcgaggtccctgtaccaggacggtgctgttcggggagtacagctgcaagggcccaggggcgagcacgaggaaccgggtgccttggtcccgctcgctcacctacgacgaggcgcggccgttcctcggcccgagcttcatcaacggcgagcagtggctcaggctgtagatccgatccgtcctcccggctgccgagctgagcttcgtcgacggcgagctatggtccctccgtccgagctgtgtgtaggtcatgcgacttctctggtcttcttcggtgcatatagcgtgacaagcaagcagctagtcagactgtagacatgtacgctgtaccatatactactagtaccatgtacaaacctgatacccatatgtgtagtgagatactgagatggccatgtccatcattcatggcaagatacatagtagtttgcatgcatgtatgtgaaggaaaacaggggaggccaaagtccgatacgtgacacgtacgcctcatgcagatgggtcatggggcctccacctcaggcccgcccaacataccagaaaatcaaaatgatgagatcactgcatggctttcctgatttctagcacgggcaagttcagatccagtatgccaaatgccacaaatagatggcgcatgg

SEQ ID NO: 42151 - DNA, 2411 bp, Zea Mays
aaggcatcctcgtcgtatttttatttcgcccagcgccgcagcccgtctctcatcgcggctgcccctcggcgatctcaagagcctcggtcgcctctcttcctcagcccgctcgccccctcttcgatacccccgataaaacccccgacccgccccgtctccagctggccaccccatcctcgtcttctccaattccaaagtaagaaagccacacgcgaggccgaccgaggaagtccaatctcatggcgctctcctgcatgaggtgccccgcgggcgccggcgccgcctccgcccgacgcgccgcagcgcagccgttggccgcggaggctgcggtctccttcgccagatgccgcggcttcgggaggtccgccaccgctgcgactgccgcctggttttggcgcaaccatgccgttgcctcacagggagtgaaagctcccatggatgctgatgtcaagaatgctgtcatacctcctacctcaccaaaggtggaaagtggctctccttcagaaatcactctggatgaatttgaagacttgagcgctctatgcaagaatgatgattctactgttagcatcacagtagttggagcatctggtgaccttgccaagaagaagatatttcctgccctttttgctctctactatgaagattgccttcccaagcatttcaccatctttggctatgcacggagcaagatgacagatgctgaactgaggaacatggttagcaaaacactgacttgcagaatagataaaagggaaaattgtagcgagaaaatggaagagttcctcaaaagatgcttctatcattcaggccaatatgattcagaagagcatttcatagatctagacaagaagctaaagcaacatgagggttccagagtttctaaccgccttttctacttgtcaatacctcctaatatattcttggatgttgtaaaatgtgcaagcaaatcagcatcttcggtgaatggttggacacgagtaattgttgagaagcccttcggccgagactcagaatcctctgctgcattaacaagcggtctgaagcagtaccttgtagaggaccaaattttcaggattgaccattatttgggaaaagaactggtggagaatttgtctgtcctgcgcttctcaaatctcgtttttgagcctctctggtcaagacaatatataagaaatgtgcaacttatattctcagaagactttggtactgaaggacgtggaggatactttgatggctacggtattattcgagacataatgcagaatcatctcattcagatactagctttatttgctatggaaactcctattagtttggaagcagaggatataagaaatgagaaggttaaagttcttcgttccatgaagccgttgcagctggaagatgtggtcgtaggacagtataaaagtcacacaaaaggtggtaccacataccctggctataccgatgataagacagtgcccaaggatagtgtgactccaacgtttgctgctgcggcgcttttcataaataatgccagatgggatggagttccctttcttatgaaagctgggaaagctttgcacacaaaacgagctgagattagggtacagttccgacatgttcctggaaatctctacaaggggagttttggcacagatcttgatagggccactaatgagcttgtgatacgtgtgcaaccggatgaagcaatttacctaaagattaacaacaagattcctggtctcggtatgcgactagataggagtaacttgaatctccattatgccgcaaggtactcaaaggagatacctgatgcttacgagagactcctgcttgatgccatcgaaggagagcgcaggcttttcatccgctcagatgagttggatgctgcatggtcactcttcacacccctcctgaaggagctggaagagaagcggatagctcctgagctctacccatatggaagccgtggacctgtcggggcccactatctcgccgccaagtacaacgtaagatggggtgacttgagtgcggagcactacaaggcatgaaacgaagatggctatatctttgtgatattcttgcttttccatttctgaacagtaaaggaaacggaaaaaaattgccgcatttcaaggcctcggaagtgaccattgatgagtgcaagaaacggttgacatgtttcaactagttaacatttgttggtctcatttgttggctacttcacatgtgtagacgttcaggttggcaagtcggttaggttccgcttcaactagttaacatttgtactgaactaaatgaacacgctgagaacaactatctcgtgggatttgattaatcgttctgtttgtaggctactctaacatgtaaagacgaccttagtgaagagttgagacacgttacaaggaaacaataactgtaggctt

SEQ ID NO: 42152 - DNA, 1508 bp, Zea Mays
atgcggtccatcttcagtggagttgttcaccttcagatgaattgtgcgcaccttgaaaactgtttacatgaagcaagagaagaggcccgaacaaacaaatgttcacctgacagaagggctgttgagtatgatgctctgcggtcgtctgctttgaggatacatggtttgttcgaaaggctaaataactgcatcactgcaccaggtgtgactggctttgcagagtcactgcattctttggctgcctccttggcaagctatgtaaagaaggatgaagctgataccactgttcagtttcaacaatgcatcaagatcctggcggacaaagcagtacatggaggtatcacaaaagagttggatgagaagaaagagctgattaagaatctctacaataaacttcaacaagaaaaacaggaaccaaaaacaataatactaacctcatccgatgcccaccaatctgagcagccaaggcatgcatacctagccttctcgaggacaattcaggaggtatggtgcataaaaagaatctcagttgttcctcatgtggagaacctccagaggctcacatgttgggctccaaagttgcaatgttccagtattcctcagtcgaaatttacaatgcctacaaaccacagcctactcttgagattcacaatcccgatatgcacaaagatgccccaaggttgctgccctcgtgtttcgtgctctgattgttgagtcttcaatgagagctgattccagttatatagagctacaatgcttccgagagaagggaaaccggcaaaggggaaaagagacgaatagaagggcattggtgccctctcacacacaggccaagtatacatccacatgccacaatgacttgggcctggtgcatatggtattacagctgttattattggagctattggctatttattcataagatggaaggggtggaaactttctgatatgatgtttgtgacgaagcgtggattatctgatgcttgcaatgttgtggggaaacaagtggatcaggtttcagaaagtgttaatgatgctgcgtcccttgcagtagcaatcatgaaaaagggactgcggagtcgaatatttctgggctgtgacaacaagcccctttccaggcaagaaataatggatgctgttaacaatagtggaaaatttgacacgaagtttggaggctttattggtactgacgatccattggggaagataatggagaattcaaaaactcgggctgagatcggttgggaaccaaagtatccaagcttcaccgaattccttggtatcatcagttaacatccttgcatactgttcagttagtctgactcagctgagttgcaaccgtgattagattgtacatcgtttgaatttttatatggtctgaattggtgatggtgtacatctcagactaattttttattctcacagtatttgagctgtgaacgagacagatgccaccccatcccaccggacaatatatactgtcacgtgagtggatttgtcgatcataa

SEQ ID NO: 42153 - DNA, 1415 bp, Zea Mays
ctcacagctactgaactgtgccatcaaccttttgtctctactgaaccagattctgcaccaagaaaaggtggagatgtaaattttgaggacgttaaaaagggttgtaactagatatatatttcacatttgttttagcaagatgttggtttgtaactaaggatatatatatatattatatatattataagcgaaattaataatcaaatatgccttgcaacactactcaaatattgatattccctacaaaaaataaatgtagagaataacacatttaaattcccattgtccatatggtagtgttcttaatcacttttatgctttttcttactgagaggttcagaagaacagggagaaacatgagaggtataaattatatgggtgttccttagtctattatcgcttaatctcaggaggtgatcagaaggtttaaaacagatgcccctaacaacctaatagaattaattcattgctaacctattagctaataaacttggaaagaaaccaacttaaaggtacaacaaaccaatcaaatctgtaatatgtaggcttatgttgaagccatgctaaaagtctattattggaccactggctcacaattttcagataccatacaagataaaagaagacataagtgattcaaataatcgtgcacctatttcattattgtagtagcgcgatgatacatgtatgattttatcttcttaaagctgtaagactttcggctcagtgtaaaattcgggtttcattcctcataatatgttgagtatgagaatgattaattcgtttttcttgtttcgaggtgaatcccgggaatggttcattggtagtgagacgatcccaagcatctgggacaccttcactcaccaaggttcacgaatttaagtttttagttatgctacttagaagacaagtgccttgtacagggtgtacatttaactcttcgtcaatttcatgtcctcaggtcatgtactcattcctcttcaaatctagtactgctttctatttgactaggtttcaatttttagcaggaacactttctttacttccttcgtcaactattatgcttcaatcgaggccaagtgtctccatcttacgtctgcttgaccactataggacatgcaaccttatggctgctatagtagctagttatagtagctttggatttaaagttataggattattttcaatttgcatctgtagagagtggagagcaagaacaagaagtgaaatagtcgacatactaggactgggagtctgggacgagtgggattatgtttaatgtttaatactttgagttggagttataggatttacaaatatatgttttgaagttatgattctctatgggatgaaatatttgtgttggacaaatatgtgatgcgtaatattccgtgatgacatgaattcatatgatg

SEQ ID NO: 42154 - DNA, 637 bp, Zea Mays
aacttctccggcccacaaggccacaatccaagccgaagaaccctaggcggtggcggcgcatcctgcataccccaccgtagtggcagcgagccagcgacctcgagtagcagcagaggctccgcaggggcgaaaaggtgtgaagcttccttcggagatcccagtagcagaagcaacgcaggcatcggcttgcgacaggagaggacggagatgacgcagaagcagaccctgttcaaggggcagagcaagaagaagactatccctcccaaccgccacggcaaggcgcctcatgttcgtaaaggaactcaccaagttcatcaaccagtgcaacgaaataaaagctgcgaatcttgctagcaaagagggcggtgacctcaacatagtgaaggcggatggtgaggaatctaaatcaaagaaataggaagccagaaactgaaaacgagtgtgtgaaacgtgatgcgtggtaaactgttaatgcgatgtattctgctgaagaaaattcagttccgtatggctgggtagatgaacatgtttagcgcaaagtgacggtgtaactgcaaccggggtaatggcttgcaagttttgttctgtgccatctctatttctccaattattatattgatgaagtttgtgtgcaata

SEQ ID NO: 42155 - DNA, 1331 bp, Zea Mays
gcctgagtaacactaggttagtgttgttaggtgacgtccacttgacgatcatccttgtcctagcacttgattaggcgggttcgtccatcagtatcttcaggcggagtagtccggccgcacttggggtcgacttggatcgtcttccgtatcacgtgattaattaacgtacctcatgagatgcacgatacatatgtatgagcacaagtataacgaatagattatagataatctactctaaaaaggatgaaacacttaaaatcaagcattaagcaccatggatatcatagcaggacatcgactacatccattaaccaaagtgacatattaacactagaacatctatttttattcctagcttgttattaactctttaaactgtgtaacttaattacttgatttaccgatttatctaaatcgatcatcacaaaatatgtatgctaaattaataatatttatggagactaataattctatttactctatttatagacctagttaacgggaatacgaatcaacttaccctgactaattcgatgcgatagtcgcaaacacgactacaggttccggttgacgtcatttaggggccttcttttcttcgataatcaattgctgaagatcttttcctcgactgaataagtttggcgaatcgaacttgagtcgcacaagatgtccgagctttttgtcgcgcacttggtgaacaccatgttgctggctccatcttcactcgactcttgaaattttttggcgacacgtggaacgacgacgacacaggagggtgacgtatatagagctgcacacacgacgcgacaaactaagtcgcgacgagctagaaaaagattcggcacgcgagctcgacgcgcacggatttttgtttcgttgctcgacgcacgacatgattgggaattaaagccgagccgagtcgagagggctggagctaaagcgccgcgatgggcaaagtggagcacgaccagcgcacgtgacagagggactcggctgagctcgcgcttgagcaggcagggcgagcaccagaaggcagagcgctgcgcagaggcgagcagtcggcgtggggctaggagaattacggctgcgcgcagctggaggagcagagcgcgtaggggagctcgcaggcctgatgaaatccgagcagaggtgcgcgcgtatggactcgacggcgaacggcggccatgggcgagacgcgcggtcagagcagaggagcgcgcacggcagagaagaaattcgagctggggctggggcgagttcgccagggagtagaggaaatccgagcgcaaggaggaagaaacagctgggcggccgagcgccatgtgggacgg

SEQ ID NO: 42156 - DNA, 567 bp, Zea Mays
ctcatattataacacaataattacaaaattcataaactaattgaaaacacgttttgaaaaataaatcaaaattttgggttgtcttcaaccttggacgaacagacgacgacgaggcatggcgcggtcgacagcggactgcgagggctccggcgcagctggggcactgcgtgggcgtggctaggctcgacggggctcggacggggcacggctccggcgatcgaacgacgaacgacaagggcacgacggcgagctccgacggcgagctttacggcaaggggaggaagaagacggagggggctcggctgcagggagggagaggagtaggggctcaaccaaattttatagggaggcacaggggagaggacagggcgccagcgggagagaaaacggccgacggctccatcaagcgccatcaatggcgccgacggtttcctgctcgtaaatgggcagaggaggaatggggggaggaagaaacgaccgccacttgatgctccataacgcagggtggtgaaacgacgacgaaaaacggcctggatgcggtcgaccaggcgccttggcggctgcaag

SEQ ID NO: 42157 - DNA, 1618 bp, Zea Mays
gctccagcgccgcacgccctacttctctccctggcagccgcgccctggatcgcgtgctccctgccggccgagctccccatggcgcgcccctcccttgctcctccagctcggcgctcctctgctcgccatggctggcgcgcgttctccctacgcccggccgctcctctctttccctctctgctcgccgtggagcttccttgccggcgctcctccttgttcagctctccagcgcgagttccgtcatcccctgtcgtgaccctgcagtggagctcccctgcagcgcgtcccttgcttcccatgtcacttgccctcttctcccctctgctcgctcgagcccagccgagctcgcctcagcccatgtgttaggagaggtgagtgagtctctggtacgtgaggctatgtccttgggtcactagtcagtggatcgtatgtaatagtataagtacgacgatggttgccttgtgcttgggaggaaaaactacgaagaaacggaatacagataagctctctgctgtctccttcccaacctaacctatctctctctcgcctacctccttctcctcttctccaatccaatccacttgtgatctatgtgctaacaattggtatcagaggagtcgatcctcgatctagttccatggatcccgctgctctcaagtttctccttgacgagatcggcaaaaagttcgacgaggccgagtctcgactcaatcggcgcttggccaggttacagcagcccgcacgcggagacacgccgtcctcctgcagcaacaactggggcgtcgtcccctttccgatccagtccgcgactgttagagccgaggtggtcgctgacaattggggcgacctctttggcagtggagacgactccgataagcagcgcgacgaggaacccatcatcgccgacaattggggtggcctgttcgagcagtctgcgcaaccttgggaggagcgcgacttcggtatttcctacgcgaccacgcccagtgctgcagtctccagtaccgatgaggtggaggccgtggtagcacgcgagatccatggcgaagtcactggagcagaggttgcaccacagcagcccatggcgtttccacgcttgtgtccaacgcaaccgacggatccatgtcggtgcaccacgtcgggcgtggcctggagcgcggcaccttcaccgacctcctcgacccggacgtccacgcctgacccatgaaagaggcgcaccgccttgccgaggtctccatccgctgctgcgagctctggcgcaagtaccgccccgatatcaccactttcgtgctctccgagctgggcatccgccagtggtgaagtccctcgcccaccacagtatcttggggcgcacctgctgcgaggatgatgaggttttccacacatcggcccccaagtgttcgacagaatgcctcattcaggacatcgacttgttgaagcctatcagtgttgcgccaatgtccacgctcgtgcctgctacaccaagagcagcggtcgagcttgccaacagcgtgttcacaagtattacatttttcccagacagcctccatggccaccacctgtgcagtttgtgcttcatggtgagattgagcaagaatacatatggcgagtggaagag

SEQ ID NO: 42158 - DNA, 323 bp, Zea Mays
aatgaagagggctagtgaaaaccaaagtttagacaaaatagctgtaaaatagtatgattttatgctttttataatattttagcttatatacataacatatatatgtatatataattgttttgccaaaaataatgagtattcaatcgaataaccttgcttgcatgtaagcccgccactgaccgtccattctgcaacggcccagctagagggtggcgcgcaggacgtaacccaggagcgggcggggcacaacgagttttttttaaccaagccgaaattcgccccaagagggatcgaacccaagacctgaaagtgctacttcaaag

SEQ ID NO: 42159 - DNA, 4725 bp, Zea Mays
ttcagtcagtagccatctaaacaagcccttacagtattcgctatttcatattgaattttcctcatattgtagagaaaatcgcagctaatctgttcactgtggatgagttgccccatggtttgttcttaatcagaagaatggacgtgtgcaccacagtttagtgctaaatcatatggatataggagagatgtgctctctcctgtcctaaaacagttcatgttctcgtttttctattctgacagttcataagcgccggtcttttagatgcccactgacctggacatgttggtagaaatactgggcaggtgggatcaactccgatatttggtcaatttctcaaccactttctgttaatacgcaatttttattgaaaaacataatgacgtgcaatgcaaccaccctattcaatattcgtatggttagcaaaccatacgatcaatagaagatctttttggtagcactaaactacctacatacttgcatgcatgcgtcctaatccttgagtttgagtcaaaattaaatcaaaaattgtcatgatcaatcaaacaggaaagaattgacattctatagtttgcgtaggaaagtgtctctgtgtgttttctttttgaaggatcaaggattgaaggattttcctgcttgacggattagcacttcagtaccagtagttaagttattaggagcagtagcaaaaaggggctatatttgtttagggcttgttcgttttcatctcaatccatgtggatcagaggggtttgagtagctttaaatctacaataggtcaaaagctctactaaaatttttcaatctcatcaaatccatatgtcatatgaccgaacaaggccttagcgggtagggcacatcatcttaacgccaaactgctgcctcgaaaacgagtgtatagggcacaacatttgaaccacatatatgatatcaatcttatcaatctattgtgttaattatgaatcctgcatcaatcaaccagggcccggggcacattttcccaagccattgacaaatgttggtagatgcaggattcatagttacagaaactatgtggttcaaattttgccagtatttgactcatcacatttttcttctctatttcagttcttctagcagttgaagtagtgttttcttggcagatgttcgcctttaggacattgctgcgaggggaatcggatatgccacaggctgcatgttgttggagtttctatgtatccccatatcaaatttgtttttccctaatcagggaactcaattgttgtactgctcatctctttcgagaagatcacactgtcgcatttctaatgtttggatctttttgcatagtgcgagtaatagcaggagctcttccgaaaggccttcacatgttaatcctatcgaagaataacatatcaattattgaacgcctcagagaattgacacgattgcgcttgttggatatcaactataataggatatctagaattggccatgatcatctgttaggattggcctcatgttcctctttgaaggagttgtatctggtcggtaacaagatcagtgaggtagatggtcttcaccgacttctgaagctcaaggtgcagaggatgctaggaaaatactcaataattatggtacatgtccaattctaagtatggtatattgtgctctaatatttttaggcatcattgtttctgttaaatactttgcccatggttaaggttatgagtgcattggttaatgaaatgtatgacattaaacggtggctgcgtggtgttccatcgtttcgccttgagccattatttaggcgaagagttccacaattgcatactgcacttgaacatatatagtactcatgaagttgttctacatcatattggatttcaatgcttttttatcagtgacagttttctcttttttggtgagtacaataattgtatttttatcttgtaatagattagttttattcatacgacaagcactatgcactgtgatatttgttgatttttcctttacctgccccccttgcactttctaattaaatgtttttgactatggaatggatcttttccattccatgtggtttgggggacaattgatgtgctttgctttgaagacagttgtagtggtcatctgattgtgaatttgtggtgcacaagttggctatgtgttttttccaagaaaatattttcttaacatagtccagcactaggattctcgagtccccgatccccagcacaaacttgctgttgtttccacttttatcgtcaatagttgttagtacttactgattaaattcacattctttaatatatgaactttattgctttctgattgtgcattcagaggggcaacagtacatcattaatccatcaaatgttcaaaaatgtgcatccataggtgcaacattataacagggatacagtcactgctacgtacaataattttatggggctactgtaccacctgtacagtttttcatgatctgtttgagggaccttaacctaggtactaggcaaattttaccattgttgtgaactgactataaaactccttttaaggtggccttaaagtaaatttaagcatgtttgcttgaagccgctcagcctcagatcatcttaagaggttgtggatttattgagtccaacacaagtttggtgttcctttgtacagttttactatggagtaccagactacgagtcattgtttgtgccatgggtccttgacctttgtaactaattcaagtcagatgatatgtatctccttatgaaattcttttctcaactaccgtgatgatatttcaataattgatttcagtttcttctatgcattcaaagtagccaggctatcatgacggcattaagttcttgtatttaaccgttcgaccaaatttgtccaattgttataggtatctgtgaaaatccatgaacaacttatgtgttcatgtctctcattttatgtccttgcatgtcaataactataggtatctgtgtttatcacatatacaagctaacaatatacagttatgggtgagacaacgtcttagttcactgatcacacacatatttttgacagtcaatacttgcaataatgtgatatttgtaaactaatttttcctcaaaaattgtaacctgcatcaggcaaatatgagaaactagcatttgttgatgtttgaagtatatttatgtggatttgtgacttccttacatctcctctttcaaacaattggttcattattattattggtatggtggtgttatcgccccatttgcattaagctgctcactaagtcaaagtagtaaaaagccatggctgttgttacctagaagatgttgtgtatattcaaatcatagtgcttgtgttttgggctggagatagcacaaaataactactaaaactatctattatcaagtgatccatttgcagttttttcaatctgacactcacagactcactggttatatttcagagctgggaagaagctaacgatataccatacttagactcactggttaaggttatgagtgcattggtttgtaaaaaaaatatttcatggtcaccacagtaggagcaacatatccctgtttagcatattgggtaataactgtgctgatagtgtcacttaaacttggtaaacctgcaactgtaaatactgatacgtggactataagttttggccgtgcagttgctgtgtgataactattttgagttttcctaaacagtttcttacctagattgtcgtgaacttgcggtgtagtagcattgtacctattttaacttggccttgtttgtttgattttgtaagtgagggttttaatttagttgctagctcgatgaaagactatgattcgcaagactggatattttcctgcttatgaagaagcggtggcaaccaaattttcgaagtatgtgagttaaaaatctcgtcatgaatgaactcatgttgtttatagatttgcactggaatatgggcatgtagtgggcactactgggctaggagaagatgaagtgtttgtttttaattgcgtctttttgattgctttggcatgtatggctggcaatgtcatgttttttcatttttgtccacttcaatacacatgaaaccgttttggagactaattttgaagtatgtttaaacaattattctatttaaataagatctgcatatgtgatatattgaaaccattttggcaatgtcgtgtttttttatttttgtttaccatctgcatacctttacaaatgtcattttggttattttactgaattatattatatgccacatgactcttttattatttcttttttttaagaaagtcggggccattactcagatggtaaacaaacttgggccatgtaaatggtcgaccttgcctaaactatacctggacgtattggaaagcaatgctgggaaagctatgccatgaaagatatttgtagcagtgttacatgatggcatcaagtgctgggaaaatatttattaatttatggttttgtttctatggaatataggagtcatgattttgtgcatttgatcagagactacattaactagaggatactttctttttttcaaaattacaaaaacaatactaagtgtacctattattgtctactcgtctcatgatgattactatgtagataaattctctaagctatgaacagtgaccaatgaaatatattcatttgcatacagttctcaaactaatgtattcacgtcattatatattgtgccagctttgtcaa

SEQ ID NO: 42160 - DNA, 839 bp, Zea Mays
ttaaattattatgtctacaagcttatccatctgctgtgtttacctgaaatgaagatcttcatggatacaattagacttcttgctgaaaaaacaaataatctacttgaagagctctggaactacattgagaatgtaaaacttatccagtctgcggttttactactggctgcttaggggaagatctgtgggggttgttcctcgaagataaatggcagtaataagaaagatgagtttgacattatcaatgagcgtatactgaggttttcatttgtcttgagatgggagaaaggttcaaatggaatgaccagaagcttctaaaggaaaggattgttcttgttgattgcactgggttgcttgttaatataatttctcgtactggcgaacctctttctgcatatattcagtcactttcagaggtacggatttttcattatgttgtagcttcagtgcctcatacgcctgttgcttaatattttaaaaatatgttctctactattgttagttgtgttattttaaaaaaatacgtgcacaaactttagcaagaagaatgttaatagttctcatgccaactgaaaaataatagtatatgttgtataattgtatttgacaactttgtaatcagactatcagagtttattcttttaaacaaactctacagaaatgaactttataaaagctaagacttccaccagatcaccaattgttttgcaaccggtcataatctggttccatagattatattctgtttactttagagtttcaacttcacattagaatttttcatatgagtatgcttcaccaaatggcttctcaggaaaactgaagagtcctattgtgtt

SEQ ID NO: 42161 - DNA, 526 bp, Zea Mays
gtttaatgctcccgcatttaaaacgagcagccactgccacacaaagacagtcactggttctggcagtggggcacaccgaagattcgaacaccaagaaataaacggaaaaaagaaaaggatcgtcaaaatggcacgcaggtccaatccagcccgtcgcgtccgaccacggctgaccgcgagtgcggacggtgcgcctggctgccgcctgggacttgacgggcgcacgccccgctctcgtactacgcagtctacgctacggcggtgcgaggccggatttgccatcgctggggtcgccgggcggcaaatcgatgccggccacggaggagcaccggccacctgcgcgcgcggcgcccgccaaccgcggcgcgaaacgtcgcccccaccggggccgatggcgacgcgggccgtcgcgtcctgcgtctcgcccgcaccgcacgcctttcgtttcgtttcgtttcgtttccacgaatcggcggcgacccgaccggagcggagggcagcgggccgtggcaaccggcggtcgcct

SEQ ID NO: 42162 - DNA, 1126 bp, Zea Mays
ggcaaggcttgccagtgtgttgccactcgcaacaggagcactcatgcaaatatgctttaaccacaaacctacggttgaaattgtcccacacctcagcagcatagttatcacctttgataacagttaaatgtcccagacctctagttctagcattcaagatttgtatgaccgctggtaatatccttccatacaatctttccccaatttttctcctcttgtaagagagaatcataatcatctcccttatcttgtcagccaactcaacaacaggcaagtcctttatatctttgatccaattgttaaaaacttcagccacattgcttgtcacataatcacacttgatgtcaggatcaaagtctgacctctgccacttaagcttatgatgtgtttccaaccagctcttagcactagagagcgccgcataaactatagccatgtggctctcataaacatgtttgtcatatgccctagctgctggccacatgtgtccactgctgtcacccgaatatctcttaacaaaattctgcatcagatgcctaaagcattctcttctatcgacttctggaaacacatcacgcactgcatttagcaatcctttgcaagcatctgaacaaatagcaagttttggaagatctcccacaaccttatgtagctgagccatccaccatttccaattatcttctgtctctgagtccataaatccatatgcaagtgggtacatccaattatgaccatccacaccaattgcagcagctaaatgaccattccacctgccatttagtgcagttgcatcaacaccaagccatggtctacaacccgtccgaaaaccttcaatagaaggaccaagtgcacaaaaaaacgatggaaataagccttgcccttaaccaccttgcattcaatttcaataacactatctggcattctcttcatgacctctgccctccaattgtataacagctgaaaactctcttcccatgaaccatataattcatccaaagccttctcttttcctttccagaccgtgtcatagccaattgtgcacttgtgctcatcttgcaacctaacctgtagctccttagtacccatatgaggatattttctgagtatagaaactgccttggaggca

SEQ ID NO: 42163 - DNA, 1924 bp, Zea Mays
ccggccgcgacgcggcccgcagccacggccttccgtaatgtcataactccccttctcgagtccatctccaacctcatccctcccaccccaataatacatccagccggcgccatcaggcccggcaacgcgcaagcggggctgaccatcgaaccctagtccccggccgagccgccctccgccgagccttgcggccgctctgcgtcatccctcttagtctccctccgttcgacacggcttggatccgagatggaatcaccgcccctcacagctgaagcaattgcttatacagagaaaaagatggacatggctttggaggatataattaaaatgtcaaagaaaaagaatcctggaggcaagaaacccccgaggcagccgataaaaaagcatccattccagaatggcaactctaataaagggaatggcaaggttcaaagttttatggagtctagatcaaccattagacaaggtgttcttgcacagagaaggtcaaatcttggtggaaatcagttccctgctacaaagcaggctgcgaagaaggctgctgttatgccaatgcacaagggggctatccgttggaacaagccaagtttcatggtgtaatttatagctgctggatgagtgttattttggacaccagcattaactgtctgtgagggtttcattagtgttatttgtcaactattgttggaaggactgaaggagatgtgataatggttagcgtctcatgccactggtgacggatcatccatatacagggacgttacatgcctgagtttgaattggttttgactactggctccttggcagtgttcagtgtttatttgttgaatgatgaatgcagtgtaaatctagggtagtgctgctaattggacaattgttgtatgcctccaagggagtatattttgctactgcctcatattcaagttggctgtatccgtaacatcatgccagttttgagcatcctatcataatctgctatatgctccccttgttcactgcgtcccacagagataatgcttgcctgcatttctactggataagagtaaatcatgtgcaagtaccttagtgcagaggaggcctgtaggtggtgcttttcagaatgccaaggtcaaggagtccaaccaggcagcaccaaggacgatggatgcactctttgcacagatgaaggcgcaacgcttgaggacggtacctcaacagcaggcaaattcttccccctggagtcatttcaaccagcatcgacgtgttcagcagcagcagaggcgaggcagagggtatggtggccgtaatgttggcaaccaatgaatccaactagacatatctactgcatcggagccctttctcttcactggtcttttggaccttggaagaaaggacgccccttggaaaatcaaacttggctttgtttattggaggggtgacaatgggctctaacttggctttgtttattggaggggtgacatcgggctctaaattttacactaagatttaaggatctgattaagatcaggccctatttctattcatttttaaactaaaatttatttagtgtcctactattttgtgaagcgtttggatcgtgatccattaccacctcacctttggacgtggacaggatatgaagcgaagtttgtttgagttttctagttgtgtgcagtctgcttccgtttcagcatgtataatgacatggaaattatttggtcagagattatgatgtcttgtttcttggcttgattagcttcatccccaactaagagtaattcaccttacctagggatgacaacaggtcaggtttagatagggtagaataaatatccgtccgctataatatttgcgaagattatttatatctgtctatgactatactcgcggataacttgtaccggtatccgtagctattcgtttgattggttatctgtactatttc

SEQ ID NO: 42164 - DNA, 592 bp, Zea Mays
gccgttccctgctcttcctcccccagctcgctcaccagccgttcttccgaactcgccccagcccccaaccgccgtgcgccctgcttgatttcccctatgttacacgcccacgcatccgcgtgcttcctgcgcgcgagcttctgcacgcccgggtcttctccctcaagctccagctccatcgcgacccagccgagttctctctctctctggtgccgcgctcctgctgcccgctcctccttcagctcccagccgccgaagctctctgcgcgtgtaacgtaccaacaccagaatttgagatcgcgagcaccgctccccggtgctctccacctccacctctcacgaagtattcactatatccagagttggggtttacaggagttcaagccagtaccggtcggcacagccgccgttcgctcctagcacttccgtcctttcctcctccccctcttgcatacggttcagtctcccttattaatacgatagcgaccaacaggtgaacagaaacaatacaaggcaggaagcctactgggtccaatctggcccaaaaacacggctgttgggccgcacgactcgcttctccttcatctgttgt

SEQ ID NO: 42165 - DNA, 3169 bp, Zea Mays
aaaagcctcgcccgtgaagcgaactccctctccttcgaccttcgttcttccactgcggcctgcgcgacccgtgcagctgcgcgctccacctggccgcgcctggggcccacaccgcctggcatctggagcattgcccccggacttcgcgcggccgcccgcagccccgctccccaccgaaaagcgaagcgcgattgccatccccacgccaccgcgaagcacaaggtccccgccctgcacgatcagcaggacctcgccacgccgccgctggagctgcgcgtgcgcgtgtgcgcttggaccgacgcgcaacggcctgcctcgaccgcccgtgcacgccactgctcatgcagccgtccgcctcgcccccgccccgaactgccgaggtcgcgtgaacgcccactcccctcaccgctcgtctccgtgctatataggcagcccgcgcccctcctaattgtagccctgcagtcacccagagcagacccggatttcgctcttgcggtcgctggggttttagcattggctgatcagttcgatccgatccggctgcgaaggcgagatggcgttcgcggtttctggggcggtgctcggtggggccgtaagggctccccgactcaccggcggcggggagggtagtctagtcttccggcacaccggcctcttcttaactcggggtgctcgagttggatgttcggggacgcacggggccatgcgcgcggcggccgcggccaggaaggcggtcatggttcctgagggcgagaatgatggcctcgcatcaagggctgactcggctcaattccagtcggatgaactggaggtaccagacatttctgaagagacaacgtgcggtgctggtgtggctgatgctcaagccttgaacagagttcgagtggtccccccaccaagcgatggacaaaaaatattccagattgaccccatgttgcaaggctataagtaccatcttgagtatcggtacagcctctatagaagaatccgttcagacattgatgaacatgaaggaggcttggaagccttctcccgtagttatgagaagtttggatttaatcgcagcgcggaaggtatcacatatcgagaatgggctcctggagcattttctgcagcattggtgggtgacttcaacaactgggatccaaatgcagatcgtatgagcaaaaatgagtttggtgtttgggaaatttttctgcctaacaatgcagatggtacatcacctattcctcatggatctcgtgtaaaggtgagaatggatactccatcagggataaaggattcaattccagcctggatcaagtactcagtgcaggccccaggagaaataccatatgatgggatttattatgatcctcctgaagaggtaaagtatgtgttcaggcatgcgcaacctaaacgaccaaaatcattgcggatatatgaaacacatgtcggaatgagtagcccggaaccgaagataaacacatatgtaaactttagggatgaagtcctcccaagaataaaaaaacttggatacaatgcagtgcaaataatggcaatccaagagcactcatattatggaagctttggtcatgcgtcaagtaatactctggatgggttgaatggttttgatggtacagatacacattactttcacagtggtccacgtggccatcactggatgtgggattctcgcctatttaactatgggaactgggaagttttaagatttcttctctccaatgctagatggtggctcgaggaatataagtttgatggtttccgttttgatggtgtgacctccatgatgtacactcatcacggattacaagtaacatttacggggaacttcaatgagtattttggctttgccaccgatgtagatgcagtggtttacttgatgctggtaaatgatctaattcatggactttatcctgaggctgtaaccattggtgaagatgttagtggaatgcctacatttgcccttcctgttcacgatggtggggtaggttttgactatcggatgcatatggctgtggctgacaaatggattgaccttctcaagcaaagtgatgaaacttggaagatgggtgatattgtgcacacactgacaaataggaggtggttagagaagtgtgtaacttatgctgaaagtcatgatcaagcattagtcggcgacaagactattgcgttttggttgatggacaaggatatgtatgatttcatggccctcgatagaccttcaactcctaccattgatcgtgggatagcattacataagatgattagacttatcacaatgggtttaggaggagagggctatcttaatttcatgggaaatgagtttggacatcctgaatggatagattttccaagaggtccgcaaagacttccaagtggtaagtttattccagggaataacaacagttatgacaaatgtcgtcgaagatttgacctgggtgatgcagactatcttaggtatcatggtatgcaagagtttgatcaggcaatgcaacatcttgagcaaaaatatgaattcatgacatctgatcaccagtatatttcccggaaacatgaggaggataaggtgattgtgttcgaaaagggagatttggtatttgtgttcaacttccactgcaacaacagctattttgactaccgtattggttgtcgaaagcctggggtgtataaggtggtcttggactccgacgctggactatttggtggatttagcaggatccatcacgcagccgagcacttcaccgccgactgttcgcatgataataggccatattcattctcggtttatacaccaagcagaacatgtgtcgtctatgctccagtggagtgatagcggggtactcgttgctgcgcggcatgtgtggggctgtcgatgtgaggaaaaaccttcttccaaaaccggcagatgcatgcatgcatgctacaataaggttctgatactttaatcgatgctggaaagcccatgcatctcgctgcgttgtcctctctatatatttaagaccttcaaggtgtcaattaaacatagagttttcgtttttcgctttcctaatgcttgatggctgattgtttgcacttgtttcattccgttgggcactgatggtcttagagttagacaatcggctgcagcgcataggtttcaagctggggggttgcatgtccgactaca

SEQ ID NO: 42166 - DNA, 2796 bp, Zea Mays
tcccctcggagcttggactctcagactaaacaaatccgaagcacaaagcaggggcctcttcgcaaatcccaccaccaccatcaccgcctcccagatccgcctggccgtcctcctcgtccgccactgcggcggtgatccctcgccgccccgcccttgataccgtcgagaggatcgtcgaggacttcgccatggacctcgccatcaatcccttctcctccggtacccgcctccgggacatgatacgtgcgatacgcgcgtgcaagacggcagcagaggagcgcgccgtggtgcggcgggagtgcgcggcgatacgggccgctatcagcgagggcgaccaggactaccggcatcggaacatggccaagctcatgttcatccacatgctcggctaccccacacacttcggccagatggagtgcctcaaacttattgctgccgcaggcttccccgagaagcgcatcggctatctaggactcatgctgctgctcgacgagcggcaggaggtcctcatgctcgtcaccaactctctcaagcaagatcttaaccactcaaaccagttcattgttggtcttgcactctgtgcccttggcaatatatgttctgctgaaatggcgcgtgatcttgctcctgaagtggagcggctgttacaaaatagggaccctaatacaaagaagaaggaaaaacatcacggtgttctgatatctgctgttcagctttgcatggagctatgtaatgccagcaatgaagcattggagtacttgaggaaggtttcaacgaaaaccgagtcaaataagaatgctggaaatgctattttatatgaatgtgtggagacaataatgagcattgaagctacaagtggtttacgtgtgttggcaattaatattttgggtcggtttttgtccaaccgcgataacaacataagatatgttgccctaaacatgcttatgaaggccattgctgtagacacacaagcggtgcagaggcacagggcaacaatattagagtgtgtcaaggaacttgttgattaccttgaagtgagtgatcaagatttcaaggaagacctcactgctaagatatgctcaatagttgaaaagttttccctggacaggctatggtacttagaccagatgttcagagttttatctctggctggtaatcatgtgaaggatgatgtatggcatgctcttatagttctagtgagtaatgcatctgaacttcaaggatattcagtcaggtcattatataaagcattgcaagcatctagtgaacaggaaagtttagttagggtggctgtttggtgcatcggtgaatatggagaaatgctggtcaacaatcttagtatgttggacatggaggaaccaattacggtaacagaatatgatgctgtggatgccgtagaggctgctcttcagcgctactctgcagatgttactactagggctatgtgtcttgtctctcttttgaagctttcctcccggtttccaccaacatcagagaggataaaagaaatagttgcgcaaaataaagggaatactgtgcttgaattgcagcaaagatctattgaattcagttccattatacaaagacatcaatcgatgaaatcatctttgcttgaacggatgcctgtattggatgaagctaattatttggtgaagagagctgcttctatacaggctgcagttccatctgtaaattctgctccagcagtcacttctggaggcccatttaagcttcctaatggtgttggaaagcctgcagctcctttagctgatttgcttgatttgagttctgatgatgctccagtgactacctcggcccctacaacagcacctaatgattttctacaggatctgttgggcattggcttgactgattcgtctcctataggcggagctccgtctacaagcactgacattctgatggatcttctatctattggttcatcttctgtacaaaatggaccaccaacggcaaactttagccttcctggcatagagactaaatctgtcgctgttacacctcaagttgtggatcttcttgatggtttgtcctcaggcacatctcttcctgatgagaacgcaacctaccccacaatcacagcattccagagtgcaactttgaggatcacattcagtttcaaaaaacaacctggaaaacctcaggagactacaattagtgcttctttcacaaatttagcaaccactacattcacagatttcgtcttccaggcagctgtgccaaagttcatccagttgcgtttggacccagcgagcagcagcactcttcctgccagtggaaatgggtcagttacacaaagcctcagtgtcaccaacaaccagcatggccagaaaccacttgcaatgcgtatccggatgtcttacaaagtgaatggtgaggacaggctggaacaagggcaaatcagcaactttcctgctgggttgtagggccacctgtgtctatagggtttgggttgctctttcagacttatgcttgcctgctagtgagttgtgtacactggtagttggtttttggccgtccattatctctttatatatatagtgtacagtagatgacagcgattaatgatatatcctcagttttgccgaaatgtatttttatcttggtgcatatcggacttcagggtaaccaaaattttcacccttttccccgcgtaccaagcaccaaaggaatgtgttgtaccatgatattccccaatgtaattatttatttttctaatcattgtacaagcttattgtgcagacaaattatttgtttttcatgtgcgtttcttcaggc

SEQ ID NO: 42167 - DNA, 1591 bp, Zea Mays
cccgcgcggcgcgatcgcaatcacgcgcaaacccaatcgcggagacaaagcacacaagcaaaagcaaccccgcgggccgcgctagcagtagtagccgaacgaggaggagcctcgaatccagccaggccaggctcctcccattcctcctctcccacgagctctcaccgctcctcgcggcggcaaaaccccccttgaattccctacgcgcccgcctccaatcccgccagtccggcggcgacccagggatccatggagaggtacgaactgctcaaggacatcggttccggcaacttcggggtggcgcggctgatgcggaacaaggacaccaaggagctcgtcgctatgaagtacatcccgagggggctcaagattgacgagaatgtggcgagggagatcataaaccaccgctcgttgcggcaccccaacatcatccgcttcaaggaggtcgtgctcacgcccacgcacctcgctatcgtcatggagtacgccgccggcggcgagcttttcgacaggatctgcagcgccgggaggttcagcgaggacgaggcgaggtatttcttccagcagcttatctgcggtgtcagctactgccacttcatgcaaatttgtcaccgggacttgaagctggagaacacgctgttggatggcagcccggcgccgcgcctaaagatctgcgactttggctactctaagatggcagacgtttggtcttgtggagtgactctttacgtgatgctggttggtgcatacccttttgaggaccccgatgatcccaagaatttcagaaaaacgattgggagaatagtgtcaattcaataccagataccagagtatgtccacatatcccaggattgcagacagctccttgctaggatcttcgtcgcaaatcctgcaaagagaataacaattagggagattaggaatcacccctggttcctgaagaatttgcccagagagcttacagaagctgcgcaagcgaagtactacaagaaggacaacggtgcccccaccttctctgatcaaacagtcgaagagatcatgaagatcgtagaggaggcccgcacgccgccccagtcgcctgctccagtggctggttttggttgggcagaggaagaagagcaggaagatgggaagaaacctgaggatgacgagcaggatggggaggatgagcaatacgacggcgaggacgagtatgacaaacaggtgaagcaagtacatgccagcggggactttcgacacctaataaaatgaagctcctagcaagaccgagttctcaactgatgagatactgtctggttttgctgtagtttgtggtgctaagatgatgcaccctcggtgcttacgtagtatacttctgtctggattcacctttttttcgcatattgtgttaatactctgtaaattatcaaactggcttcctcaatgctcgtgtaattaaatgaaccgttgagtgattaagctagaaggcaagatatactttctatggagtaaattctgaaagtatcaatatgtgttgaactagactaatttaaattttattttcgcaaccattacatactattgaatagtctatttcattctgtgtacctag

SEQ ID NO: 42168 - DNA, 1144 bp, Zea Mays
cttctccgtttctttccaaaactagcgcttactgttttgcacggccatagtctcgatccccaccgagtccagcaaacagcaccaccccaccctcttcgcggctccggcagccgcgccaccatggcttctcctgcgggggctaacagcggggatgaacctggtaccatccccagagatgtgagagtggagaatgggcatggagttgttggaagaagagacgggggtcctgcatccagctattgggacctgttgagagcacacctctctgatcctttaacaggtgttctcatggatgatgcattgattttatcatgtggccattcatatggaagtagtggaatgcaacatgtctacagaatgaaagcttgtggtaagtgtggcatgccaattactgaggccgccattcgaccaaacttgggaacacggggacaatatatatcctggattcaagtgtaattattgcaagaaagagtggaagggggtggtgctacacgtttgaagcaacacctttcaagaaacactggaaggggagcgacggttggtgaagtgactccgcaaccgatgagcaggactggtcctagcatttttggggccctgagcgaaagctaacatggaggcctctctcatctttatatattgttgatcttaaatagttttttaattatagttttaaaaagcttttctcggtaggtggaacgatcactggcacaataaataagatttgatatgtaatagatatattaggatactaattcacctctatgacatgctaaaaaaattctaaatatttccaagactccatccaaaaatccttaccttggccctgtaatttcttggtgccaaggcaagataagagtttgggacaagaattctgactttagaaccatatatagaatatatcaatgatcaatcattagtctgtgagattcaaaataaatacaaatatataatacaaggactagtacactatacactacgagtctacgactataggcatctaataaacactatacactacgactacggcttgggcaaagtacaagacgcagttgaggcgtgagcaaggtatttgaactatgaaacagtggcatgtaatgtatttgaactgctaaatgttgttattggatttgtgataacatttggg

SEQ ID NO: 42169 - DNA, 2075 bp, Zea Mays
gctggctgctcacgcaagagaactgcgcatctttgtatattaagaagaaaaggttgaaagggccttagaaatgcccagatacaaaagaaccccattacgggggccaggaacaagcatacaagaaataacccataaggaaaaaaaccactcctagaaggtcgctctcacagcagccatcaagaatctggcagcggggcaacaagggttcatagtatgatcgagaagttagcccaattcactgatatcagatgttgtctcatcgttggtggtctttcaactaaggttcaagaagttgctctaagatcaatgcctgacatcgttgtagcaacccctgggcgtataatagaccatttacgcaactctctttctgttgggcttgaagatctagctgttgtgatccttgatgaggctgatcgcttgctagaattgggtttcagtgctgaaattcaagaactgattcgtatgtgtcctaaaaggaggcagactatgcttttctctgctacaatgacagaagaaattgatgaacttataaaactttcactaaacaaacctgtacgtcttgaagctgatccttctctgaagcggcctgcaacgttgactgaagaggttgttaggatacgacgagcacgtgagtcaaatcaagaagcggttcttcttgcgctctgtttgaagactttcaagcgaagtgttatcatttttagtggcacaaagcaatccgcacacaggttaaaaataatatttggtctctctggcatgaaagcagctgaacttcatggcaaccttacacaggcccagcggcttgaggctctggaacttttcaggaaacaagaagtagattttctgattgcaactgatgtcgctgctcgtgggattgatattgttggtgttcagactgtaataaattttgcatgcccaagagatgtgaaaacttatcttcatcgtgttggccgcacagcacgggcaggaagagaaggctatgccgtaacatttgtaaccgatgatgatagatccctcttgaaagcaattgcaaagaaggctggttcacaactgaaaagccgcattgttgcagagaaacctgtggctgagtgtgcacaactgattgagcaactagaagatcagatttccatcatcattcgagaagaaaaggtggaaagagaagcgagaaaagctgaaatggaaattgcaaaggcagaaaatatgatagctcataaggatgagatatactcacggccaaagagaacctggtttgctactgaaagggaaaagaagcttttggtagcagctgctaaagaatctttgggtcaaggtaagagtacctctggaattattagtgctaagcaggctgaagacctccgtctgaaggagaaaaagagacgagagcatgagaaggacctaccaaggaagaaacgccgaagattagaggcccagcgagagatgctggaagatgaggatgaagatgacgaggaagcaaaggaaagtgatagagggaagaaactgaagaaaggccagtctctagtggatgctgcttaccgaaaggcaaagtcattgaaggcggctagcaaacggggtcctggtgcaagcaaaggaaagaaagagaagaatgcaagacaatattctgagaagactcctaacaggcatgaggagatgcgtgagctgttccagaatgatatgagtgaatggaaacagggacgctcctcaaagaaaaacaacaatttcgcgcacaaaaaatcaaaagcttttaatagcaaagcaagatacaagcgccgcaaatagaagactcggccatccccggatttatttacattctcgtctcagttttgactgactgaccctgaagaaatctctgggatccagatgtttccagttaccatgcgtttgcttgttgtaaacttcgtcatatcatgtattgaaacttaccgttttctgatgtctcattgatcttgggagagctatcctcagtttcgacatgtgccgttgctggtttcgtaggtcgtacttatctcaaaacttacttgccagacgttgttgtgtggaaacgtcgaccagcttgttatgttcctacgcctcgaatgcaa

SEQ ID NO: 42170 - DNA, 4124 bp, Zea Mays
gtacacccccggtggtctctgtgtcaagtctcaactctcaagtggacagggcgaccgccgaccccgacgcctacactacaccctacccttctacaggccggcgaactcaagtctcaagtgcggcagggcgaccgccgacgcgggcactctacgcaagccttcttctctagggcgtcgtttgccggcgacgagcaccacgaggtactttgtgctaggatagcagtgctatgtcaaaagctccagatgatcatttacaagcaactgagcaggaaggaagtgtccatccaagtcaacaagcagggcaacaacatgtgaatgcagcataccagttctcgaaaacagaactaactgaaggttcaaaaaatgaacagcctgtccaagtagagcaactgagttcccacctacaacaagcatatccagaaattcaactacagcaggctgaaacagatagcttccagttagctgaaaaagaaacagggtattttggtcaacagagttttgcaggcgccaaggtggatgtagcccagccttcagtagttcagcagaatgtaaagcaaactgttggtcaacaagcatcatctggtacccaggatacaaggaaaggaccatcgataccatttaatatgttaattccaatcctacaggcacatcttgacagagacaaagatatgcagcttcaaactgtttgggcaaaacttaggcgtaatgaagtcaacaaagatgatttcttaagagttaccgtgaatattgttggggatcaaatgctcaagcaggcagctcataaagtttttgtacagatgcaagcacagatgcaaagaaatagccaggcaaattcaagtcagcagtctttattctctcaactttctgcacagcagatggcttccagtggttcagcacagttacatgatcagaaaattcggccacctggaccacccaaccaaggccagaaaaaccaggtgtcatcttcacctcaggcttttgcaccaccatcaggtacccaaccgcagaatagtgtacactatcttgctcatgataaccctaaccaaaaccctgatgcaaagggaacaaatgttgtaccaaatcaaccatctagaatgaacacatcagttccattgcaaacaaaggacaaacagcatcaaccaacacagttgcagcaggcctcacaacaaatatatggagcaaataatcctggtgcccaggcttaccctcggtcaatcactggttctcttagatcaccgagtcctgttccagaaacacagccatccatgcatgctcctggaatggctcctgcaaaaatggttcctcctcctactcatccaatgatgcagcacaatgcaactgcatggaaaatgcatcaaaacagggaattgaaaactaacgctccccctccaaatgctaatatgaagcaaaattctgaatctgttggcaaagtgcgcatggctggcacaggaaattcttcagctaaaggaaagcagggaactcctaactctacaccgaatgctagtggaggtacaaagagtagcaagaaatcgggcgggcagaagaaatcattggaagcagcaggctctatgcaaccttcaagaagaaatctggagccccccaggaacaaagtatcgatgaactaaatgatgtcacagccgctagtggtgttaatattagggataacaaagagatagatatttgccgggaaatgctggataaaatgggttatccgaagcttgaacttggtctatctgcaatgccgaaggaccaacttgcagacaaccttgcttataacagcttgaagggtcttatccttagcaaggctttgatggctcagaaagatgccgaagatgaaagcactcggatagccttcgaaaacctacgctcggaagttatatcacttcggaatgaggcccttgagaaggacaaaatcttgctttctttagttgagaggttaaagtctagcgacgctagattggctagtctttctgaagtggaacaaaaaatggagaaatttgaaaagaagaaagaagcagatgcgaagcgtattgctgatttagaatatgctctatctattcaagcgagattgcaaagattcgaagtagaaggactggagaagaagcttgatgaaatcactgaaaacttcaatgtcgaacagacagaacgtgagatatctgataccaaacgattgagagttcaaaagaatgtttaaaagcttcgtcaggcgaaggaggaatgctacaaggttgccatgcaatgttgcaacaaactgaagagtacttttgctaaggttggcgcattctctactaaacgagactttatccgtggttatcctgacggagttatcagattgattgaaggcgaggccgaagcttttgatgaaatccttagtgataggggggatttttgtgcctgcatcgacgcccgaggagctatctctctgctcgaaaaagctggctatgagcatgtgaaggctgtaattcagccagaattctcagtttcagcgagtgatgtcaaggatccttcagccgaaggcatcgcctttagtggaaaattttattctgaagtatgggtgaatggtggccgaaaaatggcagatgaggctattagacaaaatgaagaagaatctcgtactgctttataagaagtaaggaaagctgaagaagccgcagaacgtgaaagacttatagccgagctttctccttctccggagccgtacgaccctgaggccgatccagccctgaagggcgctcttgatgtgattaggataacaaatgaggctgttgacgaagctgtgaatagactcttgaacgaagctgctgaaaaaattctgaaggaggatgaacatactttatatatgaaaacacttgtagaatttttgtgtactgctctgttatgtacttgtaataaatttctttgtggagcgtgaaatcttcgtacgtaccgtttttgtgccacatgcgaaaaaatactttcccttttttcacgcttcataaagaaaaatatcccttttcagccgaagtgacattagtagactcgaaggccttgccgtagatcttgcataagaaatacctgttcccgaaaccgtagatctttgcctaagaatatcgttgccgaaggcatggatcttgcatttttgaaacatcctttcataattctttgtcaaaaataaacttaacctcaagagttagccaacatgtttgaaggggcaatttccttttttccaatgttgcggatgatgcgagatgatgaatgatgcgatgctatgcaacatgatgcaatgatatgatgcaacaaatgttaacgcataaatgctttcgtaaaagtaagactctgcatccccttaggaacgactttagagtctcttcaccttttatttaggtgatattttagctctgcatccccgtaggaacaattttgaagttaagctctgcatccctttaggaacgtctttgtagcttcttcatcttttacttaggtggcattttagttccgcatcctcgtagaaacgactttggagctaagctctgcatccccttaagaacgactttgaagattattcaccttttactcaggtggttttttagctctgcatccccgtaggaacgactttggagctaagctctgtattcccttagtaacgactttaaaacttcttcacattttacttatgtggcattttagctttgcatccccgtaagaacgactttggagcttcttcactttttttgttacactcgatggtgtaactcaatatttattacaacaggctgaaggttgtaccttctcaaattgtcttttaggtagagaaataaaaccaagagaaataaaaattacattgaatgtgtatgaaagttttttgattgagcccctctgtcgcttcagtaaatatgtcttgattctggtatagtgttgttgactgtccgagcttcagactcttcacgtgcgtcgcattgttgctggatttgacggtgcccttctggttgttgattgcgagacgaagttggagccatgattggtggtggtggtggtggtagggcccatgcagctgggtagtggcttgctgaagctactgatactgtgggttgttgattgcccacatactcagaaatgtacggggaatagcacgaagtagtatgcag

SEQ ID NO: 42171 - DNA, 3414 bp, Zea Mays
tcgtggcccacggacgtgtaggaggggacacgccgccgggcctcactaaccgcaggttcgggagtactccggaacccgccgccgcatccacacgacgccacgactgacgacggagagccccggtctccttccacggctccaccgccaccaccccgcataaaaaaccctacagctcgtattcgcctcatctcgcagcagcagcagaagaacaagggtatggcgaaggatgggggtcccgactggaacggcctgctcaagtggagcctcgcccacggcgacggcaccaacccgccgcgtgctctcagcgaggaagacagaaaatggttcatggatgctatgcaagccaacacggtagatgttgtgaagaggatgaaggagatcactcaggtgatgaaaactccagaagatgtcttgcagtctcagggcgtgacccctgagaacatcgaagatatgttggatgagctacaggagcatgttgaatccattgacatggcaaatgatctacattctattggtgggctggatcctctacttggttacttgaaaaattcaaatgctggcatccgagcaaaggcagcagaagttgttagtacaattgtgcagaataatcccaagagtcagcaacttgtcatggaatccaatgggctagagccactgttgacgaacttcaaatcagatccaagtacaaatgcacgcacaaaagctttaggagccatatcttctctaattcgtcataaccagcctggagtttccgcatttcgattgggaaatggctatgctggattgaaggatgctcttggttccgatgatgccagactccaaaggaaagctctcaatctcatacaatacttgctgcacaactacaaggcagacaggagtgttgccacagagcttggtcttccgaagctgatgatgcaccttgtgtccagcgatgattccttagtgcgtgaagctgctctaggcggcctccttgagttggcgcgggacaagacatctggtaacgcgctacctgaccaagaaaagctgaaagacatgctcaagagccgaatagaagggatcagcgcaatggacactgacgatctccacgctgctcgcgaggagcggcagctggtggattcactctggaaggagtgctacaacgaaccttcgtctctcagggagaagggcctcgtcgtgcttccgggagaggatgctccccaacagccgccaccagacgttgcagggaagatgtttgagccaccgcttcgtgcgtgggcggctgcaagacctgctcaggaagatgactctgactctggcagcggaaagaaggctccgccattgctgcttaagttttgacggccttcttatgccgatactagttcttaggctccaccatgggtgttgaaagctgaaagatcagatctgatggatgcctgaccttcttcgaacctcagttgtggttcttgtaatttgcaccgcatttctgttctgagtatgtttttatgagaagactgggaagatgacagacagatactgtatcacgtgatgctcgtaaattaacactacatgcgaattctcttgctcgattgctcattttctgatgcttccatgattgctgatatatcttaatccgatccgatagttataatttcacgggtctagttctagagatgctgaagagcttgcgcctgcttgcaggcatatgttactttcagcttgaaggatggccgtccgattctcgcgttcgatctggacggtgggtgattttgcctactcccgtccgtcgatgattcgtcgcgagccattcagaaggcagcaaatctagctatctcctctgcctcctgctggcggtcctgctgcgccatggcgctacagctgcgggccgccgctctctgtccgcccctgccactcaccgccttccatggccgcctcgttgcaccttggcctccgcctcccttggtcagcatagctgtcgccgccgcctccagcccgggtccctccgcgcccctctcctgccgcggcccggcgcctcgctggcgacgttcgagcgtgagggcgcgcaccggggccggcggcggcgggcagagggagtccccatacgaggtgctcggcgtgtcgccgtcggcggcgcccaacgagatcaagcgcgcgtaccgccgcctcgcgctcaagtaccacccggacgtgaacaaggagcccaatgctcaggagaagtttctgcggatcaagcacgcttacaacactctgatgaactcagagtcacgatccaagtacgcgagcagcagttcggattcgtcctggtcctccagctcccgggagagcaaatcagctgctgcagaagagccgttctatggatttgcggacttccttaaagatttgcaaacagaatttcagaactgggaagctgggttgaattcggatcagaaacctaaaagcctttgggaagagttggcagcaattggcgaggaatttgtagagtttctggagaatgagttgaagattgatgactcgagaccagaggacgtcactggagatgacccatacacccagtttggacagcaggcaaaaagcgctaaggatgacaagacgtcgacgaacagctttgatgatggtctttctgaaatagaggccgctcttgagaatctgaagaaggaactcggactgggctaaaccgttgatgtggcaactagaggtgttgctgctgctactgacttagttccttgttcatacaaagatacaagatctggcatatacctagatggctagcaaaagctaagtgccagaaagccaaaacggcctataatttgggatggagaggattatcaatagctcaagagcttctttctgaattctaattgttcagcgtgttcggaaagaaaaagggacaaatgtttgatcgcctttagaattttgtgggtagaggcgttctgattttgtgtgatgggggggtacaaaagaaaaaagttttgcaccgatagcactgttggggaccttcggcgtccgaaggtcctcaaaaactggatttaacagtatttctgtagtacaatgtgtgaacaggtaccctcaaactaaagtcggcattgcagcagaccggaataatacgaagcttgattcagagccgaaggtgctgagcaggaaagcttcggcgtaacagcaaagagtggaaccgacttaaagatgaaaaggctatccagaccccgatagattactatagagttattatcaaatgtaaagggcatgaatgtaattttgtaagggctgtgtcccttgtctataaataggtgaacagtatccccgtactgttcacgctgacttggcattcgttttttgcgccaagcttgtactgttattcccttccgattgaaggtacacttgtaattcgacaatgtttctgtttatgccctatcataatatatgattgcttatattgtcttt

SEQ ID NO: 42172 - DNA, 2017 bp, Zea Mays
gaaggtgccgcggatctcccgcccttctccccacaccgtctctccctccgcctgtgctccacctccccgtgtccgcgcatggaacacacccgcggatctcgcccacgatgcacgcctccaccgcgcatggatcccgcccgctcgcccggtctcggcacgctctcgcggtggtcctcgcccctctccaccacgctcgcgaggcctccgcccgcctcccccaccgcgacaggtaggggaagcaagcgagctctgtcggtgggggagctgctggtggttgtaagtgtagagcgcgcgattggctgccaggatggatcacgtagtcgggggcaagttcaagctcgggaagaagatcaggagtggatcattcgggaaactttacctcgccgtgaacgtgcagaatggcgaggaggtggctgtcaaactgggtggaagctgccggcgtgaagcactggccaccgggtgctgcacgtcaacggccaacagggggcaccgtgcaggtgggcagaagcagccagcgacaacagtagggcacagacgcctggaagagggagaagaaaagggtgaattggggttcatccttgatggctttcctcgaaccatgagacaagcgcaccaacctcggcaggctgggttcgctggcgacgacgccccgagggccgtcttccccagcatcgtggggcgcccgcgccacactggtgtcatggtcgggatggggcagaaggacgcctacgtcggtgacgaggcgcagtccaagaggggtatcctgaccctcaagtaccccatcgagcacgggatcgtcagcaactgggacgacatggagaagatctggcatcacaccttctacaacgagctccgcgtggctcccgaggagcaccccgtcctcctcaccgaggcgcccctgaaccccaaggctaacagggagaagatgacccagatcatgttcgagaccttcaacacccccgctatgtacgtcgccatccagaccgtgctctctctgtatgccagtggccgtaccacagatattccgtggaaaagacggaaggcctgggtgtgttcagaacacatgtgctcacagggcttgcccgctgcatcttggttcagtgaacgagggtaggatccagtgcccttaccatggttgggagtactctactgatgggaaatgtgaaaaaatgccatcaacaaatatgctcaacgtgcacatccagtcattgccatgctttgagcaggaaggaatgggggtgcatggcctagggggaggatggcgactaggttcatcgatggcggcaagcagctcgtgttcgaccacgcgacacagttcttcactgcgagcatccgcaccgctgcaggtgctgcatatcatcggcagagaggatcgagttcagatcgatgatgcaaggcggctgcatcgtcgagctgtaacacctgcagcggtgcggatcaatgaggggatttttttgtacagggccaggatgatgcctccttatgggacaccaccaccatatgcagcaatgtatgcacaaggtacaccataacagcaggcaccaatgccaccgggttcacacccatacagttcttatcctatgcagtcaccaaacggacagttcaaactccaataagaatctcttggctgctcacctgtcgcatcttccccgattcaaaatcgtcctggtcgcatcttccccgattcaaaatcgcccaattttggagatatgtgacaaacgccatgccctgtgcattagagaagatacagaatcgccatgccctgtacaagacagtgagccaaattcttgttcattttgcactatgatacatattgattcattaggccctaggttggaggttgtgactgatgagttgggaagggattacttgattggtggtgtacaattcttggactggatacatgttccagtttttggtccattagttcaggaattgtttcatttacatgtatattcagtacactcgtataatggaaacaggcaaatctctatctcattctttggttattgtgtta

SEQ ID NO: 42173 - DNA, 986 bp, Zea Mays
ctactaactaaagtaacacttagatcttacaaatagtaatatatatatatagcttggtggagctggtggtggtggaagaggtagtgggtgttgttgttgttgtctttccaaccgtgcttatctcattgcttgtcgcatctccaaccggtcctgtcgcatttcctggcattcttgccttatctgattttgcatttcgttaaccacgtttgtcatatgttgtagcacttctgtcatttgttgtagcaccagcattttggcggcaatcactggatcggttccagccggtggacgatttggaggattcatttctgtttgttgttgcctgatagtcctcccttcctggtattgaccattagagttagaagcatatggtaagatagttttgcaaggaaaattatttggtaggcagaacgaataggctaatagctggttatgaactgaagattctttggcagggcttaatttgttgttttatatcaagcttggggataactagtcgtataaggtgaatatccaaaggtaaaatagtatctgttaggatgagatagatatgggtgagatagacttacatggtgtaggtcaaaatcttgtctgatgttaggtggggatagataaattatgcaacccatcatgagtctattggctggattagcttttttctcatggttgagttggtataatgctaagttaagttaacacctggatagtagggtctaatctcttctaccagtatcaccgatctgtttaagtagaccacattagattagatcatattagattatataatcctatttaagaataccatttagttgagcatgtcaagctgactttatctttacgaagttctagtattttttctctaagtggaacttccaattagtatatatttttatacacctaaaatcttcatgccattaacaggtgtggcatagaaaacaatggtacatcatgttttagctattaggtgagtgttgacatagaatgag

SEQ ID NO: 42174 - DNA, 1237 bp, Zea Mays
gggggcgccactgcttctcttcaagacccgattccactcgcgtgtctgcccgccggccagacctcgaggaaacaaggccttacttccttgattacatggcgtcgccggacgaccccgtgctctccgcttgcaagaaaaacttgagccacttcagaataaaagagctcaaggatgttctacaccaacttggactttcaaagcaaggaaagaagcaggacctagtggacagagttatggcagtgttgttgagccagcaagatcaagcctttgaaacgaatggcttaccaaaggcaaaatcagcggtgaaaatagtggaggacacatttagaaaaatgcaagaccctacaaatactgttgcagtctcaaggagccacgaattaggagacagtgttacgtgtaaaaagaaaccggatgattctgctcaggcagttaaggttcgttgcccttgtggtgactccaagccaaatgattccatgattaagtgtattgatccacaatgcaacatatggcaacatgttggctgcgtcgtcatacccgatactgagaaatccgcggacaatatttctcctgaattaccttcctgcttttattgtgaagtgtgccgacttagcagggctgatcctttttgggtcactgtgaaccatctgttactccctatcttaataggaccctctactgtagcagcagacgggtcatacactgtacagtataccgcaaaaagctttcagctttcaagagctaatagagaaattctgcagcaagctgaatgcaatattcaggtttggtgtatccttctcagtgacaaagtaccttttaggatgcactggcctttacactctgacatgcaagttaatggtatttatgttagggtggttaacaggcaacccacacaaaagttaggggccaatggtagagacgatggtccactaattacctgaaggagggacctaacaagatttctctatcaagaaatgacactcgtactttctgtttgggtatcagaattgccaagaggagatctctagaacaggtcctaaatttggtgccaaaggaacaagatggtgaaaacttcgatgacgcccttgcacgtgtgcgtcgctgtgttggtggtggagctgaggcaaataatgcagacagtgatagtgatatcgaagttgtggctgattttgtctctgtgaatcttcggtgccctgtaagcaatctggttattactgtggatgctttagatcctcaatga

SEQ ID NO: 42175 - DNA, 4081 bp, Zea Mays
gtagcacgtgagcatagcttcagctggccactaaaccctcgtcttccccttccaagcgaatcccattccctacctttcgccgccgcctacgcaccatcgctcgaaaccctagccccattccccgtctcgctcggaatcccagctacctccagcgccgccgcgactgcaggataggaggccatggacgacgtgtgcgaggggaaggacttctccttcccggagcaggaggagggggtgatcgagctgtgggcgaagctcgacgccttccacgagcagctccggcgcacggagggcggcgaggagttcgtattctacgacggtccccccttcgccacgggcctgccccattacggccacatactcgccggtaccatcaaggacgtggtcacccggcaccagtcgatgcgaggccgccacgtctcgcgacggttcggatgggactgtcacggactccccgtcgagttcgagatcgataaggcgctcggcatcaccaaccggcagcaggtgttcgacctcggcatcggcaagtacaacgagacgtgccgcagcatcgtcaccaagtacgtctccgagtgggaggccatggttacacgcacggggaggtggattgacttcaagaacgactacaaaaccatggacctcaacttcatggagagcgtctggtgggtgtttgcccagctatgggagaaggacctcgtctataggggtttcaaggtcatgccttacagcacaggatgcaaaactgcactgtcaaactttgaggcagcactggactataggactgttcctgacccagcggtgatggtatccttccctattgttggcgatgcggacaatgcagctcttgttgcatggactacaacaccctggacacttccaagtaacctagcgctgtgtgtcaatgccaatcttacatatgcaaaggttaaagacaaatcaaatggagcagtatatgttattgcagaatccaggcttgggcagttaccagttaaggccaaagcttcaggaaagaagcaggcaccttcaaagggaagcaatattgaagctgttcaggatggtttggacaaggaatcatatgagctgttgtcaaagattcctggggtatccttggttggcttaaaatatactcctctatttgactttttcattgaacttcaagggactgcctttagagtgattgcggataactatgtcacggatgatagtggaacgggtgttgttcattgtgctcctgcttttggtgaagacgaccatcgtgtttgccttgctgctgggatatttgagactgctggacttgttgttgctgttgatgacgacggatgttttattgaaaaaatatctgattttaaagggcgatatgtcaaagaagccgacaaggatatcatcaatgctgttaaggataaaggaagactcattagtaaagggagtattgagcactcttatccattttgttggcgatcgggcactcctcttatttatcgggctgttccaagctggtttgtcaaggttgagaagattaaagaccagttgctggaatgtaacaaggagacttactgggtgcctgactatgttaaggaaaaaagatttcacaactggcttgaaggtgctcgtgattgggctgttagcagaagtagattctggggtactccacttccactgtggataagtcaagatggtgaagaaattgttgttatggattctatagagaagcttgaaaaattatctggagtcaaggtcactgatcttcaccgacactatgttgatgatattacaattccctctaagagaggacctgagtttggggtgctcaaacgtgttgatgatgttttcgactgctggttcgagagtgggtcaatgccatatgcctacattcactatccatttgagaatcgggaactatttgaaaagaactttcctggcaattttgtggcagagggtttagatcaaacccgtggatggttctatactctgatggttctctcaacagcactgtttgggaagcctgcatttaagaatcttatatgcaatgggcttgtcttggctgaggatggtaagaaaatgagcaagagtaaaaagaactatcctccacccaaggatctcattgatgagtttggagcggatgctctgcgactatatttggtaaactccccagttgtacgtgcagagtctctacgattcaaacgtactggtgtctttgctgttgtgaaagatgtcttcctcccatggtataacgcatatagattttttgtccaaaatgcaaagagactggaagttgagggtcttgcctcattttctccgatggaacaagtggtacttctgaagtcatccaatgtgttggatcactggataaactctgcaactgaaagtctagttagctttgttcaccaggagatggatgcatatcggctttacacggttgtgccgtatttggtaaaatacattgactatcttactaacatatatgtgcgtttgaaccgcaaacggttcaaagggcgtactggagaagaagactgcagaatttctctttcaacactctaccatgttcttgtaacaacttgcgtggtgatggctccatttacaccattctttactgaagttctttatcaaaatttgcggaaggtgtcaagtaattctgaggagagcatccacttttgcaagttcccttccacaactggcgagagagatgagcgtgttgagcaaagtgtaaagaggatggtgaccataattgatcttgcacgtaatattcgtgagcggcataacaaagctctcaaaacaccactcaaggaaatggtggttgtgcatccagacaatgacttccttgaagacatcactggcaaactaaaggagtatgtcatggaggaaatcaatgttaagaatgtcactccatgtaatgaccccttgatgtatgcttctctgcgagccgagcctaatttcagcgtgctaggaaaaagacttggaaaagacatgggaaaagtatcaaatgtggtgaagaagatgactcaggagcagatcttagcatttgaaaaaagtggagaggtttcattcttcggccattgcttgaagctagatgatatcaaggttgtccgacaattcaagcgtcctgaaaatgtgtcagagaaggagattgatgctgcaggagatggtgatgttttagtcattttggatctacgaaccgaccagtcattgtttgaagctggagtggctcgagaggttgtgaacaggatccagaaattacgaaagactgctcagcttgaacctgctgatccagttgatgtgtattacgaatctgtgggcaatgacaaaaacactctggaagagatattgaagtcacagtatattagagacgcacttggctcaccaatcgttccaaaggaaatggcaccaacagatgtcgtagtacttggcgaggaatcgcacaacgtacatgacatgtcatttgtcatatgcatcgcaaggtccaccccgattatttcaccagatcttctttctcatgcctcaggcaacagcaatcatgtcgaggcgttgagagtatatcttctgtcaaaatctctatccagattgaagaaccagttccaaagtggaaatggcgtgattacggtcgactgcatcgaaggttatccactaatcaggttacagctaggaaagcatgtttttctaagtgcaggggatttttatctggctagtcgatcctaatttttgtgtgcagcatcccaattttgactgattcacccatcattttgccgcaatcggcttaaacagcttggttccatttatgcattcagattcacttgttaaaggtgaaaaatcccaatttatgatataccatggtactctccgttctttttttatttgtcgtgttttagttcaaaaatgaactagccggtgacaaatatttttttttattttgtcgtgttttagttcaaaaataattagccggtgacaaatattcgagtaagctataggttcccatacccctagtgaattatgagtagataacatgtatgtttgtaatctcttgggtgtttggtttttgaggattgatgtggtccatcagattttgatgaatgaatgcatttcattt

SEQ ID NO: 42176 - DNA, 578 bp, Zea Mays
gttgaactttacaagctcagtgtttccaccctagatctattgaaactagcatccaaagaggaacaggttgcttatgtcggtgcatggtacattatgcttctgtcctatgctcaagaattgaagcatggtgtggaactttggcaagtgttttatcatgcaaatgtctgcgacagagtagtttctgaagctgcagttttcagcggaacaaataactataaccgtgttactgctagacacaaagccttctctgaacaaagcttgcacacatgttattagttcagctagcagcaatttcagtcagctatatagcgcgcctcattggttgactgaagtggtgaatggctatgctcaagacccaaattaaaggcgatgcaacttcttgctgcgatgccagctagccggatcagtttctggaggccattatattataatataatatgaagaatacagattattgtatatgtcatgggtatatttcatcttcagatgcttgtcctattatcttttaccatttaaatatatctgtcatgggtatattgctggaaatgcaacattcaaagtcatttagacaggaatag

SEQ ID NO: 42177 - DNA, 993 bp, Zea Mays
attaagatgagctgcaggttgtgtgacaaacctgggcataactcaaggaaatgcttcctaaatccagaaacaggaaagaaaaaaatgctcacattaaaagagatgcaaaaaaaaaggaagagagatgaggcatccacatctgcaccagacaggaacaaaaggtcaactgaacagagcacaacaagggttcatgtgagcacacagcagagtacaagggggacaaggggcagaaggaccacaagggggacaacgatgtcatggggaactaccagcaggctgcagcacctgctgtttggaaacaactaataccaagactgcaccaccaagactggcttttgtcttttgtttatattctagaatgctaattgaaacatgggcaggcaagattatggccatgtaatagcaaacttatgctggaatgtcatggttatagacctatagtagcaaacttatgttgggatgtcatgaccatgtatggtccaatgttatgctcacctcttgttgagctttgaacatggtggtttacaacaatatatgctcacttgttgatgcatcaatgtattacgcattgatagaaaccatcaaattgcagtattaacatcatgccattacatgtctggtacacaaagttcataccattcaacctacaaggaagaggatttctactacgttacagtgaggccatcactactagcattaacatgccaacaaacaggcgttccccgccgtgatggagccgtcgcgagccgaggcggtggcagaggcgcgcggcgcagaccatgcggaggaggagcgcgagcagtcccatgtgtgtgcgggcggcagccgaagatgagctcgaatcttccatggcctcttgtcgggcacctcattcccgccgctggcttccttctacctctcgtcgggtgcctctttcccgcctcgaccacctctttcccgcctgcctctccgctcgtctagtgccaaaatagggccaggctagacgagcgtgcc

SEQ ID NO: 42178 - DNA, 650 bp, Zea Mays
taatgcgttattatcctccaccagagaggacccataggccatatgcatgtaggcatgtagctgcaagtctctctctctctacaccctatacttagtagcggagatcatgctgtccctgtcgctgcctaagtggttggaggactgactagttagtgccagacccagactagagacgggcaagccagcagccaattcgtccgtgttgttgttgctgttgtcgtcgtccactatttagttgctttgcgcgcgtgcagagagcgagctacctaccctatagagtgtacatagcaagctccgccgccgtcgccattcctagacacaccttagctcgctctcgcccatgtccgtgacaacaagggagccggagctatagctgacacccgctttcgtcctttgtcctttcgcggcattcctcttggccttggatggaggggtgcccgtgcctctgagctccggcctccgggaattaataaagcaagataggaggatatcgccatgcaggcggcggccaaggccaagacaagcatgcacgagctgacgagctaatcgcctactctgtgactgtacacgcgctcacgaaagcgcagaagcgaggcatgttctctctgctcagcagtggtcgcaaagcaacagaggctcacagacagctg

SEQ ID NO: 42179 - DNA, 2775 bp, Zea Mays
tcccttttaatataaagatgcgcagttctcctgcacgttcgataaaaaaaggaggccaaaaacacagaaaactaaaaaatccatcaaaacacacctaaggaacaaccgctagtcttcaggaaggagggcagcaaggtatgaaagacctttagccccagccacttcccaaagctgtttctcctcccttgctaacctaagggacaaagccaaactaggagtacaaccatccaaaacacaactgtttcggagtttccaaattgtccaagcccccaaggcaacaagggagttgatgccttttccaggtaaacgagtgaccgctcggagatttgctcccaccaaatcatgaaggatgaaagcccaaatccaaagggtttcaggaggttaaaccagaacactcttgtgaaaacacaagagacaaggatatggtcaagagttttagcttcctgatcacataagagacaactagctgggtgatccaaacctctcttagcaagcctgtcagcagtccaggatctcttgtttgcagtcagctaaagggaaaaccaacacttaggaggtgcccaggttttccaaaccagatggtaatgaccaaaaaaatgttgaaccagcaaaaagaccttcataagccgacttagccgaatatttgccatctgcagcaatactgaatacatgtttattctccacttcaggctgcagcactatttctgataggagctcccaaaggttcagtgcaatatcaggtagtggaagtgctgggaggagaaaaaatcttgtcttgcatctgattcggtcttgtagagaaacagaaatgaaatttcttgtcagaacactggttcgtaacttgcgtattggggctatgatgaagacgattttacctgcgcttgcacatgctgttgtttttgatagaaactgtgcagcagatcctgcggtgtcattggaaggcataaaatcacaactacaggatttgctcattccttctcttctgagagaaggcactgcattttcagcttcatccttggcaatggtgcctggcacacctattccacctatgcttgcaagaattactaacgggttgactcagtcgttgaaagctttccatggcagatcatttacttgtgagtacaagtatgatggtcagcgtgcccagattcacaaagcacttgatggatccgtgcgaatattttcaaggcaaatgaaagaatcaacttccagatttcctgatcttgtgaatatgattaaggagttgtgcaagcccgaagtgtcaagctttatactggatgccgaggtggtaggaattaacaggaagaaaggaaatgagttgatgtcgttccaagagctatcttcaagagaaagagggaataagcattcctcaatttcaatagagaacataaaggttgacatttgtgtgtttgtttttgacatcatgttccatgatggagagagactactggattgccctcttcggcaaagaagaaagtacattcatgacttgttccatgagaagccaggatattttgagttagctcagcagctaaatatagaagcctgcgaagcttcaccagacaattctagcactttggctaggatggacacgtttttcagaaatgcatgccagtcttcttgtgagggtataatgttaaagactttggatgtcgatgctggatactctgcttccaaacgctgtgattcatggttaaaggtcaagcgtgactatgtgcaaggcttaggtgatagccttgacttggttccgattggtgcatggtatggaaacggacgtaaagctgggtggtacagcccttttctcatggcatgctacaaccctgaaactgaagagttccaaagtgtatgtcgtgttatgtctggtttctcggatgagttctataaagagatgaaggagttctattcgggggaaaggatactgcccaagaagcctgtttactacaaaacagacgagcaaccagagctgtggttcaccgcagaacaaatctgggagatccgaggtgcagacctgacgttgtcccctgtccaccatgcggccattgggcttgtccatccatcgcgcggcatctcggtgaggatgccccggtacatccgttcagttccagaccggagcccagaggactgcggcacggccgccgatattgctagcatgttcaaagcccagacccggaagatggatgtcagcagcgagggccaggagtagtaggcaatgcaaagctcagcccatttcctcgtcctagctttgcttatgttcaccagttctgtatatacacagaacgaaccagggtgaagtgaaccaccctactgatcaaatggtgaaaactgaagcgtaggacaggcagcactgatcccactggctttcaatttttctttgtacagaaactgaatgcagttggaacgcggaaggaagcccacgagttgcacgttcggggggaaaaaaacaatgcataagtacatcaggtatcagcttgctttgtactacagcgcgattattgtaacgcccgtggccgccggcgagtcagccgttgacgtgagcacagatttggtgggaagcgccggcgaggattgcgtcggcctgtgcgcgttcgtgtttctgaatatctgaatcgatcgtctattacaagtctcaggcacttatgtgctgttacacggatacaagagggttaacgctaataactcgaatacgccgccctaattcgaagacgtcttcccgtagtacgccatctttactgttcagctggagcactcgttacacctccggagatgaagcttgag

SEQ ID NO: 42180 - DNA, 4775 bp, Zea Mays
cccggtagtgcacgatctgcaactcaacaggtcaaccccatgcacacgcagtgaagtgcgtatatatacggacctggttttcctcctcctacgtaccaaaggaaaccatagcactgcttccccaagcctcggctaactgcacccacgctaatgatggcagccagcatctcttccagcccgatgagcctccccgtcggcgaccgttggctgtcggggaccctcttccaacggcgacagtcgcctccgacagggtaccggtggttcttctcgggtaatgaggcgctgaacattgtcagggattacagttgggccatcgtgggcctcgggccttagcctggttgaatagtacacgggcatcttctacaagaggcagaaggaatagcgacaaggaaaggcagaacagatacagtatcgtcttcctccttcctagctgttgtttcctatctctagcttcttctagggttagtcctctacctctccctgcttagcgtgctcctgatcttttagcccgatatcgtgtacctctgcttttccttcctgttatcagtaaaaccagtggtgctctgtacttctgactgcatccgtggagaggggtgctaacaattggtatcggacgtcactgttctcggaccatggagcccaaccttcaatccgcactggaggaacaaacgaagatccttcgcgcgctcagtgcccggctcgctgcccaagaagagcggtggcgcagttgggagtcgaaagtggcgcaccattcggcgtcgatccacgaccttgaggtagcagtggccattgtgccatccgcggcgttgaggccggagcgagacgctcaggtcgccgcgacccgcgagtgtatggccgtggtcgctgacgactggggtggcctcttcggcacaggcgacggctgcatcatggccgacaactggggtgggctgttcgagtatcctgctcacttccaggaagaacaggacatctacaactgcatccccatcaacgatggcacccgcttcaccgaggaagacgacgacaaccaccccgccacgctcgaaccactgctcaccgtcaccaccaccgccgccgaggtcgattccatcgccaacaccgacgatgtcgaggctgactctctcgcctccgcctccacggtgggggtcgccacatcccaggccgccgagatgcagctccatgtcgggtgggcgcgctggctggagggacaggccgactacctaagacacgatcggatgctctgctccaatctagattcccttacttcgagcaaccacccgctgctccaggatgcctcagccaccaacaactcgcccacccagtactcgacagaatgcttcagccatgacatcgtcttgttgaggactatcagtgctgcacccacaagcgaggaccgcgcgctgcagcagaggcgccacgagtgcctcgtcacgcggcccgagtggcggaggattggcggacggaactacatcatgctcgagcatcaccccaacaggatgttcgacgcgtgcgataggttctggcactgcgtcttcgcgctctgtgacttcggctctgtgcagggcctgcagaggaagctggagcggctctgcctggcggggagcgcgcctgacctggaagtcctcgccgtgctttcgagcctgcgcgcgcgaagcctttccgaccagcgtgccgctaaccatacccgcatgtccatgcggagcatctccacgacggccaccccgttcagactctgctctgcacagagcggctacatcgcaagcgggacttcgacgggcacgacttgcagcaccaggtcacagagctggatctcctccaagttcgagcacttctccattccgacccccaaccagaaggtcttcaacctctcgtctgatgtcctcaataagagagatccgtgggtcggtaccttcgaccacattttcaccgagctcggccaaccacaaagcctggaagctgtccgacttccctgccacctgcgtcatcagctaccagactgctcccagttggaattcacagacgaggtgtttgctgcacaggaggtgttcgaggaattgtctcttagctcccctgctacttgggtcaatattgggaagctcttagcctctctgtgctggaaaattccttggccaccaccacatatacaagttgggttgggatgtggtagtgagactttacgttcaattccatggttgtctcccaccatagctagtaccaatgaggagagaatattcatcatatctgaggatggcaaggttgatgatgtggttgatcggacgatggatgaacagatcgcaactgcagtctttgtgccagcttgtatagaagcttcgcttaatgatgggatgaatgcaggcaaaaccagggaggcctttgctgatcatcagtattctgattatgacagtagattgaaagataaggatcagaagatattatttgaagatgagattgatttatcattgttcaactgcaagttcgattcctgcgcaacagatagtcctgtcattgatgttgtttatactgcactcaaagaagcagagcttcgttctacggatctttggccatactggaaggttgattgcttgtgcaagataattccaagacagctactagcagagaaggcaatgatgcttataaggaacactgttggcaagctgattatgaagcataaagaaatacaagttgaaactgaacagattgtgggcgaggattatgtaaatgaaggggattctagcatcctacggttcctacttgcaaatgtgtcaccaaaaatagaagagccaaaaattccgtacaccctgcaggccattggaggaaacgtaattgcagtttatggactttttgtgcaactgatgaccaatggtcagtttacttgttttgcacaatatcagcaaatattcacgcaactagctaattgtggtggatctgcacgtgtccttagggttgaccgtgtgttcagagctgaaatttacaacatcagcatgccgctttctgacttggtttgtcttgcggccaaaatgaaagttaaggagcacaatttgagaagctttgggacattcctagagattaatacatggaaggcaacaaagaccaaaggactggagctgcttgaatatatgggaatggagagactagagtttattgtggaacaacctgacatggcatgtgattcacgggaacattcacggaactgcctatcggtctttctttgtgatcctggtagtaccaaaagaggggtgctaacaatcatgtcgcagcgccgccgtcctcgtcgtcgttcttgtcatgccgtcgccccggtcgacaaaaccacaaccgaccgcgaccacgcgacgccccttgtcatggacgtggaccgcgtctctcatccggccgagacgacgtccgggcgctccgacgacggggaaggggaactggccgcgaggtggcgggagatccacggcagcgaccactgggaggggcagctggaccccatcgacgcggtgctccgcggggagctcatccgctatggcgagttcgcgcaggcgtgctacgacagcttcgactacgaccgcttctccccttactgcggcagctgcaggttcccggccaagaccttcttccaggacgtcggcctcggaggcgccggctaccaggttagccgctacctctacgccacctgcaacgacctcaagctccccaacttcgggggccggaagcacagctccgccgccaacgacaagctgtggagcgagctgggcacgttcatcggctacgtggccgtgtccacagacgaggagacggcgcgcctcggccgccgtgacatcgccgtgtcgtggcgcggcacgatcacccggctcgagtgggtggccgacctgacggccaaccagaagcggctcagcgagctgggcgtgccgtgcccggaccccgacgtgaaggtggagatggggttcgcggagctgtacacgggcaaggacgcggcctgccgtttctgcaggtactcggcgcgggagcaggcgctcgccgaggtgcggaagcaggtggagctgtaccacggcaggggcgagcaggtgagcgtgacggtcaccggccacagcctgggcagcgcgctggcgatgctcaacgccttcgacgtcgcggagacgggcgcgaacgcgtcgccggacggcaggaaggcgccggtctgcgtgttctccttcgcggggccgcgcgtcgggaacctcaggttccgggagcggttccagcgggagctcggcgtgcgggcgctgcgtgtcttcaacgtgcacgacggcgtgcccaaggtgcctggcgtgttcttcaacgacgcggcgttcccggaggcggtgctgcgggtggtggacgggctgggcgcgggcggcgtgtacacgcacctgggcgtgcctctggcgttggaccacaaggtgtcgccgttcctcaaggagaccatggacatctcgtgctaccacaacctggaggcgcacctgcacctgctggatggctaccgtggctccggcgaggggttccagctccgcgggagagaccccgcgctggtaaacaagtcggccgatttcctccgcgacgagcacatggtgccgcccgtttggtaccaggcggagaacaagggcatggtcaggacggaggacgggcggtgggtgctgccgccgcgccatagggacatcgacgagcacccggatgacactgaccaccacctccagcagctcggtgtcattctcaccgcatcaacctagtgaaacgatggttaattgatgtcatggtgcatcgcacatagaggtgcc

SEQ ID NO: 42181 - DNA, 1957 bp, Zea Mays
aatttggtccccgcttcccttccccctgttcctcgcgttcctgtcaaggctcagcctcgccatcgctcgcggcatcgccgcttgccctccccttccccaagcgaataaagtgccggaagcgcgcgcgtcaagcgaagccctcgcccccgcgctccgctcaggatcgggagccaccccctagggttagggctcggttttgcatcgttccggcgtcgaccgatgcgcggcgcatggcggcggtgaactgcctctacgtcgcggctgcctctacggcggccagcgccgccgcgctgcagtggtgggcatcctcgctcttcgacggcgacgctggcgcgggcgaggatggagcctggctcggagccgtgctgcggtcaaaggtcaccgtcgcgctcctggcgaatctggcggtccacgtgttcctcgtcatcatcctcgcgctcaagactctattttttgttcagctaacttctatagagaccagaaaagtgttggagcacatcattaactatgtaatttacaagggaacttttctcccactggttgtgcctcctacttctcagcaaattatcctttggtcaacttggttggtcattctttgttcgctgaaggatgtggctctgtgcagggttttgcagcttctgtaattccaagttgttttggctcctgttctttgagccacttagtattgcctttgatacactgcagtctattatggtgcatgggtttcagttatttgacatctggcagcagcatctaatggaaagtggtgcagacttccttgatttacagaaatcttataagcaagcagcaggatctttttctgaatggaggggcaagcttactaggaactttggttttgccattgatttgataagcttgttgatgtcacttggtcattactcgatgatattttggcttcgtggtatggcgtttcatctggttgatgcagttctcttattgaactcgcgtgctcttatagtttcctttttgaagaggattaaagctcacatcaagttacggaaggcacttagttcactcgatggagcacttccagatgctacgtatgatgaaatttgtgcatatgatgatgagtgtgccatctgcaggggaccaatgggtcgagctaaaaagttgtcatgcaaccatctatttcatctagcttgtttgcggtcatggttggatcaaggactaatggaaggttactcctgtccaacttgtcggagaccgctcttattgtcatctgaagggcaaagaaggtctacaactgcggaggtagcaaatgttcagcgaattgcggaacaacttactatggggatgaatcagcagagagttcctggtaatgaacatcctgttgaacagcagaacccttcagatgctgtttggagaggtgctggtctggatgctagctggattccaccgtggtcaagccctgtgatggaccatccgagttcctccagtgcagtgagggtcctctcttgttccttccacttcctcgatttccggcactgcatctgcttctggattgcggctccgtggtagtgcaggcataagcaacgggagtctttcggaggtactcactatggtagatagagtgcgggaagttctacctcatatccctgatgagctaatcttagaggatttgatgaggacaaacaacataaacgcgactgtgaataatcttctgctgatgcaatagtagatacgtcaatacaacatataagtgtgacgtttactggctataaaagcttataagaaaagtatgtgtatagctaagggcgagcctgggtgtaacacgtctttggttctgtaataaaagcccttttttctttatttttgtctgcagaggtctgtatagcaaccaatattatcggaataaaatttgttttgctactatgtagtaatgtagcctgcgtccggacgacaagtgcttcccggaattacgtacgcttgctcacca

SEQ ID NO: 42182 - DNA, 1569 bp, Zea Mays
atggcggcaggcagccaggaacagggagatgggcttattgacaaaatcagaggagacattgctatccttacattgctcgccgaagtattatgtcttttggacatgattgtaaattcttttgcgcatacaatatctacaaagcctgttgatcgctacacaagaccagagttcacagatgatggtccaatggcaatcaatgctggacgacaccctattcttgagaccttgcatactaattttgttcctaacaatatatttctctctgaagcatctaatatggttcttgtcatggggccaaatatgagcgggaaaagcacatatctccaacagatatgtttaattgtcattcttgcacaaattggctgttatgttccagctcagtttgcatccttaagagttcttgatcgtatatttacacggattggtaacggggacaatgttgagaacaactcgagtacgtttatgacagaaatgaaagaaactgctttcatcatgcaaaatgtttcttcaaggagtttggttgttgtggatgaacttggaagagcaacatcttcctcagatgggttggcaatcgcatggagttgctgtgaataccttctttctgtgaaagcatacactgtttttgccacgcacatggaacgcttgtcagaactttcaacaatgtatccaaatgtgaagatcctccattttgaggttgacttgagaaatgaccgcttggatttcaagttctgcctaaaggatggcatccgacgggtaccacactatgggcttctgctggccagagtagctggtatccctacttcggtgatcgacacttcaacaagtatcacttcacagatcacagagcaggaaatgacaaggatgaatgccaattgcgaggagtactggtcgcttcagatgacgtaccaggttgtgcagcggcttatctgcctgaagtactcgaaccatggcgacgactacatccgtgaagcactgcagaatctcaaggagagctattctgcgggccggctaacataagaggtgtatgccgctggaggatccataagccaatgtatatattcctccgtcaatgtgatactatcttaggtcctcaaacgcacatctatcgttatcgcacatgccatgtaacatcttatcccctattcatatagatgatcacgaagcaagacagcatgtgaatgtttagaacaagtgattattatgacctcagccacatagcttttacgaaaagatttactggaatatatggaacaccaaagtaggagattagagtggtcgatacatacaaactgtaggtttgaacagcaaatgttggcattgttttctgccaatacattaatcgatacagtagcatgagaggaggaggagcacagaaggcggcctagaccacacaagagagcgggaggtagtgtggagccgagcaggacaagaattcatgagggacaaaaaaaaaatgtatggcaaaatcattcattgtcataaaaaacttgtgttttatataatttcagtttcatgtcaatgtatcaataaaataagcaaatataccgttaagtttttgttgaccgagac

SEQ ID NO: 42183 - DNA, 1475 bp, Zea Mays
caaacaacaacaaagccttttatctcaagcaagttgggatacaaatccaatgcttcgtaatggtgagactggcgactggattgggacttttcaaggtcataaaggagctgtttggagctgttgccttgacaggaatgctctgagggctgcatctgcttctgctgacttttcagctaaagtatgggatgcacttactggggatgagctacattcatttgaacacaagcatatagttcgggcatgtgccttctctgaggatacacaccttttactcactggaggcatggaaaagattttgcgtgtgtatgatatgaatcgtcctgatgcagctccaagagagcttgacaaatcacctggttccgtccgaactgctgcttggcttcatagtgaccaaactatattgagttcctgcactgacatgggtggagtaaggctgtgggatgttagaactggaaaaattgtccaaactcttgaaaccaaggcttctgtcactagtgcagaagtaagccaggatggcaggttcatcactactgctgatggctcaagtgtaaaattctgggacgcgaatcactttggccttgttaaaagctatgatatgccatgcaatgtggaatcggcttcacttgaacctaagtctgggagtaaatttgtcgctggaggagaagatttatgggttcatgtatttgatttcttcactggtgaagaaatagcttgtaacaaaggacatcatggtccagtccactgtgtccggtttgcaccttgtggtgaatcatacgcatcgggttcagaagatggcaccattcggatctggcagcttagcccggctaatgctgatgacaatgaggtggccaatgcaaatggcaagacaactgctggggtaaacgaagttacaaccaagatcgaaggcttccacattcccaaggaggggcagaccgaggggtaggatctcatgtgttttgtggtgcttgtggttcttattgcgaggagattgccatcagagctgcagtggtcattcagtttccctctgcggagtcatcatgtctgcgatccaagggtatcctggcttcatgagtcatcatcagcactggggaaaaacaagcaagcaaatggtggtgggtttttggatggggccctcgctttgatagaacatagcaattgtagcgtcaaaaataaacaagagttgggtagtttaggtaccgtgtttgcgttcattaaagtgaagtattctgtatcaccacagtcccctaaaaaaatacttgaggccttcatcgttggaacaccgaccttcaaagctgtagaccacttcttgatcctgaggtatcccataaggagaacatctgggatatggcacatgtttcgttttgcagcgaacatccctgctttcgcaaaagggaatcgcgtcacatgccccgccatgtgagtcaaacttggctgaacggtgaatgcatctgatcggcctttctgcgatggtttcg

SEQ ID NO: 42184 - DNA, 655 bp, Zea Mays
caattctcatgtcggtacagccgagaaccgggaccggtgattttcccctcccccttgtcttgctgcttccaattgacccgtcaattgctcaggcgatagtggctgcagtgcatttctgggatggggctgctcttccttgagcggctcgagggggagggcgtgttcaggtgccggcgctgccgcgtggacgccgcctccaaggacgccatcatctccagggacttctacggccgcagcggccgcgcctacctcttcgaccacgtgagaaagcctacgagcaaagccagaaatacaaggaagggaagtacatcctcgagagagctagaatggtgaaggatgggtgacgatcatttggatgctcttacttctaacaccccagaagcgcaatcttcttgaactctggaaagattcagaactatccctcaatttgcatgcctcagaacatttgacacctaattggcatcccagttagctaggaagatcactggttgcagattctttgatttgtagaatattactgactctgaatacccttagcttgttagtaatggtaacatttggtgaaatattgatgattaggtgaattgaagtgaagctgatgatttatctgtagtaaccattattattcaggcgccctgtggacttgtctggttcg

SEQ ID NO: 42185 - DNA, 2717 bp, Zea Mays
cgcgcatggtgctccgcgaaagccgagcggccggacaagtgaagcgcggccacgatcgaccggccccggccccccatcgtcgcatcccatccatcccatttcccccacgagccctaggcgcgtccacggcggcacggaaccggagatggaggagagcgacgcggcggagggggtggcggtgcagctgatcgacggcgagggcgagttcgcggccgagggggcggagcggttcatggcggccgccggcgtcgccgggtgcgggctctcctacgccgtcgtctccatcatggggccacagagcagcggaaagagtaccttgttgaatcaattatttggtaccaattttagggagatggatgcattcagaggaaggagtcaaactactaaaggtatctggatagcacgctgtgttggtgttgagccttgtactgttgtattggatcttgagggtaccgatggaagagagagaggagaggatgacactgcatttgagaagcaaagttcgttatttgctcttgcaatttcagatatagttctaattaacatgtggtgccatgatattggccgtgagcaagctgccaataaaccactcctaaagacagtatttcaggtcatgatgcgtttgtttagtcctcggaagacaacactgctatttgttatacgtgataaaaccaggactccacttgaacatctagaaccagttctaagggaggatatacaaaagatatggaactctgttgccaagccagaggcacacaaagacacccctatcaatgaattcttcaatgtgcaagttactgcattgtccagttttgaggaaaaagaggaccagtttagggaacaggttcaacaacttaggcagagattttcaaattcaattgcaccaggaggtcttgcaggtgatagaagaggagtagttcctgcttcaggttttttgtttagttcacaacagatttggaaagttatccgagagaacaaggatcttgatcttcctgctcacaaggtaatggttgctacagttcgatgtgatgaaattgcaaacgagaagtttggatgcataacctcagacacagaatggttggatgtggagagtgctgtccaatctggtccagtacctggttttggaaaaaaacttggcaatatcgtcgacgttcacttgcaagagtatgacaaagaagctgtctattttgatgaagctgtaaggaaaggaaaacgacagcatttggagtccagaatactgaatcttgtccaacctgcattccagaaaatgttgactcatctgcgtgtgaaggctctagaaaaatttaaaactggtcttaattcatctttggagagtggaaaaggattcgcagtatctgctcgagacaatactgaatgctctctcaaagaatttgaacaaggctgtgcagtgtttagccatgacaaggattcaattccaagggtctggacaggaaaggaagatgttcgtgcaatagcaaaggaagctcgatctgcggctctcaaacttctgtctgtaatggcggccattcgctgggatgacgagccagataggattgaaagcatcctcacttcaacacttctggaaggctctgttgtatcaaagattgcaagtgctgcttctgctgatccacttgcttctaccacttgggaagagattgctccaaagcatacaatgattaccccgtctcagtgcaagtcactgtggaaacaatttaaagcagaaactgagttcacgattacacaagcagtatccacacagcaagctcacaggcgcggtaatagtaaactgcctcctccttgggcaatcgtggccattgctattcttggtttcaatgagatcatggtgcttattaggaatcccatttatctgttcttgctatttgtgggctacttgatggtcaaagctttggcgatgcagctagatgtcagcagagaattccagaatggagtggttcctggaataatctctgtgtcggtgaagctcctaccagcgatacagaacctggtgaacaaagtggcagccgagcagcaagctgagcaccagcagcagcacccgcaccctcaccctcacactcaggccccaggacccccacagccacagatgcagccgccgccgctgctcctgagcccgagaagccccatgagcgagctgcggaggctgcacatgccgcgcagcccgcgcagcccgcgcaaggtggcgtcgccggcgccatcctcgtcgtcgtcatcgtctgccgtgtcgtcccctaggcacgttggcgaggaccagaagccaagaccaggggcagtcggggcgcctgagaacgaggccaccgtcgccgactcgatagtgtgatccacgcaccagccatcgtggcgcgcgtttgactgctataggtacaaggtatggagtatgaactatggaccttctgctgtctcctatttcaatgcattatgtatagtgattatcgttatgcttcagtaggatatcaaggcagaaataatgcaggaccctcttctgccgtgcaatcctttagtttttgcaaggagagggaggggataatgcatagatggacaattgctacctggcaccatttttcagcatatgtatagaaaggagctacccatttgaaactgaaagtcgtaggcattgtttaattaagtgcgctagaaataccccagccgcattcagctctttttatatatatgctaacaccgtaatctaatgtttaaacgct

SEQ ID NO: 42186 - DNA, 1152 bp, Zea Mays
gcggagcaagggggctgggcttctatcagtgttggaccacgcgatggcggattgcttgtgctgctctttgattcttttttagtggaagtggcggtggggtttgggggagctgcaggcaaatacccaatttctttcttcgccagtttttccttgcgatgtacttactgtttcatgccacacttgctgctatcttcagtaccctatcatttctctgctacttgttttgtttgatctctcgtcttggttgggtcctatccatttgtacaattacaaactttacatttggtaactgagggatttgatgcaatttttgcagaccagtcgcctgaccgtacatcggtcggttcagcttcagcgccgaaaaagcatagcgcttcctcacggggccgacgccgtaacttctcgtcgtcaacgtgcaaggattttctccgcaagtttgtggacagcgagcttctgacgtcaagcctagaggactggttctccggtcacagcgaagattgtggtttcaggaagccaggtttcaacgttcctttcgagcttacagagttacagaatttcgattacgctctggagggcgttacttttcagcagctatttggcggagtggtaaaagtgcaaggtgatttgaacaagctggattttgatctcaacaacgtttttgattgtgccgctgaatggataaagaaacattccagaatttcagtctgttccgtagaccgagtatggaacaaacttgggaatgctaactggggagacattgggacccttcaggttctcatcgcaatatttcactcgatgatccaattttacggagagcctaagtattctctcgatgaactggcaacggaacatagttcaaggctacaaagccgaagatcagaaagacatctggttgacagacaagctaatggcaatggtttatttcgattccaacagcgaagtcattctcctgaaattgttgagttacaggaggaagcagcagttgatgtgaaaccacatgaaaccttaaggcttgaaatagggtatgttgtattgatggatgatgcttacacacagaaaggttttcaaatcagtgacatcctaacaggcagtgatcctcctatttatacttctgctcctgtggaagaacctaccaaaacttgttactgctag

SEQ ID NO: 42187 - DNA, 1132 bp, Zea Mays
agccgctgtgtatggatgagacaggggtcgaagattttctcgatttgtatgagatcttcttaatgaagttgggaaacactagaaactaaaccaaaagcgaggggcctggatatcagacttgaacttctgaagttttacaagaattattcagcaaacgttatgcaccttgttgtttatggaaaggagaacctcgattgcattcagggcttggttgagcgtatgtttagtgacataaaaaacactgatcagagaagcttgaaatgtccaagtcatcctctttcagaggaacatttacagcttcttgtcaaagcactgccaatagtagaaggggactatctaagaattatatggccaataacacctagcatccagttttacaaagaagctccttgccattatctgagtcacctcattggacatgaaggcgaggggtccatcttccatattataaaggaactaggatgggccatgaacttaatggctggagagtgcagtgacagtaatgagtattcctttttctcagtaagcatgaggctcactgatgctggccatgaacgcatggaggatattgttgggttgatcttcaaatatcttcatctattaaaagaagacggagtccatgagtggatatttaatgagcttgcggcgataaatgaaatggagttccattatcaagacaaagtccgcccaatcaactatgtgatgcgcactgtctcaactatgcggttgttcccaccagaagaatggttggttggagcagcattaccatcaaagtatgcatcacagagaataaatatgatactcaatcaactaatacctgaaacagaatggattgaaaaagctcctactgaaaaactccatcttccaaaacctaatattttcataccaaaggatttatctcttaaagaagtgcatgaaaaggttacttttccaacagtgttaaggaagagcccactttcacagttgtggtataagcctgatatgctgttctccacaccaaaggttcacattatcattgatttccactgtccattatccagccactcccctgaagcagttgttgctactgagctctttgttgatttgttagtagattatttgaatgcttatgttcatgtatactatcttcttt

SEQ ID NO: 42188 - DNA, 1854 bp, Zea Mays
gtcttctctctccaagccacggcgtcaagccgctcctccgctcctccccggcttctcctccgcgcagctcctcctccagcttccctacgcattgctgtagccccttcccatggtcgccgcagcgtcacactcctccctgccgatctctccctctcactgagtccttccccagctcatcacgcccagctcggatttcttcttcccggcgcccggctccagcgcacccacctccccaagctcgtcgcgaacccccagctccctctgcccagctcgcgccctgctcccctgcgcgctggtcggcaatcggcatcctgcgtcgtccacagttcgctggccaagctccatcttccatagtcgcgccctggctccagcttcctccctgcttcccagctcgcggcgcccctgcttttctctctctcctccatggccacgtcttgccgaggtccctgctgtagctggttcgccggtgcccgaacctcgctgtcgacctccctgttcttgccctcccatcacgcccaactgcttgcctgtgctcagctactatctgcggcatcgcgcgacgttcgtcatctatgctagtccatgccgcgcgacccatctgcgcgcgatgctccctactcgcatccgtacagaactgcgccatgtcctgtactgagctatgcatccgcgcttcctccaacagcagctgtgtcagcagaccctcgatgtcgtgctgtgcactgggactgttgtagctcgtctgcatgcccagccgtttcaaaccacgccgccgactctcggcaccacgagctcatcttctcttacacacatctccgcagaccctgccttatcacacgtgtgcgttatcgagctcgtcgtcgttccgtacgtcatcaagaaatcccgagagtgggtaaagaagcgattctcgcgtggcgctcgtcaaatattcaacaaacttcttgaacatattatcgttgttatttctgcgaaatccaagtcggatttaggtacgttaattgatcacatgatgcgggggactaaagccgagtgaccccaagtaatgcaaagagtcgactactctgagaaacagtgtcgatggaccacaggtgaatggactgaatgaatgccaagacaaaggatggtcgccaagtggacgtcgtctaacaaacattaacgtagtatttattccaggtaagtcttgctgagtacttgtgatgaggacatcactcccatggatacaaacaacactcctcaagttgactacccaattacttttgcacgcgctcgacaattgaatttataggtgatctcgttcctaagtaattattcttgtgcatttgagagtagtatgctacctaatgatttaattgtacttaggaatgaaggggaggaccagctaggacgtcgggatcaagatggaggcccaagttgacgttcagaatctgttccggcgctgcgacaccgtcttttgggccatgtatcttcgttgagcccattaggggcgcgtccagggtttgcgtaaccctagagtctttattaatagctgccacatccttgttagaggcgggttttgcttatgtttagatctgccaagaacagtcgccgtagatcggtttgtgagaccccaacttgtgagcttaatcattcatccgcaatattctagattgtgttctttcttgttcttgcttgtgtctttgattctcaggcaggaactagccctcgtggcgaggtcaatcgctcagtgcacggttgataaccagaggagaagtggtgctgcgattgcggggttctagtcgtgttgattggaagccggatcgtttgtgtgacatctccaccaaatcgatagttaccttcactgacggaagatcggac

SEQ ID NO: 42189 - DNA, 2017 bp, Zea Mays
aaataaagttaaatacattcccttgccttcctcagcggctcctcgtcctcggctcctcccgctcccctccgcactgtgtcgagccgagcgtgccgctggccgaccttggcaccttgcccgcgcccgcccgagccccgacgctgcctgaagcagcaagtgacagctcccctgggcgagccggtttactaccagcacggtgagcttcggtcgggcggagcagacgacaggcagcacaccaaggatgcgtccgagactaagttgatgaagcagcctacttgggtcttctttgagaaagaatcggtaactgacttaagagaacaaattctccaactcattcagcatgattgtaaggatcaagaggaaaaatcacgggcagagctactggagaagctcaacagatgtaaaagagatacacttatcgaactgtgtcgctcgtttgatttaattggctcaagagctaataggaaggaggaacttgtattgtttctgatggaattcattaaggatcactgttctggtagtgatgtcataaactcggataagaaatacaagaaaagaaagcgtgtcagagaagaggaaaatttgtctgctggtaaaccttcaaagaaaaagaaacgagagggtgaagaggaagcagaggatagagtaaaacattctgactgtgatttgctggacaacaaatattcatgtgctgatagtaagaatggaaaattcccaaatgaacagaccaactttgagccttctgggaggataaattactctgtatcagagaatttagatggagcatcactcagtgaagcgccaattcctacagatgagcaagcaataataaccacaccacctacaaagtttgttacagctgctgaggatgatagtactgacgtgaaggctttacaaaggaaaatgtcttctattgccaagaaaaaaacgacttctaaggaagattgcaaagtcaaattgtgtggtaatcgggagtctaaaggagacacaaagcctcgaaaacaagtaatcaaaccaagtaaagatgagctgagggaagctgtctttcttatcttggatactgcggactttgccactatgacctttggcgatgttgtaaaagaagtcgacaaatactttggcaaggatctgtttgagagaaagccactaataaggtcgcttatagaagaggagctctttaggctagcagacgaggcagagaagaaggaactggaagagtcggaagcagcagaggcgaaggctagagccgagcaagctgccaaggagatggcacaagttcaaacagttgaattggttatcaacgagcaaaatgtacttgaagatggtcgagatagcaacaccaaagacagtctaaagaacgcaaatgacagtgctaacaagaaatgtatcgatggtggggcttctgtggagtatggtttcaatgaaaacagctgttacgctgctgaaggttcagaagagcacaaagttgatgatgataataaaaacataactaaggatggcaatggtggaaaggtcgcagttgcacccactgcaaacactgattgtaccttacaactacagggttcaagcaacgtcgaagctgagacgactatgaagagcaatgttggaaccctagaagcgtcaaaagatggagaagtgagagatgccagaaatggagaaaacaatggcactgaagatggtgggaatgaaggaatcaggagtgggaatgttggtagcaatgcagaagctgaagagtctcacggtcatggaaataatgaacgcgcagaacataccgaagatgacaaggctcaggaatgtagccacaatgagaacagtgcaagtgtaggaatccttggcgatggagacggtgaagctagagaaggcgatataaatgcggaagcggaacaaagtcaagcagacggtggcggcaatagtaaagcggaagatgctgagcacaatgaaaacaccaaaactgacgccaattcaagcaagaatggtactactgctgctgtggagtttgaatatgaggatgtggatg

SEQ ID NO: 42190 - DNA, 4237 bp, Zea Mays
cccccgcatcgcgaaaaaatctttttctcgcctctcatcgctcctcgccatttctctctcctcccctccgtctcacccgccgcccgccgcgaaaatctgcgcacggacgcgccggctgcccgcggagagcctcgggtgggagcgcgccccgtcgagtgttgattacaggtgctcttattggttatgggatcaatgtgcaatttttttctttccgtttgagagcctttctagtttcttgggcaggctcttgagctaccaagcatgtcagaatcaaatgtgaagtggattgatgggcttcacttcacatcattgtactggcctccaccccaggatgtggagcagaagcaggcacaaatcttggcctacgtcgagtactttggccagtttacagctgacagtgagcagttccctgaagatgtagctcagctcattcaaagttcctatccatcaaaagaaagtcgcttgatagatgaagtattggcaacttttgttcttcatcatccggagcatggtcatgcagttgtacatccaattctttcacccatcatagatgggacactgtgctatgataggcatggtcctccattcagctccttcatctctttatttagccatacttctgagcaagagtactcagaacagtgggccttggcctgtggagaaattcttagagtcttaactcactacaataggccaattttcaaagttgaacgccaacacagtgaagctgaatgtagcaccacatctgatcaggcaacatctagtgattccacagataagaaatctaacaattctctaggaaatgaatctgaccggaagccattgaggccactaaccccgtggatcactgacatattgctagctgcacctttgggcattcgaagtgactattttcgatggtgtagcggtgtaatgggaaaatatgctgctggtggagagttgaagcctccaactactgatgggctgttgccaatggagctggagttatattaagtgtctgtgatgaggaggtagctcgttatgagacagcaaatttaacagcagcagctgttcctgcgcttctgctacctccgccaacgacacccttggacgagcatttggtggctggtctgccccctcttgaaccatatgctcgcttgttccatagatattatgcaattgctacaccaagtgctacacagaggttgctttttggtcttctcgaagcacctccatcatgggctccagatgcacttgatgcagcagtacagctagttgagctacttagagcagctgaagattatgcttctggcatgcggcttccaaagaattggatgcatctgcatttcttgcgtgccattggaactgcaatgtcaatgagagctggtattgctgctgatacagctgctgctctgcttttccgaatactttcccaaccaacgctgctttttccaccactgcgacatgctgaaggagttgacgtacatcatgaaccactaggtggctatgtatcatcatataagaaacagttggaagttcctgcatctgaggccactatcgatgccactgcacaaggcattgcttctttgttgtgtgctcatgggcctgatgttgagtggagaatatgtaccatctgggaagctgcctatggtttgctaccactaagttcatcagcagttgatttacctgaaattgttgtagctgccccgcttcagccacctacactgtcatggaacctgtacttaccattattaaaagtattcgagtatctacctcgtggaagtccatctgaagcatgcttgatgaggatatttgtggcaacagttgaagctatacttaggagagcttttccttctgaaacaccagagcaatccagaaagccaagaagtcaatctaagaatcttgctgttgctgaacttcacacaatgatacattcactctttgttgaatcctgtgcctcaatggaccttgcctcccggttgctatttgtggtgttaactgtttgtgtaagtcatcaagctttgccagggggcagcaaaagaccaactggtagcgataaccattccctcgaggaagccactgagcattcaagattaacaaatggaagaagcagatgtaagaagagacaaggccctgttgctacgtttgattcgtatgttctagctgcagtttgtgccttatcttgtgagcttcagctgttcccttgcatttctaagaatggatcacattcaaatttaaaggattccatgaagattatcatacctggaaaaaacaatgggatcaataatgagctacacagtagcatcagctcagcaattattcatactcgtagaattcttgccatcctcgaagcccttttctccttgaagccatcatcagttggtacctcatggagctatagctcaaatgaaatagttgcagcagctatggttgctgctcacgtttctgagttattccgtcggtccaggccatgccttaattcactctctgcactgatgagatgcaagcgggatgctgagatttctaccagggcatcatccctctaccatttgattgacttgcatggtaaaacagtgtcctccattgtgaacaaagctgagcctcttgaagctcacctgacccttacaccagtaaagaaggttaatcaacatcgctgtgaggaaaacaacaccaactcatcggatagtgccaagttggaaaacaagaatggttcaacacataagaaaaacggtttctcaaaaccacacttgaaatgtgcagaagaggttctgaacggcaatgttgcaagtacatctgggaaatccattgcaagcttacaggtggaagcatctgatttggcaaacttccttaccatggatcggaatggggggtaccgagatgtctgcagaaagcacatcagctcaccaaggatggaggaaggttgtggatgcactttgtgatgtcgtttcagcctcaccaaccaaggcctcagctgctatcgttctccaggccgagaaggacttgcagccttggattgctagagacgacgaacaaggccagaagatgtggagagtcaaccaacgtatagtgaagcttatagcggagctcatgaggaaccatgacagccctgaaaccttggtgatactcgctagtgcctctgaccttctacttcgtgctactgatggaatacttgttgacggtgaagcttgtactttgccacagcttgagcttctcgaagtaaccgctcgagcagtccatcttattattgaatggggagatccaggtttatcagttgctgatggcctttctaatctgctaaagtgccgtctttcaaccaccatccgctgcctttctcacccaagcgcgcacgtgcgcgcgctcagcatgtccgttctccgtgacatcctggaccacggatccgtgagccccaacaagatcagccgaggggaacagcagcggaatggcatccagagcccatcgtaccggtgcgtggccgcaggcatcctcaactggcaagcggacgtggagaggtgcatagagtgggaagcccacagccgccgcgccaccgggctgacgctcgccttcctcagtacggcggcgaaggagctcggctgccctctcccgtgctgacgaggccgctcccggatctgatctgacatcggcggccacttgacggccagtgctggcagcttgctgcgggaccggcgagtaggacgctaatctctcgaccaaggacgactcgccggtttgttcacgtgatatgtgatcaaactgatattagatggtgtttccaaagtatatatctactgaggggcttgctcccatgatgcgattttattccaatctgacgtcagatgctttacgagcatatttaactgcttgagctgtacgtagcttgtattacttgtaactttgtgtaatatggttattattgccgaagaagcagaacatagctttttcttttttttctctctcttttttagactgctgctagatccttatccatgcgttgcaacggagcgccatatagattgaagttccccttgcagggctccttgtacggtctataacatgaacataaagatggcatccagtagtcaatcagcaactatcgcaatgagattggtcttctgcacgtgacccagtttagctcccgtgcagggctctctgtaacctactgtgatgtcccatgacatgaacataaatgtggcaggtttatcattcaataaccaaacagcagccgatatgtttcatctttatacataagtgctgatctaat

SEQ ID NO: 42191 - DNA, 2786 bp, Zea Mays
gaactaccaccgggtgcgggtagctagcgggtagggtaccaaaacggcggcgctagaaaggaaaacctgccgtactgtcccctcttcccttttactgccgcctgccggccgcgagggagggagggacggaggtgctcatctgtgcggcggcttcggtgtcggtcccaggggaggcggggagccatggcgcggaagcacggctggcagctcccagcccacaccctgcagatcgttgcaattacagttttcttccttctggtggttgcgttttatgccttctttgtgccgtttttgggaaagcaagtagttgagtatattgcaattggcgtttatactcctgtggcacttgcagttttcatcctttacattcgatgcaccagtataaaccctgcggatcctgggatcatgtcaaagtttgaggatggccttatcaatataccaaccaatggctctggaatagaaggcatgaatttgccccagaaagtaaacaatgctacaggaacaaactctccaatgtctacttgcagaagttctctagatgggcattctaatcaaagaggttcatccataggggaggcaaacatgaatctaggatcacaactgccaaagaaaagatcaagctgttggttgctaggtgggcttctatgtgctacatttgtcaaggaagactgccgaaaaactgatgactcggagcagcaagcaaatggggaggaggctctgttttgcacattatgtaatgctgagtggctaaataactgtgttgggcggaagaattatttcacattccttgctctgatggcaatcagtcttatctggcttgcaattgaatttggagtgggaattgctgttattgtactatgttttgtcgataagaatgcatcaagaaatattcaagacaagttggggaatggcttgactcgtgctccatttgctgttatcgtgggcatatttaccttactttcattggtggcatgcatacctttgggcgaacttctctttttccacataatattgataagaaaggggattacaacttatgattatgttgttgcaatgagagctatgagtgaggcagctccagaggacgaggaaggagaaaatatcatttactcgccatcaaattcagcaacaactgggttcagtgtaggaagttcacttggtattcaccacaaaggtgcttggtgtactcctccaaggatatttatcgatcaggatgaagtgatcccacatctggagcctggaatggtgccttcaaccgtggaccctgatggtgctggatatccggaaagagcaaatagagccaagaaggcagtcaaaatcagtgctcgcagcctcgcaaagctcgataagaatgaggtaatgaaagctgctgcaaaagctcgggcatcatcctcggttctgcgaccaatagatgcccgccatggtcatgaagctgatgtcatctccagcggcagtgccagtgtcaggagcagcatgagtgttgactacagtggcacaaaggaatcaaacagcgagatgaaactttctccgcttcataactcatacccccaaagccttgcaagccaggatgaatacgataccggcacaccaaccgcaagcagtttaagcagtctggtcaacatccacaagcttgcatcccactctcagttcagtgctgcgcctcgccctgcacctccggaaagacctgtgccggcgatggtgcggccacctgttcccaccacacaaataaccaacccagggataccgcggccagctgttcccacaacacaaacaaccaacccgatgttccaatcagccacatcttatgttcgagagaaccgaagggcctctgtcgtctgggatcaagaggctggtcggtacgtgtcagttcctgcacagacaagaacgggaactggagccgacctgccagcaagaaacccacggttcttggcgaacccaagtggcgagccaagcagccatgtgaggggtgttgcacccggcaacacatcgtcctcagcaatgccgtcagggcagccttcggagaggctgacctactctgggcagtcgatattcttcggtggccccatgctgaacacccctagcctgggcgcccagaggaacgaggcaggcgcaagagcgcgtccggagggaagcagagatcctaatgcccagcagcgtgacatccggggtgagaaagcgaggacaggctccttgccagtatttgctcctgggacggtccagaggaacccgccctttgacaaatgacctgctcctgctcatgaagtttatctgaagtgcgatgatgccgttacgctggaacacccccagcctgaagagttggcagatagttagggctgctctactggggttgccagacgggcggacaaggcagccgttggattgaaggctgctgccctgctggcactaggcaggtgctaacgagaaccacaaatattgctcgcagtcagtgctgacatttttcagtgttgcgggggcgatggagtgactgacgcacactgtgtttgtgttaggagttcatcagatacttgatgcgcgacagataggaagagctaatttctggcgatgtcaaacgctgatttgcagctgactttgtagcgtcgattgtggtcactgtgtggtgtgtgtgtgccatgggatactagtagacatgtgtaaaatggttagtcgaggtgcactttcggacactgctcgtgcgtacttgcttgcttgctagtaacaggtcttgagtttattcttgtagcatctccctttgtatggtgcgaaccatctctgcattttgttgtgct

SEQ ID NO: 42192 - DNA, 972 bp, Zea Mays
ctaggtgctgctacttgaaatcgagtggtgtgcaaacctggtagtctgaagacatacaaaaagttcgaggcggaaatatatgtcctcacaaaggatgaaggtggctggcacactgcctttgtcacaaattacagcccccaattctacttcaggacaactgatgtcactggaagagttgagttgcttggggagatgaagatggttttgcccggtgataatgtaactacgaattttgagttgatatcacttgttcctcttgaacctggtttctgaaagccaggaagttcgattccaacaagacaatgcaaatgtggtcagagatgttgaaagccaggaagtttgactattttttggcattgacctgattctccaagggaagaagcaatttgacatggatcctcccgccggcccctttcggtactaaagaggacccgactatgattgaatcctacaataacaagagaacatctggctgatctggtggtgaaggagttacatctacgctaaccatggaggaaccgactatgattgaatcctacaataacaagagaacagttggctgatctggtggcgaaggagttacatctacgctaaccatgctcaaggtcattggtgatggtggttatccaaacgaccactatgacaaggatgatcatcaatgaggccttgtgtcgataattataataacaactttgtgaaacatggttttgccccatctttgcagcatcatattgtcctatagtattgtaattgataagtgtttgagcatgaagcaggttaggtggtgttctacacctacgaattacgcaatcacatatagattgtttctatgggtttttagccatgtactgtagtgaatctttattactggcatacaacatctcacaacagttctaataatgagcaataaactgatatgtatttactggtttggtggtaagcttgaagtttgccgagtaatatgagtttagg

SEQ ID NO: 42193 - DNA, 1104 bp, Zea Mays
ccgagctccgacacagccgtcgccctgagcccgtcatccatgctcccttccatccttctccccaccagcacaaccacaccccctctcccccctcgccgcctccccagaccccgacacgtcctccccggccgcaatgaccgctccccgaccgtggtccccgctagcaaacccaagctcgtcggggagaagagcaaggggggcgcagaggcttgcctacctagctcgtcggggccctatggagatccagcaccaccggggctgggcaactccaaggttgtgaaggtgcagagcgaggaggcgtgggatctgttcaccgatcgagcgagcaatgaaggctgggccaggtatcggcgatgccctcggcgacatcgaaatctactccgcggccaccggcgagcccgtcctgttcagagacctgtgggactaggacgagaattagagagctgtttagatgactggagttcacattcatcttctgctggcaacccaaacataccatatgtggttgtctccaagtcatcaattgtgactgctgtatgcaaagagattcttggctgctacaggaagttacttggcattcctgatctgttgaatcaaccaaacatgtcaattctgaagcaacttttgcagactttacagccaactgaaaattttgatgatgttctttctgagttccaatcatctcttggtccttgcaatgttgattacctatattgtggagaatgtaaaatgttggaggatattatggattcagtgtcctcattttcataccttttgtcttctgatgtgttaattactatacaatcaattgtaaattctgttgttgtgttgttggacaaatccggggaaccaaatgggaaaaatatacacatgggatgctccaaagcaatcatttcctttctgcgaaagcgtcttggatactcagctcataagctgctcagtgctgatttccctagcgaagatgttggaaaaggatggcagagtaaaggtgatcttatacagaagatattgcaaatatacctcaggaatagtgactctacttcagatctacttgctgagataggtcgtgaattgcctaaggcacccaacacacaattgtttttt

SEQ ID NO: 42194 - DNA, 1144 bp, Zea Mays
atcagatagcgcgctcccagtcccagtccatcatcggacacacctgctctcggctcgtggttcgcggcttcgcgcacgcgcagcaatggcgctccggccgcagctgcttcgcctcctcctcccatcgcctccccaccggaaccctccgcctccgccctcctccccgtccgtcgcacccattggccgccgcaccgccgcagcagccgtcctcctgctcgccgcgggcgtctccgccccgcccccgcgcgccgcccgcgccgagcccgacggcgaggacgtcgacgaggcccgcatcgtccgcctattccaggaggcgtcgccgtcggtcgtgttcatcaaggacctcgtcgtcgcggggccgcaggggcggagagttggtgaggatgaggacggggacgaggagggcggcggtgctaaggtggagggcacaggctcgggattcgtgtgggactccacgggccacattgtcacgaattaccacgtggttgcgaagttagctggagacggatctgcatctcatcgctgcaaggtgtttttggagggttctggtggcaaaagttactcaaaggaagcgaggctaatagggtgtgatccagcatatgatcttgcggttctgaagatagatgctgacagggaccagctgaggcctgctctgattggcacatcacggagtttgcgagttgggcaaagctgctttgccattgggaacccttatggatatgaacacactctaactactggggttattagtggattggggagggaaataccatctcccaatgggagagcgatccgtggggctatacagacagatactgctataaatgctggtaactcaggaggcccacttattgactcttatggccatgtaattggtgtcaatactgctacattcacacgtaaaggatctgggatctcgtccggggtgaacttcgccatccccatcgacacggtggtgcagtcggtccccaacctgatagtgtacgggacctccgtgagcaacagatgagccaggtctccgctctctttcatcacagagacggtccaagaagaaaggaacggcacgaggaagaaacggagggcaaggggaacctcgactgccatcatggggagctccggcgctgacccggccgtgtccggtccg

SEQ ID NO: 42195 - DNA, 534 bp, Zea Mays
agcacgctctacctcaacgttgctgcgagatcagatctgcatcaactcttcgtcacgccggtaggtccttggcctagccgaactgtcctacgcgacatgcttcaattctcctctacgtaattaagcggtatgcatcacgttgaggatggaatcttatattgctattcagatagaaaaataaatagcgccggggccatgctgcgcgctagcacccacgccgagggcccgcttgtcactgctggcgtatatcttgcctgcgtgcacaatacaggagcttaaagttgaataccccgagagggcgatgattgggttcaccatttgccgcactgcatgcagtcttggctctgagctgtgcgacgccataggttagatcaccagtgcagccaccatatgagcacaacaacaaaaaaggaactgtcgatttctctggagactgtcctctcctccagcgtggcctctgctctgctttgctgccggacgacatatccatagctagttggggcgctctgtggcctgatttggccggatcaggac

SEQ ID NO: 42196 - DNA, 455 bp, Zea Mays
cggagtcttgccctttatgcgaccagatggaagaaactatcaaccatttgctggttcagtgcagttttgcaaaacagttttggttcagccttctgcggtcagtgggtttccaggagctctgcccttcccatgatgatgtctgttttgaaacctggtggaggaatagtgctgccagggtgggcaaacctttatccaagggattcaattctctagtcattttgggtgcatggtctttgtggaagcatagaaataggtgtgtttttgataattgtaaccctagcgctgcggtagtgttggcagctgcaagggaggagttaatgggttggcgtatggctggagccaaagcgctctctttcttccatttagaagaggtgtcttaggtgccttagttgtttggggtgtgttttggttttggtttgccaaatgtaacacctttgtatcggggttttttctcc

SEQ ID NO: 42197 - DNA, 2985 bp, Zea Mays
gccccttctccgccttcattccccaaacaccaaaacccggctccgcgtctccgccgaagcgggaggcgggcgggggcaggcacctgttcgcgctgcgcgaaattacactccccctccctctcttttctcactccgattccccactcgcgatggccgcgcctcgacccccgccgctgggggccctgggaggcgttgtcggtggcagcggtggcgccgcccccgccgccggggcgcccgccggagtcagcatgcggatgttccacggcgagtcgttccttggcgagatggaggtcttcccgatgaagcgggacggcgaggggggcctccctttcccgaccaacgagatccgcgtcagccacttctcgccggcgagcgagaggtgcccgcctctcgctatcctgcagaccatcgcgcccttctccgtacggtgcaagttgcagaccaagcttacgcctcccaacccgggcctccagcgcttgtatctcacttgtttcaacgagttcaagagtgctgtggtagtagttggggatgaggagctgcacctggtggcaatgccgaccaaatcagggaaggtgccatgcttttggtgctgctcagcacgctcggggctctatgcagcgtccgttggcatgctcaacttgcgctgtcttgccattgtgtttgatcttgatgagacccttattgttgctaacacaatgaagtccttcgaggatcggatcgagatgctctcccgcagaatggatgtcgaagatgatcctatcagaatagcagggatgtctgcagaaatcaaacgatatattgaggacaaagagcttctcaaagaattcattgacatggatacagttacggacaatggcaaaatagttggaacccagaaagaggaggttcaacctatgtctggtggtcaggagcgtgttttccgtccagttatcagactgcctgacaggaatgcaattttgactcgcatcaatccagagaatcgtgataccagtgtttttgtaaagctaagacctgcttgggaagaattgaggagttacctaactgcaaagggacgaaaaagatttgaggtttatgtatgtacaatggctgagagagattatgctcttgaaatgtggagacttcttgatccagaaggcaacttaataagtccacaacagctctcagaacgcgtaaattgtgtaaagtcaggttccaaaaagtccctgcagaatgttttccgagacagaagatgccatccaaagatggccatggtaattgatgaccgacttaatgtttgggatgataaagatcaacacagagttcatgtcgtccctgcatatattccatactatgctccacaagcggagatggccaatgctgttccagttctatgtgttgcaaggaatgttgcttgcaatgttcgtggtgggtttttcagagagtttgatgagaatctattgaggaaagtgttcgaactatactatgaaaatgggttattggatcttccatatgctccagatgttggtgactatttagtctgcgaggataccagttttgtaccaggcaacaaagatcaggctcctatacctgagggcatgaggggaactgaagtagagaagagattaaatgggcagtcatatcggtgggagcaaagggaaggacaacaaatgccatcttcaatccgttcaccagatgacgagggaatgcctatccgaggtactggaggagttaggaatatccagccaaatgggggctcgctagcaataaccccctcggtatatgtcacagtgttgcaagaaattgggcggctgtgcgactccaaggtggaatttagatctactgtaagcagtgtcagaagtatgctattttctgtagaggttctgtttaataatgaaaaaattggaataggcgtcggaaaaacaagagatgaagctcaagttcaagctgctgagaaagctctccaaaatttggagaacagttatttgtcatctggtgctccagttgctggagttcctaagaaagattcaaggaagtcccctgggaggagtggtaatggctttctggaggatgctacttgttcagataacgatatctctatgcgagaaccttctggaagtgcattgaaattggatcattcaaataatgtggatacattgtcgtctattatgagtcttattagagaacattgcttggaggaccaacatgtagtatttcgagatgaagtccagaattctagcccagccaggaatgaagaatatcatttccaggttgaactagcaggattgattctcgggaggggcgttggttcggacagagaggccgcgaagcttctggtaattgattacccaaatcattactgactggaaaagcaaaaataaatcgagtggactgtctaacatgctacatacattattcaaaagaagaatgtgctattttgttttggctgcagaagaggcactgaagaccttgaaatcaaccactgacccacaaattaagaagtatctgagacctgtaagatgcaatggctgattcccttccacgttctgagctccgcaaccaaatgagctttagctcatttcaccgttacagatgtcattgatttagcagaagtgcatcaccctttctgtgagtatggttgacatctcacctcgagcacatgatgtgtgccaaacacatgtcttgttctggaaatcctggctttgaaggtggtaacatagagagcggacatggtgctttatgcattcttttgaccatcatacaagtatagatgttatgtcttgtttaggatagtggcatagttggctgtaaacaagcaggagagtagatgcggatctaaaattcttgttttgaaggttatgctgactcattaacagttatggatcgttaaaaattgaatgcctgtaccagttgtcatgtttacatgtctgttataaagtgctaaatcctttacaaacttatttcaactacaaataaattcaagtgctcgtatttgttgagttatacatt

SEQ ID NO: 42198 - DNA, 884 bp, Zea Mays
cgttcgcggttggctcgagcggcaccgatggagcgacggctccgtttcccagaaggcgaaaggccgatgagaccgacggacgattcgtgccgatcgcacaccggcaggcggtggcgagccgggcggacggggcggcggcgggctcgccgtacgcggtgcataggggacatgagggtgctgctgtctaggtcgtgtaggtcggtcgccggtcccgcccgccgtctccacggccaagaccgtggtggcgtcctcctccaacgttcgtccgtgtttgtctccatggcgctctcgaatgcctaagccaaggccgaccgcctcgagctggtgctcgacgaaacgccccgcaggaccgagttctggtagaccatgctcgtcgattcgctggcgagggccggccgacagcacgacgcattctgcctctctgcggagatgcgggcctccagcgtggcctgcgactcccacgtctgcgtatgtcactacgggaagagctacatattcatcgtaaattatgtgcaaaggatgtacaagcaagctgcccttgtgcagacagactcagaggtgtagagaagacatggtgtccgctgaggattgcaagatccattgctgcataggctgatgtatgcggcacaccatcaggagcagactgatcccgcacacataaggtttggtgctgcgaacagagtgttagaaccaaattcttgtcaggctaaaccgatttatatcatagatgcaggtgattttttttcttatgattatgatcttaaatgggatttagttggaccgtgctattctgctataactgtaaagttagggtgccgaatagttgatgcacctgcttcatcatctagaaaaaagaaataaaggagatttttgacgagtttcat

SEQ ID NO: 42199 - DNA, 3855 bp, Zea Mays
cctttggcaacccaattcgagttccatcgcaccgcatcatcaccccacgcaggtagggttttccttcctttcggcctcgccgcgtcgatctccgtcaatccacccgcccgccccctacccaaaccctagggcttccaaggtccaagcttgccgttgatggggcgcaagaagaacgtcgccatcgacgacgacgagtacttctttccgcaggacgacgcggccgacccagccccgcccccgcccgcccccgccgccgccgacaaagagaagtccaagaagggcggcaagaagggaaagaaggggggcaaggctgccgcgcccgacgacgacgactacgagccccctcccccgccgccgccggccgccgacgaggacgatgacggcgagcccatcaacctcgtcttcaccggcaagaaaaagaagaagaagggcgccactcccgccgctcccttcagcgccttcagcgccctcggcgaggagggcgaggaccaggatgaggaggaccccgccccgtctgccgcagccgagccggaggccatcaacgatccggcggaggacgacgatgacgtcgtcgatttcgatttcagcaaggccaagaagaaaaagaagaaggacaagggacctcgctcggcacctgccaaagacgaggatgtcgagcctgctccgccacccccacctgtggctgaggaggaggatgaggagcccccagtgattgccgcagcagctgcgaagaagccgcagaagaagaagaaaaagaagggtgcgtttatgatggatggtgagaatgtcgaccagatccttgcggggatggaggatcctcagctcatggatgagcctgaaccagaggaggaagagcgtctgcgacgtgaggaggaggagaggaaagcagaggaagcaaagaggaggaggaaggagagggaaaaggagaagctgctcaagaagaaacaggagggtaaactcttgactgggaagcagaaggaggaagcaaagaggttagaagccatgaggagacagtttcttgagcagagtgaactccaaaaggctgaggatgctgcccctgagaccaagaagaggccaatatatgattctaagaaaaagaaagctcaatcaaaggccacagagactgcaaaagtagtcgaagaacaacaggaagaactcaatgaagttaacaatgacgaggaagaatatgtgctcgtggatcaggaatctcaatctcaggttgaggaatctgatgagaaaactgaacctgaccaggagactgaagagccaaaaccagaagaggacgaggaagatgaggatgagtgggatgcaaagagctgggatgatattgatgtcaacttgcctaagataagcgcttttgatgaggaagaggcaaagcctattgtcaagaaggctgagcctgtccagaagcaggagaataataaagctcaacctgcaattcctgctgccaaaaagcttgttccttctgttgcagactctaaaaagagtgaaactgatgatgtgggtgccagtaatggaaatgttaagaggcacaaaaagaaaggacctgtgaaagaggataactctaagagtggtagtgacctcagatcaccaatctgctgcatccttgggcacgtcgatactggaaagacaaagctactagattgtattaggcgcactaatgtccaagaaggcgaagctgggggtattacccaacagatcggagcaacatacttccctactgaaaacattagagagagaactagggagttgaaagctgatgctacactcaaggttccaggcctgcttgttattgatacccctgggcatgagtcgttcagtaatctgcgttcgagaggttcaagtttgtgtgatattgccattttagttgttgacatcatgcatgggcttgaacctcagacaattgaatccctgaatcttttgaagagtcgagatgcagtgttcattgttgctttgaataaggttgatcgtctctatggttggaagaaatgtccaaatgctcctattgtgaaggctttaaaacaacaaaatgaagatgttaagagggagttcaatatgagactcacagatattgttacacaattcaagatgcaaggagtgaatactgctttgtactacaagaacaaggagatggaagatacctttaacatagtgcctacgagtgctgtaagtggtgaaggtattcctgatttgcttctgttactggttcaatggactcagaagacaatggaagaaaaactcacttttgttgatgaagtccagtgtactgtactggaagtcaaggttgttgaaggccatggtactacaattgatgttgttttggtcaatggtatactccatgaaggagatcaaatagttgtttgtggcatgcagggacccattgtgacaactgtcagggctttgttaacaccacacccaatgagagagcttcgagttaagggcacctacatacatcataaggagatcagagctgcacaaggagtcaaaatatctgctcagggtctcgaacatgcaattgcagggacagccctttacgtgttaggacctgatgatgatttagacaaactgaatgaagctgttatggaagagatgacacgggttaggagccggattgacaggagtggtgaaggtgtctatgtacaggcatctacccttgggtctttggaagctctcactgagttcttgaagagccctgctgtgaatattcccttctgtgatttcagtatagggccagtgcataagaaggatgttatgaaggctagtgtcatgcttgagagaaagaaagaatatgcaactatcttggcctttgatgtcaaagtgatgcctgatgcccgcgatctcgcagaagagtccggtgtgaggatctttgtggcagatataatataccatctgtttgatcaatttacagcatacattaagaacctcaaggaagagaagaagaaagaaagcgctgaagaagctgtgttcccttgtgttcttaagattatgccaaactgtgtcttcaacaagaaggacccaatcgttttgggtgttgatgtccttgaaggaatagccaaggtgggaactcctctctgcatacccagtaaagaatttattgatattgggaagattgcctcagttgaaatcaaccacaagcaagttgatatggctacaaaaggccaaaaggttgctattaagattattgcgaacaattctgatgagcagcagaggagcttcggcagacactttgatatggaagatgagcttgtcagccggatatcaagaagatctattgatattttgaaacagaactacagggaggatttgacaactgaagactggaaacttgttgtaaagttgaaatcaatattgaagatacaatgaaaagccccctcccctaacacacctgcccatgaatttgggagttgtggttctgtggcgccacacctatctctagttctctacaccggagttccccagggagggttaccaattttgatacggtttgatttttgtaatttgctcggaaggcgcttcattttacaaccacattccgtaataacataatattttgtgtttgtttctgtacttttcatgaactctgaagcctctcaccaacgaattgtgtaatactacatgctatggaaaatctgtgctgtttacgacatggggaggccttgccttggctagtttgggaactcagatcctctctaggattgaagggaacgagggggaagggaaattagtttgtttccctgtattttccttagtctcgagagtatgcatttgagttctcaaactagccctaaaagttgtggctttacatcttgacaagaagagattaatagcttgacaagaagagattatagatccacc

SEQ ID NO: 42200 - DNA, 882 bp, Zea Mays
aggagtaggaaccggcgcagcgagactataggcatggacgtggaagcgagccatgagtctccgcccttgcgcagcaagacgatgcgccgcctcctggtggcgaccaactgcgtgatgctcgcgcttggcgtcaccggcgggcagctcctcagccgcctctacttcagcaagggcggccaccggcagtggctctccggatggctgcagaccggtgggtggccgctgctgctcccgccagtggcggcttcctacgtccgccgccgagcgcgctaccggagcgccccggcgctgctcacccagacccagccgcgcatactgctggccgccgcggggctcgggctcatcgcgggcgtggacaacttgctctacgcctggggcctcgagttcctgcccgtctccacctccgcgatcctcatctccacgcagctggccttcacggtgctgttcgcgttcctgatcgtgcggcagcggctgacgatggcgacggtgaacgccgtggcgctgctgacggtgggcgccgtcgtgctgggcctgcacgtctcctccgaccgccccgcgggcgtcaccaggagccagtactggctgggcttcacgctcaccctgggcgccgcggtgctgtacgggctgttcctgccgctggtcgagctcacctacaagtgcgccgcggggggcggacgcgccgtgacgtacgcgctggtggtggagttgcagctggtgatggggttcgtcgccaccgcgttctgcaccgtcggcatgatcgtcaacaaggacttccaggtgatgcatgataacttcatttatcaaatttagggtttaaaggttgttcagtttttagggaccaaatttaactcactctattttattctattcttagttcctaaa

SEQ ID NO: 42201 - DNA, 399 bp, Zea Mays
acgccatgtctctcgatttcaagctcatcctcgatgagttcaaccggcggttcgacgagctagagattcgctgggaccggcgcttctcgtccgccgcgtacatcgacctcccgcccacctcgctcagcatcaaccactcctccgacgcgtctgccagtgcgccgcccaccccggtcgcggtcatcgcagacaattggggcgggtgctttgacgacggcgagcagtaccgcactaggccatccatcgtcgtcgacaactggggcggattcttctatggcgaggacgtcgctccgtcagacaaccccacgagattcgtcctccccgttgcctccaccgacgagcccagcatcgacaccgcgccggcccgcgccaactctggagccgcggatgactccgtgt

SEQ ID NO: 42202 - DNA, 3120 bp, Zea Mays
agatctggggcagggcaaggagagggcgaggtgcgacaggagaggtagggaggaaccactcacaactcgattgcataaaaaactcgggtccggaagctggttcctgtctgacgacgctgtactcaagccacacgtcgttcgagctgtggcggactgcccgtgaagcgcggggagaagctcaaactccaccgggttttaataaaaggaacagccacggactctgagtctctgacgctgccttttgctctccccttccaccccgtctgcccgcgcgcgctgtctcgtggcgacaactgggcgaccgccgccgccgtcgctgccgccgctacgccaagaagctaggtcttcatcggtcccttcgtcgagattttctccggagacaagcacccagcaggggactacaagattgattttgatggattatgacaagtctagaagaagtaactccaaaaagaggagacattccaattctgatgacggaaagaggaaacggttgagctctaggcatgatgacacatctatgtcctctgagccaattgaaaccatctacaggatattgtgcccggcaaaaaagataggcagtgtcttgggaagaggtggtgacattgttaaggcccttagagaggaaactaaagccaagataagggttgccgattccattcctggtgcagatgagagagtaattatcatcttcaattaccaaaatcaacctgaacttactgatgaagcagctgaaaaacaaattagtgatggcttagggaacatgaaaccccattgctttgcccaagatgccttattgaagatacatgataagattgtggctgatgaaatttatgatgaagtcgctcatgatgaaagttctgatgatgtcactgctcgaattttggttcaaggcaatcaagttggctgccttctaggaaaaggtggctccattatacaacaactacgaagtgatactggtgctgggatccgtgtcttgtcatctgaaaaccttccccagtgtgcacttcaaagtgatgaactggtgcagatatctggagcaccatctcttgtaagaaaagctctatatgaaatatctactcgtctccatcagcatcctcgtaaggaaaatagacctcttgaacaaataatagatgcaagcacacaaaggaaacacgagtctccaacactgcaacatgaaaatccaatgttgccgcacctgcatagtcatcatccacctccaatacccctgcttgacccatacagaagtggacctcagtatcctgttagtgaaactgaagagttttctatcagaatcctatgtgcttctgagctcattggttcagttattgggaaaagtggggctaatgttaggcgggtagagcagcagactggtgctcgcattaaagttcaagagattgacaaagatgcttctggagaaaggctgatcattgtttcatctaacgagataccaactgaaccaatatccccaacaattgaggcactcattttgctccacgataaagtgattactgaaatgagaagacgaactggggctgaaattcgagtttactcgaaggcagataaaccaaaatacttgtcttttggtgatgaacttgtgcaggttgcagggcctccagctattgcaagaggagccctcacagagattgcttcgaggcttagaactaggactttgagagatacaagtactgccaataatcctccaccttttgccccttccgatgatcctactgtcgatatgcctagcagaaaattaacactatatggagggcctaccaatgatacaccgtatggaaggcctgccaatgatccactgtatggaaggcctgccattgatccaccatttggaagacctaccaacgatcgaccatacggaaggcctgccatcgttccaccatttggaagacctaccaatgatccaccatatggaaggcctgccaatgatccaccatatgaaaggcctaccaatgatccaccatatggacgaccttccagtactatagcatatggaagaccaaacagaagtgcacctcgtgatccttcagatgcatatcctgtagactacttctctaaaagagaacatcctagtggaggccctatgtttactagtaatgccccatcagctgcttatgagagatatgcagcacccacacactttcctactagagaacctccctcaactttcagtcatcgttcctatcgtgaccacatgcctactgatagctactctagtaggggtacacagaaattagacatcacgagagatggaaattcagatgcttatgattatacagaggctgctggacaaattcatggactggaggactatagaggactgccaagtgcttctggaaggttctcgagcactattgaactaaggattccaaatagttctttggagtctattgttggtgttggcggggtcaatttagcagagatacgtcagatttctggtgcaagactgaggctacatgaggctcatgctggttcttctgagtctgtggtggagatccagggcacactggaccaagcaaaagctgcgcagagcctcctggagggctttatcagcgcgaacagcaggcagcagcaatcccattcttctcgcatgccactttacccaagatggggatagcttctggttgtggcaggggaaaaccgagtcagcagggttggctggagttatctcagactgcagattagatgcatcgatgatgttaatggtagctgtttaaattgaccgtgcaagcatgataacttatattatgccataggacaagtaatgctgattctctcatgaaatactaagtgacaagctgtctctgtagttgtatttgtttctgaatgtttgaaccctactgttacaacggctgctattttaggtcagatttcagaggccggataattatgttatctgcagagttgggccaaaaaaaaaagctcaatctggttgagactggcttcacccatgccgtttcatttttagaagttacagcatctctgcaaaatatatgggtaaggcctcttggaacgcatgaatttcatagaaatcagtttattttctcagaaaaaacatgggaaacaggggaaaaaaatcccacgttccaagaggcctaaagtttg

SEQ ID NO: 42203 - DNA, 831 bp, Zea Mays
aaatagttaaataattacatcatacaaagacaacgatccaacaaccacagttgactgggagacgacggcctagacctctcacaaactcaccgcgacatccttcatgcttcttatgttgtggtacctatccttgacctgggggatgtgactacaacaagggtgagctacatacgttcatcgctcaacaagttatggggaataatatgtatgagctcacttgcagtggggctgatgtgaagtgtaaagcttaccaaagaagatggttaaaactaagcattgcttttagagttggtcaaaattttcttagcagttactaagtgtaagtagataccaacccaattaaataagagatcacaattaataataaatcccacaatgcactgcaaatgacaaattaagtttaattccataagttaatcatgtgagagtccgagttgctcatgaccgtgagtaccgctgatatactagttttacactctgcagaggttgcgcatctttacccaaaagtcgtattactcatttgccaagggatcacaactttccattcatctctgccgagcagacgaggcagggaagcactacaaggcctttacaaagttccactagcttcagaaaaccccctacggttctaaggacggcaagataggaatcactcgtccgaaaagccattgcagcacgattgactcgagaacctccctataccacagctcttctaccgcccttgccccattaaggtaaggtagtcttccactagctttccaaattagtcagccaagggtgtcccataccacccttgtggtagcattgttttcccgggtggtcactccatgt

SEQ ID NO: 42204 - DNA, 3253 bp, Zea Mays
agcccaggcacacacgactagaaccaggcaaccagctgcggagggaggaaacctagcggaacactgtgcaggtgacggcggcgcgctaccggtgacaggggatacggcggcatcgtcccctcctccatccccggcgcggcggcgccagcagccggcctgcaggcacacaagtggccacccttccaatggcggtggagaagtccagcagcggcacatcaactccctccaccacctccaccatggaccggtttcagaagattgtcctaagctgggattacctccgtctcatcgctgaatccaagggcggcaagcaggccaaggtgctgcagcatgtgaagaacacatacgtctcggtggctgagtaccttggtgtctttgagccactgctctttgaggaggtcaaggcacagatcatccagggacgcagtaacgacgaggaagaatctgggatggactggaggaggggagcagtggggtcgtgcacggagtctgaggggttccacaagctctctgtggcggtggaagacaattttcaggataatgtgtcagagaatgatctactgcttatctccaaggagaaatttgaggagggatcgacccctaatgcatatgcatttgcattagtggagcagcgaggtggtggcatacatatttcacttagaacttttgtggcaggtgaaattcaaaatctgaatgttgcaaagcctgtgaagtctacaaggctgcaacattttgcttccattattgcaagtcaaaacagcttgctgtggatactgaaggtctgcagcttgtctacaataatgcgggagttcacagctatgcattccgtagcttctctaccttttaaggatttgattctttcagctaccgaggcgcacaaggatggtgatgatcaaagtcgtgcgtggaatgtccctgagccacttatggattatctcaaagtgaatcttaatgattcccagctagaagcagttaatgcaggtctttcacgcagatcctttgttcttattcagggccctccaggaacaggaaagacacaaactattcttggactccttagtgccgttctccattctgctcctgcaagaatgcagatcaaaggaggatttgatgttctaaaacatgggccagaactggacattgatggcaagcgtgcacactggataaaggcatctccttggttacttggtgcaaatcctcgagatctgattatgcctgttgatggtgatgatggattttacccaacgggaaatgaactggttcttggactatttaccccttacatggaaaagaaaaaaatctttatagaaacccgaaatcgtaagttccaatcgcaagtatcgggctcatgtgttggtgtgtgctccatccaactcagcactcgatgagatcgtgttgcgtgttcttaagacaggaattcgagatgaaaataacaacacttataaccctaaaattgtgcgcattggagtgaaggcccttcattctgttaaagcagtttctatggattatcttattcaacaaaaactttctggtgtagatcgcacattagatggtgggagacgaggtgctggtgaatatgatcggattagagcttcaatactggacgaagcagccattgtattttctactctgagtttcagtggatcatcaatttttagcaggatgacccgtgcttttgatgttgttataattgatgaagctgcacaagcggtggaacctgcaactcttattcctttgatccatggctgcagacaaatttttcttgttggtgacccagttcagttgcctgcaactgtcatttcacagactgcacagaagttgggatatggaacgagcttgttcaaaagatttcaagctgccggttttccagtgcaaatgcttaaaatccaatatcgcatgcatccagagattagtacattcccttcaaaagaattttatgaaggggtactacaagatggggagggcctgagcaggaaacgtccatggcattcctacagctgcttcggaccattttgtttctttgacgttgatggcattgaatcccaaccatctggaagtggttcttgggtaaaccaggatgaagtggaattcataactctcctgtaccaccaattggcattgcgctatccagagctcaaatctagtcctgaagtgggtgttatatcaccatacaggcatcaagtaaaactattgaaggacagttttcgatcaacctttggggatcaatcaagggaattgatagatgtaagcacagttgatggattccagggacgtgaaaaagaaatagtcattttttcatgtgtaagatgcaataaggaacaaaagattggctttgtttctgattttcgacgaatgaatgttgccattacaagagcaaaatctgctgtactggttgtaggttctgcttcaacattgaagcaagataaacactggaacaaccttgttgagagtgccaaggagcgaaactgcttattcaaggtccccaagccattgaccgcattctttgcagaggataacctgaagactatgaaggtggaaaggcgtcctccgccagagctgaatgctcgagtactggaagagatcaaccaagaagttgtaaggcaggagctcatgaatgtcgatgatgctgccgaccatgcagacgcaggggacgacgatgatgctgatatggatgctgacgatggaggcggcgatgattgattgtaagattcaaaggcttgggtggcctaggtagagcatttacgtagactactggtatacaagaggagtcggttttcttgggtagacgtagtgattgctgagggttgaaaaaaaatggaagcgatgattcttttctcttatctaattatggggagaagctgactatcgtagagtgcaccaccaaaattattttttgtgaaactgcagaggtgacaaatatgtcgcttatgtctgttttccacggttcacagttaaattgatggggctggagcctggaggttcaccagctccagtatttgtcttcacggattgagttgaggcagtgaagaacgtaagcatgtggataccagctagggaaaacaggcaacagcgttgatccaagcagcgttttacagttacatgcggaaaattgtgtgggttgtatcttacaaacacatattcatctcccaaacacggaaatctctgacttcgaaggagataaacttgtcgtttcaaccagaacgtctctgtgtagtacgaaaataacaaaaaccagctccgtggtgtcatttta

SEQ ID NO: 42205 - DNA, 547 bp, Zea Mays
ctgccgtccagaccacaaagcagtccgcgtaataaagttcacccggccgcgacctcgctttgctctccgcgtcgctgttcgccggatcagtcctcatgtgtcgcgtcctgtttcctgttcgccagtgcgccctctcggctcgctcggctttaatccccaatcgtgtcgtcgaccgtcgaccttgtcgttgcctcacagcgctcggcgctaggctcgtccgtgcactcagctctcaccagggtcgcctgagccggtcgtcgatctcctattcgccatggtcatcacgtcggctgtccctatctaagccaacctagctcgccggcacgcgcgcctgtccgtatcgccagcagctcggcctctacgtgtgtctcccttaccatctcgacaccgcaactccatcatgtctgtatgtgtgtggaagatcggagtcgatggagaaggcagtaaagtccgcgtggtgctcaccacgtgctcgacataatggcagaatcagaaatcgtagctgtgctcgtggcttgcaagatggattaaattactggtacgataa

SEQ ID NO: 42206 - DNA, 1956 bp, Zea Mays
ttgaagaatataaaccggtcgaaaaatttagaaactgacgaaaaccgggttttaactatttactgatttgttgatttacagattttcgaaagttttttaatttaaaatttaaatcgttcagttttagcaaaaaccgtcggtttcctagaggtaaaccgttttcgttgactactggtttttggtaaactctacccacgtcatcccacgttccagttccacttctaccacaacggcacaacctcagtcctcagcccggcgagccgccgcccgcatcgttcaacccccgtgcccggccgccgtttacctaccgctcgcacgcgcgcgtcgctccttttatcacctctcaagtcccagcaggatcggcccccgcgcagcttcgcccccacatctatcgacccgaattctccactcaatggacccacccaagccgccgtcctcggtcgcctcgtcgtcggggccggagacgccgaacccgcacgccttcacctgcgagctcccgcactcgatctacgcgctcgccttctcccccgtcgcgcccgtcctcgcctccggcagcttcctcgaggacctccacaaccgcgtctccctgctctccttcgaccccgtccgcccctccgccgcctccttccgcgccctcccggcgctctccttcgaccacccttacccacccaccaagctccagttcaacccccgcgccgccgcgccgtccctcctcgcctcctccgccgacacgctccgcatctggcacaccccgctcgacgacctctccgacaccgcccccgcgcccgagctccgctccgttctcgacaaccgcaaggcctcctccgagttctgcgcacccctcacctccttcgattggaacgaggtcgagccccgccgtatcgggaccgcctccatcgacaccacctgcaccgtctgggacatcgatcgcggggtcgtggagacgcagctcatcgcgcacgacaaggccgtgcacgacatcgcctggggggaggccggggtcttcgcctccgtatcggccgacggctccgtccgcgtcttcgaccttcgggacaaggagcactccaccatcgtctacgagagcccccgccccgacacgccgctactaaggctggcgtggaaccgctctgacctccgctatatggccgcgctgctcatggacagcagcgccgtcgtcgtgctcgacatacgtgcgcccggggtgccggtggccgagctgcaccggcaccgggcgtgcgccaacgcagtcgcgtgggcgccgcaagccactaggcacctctgttcggctggggacgacgggcgccgaaataaaccaacttcagtgggcggccgcgcacccggactggatggccatcgcctttgagaacaaggtccagcttcttagggtctgacaagaaattttctgaagaaagctcgattgtgtggagccctgggactttggaaaccatctgcttgtaatcttgtgttggcaaacctcttgacttaagctccggcaagcaaggaatcatatctgttccaggttgctacctctttgtctagcgaatgaagtcttaaatctcagcaaatgctacatgtgctagcagatttatctctgaacttcctgtgaatgtagaaatatatagaggtactaactttgactcacttccgaactggcctaatattataacatcatctggccattcctgttgtttcggccttgttctgctctccagtagtccagtttgctccgttactttgtttctgaacttcaacttcctgtgaatggaactcgtcaaggtttaggccaagtgcactggttctcatgtaatgccatgtaatcttgatttaatagattattatcccttcgaaacgaactgtcatgtaccataggtttgatcttgtgacgatttaatgccaatgcatcataggcgatcttgaagctgtttacttgacctggtatgaggtacacaaaacctt

SEQ ID NO: 42207 - DNA, 1763 bp, Zea Mays
gccgcctcctctctccgcacaggctcaccaaacgacgaacactctccctcgacccgtgaccgtgagcaagcgggtggcgacggcgcgcggccggccatggtgagcgagagcaaccgcggcggtgcggaccggacgacggcggcgggggaggagcgcgggcagctgctgttcgacgtgccggagatcaggttcaccaagctcttcatcaacggatccttcgtcgacgccgtctcaggccggacgttcgagacgagggacccgcgcacggggggcgtcatcgccagcgtggcagaagctgacaaagaagacgtggacttggcagtgagggcagccagggccgctttcgaccacggcgagtggccacgcatgaacgggggcggatcatggcgaggctggccgacctggtggaggagcgcgcggacgagctggcggccctggagagcctggacgccggcaagcacccggccgtgacccgggcggtggacgtcggcaacgccgccggcagcctgcgctacttcgccggcgcggccgacaagatccacggcgagacgctcaagatgccgggccagttccagggccacaccctgcgcgagccgctcggcgtcgccggcgtcatcatcccctggaacttcccgtccaccatgttcgccgtcaaggtggcgccggcgctggccgccggctgcgccctggtcgtcaagcccgccgagcagacgccgctcagcgccctgtacctcgcgcagctcgccaagcaggcaggggtcccagacggcgtgatcaacgtcgtgccaggcttcggcccgacggcaggagccgcgctggcgtctcacatggacgttgacatggtgagtttcaccggatccacggaggtcgggcgcctcataatgaaggcctccgcggagagcaacctgaagcccgtctacctggagctgggcggcaagtccccgctcatcgtcttcgacgacgccgacctcgacatggccgtggagctcgccgtcggcgccagcttcttcaacaagggagaggcctgcgtcgccgcgagccgcgtctacgtgcaggaacgcgtctacgacaggttcgaggagaggttggcggagaggatgaggagctgggtcgtgggcgacccgttcagcgaccctagcgccgaccagggcccgcaggtggacaaggctcagtatgagagggttctgagctacattgaccatggcaagcgagaaggggccactcttctgactggaggaaggccatgcggtccggaagggaaaggctactacattgagcccacagttttcaccaacgtcaaggaggacatgatcatagcgaaggaggagatcttcggacccgtcatgtgcctgatgaagttcaagacggtggaggaggcgatcgcgagggcgaacgacacgcggtacgggctgggggcgggggtggtgacgcgggacctggacgtggcgaaccgggtggtgaggtcggtgcgcgccggggtggtgtgggtgaactgctacttcgccatgggcagcgactgccccttcggcggccgcaagatgagcggcttcggcaaggacgagggcatgcacgcgctcgacaagtacctggccgtcaagtccgtcgtcaccccgctccgcgcctcgccctggatctgattctctttaatttctggtgtcagtcacccacccacaacacatatacagcagtggtcaaaagatatttatttattgataataaagtagctagctatattgtgcggaaatccttgtagctagtcagct

SEQ ID NO: 42208 - DNA, 1013 bp, Zea Mays
taaatagctaaatcctatgatgcgacaaaatactattattaacgtgtacttgacatgattacaaagttaccacaatcggaacaggatcaaatgtatttgcgatgcacacacattgaatacatactagttcacggtccaaaacgatggaatctcatgcagccaccacccatatcacccacgaactggtcctgcgcgacgtgcaagggcgcgagtggttgtgccggggctgctcgagccgcgctggccgcgcgagggcgtcgggcacacgcgagcgaatcgcggacacgccagccacacgcaggccgcaccgaacgcgagcatgaggccgcgctggggcacaagcatgggccacaccggagcaccgcctgaccgcgagtagcgggtcgctccgacgtgcgcaagggacgtgccaggcgggctgcgccggctgtgcgccgcgccgccgcgcgagctgcacaccgcgggccacaccggctgcgccggggcaccgcgcactccgcgtcgggccgcgctgaggcacggcaagccaggccaagcggcaccagggaagcgggacgcgaggggggcgggcgccacgcgccatggccgcacgccgggcggccatgccgggaactgcgccacgtgaggtgccacgaccgccaatggagcacgagggagccgcgccgccgctagggccggggagggcgcgagggaaggggcggggccgcgccgagctggggcaccatggccgtgcagcgagcgcgctggggagccgcgccgagagccgcgcccgcgccgaggacggggccgccgcgcccatgcctgcgccgtcgccgggggggacgcatgcagccgcgcgcgtgcgccgggcagccgcgctcttgccgagccgctagggccgagtccgccacgctgctcccgagcacgcgcagggcccgcgcccgctaggccggcgctcctagggctgccgtgcaggcgtgcccactccgctgtggctgctggcgtccccttggtggctgccagggaactccctg

SEQ ID NO: 42209 - DNA, 1049 bp, Zea Mays
gttggtgaaaaaaataaatggattgccactgcctcacttcacgcaattccgcaccggactatgttccgacggtgtttgacaacttcagtgctaacgttgtggttgatggtaacactgtcaacctcggcctctgggacactgcaggtcaagaggattacaacagactgagaccactgagctatcgtggagctgatgtttttcttctggctttctcactgatcagtaaagccagctatgagaatgtttcgaagaagtggatacctgaactgaagcattatgcacctggtgtgccaataattctcgtagggacaaagcttgatcttcgagatgacaagcagttctttgtggaccatcctggtgctgttcctatcactactgctcagggagaggagctaagaaagcaaataggcgcgccatactacatcgagtgcagctcaaagacccaactaaacgtgaagggtgtcttcgatgcggcgataaaggttgtgctgcagccgcctaaggcgaagaagaagaaaaaggcgcagaggggggcgtgctccattttgtgatctaataatgatcagtagacaaaagaaacaagggcgaaggtgccatggttctattatcgccgcgtcttgcttcagcgaaacagcaatggatgatcccaccccctcccccccctagattttactggcggctgcagcgagtcgaggcattcgagagcgatatgtttgtttcatttccctccttcccgccttgtgattatctggtgtgtgtgactgacgaggtcgtggcaatttaggtaactcgcttagaaggtatttcccccgtgtttgagcccccacccccaccaaaaaaaagaaggtatcatgctatctctgttccataagtagacatgatgtaatcgtactaagtgtttatttttattttttttacttatttcacttcaatcaatggaaaattatgcttcccaattatatggtgggtcatggcagtccccctccctccttgtttgcctgtcaagttctcagtgtctttgtggcaaatggagcatgcatattgattta

SEQ ID NO: 42210 - DNA, 2453 bp, Zea Mays
ctctagaagcacttgacgcctagactcgacgccaagggtttgggccggccgagacagcttccaatggcgaaggtttcggaaagggatgcttagggtttcgtgaccaccgacggcgctcttctcatcgacctacggcgacatttgcgaccgcatcaggttcctggaccacttgatcatctccatggtttgttggcattggaagaacttctgtgcaggggctgttatcaagaaggttaatttcgacagaacaatctcacacaagtgtatatcaaatttcatggtcaaatgtttacttccaaattcattggataaacttggttaattgtatgaatattcatatacttttttgggctatgtcaacgaattataaggacctgcgccgacctatttccaaacttttaagtatactgtccaaatcttccacaggcaagttcagagacaatatgttactttcgtacaaaaaaataaatgtatgctactgttacagcagctgtcaatgttgctattttaattatcgtggtgcaggtaactgttttactcatatacatccagttcatccaaagtgcaggtaactgttttattcagacatatatgattaatcatcattcattaatatgtgaactccattgagcaagtatattgtaaagttagaactaaaaagaggaaacatttggttccaccatttcaccttattttgtactaaggggaagtatttagagattgaattgatggcaattacttcagtctttaaacctgttattagtgttgataatgttgattctattctgtcgcacattgttgtgaacagcttggaaataccttgcgaggtttccttaagttgttcctagtttggcatcaagtttgtttgtgttctctgctcctcctcccctcctgttaagactgcagcttagtattccgtttgaaattggtcgtctcatttcaccaagactcgctcttaaaagaagacttgccattatatgtcctactcagctagggaggaaaagaaggggaatgctggggccaactgccaagatgaaccactcaattgacaagcgatgcaggataaataatttgtccacaagcatgattgcattatcccagcggtcttcattattttgtggactgaacatgtacttgaatttatgagaagctggcttcagttttcaagcaggacaacagtgttgtgattgccaatcttgatgctgacaagcacactgacttggctgaaaaatatggtgtttctggtttccctacattgaagttcttccctaagggaaacaaagccggtgaagattatgatggtggccgggacttggatgactttgtcaagttcattaatgagaagtgtggcaccagtcgggatccaaagggccacctgacttcagaggctgggcttgtgccaagcttgaatcctcttgtgaaggagtttctcaatgctgctgatgacaagcggaaggaagtcctctctaaaatagaagaggatgttgctaagctcagcggttttgcagccaagcatggaaagatatatgtgacagctgcaaagaagatcatggacaagggctctgactacactaagaaggagactgagaggcttcaccgcatgctggagaagaaattcttgtgtatagattccaagttcacacagcaggagttgccagcttgcaagccgattcttactccaaaatgggtaggcttacgagttgtgaagattatgatgctactggttacgcctaatctttatggcaatttggtggctaacacagctgcaggtattgttggagggacgggcatcatgcctggagatagggattgcagctaattctttattatttgttgttttcccctctgaaaaaaattgttctggcatagcgtttcatttctgtaatttattacaaaaaataatattttgggcatgacttatctccctttgttcctacattgttacatatttgtaaagactttgtggcatatggaacttcttggagctttttgctatggtcttcatcaagttttctaccaatgacttatctcccgccaccccgacccgctcatcaaggccaacgacaccatcaagatcgatctggagaccaacaagatcatagacttcatcaagtttgacatcggcaacgtggtcatggtgactggcgggaggaacatcggacgtgtaggagtcatcaagaacaggaagaagcacaagggcagctgagaccatccacgtgctgcttggagctttttgctatgtctagttttctcctatttgttgtacaggaaaacatagaatagaattcaaatttggtggtcgcaaaagtgtggagactttaattcatctaaagttaggcttaacattagtgcaaacagttgtattttagtttagatttagagtacagttatgtatgcgttgtttgacaatgcttatttatgatatattgaatggtacttatttatattatatt

SEQ ID NO: 42211 - DNA, 310 bp, Zea Mays
caacaaactcgaccgcatctcgcgtgagctcaccgaaacgaactccgaatcgtccgtggcccctccccctctctagccggactccgcggcggtactataaaggcgcaaggtcgtgaccccccctcgccatgctgatagctgggaacagaagcagagaaccaagggtgagaggagggagaaggaccgccgtggtgtggcctactcgtctgctggcttctggacctcgggtttccactccgagcgatcgccgcagctcgttggtggcgtgtgccttgttgattcgggcgaagatcaccggattcgcgtgtaa

SEQ ID NO: 42212 - DNA, 2381 bp, Zea Mays
cagaatttcattctgaagcgggcgggcaggcagtggatcccacattggaggagtccgacggggaggatattggtgttccggaagttggtatggtgttcaataatcacacagaagtcaaccgattctaccgccggtatgcccgccgtgttggctttggtgtctcagtaaggaggtcttcgttctcacgagaagggacctgcttatatctggagcttatgtgctgcaaaggagggaggccacgttatgagccgaagtttcggaaaagggcttcatcgaccactaactgcccagccaaagtacgagtgaagttgtggggagataaattgttgcatatagagttggcgatccttgatcataatcacccagtgagccctgcaatggcaaggtttttgaactcttataagcagctctctggccctgcaaagaggcggttgcgtatgggtggccctgggactatgcctgttgaagagtcaagcaagatgcccatggataagctgggggagcttgagcagcttctgtttggtgagagcaagcacaacagctttgtggagaggggtcgtttgaagctccaacctggagattcggaggcccttcggcttttcttcactcggatgcaggccaaaaatgccaacttttttaatgtcattgacctggacgatgaaggctgtaccaggaatgttttctgggcagatgcacggtctagagccatgtgtgagtactatagtgatgtcatcacacttgatacatcatatgtggctagtaaatatgatatgcctcttgcaacatttattggggtgaatcatcatggacaatctgtcttgatggggtgtgccctgctttctgatgaaacagcagaaacctattcatggctacttaagtcttggatagcatgtatgtacggcaatcttccaaaggctattgtcactgactattgtaggggcatccaaagtgctgtagctgagattattccgggagtccgtcatagaatgtgtttgtttcagataatgaggaaggccgcagaacgtttaggtgggctgtcagagtacagagctatcaacaaggcgatgcataaggctgtatatgattctttaaccattgatgagtttgaagaagaatggaatactttaattacatatagtgggcttcagagcaatgactggttaagatcactttatgaatgtcgatcttcatgggttcctgtttttattaaagatacattttgggcaggaatgtctactacacaaagaaatgaaacaatcactcctttttttgatggatatgttgatttgaaaactaccttgaaacaatttcttgtcaagtatgagatggctttgcagagtaaatatgagaaggaggcccaagcagattttgagacgtttcataagcaacgcccaccggtatcaaaattctatatggaagagcagctctcaaaagtatacacacataatatgttcaagaagttccaagatgagattgaagccataatgtactgccatgtatctttaattagtgttgatgggcctgtctctacattcaatgtcaaggagtgcattttctttgaagatggtaaaaggactatgagtaaaatttttgcagtgacatacaaagtggacgaaaagaatattagctgtatatgtggaggtttccaattcagtggcatactatgtaggcatagtctctcaatgctcaagtttcaactggttcgtgaaatcccacaacattatattcttgataggtggaagaaggattttcgacagttgcatgtgatgagacgccctccaagcgatcttgttcctaacaatcgcatggatcgatatgactatttatcaataagatgtttgcaacttgttgactctgcagtcctatcagataagtatcgccttgctttgaggttggtaagggagacagagaaatttctgctaaatagcaacacacatgatgatacacaaccaaggatcaagtctcgtgttcctaaagtaaataaaccaaatattgtgactggccaaaccatggtgggtgcagctactggaaatggaaatgatggtctcaaaggaccagaggctacagcagtcacgcaagtaccacaatcccaaaagggaggagcagaaaaaggaatagttcctactggctacattggagtaccagctaatctccaacaatttgtaggcaatcaaacagcatttcggccaagcattgtgtacatggtaccgctagagctaggagattgggaggagcaaaggaggtcacaagggagcatgcttgttggtgatgtgaggaagacgagtggtggtgtgggctgtgtggcgataaggaggccgcgagtcaccctgggtgccaaatctgcactattccaggatattgatgcttttcttgcatattga

SEQ ID NO: 42213 - DNA, 369 bp, Zea Mays
ggtatgccttcgagagacataaggaaaccaaaggcatcaaactttaagaaaaatggtcggacaagcctttcctggattaggttgataaagcaacatggtgatccttaagaacaggcaaactggataagggacatcagcttgtgccaatcgaataaggatatggtttaggatggaaatatgataactaaaagtcacagattaaatagcgaggacacagactcaagattctagctttaagctcatgcacatcttacgctggataaagaaatttacccaaacacccatttgcatgagtttggtcatggagggataacaaaaaattcaaattgggtcatggttcaccaactaagaacatggcctagatttggg

SEQ ID NO: 42214 - DNA, 2948 bp, Zea Mays
atgaagctgagtgctgctgttctcttcttctccatcttgttgcagtactgcaccagcagcggccagccagatagccgaggtttcataagcatcgactgcggcatcccggagaactccacgtaccaggacctcacctccaccatactctacgtctccgaccgcggcttcgtcacctccggcgagaaccgcaacatctccgccggctacatcagcccgtccctcgcgcagcgctactacaccgtccgcgccttcgcgtccggcgttcggaactgctacaccctcccctccctggtcgccgggaacaagtacctcgtccgcgccgccttctactacgcggactacgacggcctgagcacgccgcccgtcttcgacctgtacctgggcgcgagcctctggcacgaggtcaggttcagggacgcggccgcgatcaactggatggacgtcgtggccgtggctcccaccgacttcctgcaggtctgcctggtgaacaagggcaccggcaccccgttcatctccggcctggacctcaggccgctgcggagcactctttacccggaggcgaacgctagccagtcccttgtcatggtcaacgccaaccggtgcaacgtgggacccacggacaagtctgtggttcgcccaaccaaagcacatttctctggcccaacaagcaggtacccgctggacccccacgaccggatctggctggcgtacggcgccgtcccggcctggaccgaggcgtccgccacgtccgtcgtccggaactacctcgccgacccctacgacgcgccgtccgccgtcatgcagagcgccgcgacgccatccgacggctcggtgctcagtttctcgtgggacacgtccgacgaccgctccgtggacgccagcagcgccacgtacctcctcgtcctctacttcgccgagctgcagcgcgtgtcggcgagcggcgagctgcggcggcagttcgacatcgccgtcgacggcaccgcgtggaacagggaaccttactctccgccgtacctcttcgccgactccttctccggcacggtgcaggggcaggcgaggcatagcgtctcgcttactgcgacgaggaacgcgacgctcccgcctcttctcaacgccatggaggtgtacttggtgaggccggtggatgaagctgcaaccgaccctggagatgctaaagccatgatcgcaatccaagaagcttatgttgtgagcaaaaactggatgggtgatccatgtgctccaaaggcttttgcatgggaaggactggactgtactactgatcctccaactggtactccaagaataacagcattaaacttgtcttcaagtgggttgacaggtcccatcactacctattttggagatctgaaagcactccaatacctggacttgtcacacaataacttgtctggctccattccagattgtcttggacagcttccattcctagtgttcctggatctctccagcaatgacctccgtggaccagttccttacactcttcttcaaaaatcccacaatgggactctatcgctaaggcttagtaacaacccaaatttgtctgggaacggatcgggtccaaagaagttgaatggggccgcacttctctccgcgataatcatcccaacagttgccgccactgccttgtctgttaccttcattgctctgctgctccgagcactcaaggaacaagctagaagacgggctgttgatccaactccgagagatgagacggcgttgcttgagaaccgagaattctcttacagagaactgaagcacatcacgaagaactttagcctggagattggcagaggtgggtttggagctgtcttccttgggtacctggggaacggaaacccggtagctgtgaaaatccggtcggagtcgtcttcgcaagggggtaaagagtttctggctgaggctcaacatctgacgagggtacaccacaagaacctggtatccttgattggctactgtaaggacaaagaccatttcgcccttgtctacgagtacatgcctgaagggaacctgcaggatcatctgagactgagaggtctggagtacctgcatgtggcatgcaaaccagcgctgatccacagagacgtgaagagcaggaacatcctcctgaccacgggccttggggctaagatcgccgactttggtctgaccaaggctttcagcgactcggagacacacatcaccactgaaccagctggaacaatgggctacttggatccagagtacgtctcaggccagtccccggtcgtcccggtggacgacagcgtgagcgtccacgtcggcgagtgggtgcagcagagcctcgaccggggcggcggcgtcgagagcgtcgtggatccgagcatgggacggtgcgagcgcggcgactacgacgtcaactccgtctggaaagtcgccgacctcgcgctgcgctgccggcgggaggcctccagggagcggcctacgatgacggacgtggtcgcgcagatcagggagagcgtggagctcgaggcggcccgccggagctcggcgtcgggtgctgctgctgctggtggtggtgggggtctgaggagttgtgccggcgagagggacgcgtttgaggtggtggaaggaagcgttggggagacggcgggggccgcgcctggtccggcgatgatctgagctgaagactctgaactaattaaggtacgagggtggtggtggacatgtgtttcaccgtgagaaacctgctcagcaagggaagatcggaacagtgggccttctttttcttctttttttactggtaatgcattattgttggagacatcgtcgacaggattttgctgatgaagcaaccaggcagctatcttgtctgccggtcacatatataatgtgaggaggttagctagtagtggtaggggaacaattcccttggccagggcgattgaataatacaagtctgaatatgaaat

SEQ ID NO: 42215 - DNA, 2112 bp, Zea Mays
atagcggacgcccccccccccccaagttcccacgagatcccgactcggacgaagctctcctcgccggccaccgtcgcggcagcttgctacgcacagggagtctgcggcgcgcgaggaatacagcgagggatggggtggggcacagtggtttacgagggcgcggtcgtcggctcgtcgctggtggggctcggctgggcggggctgtggttcctgaaccggcggctgtacaaggagtacgaggagcggcgggtgctggtgcagatcctcttcggcctcgtctttgccttctcctgcaacctcttcgagctcgttctcttcgagatcctgcccgtcctctccaagcacgcgcgcttcctcaactggcacctcgacctcttctgcctcatcctcctcctcgtcttcgtactcccctactaccactgctatcttctgctccgtaactcagggatgaggagggaccgggcgtggctcgtcgcggcgctctttctgctggtcttcctatacgggttctggcgcatggggattcacttccccatgccttcaccggagaagggtttctttacgatgccgcagttggtcagtaggattggggtgattggagttagtgtcatggctgttctttctggttttggtgccgtcaatctgccatacagttatctgtcgctattcatcagggaaattgatgaaacagacatcaaaaccttggaacgccagttgatgcaatccatcgagacatgtactgctaagaagaagaaaattattttgtcccagatggagatggagaggattcaaggatcagaggagaagttaaaggccagatcgtttctgaagcgtatagtgggaacagttgttagatctgtgcaggaagatcaaactgagcaggatataaaaaacttagaagcagaagtccaggcactggaagagctttccaaacagctgtttcttgagatatatgaacttcgtcaagctaagatagctgctgcgtattctcgaacttggagaggtcatcttcagaatctacttggatatgctttatcagtctattgtgtttataagatgctcaagtccttgcagagtgtagtctttaaggagtcaggctctgttgatcctgtaacaatgtcaataacgattttcctgagacattttgacattggcattgatgttgcactgttatctcagtacatatctttgatgttcatcgggatgttggttgtcatatctgttcgaggtttcctggcaaatgttatgaagttcttcttcgctgtttctagagttgggagtgggtcgacaaccaatgttgtccttttcctatcagagatcatgggaatgtacttcatatcttccattcttcttataagaaaaagcctggcaaatgaatatagggtgatcattactgatgtcttgggtggtgatatccaatttgacttctaccatcgctggtttgatgctatatttgtggctagtgcgttcctctccttgcttcttatatctgcccaatacaccaccaggcaaacagacaagcatccgattgattgatgcatcttgcccacaatgtgtgcatgttgtctttttaaccagtattcatccaaggttgacccattctttgtaccacagttttccagagcactgtttctccatacacttccatacacagttacaaaacataatactgacgggacacgggattcattgtaatgcagtctgcacgatactactttttgactaggacaattgtggaagcccatattaggaattgattatgactttgtaaaatagcttgaaactagtgtcgtagcaccgtagcacggtatgttggtgtatcttatatatttttttggctgtttcatgtataacacacttcgcgacaactctgaatggtagatagatctgtttcttcatgtgacttcaggatgacaactatatacctgaatccttataggtacgtactttgcaatccgtaagcatatgctcttatattgatgatgtttctttggtgacccatcccatgcatattactccctcggagttccaaaatatagttctttctagctcttttttttcgtccacattcattcgaatgataataaatatagacatacatataaactacaa

SEQ ID NO: 42216 - DNA, 4848 bp, Zea Mays
taacttatagactagagcaagctagttagtccaattatttgtgttaggcatttcaaccaccaaaatcaattaggaaataggtgtatgcctaattccctttcagccactcgtcgcccgcggattgcgtggccgaccgttgcgctggcggccgttggctcaccggatagtccggtgaattataatcgtacgccgccaaactttctcgagagtggccagttcgccggaagccagcctggcgcaccggacactgtccggtgcaccatcggacagtccggtgtgccagactgagctgagtgttggctgcttagagccaagtccttttcttcttctcttttttttttgtttctagcacttagacaaaacatgttagtactcaaaacaatgtactaagtctagaaacgtatcttgttacatgatttgcacttctcttttcatttggcatatactcaactcacttagtatgtgttggacacttaatcaccaaaatataatagaaatggcccaatggcacatttccctttcacaacgcttgagcccatagagggtgaaccgactgtaagggtgattttgtccattaacggtggtgacattgtattgctcgagttagtcggagaataagacatgtcggcgacgtgccgagggtggtggcgcgtgttattcttgaatagtcggcgatgacagcaagtggcgcgtggaagagagagagtcggttgagaaaatgagaggcttggaaagcgcaaaaaccctagcaacgatcattcccttctataatcatagtaaaataaagggcaatgataataacatcagtcgtttcacacactatacaaactccgagtaaaaactccagtgtaattaagtcagggtcgatactattgcgtaattaccccattgtacattattttccaagaatgtagcaagtaaccaggggttcaaacgtacttaggctccctgattaccctataaatacatccatctgcaccccagatgataggcacttgacaagacattcgtgcaccctagcctcttgatttgttgagcaatgttgcctcacttgctcccaagtgcttgggcccacatgtcaagatccaacaatcatgccaactaattgggtaccaattgatgactctacatgctatgattctgacaactcataccaccatgtcaatatcgaccatgacaatgatctatgagtgttgttggtgtcacccgttgatagatgagtgcttatgttatgaacttttgggaactatagtctctacatttgaagccagtctataattcaaagtttggtcacatgttttagtagttgaacatcaacaataactttgtagtttgttgcagctatgtgtaaattaactactgtaatgatctaatgtgtttctatccttgaattattgagtacttgagtatatcattgcattagaaaagtaatgtgtggttatgattggtgcctatttcattgtctactaagtactataatcgttgcacttcaatgttgtataaagtatacactttgattgttgttgcatcgaatacaggagcaaattggacccaatttggatgaacactttgatgcagacatccacaagtgaattggatctaagtccatacaccacttcatgtaaacacttatcagacatggtatcaattcttcaggataggttcctcaacctacaggcactcctgtcatgccatcatctactggtctaagtttaggaaatattagggtggcattgaaaaccaaacttccaaatttctcaattagcgaagatcttacacttatttcctaatggctaaacatgagcctaaacctagtgggtagtggctggtaagtaggtaaacatagtcttttggaatgtggtatgagtttagtacgttgatcattagtgtatcacaatgtgagaatatctagttgtaggtatgagacaacataagtcttccttttggaaaggtatataaagagagtacaaaacctaaagggagcattgtaccccaactaaaaattatgtagcttggaaggccaatgggatcttaccaaagagcaagtgaccaagttcatgtcgtaccactgccaagtcataaacaaaaacgacagtagcctacaagactgtttttgccatgaccttgtacaatagcttagagaaaaggcccttctctacttctcattgttgggaggttctaaagaatgaagcaaaatggttagacttggagtagggatcaaaaaatgttgatgtgttagtggactaaggtgcagattctatccccatgggcaatggtaacatgtgtctggtttcttaatctaataacaagagtcgactcaagagagacaatgacaagactaccaagaagaagacatcaacatacccgacatttgacagcactgagtacatctccaagatgtcaaatttgacaatgaagaagattgagtacttgtagaggtccgatggaacacttggcactaacattcactaacttgttcaaatagaggaaaagaagatggaaatggagaaaggcatctaaccatcaaggccaataaggaggagagtgaagctgagctcacgacaatggcaagggccaaggaagacgagcagatcatgggaattgacctagaatcttgcaatctagcaaaacgatcattttatgatgccatgcaacatgacattctagaaatatgggtggctaccacgaagcaccaagggggaaaaaggaaagagtattggcgcaaaccttgggcttgctggagcaatccccaaagccgggttagcagcaggagcgacgagcccaaaccttcctacccctcgtcgtcctcggctaatccgccgcgcctccgatactcccaaggcagcgcccgccagctgcaacaacagcatcagcaagcgaggagtagccaccagcccaccacgatctcatcagactcctctcaaatcctcccgcccactctccatttccctcccctcccccgccaccctgcaatggccggtctcctccacctccagtccacgcttctcccatcggcgtccgcgctccgccgccgtgcaggcgtgccggtgccatcctcgtcccgccgccgatgccggattgaggccaagatccgggaaatcttcatgccagcgctcagctccaccatgaccgagggcaagatcgtctcctggaccgccgctgagggcgaccgccttgccaagggcgaccccgtcgtcgtcgtcgagtccgacaaggccgacatggacgtcgagaccttctacgacggcttcctcgccgccgtcctcgtgcccgctggcgactcagcgcccgtcggctccgccatcgcgctgcttgccgagtcagaggaggacatcccagtggcccagtcacaggctgcctccttctcctccacgtcccccttaccgtcgcctccgcaagaaactgctgctcaagaagcatccccttccccgccgccacctcctcccccagggccggtgtcagtctctgctcccacgccgcctttgccagcaacacaaggcgagcgtgtggttgcttcaccctacgccaagaagctcgccaaggacctcggcgttgatcttttctcagtcacggggtcaggcccctgtgggcgaattgtggccaaggatgtcgaggctgcgcttgctgcgcccaagaaggccgcaccagtgactgctccacggccggatgtgccattggggtcgacggtaccattcacgacaatgcagggtgctgtcagcaagaacatggtggagagccttgccatcccgacattcagggtcggatacaccatcacaactgatgctcttgatcagctctacaaaaaaattaagtcgaagggggttacaatgacagcactgttggctaaggcgacagcaatggcgctggttcagcatcctgtggtgaactccagctgcagggatgggaagagcttcacctacagcagtagtatcaacattgccgtggcagtggccatagatggtgggttgattacaccagttcttcaagatgctgataagcttgacatttattcattgtcaaggaaatggaaagagttagttgataaggcgcgagcaaagcagttgcagccccatgagtacaactctggcacgtttactctctcgaatcttggtatgtttggagttgataggtttgatgcaatactgccacctggaactggagcaatcatggccgtcggggcatcagaacccaccattgttggtacaaaagatggtagaattgggatcaagaatcaaatgcaggtaaatgttaccgccgatcatcgggttatttatggagctgaccttgctgcttttctgcaaacacttgccaagataattgaggatcccaaggatcttacattctgaatgtcccaactgattgtttttccctgaggcaatcaaaaccgggtgcttcttacctatcagtagatgtgtagtttgtcttctgtttatgtgattaggtgttttaagctgtcaccaatgtcagcatcaggtaaattttccctgttggttaccttattatcatcggtttgtgtttcaataaaattcttttttttgtcttgcttaactaaaataggtgtatctaccatttttactggacgtttcatggatagtggattttgttgagctcctcaatgtaccgtatccttgtgggatacaaagaatgaaatgtaccttgtaccaccctgtggttgatttctcatgcttgtcaaacagaaatatggttgacgctcttgcaagggtgctgacgctatatcttcagggagatctgtaaaaacgggtcacatatctgtttgttttacatgtgaaggagacggatcatggtttctccaaaccactccaatatgccaaggctgtagggtatcgg

SEQ ID NO: 42217 - DNA, 312 bp, Zea Mays
ctagtggccttgatgttgacataaaagcttttgtaggatgtgtgttagcaacttgctttccatgttgacatgcactacaaggcttgtccttttcaaatgcaacatcctttagtcctctaaccatgtctttctttagtactttcttgagtgtgctcattccaacatgtgcaagccttctatgccatagccatccaagtgatgctttggtaaagaggcaagttcttaagtttacatcttcagaggtgaaatccactaagtagagattgatgtatctaaatcctttgaacatcattgactcatcatccatttttg

SEQ ID NO: 42218 - DNA, 1886 bp, Zea Mays
gaggaatatgcacaattatattaggtcgaagaagccgccactgccggatctggcgcagcgctagggcacaacgtgcgttggcgaggcaggcgagcgtgccgtgggtctgcgtgcccttggagctcctccaggtgacgtagggccatcacgccaattcacagttcgagatccgacgctggagccgccgctccaccagctcatcggcggtagctccgtgcggacagcgacgtcgacgcgtcgtcatctggtggcatggcagcggtggtcctcaccgatggctcagccatccgcaagagcgcaagcatggggacctctccctcgtcttcgcggggtccaccagcgacagcgcgtccccaactgttgggcccgacctcgccgacagcggtgtggggccatgacttcgaacgacatcgtcctccgcgagccatgagcgtaaaaaggttaggtactgccctatctctgcccctcctctctaatcgatcaatggtaatagcacactacgagtactcttgccattgtattccattagcgacaaatctgctagaaaactatgttatggctagaaactgttagaagtttcaggaatggtgttttatgttacctcgtcatatttttcaagatacatgtcttgtggtcgaaatttcttaagatttcttagttgtcttatagttttgattaagttgacaacttgaagtctggatagagaaattaatgatgaaccagtgtgcaatataagacatatatcatatttaatggtttagtgacatccttattagcacccgttttgaggacatggacttccacatacgtggctgattctcttgaaccatgacggtacaatctctgatttcaactgaagaaaatctctgctttcctgtcctttcccatgaaaatcgtccgagagatgactaggatgaaggatgagaggaataggctgaggatgatcatggcacagtacttggtgtggcttcattcttcatgcaagatctgagcaaccttgagtagcaaatcgaggggaagggtacgagcagcttcggcaagcgccggaacaagacgcacacgctctgcatccgctgcagcagccgtagcttccacctccagaagagcacctgctcctcctgcgattacactgccgcccgcatccgcaagtaaggacaagcctccacgtcgatagaagcaaatcaatccatttcgtttgacaagcattttggattttccagtctcaaagcattccaaaaggaagtcttggatgcttggtttgctcatgaggattgtgttctcctaacagccataggatcaggaggtaccaaaggaaatgagcaaaacatagcatacagtctcagatgctgcaggatcacatgaaaattattgaagacgacggtccaggtgcagccttctatgccagtgctaaggccatgactaatggaaatcacactttctatgtgagcaaactgatacagaggttggctagattaagtaaatatgatacaatgtatcacatgcacagggacctctcaagcaacaacctcaatggataaggcatattaaatacattacttcttcagcatcatgggagaaaatcttactgtcagggttcagaggatgttgtacggaatgaagttggttgatttgacgaagaagaaaacatttttagtcttgtggctgtgcgtctagctgttgatgcagctgatgagaagtcggctatagccgagagaatttcagtcatcctgcagaaatatgtcttcccatatgacttctttcgttgttggatttatcatcgagtggagagtggcaatacttagtctggccactacttgtgcttgccaactttgcttaggtaatttcttggcctacttttaagcggtgtcatctgtagacaaaatgag

SEQ ID NO: 42219 - DNA, 708 bp, Zea Mays
gcagattgtattgttcacgcatggatgccacgtagagaagaggcacagtaaggggaaaacaaggcatgggtgacaccgcggcggaagtgaccgagccacggcaaccgccggtgggatacctccggccatgcacggctgggttcgcgagatggtgccatgtccgaagttatctctccgcgatcgactccctccaccagatcactcgagcacatctggttcagtagtgcctcagatcttatccgcgttcttcagatatttacagtgctttgatcttcagcgttttactgaaccgaccacctatcatccccactttctcatgattcttgttaagaacagggtaacctcccttaataaaatttgttccccaaacaacagtctttaagtttgttatagggttcatggatcaattctgtatagattctcagatttggtgctctcaaagtgactgcatttcactgggaccatacttttctgaatccagtgttcagaactgcccaattggcttctgacagcgcaacttcacacttatttatctccaatttatattcagcaccagtgcttagttacttaaccaaaattgttctccttacatagctctacaaacttgatgtgttgacatagggcaaaatcctcataatttggaagatatagggcttcaaagttgagcccattcactgaaattcagactttgccattggagcacaaatg

SEQ ID NO: 42220 - DNA, 427 bp, Zea Mays
gtaatgcaaaagtggtaaaacttaattatgacccaactgaagtaaaacaaatgggataaggaactcagcccaccccaaaataaacgctcaactaagaacaaagcaattcactagacttgtccaactctgattaacaacattattaaatggtgattcctttattaaaggtgtagtggccgtgctgctacatccctctattccccaaagcaaaaattaggtgcctgcatcaaacaatgcaagatgtgagataacacatctcagcaagtaaacttaacaacaacaaataggacattgtaaatcaactgtgcttacacaaccacgtgtacatgacttctttcttttcctttgaacagtaaattgcagcaagtatacaagtaactaaaaactcaacgccaagtagaatcaccatgcacaagtccaaattatc

SEQ ID NO: 42221 - DNA, 2965 bp, Zea Mays
gggccggcgtcgagtggagatccaatcgaaaatcgaactgacttcatcttctgttggtcaacaggagagcccgttgaaatcctggacctctcaattgtccttttctctctccccgcccaccttcccctgttctgccgcctccccagtccggcgtgcatcagcagcgacatcagagtcggcgatgggaggcgtcatcgacgttctcgtccccttatgttgatgaagtggtgtgccgtggagattccttgaccgatttcttgccggtaagacggagtctgccatctgcgtggctggtcatcgcggtgagcaaggaacgacgaagtgcgcccctccgcccttcggctcgtcgttgtgccttgcgtcgtcgggtggagttccttcccctgcttcaagctaattcggtttttccctctcatcctgtcagttttctctttgttggcattttcggttctctgctgtgaggttttttaaggtgattttgttcgcatctgtgatttgtgtctctgtgttcatcgtttgatgagggattcgatgccaaattcatttgaatcgattacaggaaatcatgcaaaaaatcaaacacatacctgtagaattgcgttggattggattccaaaaaataatgaaggaaaaaggaaaaacaaatctgatccgattttgtggcctgcatgcttactaacttcgtttttaagaggctccaggaaaatgtaattttgggtagggtttgtcaagcggtggtgcctgaatgtatcttctcctgtcacctccctcctttcacattagagttattgggtctacctttactgggtctactcctggatcctgctctatttaattatccttttttgtgccaaagcagccaaaccgccaatcaccacaaattgtagattaatgtttccagcattagcttgctgctcctggttccatacctgcaatcagttgcaaatacaccatgttttgtactaccccctcccccaattaaactttataattaaatgaaaaagtgtaggagtttgcctagtgaccacaaagcattttttggtgcattggaatcttgtgtatgcttgaatttaaaattatgaattcaaatgttgttgaattacatgcaggacccataaactttgaattattatgatgtgaaaaatgatttataatacagtatgtgcacaagtgtagatagatataagaaaatgaaatataggggaagggatcattggtagtgtcaccctaaagtgctggaaaagttttaaggtgcttcccatagaacaacttcttgggggagcactattggtatggaattgctcttattcagtttttttggggtttctgaggatcctccatgtcccctagattattgacctcactttgttctttgtatcgatttattgttgtaggcagttataatagtaggaggtatgcgtgctttgtagaatcatacagatgcttgttgaacatgtgtctttgtttctgtgtctgtgtcaacaagatgttctagcatcaacaagatcctgattagcatgtcaacttccagacaaaaagagtagagcagcaaaatggagaaccatggaaaattggatgggtgggatgaagttctggaagaagaagatgagttagcgagtgtatgcaaatatcctattagcacatcgtacctttcttatggaacaagcagaaggggcaaaagtgtaaagaagcctagattctcattacgaggatatgattttgttccattagatgttaagactgataacttgtgcattggggagcaagatggttcttctgcagtgccatcaactaaagcttcacaaaccatggtggctgaacggttggaaaacgttgaggaacaaactgaagatttggcaccagagtttgcccttccacccaaagcaaatactttagtttctgagctgctagataatttacagcgtaggggtggttcttttgtcaggacaccatctttgttgcaccaacatgctccaagcatatcaatcagggagcaggaagtttcatccggagtgccaccaactaaagcttcacaagctttgatggatgaaccgtttgaaaatgacaatggacaaactgaagagttgccatcagagctcccctgctcgatcaagagaccaaaattttcagttgcagaacttctagaagacctacagggtagaagtggttcttatgttgagacagcatctttggatgctactcaaaaccacttgagtttggtgaacaaagatgagaaccagcaaactatggctgacctatttcaagaagtttttaatccaacaaacatggatggtgccatgaaatcaatgagatcaacaggagctggtaactatggaagaatgcaacagattatgcacatggagaaagattggcatgtggaattctcgaggcagtatagcagagagcacagttattcaggtgatttaaagggaactactgttcagattatgtcaaggtcattggaaggaaagctaacagtctgcagctgcatgttccaggaaaagggcaatgatgccactataagtaatgcctcagcagacggcaccatggatgaaagcagaactaggaggactattatcttcagtccaaagatatgtaacaatgtagatcttctggttggaaacataattcatatcttcccaccatggaaggaagttaaaatacaagaagagcatgtgattatttgcacctacttctcgcaccaccaccggacttgatactcggagatatttctgtgctagctgcaaagctagaggcagaccgccagcataaccgttgctgacagtttaatgttgatgtactcgcagggtctattctgtttgttttgtaatcacaagtgtactggctgcaaagctataggcagaccgcaagcataaccgttcctgatagcctaatgctgatgtacttgcagtctctcttctgttttacaatcacaagttactgaggcctagttcggattctctaa

SEQ ID NO: 42222 - DNA, 2586 bp, Zea Mays
gttactggtgggaagcgccgcagctccacctcgtccggtccggtgtggtgtggtggactgggtgggtgtctctggcggtggtcgccgatgctgaccccctcggccggcataccgccgccctccctctccgcagctagcagcccctccacgtcctactctctcctctaccttccccgacgatgccgacgccttcccgtcccccgagcctcctccagctttgcccccaagcgctcggcgccggtccccaccaccaccctcccgcccgaggccccctccacctccgccgctgtcgaggcgccggcgcccttctcggtcacggccccggggacctaccggggaggggaggacccgctcgtctccaagctccgcacccagctcggcgtcatccacccgctcccggcgccccccatcagccgctccgtcgtcggcctcttcgccctcttcttcttcgtcggcgccgccttcgacaagctctggacgctgcggaagcgccgtcgcgccgagcgcgagctcaaggtcaacggctcctggccgcaggtgcccaccccgagcttctccctcttcctcgagaaggacctgcagcgcaaggagtccgtcgagtgggtcaacatggtgctcggcaagctctggaaggtctaccgcaccggcatcgagaactggatcgtcggcctgctccagcccgtcatcgacaacctccacaagcccgattacgtcaacagggtcgaaatcaggcagttctacctcggcgaggagcccctctccgtcaggaacgtcgagcgccgcacctcaaggcgggccaacgacctgcagtaccagattggcatccgctatgccggtggagcacgcatggcattggcactctacttgaagttcaccaaagtaccggtcgtcgtgccggtctgggttcgagattttgatatcgatggggagttgtgggttaaactaaggctcataccaacagaaccgtgggtgggagccgtatcttgggcttttgtgtcccttcccaaggttaagtttgagctttcgctgttccggctattcaatcttatgggtttctcacagaacttctgacagaagatttgccacgtctctttgtgcggcccaaaaagattgtccttgattttcaaaaggggagagctatgggacctgtttcaggaagtgttgcaagtgatataattcaaaatgttgcaactgacctgatccaagaggggaataaggactttgttggagagctatcagtgacactagttgatgctagaaagcttagctttgtcttgtttggcaagacagatccttatgttgtcatgattattgatgatcaagtaataaagagcaagaagaacagtcaaacaactgtgattggactaccgggagaaccaatttggaatcaagatttccatatgcttgtcgcaaatcctcgcaaacagaagttgaccattcaagtgaaggattcaattggtctaactgacatcactattggcaccggagaggtggagctagggtcacttaaagatacagtacctacggacaaaatcgtgactctatatggaggatggggtttgtttgggaagcgagaggctggggaagttctacttcggctgacatacaaggcatatgtcgaggatgaagaggaagaagacgaggcggtgagaagcgagattggtgcgggttacgcctcagacgaggatgtgctggactacgttagtggcatgagcaaggggactgatttcgtgggtaaagaaagggaaactttcatggatcttctcgccgcgctgctggtgagcgaggagttccaaggcatagtgtcatccgaaacaggaagctcgtcaagagaaggtgagcaggcaggcagtggaccagaaggcacagacagcgtcactgtccctactagcgctgcggcggctgatacggaggcatccaccgtgccaaacagctccacagatacggctctggtgtggctggcggccataacgagtgtgatggtgctggtgtcctccaacctcggtggctcaggctacttcaacccgtgaccgtgagtgaaggcaacactggctgtaacttgtaagggtgacaacaagagagttctcttcttgttcttttttttttcttttcttttggaaggctagtgaagagaggcaactgtgtatattcatttttgctgtcacctccttccgatttgctgaacatggaccaggatttctcctgctcgcgtcgcggcaggggtcattgccatcggttactgtttccaaggcaaatgcgattgtagttgtatcgttaaaaaatataccaagaaaatttaaggctgccttgttaggcatcagcttatgattatgacgagctgtttgaagtacttttttttttggctaaacaggcctttttgcgaatagctaatcattctctcacataggaataagaacgtgatgagatcaagtttaaaaaaacattttttgcagttttaactcacacttgtggatcctatataatatgttttaatgaactcatgagatttcgtgagaccataaattctacatgtagaactgttttgtcaaatactgtaacaaaagaggtttaatttcattggtaaag

SEQ ID NO: 42223 - DNA, 779 bp, Zea Mays
cccctggccactggcccctgcgtttcctatcgtttcggttcggcgcaggcgccgctaccgcctcctctcgaccgctcgccttcccgttcgccatgtcgttgctcgccgcggccattcccagcacttcctcccacttctccgcacccttcctcccctcattccacatgccccgcaagaacctcaccgccccactccaccggatccgccgtccgcggccgttcaccgtcgtctcctccgtcccagaccccgcggcggggccggtggaatacacgccctggctcatcgccggcctcggcaacccaggcaacaagtactacggcacgcggcacaatgtggggtttgagatggtggatcgcatcgcggcggaggaggggattacgatgaacacaatccagtccaagtcgcttctgggaattgtgtaggttcaattggcgaggtgccagtcttggtggtaaaaccgcaatcatacatgaactacagtggagaggcaattggacctcttgcagcctattatcaagtaccattacggcacatcctcttgatttatgatgatacaagtctgcccaatggtgtactgcggcttcaaaagaaaggtggtcatggtcgccacaacgggctacagaatgtgattgagcatttggatggtcgcagagaatttcctcgtttatctataggcattggtagcccacctggaaaaatggaccctcgggctttccttctgcagaagttcagttcagaggaacgagtccaggtttgtaatacacgcgggtaaatgggtg

SEQ ID NO: 42224 - DNA, 389 bp, Zea Mays
gatttaggaatcaaggagaggcttttagcaagaatcaacttagacattttgcagaaaagctttctaaaagtgagtccttactttcaacattttattgctagattaggtattaattgactttgtttgcatctagtctagtctaaattcatcatcccattaatcaatacaaccatatttttactctttgtgatttcatccatgacttacgatgagtggtcggagggtagagtctccatgaccgaggagcaacgatgattcgaaccgattatacccagctggggactcctaaccacacgacatatgttgcactcaacccttacatatgtcaaccgttcccacagatcctccataacatgaaccggtccgcgctacccgggagcacagtactc

SEQ ID NO: 42225 - DNA, 1996 bp, Zea Mays
ccgcactgcagtggcctagccggcgtcgtcctccccctctctcgctcctctgtcctcccctctccacttgagaagaacacaattaggaaaaaaaggcaaaaaacatttaccttttttctatctgtatattatctgaataaatcaagaggaggaagaggggagggagcgagggagggggaggagtagcaaatccagactccatagcaaccagctcgcgagaaggggaaaagggggaggaagagcttcgcttgtgtattgattgctcgctgctccagtccctgcattcgtgccgtttttggcaagtaggtggcgtggcaagcatggtgccgggctatgactgcgccgcctccgtgctgctgtgcgcggaggacaacgctgctattctcggcctggacgacgatggggaggagtcctcctgggcggccgccgctacgccgccacgtgacaccgtcgccgccgccgccgccgccgccaccggggtcgccgtcgatgggattttgacggagttccccttgctctcggatgactgcgttgcgacgctcgtggagaaggaggtggagcacatgcccgcggaggggtacctccagaagctgcagcgacggcatggggacctggatttggccgccgtcaggaaggacgccatcgattggatttggaaggtcattgagcattacaatttcgcaccgttgactgccgttttgtctgtgaactacctcgatagattcctctccacgaaggcagagcttggatgactcagctcttggcagtggcttgcttgtctttggcttcgaaaatcgaagagacttttgtgccactccccttggatttgcaggtagcggaggcaaagtttgtttttgagggaaggaccataaaaaggatggagcttctggtgctaagcaccttaaagtggaggatgcatgctgttactgcttgctcatttgttgaatactttcttcataaattgagtgatcatggtgcaccctccttgcttgcacgctctcgctcttcggaccttgtcttgagcaccgctaaaggtgctgaattcgtggtattcagaccctccgagattgctgccagtgttgcacttgctgctatcggcgaatgcaggagttctgtaattgagagagctgctagtagctgcaaatatttggacaaggagagggttttaagatgccatgaaatgattcaagagaagattactgcgggaagcattgtcctaaagtctgctggatcatcaatctcctctgtgccacaaagcccaataggtgtcctggacgctgcagcctgtctgagtcaacaaagcgatgacgctactgtcgggtctcctgcagtatgttaccatagttcttccacaagcaagaggagaaggatcactagacgtctactctaattgtggtacgcttcaggtgtgctcctcaccgctctaggagtttttgattggttcaaacatcttaaatttagtttggccgctggaggattatggtttagtcaagtagttgctgaatggaacaacaaaacacgcacactacttggtccataaagacaagaaaataactggcagcgtcccgcgagccagcgctgcaatccagttcatgcaagaccctagagtccagggggggtgctggtgtaggtagagagggaacaaggcattcacatacgccgtagagatgagagagcctctcgtatgttttgtacttttgctccttcagtttgcaatgaactatataaacaaggattgccttggggcagtgaacatttgtcggatgaaaagaatcaaaaaggatgggggtcggcagaggaatagaacaatttgatatatttccataaactacagatatgtttcctttttcataatgatgagctatcatttttgttgatggtaacatggtatttggcgtcccgttttgtttgcatcaggccattggttgattgcttccaatgtaccttcattgattatccaatttttgtttgcattgggccattagttgattacttc

SEQ ID NO: 42226 - DNA, 321 bp, Zea Mays
tggagagttgccgccaccgtagacaattcttgcgttggctccactgctggatcccagatgaagtcgtggcgattcaccaagacgagtggaacctgatcatggtaaaacaaatcaatgtgagacccggagatatgtggaattccatgccgaagttcggcaccgccgcagagtcatgctccaccatgggcggaagcctccgcgctacgatctcggatgagttcagtatacactccgcttccttacgcaccgattagcatctcggatggggcacaggaatgccaagcggtctgtaaaaccctaaattttagcatataaaatttc

SEQ ID NO: 42227 - DNA, 845 bp, Zea Mays
gagatgaatattagagtatccaaacataagcattttgcaaaccgcgacaacaagagactaaaaaaaagcaaatttgccgtctgcaaaacccctcccacagccgtcgccccccgccagcccgcctgcgagagaagtccgcttcatccgttcgccgcctcaaggacgagatggacacatcaagccctgcagcacttgtcaatgcacagatgctgaacatgtttgttgggcgaagagtgcgcacggttgttcaagtccaacacaatgaaggtggagtgcttgtcgggcagtccaccgatggccatcagttatgtgtcaaaagtgccatggacgtccccgtttcacactttatggaggtttatggaattgctgaaaacagccagaccatccgtgctgaagtttgcacagattttggtcccaactttgatcccaaggtttttgatgagttgtgcaagctggcgagtggcaggttcaagcacttgttcctgtagagataatcatcgcatggaggatcttcagccaactgaagcttgtttgaaactgaatgtttcggctttaaatttaagatttggctacatgttccttcattgcatggaggaccttcagtaccctgttactcgtcattactggacttctattagcatgtataagcaacgtaggactgcgaatacaagcaaaatatgtagttgaagaacctatggtctttttctacctttaggcaatccaaccctaagctttttatgttgctgtcgcttgcattgggaccctgagttgctacaattgtcatggagtttgatgagaggaaaaatgattctaatatgctagttctaaatgtcaattgaactgtt

SEQ ID NO: 42228 - DNA, 819 bp, Zea Mays
gcgtgcgctggctgcttttggccaccgatacgctgcgtcggcgctccaaagttccaggcaagcacacttcctcccctgctctccacctcattctggttcccattgctagggtttgtcgtgctagggtttaggtcgctccttctccaccacctggccgcccaccctccacctctcgtgcttcccggacgccgcggccgccgagacgagggccaggagcaggagccaccgagcagtcgtcgccaccgccataaaccaaactaactaaggcagctagaatctctgctttgagttcttccccgtcaccgcacgggctgcgatctctgctttttttggttccccaatcccattccgtgtcctcatgctgccattttggggttcaaggaaatcaaaatgccatagtttcacgggatagacggatcagcttggtctggggatgtcgtcagcgtggatggacggtcaatttcttcgtccgtcgcccaaccggcagcaacacatacgcgatgatttgattggttccttgtgtcctaaatgaaggtcaggagaggctagagttccaaatcgtagttcgtgtgaaccagtgtgaaccagttgaatctcatcaatcttatcaagtcatctaataaaaaaaggttcgacgcgtcttagagttctacgatgcatccaagaattcagagaacgttgacaaatatatagatcagctgaccaacaatgaattgtcatcaccacccaaaaagatgaagcacacccaggttaacaaagccattccagattctacatgttccaagaatgacaacagttagaccatcctgaaatacatca

SEQ ID NO: 42229 - DNA, 885 bp, Zea Mays
cggccgggagaagtcacgtcaatgccggacgaagcagccgccggttgtcgctggatcggccatcgctacgttgtgcgtgcccatcagctgatgatcaccaccacaggtctccacgttattatccagctgtcggtttcgtacttaaaaagtgtagtcccagtcttgaagcgtaaaaacgaaggggaaaatcagttacacatgagctttagggtgccctttgcataataattagtactggttgacgggagagctgaacgaccaaacacatgggagtatacgttattgtcgttccaattatattcaaaggtggcagcgtcacgggatgcaaccaaatggaaatggtgtgacagggaaagctcgcaaaagcatccacaggggatctgaaatggcactactgtgccacatctgactgagattctcaaacaaccgagaggaaagattattatccggacgtactctccggacttccgcgcgcctacgagcaagcaattcacgcaagtggacggcggtaagcagagctgaatttctacgcacggatcgatctcgatgtgaagctctgatagagagtgtgattgcaggtgaactggacctggcatggcatggtgcagtggtttgagccaaggcggctgcgagctgcaaatggatcaggacagccctagctagctagctcctcgggaagagggtgaccggtggccgtggaaacaggcacaggccggcgcagagagtctacagccacgaacacgaagtggtgtcggcgcacgacgctctcgttaagttcgagatggctgcgtcacatgccctgcgcagcgcaggtacgtacgcgaaggggggaaaaaagagaataaactcaggaattcggttggtttccagtcaggtccatgcctg

SEQ ID NO: 42230 - DNA, 2313 bp, Zea Mays
cacggttctgccgtgtcttccctccgcgcgatactccccagtccccaatggtgcagatcgcggctcctccccgacggcgcgatggccgcgccccctctccctcccccggcgtgatgcacgcaaccccaccccctcggtgccatggtgccctcgccttcgcccccgtcaaccacgggcgtcaatgtcgaaggcgtccacaaccgcgcccccacctgcccccgcccacgctctcccacgatctctgccgccacgtctccgcgtttggcggcccgtcctcatcctcatccgcgcttggcggcccgtcgtcatcctcaggtcagatctgcgtttggcggcccgtcctcatcctcatccgcgcgcccccgcccgcgatctccgctgccgcgtcttcaccaccctcgcccgtgatctccgtcgccgtccgcacttgggtcaggtcagatctgcgtttggtggccatccccgtcctcatcctcttccttgcgcccacgcccactcttcatcctatttccgacttgggggaggacgacaaggtcatcgtcgagcgttgtgccagggaacggagtcgcccaccggcagctcctcaccaccgacgggaagcaactcgtggagatgctcaagcggtcaccctatttcttctccacccgcgtccacctctaggtccgcgtgggcgagcaatccaacgaggcaccgttctccccatcaaggacacgtgtggtggagaagaagggctgctggccttggctttgtgggcaacacactggctgaagaagtatatatatatatattcaccagaaagtgaggaggaagagaaagaggaggaaggcgaataagaatagaagatgggcagtgcaaacaagattaatgagaggtacttgaaactacagaagagcaagaagagcaccaaaactaaggatgataaacgaaaggtgcgcccaacaaagcgctcttgtggatgcacggcaatctaaatctaaatctatcaagagacatcacaaatggatctgatcacaaatcacaaatgtgacaagcttgctaaggtgaaactgctgaagatgttgtatgactactatgccgcgggcacatgacatcaattgactcaaggagaaaagagaggcgtcatccaaaattctgagtttgttcgctctattagagtccagaggcggtactgggcgaggagctatgctggatggataaggtttaggagagcacaaccaaatgcagcccattacgctccttccctttcatctgtctgcgcgccttcactttcatctggcactgggagttcctgtacatagacttgtaaaagctgccgactcagtttcggtatgcctatctaaagggttaggcgcacccatcagatcagttgttgttggttcagaggccttcatcgacaaggctagaattcttaggaagaccctaggcggtgggatgagacaggttggatttctttgtgctgctgcttatgttgctgttcgtgacaccgtgggaaagcttgcggatgatcacaggaaggctaaagccttggcagagggcctgacgaaaattaaacagttcacggtggattcatcttcggtcgagaccaatatggtgttcttcgatatcgtggatccacacatttcaccgagcaagctatgccaagtcttggaacaacgcaatgttcttgcaatgccagcaagttcaaaaagtgtcaggttcgtcatccattaccagattttagacagtgatgttcaatatgcattgacatgtgtcgagatgccaaaaggcccaaaccagagtaacactttaaagcagacacaataatcaaaagtcatggctacaatgaatggcccaacacacgtgtatttgcaacgtgcaagggtgacaagaatatgagcactctaatgcaccacccttttggtaactgggctgatacagtgagtcgctatttcgcaagatcgtcgtggccctattgggaacggagatgctcttaatgaagtaggaggaccgaccaatccaactagcaacagcaggcagggagtggatgcgcctgctagaagagtgctagctccgcgcatacgctcgctcgacaaacgtgtgttgttaactattgtatatagtgttataattactgtcctttattcttgatgtttgttttgtagttgaaactcacattgttttttcatttccatctcgattttgtatgccgtgaccacgaaagactaaatgttttcttgcggtttctaaaaatatagctctctattgttgtgattgtgtgccgtcgcatcgcacgggcaatgacctagttctaaatgaattatgtttgtatgctgc

SEQ ID NO: 42231 - DNA, 950 bp, Zea Mays
tttttttggaatggcgacatctcttcgctatatgtcaatcaaagagctggactgcgggctataccggttaggcgtgaaactagagcatttttagagtgcggtaactgcaccttgtaacaatgttttgctgttcttcgacagctccaaacctgaagttcatccccttagtttttcttctctttttttttaaaaaatcaaacagttccccactgctatataggttccatgtataagcattcgggtcagctagagttcataaatgccaggcgatggtgcatgcatgatgaagctgttgtccattatattgacatgattgatcagaccacgcttggtcaccggatgatcaagaaacaattcaacaagactccaagagctggctggcaaatcgatccttttggacattctgcagttcaagcttatttgcttggagcagagcttggcttcgattctttgcattttgcaagaatcgattaccaagataagaaaaagtgtaaagctggcaaaggcttagaggatgacatactgatgtttgactataatgttgaagaacgagttaatgattttgttgttgtagccatagaacaggatggccaagtgcatgcactgtattctaccccatccatttacacagatgcaaaacatttgtcaaatgtatcttggccagtaaaatatgatgagtatttcccctatgctgattcaaaaaattcatattggactgggtactatacaagccgtccaactttcaagcgatatgttcgagtgttgagtggttattacctggctgcacgtcaaatagaatttttagtaggtaggaggagttccttagggttgttcacgaccagcttggaagacccaatggcaattgcccagcatcatgatgcagtctcaggtacaacaaacaacacacgacagatgactacttgaaacaccttgctcttggagcatctaag

SEQ ID NO: 42232 - DNA, 950 bp, Zea Mays
atgcccttcccgacctgcccccgccggcccagcgttgacgcgtcccgcgcgcagatcttgatccgtttctgcgtccgcggcccagctccggctacaggcttgcgcgcggccagacacttccctgcgtggggcccacctggcagcgtctgtggcccagcgcacagcgtgcccacggtggcccagccactggtgcgcagagcgcggacgcgctcgtctgcctcgagggagctcggcagttgcccagcggcttcagccgccgccgccatgtgcaggctcgcgcacctacccagtctccacaccacccctggttggtgggcccgcaggcgcagcgctccaacctgctgcttgcttccctctctaaccccttccacgacgcacgttctagatctccccataaactcgagaccgttcgtccctgcacagccctcacaccctcacctccctagtgctgctcgttgctccgtcgttcgtcggacccacgctgccactgctcgtccgccgaggtgagctcccttcttcttcttctctccctaaccttcgattttgccttcttcctcgttgggggtagccgattcgccgtgcctctccattcccggcatgcgcggcgaggggccatagcagcggttccctcgtcccatcgtctgcttccttgcgtgcagcggcgcggcaccgcacccaatcccctgcgcggataggctaggccaccagcaggcgcggcacctccatccctcccctcgcgtgccctctcccgacgcgagcgcgtccctgcgcagcggagccggttggccgtggtccggccatggccctgtgcctgcggcctccttgttctgggcgcgggcggtacgcctctgcgatgcggcgtggcccggcccggtgttccgcggcggccagcgggtgcgcgcggcaggcagcgcggcagccttgcgcatgcccagcgcggcggccaggcc

SEQ ID NO: 42233 - DNA, 487 bp, Zea Mays
cccatgtgcagccgcccccccacttctcttcccccttggctgccgcccccctgcccatctcctcctctctcaattcttgcagccaccaaaccctagccccccctctcaatcccctcctcccaaggtgtcaatccttgccgctcggatcatcgtcgtcgtggtgcgagtcttcaatcgttttggtggagggaagaagggaggaaggaaagggggagaatccaaggtgatttttgtgttcatcccttgttcatttgcgctgcaatttaattgattagaggttgcgtttgcgattggggtagaggggggctgtccagaattttaggtggtgggtgaacagcagtagtctagcagtttatgtgtttttttcgtgaggaattaagggaaatcagtttggggatcatgtagaactttaccttacctttccaacgagtatttatgcgctcaatttggagttataaattgaaagttatcaccgtttgaatccggg

SEQ ID NO: 42234 - DNA, 297 bp, Zea Mays
taaaattatttacgagccctaactttttgtgaatggacatttgaatcgtgatccattaccagtttaccatccctacctaaagtacataattagggaagcagctcaataaaaatgatgaatattagaaatgcataacaggcagtaacagattagctacttaaatttaagacaccagcctgaaagtgggtgatgcaaacagtcaagggtggacaagtttgtaccaatgtcctcacttagttgtgggtgtcttaggatccttaaatgagaaaggtatttctcatatccaatatgcagacg

SEQ ID NO: 42235 - DNA, 3745 bp, Zea Mays
ctggtggcctcttcctcgccctgcccgcctgcctcttccccacctcgacgccgcccccgcgccaccgagacaacgccgtcctcaccgtcgcacggttcagcgacgagatgagcgagctcgcagcgcccaccgacccacccttcccccaacattgccgcacaccctggccagagttcagtgaccctcgccccccgagattaccgccatctcctacccgccattatcgcgctccaccaccagggccacgacttcaccgagggtcgccagggccacctcctcgacatcaacccatgggtgcatgcattcgtctctctcatcatgttcccatgctttttagttcctcacatggttcatgctcgtcgattgattcactgttcttgcctctctgatgccataggaggacgaggaggtggctgacagccctcccccggccgccaccatcacctcccctgatttgtgcccaatcctccgatgcagagctctgcaagtacgcaggctctatgttgcttctccttggctgtaccgtcgcaactggccctcaagggcgcgcttgtcgccgctcgcaaggagcgccacaatctcagaccctcgacagcgacatccccactgtccaccacctcccccacatctgcgcccctccccgccctcccttccccctcccagattgcctctaatccagaactttgcgctctccttcgtagtcgcgcgcgactctcccgagatccaagaaccgtgagatctgcttgcccttgttgtcggttagatcctagagcccccatcccttgatgcaggcggagcgctgcctccagttgttgggcttcaggacactagcacggtgatgtataagccgcagcgggcgggcgcagatgcataaatgcaaagtttcaagataaatacaaggataacaaatcaataatattatgtttaaggtctgttagtagttcatagtgtgggctgaattttttatttagaactcagacacatgtttaattttagattgatatgtgatcaactgacaactggagtaaccagataattgataagattggcaccagtaaacatctctttgaaccaaataaaatatcaaggaatgcattaaagttgaaaatacattgatcacacagccaaactccttgggatatttttaagttccacttcaattttccttgcagtagtctgttttctttgcaacaaaagtgaacatcattcctgacagtactctgttttctttgtatgttctgatataatattacatcattcctgaatttcagaattagataagcaaactttagcctttttcaatttcctgttttattatgttttaaaactccatgtagtcagtacagtaacaattcctgacttatgaaactttattcatcttaattttcgaaattctgttctggattcttgattgcctgatatattgctatatgctcatttgagataagtcagatgccatgttcactttgtagaaacctgcacaagttcctacaggtgtgtaacaaacaaaatgatggtttgtacctttatgagatatgatagtgagcatctgagcgggtggaacgagcctgcaacaaaccgagcttggctcagctcgcccatctgacgagcttgaaaaggcggctcgactcgctcctagcgtcggctcggtccgagcggagcgtgttgcgagcccgagccagctcgttgcgctcgagtttttttccagccgatagttgttcctttctataaattcaccttgttctttctcaacatgtatgtagaaatctatgttgtatttcttaagccaaattagcaaatattttgtcagtaggtgtaataagtccggtcgcacctacaccgatggccatacccaacgtgagtcaagccaagtccattcccctcccttgcttcctcaacttgttgtcttgtggtctgctatttgtctcagagaaggtggtgccatcatcatcagttgtgattatgaattatattctaccgataggcttagataatttttggaacacaacattgctccaaaaagtttttctgaagaaaaggtatcaatctgcagtttggtaagtgagtctgaatctgcagcaccaaggacttcaagaattagtctgaacctgcacttacagttccatgggtcttctcaattattaataatattatttttaatgaataattgaatatatattgagtctgtatcatagattcagtcgccttaacaccctttgctgttttcccacttaagttagttaatgagatgaatggatgtaaattacgtagtgaatgtatgataagtccaggctacatgttaaaagacacacttggctacttgagctctgtattgccatgaagaaatcttactgacgggtgctttcatctgctatttggatccgttgctgatggatcttataaaggttgcggagacaaaaacaaggagcatggaagaggaagtaatcaagctgcagaaatgcttacaggacaaggatgagcaactgtgttcatccacaagtagcacggaacagtaccatcatgagttggatgatcttagaacacatctgtcatttactcaagctacaggagaagcagagctgaatgagaaggacagctcactcaaagaccatagacttcgagtgaacaatctaggtgagcagcttgatcttctccagaaggatgtacaagcaagggaggtcacacaaatgcaacttaaagatatagttataaggatcgagaccaacatcatggatgaagttgccaaagcttttgaaattgcgatgttgagagggggaatcggaatattgtctactcactggacgaacaaaaccaagaaccttgaatcacagatattattatgcgctcttgtcacaacaattgagaacatgaacctgggggcatggcgtggaggggcacccacggtagctgatttgtttctctacgtccagttcttggaaaaggctacctgcactaattcagcattgggaagtgtcatgtgatgacaccttagatccaacagtacctcttataaactatcagaccttcccaataaaagatggttgagtttcatggtaaacttatttatatactacactaaacaagctaactggctaagcttagcagaaaatgttcactacgatctgccaaaaccacttataatttgtgccagatggaggagaaactaatcttttaaactgaagcatatgcatagctgaaactaaattcttatttgaagcataattttagttaagaaaactaactttttgtgtgttcgcgctctgaatccgcacaaacagtttcctgtttctctatgaaccctaacccccccaatctcggcggagatcaagtgcaccccctcgcccctcccctggttggtggatgttggatatagaggcgttgcagaaggtattgtgcaggaaaacatagcttctgctattcgttggtttcccctgttcacgtgtcattctctgtttctcttttctcttaaaaaatggaaaacatattgtcccttcagttcaccacttgctcggtggcaattgcagttacttatcttgcagttacttcaaacatggtggccacatcttttgatctgtgtgtgcttataattgtagatttgaaagatgcaacccattgcgataatgattgttttatgtgatatgattagcaaaaatattagattaggcatatttgagcatccctgagaactgccggtgagttgggtctgtgatagatttcttcatctccgagaaatggaattttactc

SEQ ID NO: 42236 - DNA, 490 bp, Zea Mays
tctatcaaagtgctcaagatgctgctagcagaccaaggtgctgcaggacatttctttgtcatgatttaggatcctggtggaattgatgccatgtatcggcttgagggcaagccgaattttaagaaggggagaatgtcagcagcccgccatctgaacagtgagccactgtcactgtctcaacaaggaagctggaccaagacgagcaagtagctgatgaagatacttttagagtccggcgatagtttctgtcgtgcaaaataccagtgtgcaagaggccgagctaatgtaacgcatccgaaggcccacagtccgcttcgtcttggcccagaatagcatgtaaaggttgtgtgtgtctgcgttgggctgtggcgctgaataagtacgcgcgccgtcaagatccttgtatcgaacaactgaacaaacaattattctctagaaatcacatctgttcttctcctacctctgctctctctgatttccttcttactcc

SEQ ID NO: 42237 - DNA, 738 bp, Zea Mays
cagtgcgtctacttactgacacgggaatgcactcgcaccgcgtaaatggaatcacttcaattatactagacctatacatccatcgaggcacttctcgcctaaacaattttctcacaaacctaatttcctaaaattatttacacaacttctactacagggtttttttctcggatttctaacagatgtcggctcgtcgatgttactcgacaattagccaagacaccgaatcgatcactaaatatcatataatagctcccgcgtcaggacatcgaccccaaccatcgacgaaatacatctacctgccagacctgagaaacactagtcctataatttgtattattaatttggtcacataatttagatatgtctaccatttacccttcatatgaatcgcatctaaaatgctgacttcaacccacgtatactaaatcaagaaaattatcgcgttcaacaattctatttgatccctcaacctagtcaactaataaaaatagtgaagcagcttacctaaattcgacttggaattgcagaaacgacgacgatcacatgtttaagaagttcgtcgaatatttgacgagcgccacgcgagaatcgcttcttcacccaaatctcgggatttcttgatggcacacggaatgacgacgagatcgttttttggagcgagctggtgaggtagggtcgaactgggactagaggacgacgaacgtgcagagcttcaaactcacgcgcgcgtgatag

SEQ ID NO: 42238 - DNA, 341 bp, Zea Mays
ggaaaaaaaatgctgcgattggcctatcgtatgatcccaacatccaatccaagtagcagttttggatcgatccttcacagacaccaaaggcacgtagtcctgctgtagttagcagtatatatcagcagccagtgtagttgtagtacgaggctttttgtcgttacgggatgcagcgtggtcgtcgtcgtcgacgtctctgggtgttcgatcgatgctcagcgttgtacagctagtgcaaggcgcgctctcgcacgctaggcgcaggtgacattgtgtaggcaatgccgatttttttgttttttagtccctttggagacaaaaaattatgtttggacccccag

SEQ ID NO: 42239 - DNA, 2079 bp, Zea Mays
agcttgtgctgcggtgctgcctagtcttgccttctaccaagggtgtgccacacatcaaacaccattgatagatagatactgatgactgcttccttggaacaatctcctatttaaaagctgtgtgcataccaggcactcaggcagcacaaaggtcgacgagttaggaaggatggcctttctggtgccgtttctgctgggtctttcctctgtcctcgccgcgtggatctactctgaattcctgggatacagggcatcatcgtctcatgaaaaagtccactcggatgttcacgtcggcgataaaaccatcaaagaaaatgacagggcggtcctacttgaagaaggtgaatctaaaccgccatcgacaaaggcacccaacatgtctgccagagccaaattaatacggtttattacgttggacgagtcctttcttgttggaaaccgcgccacactgagagccatagctgaattcggcattattcttgtttacttttacacctgtgatcggaccaacatatttgcagagagcaagaagaactacaaccgcgacatgtttctgtttctttacattcttcttgtcgtcgcatcaacgattacctcactcaagaagcaccctgaaaattcagtagtttcaggaaagaccgttttctatcttaatcgcaaccaaactgatgaatggagagggtggatgcaggtcttgtttctgatgtaccactatttcgctgcctcggaaatatacaatgcaatccgtgtgttcattgcttgctatgtctggatgactggatttgggaatttctcatactactacaagaagaaagatttcagtatcgcaagatttgctcagatgatgtggagggtaaatttctttgccatgtcctgttgcatggtccttgacaatgactacatgttgtactatatcgctccgatgcataccctgttcactcttatggtgtatggatcactgtttgttctcaacaagtacaatgagatcccatcagtcatggccattaagatcgcaggctgcctcttgactgtcattctgatatgggaaattcctggtgtgtttgaaattttctgggcaccatttacgtttctgctaggttacaaaaacccagagccttctaagatgaacttacccctgttacacgaatggcgcttccgctctggccttgatcgttacatatggatcattggaatgatttatgcttactttcaccccaacgttgaaagatggatggaaaagctggaagaatctgagactaaggtgagagtgttaatcaagggaaccattgttacagcttccttaatggccggctatctgtggtacgaatatatctacaagctggacaaacatacatataacaatatctatgtctgcctacgcaattgcacccaacagttgaggagtacccatttgtctctttttgtttggcttggcaaaattacaatggagagttatatttctcagtttcacatttggctcaggtctagtattccgaacggacagccaaagttgcttctatctttcttaccagattatccgatgcttaactttttgcttactacgacgatatttctgtcggtatcattccgggtgtttaagctcacaaacgtactgaaagaggcatttatccccaccagggacaacaagtgtctatatcaaaattttattgctggagttgcagtctttgcatgcctatattgcagctcattattcttcaaaacctaccaacagtatagctgatacatagactctaaatcttagctatctcatgtagctcaactcagaaagcacattgtttttcctgggatggagaaattccaagtaattaagtgaacttgttaatttgtttcttttgtatgtatttccaagtaattgcgtgtttttagagacatccatagtcgtgtccttagttttggtggttttaactgcctatgtaaacaaaacaacaagtcttgtaaaatcagttctatagtagtgttctactttagttaagctttactcttacgagttcactatatttccgcttacataatatttcagttgtgtagtgctcatatgaaaatgaatctgaacgagat

SEQ ID NO: 42240 - DNA, 1140 bp, Zea Mays
acatgtcgtgttggttcataatggtcctctatttcttcagactctaagcctggtactttgtcgagattcgactcaacatcctcgtctaaatctgaacttggctctaagcctggtacctcagtgagattcaactcaacatcctcatccaaactcgaactcgactctaagcctcgtacctcattgagattccattcatcaccctctaaatctgaactcgactctacgcctagtacctcatcgagattccactctgcatcatcgtccaaatccgaacttgtctctaagcctggtacctcatcgagatcccactcaacatcctcatctaaatctgaacaatgctctaagcccggtacctcatcgagattccattcaacgtcctcctccaaacccaaaatcgactctaagcctgatacctcgttgagattccccttgtcatccttgtccaaatcccaactcatcctcgatgttttaagagctcgacatgtcgcctcaccaagaccctgaattgttgctgcctcttttggcactagacatgttgctcctttgttatcccacctcaacaccattgctttgagctctaatcttggaaggtcccatcctactgccttatcgagatccgagctcatcgtcgttgcttcgatctctaggcttgttgcctctttcaaccccccctgatgccccattgagatccaaaatcgtcgctatcactctagaatgccaacttgttgcctctttgagattccatagtggtgtcttgtccagatccaagctcgtcgccactgccaccgctttaggatcttcgcttggttcctctctatggtcccaccgaactgcttaggtgagatccaaggatcttgctaccacttcaagctcttagctcgctacctcatcaagatctcatcctgctacctcgttgagatcccaactcatcgcctccaaatcatagatgccatatccgctctcgccctttggcatcaacacaggattcatagactcatcccatcttaaggtctcactgtgtctgattgccacaatctctaaatctttgctcacccatagtaaatttgaatgttgtagagattcgctgggtgagaaagcttataagaaggataaatgaaggggatagagaataaaagtaag

SEQ ID NO: 42241 - DNA, 1215 bp, Zea Mays
taaatatctcatcaaaacaattagcttgctgagatgttacatctcactcttgcattactcaatgcaggtgtttgttgctcatcaaggggagtgggaagtagcagcacatccatcttcactctcataataacgctgcctaggcgcagtcatgatttaattagaaacttcttgtcaaaggatgtttgtttttaagtagtcgtgcgcactggttaattcagttcatgttgttatggttgtcttcccattgctagcagattattaatgtctattatgttttcttctcatgatatctatttatactttgttgcttcccccgtttatgcaattttcaaaggagatgctgtcgaaattttatatatgaatgttatatgtgtagtttagtagcattctggggtgtttgtggatcccgaggtgttacagcttcttcatcaactttcttcacccagagagtggcatagaactgagccaccacttcgtcgttccagggatattccatagtcattatgttcttcaacccctttctctctaagttgcggagagctgatgtcatgtcaacatctcccatattctcacacccctcccagtcaaaaacgatgtctaacgactgggtgcttcttattcatgatggctgaattataaaaatcagcctcaaaaaggttctagaaccgagggtcctggacaccaggatgtctgggtgtgagagagggattagtgaaccttaagcgttgaagggctccacccccttcaacgagaagtcgaccgaaggttcattcggccacgggacatagtcgccggatgcatgtggagaccggtgatgaggagagcgtcggacgatggaggttcgacctcgtcgtcgaacgctccatcctcctcctgcaatggagggtatccagcggaggaggtgctttggcgaggacgagtggcgccaacctttcgacgcccctggcgcgcaggttgcgagggcatcgagggtccctccccttccaaacggccagagccttgtcctctcttggagagagaacgacgaggcggaggagaaggaacaggtgattcctcctggatttcgtcggagtcactgctgaactccaccaccaaaggattgccgtgacgcaccatcttgttgagaagctccgagaagatgaacaggtgaaatgcaagtgttttaggaggctcaagtggctggaggactgagggcttgagtgattgagatttgag

SEQ ID NO: 42242 - DNA, 1221 bp, Zea Mays
  misc_feature (1)..(2): n is a, c, g, or t
nnccggaaattcagattgctggctccaaggcttatcagcaagggaagatctatggaattgatgccgcttctggagctgctatattagcacttgatgttcgaccaggaaatcatgttcttgacctctgtgctgccccaggtgcaaagctttgcatgctcgcagatacgcttggaaccactggttctctgactggtgttgatgttgcaaagcaccgccttgcggcctgtcgtacaatgttgcagaagtattctcttggtgaccgtactcggctctttgttgctgatggaactttgttttcccttttacctgtgaactccaggatgcaaagaatggaagggtcaattggcgttgaagaaaatggaagcatattcccagaatggacttcaaggagatcatggaaggatcggcagaagactaggaaagcaaatgcaaatggtcaacagcacctactggcagcttcagaacctgaactgatatactatggtaaacattcaggattagttggacagtgtaaatctgatgtcttttgtccatcagttgatgatgaagcttgtacatctggctatgacaaggtcctagtggatgcggagtgtactcatgatggatccataaaacatattcaaaaatttgaattctggggatggaaaagtctagatcgccgcgtacttgatgctgaaagaactgagaaccttcttcagcttcagttacatctcctcacaaatggttttaaattgttgaaaaccggtggatcacttgtatatagtacttgcagcttgacagttgcacagaatgaatgcgtggttcaacaattcctttcaacacacccttctgcagttatgctgatgcccagatcatgaaaattatcccttggtatcatgttttaaacttccagatttgcagaagatcaatttggccgacaattggccctgcagaagtggcggcatccccaaaacactgcgattcgatcctgcagtttcacaaaccagtggtctttttgttgccaagttctgtaaactaccgacttaaagcattttctggtctatcttcctggaccattcatgtcctctcacatgtaaaactgggttttcctgtcagcaactaaattacaatttctgttcttgcagttggattggtcagtcaaatacccaaacgatagcaaaccaggtactcaaatggctgatgttatcggcatgaaaccaaatcagttcaaagagattggtg

SEQ ID NO: 42243 - DNA, 942 bp, Zea Mays
ttccgaatctcgggacgagattcttttaaggggggagggctgtaacaccccaggtgttactgtacgtaaacagcgaatatggacgtaagtacgggatattaataagaataacagtctctctgttttaatctgtttcgtctgtcgttagttcgacattgtttttatttttatctatccgggctcttcctaaatttttgtgatgttcggaacattgttattccgaaaatcggtgcgtccgatgattatttaaaattcatcgcttgcgcgaatacgaattctgaagctcgaaccacttggacgatttttatcctgaacaaattaatttgaactcaacgactaaaatgttcgggacaaaataatttgtatcgcgcgttgtctgagaaaaatcgtgcgcgaggttataatccaatttattcttcagcacgctgtttcgaagacaaaatcgcgtatacgttcgcagatattatttcggctaatttcggtcgaatcaagcagaacgaattatcagtgccgaaatcagtttatttcggtctgttgttctcgcccaaatccaaatcttcggatgtaaccaattattaaaccattcgatatataattgagcctcgattcactggtaaatcatccgtgaccgtggaaccaaatgttcaaaccgcgggtaaatttatcaggatttcgaatcgaatcaaacctggttcaaattttatcgccggttttgtttgattcgacctgttcatatttttttagacccagatttcagaactccaaaatatctacatgtttattttgttaatggtttggagaagaaaaatcaaaattctctttatcttcctaagcctcatttctttcttatctcgatattgtgtgcatgtcaattcaatggaaaaaaaaaatcccgacgtccttgtctcctgtttgattttttttcctagcccttatccacgt

SEQ ID NO: 42244 - DNA, 2025 bp, Zea Mays
ctatctagcacctcgtcgttttcttcatccattccatcccctcgttcccaaatctgcaagcttttaagaaaaaaacattccacccaccaaccaaactgtcaagtggtcaccagctaggtttccctttcccttccgtggcccacggctccgcgtcctcctccgcagtcggccgttcgaaccccgactactgacgccgtgttgactcgcttgcgacaaccaactgactcaagcagaaacgcacgtcctcccgtggccatggccgcggcggcgcgccgcgcgatccccctcgtcctgatcttcctcgtctcggcgcccttgtacgcggccgatgcgtcagcggcagcggcgggggccggggcgaactcgtcgtcgttcctgctcgcggcggagcagacgcagcggaaggacccgctcgatgggctgaggtactacaccggcgggtggaacatcagcgacgagcactactgggcctccgtcggcttcaccgcggcgccggtgttcgcggcggcggctgtctggttcgtcgtgttcggcattgggctgttcatcgccggctgctgcttctgctgctgcccgggcgccggcgacgcgtactcgcgcgcgtgcctgtgcgtctcgctcgtgctcctcctcgtcgccacggccgcggcagctgtcggctgcgccgtgctgtacgacgggcagggcaggttccacggcagcacggtggcgacggtggactacgtggtgcggcagtcgggcgacacggtggccaacctgcagcgcttcacgggcttcctggagaccgccaaggccgccggcgtggggcccgtcgcgctgcccgacgacgtcaaggggaggatcgacgacgtcgtgcgcaaggtgggcgcggcctccgacgagctcgccgcccgcacggccagcaacgccgccaagatccgcgccgccctggagacagtaaggaaggttctgatagttgttgcggcggcgatgctaatcctcgcttttcttggccttgtgttctcgctgtgtgggttggaatcgattgtctacgtgttggtgttcctggggtggatcctggttgcagggacgcttgtactgtgcggtactttcctcctcctgcacaagtagcgtggtggacgacacgtgcgtggcgatgggcgagtgggtgcagcacccgcaggcgcgcacggcgctggacgacatcctgccgtgcgtcgacacggccgcggccaaggaggcgctgaaccggagcaaggaggtgaactaccagctggtggccgtgctcaacgccgcgctcaccaacgtctccaaccgcgacttcccgccgcaggtcccgccgccgctcaactacaaccagtcgggcccgcccgtgccgctgctctgcagcccctacgcggcggacctccgcgaccgcgcgtgcgcgccgggcgaggtgcccctcgacgccaccacgccgcggcaggcgtggcagcgatacgtgtgccgtggcgtctccgcggacgccgggtcgggggccgaggtgtgcacgtccccggggcgcgtcacgccgtccatgtacgcgcagctcaccggcgcggccgacgtcagctacgggctgtaccactacggccccgccctggtggcgctggcggactgcaccttcgtcagggagacgttccggtccatcggcgacgaccactgcccgggcctcagccggtacagcggccaggtgttccggggcttgctcgccgccgccgtcgccgtgctgctggcagtgctgctctgggtcgtgcactcgcgggagcgccggcggcggagcgaggccatggagatcctgtgtctggcctcgtcgccctacaagtatcctctggaggagagggcgtttctcaagagccccgcgaggccgtacatgtaatttaaactgacttaaacaccgtccgacaaaatggggcgtattatacctggtagacattggtgttctcatatgtgctaaatttggagagagaaaaaatatatggcggatgaactgctatcacagacaacaaaagcaagaaagatgaaaca

SEQ ID NO: 42245 - DNA, 1765 bp, Zea Mays
gtatcgctattactgcctacatatggaataaagtgcatttccctgtctacacaacgtgtagcccgtttggggttttataacaataaaacctcgggaggtcatcccacccagttgttagtgcaccacgtcggcttcttcagtttgctgttcgtgatgctgtcagaactgtgcagccagttacttctagttctgaatcagattccaagcgtattcgttctgtagtgtcaacattggcatcagattccacacttgatatcactcatattaggttacagaaaacaaattcagatttgagagtaccaggtgccacagcagcactaagagctgcagctgaggctgctggagatgctctcaaggatagcttttctagaagtgtttttagtagattgggcagaatgcccacaataaattctactgaacaatcaccttatcacagagaacaagatctcaaaggcaaagaatatgggaatatagataatatacaagcagaaaatcaagttgaatttgacgaaagaaatcaacatggtggcagcgatgtttacatgcgcgatcagagaacagaggaagctactggttttattcccaatattgatgagtatgatcagaacagtgcagttaggtctaatggattgggttctcgccaaagcgcattgcctgctagtggaggtaaagagtcattagtactggggtatgtaagaggagcttctgaaataagaagcagaagattgatagcccaggggccacatgctggttcaggaccaagaccatctgaaaagacccaaaatgtttctggtaacactaacatgcagaagcttccaattcatgtaactggagatgccgttgcatttgatcatcaagtgccaatggagaaggttgctgatgcaaggaaatcacatgtgaagaccgcacaggctaatgatgtatccatgatgactgataagtccaaagatttgatacagccgagttcaatgctgcaggcacagaaggcttctggtgctgctggatcaaatactacaggccaacctgaagctcagcatatattgagtttttgcacaaagaatcagcagaacaggcattaaccctgaacgggacatcatttatgtcacgcattttgaaggtcgttcggaaaagctccactgaagtaacccagctgcctgtcttgccccgtgcttcttggggatcaccatttgcttcaaggctcattagaactgcatacccaaggccgaactatcccggtgcaattcgtgggcgactatcactcaggggtgctgcccggagtttacagtggaagcgtggtgttgctgattcaggagatgttggaaaacctagtccaactgcacctgggaatcagttggtcaccccggccacacgaaacttcacctacacacgcacggagccaaaaacaaatgcgggagcgatggcatgactgatcagctgtagcatgccgcagcgtcgcagaaagagatcgtgattgatgactgtttcgtagtccattcagctgcttttggtaaatatttaagtagctgcagatcttagtttgtagcaggctggtttttgtggacctcaaccttgagtaatattctgtgaggttttctgtgctgatttttcaccgtcagcacacccgttgttctgctggctgttcggagttcgtggatagagggtaaaatatataaaaagtagttttaaatgaaaatacgaacgcgataggtaggttgcaacatttgttttttttattgatggattatttaggatgtgtttgtttgca

SEQ ID NO: 42246 - DNA, 1845 bp, Zea Mays
ggatcacatatattttgaactgcagggatttaagtaataacaacttgagtggttcgatacccccggaagttattaatctttccaaactggaaacatgctaggcacttcaataataatcctctcagtggaggttttcctcatgaactgtcgcttttaaggaatctacggtccctgtggatgtttgataattacattgtagggccttttccggcatttattcagaacttaaccaatctcacagacttgcgaatatatgggacgaatcttcaaggacctattccaaaaaatttctctaatctgagcaatcttgaagtcctgatgcttggtgatcttgcgggcaaccattcttatttaaatgtcataggagcgtgggcaaacctttcagtgttatctctgagaaaatgtggtcttacaggtcaggttcctaatactcccccaaacttgcccaagctaaaatatctggatttgacatcaaacaacttatcaggatcaataggaggactcttgctttcatataagacctcaaattacatatatgtaggtggaaacaacttaagtggacctgtgccttctgaaattgttcaatcatcagtttccttggatgtttcgtataactattatgttgacggatccctttctaacaatccttctgaaattatcttggaacatcaattgatgcaagtggaagaatcaacagtggaaatcttacaatcctgaactgccttcgcatgaacgaatgcaacataaataatttaactaatcgtgcaacttccttcgctataaactgtggtggcaagcaagtggagtattcagatctaatgccaattatgttctctgaagactccactgatcttggaggatcaggctttcatgttaatgctactagtcattgggtagttagtcatgtgggttctgatccatttaacgaatccaccggtattgtaaatacaagtgatatttttgaaaccaacatgcaagagctctaccaaacagcaagaacttcaacaagttcgttgtggtactatgtggtaggtttagctaacgggaactacacagtccaactcttctttgcagagatagtcataactcatggacctggaaagcgcttatttgacattgatattcaggaccagaatatcaggaaggactttgacattactaaggaagcagggggttccagaaaagccactaacataacctacgaagtgactgttgataactccatactggcaatacatctgtattggagtggacgcggcacctgttgtattccatatgaaggagcttacgggccactagtttcagcaataaaagttacccattcccaagacccgaaaaccagtcccccacaagcaccacattctgattctgcccgagatgatgtaaagcgaagaggagtggttgcaggcattgcagcactttccatagctgctgcggtgatatcttcatctgttgtctacctttggtggaaatgggtttcacttgtgaagcgcccaatggcatgagttcgtcagatgtttgcatatagttgattctcccacaaatttccatgtcatgcgaaggactctatgtatttgtcttttagcgttggctgctagcaactagccaactagcatagccaagatgactgatgtacagttgacgttgcgatcacggttttaggtctcaagttttgtttcacgattattgtaacctaggaaattatctaagacattctgctgctaatatgttgtttgtttgttgatcaaagtgattcaaatcgcattgtgatatattgtttgtttgtcgatcaaactcattgtaaaactattctcggacgaatgtcacatttcacgtgttgccaac

SEQ ID NO: 42247 - DNA, 1734 bp, Zea Mays
ttcagatcagctcaacaaagataaccttgcgccgcctcctaagaagatcaagactacccagccaggttctacagaccctcaaaaccttaatcgttagatcatcgccgttctcatgaagaattccggaggaggcgccgcccatggcgatggcggcgacatctacaatgtccgggccgccgagatcctcgccaacgaggccctcctgctccccatcaatgaggccgccccaatctacgagaatctgctcgccactttccccacggccgccaaatactggaagcagtatgtcgaagcctacatggccaccaacaacgatgaagccgccaagcagattttcagcagatgcctgctcaactgccttcacattagtctatggcgctgttacatcaactttatcaggagaattaacgataaaaggggctctgagggtcttgatgagacgaagaaggcttttgatttcatgctcaactacgttgggaatgatgcagcttctggccctgtttggatggagtatattaatttcctcaagtccatgccggttgtgacgccccatgaagagtcgcatcgcatgactactgttcgtaaagtgtaccagaaggcaattttagttccaactaatcatgtagagcagttgtggaaggattacgagaacttcgaaaattctgttagccgcaccttggcaaaaggcttgttatctgaataccaaccaaagtttaacagtgctaaggctgtatatagagagcgaaaaaagtacattgatgatattgattggaatgtactggccaccccccctacaggctcgtacaaggaagagcaacagtgtatggcatggaaaagactcttggtatttgaaaaggggaaccctcaaagaattgatgctacaacagctaataggcgtatcacctttacttatgagcaatgcctgatgtatctatatcatcatcctgatatatggtacgattatgctatgtggcatgtgaagaatggttctatggattctgcatcaaaaatatttcagcgagctctaaaagcaatccatgattctgaagtacttaagtatgcctttgctgaaatggaagagtccagaggggcgatacagactgctaagacagtatacgaatctcttctaggtgaaaatgctagtgagacctcacttgcaaatattcagtttattcgatttctaaggagaactgaaggcactgaagcagcccgtggcacaaagtgtttttgaagcaggtttaaagaggtttatgcatgagccaggatatatccttgaatacacagacttcttgtgtcgtttaaatgacgatagaaatgtacgtgctttgtttgagagggcactgagcttacttcctcccgaggaatccacagaggttgaacaaagaaggaaagaggctctatctaggacatctgaagatgccttatctgcatcggaaaacacacttcatgacatagtttctcgatacagttacatggatctttggccatgctcatcaaaagaattggattatctagcgagacaagagtggcttgcgaaaaacattgttaagaaggttgagaaaccagctatgttaaatagcggtagcatgctagacaaaggtgctgcaggatttagtgcgagtgcgaggttattaccacaatctgccaaagttgttcgtcctgagacttctcaaatggttatttatgatccaagacagatgaaagagtgggaaatcaccgtggattcttgggcag

SEQ ID NO: 42248 - DNA, 415 bp, Zea Mays
cgcggactctacgtgccggcgtaacagagtgccgacgcacccgcgccgccttcgctgcgattgtcgctgaagcaatcgaactcgtcggggggataaaggcctgttaaagcgctcctctccactcgtttctttgcgcatcgaaactcgctttccttcctattgccgaatccgcccgccatcgccgatgtagggagagagtagaggagaagccgtcgtagcagcaccacgcgtccgtaacctcctcatccttggggccgtgtctgagggctttgctgggtgcctcaaggagggatttctcaacctcaccgggtgggccgcgtccacaaaccgccaggcttcgcaccgccgtccgaccgccgtgaagaagccgccattcgccgtagtcaactccgtcgtcgcttcctttgttggtaag

SEQ ID NO: 42249 - DNA, 88 bp, Zea Mays
agattgtagcacttggaaaaatcacaatgccagtaaccttcggattcattaacaacacaaggactgaacaaattgtgttcgacatttg

SEQ ID NO: 42250 - DNA, 1525 bp, Zea Mays
tttctttttgtgagatcatttgtggtcaaacctaaaaatgctaatcaccatttacaactactaaagctcacatacaaagcaaccaaaatcaaggaaataggttacttcctctattccaaattataaaatgttttagtttctttagtacaaagttttgttgtgtacttaaaaaagtttaaaagcgttgtaatttgaattacaattacttgtttggtgatactaatacacgacaataaagattgcatgctgctaaaagctgcagtttgacatacctatgagtttgtggtactttgcgcctgaagcaaaggtcatctccttgtttctttctattagcccatttctctttatttagtaatcttagaggaaagaaaaatatcccatgatttattggagctctgtcgttactgaactagttgaagcacatgttattgaagtgtcttgtattctctcaattgctctatcttagagacttacttttttatatagaacaattttatctagaacaaacttaatcgtgagaaaatacattttccacagtgcatgggatcttagtcatacattgccaaatcttatgcaatggtaagaaactaatcatgtgatgtctggttgaatttgttgcatatctacatacttgattattgtttcaagtggtagtgctgctaagatagctaggtgaacatctcttatatctcgacaataactttctatgttaacttgtatattgcttcctggttggttattagcaacattttttgtgtatacacaacaactagcttgcatgatctctacaaaatgctaggtcctttcaatatctcacagatgttatgatctatgctatgatcttgttttatttatatcctctagcttggtttctatttatctttttgccttcactttctaacttgcgttatactatactaagttttaatcttaatgctaggatgatatggaagcaatggtggcagcaccagttgaaggacagcttgcaaagtcttctacacaagtcatttcccatgtattgccgagctcaagtaaattctttcacaatgttggcctttagcccgcctccaaaacaagctctgttgaagatggacaacttgcaaagtcttctacacaagtcgtttcccatgtcttgtcgagctcaagtaaattctttcacaatgttggcctttagcccacctccaagacaagctctgtttttagcaaaggtgcaagagctccaatctcaactggagactaagaggcaaaaaagatagacttaggcaagaaatggaaactttgaagctacatcccacaacattggaccttttttattccttatacttattgtctaggtgatctaattatatttatgttgtaatagttgtgctctgcatttggccgttgagctgaatcgacttgcttttgtatttaagttatagggtatttaaatatgtttgatgtttaatacttgtgttggattctttatgcttcaattatacgtggattctagataaagttgtattcactcatgttgattgatgaa

SEQ ID NO: 42251 - DNA, 3480 bp, Zea Mays
actgaatttgcttatttccggctcttgttgaaaccgccacccgattcctccgctcgccaaatcctcgccgtgccctcgtagcaattccttgcgtcggcgcatcatcgcggcctcctctccctctctctctctatctctctcaatctctccgttggcaaatcgttgaatcgacgtgcttggccccggccgctctgagcccgccgccagcctcctcgtctgaagaagaacgacagccgtcgggctccggtggtcccgccgaagaacggcaggtagccagccgcgctcatcacgccggcgactcgattggcattgtattggcctttccgtttgttgtcagatcgaaaagaagaggaaagaatcgggaagcccgcccccctggtggatatgcgaggccatgtttttcatgtcacacccccgaccgattcgcctcgatttcgttcttctgttcttctgcgccgcaatggctccttcgctcgttcatatctgttattctgttgtgaatactcggtttgagtcaatgatgcgatttctttcattcaaaatcttctgggtgctcctgtgttattctgatttattcgctctgtttcgacgccagttaatctatcgtgtcggctgttgacaatatctttggtttcttgtccgcgacagagttctcgaagcaaaacgacctgatgagattcctcaaggggagcaaggtggaggtattgcaggaggcagatgtgccgtttggttcttggaggcctggtgagatcgtctccggcaatggacacgcctactttgtgagatatgatgaaagtcccgttgactccagcgtggctgttgaaagggtgccaagaaggttgatgaggcctcgccctcctgcggatgatcctgtacgctggagtttgggtagtatcattgaggcctttgacagctactcgtggaaggttgccgaggtggtgagagtgcttggaaagaatcaatatctagtcaggctccttgggtcctcgctggagttgagtgcacatgcatcggttcttcgaatgaggaagctttggctagatgacatatggattgtgactcagaagtattctgcaagatgcttggatggtggtgcattccgaggtcaatcaaaagataaaaatttagaccataacttcagaatggacagtcgtcaacttgagaaccagaatgcctttgagggtgatacatctagaggcatcaagagaaaatcgtctgctatatcaacacatcctcaatgcagtgaaatcactaagagattgcggacaccaaatagagatggaaggtactcaaagctggttgatagaagtttttcccctttggctgaaaaggtagatgatgttgattccccatgcattattctacgcgggaaatgcatccatgctggtcataaatggcatactggaacaactgaagaatttagtgatacagagagtatatcatcttctgttggcagttctagtcctaacagtacccctcatagatcacaacattataatttggtctaccaaagtggagatagctgtagtagaactgatgatgatgaagcttctacatctgaaagagaaacatcagaacatgataacaatgggtcgagggaagaaacccatgtgctggaattacatgcttatcgcgcaacaatgttagccttgcatgcttgtgggtcaattagctgggagcaagaggctttgttgactaacctaaggttaacactgaacatctcaattgatgaacatctagctgaattgaggagtttggttacccgtgctgttacttccagatagcttttgttgttactttcctggtggcatttcatatctttcaaattattgtcaagctgggtcaagactggttccagattaatactggttgctggataaaatggtcaaattagattggtttatcatccaaagacaaaaaggtgatctgcttgttgtgtgatttttcacagaacaagcatatttcttctatgatggcatgcacccgtttgactgtccagaagagcacttgagggaacatctgtatcagcaccggagtgtttcctctttccagcaccggagtgtttccaccatcgtcattagaggtaggaccctcccacaacctagaagcaagaccctcgcacgcccgatctgaggatgacttcgagggatatgacgattgacttctcgagtcagacgatgaacttacatttgatgcgcaacctgaaggcccggctaactggaactgggtggctgagctacaataggaggttcaaactgagctgcctgctgaactaagtatgattcaagacgaaaaccactctaagtatgacctctcggatgaggacgtctccgtggaagggacggacgcgtccgatgatgatattttggcagataatcaggacccggctgatgaggatattgaagatatcgagccgaaagaagatgagaaagattcagaggagctcattgttatcgatgatgagccatgggcgccagatccatttattcctgttgttcctaatccgaagactcgagcaccggagattcctgtaccagaagcccctgcgccagtagctcttgcttcagagggtcccccacaaggaaatacaatgcctgagctcgtcccgcaaccggattgggtaaggacaaaatctcacaatcatcaactcaggtgtggctgaagacaatattcgtatggagactactcaaatataccgctgccctgaacactgactgagcatgacgctgccttgattgaactcgaggaattaaagaagcagaatgcccaactgtgactcatctggagaatgaaggacaacctcaggctgccgtgaaacttagattttcctgacttgcagccgacttctatgtagacacaaaattgttgggattacatagtttggccttgcatcaaggaaaagttgcaggttatctgtacagtaatttgccagtcgtcttatgcatatgatgcatacctttttactgttctagtgttttgtaatccagatattgtagccggtgttcttggtgaaatatgcgccaggagagactgagacttattttgccaccttactttgtgcaaagccagctgcccttcaactttgctggacaggcaatcacatattttcagaagtgaagcggtaggccccggtagttctgatgagcaagcaagtgaaaagtttgtatgtggtgtatgacgatgtaccttggatctctttacttccaattgaacctgcacatgttcctggcttcgtgtcatcacaatgaccttgtattgtttcagtgttcacctacagttcatgtaccttaggttccttttctgtttttgccttacacgtaattggttgcagcagagcaccaaggatcggggatgtacaaatcaatatcagtttgcaactttgcatggaaggcatgcccttgcaaggcctcttggacagactccttcctcagtgctgaccgcatttgcagttgcagtgcgttagaggtggctgctgatgct

SEQ ID NO: 42252 - DNA, 1946 bp, Zea Mays
ctcccacctcccctgcatgcgcaacaaccccacgccccacccggcgatacggtagccgacgcccctacccctaggtcgtgcccgtttcctcccccaccctcgcgtccccgccgtcacggcgtcacccatccacttcctctccctgctgctgcagctcgcgcaacccccatctcaccctcttccttcctgccacaccgttgctaccaccgccctgccctgagagggcccgacgccatggacctcctcgagaagatgatggggcggggagtgctctcggacctgcagaacttctccggcctgatggagcacctggccagcgttgtcgacctcaatggcatggctggacgatccatacttgaacacagatacaggtacaatgtccccctttgagcatggtgaggtgtctgttcttgattttcttgataacggtggataggttgacttggatttggggaattatgagtgtttcatagatgttactctgacgagggataatattacctctagaaatatataccagtatcttctagctcaaggaaatacttgtgttttctcatttgagattgtaactgatagtttctacttctttcggtctgtcattgagaaggagagaaggggtgattatattggaaagactttataggtgatattgagtcaatgcccttcattgaagatttgcgccaattatccttttctcctgacacattcagtgaagatttgttctcaggttgatctgtgcaattttgatggcactcatggtgtcaagtgaggactggcaatttccaccagggttcaaaatgaaacagaagttcacttggcaacaaactatacaaagccacttattcttcactggtcattagcaaaaaaagactagagaatggaaggtaaaactccaaattttttcatttgtttaagatgcaagcagttgtattaacactgccatcagttccaatgcagtgttatttaagtgtgcaagaactccttcaaatgtattgccatctcctttcaaattgcttgatagggcgtgtgaaattgaatttactagacaagaaaataattaagctcattcattgtttaggagtaaagacaaatgtatgatattctttaggacaaagagaaacaatttcacaaatttcagccaattgattctactaccttaaaaaatttattctaaaagaatactcaaacctggtgaccttatggcaatgagcaaaaaacaatgtttctaggtggatagacttgattttaggtactccttcaataccaaattagaagtcattttagcttttctaaatacaaagcttttgctatgtgtcttattctacagtgtatctacatacacagtaaaagttatgaacctaaaaaggacaaaaatgcctatatacactataaaagccaaaacgacctacaatttagaaaggagggagtggctgaattatgttgaagaagttatcactctgtagtaggtataactggtatgccaaagttcgagctcattttcttttccatcatttcacattattttactaggatgttttttttgttttgggtgtagatagattttagttttcttttttgtgaatcggccatgaggtcctgcttaacatattaccatgaagatgcattaattacttgccttaggggaacttcctgttgcgtctgtgtttcaggcattaaactcaccagaaaaattataacgatcacttacttgccttgaaatcacaatcaatgtggacacttattatcacaactatatggttttgtttgttttgataatgggctcagatccaaagtctgttgccatatattatcagttgtacatttcaacatatttgaatttgtggaagtgtcagctatgtgaaagctctcttgtgggttttggtggtttggatgacaacccaattaaaggactaacaagtgtgctaagtgttgaacaggtgcttaat

SEQ ID NO: 42253 - DNA, 898 bp, Zea Mays
caagaatccagcccttcgatcttttccctgcctatataaagagcaacagggagagggaaagaaggcagaagtcagttcagtgattcgtgcttcgatcatcaaccatagtgagtagcttcagtcagcagtattgctcttccttccccatatcataccctggacacgcctaattccatcgatcaaggcactgaacgtatctggtgaccacctcgcccatgcatcaacctcacgcggccaggagattacggtacgataagtggtcacgtgatgcggaagacgagccaagtcgaccctaagcgcgggctaatccgcaggatgaagttgatagaccaacctgaagatggttaaatcaagcaagtgctcggtcgagggatgatcgtcaagtggacattgcctaacaagcactaacctagttttattcaggcaagccccggtgcattttccacctccttgttgttttaaaatctttatcaccttgcttgatgcattaggtgataggagttgtgtgctaaaccgttgatgcatttccttccttgaaaatttattacccttccttggtacctgttttgaaaagagttttatgatgcttagccttgctttagcaaataaaaatgttttgttttaaaacaaaagtgatgctttagtgggtgggaatgttttcaaaaataaaacttgatggtggatccatcacgaccgtgataggttcaacgtcggaaaagatgtacctctgccaggtaccaaactttgggttgaaaataataaagctgagaccgagcggttgacttgcacgagaagggagtctcggtgtagtgtctccctggtcacatgcctcatcatgggtaagctttgcctcgggcggactaataccagaataagataacacgcaatgggagtggag

SEQ ID NO: 42254 - DNA, 254 bp, Zea Mays
ttttgcatgttgaaacgacgaaggaccttctcaatataattcttctggctcaagtacagcagtccagacttcctatccctgactatctctatgccaaggattttctttgcagcacccaaatccttcatatcaaattcgctactaagttgtgcctttaaagcagcgatttccttcatgctcttggcaacaatcaacatatcatcaacatatagcagcaaatatgtaggtgatccattaacaaattttagataaac

SEQ ID NO: 42255 - DNA, 1213 bp, Zea Mays
ttggctgccctgtttgctttggaacgtgcaacgtttctgggaatgtcaagaattattttggagactgatgctatggagttgaagaagggcctgacaacgacgaccctagaccggagtgtagatggcagcttgttcagacaaatcagagaattcatgaatgtgtcatttgattgttgggaggttcaacattgtccaaggacgtgcaacaaagtggcagattgccttgcgaagtatggggcgagcgtggtttgctctggttcgaatgttttcatgagccaagtccccgcctttgtttccaatttagtctccggcgatctgcctggagatgttgtttaacagtctctatgagtctgtgtttcaaaaaaaaagtcttcttcgttcttccaatctccttcctattcctctgttagggtagccagtagctaacagctaggtcctgctctgctggtacgctgtcatcctggatctaccgcgcgtcatcctccttgcctaggcgtagcgctcgggcggaaccgagctgcggccttaagcatcgacaccgtcctcgacttccccaccagtacctacagtgaaggccgaccagattgaagtgaagcgccaacgccgacctgtagatctcgcctccaccgccgctagtgccctccatcccctgtccgcgagtctcggcaaccaaatctgagttttgaagctttgaaccccagggcggttactgttgtcgtagaccccatatagagtgtgaaggggaaagtagttattgatgtattccgcctaattaatcctcagaccatgatgcttggccaggagccacggcagacgacatcaaaggtcgggcacctaaataactcatcgattcaggctcttatccatgggctgaacagacactactaatttgcaatcaattaccgcaaaaatgagctcgagaagaaaatgttgttgaacttgcacaaaaagaaatggatagatgggctaattttgaagaggtttgacactcactcaaaaaaccaacgagcaaactgtccaggttccatccgtcttgtatgggaatgaccattgagcaagccaaaaaattacatgtgctcggattgtgctaaagaaaatggtgcaaagagaccctcaaactcatacccagtttcaccaaactctgattctaagggtttgtggtcattgttgtggctactcttgctagggaatgtgctgaattttttctcattat

SEQ ID NO: 42256 - DNA, 1408 bp, Zea Mays
cagcgttctccctgtctgtcgtttgtagatagttctaggtctctccccgtaccagcgtctccaagtctcacgctctctcctccatcccaacgtctccagtctcgcgctctctccccccaaaaacctcgtcttcctccgctcgtctgcgttctcggccatcggtactctccaccggcgctccagagttcatcggtactctctagcggcgctccagagttccagacacagtgacggtggcggcggcgccgacttctccggtagtactcgctgtcctcctccctcaccttgcgcgccgcggactcggaggaggaagacaacccctgggtgcttaccaacgcgccagtggcctcctcggcgccggagaaccgcggcggccggtccgtggagtcgtcactcggcgcctagatgtatctgctgctcatctactggtgcgtcctgcccgcatttccgccaccagcatgccatagcgtacgccgagggcgataaataatatggtgcaaaatccagcattaatgtttgggagcccaagattcagcaggctaacaaatttggcttgtcctagctctggatctttgggggttcatttaaggaggatgtcaacagtatagaggctggttgatagaaatagaataatgcgtaccaggccacagggtgctagatgttgtgctctggttttattcagataaacaccaagatggctatcgcgactagcattctcaacatctcaaactacgcaggctcccaatgtgatatcagcatcttgatctagaagggcagcggatttctcgagggactacgacgggatgcctctagatgtacaaccccgactcccacttcttcctcttcctcatgtactggaccgattgcagcctagctggcgcgcttgggctactcaagatcctaatctacaaggtttatgtagatgggagtaccaccgtgacttgggagctaacttggataatgatctcttagttctcaagactgtaaattaccttttcctgcaccaagttgtgaagttgtttcctctgagatgaagcaaaaccaataagtatcttttcaaatttcagaaatcgcactgaagccatgagtgcttcatggaattcagtcatctgttgggatcagttccaataacatgtggcactactccagtgatatgaccctccttattataactgccaacatataagttacctttcttacaatatattttagtccgctacagcgcccgatagggtgctattttttctagtttaattaaggctcccttggaacaatggatataaaagtactgtgtccatcctatgatataaggcactgtaaccaatttttagttttgttccatgatataagggcatgtacaagctagatgttataatggtgtttgggatagctccaggttctagctcca

SEQ ID NO: 42257 - DNA, 2036 bp, Zea Mays
cacgcgcggtgttctgcctccagtcggtcgcgatagcgctctccatcctgccgccgccgcctaccatttctgccattcctgtctattcccatcgttgaaaccgctcgccctctccacgtgacatccaaacgcgaccgccccctccccacccccaccagccgcccgcctcctctgcgtcgcatccgccgcgagctcggggcgggacagcctccacggcggcggggtcacgctgaacagggagccgctgcagggccggcgcctgcacgccatctccgtgtatgtgagcgggatgctgaccgtgcgcgagacgctgctgttcgccgctgagttctgcctgccctgcgcgctttcctcagagcggaagcgcgcgcgcgtcgaccagctcggcctcttctacgctgccgacaccatcaacggctggcggcagcggcgttcctatcgcagccatgcgccgtcgacgtcgtctacggggaggtgtgggcaggacggctggcactgccggtggtgaacggggaagagctgtttgcacgcgggctgttgggtgtcgagctcgccccgatgacgttccgtcgttcgcagcaaagccagactggtgccctgtgttccttcgggcatcactacggcaatttgaggggctagaggacgccgccgacgtgctcgtcaactcattccacgagatcgaacccaaggaggcagattatatggccctaacatggcatgcaaagacaataggcccaacattgccatcattttatcttgatgatgactgtttgccgttgaacaagacttacggtttcaacctcttcaacagcagtgagtcatgtctggcttggctcgacaaacagcttccgtgttctgttgttcttgtatcctatggtactgtctctgattatgatgaagcacagttagaggagcttggcaatggattgtacaattctggcaaaccattcatttgggttgtgaggtcaaacgaagaacataagttgtccaatgaactccgtgacaagtgcaaggaacgtggccttattgtttcttagtgcccccagctggaagttctagcacataaagctacaggttgtttcttcacacattgcggatggaactcaacattggaagcaattgttaatggtgtgccaatggtggcaataccacactgggcagactagccgaccatatcaaaatatatggagagcatgtggggcttgggtgtccgggtgcgcaaggatgagaaaggcttggtgacgagggacaaggtggaaaggtgcatcaaggatgtcatggatggtgatagtaaggataagtataggaagagtgccactatgtggatgcaaaaggccaaggcagctatgcagaatggagggagttcggacaagaatattacagaattcatcgctaagtattctttaagcgtccacacgccgcgagctcggggcgggacagcctccacggtggcggggtcacgctgaacagggagccgctgcagggccggcacctgcacgccatctccgtgtatgtgagcaggatactgaccgtgcgcgagacgttgctgttcgctgccgagttccgcctgccctgcgcgctttcctcagagcggaagcgcgtgggcgtcgaccagctcggcctcttctacaccgccgacaccatcatcggcaacaggggccaccacggcacgtcctcggcagcggcgacctgtacgcggtgtgtgctggtgatgcaagtggcggcgtgggcgtgggcgtgggcggcctatacgaggtcgtgtacaacaacgtcgttagtctatgtgtcaaggccattgggtggaggcccgagcggaggttcaagtggaagctcctcgacggctcgacggggagaagaggagcgcccacttccctatggtcctggtccagatgcccatgtataacgagctggaggtgagaacaggccaccacaaaaaagtcgctaaaatcgtataggaatatgttaactattcatccatggattgttattcctcttgttactttgtgagatcaaatattattttgatgaggtgcgct

SEQ ID NO: 42258 - DNA, 548 bp, Zea Mays
gcaaatggagtctatcatgatgtctgatttaaaaagattgaaaaaaattaaatttcgcacacacaaagttatctacaggagatatgctggactgtttttttcaatatgtgtggacataactgataatgaattggcatacttggaatgcattcacttgtttgtcgagatattggaccatttctttagcaatgtttgtgagctcgatttagtgtttaattttcacaaggtttacctgatactagatgaatttattcttgctggggagctgcaagaaacaagcaaaaaggcaataattgagcgaatgggtgaactggagaagctggaatgacgaagaccaggaagatgctgccgcgtgtgttgtattccaatttgtattattcgtttcaggtgttttacatttgctctcctggttcgttccggctgacagcgtgatgcccatgctgtcactcgaaagaatggtagtagtagctagcatgagtacattataaacgtaccttcgaaaacataataatttcccagcaattatttcgttcccctctgcagtgaaa

SEQ ID NO: 42259 - DNA, 3499 bp, Zea Mays
cggggtcggagcttttcaaacgcccctggctctgtggaccgctcgtccctgccgttgcgagcgcgagcgcccgagctagtgagctgcgtctgcgtgcgagatccgcgaggggcgggcgaggacggcggagtcgccggcgcgagcgaataaggcgaccggcttgcgcgcgacgagggcgatggcccgcccggctgccggagcgcacgacgtggggatggcgctgcgcaaggccgaggaagccgctgcgcggaggtgcgaggcggcgcgatggctgcggcagatggagcccgccgcagcagagtccctgccggagaggccttccgaggaggacttctgcgcggcactgcgcaacggcctcgtcctctgcaaggttctcaaccgcgtcaatcctggcgccgtccccaaggtcgtggagaatcctgtcatcacggtccagacgttcgatgggccggcacagtctgcgatacagtacttcgagaacatgaggaacttccttgtcgcagttagtgcgatgaacctgttgacgtttgaaacctctgatatagagaagggaggttcgtcaatgaaagttgtcgactgcatactctgcctcaagggataccacgagtggaagatctcaggtggcattggtatatggcggtatggtggcatcgtgaaaattgcatcctccagtaaaaggcctgcttcacatttaaacagaggtggaggctcagaccaacaaatgctggaatttgtgcatcttctctctgaggtctctcttgaggaatcaagagttgaagaagcccagcattctctttttcagcgctttgttcttcaagttgtacgagcattccttctggaatggggtgaagctgaagatttgcctcttgatgatatggtcatcgaaacagtactcgaacaagcttgtaaagaatttaccattttgcttgcttctcacagaaatcaggtgaggtcacttctaaggaagatgatgaaggatgacaatggaactctttctaaaatggatttgatcgaaactattacaaaatgtcttaaggagaatgaagttaaagatgtcattcaatgaaatgaagcttcaagttgaatcgactcgtgctgagtgggaggaagacttgaggaggctagaaagctactttgaggctcagaatcataatgcttaccaaaagttgctggaggaaaatcgtaagctctataatcaagtacaagatcttaaaggtagcattagagtttactgcagagtgaaacctttcccaaaggcacaatctgatcaaaggtctactgttgatcatattggggaaaacggagaaatcctgattgcgaatcctcaaaagcaagggaaggatggacggaaaatattcacattcaacaaaatatttggacctagtacttcacaatctgaagtttttgctgatacccaaccattaattagatctgtcatggatggatataatgtatgcatatttgcatatggtcaaacgggatctgggaaaacttacacaatgagtggtccagatgtaacagcagaggaaacctggggtgtaaactacaggtcgttgaatgatctgtttgaaatttctcaaacaagagcagattccattacatatgatgttaaagttcagatgattgaaatatacaatgagcaagtgagggatttattaatgactgatggtgcaaacaaaagattagagatacgcaataattctcatgtaaatggactcaacatcccagatgccaatattgtgccagtcaagtgcgcacaagatgttttggatctgatgaaagttggccagagaaaccgagcagttggatcaactgctcttaatgaacgaagtagccgctcacacagtgtgttgacagttcatgtacaaggaaaggaggtaatttcaggctcaactctaagagggtgtcttcatctagtggatctcgcgggaagtgagagggtagacaaatctgaagcgactggagaaagactaactgaagccaagcacataaacaaatctctgtcagcacttggtgatgttatatctgcacttgcccaaaagagttcccatgttccatatagaaatagcaagttaacacaagtgctgcaggatgccttaggtggtcaagcaaaaacattgatgtttgtgcatgtgaaccctgaaacagactcttttagtgaaacaatgagcactctcaaattcgctgagcgtgtagctacaatagaacttggtgccgcccgtgcaaacaaggaagcaggccaggtcaaagacctaaaggaagagatcgccaagcttaaattggcattagatgaaaaggaaaatgaagtggcacagtttaaagatcttgctaaccgtgtgacttctgagatgagaaatgcaagaacaagatcacctttaaccgccagcatgtccttgaaacctgaagtcagtcaagaatccagtgtagacacctgtacaagtgagataagaagttcatcatctggcaagcaaagaaggttccgttcaccgttgtcagtgagagagctagacgataagtcacctgtcatcagcagggaactgtacctgagtgcgcgaaagtacaagactccctctcctccggttagaagctcactctctgtcgagagaggcagctttgccaaaatcgtggagaacactggaagcatcgactgcacaccgatatccaaggtcgaagtgcctccaaaagtgtggtccagcaactcgaagaccacaccttcatctgtcctgacagctcagagcctacggaaattccgggactccgaggagaacagaaccaaaattccgcccgctgtccggcagagcatggcgaagaacaggtctgagagtacgccaaagactcacaatgaagagaaaccggcgaacaggcaccactcgggtaccaaagcgaggtcagaggccaggaacacgagggactcgtccgaaatcgagaacgagtttgcgggcgatgaacctactttccacttcaaccgaactgcgaagaagttaccgacaaaggtgatgtcaagacagtcccagaacatagatgtcagtgtcagggcctctgtccggggggagatggagcctctgaccgaaggaaggcaacgccggaactggagcaagccgccgcacgccgagaggaccaatatgccgttgccggacatccggcgcagtgtctccctgccgcgcgggaagaaccctcttgtgtgaatctagctcgtttcgccaaccaggcattctttcattggttgtttgtttctttatcctgcggttcgatccgaatgtaggctctacggctgtgtagaacacttcatccggatgcataacacaaagtctgtcgagttgcttccaccaggctcccatgaaaacgcaaagttcacgctcttatacgcgatgtaaaaatgtatgggttaatgttgcactgcaggctgcagcatctcgttccagtggtgattccgtaccaattttgttcttatattattatatagaccaacaaatatattattaatacatcacaaaatata

SEQ ID NO: 42260 - DNA, 952 bp, Zea Mays
caaacgcaggctaccgcgacgaagaagagcataagcaaacataaacgggcttgtgctttgtggaaaacatgccgccgccgccgccggtgaatccacagcggctttcgccggcagagtcccgagagcggacgctgtacttcttccatggtctgggcgtggacgtgcccctcccggtctcggccgagcggcccgacgcctacacctcgctcgtccgcgccatcgtctcctccgccgcagtcacctcctcgcgcgtctcctgcaccctcaccgtctctcccgccgtcgcgaaccagtacaacacgctccacggcggcgcggtggcggccgtggctgaggccgtcgggatggcgtgcgcgcgcgccgcggctggggacaaggagatgttcctcggcgagctcagcaccgcgtacctcgctgctgcgcgactcaacaacacgtacaacacgctccacggcggcgcggtggcggccgtagccgaggccgtcgggatggcgtgcgcgcgggcagccgccggggatcgagagatgttcctcggcgagcttagcatcgcgtacctcgctgcagcgcgatgcgatgtgatcttctaattaaattctctgcacctcgcttttccagcatccatttgttggtcgaatcccacattgctatgtactcttggggcaactttgtgcagcaattcaacacgtcaggataatttgggggattggggagtctagctactgcttttgaactggttattattattatgtagttacaccacagttctatgatgttttagaagtaaatagctgattgtaaataagagttgttgggcaagcattgcagctttgccagaaagggtgtgtatttgattgacatatagtagaacctctagcaatgttggaggtgaacattctagtagaatgataaatgtgaaatatatcaggcctgccaatatctggtttaccgggag

SEQ ID NO: 42261 - DNA, 3139 bp, Zea Mays
aaattggactgattgaccgcaccgattccgcgatacgttcccgaatccaacccatcttcgtccgctccggccactcgtttcgccgccgtcggtcgccacccgcaaggtttggaggataagattcgggagggatggcttccggtgggcagccgcagttccggtacacgcagccgccgtcgaaggtgctccacctgcggaatctgccgtgggactgcactccagaggagctggtcgagctggggacccccttcggcaaggtcgtcaacaccaagtgcggcgtcggcgccaaccgcaatcaggcattcatcgaattcggcgaccaaaatcaagctattgccatgatatcatattacgcatcgtcaacagagccagcacaggtaagagggaaaaatgtgtaccttcagtactcaaatagacaggagattgtcaacaacaaggcaactggggaaggttcaggcaacgttttgcttgtgggaatggagggtgttgcaccagattctgtcagcattgatgttctacacgtgcaagccgttgtcacggagtatcatggcaggaagcatctggaacacatgtctgtgtttgtttcctctcccttactcatcgctgccctactcctcccctaccctccctcccctgcacctcttctccctacctttcccctcccataccctttcatccaagtaccctcttagggttggtcacatctaccttcgtcgatgtccgttttagttgttattataagttgtatctagttagtgcctaaggttggtggatgcatttttctcaatggaggtcgtttctgattggttacattggtagctggcatatttgtatgattattatcaagtgctcttctctggatttagtaagggaaaagaaagagaaaaggaacataaaatgtaatgcatcaataatagtaaataaatattcttgttttcactaacgccccgtttggatcctcggaattgaattccattctaataatagtaatttaggcaaatatcaattaagctagtatagttttatgcaaaatatatttgtatactattattactttattagcaatatgtgggagatatttatgtgctgcatttttactacagaggagtgagtagaagagtgtcttataagttgcagagtagaaacatattccactgatacacaaaatcattttctatcctccacccccatgaatttgagatagtcttatatctgaactgtggaaagtggcggaatatcaaattccaagccaaatagactactctattaagtaaatttcaattccttcaaaatgaatagatccaaatggcccataaggtaaatataatgaacttgattggcacaaatttgtcatttggttgcactgatttgtgtaacggtttaataccatctttcaagcaggattttagctccttattacagatctgcaagctaccaactcgagttatttgcatctgtattttctgctttcggatttgttcataagatcgctacctttgagaaagcatctggttatcaggctttgattcagttttctgatgctgaaactgcaacatctgcaaaagctgcactggatggtagatgcattcctagctatttgctaccagaactggatgtggcctgcactttgagaataacctattcagcacacagtgttctcaacgtcaagtatcagagccacaggagtagggacttcactaatccttaccttccttttctggactctgctaaagatggctctggaccggatggaaaaaaacaggaagcagagagcaatatactgcttgcttctattgagaacatgcaatatgttgttacaatagatgtgcttcatgaggtcttttcagcttttggatttgtacagaagattgctatttttgagaagaatggctttcaagcattgatccagtatccagacattcaaactgcgtatgcagcaaaagaagcactagaagggcacagcatctatgaaggtggctactgcaaactgcacctcacattttcacgccatactgagcttaatgttaaggttaacaatgagcgaggtagagattataccaaggggaatgccactccaagcagtgatcaaccttccattcttggtcctcagccaataccaagcgttggtgctgctattccaccagcacagggtagtgttccttctgcagccaccaattcagtaatgccaccaggggatccatcagttgctctaccttctaatccttccagtgagccactcctgcaagcacctgttgtttcctctggagggcctccgcattaccctaatcaggccatcctacaaggcccacttggtgttgttgcacggttcccaggctatggtgccctgcagtttgctcagggctcagctcaagctcaaatggtgcagccttcaggccaaggaagtcaacatatgtcaggtcatgtaaattatcagctacctccaggttcagcccaattcatgcagtatctcagcaacggaagccatccacttccaaacgcacctgggccacagacaatgccttaccctgccctcagtgggcagcagctacctccgggtcttcagatgatgcaagctcaaggttttggaggcctgccgttttcacagggtcctggacaaccaatgccacagttcccaatgtatggcacccagcagtttcctccgggtatggagcccaagatgatgcgcttctctgagcagggaggccagcagtttacatttgcgccgcggggtccaaatagtcgttagcaaatttgaacttagcaacgttagatcgttgatggtgatgaatggatgtcaagccttctatgttgctgttttctaaggtgaataccgatgctgttccattactaggatctatacttggtttatctctcgtactgtggccaaaacaaatgtctaatctgaggtttcgtagccttgtatttgtatcgatttcctcacgcccgcagcttctgcctgcactgtgttacattacggttatactgcagtagtggaagcaaatgtaaaagaaacctagagacctgatgtgccaggttgaaagcccgtagctgcaaactgtaggctcacatcgcgtccagttataaatttgtttgtgctatgttaagagtacaattgtacaaaccaaggtttaggagaacc

SEQ ID NO: 42262 - DNA, 1498 bp, Zea Mays
caaaaaaaacatgtgtggcgcgcaaattagtggctgccccaaataccagccgcgccgccgcagcccaaaaccctatctcccttcccgtaattccagtcgtcgcgctccacccaaaaattgatgccgccgccgccaatcgccgtccacagccgcgcgccctagccggccggttgcaaccgccgtcccagccgcgcgcccaagcaggccggcccccaacgccgtcgccgtgatcctattacctgatgcggcggcaccaaacctcgcaaggtcgaagcccgtacgccgccctttgtcgcccaccgtgagtcacccctccggtcctccctccttaccccctcgccaagtccctagaggtcgctcaacgctggatctgccacgaccctaggctcccagctatctacgtcctactcctgcccctggctatacctatgactgcgtctcggcagccggcgccctgtggaagccctccgcttcatatccccgtgctgtcgtgcagccagctgccaggagggcaatattcagaggtgcgatgaaaggcaaactgatagtgtcttgcccccttcctcctgagaggataccaagattctaacttcttttcaaggatgtctgagaaaactgcagctcatcacgtgcacacaatcagctacctagcccaaggtttgtatttaatcacgttcatcaaatatgatgggtatagatttcttgtttggtctactagtcaagcaagagaatgcccttcgttttgctgaggatgcaagtatgttctactcaaataaattactcatccaacatcctgtgtttttcgctattggtgtcatagtatgttctccctacaacattttattattgcagaccagttgtgctatggcacctgcctttagtgtcttccttacttcctattcatatggcgattctatgagtatggcacgagcagtagaagctataaaggtaaaattggccagctatgcataactatgaattcccaaacacttgttttgaccctttttgtttgaccatcattttttatttgcacgtgaactgctcaaattatatggtacaaatgtcttgggttagagatgagggaggtcctagaggtagtaagtcacttgtttactccatgatgacaatagcaagcagatcgcggtggtgcctatggatgctacaacaagaaagatcaaaagttcttttggatggatgcagctagatattttgttttgtattttctccaaaagagaaatttgcaagtgaacttaaaattgtgaaaccaacatgtggttgtactagctagtatctctaagctttcacaagccaaacttagtgttgttgctgcttattttaatctttattacaacaaaagcaaacttgtgaactttatgtgaatgcagtacaattgttattgtcatgaatgaaaacatgagctatgtatgaatgcagtacaattgctatgtatgaatgtagtataattgttatctgatgttgatgataattggaaactgct

SEQ ID NO: 42263 - DNA, 2297 bp, Zea Mays
cgccgaggggcaaatccgtcagcgcgggcacatcgcgtcgcctttccggcccccacacctctctctctctctctctctcttcccggtcgacgagcggagagctagcggcggggcgcgcgctgctatttatcgagcacacgggagccacgccgcccgtccctgtctccatcttgccgtcgctcccacgccgccgttccctccgcctgcctcgaccgcctcgtgccgtgcgcgctaaggagggagggagggagggaaagtgaagcaggagggtggaccactgcgcgcgtgcggcgccttcctcctcgaatcaccgccgacagcttctgcagctagcgttatcacccccaccaccccggggctcggattaggtacgctgttcatgccgtctccacggccaaggaccggggaggagcttctttctctagctgggggatgagcaacaccaagtgatgttccatcatgtttgcttaaaaagacacgcactgcctctgcctgtgcctgcctgttcatggtcctcatcctcacagagctggttaccgaaaaattggtatactttttcttggcgcaggatctgagctgaagctgccaggccaggcgatcgagccgatgtacggctcgccggtgtccaaggacctcaacctcccggcgcagccgccgccgatggcctcgtccgggctgctacgctacagatcggcgcccagcgcggtgctcggcggcctctgcgaggaccagctccagctccctgccgccgctccgagcgccgccgacaacgtcttctcaaggttcctgcccgaccaccacatccgggacgacaagccgtcgcctgcccacttcccgagtgcggccgacatggcctcccaccaccagcaggagcaaatgatgttccactcccagtcccagtcccagcaccagcaggagacgggtaggtccgggggcggcctctaccgcaccgtcagctctggcatggaagcgggcggcactggcgtcggcgccgccagcagcctgattcggcagagcagctcccccgccgggttcctggaccatttcggcatggacaacggtgaggaggacgaagatcagcgagcggatcaggaagctgcaggagctcgtgcccgacatggacaaggtgactgcacctgcacccaccggtttcagtgcgcgttgagttgctgccatatgctatgccaggaccactccggccggccagccagagctgatgacctacttgcgttcccgttgccttgcagcaaaccaacacctccgacatgctggacttggccgtcgactacatcaaggatctccagaagcaggtcaaggtaacgagctccggcggccgccggtctgctttcctcctccagaacccaaattgcaaggtcagagagccagtgacgtccaaatcacggaggctggcctcatcttgccccgccggctgatcgacggcgagcgagggttacctacagttacaaacaacgatatgtcgttgactcttcctcacctagtactagtagtaggaggaggaggagtatctttatcgtcgtttatcatcccttgtgttcacgcgttgcaggcgttgaacgagagccgcgccagctgcacctgcccggcgagcaagcaccagcagcggttctccggctgaagcaccggccgggccggcagtccccatcggtccccggcggctgcgtagcacgctccagtacacagctagtgcagcaaagatggacccaccacaaggcctggagacagacctgactgagaccgagatagagaggaacaccgccatcgtctgcagtgcatgcgcgcgagcagcatgtacagcgccggagcgatcgaggctcgctggactgctggatcgagcagtgtggcatcatcaagtattcaagcgactgggaggaaggaagaaagaatcgagtcatgggaccgaggaggaagaacgaatgaattgtacagtgctgtttctttttttttttttgctgtaaacacttttgctacatctgtgctgctgctgctctccatatgccgttgcccattgttactacgttaagaatcacagtgagatatagatcgaggaaaacttcactactgttaccaccaccatcaccatgcaagctggcggcacagtgccatgcaaaattcactcgtgtgcactgcagaaacatgcataggaacgcctcgcatgtttacatttccaaacaaatgctacaaagatgctcaaagatcgatatgtattggttaaagaaattgcttttaggaatttgtaacagctacttttccaacagctataaattagaagttgatcc

SEQ ID NO: 42264 - DNA, 466 bp, Zea Mays
atactttttggtccatttggaagacaaacaccccggtccagtcctcccccgatgctgagggatacccgtggaagccctcatggccacctgaggccgggcaaccttccccagtttggaagggacacaagcggatccgagcaaccacgccctccgccgccactatcgtccacaccgctgccatccgctctgctgccgctccatcgtcgtccttccccgacgcagtcgcgagcgggacgtgaggcgacagtgccctccaccaccgccaccgtctcggatttgtcgccctccgccgccatctctgccctcggttcactgtcctccaccgtcgtcttccgcgacacgatgtacaatacaatgttgtctccaagacacagtacatggtcttctccaagatccagtacaaggtcgtctcctccaagatccaaaccccaacgctagtgagagtcctagtgaactctgatgaatt

SEQ ID NO: 42265 - DNA, 1788 bp, Zea Mays
ctgggctctaagactatcttcagttgccgacgtgaaaaaggttatagagagtatacaagagcaggcttcctatcctgctgaccaacaagtgcttatacaccaggggaaggtgctcaaggacgacacaacattggaggaaaaccaagtagttgaaaataattttcttgttataatgctcagacagaacaagggatcatcaagtgcagcaccagctaaggtaaccgcgaatcaggcaccctctactcagacagtgcctgctactccacctcaaacgtcagcagccccagatgcaccggcacctattgtacctgtcagtgcaccggctgcaactgctacagcctcagcagctcctgctgttgctgtctccactgaggcggatagttatggtcaggctacctcaaacctagttgctggcagcaacttggaaggaacaattaaatccattcttgaaatgggtggcgggacatgggatagagacactgtactacgtgctctgcgggctgcgtacaacaatccagagcgtgctgttgagtacttatattctgggattcctgaacaaatggaggttcctgcaccgcctccgagttcccaaccagtcgaccctgttcaggcggtacaaccagctcaagctggaccaaatgctaaccctctcgacctctttccccaatctcttccgaatgattccgctaatgccaacacaggaaatcttgatgttttgcgtaataactcacagttccaaaacctacttggtttggttcaggctaaccctcaaattttgcagccattgcttcaagaattgaggaaacaaaatccccgggttatgcagctaatccaggaaaaccaagcagagtttatgcggttgattagtgagccactagagggagacgaagagaatgaaatgatgctggatcagatggcagatgcaactgagaccattgcagtcactccagaggagaatgaagctatacttcgtcttgaagggatgggctttgaccgggcactcgtcctggaagtgttcttcgcctgcaacaagaacgagcagctggccgccaactacctcttggatcacatgcacgagttcgacaacgatgacgggctcggagggcctccattgtgatgcgatgcgaaggctgtggacagaaaataggaaaacgttttgggatttgtctcgtctgtccgctccgctccccctacatttctttgctgtttagtacataattctagatttacagaaaagacaaagtttactcttttctggatcatatgttttgtgctacttattgctgttctggccgcattgggccagcatgcagttattcacgggttcaacctgacaagcgctggctgcagcagcgaggtgtttgtaggtttcgcggtgattcgtctacccaaatctggaaccgtactgatactgaagaccgtactgatactgaaggcattatccggcgtaaactgttaattcaaacattattacacgaatgcataaggctgagcacggcttttgggcttgaactcgttagactgccaccaaatagcaaatcatgcatatggtcgcatgaatcaacggtttgtactgtatactttttacacagtggacttttggactattcgtacagtaaagtttaaaattcgcactatagattgtacttttcatgtagtggaaattttggactatttatacagtacattttgaaatgggaatgagtaagctggagtatagccttatacggcctgtttggtttgtgacattaaagcgatctacgactaatgctgtttggttaatgtcgg

SEQ ID NO: 42266 - DNA, 1405 bp, Zea Mays
ccccgaattcctttcgttctcaggtctgtctccgctgccgtcgtgcagcgcggctccgttgtactgccgcaggagtccgccacttctcaaggtcgccatcgctaagacgcggccagctgttcaccaatctgctcctgcaagcttccgaaaatgtgcagctatgtcagaacatggacgtcaggaactccggaccaatgagtaccagctggatgatgatgatgagccgttttggctggcagtggtcagagaccttgctgtgggtttcaagggattggtagctttcttagctgagcagccgaggcaactgaagcacctggagtggccgggctttctacacacgctatgtttattgttgcattatcaactattgatgctgccctctgctacatgctggcctggctacttcgaaaatctgcctagaataatgctggaatatccatgtattgcttgaatatgatttagccagacaggatagtagcaggcactgcagctggaactcaagctcttgttgtcgtcgaggtcagcaatgttaatcagactggaggtagcaggaaggtggatcttgcacggtgtgccattttatttttgggaggattgagaaaatcaaaacagctgccctacaaatagtgctgatgtcatgtgatgcagatgctcatagtggcatttcaaagggttaattagatctgtgccattataactttgctgttttggaggcacaccgttacatgttgaggtccaatttaacagagaaagagcacatcatggataggatccgagaactgtgtgtagtgatttgtaacttctcttttatgttaagcagacttgcttgtaacttgttggtccgtcagctaggatatggagtatttttaagacatctggtctactttgtaggcttaacaagtcttccactctgatttctcattagtattggattggtgaattcttatctagattgtctgctgttgagctacaaaatgcaacttacatggtttggtagttatgggaggctgcaaaattggattttatacatcagaggaaggatgcaaattttgcaaacatggttaacttctgtatgaattagcaacattgcatgcctgtactactactgtaccgatgtgaaaatactactgaagggaagtttgcaggctattatttgaaatctggagtttacagatcctggtatgatacagaagtcatacaaaaaaaagtggtagatgcaagagttttggaaggaatatatgtatcaatatttcatgcaataacattactggcttcttcagataatgtgcacatttataattgatcccagttgtgattcgaggacatggacaccacaactatctgatgctttcctgtgactgtcttggcgtttgttgaactagaagtcagagacatgacagataaa

SEQ ID NO: 42267 - DNA, 305 bp, Zea Mays
atatatttcaaacttataaataatttataacagtttaaagttatttctttgtaatcactctgatcatgtacaaagtaaaatttttgtaacttgtaaaatttggtaataagatttctgctgcaaaaatgttgatgtgtgtgatttgtgttacttaaccctgcggtcctggttgtaagtggtttatccgatgtccctggggcaatcggacagatcctgttaagttatctggtgcacatgcatagccgtctgaggtctttgagacaaggacaggtgcatgtgggcccaataacttgggaggttctgcc

SEQ ID NO: 42268 - DNA, 1193 bp, Zea Mays
tggtacgggtgacaggagatgatacaggcgaatcgttgcagagagatgtgatataggggagagattgctgacgtagtgggtgaaattccgttcaagacagtctcagtcatccacttcccctctgcaccttgaacgtcctccgcagaggcagctccccaactgttagaatggacgacacggaagccgccaagaacacggccaccaccggccccactttcgcctcccctctcttctctttctccaacctcggcggtgcttccttcggctctggctttggcttcaaatccagcgctcctctgccgcctgccatcgaggtccagctctgcgaggaatcacccgttccggcagctaggttggagccagtcgtggtcgatgactccttgacgatctacaagggcagagtgagtacatctgacgtgtttggtgtcaaagactctgatttggtccctggaaaatatgaaggtgggttgaagctgtgggaaggttcattagacttggtgaaagccctgaattctgatatcaaagaagataaatttcatctggaaggcaaacgcgtattggagcttggatgtggacatggcctccctggcatttttgcgggtctcaagggtgctgacctgattcatttccaagatttcaatgccgaggtgcttaggtgcttgactataccaaatgtaaaagtcaatcttttcaaggattcaccagaaggaacatgtacatgtccgattgttggtttctttgctggtgattggagtgaaatggataagctactactttgcggggatgctgagcaagacaaaacagccagtggtgatacagaagtgcttgcgctaccctgggggtgtggtttacatggcagggaagaagcattactttggagtaggtggtggcacaaggcagtttctgcgcttggttgaaaaagacggtgccatgcatcctgagcggctcaatgatgttgctgatggatcatccaatgttagggaggtttggaaattctcattcaaatagattagcactgcccctgcgattgtcgggagaactggaaacatgtactggactccatattggattaaaagcgtcactttccaccgagcatcatgacgaagattcctgatagttccaatggcagacacatctgattgagtcacacctgacaagtcaaaaaaaggcgcaaggacaaaattctatcccag

SEQ ID NO: 42269 - DNA, 785 bp, Zea Mays
aatcactccacgcaaaaaaagaaacagcaacggcgtggcctccccgcaattgacgcccacctccttctatatccttcctcccatagaaactgcacgtcattctcatcctctgcgtaacctgctcctgctgccggtggtgtgacaagatagatcgcctgtgcaccctaagtctatccgtcagaacctcaagatgcccccggggaagaaggggccgcgagtcccacggtgtcacgcggaacctactcctacagactatgagaaacagagggcaattacaatcatgaagaataatcaaatgatgcaacggttagggattcgtcaattacaatcaatgatggctagtattccaagtggaaggatgaacgataatgctcctcacgaatctggatcgttgtatgatggtgatgatattgaggactctgaggatgagatggtcagtaaggaatccctagttgataagtctgtagccagccacatccccaacaatggtgctgaaatctcttcgaaaaatacaagagcctctaaaagggttgttgcacctggagtgcaagaacaaccaattagagtcactaggcgaaggagtgctaccataaaccaagagtccaaccaaaatataatggctggtatactgtctgattcttgtgatgccacaaaccaagattgcacccaacgcatatctactgttgtacaacctagttcaccaatagagaccgagagcgaagatcccactggagaccaagaactagtaccaaggcaaagaagtatgggcaggcaacttgagtcat

SEQ ID NO: 42270 - DNA, 3186 bp, Zea Mays
ctgcttggtcggcctactcaccacgctagccgttcgatcccctcccctcgccgcctgccctcgttgtcggccgcctgccgccgccatctcacggcctcctaccttccctcgtggtgggctccaccgcggtctggttcgtcttcgatcgtgtgggatacagcttcctctccgtcctcttgaaagctatcagagcaagcaagccagccactttacctagctagtgttccggctgattccactggcgacgattcgagattggatttttattggtgattcggtacaaccaaaaaggatttccgaaccttgtcctgtgtccgccattggtcggcgctgcagtttgagaagcacgtgggggcggagtcgaagaaccagaacggtaacatcctcctcatcaacgacaagttgctctacgacctgttccacgagctcagaaattggcccccttgtgcggaggagttttgggcgaccgccggggtactcatgactgtgcctgccaccgaagcctcatctgcgccgcaggggcagcaagcaggcgcgcccgctagctgggaacccaacggggttcaggttgacggcgtgacggtggatccccctttgcctggacggggagccatggtgatgctgaccgaggaggagaaagccagcttgtgtctgcttggtttgaagcaaagcagttccacggctgagttggacactatatgcggcattgaagggcctgctgcggaacagatcaaagatgaagcaggtggtgaccatgtgatgcacgatgctctagtgggagtgacagaaacagagtatcagctagacagtgaccttagagatgttagaggactgctgtccactggacttcttgaaggtttcagggtgacctacatgaaggatgaggtggaggaggttggacggataaatggacagggttattcttgtggctgctcaaagtgtaattacaatagtaatattatgaatgcgtgcgagtttgaggagcattatggtcagtcatttgacaaccagattgatcacatcttcttggataccgggatttctctattcagggtggtggaagcactgaaaccttgtaagcttaacatgcttggggatttcattgaagagaagattggtttccctcctaatttggatgagtataacaagtggaaagcttcatttcagaagagaaaagattatttagatgctgtggcttcagatggttgtttgactcagagttcacaggggttggctgcaggggagatgatttacagtttgagagattacttgaaagattctgtcagcaatagcatctcaaaccttaactggagtgcatctaaaaggcggtctgggagacggtttagacaaggagacactgggacttcaactccaacctttagcggaagcccaggcaaagggggttttggccactctactgacacctcagagaagaaaggcactgaagaaactcacagtgagaacacaggagaccctctcagcatcgatggtgttaagtctgattctccattacctactgcagtaaccactaaccactctaaacacgattcaacaaatttagggctttctttatcaagtccagtaaaaatcacgcaaaggccactccgaaactgcagcatagactcaaagtcaaaagaatcaaaaacaagggataccactttgcatccactgattttcaaggaggatggccttgcagataatactttgttgacttacaagttaaagaatggagaggctctaaagcaagggtataaacggggaacatgcatcatctgtaactgttgcaatcaagagttttctccttcccactttgaagaacatgctggcatggggagaagacggcaaccgtatcacaacatttatacattagaaggattatcacttcataagctagctctgcaactgcaagatcatttgaatccaaatggattcgacaatgctagtgtttccagcgtcagtgactaccataaccttacttcttcaggttgtggcagagaaccttctactaccagtggacctattgttcctctgaaacggactttacaagaaagagtggtagaaacagagagttgctatttctgtgggtatggccacacaacgattggaaatatcaatccagacacgattattttctgtaaccagtgcgagagaccatgccacatcaaatgttacaacaatagagttgtaaaaaagaaggtgcctctggaaattttgaaagaatacatgtgttttcacttcttgtgctgccaagaatgtcaatcactccgtgcccgtctagaagaaggactggaaaagtgtgtagggattaccttccttagacggataagatctaatatttgttggcgacttttaagtggaatggatgcaagtagggatgtcaaactctacatgcctcaggtcattgatatcttcaaagatgcatttatggattctactgatgagcacagtgacatcatctcagacatggttaatggcaaaaatggagaccaagagaaggattttcgaggaatgtattgtgcactgttaactgcaagcacacatgttgtctctgctgcgattctgaaagtgcgcatcgaacaaatcgcagaacttgtcctcattgctactcgtagcgagtgcagaaaaaagggttacttcatacttctcctaaagtcgatcgaggcaaatttgagagcctggaatgtaagccttcttactgcgcctgttgaccctgaaatggcacaaatctggtcagagaagctcgggttcaccattttatcagctgaagagaaggagtcaatgctggagtcgcaccccttggtgatgttcaagaacctagtcttggtgcagaaatcacttgcttgagcaaatctgatctatgtttgtttgtactactttagaaatgaaaacccggtttcgagagcttagacagtacggggttaggccgtgttaagtcattttgtttattatttagatttaaaatatttttaaactatttaaatatatattataaattatatctctacgcttgagcgggaaactggaacagtcccaaacactcccatagagtttagacggactagatgttcgtgtattgttacggttttatgtcacatggacacagatagattttgttttaataaataaaatatatgtgctctaatggttaggtggatgtagatgtgaaatcaataactaaggtgtgga

SEQ ID NO: 42271 - DNA, 6388 bp, Zea Mays
ccggccgccgccgccgccgccgcgtgttctctctcatctagggtttcatctccatctagtcgagcattcccgtgctggggtggggagtgggagactcgactcgatttgattcgactccatttcgtgctagcgcctagcgctgcagagcgagtgaggtgacgggaatggcggctccggggcggaggacggcggacgtgtcctcgtcctcgccctctccgtcccctgccgccccctccaccggcaggcgcctcctgcgcacgcagaccgtcgccaacctcggcgagtccatcttcgacagcgaggtcgtgccgtcctcgctcgtcgagatcgcgcccatcctccgcgtcgccaacgaggtcgaggttgaaaacccgcgcgtcgcctacctctgtcgcttctacgctttcgagaaggctcaccgcctcgacccgacttccagtggccgtggtgttcgtcagtttaagaccgcacttctgcagaggcttgagagggaaaatgaccccacactgaagggaagggtccacaagagcgatgctagtgagatgcaacgcttctaccgcgaatactacaggaagtacatccaggcactgcaaactgtcgttaataaggatgaccgtgcgcgcctcactaaggcataccaaacggctgctatcttgtttgaggttttgagggctgttaatgattcccagtccgttgaagtcgatcaagcgattttggatacacacatcaaggtcgaagaaaagaaaaagctgtttctaccttataacattctcccgctcgatcctgaaagtactggcgaagccattatgcgatatccagagattcaagctgctgtttatgctcttcgcaatactagaggtctgccatggccaaaggaccaagacaagaagcctgaagagaagaatactggcaaagaccttcttgattggcttcaggctatgtttgggtttcagaaagacaatgtgtccaaccaaagggaacatttgatactgttgcttgcaaatgttcatataaggaaaatacccaaggctgaccaacaaccgaagttggatgacaaagctctggatgatgtaatgaagaagctatttaagaattataagaagtggtgcaagtacctcggccgcaaaagcagtttatggttgccaaccatccagcaggaagtgcagcagcgtaagcttctttatatgggtctctacctgctgatttggggtgaggcggccaacttgagattcatgccagagtgtatttgttacatctaccatcatatggcttttgaactctatggcatgctggctggaaatgtgagcccaatgactggtgaaaatgttagaccagcatatggtggtgacgaagaagcctttttgacgaaagtcgtgactccaatatacaaagttatagagaaggaagctgaaaggagcaagaccatgaaatcaaagcattcacattggagaaactatgatgatctgaatgagtacttttggagaacagatctgcaggcaatgtccattggatgggaaaagttaattttgtggagatacgttcattttggcacatattccgtagttttgacagaatgtggatcttcttaatattgtccttacaggccatgataattattgcttggaatggtggaacaccaagtgatatctttgatgctggcgtatttaagaaggttttgagcatatttatttctgcagcaattttgaagttgggtcaagcaatcctagatctcgtatttggctggaaagcaaaaagaagcatgtcatttgcagtcaagctacgatatgtcttgaaattaatatctgctgctgcatgggttgtgattttaccagtgacttacgcgtacacttgggagaatcctactggtcttgcaagaacaataaaaagctggcttggggatggtcagaatcagccatctttgtatatactggcagtagtgatatatatggcaccaaacatacttgcttctatgctatttcttttcccatttatgagaagaatcctagagagttcaaatgttaaggtcataacgatcatgatgtggtggtctcagcctcggttatttgttggtagagggatgcacgaaggtgcattctccctcttcaagtatgttaaaatgttaacccatcttcacattgtcttgtcttgtattgcatccttctcaattactgaacattgttgtcctgacagatcaaacctctggtacagccaaccaaagatataatgagagaacctatcaggacattccagtggcacgagtttttccctcatggaactaacaatattggtgttgttatatcactctgggctccaataatcctggtatatttcatggacacccaaatttggtatgcactgttctctactctgattggtggcatctacggggcttatcgtcgtcttggtgagatacgtacattaggaatgttgagatctcgctttgaatctttgcctgaggccttcaatgaacgcttgattccttctgatgcaaataagagtaaaggtcttcgtgctgctttttcgagtagacccaaggcttctggtgacgaaagtgagagagagaaaagagctgcaaggtttgctcaaatgtggaacgccattattacaagtttccgcgaagaggatctcatagacaatagggagaaggatctgctactggttccagactgtaaagaccgtgaacttgatatattccaatggccgcctttcctacttgctagcaagatcccaatagcactggatatggcagcagacagtggtggaaaagaccgtgatctgacgaagaggataaagtcagatccatacttttcctttgctatcagagaatgctatgcttcattcaagaacatcatcaataccttagtatttggtcagcgggagaaagatgtcctagtacagattttcacagttgttgataagcatatagaagaggaaactctgataacgggtctcaatatgaagaaccttcctgcactgagcaagaagtttgttgaattacttgagttactgcaaaaaaacaaggaggaagacttgggtcaggtagttattttgttccaagatatgctcgaggtggtcacgagggatataatggaggaacaggacctgctcgagacgttggattctttacatggtgccaatagtagaaaacatgaaggaattacaccgctagatcagcaagaccagttgtttgctaaagctattaagtttcctgtggtggaatcaaatgcatggactgaaaagataaagaggcttcatcttctgttaactgtgaaagagtctgctatggatgttcctattaatcttgatgctaggcggcggatatcgttcttcgcaaattctctatttatggatatgcccaatgctccaaaagttcggaacatgttgcccttctctatcttgactccttattacaaggaagatgttctgttttcattacaaaatctggaagagcgaaatgaggatggagtttccattcttttctacttgcaaaaaatttacccagatgaatggaaaaatttcctcgaaagggtgggctgcaagaatgaagaggtactccgtgaagatgaacagctggaagagaagctttgtctttgggtgtcatatagggggcagacattaacaagaactgtaagagggatgatgtactatcgaaaagctttggagcttcaggcttttcttgatatggccaacaatgatgatcttatgaaaggctacagagcaatggaagtaatgtctgaggactcaccattaaagactcaatgcaaggctatagccgacatgaagtttacatatgttgtctcatgccaactatatggaattcagaagcgttctaatgagccttgcgcacatgatattttgagactaatgacagagtatccatcacttagggtcgcctatattgatgaagttgaagcacccagcaaagatagaatcaagaagattgaaaaggtttactactcagtgttagtgaaggcttctgttacaaaacctaatgagcctggtcagagccttgatcaggtcatctacaagataaaactaccaggtaatgccattttaggtgaaggaaagccagaaaaccagaaccatgcaataatattcacccgaggcgaatgtctccaaactatagatatgaatcaggagcactatatggaggaggctttgaaaatgagaaatctgctgcaagagtttgagaagaaacatggagtgagacatccatcaatacttggagtcagagaacacatatttacgggcagtgtgtcatcccttgcttggttcatgtcaaatcaggaaactagttttgtgacaattggacaacgagtgcttgccaatccactgagggttcggtttcattatggccatcctgatgtcttcgatcgtcttttccacgttacgaggggcggtgtcagtaaagcatccaaaattatcaatcttagtgaggacatctttgcaggattcaattccacattgcgcgaaggcaatgttactcaccatgaatacatgcaagttggcaaaggaagggatgtaggtctcaatcaaatatctctgtttgaggcaaagatagcaaatggcaatggcgaacaaacgctgagccgtgacatctaccggctaggtcatcgctttgatttcttcaggatgctgtcttgttactacacaacaattggtttctacttcagtacaatgattacagtatggactgtatatgttttcctctacggccggctatatcttgtacttagtggactcgatgaagcactggctactggaaagaggtttgtgcacaatacacctctccaggttgctcttgcgtcagagtcttttgtgcaacttggatttttgatggcgctgcccatgatgatggaaatcggtttggagagaggattcagaactgcattgagtgattttatactgatgcagcttcagttggcctctgttttcttcacattctcgttgggaacaaaaactcactactacggaaggacgttactccatggaggagcggaatacagagccactggacgtgggtttgtggtgttccatgccaaatttgctgagaactatcgactttattcccgtagccattttgtcaagggccttgagctgatgattctactagttgtgtatgaaatatttggtcagtcatatagaggggctataacttacatcttcatcaccgtatccatgtggttcatggtgggcacttggctctttgcaccattcctgttcaatccttctggatttgagtggcagaagattgtggatgactggactgattggcacaagtggatcagcaatcgtggaggtattggtgtggcaccagagaaaagctgggagtcatggtgggaaaaagagcaggagccccttcgttactctgggaagcgtggtactattgttgaaatactgcttgcattgcgtttctttatctatcaatatggactcgtgtatcatctgaatataacgaagaagataaccaaggataaccagagtgtgctggtttattgcttctcatgggttgtaattttcgttgttttactcgttatgaagaccgtatcagtggggaggaggaggttcagtgcagagttccagctagtgttccggctgatcaagggtctcatatttataacttttacagccatcgtggtaatcctaatagcaatccctggcatgacggttctggacatctttgtttgcatccttgccttcatgcccactggatggggtttgctcctgattgcccaagctatcaggcctgtgattcaaaagatcgggctgtgggggtcgatcaaggctcttgcccggggctacgagatcctaatggggcttctcctgttcacgcccattgctttccttgcctggttcccgttcgtgtccgagttccagaccaggatgctgttcaaccaggccttcagcagaggtctgcagatctcccgtatcctgggaggacacaagaaagaccgagggacgcggagcaaggagtagtagggctgctgattgaaggtccgtctatcgggagttatgtcgtcctggagcggtctatcaggttcagagaatattagggtccgtatgtatgtatgtgtgtgtcgcacctagcaccagtagtatgtatgtatgtatgcgtatgtaggttcagagaatattagggtccctatgtatatgtatgtatcaggattgctatggtcttttggattggaagatctgagatttgctggtgcaatggccagtatctgacatccaaatgttgaaactataattaggctctgctaatagttagctaacttacagctaacaattagtttattagctggcttacgactaagtagtcagattaaagttgggatgtcggtcgccccctttaggtttagttaggctcgttccaatgggtggcgagagc

SEQ ID NO: 42272 - DNA, 1731 bp, Zea Mays
aagtctcaagcacgagacggccagagaaccagattccgttcccctgaacccgatcgagatggagtcggaagctgacagagccgcggcaccggcgccggcgccggcagttgccgcggagaccagcgacgacgccatccaggaggagtctccagccacggccccttcctcagacggaaagcccggatcaggggcggcggcggccccggcgccggaggtggaggtgcagctgttccggcgcgggcgtccggtggcagtgttccggtcgcagctgggcgggtatacgcaggaccagctggaggtgggcgacgtcctggagcagcacggcctcaagtccgtcttcgccttcgaccctgccgcccgcaaacgcggcgtcgccatccgcttcaaccctcgcaacggccgctccctcctcccctacgcccctggttccacgatcttcctagacggcgagcccaaggattctttgctgaagcccatcacgaagatggtgattggggtcgccgctatgactgtggtagctgcagtcctattgaaggaggccaagatgcccgagtggcttcagtcatccaagctgggcgccgtgagcttcccaccatgggtgctggcttgcatggtcatcgtgttcatgaggctccggaagagaaccatggatgcaatgaagaagtttggctgggtctcatgaggagtacatatccaattacagagaagggaaagcagaggtcttgggtcggtccaagtgggcagtactaccgtgagctgccttgccccagctgtaggggtagaggttacactccatgcaaggagtgtggaatagatagatcaagtttggactgccctatgtgcaatggcaaggggattcaaacttgtctacaatgtagtggagagtgtgtgatatggcaagaatctgttgatgaacagccatgggagaaagttcggtcaagttctcccttgaaagtaaaagaagatgacgaagttgacaagttagagataaatatcaacaaccccaaaagatcaaagcgtacttatgcatctacttcaccggaagttgccaagaagattagccggtctttaagaagtctaaatgctcaaacaggattgtttactaagcacatgaagattatacaccaagacccagaattgcgtgctcaaagagttgctgcaatcaagagaacaaaaggaactgatgttgcaagaaagcgtgcttctgaaattcagaaggcattcttcagtgatcctgagaaccggctcaagagaagcattgccatgaaaggggtgaaattttactgcagcaaatgtgggcaagaaggacatagaagcttttattgccctactttgagggaaggttcaaccagggtgcggttcaggtgccggttgtgtggcagagaagggcataatagtcgaacatgtggaaaaccaaagtccgagaaggagcacaaacaacgacctcaccactgcagccgatgtggtgaaaagggacataaccggcgcaactgccccacatccactgatttgggtagtgatgcttcaggctatgtggttaacaaagttaatggctctaattcagctgtttatcaatgtagtatatgcttagaaaaggggcataacagacgaacatgcccgaaaagaaaggctaccttactaaaatgaaaagtgtgagtaaaattaaaagaaaggctatcttttatgcctgtgttttttctatttctctattttgtattaattcgttcaaac

SEQ ID NO: 42273 - DNA, 596 bp, Zea Mays
ttttgatattctcaagaaaataatacatctcccacataattaacccaaaattctattaaaaaagtagaaaagaaacactatagaagtgagaaaaagaagtaacacttaaattttctaggtatttaaagaagaaattttataccccaaattcagagggttacagtagggctggacacccttgaccgcgcctatccaaactaccgtgccagcactgcgaagagagagaaggagagtcgccacatctgctcttcgcctgtgtagcagattgaagcgcgaggctagcccagagaccttcgaagtgttccctggtgtgaaatcgtcaccgccccgatgtgaattggagcccgggacgagcagaattcctcgccggaatcctatcacgccgcgatctcgccttgctccgtgaaccgccttcaccaacccattattaccggtaaacttcacctccatttattcgctatactccgtatgtcgaatagtaccgagccatctgtgagatgggacactagaactcttgacgcagagggctcaccggagtgcgccaccatgaatcgcgtgggagccgccacgcgggtgctcgggtggagggagaagag

SEQ ID NO: 42274 - DNA, 477 bp, Zea Mays
ccgaaaaccgttgcacatcaggaaacattttactatagaccctgtttggcacaactcctgcttgttgaaaaagcagcttctgcttgttgtctgcttttagttcattttgagaagcggctgaactaataagctactgcagaagttatctgtttggcagaacttctacttaaatttgtgaaaaagctgaaaataagttatgccaaacagagcttatgtccgatcacgtagagaatttttcccagcttgtggagtagctaataaatgcttaccaacctcacactgacccattgtattacactaataagtttgttgacgatctcaaagacggtgtgaagtctattgtcttagttcaacgtcctcgagatgtagatactgcttctgtccttgctcagttgcaggaggaggttggcgatgtcggccgtcgtcatggtgacttcaagtattctgcctgaggtctatccaagcgttcttcatcta

SEQ ID NO: 42275 - DNA, 337 bp, Zea Mays
gaacaatcttttaacaaacttaggcatgagctcaatattcttgattataggaatttcttttgttgacttgcacacatagctcatttatgtacctttgatcatgtctctttcatatgctatgactaatatgtttttcaagtctatttcaaaccaagtcataggtgtattgaaagggaattggagtcttcggcgaagacaaaggcttccactccgtaactcatccttcgccgccgctccaagagactctccatctttgtgggagagagcaaaaggacttcgtctttggtataatcttaactcatttatttatgaccaaaggggaagatagcacttcaag

SEQ ID NO: 42276 - DNA, 717 bp, Zea Mays
gcggcatgcatgcatgtactagtaagtaagcgaggaaggaacgcagatgcatgattgagaggcaacggagcgcccccgatcggcgtccttttccaagcccccactcgaccaggaccctttcttcccattcaattcaatgccgtgatggccacaattcatgcgtcgtcgacaaaccagacactcggccatcatgatgacaaagccccggcccccggccctccctggctgcaggcagcgaatgattaggagaatttcgagtcactcatccaaccaagcggtcgatcattatatttaacccggccgcggccggtcgatccatggatggatggatggcagcagatgtcgatcgatggatggcttggctgcagatgtcgatcgagtactgctcctgcttctccttcttcttctgcatgataatcgctcgtaacttctgggagacgtcaaatcgacatgcatgctgctgtgctgatcttgttgccacagagactgcagactagagggctgggctggaccacggctggtggccggctgccatttctagctcggccattcaattccgcccggcggtttgacacacgaggtaccgcccggccggccattcaatcggcgcgggtggtaccgccccgccgcgcgctcgctcgctcgcggctactcctccatgtgttccatgtcgctggcctgctactacgtgtatgatggtgcaataatctagtatct

SEQ ID NO: 42277 - DNA, 1584 bp, Zea Mays
ctttcgcaggaagaccctggaagcatctggaagctccggccaagaccgcccgatccgcatctgacgggacgcgcgccaccctccccaccctcctgcagcttccagagcattcactctccaccacccgtcccgacgatataaactagcccccgctctctctcctcacaaacttcccctgtcacgagagtacgagaccacgccttccgtgggatcaatcggctagggtttcggagatgttcggccgcgcgccgaagaagagcgacaacacccggtactacgagatcctgggggtttccaaggacgcgtcacaggatgacctcaagaaggcctaccgcaaggccgccatcaagaaccaccccgacaagggcggcgaccccgagaagttcaaggagctagctcaggcttatgaggtcctcagcgaccctgaaaagagagagatctatgaccagtatggcgaggatgccctcaaggagggaatgggaggcggtggtgggatgcatgatccctttgacatattccagtcattctttggtggtggaagcccttttggaggtggcagcagtaggggcagaaggcaacgacggggagatgatgtggttcatcctctgaaggtttctctggaggatttgtacaatggcacatcaaagaagctctctctgtcccgcaatgtcctctgctccaagtgcaatggtaagggttccaagtctggagcttcgtcgaggtgtgctggttgtcaaggttctggcttcaaggtccaaatccggcagttgggacctggaatgattcagcaaatgcaacatccttgcaatgagtgcaagggttccggagagaccatcagcgataaggatagatgcccacaatgcaaaggtgataaagttgtgccggagaagaaagttcttgaagtggtagttgagaaaggtatgcagaatgggcagaagatcacattccctggcgaagctgatgaagcgcctgatactgccactggagatatcatctttgttctccagcagaaggagcatcccaagttcaagagaaagggcgatgacctcttctacgagcacacactgatcttgactgaatctctgtgtggcttccagtttgttctgactcacttggataacaggcagctgctgatcaaatcgaaccccggcgaagttgtgaagcctgattctttcaaggcaatcaacgatgaaggcatgcccatgtatcagaggcccttcatgaagggcaagctgtacatccacttctcggtggagttcccggactcgttgagcccggagcagtgcaagaccctggaggctgttctcccgctcaagccagtatcacagtacactgatatggagctggacgagtgcgaggagacaatgccatacgacgtgaacatcgaagaggagatgcggaggcggcagcagcagcaccaggaggcctacgatgaggatgatgatgtgccaggcggtgggcagagggtgcagtgcgcccagcagtaggcagcttgcgatcgtgggctgagccaaaccaacttatgagttgacttagcatcgagccttctttacctcgttgggtgggcgagccgagttcggttaa

SEQ ID NO: 42278 - DNA, 2877 bp, Zea Mays
acacatagccggaagcaaaaccaagggaagggctaaacctcccttggcacaagccctcaaccacctccaccaccacctttaaaagaaggtgctaaagggctgtcctgcagagaaaaagagaggagtgccccccacaaacctttccttgcattccactgaaatcttcctatctgcaaccatgcagttgctcaattctggcctcagctgaagcccaaccatccattgttatataagtcgctgcagcctttgcaatttcccactccttcagccaccatcggtcattgaaggagcttcgtgccaccagagaaggtgttcgccgtgcataatcacagactatatacattccacagacctgtaaagctctgtgaatttggagctcccacaggttctgcattggcgttgagatggggaggcattcttgctgctacaagcaaaagttgagaaaggggctctggtcccccgaggaggatgagaaactcatgaaccacataacaaagcatggccatggctgctggagttctattcccaaactcgctgggctccaaaggtgcggaaagagttgtaggctgaggtggataaactatctgaggccagacctcaagagaggggcattctcccaagacgaagaagacctcatcattgagctgcacgctgtccttggaaacaggtggtctcaaattgcagctcagctgccagggaggactgataatgagatcaagaatctatggaactcgtgcatcaagaagaagctcaggcagaaaggcattgatcccaacacccacaagccccttactgaggctgatcgcagcggagcagctcccaccatcagcaccgagagaacctcagggtccagcgaaatcaacccatcaagcgctggtgctctgggaaacttgagccacctcctcagcgagacggctcaatcatcaatgctgatgcccgtgtatgacaagaatcgcgctgaaactccaaacttggcacgccctaaggtgccaccaaaggagttgttcctggagcagcttactgctggacacgagagtccatcaacctgccgctcatcaggccaaactctctatttccctttccaacagcctttaggctacaacagtgagagtggcagtggcgatggggcgaatatgaattcactctggttcaaccagagtgacttcaactgcagcacaatttctacagtgatgccgccagcttcaccatcggccctctctacatcaatggggctgaatcttccacctgataattctcgacatggaggaactggcattggaagtactgcagtagattcattctactgggatggtactaatcctagcagcagtagcagtactgggagcagaggaagcaacagtatgggatttgaaccacagagcacgagctcaattctggagaacagtgtcttccaatggacagacatcggacaagaaaaagatacaagagctcacctggtagaggaacttaagtggcctgacttgctccatggaacctttgccgagacgaccacagccatgcagaaccagagccagacgctctatgatgacgtgatcaaggcagagagccaattcagcatggaagggatatgtgcttcttggttccagaatcagcagccacagcaacagcttcaggcaacaccagacatgtatgacaaggacttgcaaagaatgcaactgtcttttgagaatatctaggcattatgttccacatggaacagagcagatcagcagaagcagaaatttgtaattttcagagattcgtgggcagaactatgctgaattgcttacatagatacattaagttgatacagaaatcatcctccacagctgctcctcagttgaagacctggcaatatcaaggaaaggacagccctggcattagaagtggcagcagaatgcatacaaaagtacgttctagagtctctttttctttatcttgaaaaatgatgtttccttctgtacacaacgactcaacttttgcatatttgagtttttgttcactctctggtggaaattaaataaatataggcagccatgggcaaaactgcatgtgttggtagctctcaccatgcaagtagacccaaacatttcaactgctgccatgcacgtccatgcaaattaattattgcatgttgtattttctttttcttttttttgataagttgccgacaaacgacagttgtatatttgtaagaagaaatttggaatgttgacctgagagctattttcttccccctttcactttcccgtttctgtcgtaaacttttctgtgtggagaacccaagctacttgagcgctttctacttgaatacaggaatggaaaacgattggttgatttgatagggtacaaaggagcaatcattctcaagaagaagtaaacacattcaggaaagaaaaaaggaagaaactattcatgaatatctacctaccatgtagattgggtaatctatgaagcctcaatgtgaaggcaagaaaattggtggagctcggaagtctcaaaatcaaaaagatggcgtgtgagatctacaacaagactcgtggttggaggccagttgacagacgaatccgatgaaatgaaacatgttttgttatctggttattttggttcaataactgtgcggtcgttctacttcttctcccttgtagcgcctagctacaggaaaaactatgagatagaaatgctgcttgctgctttggtgtgatctgtgtgaactttgatgttggtcagctctgtgttactttttgtgttgctactagtagtttggtttggtcagggtttggtcctttttagctgatagttgtgtgttttgtcagctttaaaattctgggtgctcatgtggtattgtaagaacttatgtctctttctatttcgtaa

SEQ ID NO: 42279 - DNA, 2991 bp, Zea Mays
ctccgctcggtctcggtctcgctctcgctgcactcgtcttccccgcccgtcccctgatctcagatccagaccaaacgaattccacactaaaccccccctgccccagacgtcgcgcgcatgaaatgaaaccctagtgagtagtgaccctgtccggatcactgcgtggcgccgccatggcaccctccgctctggcctccctcccggcgccgctccggtcactgcggctcaagacgaagcagcaggagctactgctccgcgtctcggcgctggcgctcatctacgttctcgccttcgccgtccgcctcttctccgtcctccgctacgagtctatgatccacgagttcgacccctacttcaattaccgcaccacgctcttcctcaccgagaacggctttagcgagttctggaactggttcgattccgagagctggtacccgctcgggcgcgtcgtcggggggactctcttcccgggtctcatggtgaccgccgcgctgctccaccgcctcctccgcgcgctctccctcgctgtccacatccgcgaggtctgcgtcctcaccgcgcctttcttcgccgccaacaccactctcgtcgcctacgcctttggccgcgagatctgggactccggggcggggctcgtcgccgccgcgctcatcgccaccgtccctggctacatctcccgctccgtcgcggggtcctacgataacgagggcgtcgccatcttcgcgctgctgctcaccttctacttcttcgtgcgcgccgtcaacaccgggtcgctcgcctgggcgcttgcctcggcgttcggctacttctacatggtgtcggcatggggaggctacgtgttcatcatcaatctcgtcccgctctatgtgcttgtgctgcttgttaccgggaggacaaagagcagaagtccacagactacttctgggaaaacaactggctcaaagtcagctgctaagggtgtagttgatcaatctttaccattccaacacaatgctgctattggtcttcttctgggtgccttttacttgctcagtaggtatgccatacactgcacttgggtgacatctgaggcttactcttctccatctatagttttggccgcaaggggtcataatggtggaagagttatctttgatgattatcgtgaggcatactattggcttcgtcagaacactcctcctgatgctaagattatgtcttggtgggactatggataccaaattacagctatgggtaacagaactgtcattgttgataataatacatggaataacacacacatagctactgttggacgtgctatgtcatcttatgaagatgaagcatatgagatcatgcagtcacttgatgtgaactatgtgcttgttgtatttggaggtgttactggatattcttcagatgatatcaacaagttcttatggatggtacgtattggtggaggggttttccctgtaatcaaagagccagattaccttgttaacggggagtatcgtattgacaagggggcagcaccaaaaatgctgaactgcctaatgtacaagctttgttactaccgatttggagaacttaccacagaatatggaaaacctccagggtatgaccgtgtacgaggagtggagattggcaacaaagatataaagcttgaatacttggaagaggcatttacaacttcaaactggatagtgcgcatatacaaggtgaaacccccaaagaacaggtcctgaggcgtcatcgctagtgaagtggttggagagctattacctcagacaagtacatattgtcaaaaaatctgaatctgagtggcctcaggagagggcggggtcgttgttatgggcacctgctttggcgagagtgactattagcagccatagcatcagttcagctcgaagtcaagaacatctttcccctcattcggtttaggtgtaatcggattacatatgtacacaattttctgtgtatatacacacacacggattcgacaagtatcttcatttccaaatgtcctcttcccttcttccgagtacctgaatcacaccggcaatggctgcgccgatgatggaccaagtcaccccggccagaacgaccttcatttcaaagctgttgacgactccaagagcgatggcgccgccaacatgctcctgaatgccgctgccacctccggccacctgctccccgttgtaactcacgaaccccgccgcgacgatccccaatagcagcggcgccgtcaggtcgatgcttatgcccttcctcccggcgacggtcgcttcaccggctgctcctcgcctgcggccgtggccttggggagtgggagtgccccttcccctctggtgaatgctcggcggagaagctgacgacggcaggttcagctgcggggtccagtagtcttcgcgccctgcgtgcgccgtggccgcgcctcccgtcttgcgccgggcggcggctgcttcttggagcctctccgtcacggggtcagcgggtgccgccggcggcggcggcaggaggcgcgaagcgaggacaatggtgaccggggccgatggcccgaacccgaatggccgccagtaccaccagttcgacatggatctgatggcgtggactgctgaagtcctcgactgccgtgccgcctccgactcctgcgcaggcagcgttcggtcgtgtcagtttcagacgaacaacggagaagacagaaacagtgagcgatcacctggaattctctggccgcagatttctgcttcatctcatcgaaccttttcttgaacttggcgacttcgttgaagatgttgggcgcgcgagctcccaccgcgttgccttcggagacgcggactctgccgcgcggttgcttggacatcaagaactcgagagccgccaggtccgacctctccaccatcctggacggccggccgtggggaataatcagaagaccgatcgccgatgacgatgcatgggatgcgcatggacgacgaagagtgagtttacgtacgagatgcagtcgacggg

SEQ ID NO: 42280 - DNA, 4450 bp, Zea Mays
ggctgccgccgtgcagtgaccgcacttgtacccatcatagctagcttgggagacccagtctcaggacaagtgaggaggaaagtccacgcctggcttcactcaggtactaggcttaccggttaccatatttcccgacatgtgtttagtactttcaaacgcttgactcatgtatccacacattaatccttaattccatttccgtcacatggacaaggcatccatcctggatccaagtccatagaccatcataaaatcccattatcaagatgtatacaatcaatgtctgacatcgcacgagttctagaaaaatcactcgacttctaccgacatcctgattagcaagcagctactcaacctagcatactagtatgcatctcaaaaaggaatcctgagggtttcaagcaactcctacacttaagtgcacattgcaagcctacaaatattaagtgtagtaaagtagcatatataaatggttatgcataaaaccggtgcttgcgttcaaatgctggggctatgggaagatcctctgtggcaggctcgggagcgggctcctggacttcctcttgggaagctccttgctctggaatgagcacgtaatctccgtcagcgaggttaaaatctaatgaatgcaatgagtgagatatatgtattccatgatatgcaatgtagtagtaggaaaaatgatcaaattgaaaaggtaaagtttaatcttactaccggaattctagtggtatacttagccaattagggtcaagtatggtcaagttttaaatggtcagattatttgagtgtcccactggttttcttttagtgtcttagtgcaagtctatcatgatccttgctgaattcattggaggtgagatttattattattcttactaattctctctttaccttttttctattatgctttttaaagtgggtttgaactacaacatagctttataaatttccaaaaattttgtaaaacttacagtagtttctcactggtgtataactcttagtctaaaaaattgaggcttacaatgttaagggttcactctgtacaaaaatattaagttttagggcagagggggtgttttgaactacaactctcttctaacagtggattattccctaaagctaattttttgtggcagaacctcccaagttattgggcccacatgcacctgcccttgtcccaaagacctcaaacggctatgcatgtgcaccagataaattaacaggatatgtccgagtgtcccaacgaccccggataaaccacttataacccggatcacaagattaagtaacacaaatcacacaccaacaatatttttgcagcagaaatcttattactaaatttttacaagttacatcaagttttacaatgtacatgatcggagtgattacaaaagtgattcaaagaagttactttgaactgttataaattattggtagttttgaaatatattctagctcaagtgaccatcctcaataagaagtatagaagagttacttagacttataagaaggccgagcccaccggcgcttaacaccatcaacagcaccacaaaactataacctgaaaacaacagggaataaaatcctgagtacgaaattacacagcaagacttacccgactaaagaaaagacactcaagggtatgctggctagagggattcaaggtatggctgttcaagaagcaaagactctattttgcagaaaagcttactatgagtggatccttaaaatccatttttaattgtcgggttaagtaaagttacctgcatctagaattctttctaccctagttcaagcacttagcctataatagccgtctttttatcatcccttcagttcactggattgctacctgtagggcagtgaccaagtcttcatgtccgagaagtaacggcgatccgaatcgattaatacccagctggggatctccgatcacacgacatatgtagcacttaacccttgcatatgtcaactcgccaccggggttcttaagaccagatcaggttcacgccaactgagagcacatatacaccactgtgcagcctcttgccacggagggtacacgctactctcgccatttctccactcacattgcgtgttatcttatgatggtattagtctgcccgaggcatgtgaccagttaaaaggtcctcgatcagcaagcctacattgacaaggtccttaatcgactcagacagagacactacaccgagactcccgtctcgtgcaagtcaaccgcccggtctcagctttattaatttcaacccaaagtttggtacctggtagaggtacatctttttcgatgttgaacccatcaaggcctttgacggatccaccatcaagttttatttttgaaaacattcccacccactgaagcatcacttttgtttgaaaacaaaacatttttgtttgctaaagcaaggctaagcatcataaaattctttttcaaaaagggtatcaaggaagggtaatcaatttttaaggaaggaaatgcatcaacgctttagcacacaactcctatcacctaatgcatcaaacaaggtgataaaaattttaaaacatcaaggaggtggcaaatgcaccggggcttgcctgaataacactaagttagtgtttgttaggcgatgtccacttgacgatcatcttttatgttggcactcgttcagattatccatcttccagttcgtccatcagcatcaacctgttgattagcccgcgcttggggtcgacatgggtcgtcttccgcgtcacgcgattaattaacgtacctgaatgatatgcataatgcacatttatccatataaggtggaataacggaaacctaaatactacttatatgacagagaattaaacaccaaacctagaataagctgactaattaagcagggcatcaactacatccattaactaaattgacataataaaactagaaattctatttttcattcctagcttttattaattctttaaactgtgtattttaattacttgatttaccgatttgtctaaaccgaacatcacaatatacgtatgtaaattaataacaattatcgcgatcaacaattctatttaatctatttatatacctagttgactgtaatacgaatcaacttacccttattaaatccgacttgaaatcgcgaaaccaacgacgcctttcagctcagcatttcaccggaaatagggtgagtgctgcgtcgaatcacgcttcatcttttttcgcatcgagtatcctccggctgtgtactaatttattttcttctgcgcctaatcttcgtggatctacgcctaatcttcccagatcttggcgtggacgaggatgacgatcgatgacttgttcgagctttctgtcgagcacttgggacatcgaccaggggcttgcttctccacatcttcttgggattcttttgtcggcgcgagcataagtcggagacaacacgtagggaccgacatcgaggtggggtgaccgaacgacgacgagattgagtctggtgcgagctggcgaggacacgaatccagtgagaactctgacgacagtgagatcatgagctctaacaccacggggttaagcagcgaacgcattcggcggccacacatgtgccgaaccgaaggcgacaaaccgatgaagcaaagttcgtcgataggcaccatggaggaatcagcgatgttgctacacacacgacgacgaacgacgcaacgacgggagtgagagatcgcagactgagtaaagactcggcgagcaatgacgtgaggagcaaagcgaggtcatggccgggcaaactcaatggcgcggaatgaaggagcagaggtctgtgcgaacacggctaggcacagggaggagcgccggcgagccggagccagaggccgagcaggtagggacgagcgctatgggaagcaggcagagggagctacgcgagcagagaggaattgggggaaggctgcagcgctgggagctcggctggatgcaacttcaatgagagatggcggccatggcaaggagcttgggggatgggcgcgccgccatgggagagcgccaaagagtttcgtggtccgagcatagggaggtgcagagaaggcagtcgcgcgcgtgtgagagagcttcagagagaagcagcggcgcgagcaggagctagggcgcgcgacccaaggcgcggcgagcttgctgcgccagggagcaaggcgcggcatcaggggcgagctcagccatggggagctgcagggagggagtaggaggagctggatgcgcagggaagaaggactgcgcgctcgttaaaaaggaacaggggcgacgagatttttctccttgagcgacgcatgcagataacgcagagatgatttttctttccccctgcggctggagatcttttctcccctgagcggtggccggatgaagacgagggaatagcggtggctgaaaaaaatcggagaagggttagagattttggct

SEQ ID NO: 42281 - DNA, 2019 bp, Zea Mays
gtcagcgaagggttcctctgaccgggcgaggctctcatggcggcggctgaccccgagacggcggcggcgctgcggggggaggtcgccgcgctgcggatgcgcgtacaggagctggaggcagagaatcagaggctggcaaggattgcttcgacctgtacctgcggattcaagggcagtgtttcaaaggtgtcgcctaggtggccaggcgtacccagcttgccttgtgaaatagtgatgccttgtcgcctaggcgtccaggagggcagtgttggatccattactgcacatcataatgtgaaatttcatcaaaatagcactatggagaaagatttgagctctccatttgatcacacagtaatatccaatgcaaatgaaatgcagtgcaacagaaatgcagatgacaatggtttacctgaggattcaagcaagcatactaaaagaacaggtcgcaaggtgggcattttaagtcactgcccaaagcgactagttgctctcaaagtcatgtatttcggccagagattctatggtttttcttctgaaggtaacattgaaccaacagttgagtctgagatatttaaagcactggaaagagcaaaactgatggttgccaataggaaagaatcatgctactcgaggtgtggaagaactgacaaaggagtttctgctactggacaggtgatttctttatatctgcgatcgaacataaaggatgttgggggggacatgttagatgaaagatccgaaattgattatgtgaaggtattgaatagaattcttccaagagatatacgtgtactgggttggtgtcctgttccagcagattttcatgcaagattcacctgtttgagccgggaatataaatacttattttggaaaggggacctggatatattggaaatgcagaaagctgcatccaaattcattggagaacacgactttaggaatttttgtaagatggatgcagcaaatgtgagtaactacaggcggcacattacagaatttactatttctgcatgtgacagaaggtccaacaatgatgagctgtgttccatgacgatcaagggtagcgcttttctgtggcaccaagttcgctgcatggtagctgtgttatttctaataggtcaaggccttgagtcaccatccgtagttgattcactattggatattatgaaaacatctaggaaacctcaatataaaatggcgccagagcttccattgattttgcaatcttgtctatttgataaagccaactttatgtgttcagcagatgccagccggtctctgactgagcacttaaatgatgaatatcgtcaccatatgctccaagctgaaatatttcacatagcgtcatcctgtttaccttttccagaaccaaattcatcagaaacgcctcagaagaagaggaaccatattcctctcctgtcacgagagacagagccttcttacgaggagcgcatatcgaaagtcaaagcgaagctggctgataatctcaagtagagccaccgttttcaattgttacaccaatacttggaagagaacttatggaactgtagaaggtttcttccaaaagcctatatggcaccccatctcttggtgactgtcgttcgctacaggatgacggcaaagctttatttagcgctggtcggtgtcagtgtcactcatatggttgttagagctcatgctcagggatttctgaatgctgaggccttggatcttctcgctcccaaggccacgggcaggaaatcacaaacgggagaagttctatggtgtaacacccttgtacttgcacagttttacagcaaatcaaatgatagcagagtagcaggaagtaccatgttttaattcctctttctgatcaatggacttttaggaccaatttggaggcaaaaccagagagtttctctcccatcaagaattaaatgccttgtacaaatgacaccccacgcaaagatcacaagggaatttaagtttcaaactagcccttaggggatttctcaaataaagctatgctgcccattc

SEQ ID NO: 42282 - DNA, 7690 bp, Zea Mays
cctgaccgcccacccctgatcggggcccctcgccggagctctccacctgccagcgccggtgctcgagcgtgcgggcgagagagagagatagacggcgctcactcgttctgggggattttcccttcgagacagggccaaagggtaccggttaccaaacgaaaccgctccgtcctgtccgtcgcccctcggtccctctcccttcggttcgaccaaagtcaccaaacgtatcgcaaacaagctcctcgacccgagttcgagctcaactcggcggagatctccactcttcagcaaggcgcgggatgccggcgatggcaccggaggacgatgaagcactgtacgagatccaccggcacgcgtcgggatcccacgtgatccctcatcaagaagaataccaaggtgctgcgacaagttgtggtagctcagatgctggaggaggaggtgtcctctcctatctctccttgcaaggtgtgagcaaacttaaggaaaagtgggataggtacagggtgctggggaagagtaggcagaggaagaagggggatggcgtcgcactgtttgtctcaccaaatgcagaatatgtgtctgtaactgttgggaatcacatcatcatcttgaggaaagccgatggctatgcatcaccttgtggtgtttacacaaataatgaccgaatagcatttttcacaaatggggcttggctggaggctcaaggcgtttttggtgtggtggatgacctaagcacactttacttgatcaaagaaaatggggagttactagcaaggaggacatgtgatcagttgaagctatcttcttccattattgatctggttttgcaggatggtacaagcttacttaggtttctacatttttacaagtgactgcttggttcatagatttgattacactgaagaacctgaggcatgtttatgcgaagttcccatatcaactaaagatgcaatgtcagctaggactatccagttacctcgaagtttatcgtgcattgattaccatcaacgtcactcgctatttgtcctagttggagattccaatgtttcatttagctccaatagttattctgcatgcagttggaaggggtattttgtcccctgaaggatcaaagaacctttgtttcatccccgaaaatcaggatctcgcctcagggaaagtatattgctacgttggatttgactggttttgtaaactttttttcacttgatggtgacttgcgcactgttccacttcaaactcttggaaaggctagacacctaattgatgttaaggacatcagttggtggacagataatgttcttatgttggtaagaaaagatggtagcattagcatgtacagcatcactgaagacaagatagtttccaatgatgacccggttttatctacaccaatattggagaaggcaaaggctactgaaggacatgcttttgttttgcaatctaggagatatggaacaaacactccagttaataagcggatggatagtgactcggaaccttgtctgctgagtggttctggggagcaccaacaaacagaaggggatgaaatgtcctggagtctgatatcattctccaaagttacagtagcagaaatgtactctgttctgataagagagaaacgatacaaggacgctttagattttgcttctagatacaatctagataaggatgaagttcttaaagcatgctggttgcactctgatgccaatactcatgagatagactcgtacttagcaaaaattaaagaccaagtatttgtattatcagaatgtgtaaacaaagttgggcctacagaagcagatttaagggctctactttcttttggactttgtataactgattgttacagattttctgagttagataacagcagtaagggctcaacatgggacagtcgcaccattaggcttcgtttattgcggcacatagacatgttagagacattcttgggcattaatatgggaaggtatgcagcaggagaatatagcaaattccgttcaatgccattggtggaaacagccatagcattagccgaaagtggcaaaattggggctttaaatcttatattcaagcgtcatccatatactgtctcttcagatattttacgtgttttgtctgctatcccagaaacccttgctgttcagacttatagtcagttgctgccagggaaatcccttcccagtgttgtcatattaagagctggtgattgggttgaatgtgaacagatggcttcatatataaacaattgccctgccgagttggacaaggtcgaagagatcaaaacggaaatacttgtaaagcactcaaaaggcttttcatggccttcagttgctgaactttgtgagtggtataagaacagagcaagggacattgactgcttaagtggacagctggaaaactctctggccatgatagagcttgcatgtcagaagggcattgtagagttgcagccattctttgatgatattaaatgcctctaccaggttgtatattctaatgaattgaatgagtttacaatgaatcttttgacatgggaagatctgcctgattatgaaaagttcaaaatcattctcaaaggagtcaaagaagatacagttgttcaacggctagaagaaaatgctatccgttttatgaagaaattatatgaacacaaacaagaatcctaccttgttagttggctgaaagaggtagctgctaaaaatgagcttttgatttgcttagctgtcattgaaaatggttgtggggaatcaccaatatatggtctcttcaaggatcttgctgagatgatagaaacctctgttcactgcatttatatgtgcagtgcaactaaccagtggaataccatgtcatcaatattatcaaagtcactctataaaacaaagagggagaaatcgttagtggctagtgaagaagactgcaatctgaaagatgctaagcatgctcttggttcttctatggtttcttatgaggagatgcaatgtgtctgtgctgatatcttatctggtctgggcaatgctccagaagatttttatcactatgattcagtacctgacaaacctaatgatgtcaaatatcttgatatattggagaagaggctaaaagttgctgaaggccatgtagaagtaggacggctctttgcttattatcaggtcccaaaatcaatgcatttcttccttagtgctcacttagatgagaagaatgtaaggcaaattatacggctgcttttatcgaaatttggcagacgtcaacctgttcgatcagacaatgagtgggctaacatgtggcgtgatttaaaactcttccaagaaaaggcatttccttttcttgattcagaatatatgctggccgaatttatcagagggctattgaaagctggtaaattttcgctagccaggaattatcttggaggaaccagtgcagtttctttatccacagagaaggctgaaaatcttgtgatacaagctgcaagggagtatttcttctcggcttcaactttatctgggaatgaaatttggaaagccagggaatgcctaaatttgttacctaatagcaaaaatgttcaagcagaaactgatataattgatgctcttactgttagacttccttatctaggggtgactatccttcctcttcagttcaggcaggtaaaggatcctatggatatcatccgcatggtgataacatgtcaagcaggtgcataccttcattttgaagagatcattgatgtcgctaaacttctgggattaagaagtgaagaggaagtagcggatgtggaggaggctattgccagagaagctgtggtaaatggtgatcttcaacttgcccttgatatctgtttaaatttaacaaaaaagagtcatggtgcagtgtgggatttatgtgctgcaattgctagaggccctccacttgacaatttggatactggtacccgtgaaaagctattgggtttcgctctcagccattgtgatgacgattctgttggggaattgttgaatgcttggaaggagcttcatgctcagggtacttttgagaaattaatgattacaaccgcaacaaatcctcccaatttcttgattgatggatcttcaatcacaccacttcctgtacaaagtgtgcaagacatacttgacctgagagatgacaatggccatgatagacgtagcgaccttgtgggaattgttaaagacatgctgtcaaaagtttgcttggacttttctaatggagacacacataattgggagtctatgttggaagaaaaccggaaattgttgtgctttggagcactggtattaccatggcttttgaaattgttcagtaatgaagcatgtgatggtgaaataatggatcatctcactaggagatgtcgattttcaacaaaagtaaaagcagcaaccagtatcatatattggttagttataaatggtttggcccccaatgataatataatcatgattcttgcaaagtctataatggagcctcccattgatgaagagtttgatgtacttggctgctcggttcttttgaatctcatggaccctttcaatggagtgaaaataatagaggaagagctaaaaagacgagaatcttatcaagaaattagcagcataatgagtgtaggaatgttatatagttccctcaataattctaagaaagagtgctccactcctgaacagaggagaaacctgttgcttcacaaatttcatgagaagttcacctcagccgataccgatgatttagaccaggttgatatggcaaatacaaccttctggagagaatggaaatcaaagttagaagaggataaacaactggctgatcaagcgcggatgctcaagcagatattacctgatatagacacatctcgattcttgtctggtgatgttaattatatcaaaatagtagtttactcctttgttaattctgtaaagatggagaaaaaacacatactcaaggaagcagtgcggatagctgaggcatatgggttgcaacgaactgaggtgcttttacgatttctcgcctgcagtcttgtgtctgaatactgggataacaatgatattctgaacgaaatttctgaattccgggaggatattgtcagctcagctaagggtgtgatcgatatgatatattcagatgtctatctggagatagatgggtataataaacaacgtctttcttacatttacggcattctttcagcatgtcattcatatctgaagaggaccaatgagatagaattgagatacccagtgcatgtgcatacccataagcttgaaccatttcagtactataaggtacttgaggaagagtgcaagaaagtctgcttcattgatggcttgaactttaaaaacattgctggactggataatctgaactttgagcatttcaatgacgaagtatgcaagaatatccatgcctccaccgtcactgctatagccgatatggtacagtctcttgtgagtatgtatgttgatgtactggccaagggactcatatcacaacaaggtgtttacaagcactatgttctggggttgctggcatcacttgaaggccgcagtgaagcacaatcgaacaacacagattatgaaaagttgcaggcttccctatgcgaatttgagttgaactatgatagttgcagggagtacatccaagctcttccagccacagatatttcatatattgtaagaaggtattgcaccctttgctttccatctaacttagcacgaagccatccacaggaaccttcatggaggaaacctcttgccacgctactagaattttggtctaaagttgttgatgacataccgggggattcaattgatgcttgctcatatggaagaacagactacttaaattcaaataggttatctctgtgcatgagagctttcaggcagctattaataattgatgagatagcactgcaccaaggttgggatgccatttccatgtatgtaaaagattgccttagaaatggaaagatgatggaaacaccatgcttttgtcgagctatgattctatcaggctgcagttttgaatctgtagttgaagtatactttggaggacaaggacagttagggagtgagaatgcagatccaagcaattatttggacctcttagaactttataatgctgctacagaaaagtgtttgtcggatttgagtgaggaatcttgcgaatatcgaatattgcttcataatttgctgtcatctttgagccggtcaacgggaaaacatgctggtgctctagaaatggtcagatctggtgtttgggggaagttaatccgctattcggaagacatgcagctagagagccaattacgagtctatgcactacagctgatgcaatgtatcacaggaagaaaccttaaatctcttccaaatgaaatggtgtgtcaggttgagccatgggaatcatggtatgagcatggagcgggtgctgccatagctgatgagagtatcaactcctctagcagcatcacagggactcttgtcgcacttagatctactcagatggtcgctgcagttctgcctgacgctaatatcactccagaaaacctagcaactcttgactctgcagtatcttgttttttaaaattgtcagaacgtgcttctggtgtgagcgttgctgtttttgaagcagtgctagaagagtgggagcaattgttctcccccaaagaagagcatgttgcacctcatgaatcaccaaaagaaacaagtgactggagtgatggatgggatgatggctgggaggcgctaccggaagagttggagagtccaaagaataaacaagagggtgtgttgttatctgtgcatcccctccacagttgctggatggagattatcagaaaacgtgttgaacttggtgagctgcacaaggtacttgaacttctagaccgagcatctttgaaacacagcgtgttcctagaggaagaagaagcacacagcttggttgaacttgtatctgctctggactgcttcatggcccttaaaactgtgttgctactcccatatgaatctctgagactgcagtgcctgcagatggtggaggtgaaaatgagggaaggaatcgtgtccacctcatcaaatgctgatgatcaggagctccttgccttggttctttcctctggaactatgcagaagatcatcacagaagaggcatactctaaatttttctcttacatatgccatcttgtcgggcaccttgcaaggtcattccagactgatctcctcgtacaatggaacgaagcaacatctaagatcaacagatctttactgttcgctagagttctgtttccatgttttgtatctgaactggtcctcggagggcagtatcttctggctgggttcgtcatctcgagatggatgcacacacatccatctctgggcctgatggatatcaccgagaccagtgtgcgatgcttccttcaaggccaggttgcccaacttgatgaggtgggagggagcgatgctgctctcactgacggtgaagtttgtgtaaggcacacaatctccaccctacagccgaaacttgtttctcttctgcagtctgcattagctctttcgaacaaagagttgtaggcaaagtcctgtgtagttaacttttacactcttgctgtactaccggtgtacctgtaacataaaatgtttttttagataatggtaaaagtgaatggtggaagatttcatattgttat

SEQ ID NO: 42283 - DNA, 3549 bp, Zea Mays
gccatccctactccaccccaacctaagcagtaggcagtaggcatcaagcgtcttgcgtggctgcgtccaagtccaagcgccatccggccaccagcgcaggtaccgagccaccgaggtaggagccggccaccgggcagatcccaggctgccagccaccggcgtccagcactccggctgctagctaccggccacccgcagcgcaggccacaccaacgggcagcaaccgcatggtgccatagctgtcgacgaacaccagcaaccagacggccagatcccagtaattcgatttattatatcttcgtcgaggatagtgacacgtcacgtcagtgtccggccatcgcttgagagagtccaacccaaggatggttcaggctacggaagggcaatgcactgcttcttagactattgaagaatttataggatgatgtgcaggagcagagcgtgggcagtaaatgcaaagaaaaaaacacagttgcagaaattgctagcaatagactatacaagatagagccaaattgagcaaaaaaaaagaccattcccatttggatcaccattccctaaccacagcaaaatgaagttggaaaattgagtagttgagtgccgtgtatgcacatgagcagggctaatactttataagaaatgtgctggttcttgatactcctccaaccagttgtagaagaattctggtttggctgaagtagttttacatccgaaagatggactttgtacagatatattctctgtcaacaatatgtatatccaggcggagatgaacttggagggaagcagatttacagtttggtgatattatatattatcaattgcagtttattaatgttgcgcttcttctctattatcaaactattcacacaagacttcatgtgtgcgtgtgtgaaagattttattagtgtaaggtctttagggacagttcacattgaagttctggtgcctacataaattgtaaaccatacatgttgacatgggtacacatctcatggctatatacaactttgacatgaggtttatcttaagattgtgtgttccaataaaagctattactatttcttgcatgtgcatgtctttaggatatccatttttctttatagatttatttatttacatcgcttactgcttactagcctattttttctagcaatttctgcaagtcggcccatcgcgttgaactaaaccatctctaatttcctacaacttcaactccaacaacagaggtaccacaatggacttcttaagaagaataggaaccgtgtacataagcttttttgctctaacaaaataagagtggttgttgcaacaatggcattcagaatgggtcttgataagagtgacgttgaacgggtggttgattgtatcttgccagaaagcgtagaagaatacatacattgaagttcacgaatatgctatgagaaaattctttgccagatattttcttgtgaaaattcagttggatgcatttgctccttggttaaagagtcgacttcagacaagttagatataaaagaggaggcggagctgcgatgccaccaggtggagccgtgcctgctcgctcaggcgtcatgacggagccgaacgcgaggagccgagtgttttatccccgccgaagcccatccccatttgataccagcgagcgcagacatcgccggggacgccatcatcctcggctgcctccaagaccggcccaccgttctgcctgcactcccactcccaaaccccatgatgaacctccctttccggctccgccatctccgacgccttctcgctgccccgcccttaccaaccctcgccgccacacactcccatagcccaccctccttccgaccgctgcaccccacccgaatccagccgctgcggttccatctacccaaccccccagtgcggcggctctcctccgagcacgcaatcctccccacccacctccaggacgagcgcttcgccacgctctcggataggatctatgatgccgtgattaagacggggacggaatccaacgagggcaccgaggccgcgctcgacgcgttgggcgctgagctgactacccctctcgtcgccgacgtgctgcaccgcctccgctacgaggagaagctggcgttccggttcttcgcctgggcgtcccaacaggacggatacagccacgaaccgacgacttacaacgacatcatcgacattctctccggcacgcggtacaagagccgccagttcggtgtcctctgcaacgtgctcgatcacatgaagcgccatggctcgaggtcggtgccggttgagggccttctggagatcctgcgcgcctacacggagaagcatctcacgcacatgagaaagctggccaagaagcggcgggttcggatgcgtacgccgccagagactgacgcgctcaacgttctgctggacgcgttctgcaagtgtgggatggtcaaggaagcagaggcagtgtttggccgcgtgaagaggaagttgctgggtaatgcagagacgtacagtaccctgttcttcgggtggtgccgggcgagggaccccaagaaggccatgaaggtgctcgaggaaatgattcagatgaagcacaccccagagagtttcacctacgttgcagccatcgaatcattttgcagcgctggattggtgtcagaggcaagggaactgtttgagttcatgaggactgaggggttgacggtgtcatcgcccacagccaaaacatattcgattatgattgttgcattagcaaaggctgaccggatggaggagtgttttgaactgctttcagacatgagaacttgtggttgtatgcctgacgtgacgacttataaagatttgattgaagggatgtgcttggtgggtagactggatgctgcttatcgtgtgttggacgagatggggagggctggatttcctcctgacattgtcacgtataattgctttcttaatgtgctttgtagtcttcgaaatgctgatgatgcacttgaactctgtgagaggatgatagaggcacactgtgagcccagtgttcatacctataatatgctgatgatgatgttcttcgagatgggagaggcacatagagcattagatatatggcttgagatggacaaaagaggatgtcaacgtgctatcgatacctacgagataatgatctatggtctctttgattgtggagaaacagaatatgcaactgctcttctagatgaggttataaaccgtgacatgaaactttcatacaagaagtttgatgctataatgctgaggttatcagctgtaggcaaccttggtgcgatacatcggttgtcagagcatatgaggaaattttacaatgttgcgatgtcgagacgatttgcaatcactcagaagaagaagagcataggcctgagaaggaaatgagtgccgtggctattgctgctgttgtttcttgttagttgttactgaggatattcaggagcttattcaaaggtgacggctactggttttcaacaaacacatatcggggcatcgggtgaagccgccaaacgcatatgagcagcgttggctttgtctctctcgtct

SEQ ID NO: 42284 - DNA, 2847 bp, Zea Mays
cgcaacccaaccgccgtgctctcgaaggaacccgcccgcggcccgcccgttgcttgcccgcaagaccgcagcagctcagttgagttgacctcgcgacctcccccggccggcgccgcagggatggaggagggtgcgtcctcgccgggcgacggcgggggcatgcagttccaggtcgcggtggccgtgcgcggggacggccgcgccagccgccgagccgcgcggtgggccgccgccagcctggtcccgcccggcggccgcgtcgcgctcgtccacgtcatcccgcccgtctccttcgtgccgtctccatccggggagagggtgccggtggacaagatggagccggaggtggtggagatgtacgcgcaggacaaccgcgcgctcgcgcaggagatcttcctccccttccgccgcctcgtcggccgcggcaaaagcgtggagacggtggttctggaaggggacagcgtcgccgaggcgctggtgaggtacgcggcggagtccggcgtccgcagcctcgtgctcggatccgcctccctcagctggttccggaggattttacgactccaagatgtgccttttacaattctgaaaaccgtaccaagttcgtgcaacatatttgtcgtgtcccggcgcaggttaacaataaaaattgcaaatcaggctcgaagtagcaagccgaacgcttctattcggattcagtcaataagtcataaagcatttgatcaaatacagagggactggctacaagacaaacaggctttgaataatctggctgatgatgagataccaaaatattctgaaaattctatttcaggctcattctctcaagtctgcagttctataagcacttcttccatcgccgttaaaagttcagaaagtcatagaagaggtttcttaggaagtttaggacgaaggacacctgggagagaaaggaacaaagattttgatgctatcggccaattgaaggaagttcattatgttgccttaagctcagttgaagagtaccaacatatagatgaagaagaaaaactgaggaaggagctgaaggatactttgatgatgtatgacagagcttgtggaaatctcgcccatgctagtaaaaagattcagttattttctagtgactgctgtgaagatgtgaataaggtgcaagacgcactacagagagaggaagtattgaaacagacggttccagatgagaaaaacaaacatttagaagcaattggagcagttgagatggcaaaaaatgcatttacacacgagacctattccaagcaccaggctgagaatgctaaggctgtggatgcccttttatcaacaggcaaaagttgcaggcggtactcgaaacatgaaatagagctcgccactgattacttttctgatgcaaagaagattggtgagggtggctatgggaatgtatacaggtgtacccttgaccacaccgaagtagctgttaaagttgttgaacaagattcgatcaacaagattgatgagttcttgagagaggtggagattctcggccaacttcaccatcccaacttggttttactgcttggcttttgtcctgaaattggatgccttgtgtatgaatacatggagaacgggagtttagaagatctacttatcaacgataaagggcagccactccattggtttcttcggttccaaattatctttgatgtggcttgtgggcttgctttcttgcatgggacgaaaccagagcccattgtccatcgtgacctaaagcctgggaacatcttgctggacaagaactacgtaagcaaaattggtgatgttggttttgcaaagcccatatcagatcttgtgccagaagggctcacagagtacagagacactgtcatcgctggcacactgtattacatggatcctgagtaccaattaactgggactgttcgaccaaaatcagatctttatgctttgggtattatcattcttcaactcctaactggcaaacgtccacctgggctggtaaatagtgtagaagaagggattaaaagggggatattatcagacatcctcgacaagtctcaacctgattggccaattgctgaggctgagatgttggcaaaacttgggttgtggtgtactgccttaaaatgcagggacagacctaaccttgagtcagtggtgcttccagagctcgaaaatatcctgagcagggttactgtttctctcaaactcgaaaatatccttgcaccaagccacttcttctgtccgatattgcagatgggcacacctatgaacacagggcaatcaaagcttggctcgaaaaacacaagatatccccaatgacaaatcagaggcttccacatctatccataattcccaaccattccttgcatgcagcaatacagcaatggaagttacgagcatcttaaggcccgttcgttttaatcttaatctatatggattgaacgggattgagtgggtttaaatccataacgaatcaaaattctttctaatttcttccaatgtcatcttatcaacatggaatgagaataaccgaataaggcctaataaaggcatgaggtgactggtttattcgttgtatatagtttgattcattactgtctgtttgagttaagatgtaaataaagagcaatagttctataatgtagcagtgaaagaagatagtattgtaggaataagttgtgttactagtctagatttgttagagctggtttaggctactcagacaatttaagttacaacggaattaagttttgcaatgctgtatgattttgtagttatagcctacaaggcattatcttggagggtctgattacaattttcagtgtgatttctctgagatcatgtatcttggcgaag

SEQ ID NO: 42285 - DNA, 397 bp, Zea Mays
gaggctgtgcatgcatccacgggtagtgttgtgctggccacccctgaggtggtggcacccaccccgtcggtgacggtgccatccacgcttgaaatggctgagagcccgccagtggctgggagaccgatggcacccatcccgggactggctgcgatccttggggtggtggagctgtccaagtgcctggaggtgcctacgtccacccaacaccggtccacagtggctgcgacgctggagcttgtcctggccactgtccccatccttgtgccagcgagccatttttgataataaaaaaagagttgctatggaattgaagtgttcagatagtgttacctggggagggcgaaaaacgggcaagttcatatcagggccgagtcgagtagtcatttcctgcaaa

SEQ ID NO: 42286 - DNA, 1556 bp, Zea Mays
ctggaggcttcctgcgtcgcgtggaggcagacagagctcagggagggagggaggggaagaacgaagcagcagcaacagcgccatccgctcgcttccttccccttctctccctcctcccccaccgccggcgtcgcctctacgcgcgcgcgccccgccgggggctgccgtcgctgcacccgtggcccgtgggcggcggccgcgtacctgtacctacgtgctgccgggggggggggggggggggggagctacgcgtctcctctcgccatggacgccggtgtagagaagtgcggcgacgcggcggcggagggcggcggcgacctctacgctgtcctcgggctcaagaaggagtgctccgacgccgacctcaaggtcgcttaccggaagctcgccaagaaatggcacccggacaaatgctcctcctcctccatcagcgtgaagcacatggaggaagccaaggagaagttccaagagatccagggcgcctattcggtactctccgacgccaataaacggctcctctacgatgtgggagtatatgatgacgaggacgacgaggatagcatgcaggggatgggggacttcattggtgagatgacccagatgatgagccagaggcaggaaagctttgaggagctgcagcagctttttgtcgacatgttccagtctgatattgattcaggattctgcaatgggactgctaagggccatcaggttcaggggcaagccaaaagtagaacatgctcaccacggtcccctcctactactatagtaaaggaggcagaggtgtcatcatgtaatggcttcaataagcggggttcatcagcaatggactcaggaaagcctccaaggcctgttgaatgtggtgcaggtcagagccaggctggattttgttttgggcttgcttctgacgaacggtcatgcaattgaccaaacatgtaccataagcaaatgtgatgtaggagattgttatgtaaagagacttttgtggccactttgatgttttgttttatgcgtaccttttttgaaaaaaaaaatgattgtggtgctatgtgagtgcctttttctcatcataattttaggcgtctgtagattcacttgagaagtatgaagtccctaggtggttattaaaagaagttagcagctatgtaaaagttagctacagtggcgagtctttaagtgctgatattccttgatagtatgctcatgtgttcacgtcatttttctgttactctctattactgcttcctgtgttgtgaaatatattattttgccctggtgtatttggtatttataaggtttatgaagaaacagaaattcagcatggctggtacaaattttaaatatatattttttatcgataaacttttggtttatcctttattcatttgccaagggatgttagtcctgggtcacttgctgggccccattctatcttagtacctaggccctttggggcgtttaatagtcatcatgatcacatgatatagtccaataaattgttaaggactctactgaaactttttatattgattgggtcccatgggggctacgaaaag

SEQ ID NO: 42287 - DNA, 938 bp, Zea Mays
agtagcacatgtaaggagaactagcaatacttgaagatgaacaaccatatttccattctagtgattctcatcgtcgatgtgtctgttgtcctcctgctcaattcccatgtagggttatgcagctgctacaaccgcatctttagttttggtgacgataccatggacactggaaatttcattcacttgattgggaaggccccatctaagtacaaggaagccccctatggcaagacattttttagacatgcaactggccgcatttctgatggtcgtgtcctcattgatttctatggtaaacctcccaaggatggaaatatcatttcagatgtcatcgcagacataagccatttcatcgaggagcttattgtcgttaatggggcgaaagcattcgtggtcgccaataactttcccgttgggtgtttggcatcatacctaagtaggttccacagtgacgaccatgaggactacgatgagcatgggtgccttaagtcgttcaatgagttctcccaaaagcataatgagcaactttattctgccatcggacaaatcagatactcttacccaaatgtgaaggtaatctatgctgactactacaacgccaccatggaattcatcaagaagcctagtagatttggtattggtgatcctctagtagcatgttgtggcggcaatggaccataccacaccagcatggagtgcaatggcacagcaaagctttggggtgacccacaccacttcgccaattgggatggcatgcacatgacagagaaggcatacaacatcattatggaaggggtgttaaatgggccatttgctgatcctccatttccacttagttgctaggattagttacgctaggaattccttacaacatgtagccaatattttttataataatggaagtattttggatttatactacttcaaggaagaagtaa

SEQ ID NO: 42288 - DNA, 439 bp, Zea Mays
gagaagaggaagaatcaaatcaagagacggggggttgagagagccccgttcggatagtgaagaggaagacgagaagcggagcggaggcgagatgggggcggccgagtccgtgccggagacctccatacacgaatctctttgttcagaaggtgagaactgttcgtctaaaattacgtctgccaagcctggcctgttcggatcatcaaatggaactttaccaagtttctggtggacaagaacgggaaggtcgttgggagatacggaacgtcgacagctccaatgtcgattgaggacatccagaaggcccttgacgaataaagacctcatgtcctcatctcatccgtggtcacccacttgcagaaataggcactcgcggaagtattccgtcgtaggagcatttagacgtctatgcttgtctgtagtaaatctgtgtactgtt

SEQ ID NO: 42289 - DNA, 2161 bp, Zea Mays
cgccattccgcgcgagatcagtagggtgcgcgtgctggtgctggctacggccatggcgacgcccaccagcaccgtcacccgcggcggcaacaggcattggcattgtacccaagtgcttccactgctgttgctagtaccactatgcttcgcgcttctggttgagagcggcggcatccccacgacgctggacgggccgtttccgccggccacgcgcgcgttcgaccgcgcgctgcggcagggcagcaacgacgtcccgctcacggatccgcgccttgcgccccgcgtgcagcccccggcgcccgagcagatcgcgctcgccgcctccgccgacgccgactcgctctgggtctcttgggtcacgggccgcgcgcgcgtgggctcctccaacctcgcgccgctcgaccccgccgccgccggcagcgaagtctggtacggcgagcgcagcgccgccgacgccgcatcctatccgcacgtggtcacggggtccgccgaggtgtacagccagctgtacccgtacccgggcctgctcaactacacctctggcgccatccatcacgtccgtctccgcggcctgcgccctgccacgcgctactactaccgctgcggcgacagcagcctccccggcggcctcagcgacgagcactccttcaccaccctgcccgccaccggcgccggatgctacccgcgccgcgtcgctgtggtaggtgaccttggcctcacggggaactccaccgccaccgtcgaccacctcgcccgcaacgacccatccctggtcctcatggttggggacatgacctacgcgaaccagtacctcaccaccggcggcaagggagtcccctgcttctcctgctccttccccaaagctccgattcgggagtcctaccagccaagatgggatggatggggaagattcatggagccgattacatcgaagattccgctgatggtgatagaggggaaccatgagattgaaccgcagggtcacggtggagaggtgaccttcgcgtcttacttggcacggttcgctgttccatccaaggagtctggatccaacaccaaattctactactccttcaacgccggtggcatccattttatcatgctcggtgcctacatcgactacaaccgcacagtactcgtggttggaaaaggatttgcagagggttgatcgacgagccaccccttgggtcgtggctgcttggcacccaccttggtataacagctattcctcgcactaccaagaattcgagtgcatgaggcaagaaatggaagaacttttatatgaatatcaggttgacattgttttctcaggacatgtacatgcatacgaaaggatggaccgagtatttaactacacattggacccctgtggcccgatttacatcggcattggagacggcgggaacattgaaaaaattgacatggatcatgctgatgaccctggaaagtgtccctcaccaagtgataaccaccctgaatttggtgggctctgccatctgaacttcacttctggccctgccaagggcaaattctgctgggaccgacagccagaatggagtgcatacagagagagcagttttggtcatgggattctagaggtcctgaattcaacatatgccttatggacatggcaccgtaaccaggacgcatatgcagagaacagtgtgggagaccagatctacattgtacgacagcctgacaagtgccttctgcagccagctaatagccccattggaggatgcccttctctagtgagtagtaacagctccggtgggtccattacaaatggccagctctcctacaaaatgtttgtaattatgtgtgtagctttaatgtgaaagagttaggtggtctgagcagtactcatctcctttttaatataatactttagggttgttttactctcggcgggtcgaaatttttttgtgtagctttaatctgcacagttgaaggaacatttcataccaccattacttttcttgattttataattgtagagcggcagaatgcaagatgcaccttactgaatattatactgcaaggtttgttgagtctttttttgtgtttattatcgatttattgtaaggaggcaacaatctttgttttattgttgtataaagaaatgtgaaacaatagcatttggtacataattgagttcctg

SEQ ID NO: 42290 - DNA, 197 bp, Zea Mays
gccttattttggacttttgattcatgtgcttgtatgctatactatataatatgctaatgtgtgaactatgaatggactatgaatgtgtgaactatgaatggactatgaatgtgtgaaactgtgaactatgaatgtgtgaattatgaatggactatgaatgtgttaaactgtgagctatgaatgtgtgaactatgaat

SEQ ID NO: 42291 - DNA, 487 bp, Zea Mays
ccttttttaacatcactggggaagggattcccgcctggataaggtgcaaggtcagagttcacgatctcacagaacaccttctcgtcgatctgcaggcttgttttgtactttttaatgttttgtttctagtttcaggaatacggttcatctcatctatacgtatgttggttagagcaggcacacccaacgaaagttacaagaacagtaataccaatcttctattttttttctcgaatatggcgtaccatctttctcatactgcataattcatgcattagaatattctgaaaatagaggtaatttgtacctttttgtgccatggttatttagtagttgatttatgaattgcttccactttatttgtacaacgaagcaaattagtagctgatatatgaattgcttccattttattcggtgccaaatttgttcactgtcgtttcttgtttacatctattttatgttgtttttaaagcaagtttgtattgtc

SEQ ID NO: 42292 - DNA, 3912 bp, Zea Mays
ctgtcgtctatggcggcggcagaggtgtactcgccgaccgcggcggcgcagcagcagagggagaaggcgacgtcgcaggtgtggcgggcggtggtggggtggatcggcttccttgttcaggttctgcttcagatcctccggggcacgccgtcctgcgcccaactctttccttcggcggcgtccggtacccgctcctcttcgggcctgcggcctcgaactcgtcgccggaggtggcctccgtccgtccagctctgaggcgggcccatggaaatcgttgccatatcagatcagcttcgccacggaccccatctgcgacccccggtgacgcgctccgcccacagctctgaggcgggcccatggaaatcgttgccatatcagatcagcttcgccacggaccccatctgcgacccccggtgacgcgctccgcccaccgcccaccgccgcccgggaatggctcgagcgctgctcctgctgcgagtagctgtagctcgctaccctcctctcccggcctcacccgcgctcctccagccgcagccgctgctgcgctgccacgcgccctcccagtacaaatcccagctccgcttcctctcctccctctcctcgtccgtgcccaacagctcagatgctcccagcgacggcgggggcgaccgcgacggggaagaagatggcgcgaagagtggcagccacgtcgattacttggggatgagcgacgaggagctcatggagcagtgcgatatgggcacgttcaaggcgtccggccccggcggccagcactgcaacaagcgcgagtccgccgtccggctgaaacaccttcccatcggcatcatcgcccaggctgtggaggatcgatcacaacataagaaccgagcgtctgctttatctcggcttcgaaccctgattgctcttaaagttaggaggccgataaacctggaagactacactccacctgttgagcttcttcagatattacccctgaagtccagcgttagaggaaatgatgttggcccccaaatcggtccaaataactcaaaattttctccaggaatgcaagcattattagacctgctgtttgctgttgaagattctgtatcagatgcagcaaagattttaggcctaagcaccggtgctttgtcaagattgattctgtcagatgattctctccgaacggccgcgaatgaactgcgagcttcgaagtgtttctttgattgcagggcaccggtgctgtactacgtgctcctgacgttgcaggacagcgtgcacaaggtcttctacgccgtcgtcgaggccgctgcagttcgcgcagacaacagccatcttggagggttggcgaggtatccggtctctgcaactcttccacagattggatccagattattccttacatggggtgtcttctggagttttcctgagatggccccattcacctctaccaacaggtatctaattccaatattgtatgtctcggttgaacttgtgaaggcgttgcaagcacatatcattaactgggatattcatatgtttgatgaggagatcggcaataccactcaggtgcacacatcaaacttgaatgagccaatgaggaccttggccgggttcatacaattttgtctgataaaaccgggtggcaagtttgaccatgcagatcgtttgttccaaagcattgagaacgcttacataaatagcttatcaaatacaagatggggaacctataggcgatgttgctctccctccatgggcaaaggatgataactcaagtgacgagtttgacaaagattctattgagagtgatgatagatctcttgaagagctaagctgggagacactagaacttcttgtggtacctcatatattcagcatcagacgaagcacatggagatcaaccttcacttcgtccgtgagcgtgtcgccgacggtgatgttcgcattctcagcatcccgaccacttcgtagtttgccgacattttcaccaaggggctgccgtcgagtgtattcactgagtttcgatctagtctcaacatctgtacaggatagaattgagactgtaggaggtgttagactcctgctaagggttaggcctgggccttcttgtatttacctgattacccctatgtaatgggcttggcccacctaactgccatatataaattaatataatttacacccaactctagattagggttagggtttcatattccaactccctgtactgtatttaataaatacatgaactccattcaacagtttagaaaaagaagcattactaaatatggttattaacatgcccagcttgtttaagaccaacagtcatattaacatgtccaacttgcttaataccaagatgcaggtatccaagctctgtgctaccgattaattgctgaaaactgaacttgggttcatgttaaatattcccaaggaaatgctcttctgttgatggctttcagataattgggcaacggtgtgtgtatatgttcagattcagaaagtgaggacaatatagcgtttgcagcagtggtcgtcgccctgtgcagggagggcctgctgatcagagatcaagagggaaagcagaagacacgttgtgccgggaggaaacacacgacgaagtagagacttagaagcaataagctaaatatttagacaactttaattcgagcactccaagaggtgtctcaaacaactggttaattcgttttatgaccaaaagaggaaaaatggccatctaatagttttgtaaaacaactccctaaagataagcacttgcttaatctccccctcaactcgccaacatgtgtgtgccttctgcgcttgctatttgcttgggtagttttgtaaaacaactccctaaagataagcacttgcataatctccccctcaactcgccaacatgtgtgccttctgcgcttgctatttgcttgggtgcccctcctctggttgtacctgcaccctcctgtccatctcgggaatatatcaaatacaaaccacgttttggtgcaaaccctgtgtaaacctactaaaaaaagtttcaaaaaattctaaaaaaaaacatgaatgtacatctcagcttacctcatctatatacaaaattttatgatcaaattcatcttactctagcagttacaaaaaagacaaattttggtgcatttgaactattaccgtttatcagaaattttgtcttttttgtaactgctaaagtaagatgaatttgaccatgaaattttgtatatggatgaggtaagctgagatgtacattcatgtctttttttagaattttttaaaactttttttagtaggtttacatagggtttgcacaaaaacttggtttgcattcgatatgtttccatccatcttctcctcctgctcgattttttttttgagtttttggaagctaccctcctatctctttccttaaaaccgcaacccctttccctccgcgccctcacttcacggctgccaagaagtcttcaacgcccgacgcgtggccgcacagggcgaggtctcgctcgatggccaggcttggccttcgtgccaccacccacccacgcttcctcaccaccgtggagatggatgtgtcgctgctgtggtggccctagcttctgcgtgggcccacgtgtagatgccgctggagaagatttattagggcgttcgatggtagcctcctcgccccagtacgctgacgtgcgcctcaacactgcccccacgtcccagcagcagcactaagggctagtttgggagccaaaaaactgaaggggttttatggctcccaaactagtcctaagacactaacgtcagcgtgttgctcccctcgtcgaccatgtgggtacgttccccatttgttttctccttccttgtcctcgccgttccccatttcgcatttctacatccgtacctcggcatttcccctaagtctgccttcct

SEQ ID NO: 42293 - DNA, 5937 bp, Zea Mays
aaaaatacaagacacagactcttcgttgcattgatgatccagtgtttcaaggttgtactatgcaatctcttagaatagatggttaaggcttactccaacggagcagctatccaggcaggcaaaggtaaaatgactggccgctgagcattgtagctcaaaattgagccttccaacagaacagctatacacgccagccaaaataccaggaggagagagaaaacggcattctgcctgctcttcgagcgccaggcattctcttcccctgtctctgacaagctgtcccctcaatcatttgccttgcttcattctttcttttttcctctgctgttggatgcacgtcgcggatagctgggcaggcattcgggaggggccagccaaagagcaaaatagctgccagatttggctggcacctgttggagtgagtctaagaaactgcaacatacaaccctgtgctcatacaaccctaagctctaaaacattaatgcagttaagagataatgtgcatagaaagccgtgaagagacagactttttgcgaagagtctgtttctcgattttttttgtacttaacatcctatagacttctcaattaatagggttgtacatgctcttagtcgactgttatacttggaaaccaaactggggttgccgtagggcttaacatccggttttttaaacttcggttcgggttttcggttttctagacattagaaactaattggttttcgtgaaaatgaaaaaccatggtttcagtttttattttggtttctcggtaaaatctaaataccaaacttataatcaagacaacacatacaccaaatttatataataaattacaaataatttttaaaagtaaaaattatataggtataaatatgtagagatatatcatacatcacatataaatatgtgagtagtaatttaattgcttcacatgtttagtttacataatggaatagttaaatttttgaatcgataaagattggtaatttgttttttttgtattatatcgaaaaacaaacttctgagataaaaaaaccgaacgttcggttcggtttccgagttaccttccctcgcgcggttctgtctgcctttatttattcgcgttccctgcctgtttcgagcctccagccttaataacccggcattctctccgccgctcgcccgctccgcgtccggcggcccgcgtcgcctccactcccaattagcctatcgtgttcgacgcgagcgaactcgctcagatcagagtgttccctgatccggtcccaatcttttattggattttgtgttttggtaggggatctagggtttgtcgtcgaattccgcctcgaattttagggtttgcttcggatcgattccgttccgtgggattcttgcttgcagcactccatggctgcggcgcggcacgggggttataggagcttcgacgtggccaggaggcgggagttcgacctggagcgttctaggaggagcaaggagtaccgccactcgagccgccaccgcgactcggatcgccaccgtgatggcagcaggggccgtgaagtgcccaacgggtacatccgccaccgctcgccgtatgcgccaccgaagagccgaccttcaaaaaggaaggacgataaggagcctggtgaggtctcaagcgatagcggctcggagtctggtgggcgcccaccagtgctgagggaggatgggggtcttggggtctgcagggatggaggtgcgttgccagcaagcaagaagaggaagcactcacctggattccacgatacgaatgtttcaaagctgcgggcaagagatgaggtgtggagcaggagaggacctgatgccatagctgcggagctccctcttccttcgccgccccctatgtctgcggttggtgggtgctcaccaatggatccagaagttttggtagttccaaatgatgctgaaaggatggacgcgattactgagggggaagaggattgtgcaacgagaaacatttttacttcaaggtgggcggatgctgctgaagaggaggaagtggtgattgtgcctaagaagaagaaaagtgtgccacctgctcatttgcctgaacagaaatccacaaagaaaatcatgggctcagagctgggagaagcgatgggcagtaaaacatcaagaagttcctcaagttcgtctaactcaatgggtagtgaaaactggaatatcgaggtagacgagggtgatggcattgattcttctgttggttgttcgctggatactcattccaggagcaatatgcgtaggtctggatcacctgaggttgtgcgaacaccacgtaggtgctttaacatgcttcagggctgtaggagtattgatgactttgagaggatcaacacaatcaatgagggtacatatggagtcgtatttagggtgagagacaagaaaactggtgagatagttgctttgaagaaggtcaaggtagataaggaaaatggacgggaagggtttccattgacttctctcagagaaatcaatatccttctatcctttgaccatccttcaattgtggatgtcaaggaagtagttgttggtggtcatgacgatgatacttttatggtgatggaatacatggagcatgaccttaagggtgtcatggaggcgatgaagcaaccatatagccaaagtgaggtcaaatgtttgatgcttcagctgctagagggcgtgaagtatcttcatgacaattgggtacttcacagggatctcaagacatcaaatctcctcttgaataaccgcggtgagttgaaaatatgtgactttggactctctcgtcaatatggcagcctgctaaagccttacacccaaccagttgtgactttgtggtacagggctccggaactactattaggagcaaaggagtattcgactgctatcgatatgtggtcattaggttgcataatggcagaactcttgtcaaaagagccactcttcactgggaagtctgagatagatcaacttgataagatatttagaatactcggcacacccaatgaggagcggtggcatggttgttccaaattgcctggcttcaaaggcaacttcgtaaagcgaccgtacaatagattaagggacaaatttccagctgtatccttcacgggaggcttgaccttgtcagaagctgggtttgacctgctaaataggttgctggcatatgaccctgagaagcgcatatctgctgctgatgccttgaaccatgagtggttccgtgaagttcctctgcccaagatgaaggaattcatgccaacttttcctgctctgaatgaacaggacaggaggatcaagagatacatgaagagccctgaccccctggtggagcaacagatgaaagaacaagggagcataggagatcatggcctttttgactgatctgaaagcagacaagtcttgctgcaaatgacagtttttgagtgagtaaacatgttgcaaggctaagagatcaaaggggaacataaattttacttaagttccatgcagctagtgttcaaatggcagggttagctctctacgagaactgtcatattctaacctatcatcattataagttgcagatgtaatgcagttcgtctaaaagagttgaatgaagtgaaggaaccggtgcatttttattttcgcaaggaaatcgatactctcttaatgggaattgtaagcttaaagctgtggctgtatcaagagatgaagggttcacggatgccagattacatacctaactgactttttttgtggtcggtcctccaaaggtctcatctgtaattgtgaatccaagtgagttgagctcagctcttttgaatactttggtaatccctgccctcttcatcttcccactccagttctgtttcatcagctcatcatgatttatttatcattcctgtgattcattgcacgatcattatcaatttgtttctttatttgcatggacattaactgttacaaaatgccgccttcgccctcctgtgcccaccatagttgccacgtgttctgggatctatgcttattatttcttggatagttattgaggcaggtaaaagaataaggttaagaatatgttaaattactccttgtgctttggttagatgatattaccaaaaatatatgttgaggtgtaagacaattctgggtttaagtgtttattctcaaacggttgatcaatcatggttttccacttccaagcttgatcctaaccaatccttatgtgatttaattgtcatattttgccactccttcctatcataaaaacatgccgtttaggacaagatttgatcaaaccttaaaacttaaaagctacaaacatttataacttctaatttatttagtttatgattgctgtgtcttgctttgtcagctaccatttttttcatgccataaaatggtggaattgcctgtagagttacataaatgctttctactaacctaagttgagatgtgtgccaatgtatcactgtatcaggtcccaattccacttgttataccatcttttttcttcactggggattgtttttgaataatctgctgataataccgctccgttcttttgagcttttataatctgccagaggtaactagttgactataaaatctgggaggatgctaccatgtgaattatgtctttctttttacctagttgggtaaaatgcgctaatggtttgctatgcctaaatatgaattcgagttgactatgttcctcattgcaatgtttgtggcacacaggtatagcacttctaattactcctgtgagatggctaatatttccgtgttttttattgggttgatgtgttcatatgattttgttaagaacaacagtaaaatacaatgaatcctggaaagcaagttgtgctaagttatataattttagtaaaacgtattcatgtctttgatactgatgtaattctgaatttctgatgtgagattccaacttaagtacctaactgctttcccagttgcctgaacttgtagggtatttaccattcttatgtcacttctctgaacttgcatgatattcaccattcgtatgtcattataatagcatcttactgtcccttgcatttgtagttgcttggaattatgacgtctttagcacgatctgaagtagggagtatatgtaccacagaacgtctaggaattttgttgtagcagttcatctgagtatatccacttactcttaccatgtgcgattaaagtgcacttgagtttgtttacagcttgaaatgtccgcactggtagcagacatggcagattgttagggcacctatggagacgacgtcaaacacatttgaagttaggtgaacttgaatatcgacggagggcagctgataatttatgttggttctttatcttcagaatccagacatcaatcatcccttggtccggcgttctttggggtagggaatcttaaaagaatgtataaacagcctctcgaggtagtgcttgggacaggaaattgcgagttacctccatgacctcttcaatgcaccattgactgcattattgagaaggcagaagacatcattgatcggttggcacgtgcgaacttgcaatcgctttgacctaaaacaatatgccatcattattgagaattcgctatgcgccattcaaaaacaatatgtatatcattatatgccatcaaaatgtttgctgcggcttctatactggtttttctctctcctggtaccacacccgtcaaatggttaactcttatcagaaaagtattaggcgaagaaaattttgaaagctggtatagaaggtagtggcaccactggcatagatgcagaataaatacatccacaatgttttcatatgtgtcagatgacaaaatttatatgttacctatagagattgacatggcctaaaacgtttacttggttacttttcatttatttaagaactttagggcatgtataatactattaattaagaagtctcttgag

SEQ ID NO: 42294 - DNA, 3389 bp, Zea Mays
ctccttccgacctcgccgcctccctccctaaactctaaaccctccaccagccgaagctactgccgcggccgcagcagaggtcgcgacgacgaacgctgaagaagcgccggcgagggagagtcctttactttttcctatgctgtagcaaaacaagcctataccatcttccaaatatactcgttccgtgccggcggcctcccctcctacgcccctgtcgattcttcaatcttcaccaacgtctgcgcgtagcaggctagcagtcggcacggcttcctcagatctgccggacgacttgttgttcgtcaccgactcaccagcaaccaatgtcggccatcagccggcagcaggggaagctgggcggagggtcattgcggcacggcgtccaggcgtacagcaggcaccagcaacagcccatggcaaacgatgaccctatggtagatgaagccggagtagaagatgccttcacacatgagatcaccgattatttgtacgtccctagataccatgtgttgagttggatggaaactgtggaggggatggtggccggtgtggcggcgcttccgccggtgtatttgatactgaacagagatcttcttgagacgggatggggatggaagaggctggtgccctacagacctggttatgttgagtggcatgtgttcaagaaataccttggggactatttcgaccataatcgtgaagcttttctttgtgccgagcagaagcctgatccatttggatggattattgctgaaaagagtgccctgattgctgcagccaaattgtgcctcaagatggagaaggcacttctcaggtactgtgctagctttctcactcctgacgacaaaaggctgatcctcgggatcaaggaccaggcaaagcaaatgatccaatcagaggtagtgcagagaaacctgtgaagcagcgtacgtgatgagtaggagatatgttttcataagctaagctgccatctcctttcactagacttattaattggtctgtcgtctatacacgtaaggaccatatatttaccggccggagaaactcccgctggtttttggaggcagctgcacacgggcacaaaggggtcgttgtattcaattagggttctctcacagtagctgagacgtacgtgtacgttggccaaatatcttttatacgagtcatctatcattgatttagattatctatcattgttccaaaaattcagttactaagaggcagactaagaaaaggtaaagatatttgtactttcttttataggagcagatgaaggcataatatccccacttagacaaatttatctccatattgcaatttaaatggtagcagtagatcattaatccagtatcagtcaaaatattcgggaaggattgcttgaagtattctatggagtttatgaaaaggatcctgacaaagttagttctcagggcataatatcctgcagatgatagtttataccctgtgatgttctgggaagtgttgaatcttgtattcctgcaggtgcttcaagcaatggttcaaatgggtgtccttgttcctactggagatatgactgttgtcagaagaaccgctcaatttttccttaatagctttcaagagtgcctaacagcacaaaggaaggagagagaaatggcaaccgcagaactgggtttcaaaaagcaattaactaaggaggagaagtttgaaaagaggaagcagagacttgctacaatcggagaggatcttttggcgattgctgctgatcaaccatttcgcttccctgccacatttacatttgtggtcagagcattctcagttctagatggtactgggaaaggccttcatcctaggtttcatattacagagattgctaagccctgaaaatgccaaggaattgctaagatttaatgacgctggtgttgaaatagttgtgaaggtgtgtggagagacatgtgtattcctcctatgacgaattcctcaggctccatgaaggtaagcctgtcttaatgggcttgattgttgaacctgacttagtacttttatccatgtcacgacattgaaccagacagtcactcatgtccttaggatattaacggtatacatcaacaattcattctattttaattgcttgcaaaacttttttggcccttcaaatgagttccacgcatcaagaagtcaagattccaggaggcctaaaataggagaggagggcgcagcttgattcaatccatgtcaagtcaaaggctgctgcgaagtttgcacatgcaagtagaatttagatggtgaggttttgtctctgttcccatttttataacgactaggtgtttgaattcctaagattaaagtttatgtagattcttatttgtaattagatctctgttaggcatctaactgaataaatgatctcctaaagaattgacagattccatcactgagcagcccttcgccccggtggctgcggtgtcgcactggctgacacctgctcgcagttgcattacaagttttactgactatgtattttcaggtttattcaatttcggttctaatgcttctgacagcagttgtatcagtcctcttgttcagcttacatgtatccctcgcatccttccttggatccacataagtgttaataataattttgttgcatctcctctgctgatcagagctttcaaactcatgacagaataatgtactaaacttcagtttggtgtctatctcagtgtacctacactcagttggaaaacttcaaccacactgcaacaaggtttataaaaggaaaaacaaatttatgggctcaaacaaagtgtgatagtgaaagtcattttgcttccagcttaagaaccaagccaagaaaacagatatcaactgtgacgccacactcaaaagcttgtttggtgggagggacaaggttgggatgctggagatctccaagcttttgagtcgtggcttcccgaaaatctccaagcttttgtggtccatggagccagggatggctctttggtaaaagacttcgttgtggatggcctcttttatggtccatgttaagtcccaagtcccactaggtggttaagcagaaaaatcttgtgatggcattaagactttcagactttgtttttgggtctgatgcatgtaaaaaggattcccagtgtttctgttgctcttgcgatcctgtgaggacacatatgagagaaatatttagtttgttgatggcaaatcttgtcttatgttcatgtctgtgcctatctgatcaagcgttatgatatgatcccatgcgtggtactgtgttctttagagatgtacttaattatgtttctcttgcatttcatattgctttgtctaattgttaccgcaaattaagattttattataattccaatttgatatgcctcatcataaccatggttact

SEQ ID NO: 42295 - DNA, 2801 bp, Zea Mays
gagttgtctgttgcctcaccacccctctgtccctgcttccttctgctcccgcaacgggtggcctccgttccccgaccccgcccgactctcccacacatctccggcgctctcttcgagtcctcctgcagtcccgccgccttctcatcgctaccaaaattgcaaagccggactggaactcgcgtcgcgcgcaggggcatggacccggacgacgaaccagcggcgcagcggaaagccgtcgacttgcacctgccgcgcgacacggagcctgcctcctcgcccgcgtgcacccgccgcgccgcgccgcgcgtgctcagctactgtgacgtccctttcgcctccgcctcggcgcagcgctgcgcatcattcccgcagcgccacggagagctggcgcacgcccgctcggcctccttcgcagcctggatcgaaggcggctcggcgtcggcgccggcggcggcactcgagcgggccatgtcgcagtacggcggtgcggacggcgcgctgccagagttcgtcggcgccggcggtggcgagggcatcttccgcgtgccgctccgcgcggcgatgcacccggcgcgcccgccgccgctcgaggtgcggccccacccgctgcgggagacacaggcgggcgcctttctgaggacgctggcctgcgacccgcggcgacggcagctgtgggcgggcgccgagtccggggttcgagtgtggggcctccacgaggtgttccgtgggtggtggccgggcgccgggccgcggcgccgcggtgacgaggaggccgcgccgttcagagagtccgtgccggtcccgcccgcgctctgcgccgctgtcgacggcgctaacgggatggtgtggacggggcacagggacggcaggatcagggcgtggcgcatggaccacgccgcgcccgccggaggatactccgccggcagtgcgcccatgttcaaggaggccctctcgtggcaggcgtacagtcgcacgccggtgctcgccatcgtcgtcacgttgtgaaatttggtccggatcagaaggcggtgccataaaggcatggccttgggacaccattgctaagtccctctcatttacatcaggagaacgtcataacgctgcctcgctggttgaaaaatcttatattgaccttagaaaccatgctacaattggtaacatgtgctcattgcctgctgctgatgtgaaacacatgctcgcagacaactgccgagcgaaaatttggagtctaactagcatgacatttgctctttgggatgctaagactagggaacttttaaaagtatttggcatcgatggacaagtcgacttagctcgtcctgaggccccagtaatgcccgaacaattcatagaggaagagattaaagtaaaacccacaaaaagggagaggccgcaaggttctttcacattttttcagaaatctaggaatgccttgatgggcgcagctgatgctgtacgcagagttgcaacaaaagggacatttgtcgaagataatcggcgaactgaagcagtggctcaagcaatgaatgggacaatttggtctggttgcacagatggttcaattattgtttgggatggaaatgggaatagactgcgagaatttcattaccatagttcttctgttcgatgcataaagacactcggagacaaggtttgggtgggctatgcaagtggcactattcaagttgtcgatgtcgaaggtaaccttcaggcaggatggattggtcatagctgcccagtcatagacatggcaattagtgattcttacattttttctttggcacatcatggtggtattcgaggatggcctctaagttcccctagctccctagatgatattctatgctatgagttggctagcagggaactgttatacacaaggctagagaaccttaaaatactggttgggacttggaatgttgcacaagagaaagcttctcctgaagcactaaggtcatggttgggtggtgcattttttgatgttgggctggtggtggttggtttgcaagaggtcgagatgggtgctggagttcttgccatggcagctgccaaagaaagtctctcttatggccttaggtagggcttgaaggcagtgccaatgggcagtggtggatagacagtattggcaaaacacttgatgagggaatatccttccacagagttggttcaaggcagttggcaggactacttattgctgcatggccacatgttggtgatgttgatactgctgcagtgccatgtggctttgggcgtgctattggcaacaagggtggcgtcggattaagaataagagtctttggtcgcaggatatgttttgtaaacaatcattttgctgcacatcaagagaatgttagccgccgcaatgctgattttgaccgcatttatcggacaatgactttcaccaaacctcagggatctgcagcttctgctacagctgtccaattgcataaagcagctaatgaaaatcaagcagatgaaggtaggcctgatctggcagaagctgatatggttatcttccttggtgatttgaactaccgacttgatggcatcacctatgatgaagcaagggacatggtctcccagaggagctttgactggcttagagaaagggatcaacttcgagcggaaatgaaggcgggaaatgtgtttcagggaatgcgtgaaggcccaatcagatttcctccaacctacaagttccagagacaccagtcgggtctctcagggtatgattcaggcgagaagaagagaatacctgcttggtgcgacaggatactgtatcgagatagccgtcctgtaccgag

SEQ ID NO: 42296 - DNA, 498 bp, Zea Mays
cttcgctagaatagcgaaagacactgacatatagggcccaccaagctgtggtgcgctgggcatataaatagggacacacattgatagcattttatgtgccatttcaactgcttacgctattttttcgagcttggattttcttgctctgctagattttgattgatttgtgagcttcagcatttgctcaagtgctaactaaatggctggagagaagaaggttgttgaccctgcactagctgggttttacgaggctatggagaagacgaacatagagaaaatcaccaatgaaatgttggctgggttgtctgaagattctggcgatagcgaatgttttgatttggaaagtggaaacgaagatgctgaagatcggcccttgcagccaagtcataccatcttcggaaagtcgtccatcaagcaaagtcagattgatgctatgaaagggagatatttccgcgatatttccattgtgagggctggaggagatagcgccgcccctgc

SEQ ID NO: 42297 - DNA, 2597 bp, Zea Mays
ttcgcgacttaatgtgctgggatgtgctgcgtgtgtggcattttggaccatgttaggcgagatctggtgtcaatagtttgcatatgcttctggtgtgccacgattgctacttctgcaggatgacgagagtttgcctgcaaccgatctaaaggttagagcgagcggcatgtgatgcggaaaaatgaagtcagcaaggaatacttcttaaaaactgtaaggaatattgttggtgataaattgcttaagcaagctgcttcacgatatcaaatgcaggcacaacgaagccctcagacaaacccaagcaactattctttatcaggtcaagtttctggtcagcagactgctcccagtggttctgtgacaggagatgaacagaagggatatccatgggcgcacaccatccctatgagacaagctattgccagcactcgaccaatttgcataaggctaatgaaatgggaaacatgtcagatgggaaaggggtccatatgttacaaactcgtccacccaataactccataccagtacaaacaatgcagcatcacgtgcagtgaccacaaacatcttcaccagtgtttggggcaaatagtattcatgcacgtccatttccgcggccagttggaggtccagctgcaccatttagaccacaaatggcagattccaatccaagagcacacttgattcggggagctgtgaccacagtatctgggagtgtgccaacacgatccatagtgtctggaaatgcgccagtcaatcaagccttgggatcttcaaaagtcagtgctggcatggaaagccagtcacaacaattgagtgcacctaaagcctttagctgcaacaagcttaagtcagactcaatctcatggcattcaagaagagcctaaaattcaggggaagaaacaactattattcgagagtttgcctgcaaccgatctaaaggttagagcgagcggcatgtgatgcgggaatatatgaggccttggagttgagggatggaggatctgattatcttggcaagggtgtttatcttagacctcaaagctcaatctagcatgctcttcgctctgttttactttccatgattcgttgagtatctatgcagtttctgcacgattactatgaattacgaactaaacttaaatcaaatacttcagtatggtctctagagaggaagctctgccaaccattactaataactgagaagatgttcgcgtacagggagacggtgttggaggaggcacatcggggcatggagctgcgtgagcactgccgccatatagttgacaacgatgaccgacactatagattccattctctgtgtgtacaccaaggtatcggtgtctcgtctcggaccacgccctttcccttcccttccttctccgcacacgcagaaccagctgattctctttcttttgctttcctcctctcggcctacgttgatctggcgatgcgcttttcatggttactgcgaccgtgatgggcatctaggtgctcgaaccattagttgggctaaggaacacggaacagcagcaacaatatcgtaaggagagtgcagacgttggacaaatggaagtagctcttccactactggagcaattgttggtggagtggctgctggcgcagccttgctatttgctgttcctgctatcagttttgcctattggcggcataggaaaccacaagagcattttttcaatgtatctggcttcaaaacgactgcctgggctacgcgcgaggacgatggccaggcttccgttgatggcgcgggcacaggcgacagcatggcgggcgtgagtgctgcggctaggcgggtgcacccgggcggggtgcgggagaagctggtcggagctcaggatacggagattctgctgttgcttgccaactggcgagaggctcagacaatccatcgggtgctggcgacgcagctcttcttcatgttcctgccgctcagtgataagagcagactgggctgcaagatcgccaggttcataagcaagtacgtcattgagtattttcccgtcactttgcacgtggaagactatggcgcctttgatcccaatagagcttatgtgttcggttatgagcctcattctgttttgcccatagctgttgggatccttggggaccttgttggattcatgccgctaccaaagctaaagattcttgcaagcagtgcggtgttctacaccccgttcctaaggcaaatatggacgtggttggggttggctcctgcgtcgagaaagagtttctactcctaccttggagctggttatagctgtattatagtgccaggaggttttgttaagatagctattgagatgggttgccctgtagtccccgtttttgctttcggacagttgattgaccggcctgagggtggatatttgactgctgatttaccaatgcctcggggagaaattgtcatcggaggtccaaatataattaaaggctatttcaagaatgaagctaaaacaaatgaagtctacaagcaaggaatcaaatacagcgatttctcagatttgtgccagaagcaagaggctgttaaagaagtgcttggatctttagcaaagattccgttcttcagcatcacatactaa

SEQ ID NO: 42298 - DNA, 1254 bp, Zea Mays
acgactgacagtgaaaaaataggaaatgactcgtcaacgcaactaccccaagtcgccgctgagccactctctccgtccgcgaatccgtaaatggaaggggacgaaatgctcagggtgaagctcggcaggcagggccttgaggtgtccaagcttggcttcgggtgcatgggcctcactggagtgtacaacgcccctgttcctgaccaagctgggatcgacataatcaagcacgcgtttgaggccggcatcaccttcttcgacaccgctgatgcctatgggccacacaccaacgaggtcctgctcggaaaggtgcaaattgccaccaaatgtggcattgcaggatttgatgcaagtggcatgcgtgtgaagggcactccagattatgttcgagcttgttgtgaagcaagccttcagcgccttgctactgactacattgatatatactaccaacatcgcattgatcagtcagtgcctatagaggaaactatgggagagctcaagaagttggttgaagaagggaaagtgaggtatgttggcttatcagaggctagtgccgataccattcgacgggcacatgctgtccatccaattactgcggtgcagttggagtggtcactatggaccagagatatagaggaagatataattccagtctgcagggagcttggtattggaatagttccatatagcccacttggccgtggcttctttgctggcagggcagctgtagaacgtgttccatcagaaagtctattgtctaaacatccaagatattctggggaaaacttggagaagaataaagttctgtatacacgacttgaaatgttgtccaagaagtatgggtgcacacctgctcaactcgctctctcctgggttcttcatcaaggagaagatgtggtccccatccctggaacaacaaaagccaagaaccttgacgaaaatatcggtgctgtaaaggtaaggctgagcaaggaagacctcgaagaaatctcaggcgcattccctgctggtgaggtggctgggtctagactccttggagtcttggagcctttttcctggaggctcgcaaataccccgcctccaaaatagcgagttcagatgcaaattcttggccatcctaccatttaggtcatgttatgttagatcatatctacatgatgcaaatgattgttcctgtgctcgcgcgtgaaaatgcatgtacctgaaacaaagagatgtaacagttggttctctgtgtggaacgtgctgattgct

SEQ ID NO: 42299 - DNA, 1541 bp, Zea Mays
gttatttatcaattagacatgctttgctctcttggataaatggaatgccgtataaaattccctcttcttcaagcaagagatggagctttcattggtagggctccaaaatgctgggaaaacatcacttgtgaactccattgctactggaggttttagtgaggatatgatccctactgtaggattcaatatgagaaaggttaccaaagggaatgtgacgataaaattgtgggatattggaggccaacctagattccggagcatgtgggagagatactgccgtgcggtttctgcaattgtgtatgcctttcatccccgatcaccagctgtcatgcttagttgtgtcgtcttgcacacatgcctattattttgttaagacagtgttcataccattctgataatgcaatttatcaatttatgtacaaattctttctcatctatcctacttttctaaacgctttctttaaggttctcaaagcctacttctctttctcatctatcctactttttctaaacgctttctttaagacagttagcttgcttctcgtgtcttagttgtcgtgtgatgccttgattataagtttatgcttctattaatttgctttttttaatatatactgatgtttctgtttattgttgtacatttttatgttgttttttccgtctatgatggtggtggtgcattgtttctttctttaaatcctttgctgtttttcttttatgtagataatgatgaagcatttttatctgtttctgacttctgttatatttctgaaatgatgagctggaagttgtgccacatgtatagttttttattatgatttacttccacagtttttatattttatacctcactgtattgaaacctgctgcatgaccttcttattctgaaggtcgtagctgatacaaaatcaataagaacttctagtgttggatatttatattattttgtttctgcaggtatgttgttgacgcggcagatcgtgaaaacatggccattgcaaaaggggagctccatgatctcttgagcaagccatctttgaccggaataccattactagtaattggcaacaaaattgacaagcctgaagctttccctaaacaaaccttcacagaaataatgggcctaaagacgatcactgaccgagaagtggcatgcttcatgacatcatgcaagaactcgaccaacattgattctgtcattgactggctggtgaagaactcgaaaaagaagaattgaacttaaatctgtactagctattaaagcgcacgccaatctctctatttttgcatgtcgcatagcattggagctgtaaattatgcaagaggtattaatcagggatgttgtgttcataattttgttaacctggtttagcagtatgttggtggacagcgtctggtattgtgcacgcccgtgctctgaggctgcctcctgtgttccactcaattttagctgtgcgatttgttctcttgtgttccactcaattttatctgcttgatttgtttcacattctttacgttaaatcaaacaaaactagaacgaa

SEQ ID NO: 42300 - DNA, 1636 bp, Zea Mays
agatcggagagcgaaagcgaaaccggcgccgtctctccccaccctcgcggtcgtcgcccaccgtttttattacatcttcttcttggtttcagctgcgcacagggaatccgtgaagctcctgtgccagacacagagagagcaaaccgtgcagcggtgcaggccagcgcgatccagctcccatcagtgggcgcgcccgccgtctcttgcgaccctgtcttcttggtttcttggcggggtcgtcctgctcgtgtcgcgctgcccacaacccgcgttctgtcgcggcatccgccgtggatcttggcccgggttgtccctatatcacgcagaaaaaagggccatccccccccccccccccccttcgccctcgggttcgttactgagtgtgccggagtggtattcgtgttccgccgggtgccgaggtggcctcgcggtcttctgccgtctcatcgtcgcctgctccccgtcgcgttcatcccgaggcatatcttggtcttgtaattgtataaaaagaaggtttggggaatcaggtttatctaaccagtggacatggtatcagttaatcttgggttagttcattatgtactggaccacatatatggaacacttcttcatcgcaccaaactaggaacaccatttttctcaaaaggatggggaggtaccaaacttgatttgctagagaagatggtgaagcagttgtttcccgaggcacgttgccaaaactggccaccaactgctgtgcagccaatgtggaaaacagtatgggagacaaacaattcttgtctgcgagaaggagttttcaggactacatgtgatgagcgactaatcgatgcattgccacctgagagtcacaatgcaagagttgcttttcttacccctaaaaatgttacacctgagaagatgtcatgtgtggtccatcttgcaggcactggtgatcacacatttgagcgcaggcttcggctgggtgggcctcttcttaagaacaatattgcaactatggttcttgagagcccctattatggacagcgacgtcctagcatgcagcgtggtgcaaagctccagtgtgttagtgatctgttacttctagggaaagccacaattgatgaagctcgcagtctcctgtactggctgcagaatgaggctggttacggcaagatgggcatatgtgggctcagcatgggactttgtacgagtgtgctccacatgccagcgctataaatcagagcacctccaccctgtcggcctcctcctacctctaccagtgccacgggggtctggacggacgtggcactggacttcgtcgaggcgctttttaaagtgcgtggcaagtctgtcatcttgactgtggtggacaggttcaacaaatactgccacttcctccccttggcgcacccgtactccgccgtgagcatggctcaagctttcttcaccgacatcgttcgccttcacggcgtgccgcagtccatggtgtcggaccgtgactcggtcttaacctccaggtttttgcgcgagctgatgcgggtaaggcttggcgcttaaagatacccttccctagaccccgcacagtgtgggaagtctacgacactaggtacgcccttttttttatacttggtttgagcaagatgaataccatctttta

SEQ ID NO: 42301 - DNA, 523 bp, Zea Mays
cctgcttcttgtgccgactacactgactcggactttactccagtttgcactaattcgcgattgcaggtcgctgaaacacttggatcaaaacagagcttgagatgaagcactacaccctgaaggatcagggtgtttatgctcttccatctactgcaaaatccaattggaaggatatctactgcatctacttccaaaacagcatgatgcaatacttgacgacaaaggaaaaggtccaaccgttacaattgaatctccacccaaaaggttcaaaatggacctctacgtattaaagaaaggtcggacacaagatcttccaacaactgaagattttctcagattatcagcagcttttaggttgtagaatgtcctttatataattatatataactgctcaacttttatgaagacatttcatgtaaatataacaaggtagcttgaaatgttgcaacaaacatactaccttctgccagtgctcatttaactctattttactttatacaaatctgctatgctctaaactgtc

SEQ ID NO: 42302 - DNA, 1484 bp, Zea Mays
cggaccacaagttctaatcgcggcggcggactcgccccgtccggccgcccctctcagggatgatttggtgattagggatccctaggggatccacgggggaggaattcccttgcaattcaattttgaatagcaagaggatttcttcccctcgggatccccggtcaccaaattagccctcacgctctcgctgtctcgcttcctggccgcgaagctccagttcagtctccgccactcgtgctctcgtagcgtagagcgaggccagggcgggaccagcgtggccggcgagaggggatggcgggctcggccgcgtactctgcttccgctaccaccgtggtggcgatggccaagggcaacggcaacagcaagggcgtcagaggcggcggctccgcgggcaccaacaaggtgacacgacctcctaggattacatctaatgttaagcagaacttgaggattctaaaattttggaaggaatttgaaaggaggcaaacaagtggacctcagcctgctactaggtaccgcaaaaagaaagtaataaaagaagtgcttcctgatgacacagacttctacgaggatccttcttccactcttcacttgtcaggacaaatgagggtttggaaattgcttcaccagttattctcgtggatggctacaatgtatgtggttactggggaaagcttaagaaggatttcatgaatgggagacaagaaattgctagacaaacactcattgatgagctggtatctttcagtgcagtaagagaggtaaaagttgtagtggtatttgatgctgccaattcagggctttccacacataaggaaacatataaaggggtcgatgttgtatattctgccgacttatctgctgattcttggattgagaaggaggttgaagctttggtggcagatggctgcccaaaagtgtgggtagtaacatccgatgcactggagcaacaattagctcatggagaaggtgctcttatctggagctctaaaagattggtcaaagagctaaaggaatcggagaaggaactcgatctagaactgaaggaaaccaggtcgacatcgttgcaaggaaaactcctgcagcacaagctgaacccaaaggttgtgcgcgcactgaaaggtcttaggaacaagcttgaagaacaagagcggggaaagaagtgaacaggaaccactggttgacaggaaagagagcaggtgtacagaagtggcgtttgtgcggccgacggacatcaactaacactggaggctggatccactgaaagtttgatgcgaacatcatgtaaatggatctggcttccttttgggtgcagtcagtttggtgtaggcaccatcagagccctgtgaaaaatagaagcactcacgcatggtagcagcttgttattgttgttagctgctgacgctttgaggcatgtcaacaagtagagatggattgcaaatcctaatcaatgtatattactttgtgtgtgttgttattgcgat

SEQ ID NO: 42303 - DNA, 4081 bp, Zea Mays
cgatcccggttgggaatggcctaaacgaacgaacaaggccactcggccccatccggcatccccgacccccgagcgtcttctttcgtctgctcgctctgcgctcgcatctaccatggagactagggtctagggtttagtgcgccgctgcctacatcgccgccatcctcaacttcctacgggatcctgacgaggcgccgtatcatcctcaacgccgcgaacctccgctcccacgttatcctcacgcccaccagtagctctcggcctctacctcgttaaggcttgatatttgactgggacactgggcaaattttaacaagtttcagcaatggggtttgataatgaatgcatcttgagtattcaatcccttcctggtgaatatttctgccctgtttgccggacacttgtatatccgaatgaggccctacaaactcaatgcacacatctctactgcaaatcctgcttggcatatgtagtggcaaccacacaagcttgtccttatgatggataccttgtaacagaagctgattccaagcctcttgtggaatcaaataaaacccttgctgagactattggcaaagtcgcggtctattgcctgtataataagagtggatgccaatggcatggagagctatctgcctgtgtcacacatggtactgcttgtgcatatgggaactctcctgttgtttgcaatcgttgtgggacacaaattgtgcatcgtcaagtgcaagaacatgctcaagtctgccatggcttacaatctcaaacacaacaagctgatggtagtcaggtgcagctggcaacggcaacaactcagccagtcatccaagattcatcacttgcctcagctggatctgctgcagctgcagctacaaccctaacaaagccatcttcaactacagccacagctgtaacagattctgcagcagcaacaggaggggcagctggtgcaaccacagcagctgtgccttcttcagcttcatctatttctgcttcccaaactccaacagctgagcagtggtaccagcagcagcagcagctccaatactcgcaatactaccagcagcagcaccctggatccaacccttacatgcagcaacatcaacaatatgaccaataccagcaggcatatcagcaatacatgcaacctccaatgcaagtaccatcccaaaatgtggtgcaaggatctgcacaacctgcttcttatgttcagcctcaagttcagtcctcccaggtgatgatgcaagcccaaagtcagccccaggtccatccattgacgagtcagccacagcttcaacagcatccagttcaaccccgaccccaaagtcaccctcatatttcccatgttcaagcaccttcaggtcagtcgcagcttcatcaaccaattcagtcagcccaagttccacaggtccaaccaagtcaagttcctctccaaccatctggtctccaagtacaatctgcagcacatccatctgctcctactcaagttggtaatcagcaatttgcgactcaagcaatggcgtatcaggtccagccacatgtacaagctcaacctccgcagcagcaacatattgttgcacatcaacaacatccacatatgcaagctttacccctacagcaaaatattcaacctaagatgcagctaaactctcaagttcagctacagcctccacatgtccagcagcaagcttacccacaatctcaggtctatcctcaacagacacatcatatgcactcccagaatactacatatgcacagcagcaaacccaaggtgctttgatgcaacctgtacatgtgtcccaccaacaaacacatgtttctcatcatcctgcaccgatgcgtcctccatcgtcaggccatcagccagctttgcagcatcctcaggcccagggaattcaacatacatcacaacatgaaaaacatattgggtttcatgctcagtggccaacaatgtattccaacattccttcccaagcaccaccacagggattgtctgtgcactcatctgtttcctcacaatcagttcaatcataccagcaaggaatgtcttcatcacaacagatgcattcccaacctggtcagccatatacacaacagcatgttactggcaatactggacaacatgttcaaacttctgctggcagacctatggcccatcttgcaccaacacagcaatttcagcagcaacatccagcaatgcttagaactgagtcacctgctgctgggcactctattgggcagggtcctttagatcttgaaaaacatacttcaaaatcagggaagttggataatgcaactattgctgctgtcggtgaaaataaaaatagtggtcctgagtcagttgtcatgagacctacaaagtcacaattgggtgatgaaaacatgaacagcgaacacaatggttttgttggtgttagaaaagatgcagtgcaaactggcattgtatcacacaatttagatggttcaattaggagggatgggaatactgaccaggcaggcaattcacatggcccacttgtgcagggaggcaaagatcacaaggcttcagatgcatctactgatcatgagaaaggacgactgtttcaacaggcatcactgcaaaatgcaggggcaccgggctcttatgtgcccccaggtgtggtaccacatccatctggaccagataaaatgcttcctcagcatatgacgaatcatggtcatatgcatggtttctctgaaaatatccgtcctccgctgcaacaaccatatggtgtgtttcattctggaacgataacaaggccatttggagagaaccagattcagatgccaatgccacagcctgggggtatcagacctggtgatggtatgattcgtccttgtttggttggcccattacctggacatcatggtgcagtgttgccttcttttgatcttgaacgtttgggtcagccacgtcctcttggaatgttgaacagcaatgactttggtggtgaggggttcaacgcttcagggggtgcagcgcctccatttgcaaaccacagaagtgcaggtttgcatgaggattttccaagaaagcaaaatgcaactgccagtcaccctgacttcctgtcacatggagcagaatttgatcatcacagggctattggaatgcctaatttcagaaatccaggcccatttgctcaagggacaagtggcggtcctggtggccctcctaaacaccagcttggctctggtaaccttcctgggaatttacattcttttgagggtgacatgcatccaggtgaccctcatcttgtcgctgaatatgctcagcatggatttcctaaaactgcagcacactttggtttgggtggattcttgagaaacgggaattctggttggtgccgaatatgcatgtttaactgtgggagtgcagagaatctggatttgcatgtacaaacaagggaacatcagcaatgtgcaatggacattgtcctgaaaatgaagcaagatgttgcaaaaaggcaaaaactgaattatggagggcccaagtcattcaacaacaaaaaggtttctgggaagggccattttcgtgggaacaggcgctagtgttaactgattaaaattgatgtggttttgaaggttgctactggtgcttatggatgtgtcaatggcaatcgagaattgagatcttttcagacattctgttcatgcggttcagcgtatttgaagggaaacttaaactgcaaagtgtaggataatttccagcagagggctcctgtcatacttgcatgtttccctaacgatggtaaggatgacatgctttcataatgctgatggtggatgtgcatgggtgctgactactgtttgaacgaactggccacgccttggctctcattttctgccagcatcggatgtttttgactgaccccagggcaccttatatctattgttgtgagggttaaattgtaaaatttctggcccgtggttcattccttaccaactaatgcactcaggtgtaaaagaaaattcctgtaatgtatacacaaacatttatatacaattttgcactgtaaatatactaatattagtttcaatggagtgcacccacaaattaatgtacct

SEQ ID NO: 42304 - DNA, 1990 bp, Zea Mays
tccaccgtccgtcccttccgttgcgccggcccggataaggtaaggagaggataccttcactgctctgcggctgctccgccacgccgccgtccatcgtccatcgtccatggcgtcaccgcaccttcctttcctctccttccccaaaacattaccgccgctacctcccccactcaagacccacgcccaccgcacctccctagccgccgctcctgctccgccgcccgccccgcctgacggcgcggggcccgccgcgcccacgcgtggggaccgcttcctcggccgccagctggccaccgaggccgccgcgcgcgtgctcgcgcccgaggacgccgacaggcggcgccgacgcaaggagaagcgccgggccttggcacggaagccctccggcctcgcatcctgctacggctgcggcgccccgctgcagacggcggaggaggccgcgccgggatacgtcgacccggacacgtaccaactgaagaagaggcatcaccaacttagaaccgttctatgtgggaggtgcaagctgctgtctcatggccacatggttactgctgttggtggccacggcggttatccagggggcaagaagtttgtttctgcggaacagctcagggagaagctgtcatacctccgtcacgagaaagcgctcatagtcaaattggttgacatcgttgacttcaatggaagtttcctggcacgtgtacgcgattttgctggtgctaatcctattatacttgtgataacaaaggttgatctccttcccagagatactgatttgaattgtataggcgactgggttgtcgagtcagttgtcaagaagaagcttaacgtccttagtgtccatttgacaagctcaaagtcattggtcggtatcacaggggttatatcagagattcatcaggaaaggaagggccgagatgtatatatactgggttccgcaaatgttggaaaatctgcatttatcagtgcaatgctaagaacaatggcgtacaaggacccggtagcagcggcagctcaaaaatacaagccaatacagtctgctgttcctggaacaacccttggccctattcaaattgaagcatttttaggcggagggaaattgtatgatacacctggagtccaccttcaccataggcaggcagcagttatccatgctgatgatctgccttctcttgcaccacaaagtcgtttgaaagggcgatgttttccgatgttgaattgagcgggaattcattgttctgggctgggctagtccgcattgatgttatcaagattaatatggtcccgacaacagaagctgatcaattttacgagactgaagttggggtcacattgactccgccaactggtaaggagagagctgaaggatggacagggcttcaaggggttcgcgagttgaagataaaatatgaggaacgtgacaggcctgcctgtgacatcgcgatctctgggcttgggtggatttctgtggagccatcaggtgtgccttcaaacagcgctgaggaagtttatgatggcggtgagctgcatctggtggtacatgtgcccaaaccggttgaggtcttcatgcgtcctccattacctgtcggcaaagcagcgtcgcaatggtaccggtatcaagagctgacagaggaagaagaggagctgaggcctaaatggcattactgatgctgctctgtttctctagggctggctctagcagtagtacagatttctgtaatccaaatatttagcagagtgttaggacctggtgatgaaatggattcagaaaacaagttttgaataaatctgtctctggtggtgtctatttagcactttgctttggcatgaggaaagaggaatcctcccatgtcctgcacatgtactcggaatgaaggaccttccagacaaggtattgaagagatttaccaatttaatttcggcaacaaaactgctctggtctggtctgcctttagccatatgtaagcacaaaattttcgttttcacgtcg

SEQ ID NO: 42305 - DNA, 3658 bp, Zea Mays
ctcagttaattgatgatccaaatgctgagtttcagccaagtcctttttttacggaacaactgacggcttttgaagtgtggcttgatcatggctctgaggacaagaaacctcctgaacagttacccatagttcttcaggtactgcttagtcagtcacacagatttagagcgcttgttctgcttggaagatttcttgacatggggccatgggcagttgatttggccctgtctgtcggaatatttccttatgtactcaaactgcttccaacaaatacaatagagttacgtcaaattttagtgtttatatggacaaaaattctctctcttgataagtcttgtcaggttgacttggttaaagatggaggacatacatattttattaggtttcttgacagtttggatgctttcccagaacagcgtgcaatggccgcttttgttatagcagtcatcgtggatgggcataggatgggtcaagaggcttgtatgaatgcagggcttatagatgtttgcctgagacatctgcaacctgagaatcttcatgcacaaacagaacctttgcttttgcagtggctttgtttatgccttgggaaactctgggaagatttccctgaggctcagttacttggtctgcaaacaaatgcaccagaaactgtaatatgcttattgtcggagcctcgacctgaggtcagagctgctgctgtttttgcacttgggaatcttactacattatcaaattgccctgatgatgattctgatgatgatgaaaaggtgaaagctgaaataaatgtagttcgaagccttctccagatatcttcagatggtagtccccttgttagatctgaggttgctatagcgcttactcactttgcgttgggtcacaacaaaaatctcaaatctgttgctgcggagtattggaaacctcaatccaaatcgttgctgaagtcattaccatcattggcaaatataaataatccaagcaatgtttacagtcccaataatattctccaaggcagcattggtcctgtgctgagggttggcagtgatagcggtgccgctggtcgtgatggacacatttctacaagtagcccaattgcagcaagtagcatcatgcatggctctccccagtcagatgattcttcccaacactctgattcaggcatattactgagggagaatgcaagtaatggtggtctcagctacactaggtcgaggcctgttgataatgtcatttattctcaatttatatcaactatgtgttctgtttctaaagatcctgacccaagaattgcaactattggttggagagcactgacccttataggtgttgaacaagtggccatgaaaagtactcgatttaacagtggaggtctacaccgaggagagacatctgcgtcaacctttggaatggcacactcttcttcttggagagatatgaattctggaagcaactcgatgaaatttatgacccctcctgttagccctcctcagcatgattatcttctactaggattgcgccgagtgtgttctatggagtttggacagcatcctataaattcacctgatggctttgctaatctccttttaagctctgctacaggtcccagtaatgcagaactaaagaaacttcccgaatcaacaatttacaactggagttgtggtcacttctctaggccacttttaactgcctctgatgataatgaagaaaccaatgctagaagagaagagagagaacggattgcactagatttcatcactaagtgccagcgctcctcctgcaagattacaagccaaattgctagttgggatacaagatttgagttggggacaaaggcagctttattattgccattttctccgattgtcgtagcagctgatgaaaatgaaaaaataagtgtgtggaactatgacgatgcacaaccagtgaactcttttcacaaccataagttgtccgacagagggctatctaaacttttgcttatcaacgagcttgatgagtgcttgcttttggctgcctcaagtgatggaaatgtacgcatatggaaaaattttgcttgtaagggagggcagaaacttgtaactgctttttcatcagttcagggacatcgagctgctggtcgcagtattgtgattgactggcagcagcaatcttgttatctgtacgcatctggtgacatgtcttccatcttggtatgggatcttgacaaggaacaacttctcaacaccattccgtcatccgctgatagtgccatttctgccctgtctgcatctcaggtccgctctggatactttgctgctggttttgctgatggttctgtcaggatatatgatgtttgctctcctgatagtaggcctgtctatgtggccaggccgcatgccccaagaacagaaaaggttgtgggcatagggtttcagcctgggtttgatccatacgagattgtaagtgcatctcaagctggagacattcagtttcttgatgttagaatggcagcagaaccctacctgactattgaggcacacaggggttcacttacagcattagcggttcatcggcatgccccagttgttgctagttcagccaagcagatgattaaagtgtttagtcttgaaggagaacagttgaggataattcgctacctgccatcttttatgggccaaagaacaggcagtgtaaattgcctttcttttcacccatacaaatcactcctggctgccggtgctggtcataatgctcttgtctctatctatgctgaggaaaattacaagtaagatcgaggcctatatctcatgctcatgataatgcagacacagtgcgatcgacaggccttacatttttggccaagtgatgctccacagcatggtgcagcttcaagatccaagatgatggtaagctttgtcacagagaaggtgttgatggctccatggctttcggtgcatattgcctgttggacggcgtgtgcaatttgtatgatacagtcaagaactcaagattcattaggcctccttgcattgtgaaccctaccctgatcctgccgttgaacttggaggccccatcaacaaattaatcatacctaagttaaccaaaatgtaaatagccagtgcattcgggttgtactttgtcagcattaatccctttttcaagtgtaaaaaggtctgaaggtgcttgatatgataaacatggcttggtagtggctgctgactgggcaagtggggttgtgcatatgggcctggtcgcacatttctgctcacagatgatgttgaatagatagatgtctgctcacagatgaggttgaatagatagatgtctgctcacagatgttgttgaatagatagatgcatttgtccagctaatatagcgctagatgggggtagcgttggcctgcatgaatgaaggaaagttgtcgagtgaggagtgaccttcattgccattctgtgccgcaacaagtctccatgtgttatcagatggccctgtagataatacatatatttgtagatgtgttttgttcggtgaattgtgctgaccgctgagtaaaatgtattgtgaacgttgttgataaatgctattgtaatgaatttgcaacaagaaaaaattatatgctattgtagtgtatatcacaactctggttgctttttatttttatttttttaaaaaaagatctttc

SEQ ID NO: 42306 - DNA, 1147 bp, Zea Mays
caaattcttattttacttataaactacgatgagtggtcggagggtagagtctccatgaccgaggagcaaccacgattcgaaccgattatacccggctgaggatccctaaccacacgacatatgtagcacttaacccttgcatatgtcaaccgttctcacagatcctccacaacgtgaactggtccacgctacccgggagcacagtactccctccgtccagcctctagccaggaggatacacgctactcccaccatctcccacgcctagtgcacaattgtcttttcacgtatggaatagccaggttcaggcttatcagggcatgtggctagttgcaaagtctccaccacaacaggcctacatcgaacggtccttaatcgacacagacgggtgaactttcctgctcaacgtctagtctacattacatattatttctcaaatttgatatcttgagagaggtaccctacttgaatgatgaaatcatcacggccacaatggcttcatcatcacaagtcattttatttcacaaactcccatatcccgtgttacacatcatcttttaaaaacaatcctaaattaataagcagggctaagcatcactaaattttgataaaacgagtattagggttgtttaatcaaggaaggaaatgcatcaactgtttgatcacacaactcctatcacctaatgcatcattcaaggtgataaactttttaagacagaaggaggtggcaaatgcaccggggcttgcctggataacactaggttagtgttgttagatgacgtccacttggcgaccaaccttttgtgttggcgctcgttcagattatccatctttaggttcgtctgactgacaacgtcgtcttgcggagatgttcaatctctgcattattctggggtcgacttgggtcgtcttctgcatcacatgattaattatcgtacctaaatgaaatgcataatgcacatgtatgaatttaaggaggaatagcaactaaataatgctatacgggagggaactaaacacttaatagcgaggcacaatacaactcaagcaagaaactatagccagacataggttctatgaactttctaaccaaaaattataacctaacttaaatagcacgccaactaagcaaagcagcacgctaatt

SEQ ID NO: 42307 - DNA, 490 bp, Zea Mays
aacaaaacactcgattgtggttgtggaaaacacatgcatgtacagatcaatgcggttttcaaatgcatttatatccgttatccaacctcgtattactttgattatgatcaagcgccgatgacaacagaaaacgtacaaacgtacgacaggatctcgtcggacaaccggtaatatccgacggctattagatggtccgccggagataagccgttttatggtaacggcgctcggccaccgtttcacctcactgtttctctcccgtcgtccacacgtatattctctttttcctctcgccgtgtgccacagtcgtcacccgcccaacaccggtggccacacgccgcctccacctcgcttgctccttcggccgtccacacacgtgcccacgccatctccgcgcgcccacgcgttcgcgaccacgcacccgacaccgatgcccagcccgacgccgccaccccacctgacacgcccgtggtcgaacgccgcggttccg

SEQ ID NO: 42308 - DNA, 4081 bp, Zea Mays
cagcatcaccatgcccccgcccgaccccgcgcatcccgcagcgctcagcttcccgaaaacctatcgcgtcgtagccgccatcaggcctccgcacaatcccctgcctgctcgccacgcagccttggcgccgtgaccgccgcctctgctccctaactccgccccgtgacgcccccagcccccaaaccacgcccgctccccacgcgatggccgctcatcccgtcgacgcgcccaccgcagttcacacccgcgccccggctcccccgcctcaccgcgcggctctgccagtgatcgtcgattcgcctcgccgcgctgtctgagagaaggaaagaggagctcaggacagcagcggctggcgcgaggtgcccggaggcagacgtgacgacgacgaggcctttgtagatctcagcaggcacggctcgcctccgcgtgggcaagctctgaggcggcgtcccttcccttctcgtcggcttccattctccaccgcgctcactccatttttcgtcgtgatcccttcctctccatgggcttccatgaaccctagagctcgcccgtccatggagtacgtgctcaccatcagcggatccccaggtcgtacctactaaacactagctcgtatggtcctgatcccccaggttctaccctaatccgcagcagccttcgcctcgggctcacctcccgctccatctcctctgtttcctcctcgcgctctgcagcggcgtctcgatccccgaggtcgtcgccttcttcaaccacattgccccttccgttgccaattagctccccgatttctactactcttgaccggcattaatttggcgctactatctaccttgatttactagcaagacattaacctttgtaatagttttggaactgggtaacgtgaatttgggtgtcaaaattcagattctgaagttgctcatttcctggaaacaatatttgttcgtttttatttttttaattatcacaaccactatgatctgctccctctgttacagagtttaagatgttttttccttaagtcaaactatgtattaccagaaaactaagcaaattggcaatcaaactaactaattagtgaggggtaagttagtctaattgtcagactccttatttggttctaaaattgcttagatgtcttgtatttcaggatggatggagtgtttttttgttgtagttatctattctatctgatgagcgtttctttctataatagagaccatgtttctttctataatagagaatatgatgagcgttttgactattggaacttcatatgctaccttttttagtgtcatttctatctttgcatattttcaaattacatgtcatcctacagtagtggatgcttcatcataactgatcagttaaattatctaaaacaagtagctaaatataattaatagtaaaaattacagatttaagggttataagtaacatgtatttggtgttagttttttacacatgtgaaagctatttgcttcagtacatagatctctgcagatgataaagtaatactaggcttgatagtattgtccatcatttgcttcagtatatagatctttgcttcagtacatatctctcacttcctatccaagtgtttgctcccagttctatagcactctgcagatgatttgcttcaatacttagtggctattttttctactacactggttaaagaaaaacagagaaaagaaaatctgcatgtgtattatagttaacctatcatatatatatgaaagtgtaagttgttgccttgaaaaacttgagatgcactcaaataacgcaagcagagagtatttactcaatctaaataatgaaataaatttacttagtttgatggttcacataacacaacaaccaaataaacaatttaaattagtcagttttttgtcattctaaataatgaaatagttattattaataccatgggatattcttattttgtgaaggcatctaccagaataggaaaaggttattattaataccaaggttgctagcttcgaaatacctgaagtgctactgctatcagttcttagactttggtttaaatcatctaaattttttctgttgttctgtcaggtctagacactctatgagttcgatgatctcgagagcatcattgataggacactaaagcgcgattttgacaccgaggaagcactctggttgcttaagataggtcttgtgtgcatcccggatagccctaagatcaagccctccatgtcaatggttgccaagatgctacaaggtccatttggaggcccaggatgtcaaaatcaagaacatgagaagcactttgagcattttacacctaatatgagcaaagcacgaaatgaatctgcatttcctcaggatgaaattgactcacatagagagcatttttataatgaactaacctcagattcaattgcttcaaagaagccaaaaataaggaagagagaaaataacaattctgtttcaagttctgctcccaacattcctaatactcaaggtggtggaggatttctgtggaaaaccgaaattcctgaagatggaaattgcggtgactggttgtcaatcccacttggtgatgttaaggttctcgtgaatgaaattacatctgttcgatccaaaaggatattgcatgaggttcctatggatacagttacaaggttattggatgtgattgatcgtcagattcgatattctcaaggtttgtcgatagatgtgaaagaaaatgtgagttacttaccatgtcatagtagtttacatgattattcgtgttttgtagccaggattaacctcactacaatgctctagcagtctactactctacttgcctttcttcgattaattttcctaaagtgaaatcgtgtgatagttgttcgttcggttagcagaaaattataggagttacagctcagttggttgtagaagtccggtagccttgcacaatgtttagaagaagccataatattgagcagatgacggtcaaaaatagcactggattaagaagctgttttttggctcacactaataactttgtttgtgattttggtcatcattttcctgcctggttgggttgcatctgcttgtcattcttgcagtcagcatgaacaaggtcgaggcattgtacaggttgttcaagaagattggcaacaccttcattgatgatgggctgattaacaaggctctttcaaatggcaagcccactgttgttgagttttatgcaaactgggaactagactctgagaaccatgttgctgatgcggagagcattgtagccaagggcataagagatggtgcaattgatgccaccatagatcaagcaaatggctggatggtatggaaggaaactggtgatgtctactctacaaatgagccatagatcatacaaatgagcccttgatgccacccaggattgggtccgccccctatctttcagtattcattggtttctatgattctgctcccttgtgttgctactgtttgtataggttttgcagagcctgcgatttatgtgagttaacatatcgatcttgaattcacatcacgggaagacacgtggtatgggagttgggcgcaagctcaagagccaccgcaggaaccagaggtgggctgacaaagcatacaaaaagccacttgggcaatgagtggaaaaaaccttttgctggatcatctcacgctaagggcatcattctggagaaaattggtattgaggccaagcagccaaattcggccatccgtaagtgtgcccgtgttcagctggtgaaggatggaaagaagattgctgcctttgtgccgaatgatggttgcctaaactacatcgaggagaatgatgaggtgttgattgttggatttggtcgtaactcgtaagggtcatgctgtgggagacattcctggtgtcaggttcaaggttgttaaggtttctggtgtgtcgctacttgcactcttcaaggagaagaagccaaggtcagtttggaagaaacattctcctttattcacaaactatgttgattttctgaccaagtgtccttccatacagatccatagaaaatatagtacaggtggcagcacggagaagacgtttgaaagataa

SEQ ID NO: 42309 - DNA, 312 bp, Zea Mays
gatcgcgcgacacggggacggagtcagtgacgacggcgacgctggacagtgacggcggcgatcaccaccgtacctctgcaggtgcggctctgcccggaccccggcccgccggcctgtgccgctgacgatgacgccggaaggaacgaggctgacacggacggtgacactgagtgactagcgcgcggcaggatcttggattcgatggatcgatcgatcgcgatccgttcagctagcccgacggaagtgacacatgtacagagagagaccgttgttgcgtgtccccgagtgatgtcgatcgatgaacagcgatgg

SEQ ID NO: 42310 - DNA, 1481 bp, Zea Mays
cgggtttccagtgaaccgcccaaaggttatttcggtcaagtcgcttctctcagtggaaacccaaaaaccctcttcgaagttcgatcccagggccgctccggcggcggcggcgcgttgagatggctgacactgacagcgcggagaccgagaaagagaagatggtagcggatgatgggggcaagcccgcagagctctcgaagagcgcgaggaagaagctgcagaagcaggagcggcaggcggaacgtaaagcggcccgaaaagcggcggagaaggagcgacggcgcgccgacatagagcggcggaggcgtgagtgggaggacgctcttgccgccgcgccgtcggatgaggcccgggccgagatggtggcggcgcggcgggagacgcggcgcgagcgggtgggccggcgggcggaggagcgcggggcgcgagctgaccggctcaggcgcgcggctgagggcgcgggccagaaggtggtgctggacctcgagtttgcggaccttatgaggcccaacgagattcatagcctcacgcagcagattatgtactgctatgcagtgaatgggagatctgcaaacccagctcacctgtggctgacaggttgcagtggtgaaatggcgacccatcttcagagaattcctgggtatgataagtggatcattgaaagggcggccaggccttatattgaagcatttgaagaccgtaaagaaaacctcgtgtatcttacagcagatgctgagacagtgcttgatgatctagacatgtcgaaaatatacatcatcggcggcctggtggatcgaaacagatggaaaggcataacactgaagaagtcagctgagcagggaattcaatctgcaaagcttcctattggaaactacctaaaaatgtcaagttctcaggttcttacagttaaccaagtgtttgagataatgttgaagtttgtggaaacaagggactggaagacggcattcttccatgtgattccacaaaggaagcgaggagaagctgagaccagagatgacgtggaaaaaggaggcctggatgacaacgatggcgccgccgaaggggctgcagatggagaccattccgaggaagacctgaacaagggcttcggtgaggaggaggacgatgatggggacgaagagctggaagaggaagaagcagatgtctccaacaagaggcagtgtgttagagttgaaaacggggaagctggggatgccaccgtagcagaggtggaaccaaacaacggcggcggcggcgggggcggggaccgctgaacagtgaacagcaccaccacgccaatgaatcgagcaatggtgacaggaactgatgaacagcgaagctcacgtttgtttctctttcgtatatgacagcattagtttttgttttccttttttcagcgttttctctggtatttatgtattttaaacaatttatgttgtgtatttggaactggcgatcttgttgctgtcattttactatag

SEQ ID NO: 42311 - DNA, 2227 bp, Zea Mays
cgcatctgcaagatattagaatcccgcctgcgtcctccgcctgaacgcagagccttctattgcggcgccggcgccggcgccacgacccttctccgccagtccccactagagggcttagaactgcgtggaccacccggcgcctcttggcctctctcgctccgtccttgcgggcgcgacgacggcctccgacagctccgcaaagtcatccaagcctggaacagttgcttgtaggaggtggatgggatattctacacagtctggtggggagtaatgaatggttcatggcacagcctgctatctcagtttctgatagatgcgcgtcagctactggttgctgtgtcgaagataacaaattttcaaagctgtcgacctccagggatccaaaaatctccctcccaggtggtgctgcctgctgcgtgcaggggagtgagcgtggctgcgtgggcaccctcggggtcggatctgaagaggaagaaggctgtcgcgctgacctcgactcgatgacggccagaagataaccgacgacatcggaccgcatccgcgcctcctcgagaagggcgccaacgtcatccttgctagccacctgcggttttacactgtgccagtctctgcacgggcagggcttccgtcttggctacaattgccacgtattcacccagacggcgctgttgaacgcgtacctcaagtgcgggtcggtggccaccgcttgcagggtgttcgaggaaatgccggtgaaggatgtggttgcgtggaccagcatggtgtctggttatgtagactccaggatgtacttaaaagccgtcgaggtatttaacgagatgagaggtgctgatgatcttgtgtggcctaatgaggccacagtggtgtcacttgccactgcctgtgctggtctgggctcgctggagcatgcaaagggtctgcattcgtatgtggagaaggctgggttggaggacgagttaattgtcaggaatgcattggttgacatgtatgggaagtgtggctgcattgagtcggcacatagattgttttgtttgatgcgtgagaaggacttgcattcatggacaacaatgatttcagggctgtcttctcatggacgcggcgaagaagcggttggtttgttcttcagcatgtgcgaggagggagtattaccagattcgaccacttttattgtggttctgtctgcctgtagccatgctggactagtagatgaggggatacatatcttcaattccatggagagtgagcacaatgtcccccgggacaccaagcactatggttgcatggtggatcttttcagcagagcagggcttgttcgccgtgcttatgaattcattagcatgatgcctttcgaaccaaacttggagattcttggggccctgctgagtgcatgcagtatcaataatgaactggagattggggagctcgtgctcaataagattgacatggtctgctcctacaaaggaggtgctggtgtgcttctgtcaaatatatatgctaaccaaaatctgtggcatgaagtggataccattagaaggaagataaggactgaagcaattgtcaggaagccacctggtcatagtttgattgcagcagaagtttcttccatgactttctgattggtaattgcatagatttgcttttaatgaagctgtggtcctgattttgcgaaggaggcttggggtgtttgctttcaacaatccctgtaggccagtcgaaatggaaggtgttatgaggagggtgatcacttcggacaacatctgctttgtaaatgctgcggtgcgattgccaagaagctggctgagcttacaacgctaacggatgtcacaaccatcgtcggctaggctggctgacaagatgagccacatttggaccggtggtggcgcgagcgagcttggagctcttggaaggcaaggcgctaccaggtgtccttgtccttttgtttcggaccatggtgtaacactgcaaagcttatggtttgtattggacttgggataggcttgccgtcgagttttggtagatgagtggtgaataagcttgatctataccactgttaccccctcacctaaaagaactatacaactgctgtcgttacctctcgttggctaccatggtgcactgccatcacttggatgacaaaatcgtcgccatgcactgattcaatgcaatttattccatgcccattaatcccatgccctcgtttaaattgttataattttgattattccgg

SEQ ID NO: 42312 - DNA, 1066 bp, Zea Mays
cccacgtatgccactatctacaccagcttttcaaccgctaaccgctgggtctctgcctttgtgcgcgctcggcattctgcgcagtagcgtccttcgctcagccgacgatggctacctcgccgttgtcctccaccactgggcgtcccctcgctgccggtctgttacaccgttccttgcgccctgctctgaccaggctcgcccaagtcgtgacctcgccgaatcgcgcctctgcttgacgccggtgatggccgccgttggtccctgcgtccttccccggtcgtctcacctcccctcgacgcccctattttttccctagctccggcgtccatcgtgtcctactccttccattcgcacagcactgctctggtggtcgtccaccccagcgcccagcgctgctctcgtctcgctgggctttgtctcgccaacgtcggtcgctgctccaactcacgttcgtggacgccgtatctgcgaccccgacaatccctacataatctgtgttttgtgtttgtcgccaaataaaatccctggcatttcggggagaggaagatgaagtcggctcttcgatcgctaggtgttcggtattgtgcacaaaccagaaattgatattttccatgcaaatatctaactggttcaaggtacgttaattgatcagatgatgcgtagaaccaaggccgaggtgaccacaagatgtcgttaagcgtgagcttcttcgcaacgtgatactgctgaatgaacttgaagattgggtgatcggatcaagtgccaggatgtgagattgtaacgccctgaatttggggtagattttttcttctttttactcaccaaattcaggcgttactctcttttctcttcctgtttcgctccttcttcccaatttcaaagcggtgtagtggtgtccgtattacgtataaacaaaaactaagttgtcatgggtgttgcatcatgccaaatcatatttctttgtttgatgtcgtgcttaatcgcgtgttttgctcagtctcgttccacgatttgaattccgatctgtggttgtgcgtgccatgggattttgacccgcggtgcggcc

SEQ ID NO: 42313 - DNA, 2199 bp, Zea Mays
atgagccgccactgtgtgactctccctgtgatcatctttggattactgcagatggctgtggctctctactctaatccaagttcaacgcatccgaactgcacggagagatgtggcaacgtcagtatccaatatcctttcggcatcggatccggctgcttccggcagcccgatttcagcctcacctgcgacgacggcggcggcggcggcggcaaccagccgcccaagatctttctgcatgacggcatcaccgaggtcttgcccgattccggtggcacggtgggtctgtcaaggcttattgatgtagccatttcccacaccatctttatggcacctggtattcctagttacaacttctcgtggaatctcagttctttcactatgtttgacggctcattcaacgtaactgggtgtgacttcgatatatatattcaagaaccgggcacgaatggttccttatggccatgtacaaatcgctgcccccaaagcatcaccaccgagacggtggccagacatgactgcaatggaactggctgctgcattgtttaccttggaattagtgttcgtgatttccagctcaaatttgtgcgccacgataatggcgctagaggtgatcatgatgctctctctaatggaagcgccctgtgggatacaattaacattaccagcaactgggcccaaatatactgggatatagatgatcaaccgacatgcgccagagcgaaggaaaagaatataaactacgcatgtgtcagcaaccacagccaatgctttgacgatgaagtgtttgatgttggttatagatgtgcttgtaacagcggttacgtaggcaatccctttgtagttgatggctgcaagcgtgacgaaggatatagtccaaatcaactgaaggagaactgctcgaggtcctgtggtaatatcagtgttccatatccctttggtttagaggaaggctgctctgcaaggaagctatttaaactcaactgcacaaatgcgacagcgtctatgctccaattcgatgacgaccgtgttgtggcgtttataaatgttacagggagtctcgtgggcatcaggtttacctcacaattcgaagatggtcagcttgggatatatgtatcaggtgaacccgatctctttatgggtcttggggaatcagtggtctcaatgcactgggcagctgccaatcttacatgcgacgaggccctgaaaaataaatcacaatatgcatgttgttcaaacagcaaatgtttaggagtcaattcaaaggatggttatattggatacagatgcaaatgcttagatggtttccaaggaaatccatatagcatcagtgatggttgtgaagatatcgatgaatgtaaaacacaacacatttgcaaagagaacgaggtatgcaacaatgttgcagggagctactactgcaccaaaacaacaaaacagcagggtcttgttttgggtgtgattattgggctttgtgttggctttggcattctagtatcttgcttgggcgggatgcttgtcatccgtagatggaaaagggacattcaaaagcaactacggagaaaatactttagaaaaaaccaaggacttctcctagaacaactaatatcatctgatgagaatgcccgcaacaatacgaagattttttctctggaagagctcaagaaggctacaaatgactttgatacatcacgcatacttggacgtggaggccatggaatggtttacaaaggaatcttgtcggatcagcgtgtggtagcaataaaaatttccaagatcatggagcaaggtgaaatcgacagttttatcaatgaggtcgccattctttctcagataaaccaccgcaacatagtacgactcttcggatgttgtcttgaaactgaggtcccacttcttgtgtatgatttcgtatctaatggttctttgttcgaaattctccatgccgctgaggcaagcaacgatttccagttgtcttgggacgattgcttaaggattgcattagaggctgcaggggcactttattatctccattcttcagcttcagtctcaatcttccaccgtgatgtcaagtcctcgaatatacttttggatggaaactacactgcaaaagtttcagattttggtgcgtcaaggttggttcctattgaccaaacccatgttgttacgaatatttcaaggcacttttggctacttagatcctga

SEQ ID NO: 42314 - DNA, 127 bp, Zea Mays
tcttagggccagtttggtgtcttacgcccgacgccacgccgcgcctaggccgcggcggccgaatcggccgccacacctgcggcagcaaaagtctggcgggaggtggtagtttaggcgtaataccaaa

SEQ ID NO: 42315 - DNA, 2822 bp, Zea Mays
caacttccagatcgttctcatcccatcgtttcctcctctgctcaagcacggcagccagtccagccaccatttgggtgctcatctccctctgctcggcacccagccccagctcgcccgagctccctgcgccgacctcatcctccccatggtgcgtcaccttctactcctctccttcccacggcacagcagcgcccctgcagctccccttctccagatccatggcgcccaacaccttgagcgcccctgccgctgctcctccaccgggatctcctcctccactaggcgtccaggcttgtcccaccatggctgcccctcctccatctcctccctccccaccaggttacccagattccatggccgccgccgccccagccatctccctggtggccgacctcgcccctgccccagccacagctcccccttcggccctgctgctgcaagcactcagcccctcccatggcacacgccccatctgcaacaccgtcgacccccgacgaggtcctgttctcgccctgtcgttttagtactcggcgtcgattaagtagatgctaaccgtgtgtatattcgtgtgttcttgtgaggagaaatcccatgatttgggggaagacgaagtccaagcacaacccccgccaatcgctcgatgaaaaatctaaaccaaaaccctcagcgttttcatgggttccggagggattttatgttggtaaggtgttgtgcggtgtgatctccaattccctattgctgatgtcttactccatcatgaccttagggctttgatgattgctgtacaaggatgatatggcctcccgcccaaagctgtctggtattcagaagcaggttttggcgctgtacaggggattccttcggacagcacgccttaaggcccctgaagaacgccgcaggatcgagtctgttatcttggcagagttccgtgacaacgcaaggagtgttgaccgtaggaactttgtacacatagagtacttgttgaggagagggaagaagcagcttgagcagctcaagaatcctgatattactggactcgctacccttgtagtaaagaaatgagcaagagaagaaggaagacaagtcagacaaaacagaagacgagaagaggttcctaccataacacttaagcaaggaatcctgtacacttctctcctggggttgtgacttgtatattgtcaaggatcacttggatgtggtaaatgctatactggacactgatgatagctgcataaggattgtgcgaaaaaacgggaagacatccctacatactgctgcaaggattggataccatcgtattgtcaaggcactcatagagagggatccaggaattgttccgatcaaggataggaagggacaaactgcacttcacatggctgtgaaaggcaagaacacagatgtagtggaagagttactgatggctgatgtttccattctcaatgtgcgggacaagaagggaaatactgctttgcacatagctacatggaaatgggagaattttgggattatgaaacaccgcagacgtggcttcgacgaaacggaggcgtaggcgagggattcgacattatgaaaaaccagagaagatactacactctaaaatggacatgaatcctctattaccagggaaggatgatgtttattacactgaaacagacgctgtctcacatccgttacccgcactagacgcacccagtctttctacagagagaatcgcgccgttcttgaatctgccattcgctgaatctgccattcgctgctgttgtttctggacagtgaagcagtattccggacagtgaacaaaaatctgggaacacatttcattttcactgtcattggctaccagagtccgggaacaaaatctgggaacaaaatctgggaacacaaaaatctgggaacaaaatctgcctttggctaccagagtttattgctcccatatcattcgctgtccatttcactgtccattcgctgaacacaaaaagctgggaacaaactcattttcccagtgaacaggtagcacaatttagttcacaaaatctgggagcacaatttagttcacaaaatctgggagcaataaacaggttgaacaggtagaacaaaatctgggagcaataaactgccatcccagaacaaaattcgcagctcacatttcagttcacaagctagttcacaatttagttcccaggtaccacaatttagttcacaagctagttcacaagctcacatttcaatggagcaatacacaggtagcagtttgacaagctattacacaagctcacatttctgggagcaatacacaggtagcagtttcacaagctatcacacaagctcacatttctgggagcaaaaaacaggtggcgtagtagcagtcgtgtgttcatcttcatttgcagcaacgacaagttcacggcttggtgcttcatcttcatttccagctacaacaacgacaagccacctgctttggcgcggactagggttgtggtcgcagcgccgccgccacctgctttggcgcggggccgcgagcagcaagggagaagacgcggagtttggagagaaggaggtgcagcgccgccgccacctgctttggcgcgggaccacgggcagcagatctccgggcagcaggggaggagactagcaggggagggaaatggagattgaagaaaatgagatggaaggaagaggcttgacgggagagagaagaaccttgaagagagaagaacggctctggacggcagaagaaaacggcgcgtgggctgatagcgacggaagatcattattcgttctcctgaacgactaataacgatgctgtctatcttgtttttcag

SEQ ID NO: 42316 - DNA, 618 bp, Zea Mays
cccatgcatggccaaaaaccactatctagaaatttctgatcggttgcaagagaatcatgacaacacccagccaagtgataaccataactattcggtagatcaaactcaactgccctttcttcaagccctactgagagtacagatgaaacggagtcatcgtttcttggacaaactgccagtggttcactggcatcttctcacagataagtctatagatcctacgtatttggtagtgatgacagcaacagcagcagtaggagctgcaactctactgcagagagtaattcagatacggaccaagccaactcctcccaacccacgaaggccaagttcagttcaggcgtttcactcttcgacatcctgcgcaggacatcagagcagagcaatcaggaaagctgtagcacagtcagcggtgcatcggttctcggcattcaaattattaaagaggttttctagggtgagctcgaaaaattgacaactcccaggaggttcaagacagatcacagtctcacagatggtgcctgtatggttggagattctgaattctgaccactggcctggaagttcacgacgaaagctgtctagaaaaaggcttcaggcgaggctcgtgaaaaagga

SEQ ID NO: 42317 - DNA, 317 bp, Zea Mays
agttatctattcccagatcgattctcagcactggatcacgcaagttcatccgattcaacagtgcccctgttcttatcgcgatcagatattttcagagctcgatcttcagttcttgtctgaaccgaccacctccttccctctttatctctggatttttgttaagaaaagagctatctcccttaatagaatttgttcactatacatcagtctacaacgttactataggattcttggatcaaaatcgatcggattcaaagatatagcgcatccaaaatggctccattccactgtgaccatttctgtcttcagattcagtt

SEQ ID NO: 42318 - DNA, 1047 bp, Zea Mays
ggcgattgtccctcggcagatggatggaggacacgtttttctttaacgatttccgatttgattccatggccggctggaccgattccagcgcatccctcctcctcgtgatgcccgctccccaaggacctgtgcctgcggcagcgggaggagatcaggacgctcaaatacgtcatcctattcctgcacgtggagccggagccagagctcgaccgccgcctttgggacgatatttccatgctcaccgaccagatccagtgcctcacgcaggagctcgccgctcaggttaaggccgagaagcactcagcaaggtcgtgctttgacgaggatggatactgatcttcccctaggacgtcggggtttaacgaggataccgctttctctctggtgtgttcgattactccaccatctcactctcacagcgaaacgattggcatgtcgatacgctgtttccaaaacaattgggccctgtgtacctctccgccattctcgagtatctcaccgccgaggtgttggagctggctgggaacgctgctcgtgacaacaagaaccgtatcgtgttgtgccacatctagctggcggtgcggaacgacgaggagctgagggttcgaaggaagtagcagtgttttttgttcctagagggaggaagagatggcaaagggggaggtgccggcgatcgggattgacctgggaacaatgtactcgtgtgtcggcgtgtggcagcacaaccgcgtcaagatcatcaccaacgaccaggggaaccacaccacgccgtcctacgtcgccttcaccgacaccgagcggctcatcggcgatgccgccaagaaccaggtcgccatgaaccccaccaacaccgtatttgatgtcgctcttcctggatgcatgcagacgcaaagcgattgattttatagcaaacaactacaaaatcgtggtagaagttgaattgcttctgtttctgtgggaacagtaaacactgaggtaattccagtggcatagcttcgatgctatgtatgactttctgaagaaaaactgggagatcacaagatgggt

SEQ ID NO: 42319 - DNA, 1033 bp, Zea Mays
atggaggcggaagagtacggagagatgatggagagcgtggacgaagtcacgtttgcgctcgacgggctccgacctgcagcgcagaagcggacgcgacgagccagcctgctcgcgctgcgcgggatctgcgcctccgccgagcgccgccgcgtgccgccgcgtgctccggtcccaaggcctgttagcaaggtgctttgcaagctgcggcgccttgagcaaggaggtccatgtgagttagaagttcttggaaagaagggtatggtccaattaaatggaaggtccatgtgagttagaagttcttggaaagaagggtatggtccaattaaatggaaggggcttagcacgagtaggagtgtgcgctcgcgacggcggcttgcacaggaatcactggaccaagataaagtcggcggtgaaccagattgagacgcacccttacttccagcgcgactctcttgtcaagttctgccagaagcacgggatctgcgtgaccgcgcacaccccgctgggtggctccaccaccaacgccgagtggttcgggagggtgtcgtgcctggacgaccctgtcatcaagagctcggctgagaagtacggcaagacgccggcgcagctcgtcctccgctggggtctgcagcgggacacagtggtgatccccaagacctctaaggtggagaggctgcaggagaactttgacgtcttcggtttcgacatctccggcgaggacatggagaggatgaaggccgtcgaccggaagtaccagactaaccagcctgccaagctctgggcatcgacctgtgaaggcaattgtaaggatctgagaaccttgagtggtcgcatgaaaaaggttggacagtacctcttgcgcaggcgaacacattatatgtctcagtttgagaaattagctatggagctcatgccaaaattgggagaacactttgttgaagaaatgataaacccaagcatgtatggaagccggtggtttatcacagttttctcgtgttccttcccatttcatctaactcttagagttttgtaa

SEQ ID NO: 42320 - DNA, 278 bp, Zea Mays
cttgccttcaatagctagggagatcctcgatggcagcctcgggagcttgctcctggtcttcctcttggatagttccttgctcggggatgagcacgtactctccgtcagcgagattacaatctaatgaatgcaatgagtaagatacatgcatgatatgatatgtgctttagcatttaaactttgatggtgaaagatccacttaaatcagatagagtttaatcttgctactaaagatttttggtggtgtacttagtaatttagatcacactcagttaaaa

SEQ ID NO: 42321 - DNA, 339 bp, Zea Mays
atgtttctaaaacctgcaaataaacgacaacacgatagttgccaacacagaaaactacatgatagctacataataaacaatatgctgaccagtatatgctaaacaatatgttgaccagtatatgctaaacaatatgctacaagtatatgctaaacaatatgctacaagtatattttgatcaggagtgccctgttgcaagggcaggcactgcaggtacccccacccacccacaaaaaaagagaggatctgagcactttatttttaggtgactactaacatatgatgttaatattgttacaggctcttcagaggttttttgcatcacttgttcaatctgca

SEQ ID NO: 42322 - DNA, 771 bp, Zea Mays
atggatggcccatgaaaggcgagcctgcctcgtcggccgtcgttccttttggcatttcacaaacgcagagacgtttctcctcgactccgcctcccccgctcctcaccgccgcgccgcctcgtccattgccgccgccgcatcaattgacccccggaccacgcgaatggccgctgaagactcaaaagatatcctaaagaagcgtctcccaaagaaaatcagagaagtccctgactgctattttctccctcgtcgatcatggccttctgcactggcaatctacggtgctgtatgtgctgctagctttggtgcagggatgcttcttgaggtttggataaacaaaaagatcaaagtggcattgtctgggagatggataaatgatgcaatgcatgctttgttgtggtgaatcccgcgttgtcatcatggacacagctagctctgaagatttctggtggaaattgacacaaccttgtttctgtatctggatctattatgcataatggcagaatgatgtcacaaacctttgagcctcattagtcgaataaactcaaattatccaaacagtataagaaactgttgttccggtgggcactgtcgcctatgcactggtaagcatcagtctgaacatttcttgtttctgatggttcggtggcatgttgtgatcaaatttggtgaacaatgacattttttgttgcgtcgatgacttttgaggggcagcggtacatcaaattatcgtgcattcacctgtatgttaagcagaaactttattgatta

SEQ ID NO: 42323 - DNA, 405 bp, Zea Mays
gtccggtgcaccagaggactccaacttgaactcgccaccttcgggaatttctagaggcactcgcgctataattcaccggactgtccggtgtacaccggacagtgtccggtgctcctcggaagagctacctcaggagctcgccagcctcgggaaatcagaacgcctgctccgctataattcaccggacatgtccggtgtacaccggactgtccggtgaaccagcagagcaacggatacttcgcgccaacggtcacctgcaggcgcattcaatgcgcgccagaagcgcgcagaagttagacacgcccataatggtgcaccggacagtgaatagttcatgtccggtgcgccaccggacatcaaggcgggcccagaagtcagaactccaacggtcagattccaacggca

SEQ ID NO: 42324 - DNA, 2574 bp, Zea Mays
tttttttttctttttcaaccaatagatcaccctgaagattgcaatatttcatcaacagaagagattttgaatgagataatccgggaggaaggattcatgaatgagacactgaacagtttatctcatgttcatattatttccgacaatgatggttcgtcaaaagcgagttatggggcatcatcttttcaaagcggatctgacaaagcaataacttacttctattttgatttctctgcctcatggccacgtactcctagttggatttctttactgcgtggtcacacattctattccagttttgctaggatattcaaaaggcttatacagcaatgtggaatgccagtaatctcttctcttcagagtacactagaagagtttttaatttcaaaagagagaccaaggcaatgtgtcgctgctgaagcgatggctgggatgctgcactctgatatcattgggaatctggaatgtgagaacaactggttgatggcccagttgcataagattatgttagcaccatctgtggagtcagctcctgaatgggcagcttgtattcgatatgctgttacaggaaaagaaagagctggaactcgtgctcctgttctcaggcaaaaagtattagaatgcttatgtactcctcttcctcattccatggcaactagcgtacttgcgaagagatattcttttctgtccgttgctctaatagaaatttctccacccaaaatgtccccagcagagaagcaataccatgttaaaattcttgatgaactacttgacagcatgaaccattcatctgctcaggtaagagaagcaattggtattgccatgtgtgttacaacctcaaatatgagactttctgggttatttggcactggatgttcaccgcaaggccttcatggggatgtaagcatgattgaacaaacaggaaataaatattggtctgaacgtttgacagatggagctaatgaattagccgtaagtatacaaaatagtactcaatctaagcaactagaatcaacatcagattcggctgaagatagcatggatgatagagagcaggctgatgctaaaaggatggaaacgatatttcattttatgatcgcatctttgaagtctgggcgatcttctgttctactggacactattattaggcttgtgtacccaattctctcactacaggaaacatcaaataaagatttatcattgcttgctaagtcagctttcgagttgctgaaatggaggattctacatcggccttttcttgaaactgctattacgtctattcttcctttagtcagtgatcctaactggcgtaccagatctgcactgttatcgtatctcaggacctttacctacaggcacacattcatactttctggctcagagaaatcacaaatctggcaaacaatagaaaaattacttgtggacaaccaagttgaggcaagtatatgttcatttgactctgtacagtgacatttattttcccattctgtgtcttgttactcaaattgtgtaatatcattgcattatcacgaaaatgtgtactatcactctatcagtgtacatgttagtgctgtgcagtgtaggtttcttttgtcaatgttttgtactttgttcttatacattcaggttagggagcatgctgctggtgttcttgcaagcttaatgaagggtatagatgaagatctatcaaaggatttccgtgaacggtcatatgcacaagcccagcatatttttgttgcacggagaagaaatttgaagttttctgttggtaccatccatggtgcagtccttgctttgacagcttcggtcctttctgttccatacgacatgcctagctggcttccttctaatgtctcgctacttgctcgcttcatccgggagcctccccctataagatcaacagtcacgaaagctgttgcagaatttaagcgcacccatgctgacacatggagcatccagaaggacgcattcactgaagacgaactggaggcaagctagaaatcttctccttcactgcctttcctactgctctacaccttacgctctttgtgatagttctgctttgaacatgcaggttctccgtgatacatcttcctcctcgtcgtacttcgcttagattaaaatttcaaaggccataggatattctctggtactggtgttgtgtatatgaatttataactgttgaagtgtcggtgtttttcataaagtatatccttgtacgtacctagttttatttcatcaacagatgccttcgtacaactgagatgaagttatgcagtctactgtataccgtctggacatagcggaagcattatggcatgtgggatccttgcgtgggctgagaaattgttaacatccaaatcttttgcccagtcaacgacgtgaataagatgctgcctagtttaaccgcataatgcatctctggcaactctaatagcagagtcaacgggctagatataaacttgcccatgttcattagaagcaagaaagaatcagccattgacattaagaagtacatgagcacccccgatgcaaacgtctatagccctaatcatacttgtttcttgcttcctc

SEQ ID NO: 42325 - DNA, 3955 bp, Zea Mays
atgccccgcccgccctgctctccgtcgcgcccttccagggatcctccatcgccgctcccgccatcatcgcgcccgcgctccatcgatggaaggtgtcgccccgccatcctcgcctcgctccccgcgacacgcggcgccagcttgtgtcgcatcttctatctattcaccagcaaggtacctggcacagaacccagccgaatcctagaacccagccggatcctagaaatttcccattggcatctggtgaccgtatccggtggttgggcgtcagacgcagcggggcggtaccggtgcttggagttggaccacccgtgcaaggcaccgtggtgcgacgggccgctcggcgcgctggagagcaacgggtgggtgtactcggcgcactgctccttcaagctctttgtggccgatgcgtcgtggtggtgccttgacgggaagtggctcttcttctggggcgactctaaccacgtcgacaccatccggaacctcctcaccttcgtcctcggcatcacggacacgtctgctgtgacacgccagtttgatgcagtgttcaccaatcccattggtggggcagggactctaaggatcacaagcatcttcaacggccactggaacatgagcatgaactatctcggcttgcattccctccggaacagaggtttccggcagctcatccggtcctacttcatgtccggtgatcgtgttccagacgtcatggtcctgaactctcgcctgcacgatggctgctactggaccagcgtccgcatctacgcgcaggctgcggatttcgcagcacagttctggtccggagtcatggacaaagtccgggctcgtgggcatgcagtgcccagggtgttctaccggacgcagatgcctcagggtggtatagatgcagggaaaaaccacgcgactcccttcacggaattgagagatgaagctggtgtcacatactcacatccgcagggatgggtcacgttgcagacacttcctaatgaagtccttgtagtgctgcgaaaggtaatcagattttgttagtagacaacacaaggaaggaagcacaaggaagtttaacctgtatagcacaaggaagcaagcagctcagcctccattttatttggaaaagtcttatacttatcagaagtaagtttttgatcctctattttattacagattttgtgattccagatctgttgacctcaaggcagattggaaacaaccttattgttgttttgttgaccaactctagaaagaaaagctaaaactctaccctctgcgcccaccttcaagggtcgctccctatcttccttcactctccatcaaagctttgctcgcatcaaattaaatttcttttcgttacgaatttagcttcattatataatattttgctcagtgaattgatcaagtttggtgcacgagtgtcatgctcctaggttttgtactaattgaagaagtagcaaatgtagttcgtggtggtggtttaagtcatgtctgatgaaattgatgcttatatagaggggttctttgtgctttcgaaagaattctgcaggaaaatcgactgcatttgttgttcttgggtacacaatgaaagatgggaaggcatattttcccccacatgacagtatctatacatattgcagttgaaatggaaataattgaaatacaaggtatgtgcaggtgcagtctattatattggagttaagagagcgctagcttgcagtcacactcgatgaagtcctatagggctagattttaaaagtaagatccagtacaaggttacttcaattgcaattagcgattagccaaaactttcatcttcggtctcactaggcctcactaggcctttcatcttcaaaagaatttataaagatattatttttcagtctatctctacatccctctctccatcttgttatgcaattatgagttcattagatgtcattgatctaaattaatttctatccattatgaacttatttttaatgaaccatgctccttcttcgttgctcacaacagggtccatgtacttggcacatgatatacatatacgagatggacttaaaaattaacaaaggtcttcttttggtggtagataattttggttttcttatgattctctttatgaagtgggtgtggtacctctaaacaaatagatgatctgttgacttatggcagtcaggcattacatttttttgcatgaaatcgacatctgagaagtgataattttgttttgatcgcttctctattgcaagatttagatggctactatcctttgcaattgatcaagaatggtgagctattctaaggaagcttctgaacaatatacctgttgtcctggagtgtcacagatggcaaagatttgcgcttagagaaggaggaagaacggtcggtgctagagtcatctccaaagttcttagctgatcagtttccactttcttctctgtagtctggttgcaactgttgatggttagcacattctttatcttcaattattggaagaaacatttttgcgccaattacatgaaagtggttgcagttttaagggtctgttcaatccctctccaagatattgtaggtgtatgaaatcttctaagcaaactgttaaatacattgcacccgatcagaagggatgctctataatgcagcctggtaaacctccctcctgggcccagctgtcctctgctttcagtgtgaaactactgatttgggtgttgctgattttcatcatgattttttcaggtgtgatctccgtacatcgtgctccagccgcactcagatctagccttggccgggagacaccgcgacagaggctggacgtgctcttcccgtcctcatgccccatgccgctgcgcgctcttcccttcacctctcactacacggcggctgcggggcaggggtgaaagaggcgaggcttctccagcttctcgaggccggagaccgtttgctcaagggtgtcgttcttgacggcctcctccgacagcgtggacgcgtggttctcaaccatggccttggtcacggcaggaagcagagcctggtgccagagaagctcccagtgccccatgtgttggcagcatatcagcatgaaagatcctatgaggtgaaaattgcaacctctactctgtcttaactcctaagggactgaattgctggttctcacttattcttgcgacactctgcagccaagagctactagaggctgttgaacaagagaggaacatccgatctaatccttcacgtaatactgctgttttccaccatccaatgctgggtgattttgaggtgggcatgtttcttcatgcatgtttggggaactttttaggttaagaaactccatcaagaaaagcagttaggaatgatggtggacaaaggcctggtagcaactaggacagggttgagtcagtaccacctgtctcactggcctagaatgtttgaggtgatcaggatgctggaaggagacatgctcacagagagatgggaggtgtcgcagaacgtggacatgccagagttcgtctcatcggagctcctacttcaaaagtacatggattttgcagcggacgaatgctcgcttggtgtagaagccatggagctctctggactaaggtgaccatctgatcgatcgaatcggccatcacacaggtcgcataggtgtcttgccatatcaagcctatattattgttgtattacattggacacatagggaagggaaaaaatccggtgaattatagggtgtgatctgtctgcctatacttgtggtggcattcatttgtgcaaatgattttgatatattgatgtagagaatatatatgttgtttatttctatgtaatcgttgcacactataattttatcaaacaacttttgtattgttgcaaggggcgacaaaaatccagtggattgtagtgtgtgatttgtctatctataactgtggtggtattcatttgtgcaaatgatttgttgtatatt

SEQ ID NO: 42326 - DNA, 2122 bp, Zea Mays
aagtctcaagcacgagacggccagagaaccagattccgttcccctgaacccgatcgagatggagtcggaagctgacagagccgcggcaccggcgccggcgccggcagttgccgcggagaccagcgacgacgccatccaggaggagtctccagccacggccccttcctcagacggaaagcccggatcaggggcggcggcggccccggcgccggaggtggaggtgcagctgttccggcgcgggcgtccggtggcagtgttccggtcgcagctgggcgggtatacgcaggaccagctggaggtgggcgacgtcctggagcagcacggcctcaagtccgtcttcgccttcgaccctgccgcccgcaaacgcggcgtcgccatccgcttcaaccctcgcaacggccgctccctcctcccctacgcccctggttccacgatcttcctagacggcgagcccaaggtaatcttagaagcagcgctcacaaacaccaccacgcatcaatttcgcctcaccctactcgttccttgtcgcctatacagttagagcatgttcaagagactattaaatgtctcgtcaagctaaattttagctatttaatagtaaaataacttttagctatttaagctatccgacttttaaattagttctttcgctgctaaatttaactagccatctaactagcaaaactagatattgaagtgagatactagagtgtaatctttataaaaagttaaatagagagtcaaataaagatctaaaaataaagagtctcttggagatactttagtatatggcaaaaggccaattttctcccccatatcatgcgtttgtatctttgatgatggtctaggattctttgctgaagcccatcacgaagatggtgattggggtcgccgctatgactgtggtagctgcagtcctattgaaggaggccaagatgcccgagtggcttcagtcatccaagctgggcgccgtgagcttcccaccatgggtgctggcttgcatggtcatcgtgttcatgaggctccggaagagaaccatggatgcaatgaagaagtttggctgggtctcatgaggagtacatatccaattacagagaagggaaagcagaggtcttgggtcggtccaagtgggcagtactaccgtgagctgccttgccccagctgtaggggtagaggttacactccatgcaaggagtgtggaatagatagatcaagtttggactgccctatgtgcaatggcaaggggattcaaacttgtctacaatgtagtggagagtgtgtgatatggcaagaatctgttgatgaacagccatgggagaaagttcggtcaagttctcccttgaaagtaaaagaagatgacgaagttgacaagttagagataaatatcaacaaccccaaaagatcaaagcgtacttatgcatctacttcaccggaagttgccaagaagattagccggtctttaagaagtctaaatgctcaaacaggattgtttactaagcacatgaagattatacaccaagacccagaattgcgtgctcaaagagttgctgcaatcaagagaacaaaaggaactgatgttgcaagaaagcgtgcttctgaaattcagaaggcattcttcagtgatcctgagaaccggctcaagagaagcattgccatgaaaggggtgaaattttactgcagcaaatgtgggcaagaaggacatagaagcttttattgccctactttgagggaaggttcaaccagggtgcggttcaggtgccggttgtgtggcagagaagggcataatagtcgaacatgtggaaaaccaaagtccgagaaggagcacaaacaacgacctcaccactgcagccgatgtggtgaaaagggacataaccggcgcaactgccccacatccactgatttgggtagtgatgcttcaggctatgtggttaacaaagttaatggctctaattcagctgtttatcaatgtagtatatgcttagaaaaggggcataacagacgaacatgcccgaaaagaaaggctaccttactaaaatgaaaagtgtgagtaaaattaaaagaaaggctatcttttatgcctgtgttttttctatttctctattttgtattaattcgttcaaac

SEQ ID NO: 42327 - DNA, 1673 bp, Zea Mays
catccattcaaatcatgaaatcaaccaacacatattcatgcctagtttagagagcacactaattgacttacaattttggcttcacgattctgggacacctaatgtttataaaattcatcaaagaacttttattaactttctaaactaattttccggctaacatgtgtattacacatattaataaaacattatatttttaacacgtacagtcccgcaagcactgggacctattgcgacctctttcttcacatgacatcgaccaaatcactgtagacgacttgggcatcctaataaatagtatacgtaccccatgtcacacatatactaaaggcaataggactgatataattagtatacctacagttccctttatcaaactaataaccgaattagcaatccgactcactacagagtcatcacgattaatatacctagtcagactattcatcagttcactaacacgaatttcaaatttgcttaccctaactaattcgacgtgatagtcggaagcacgatgacggtttccggttgacgtctttgatcacacacgtctggcgagcaaagcacatagtttctattcttgaccaaatacccatggattcctttttgtcgagacggtgacgcgtggccatcacaagagcgtcctcacgacttggggcttggcgtagacgaggatggtgatcaacgacatcgacatgcaagcgtgacgatttttcattcgacgaagacgatggcagtacgactcgttcgaaccttttgtcgagcacctggtgaacatcgtatagggtaagtccgatgcggcgcttaggatgatggcgcggggagacatgccaaaatcctggacgcgacggcgatttcacaccgaggcgaccaatgggggcagcacccaggcacacacgacacgaaccaggcaaccagctgcctacggcgcagcagggacagagggaggagcgcagcgcgacggggattaaggctgagcgatcctagcgggcgcgctggcgagcaggaagccgcgtgcgagagatcgagaccgagcagagagagctgcctggcagcgcagcggcccacgtccgcggcaagcaggctgggcgccgagcagggagcggagggagatggaccggctcggcacgcgctggaagctcggaccaagacgcagggagccggccatggagcttggggagctgcgcatggaggcgaactcggcacggcgggggacgacggaacgctgcgcgcgtgtctagggagagagggaagcacgggagcgagctgaggaagagagagagagcgcaccgtggggaagggagcagagcgcgcacatggaggaggaagaagacctggcggccggcgctcatccgggcgagcagaaaccagggctgcggtgcgggagctggaggcgctcggcaggaagcgcgactgcgcgtagggagagccacgacgcttagccatgggagcagtggagcgcgcaggggcgagcaccagagaaggagcgagcggccgagctggggactaggcagaggaactcgagcaggcaggggagagagcgcgcgccaccacgggcgagctggaggccgagctgtagcagggaggaagacgctcgctagcgcagggaagctgggagaagcgacgcgatggagcttcagcagaggattgctgcgcgcgtagataaagatcag

SEQ ID NO: 42328 - DNA, 1342 bp, Zea Mays
tattttccatgcactcatattgaagactaaatctttagttatattctatccctttgagtctcatttactggctcttaccagttaccatgtcaaattcggtttttccctacctctcgttccgttgctatcgtgccttagagttctactacacactggtgtctttggagacccctgttggacatgtcaaaactatctcaaccggtgatggacaagtttttcttcaattggtgctacccctagcctattacatgatgatatcatcctcctctcttttgtcaatattagtaattgaaagagttgatgagagggttgggctatcttgtttggtctcactcctatctcttatattagtgagcagtgcatgtgaaagggttcttgatgatatgcgcctatgggtgattctgaactttgttccttgcatcgccattcctgcaatgctattcttgtttcctcccaagtatacgcattcaaggttctggttccttgctacaggcttgtaccttctggcaagatttgaaggcttggctgacaggaaagtctacagcgtgaaccggtacttcatcagcggccattccctggagcacctttgctttgccctggtgacggttatgctaactgtgatgctgaccttcagaaacattaagattgccagggactcctgacctgtcactgattgtaacttgggtgcagaaaattctgtgaaaaaattgcaagtttggaaggcagactccgagacgacacagagattcggctagatgatgcctagtagataatattctaccttaacattgtcccgtttgccggggctgattcacccttttccccgtgttgtttcagactgacggtggcataggtcatatagaggacgcaatttattggtctgcccgattcataccgtggaaggttgtctgtgtccgccgcggcgttacaccaaacggttcgatgcaggcatacagcagctgctctcaagggtttcatgcctagacactaccgatgttgaggtctgctatcgtcagtgagcccaagtagcaggggcattgtgtcctacttggacgagactgatctcatcttcccgttgcgctgccagaaggcggtgtcctccttctcccgagccaggagctcctcgaacgatatttcttgagcctccagctccattgcactcagctccatgatctgccatggcaaaacagtccacacacacacacacaaacaggacgctcaggtggctacaacttacaaggacaagagaagcggcgtaccattttgtatggcgctgacttctgaagacgctcttgcacaaagttgtagatggcggcgtctttctttaggctatcgctttcgg

SEQ ID NO: 42329 - DNA, 1736 bp, Zea Mays
  misc_feature (1735)..(1736): n is a, c, g, or t
ctaatcataaaaatcgaagacgtttgattcccgcaccacgagtccacggcacaaggaaatgaaacaatccacgcggaacgccgccgccgccattcccatggttttccatgctcggttgcgagccagcaattccatttcagtgtcctccctcgtctcgagaccttgccccatccagcccaacgctccgtccatcaactgaatagcttggcggtgtaaccctgtcgtgtgcgatgagctcctcgccgttgatcaccgccgcggcgtcggctgccgtggtggcgctggctgtcgccaaccgcgtgctctacaagctcgcgcttgtgcctctcaaggcgtaccctttcttcctcgcccagctcaccaccttcgggtacgttgccgtgtacttctcgatgctctacacgaggtaccgcactgggttggtgactagagacatgctggcgctccccaagcaccggttcgtcgctatcggtttgctggaggcacttggagtctttgctggcatgtctgctggagctatgctaccagggcctgcgattcctatactgtcccagggaggacatattcggccagacaagtcattggttgcttcctagtagtttctggtgtgattcttgctgttgcaagtggagcggatgatggccagcttctttcagatgtaaagttaatttggccagcactcatgatcgcttcatcagcatttcacgctggtgcatctattctgaaggaagctgttttcattgatggtgcaaaacgtcttaaggttgatgcatcttttctccatggtgcttttatttgttcatcagtaaacattaatctatgaactcatggtctaatgttcataagacaaaatatttatgcaggggaagcggccagacatatttgtggtcaattcatttggatctggatttcaggctgtttttgtctttcttcttcttccattcctttctaatttgaggggaattaagtttgctgagcttcctgcttatttaaatggtggtgctgagtgcttcttaaatgtcgcagaaagtccaatcgactgcggaggagctccattcctgcctttgctgtttatagtggtgaatatggcattcaatgtctctctcctcaatttggtgaagatgtcatctgccattgtggcttcacttacagcaacatcagcaggtcctttattgttttttgacccttgattaccccgcctgcattttcatcttctttcttggtgttattgctggtgggtagaccgaatggaggaatataaccatacaatactaattatgcttgttttgaattttagtgccaatatcgatctatattctttcacttcctttgccctacatccctcatggcacggaattaagcacgtctttcatcattggtgccgtgatattgctgatgggcctgattctgtataaccttcctcaatcgtcactgaaacaattgaaggctgattgaaggcgataaagcaccctagactgtcagggattaggttttagtggcggcgacggttcctcgaccgtgcgagcggcggcgatctcaggggcgagtgagggcaggggctccccccgaggcgcgtgatcggcggcggcaacgctcccccggatcgagcgacggcgatgccctcgaggcggatgagcagcgacgcaccctaggttcggtggtgacggtggttgcatgaagcgcggtaggcttcgacagtagcggtggcatccatgagagacatgggtggcttcgnn

SEQ ID NO: 42330 - DNA, 677 bp, Zea Mays
ggatgcgcgacaaaatcccgggcgcgacgcaggggaccggccacggcgagcatagggacacggctgcgcgcgacgtgtgcgcagagagctcgaccggacgcggcgagctggggactgagcgcggtccgagctaggaagagccgggataccacggcgtgcagggagatggcaagccggagcgcgcgtcagggaaaaacgccggcagcaggcgcgacacagggggaaacgtcggggaagctgggagcttggggcgcgcacagagaacaccatggcgcgcgattagcaggaaaagagaggaggaacggtcgagctggagaagcaagggaggggtgcgaccacgcgatgcaggaagccgagggcaggggaatgcgcggtggctacagccgagcaggcaagctgcgcgctgtaccagggagcaggggtgccgtggccatggggagagagaagctaggtcagggagagccgcggtgaaggaaaaccgagctggagtacgagcgcgtaggggagctcgcgggcccgacgaaatccgagcaaagaggagactccggccctggatggagctcggcgtggccaggcgagcaggagatcagggaaccgcgacctccatggccgagcagagaactagggcgcgacggctgaagagaaatgaagggaggagagaggaaaccgcgcgcgcg

SEQ ID NO: 42331 - DNA, 678 bp, Zea Mays
agctgctgtgaaatattagctgtgaaaaaagcagaaagctgtttggttcgaacaactgtgaaattgtaggtttggtacaaaatgtgtgtaatagccctacattgtaggagacacataaataaactgatgattcagaatatcctacttcaacataactatctccctctcgcactactcaaagcatcagctatcttaatgcgaatggtattcattgtattctcattctctccctctggattgtcatctccttgtgcttgtgacgtgaaactctgttgtaccaagtactcctcatcagcatcacatctatcaaacaacttatcttctgaattgctgtcacgaataaaattacgcaacgccatgcaagctattattatatgtttctgtgtacgtgtagaaaaacttggaatgcctttcaaaatacgccacttctgcttcaagactccaaaagccctctcaataacatttcgaagagatgaatgtaagaaattgaatatctcatacttcccttgaggaggacgtccattacgaagtcgaaattctagtatatggtatgtgcttcctttgaaaggggctagatatccttgtcgatttggataaccagagtcgacgagataatacttacctatatcaaaaaattagcaaaacaaaaaatccatataaatattgaatgaaacaaaa

SEQ ID NO: 42332 - DNA, 2116 bp, Zea Mays
ggctatttgcgttcggatcggatctaatttcagcttaggttaaaatcaaaaaaatttgtcgggcggataatacaaggcctacaccagaaggaacaccctttgtgcgacaggcgaacagctgtctctatctctctctgcagtgttatttggtttattatatgcagttgcaggggagaaaactaaggcatgttcactgcagctagaagcacagccgcagcagatgcagcaggcttcttatagtatttgcagcttagaagttggagtggcaactgcagctagctgcagcaaacactcctaacaataatagtggagagagactttcacgctgtttaaatttaggtgatttttgggaattaacttgcagatttattaattattatataggtaaaaagtgtagtatcagttactaggagcaagaacttgccctgatgacacagttattttggtttttctgttcacttctcctaatatttaaccttttgagtaagtgtgcagattaggtcttaaaaagggattgcgattaagattttattgccagagcctgagctgtagaattttccatttacacacgtggctgtacagggggtaaacttgcaggattattacttggtgatcctataagatacacatgctgtgaaccctgatttgttttagctgcttttgttcgtttttgtctacttagccttgcacactgaggacctttattgaggttgccggtctgcgggttgaatcatggcggagcacttggcttcgatcttcggcactgagaaggacagggtcaactgccctttttacttcaagattggggcctgtcgtcatggggatcgctgctctcgtctgcacaacaggccaactatatcaccaactcttgtgcttgctaacatgtatcagcgccctgatatgataacccctggagttgatgctcaaggccaacctattgaccctgagaagatgcaggagcattttgaggacttctatgaggacatctatgaggagttggggaagtttggtgagattgagaatctgaatgtttgtgataaccttgctgaccacatgattgggaatgtctatgtccagttcagggaggaagagcaagcagccgcagcatacaatgctcttcaggggcgcttttactctggccgccctataattgttgagtattctcctgtgaccgacttccgtgaagcaacctgtaggcagtttgaggagaacagctgcaaccgtggtggctactgtaatttcatgcatgtgaagcaaattggcagggatctcaggaggaagctgtatgggcgttctgcttccaggaggtaccatgggagaagccgaagccgaagcccgccaccacaaaggaggggccaccgtgaccgtgatgactaccaccaccgtgaccgtgatgactaccgtggtggcggcggtggtggaaggggaagaggtagcaggtatgacaggtacgatgacggagcaggcagaggtggcaggcatggcaggtatgatgatggagcaggcagaggcggcagacatgacaggtatgatgatggaggaaggcgcaggcatggtagcccctcaaggcgtgcaaggagcccagtcagggaaagcagcgaggagcgaagggccaagattgagcagtggaaccgtgaacgggagggaaaacagtgagctctccgtggctactgtttgccggacttgttgcttagctccggctctcatcgctatattctaagtatgcttgtgtggattgcattctgcatggctaagtaaaaccttttaagatcaggattcctcggttcattttatggttaaaccagacatcatttgtttccatctgtgttgtgtcggatcctttgctattatgttattttgacaattggtgtcaaatcttttgtggtgtgctattagcttatgatgatgtcagttgtggtttgtcactagatttgccatctggctttcagtcgtgtgttatgctgttccatggcggatttcttgttttccctcttctcatttttgctcaatgctcctagacagtgcttgggctgccgtcattgtactatgtgcagtagcacggagcaggttctattcagtttgagctgtcttttgtcttgggttcatggcaatctgt

SEQ ID NO: 42333 - DNA, 2925 bp, Zea Mays
attctttccatctacccccacctactgcttgtaaatacaagcaacaccctggctggcacggttcaaaccaagctttctctacccaagtcctgcgccggccgccgcttcttctccttgcatccggttcaggatttccagcggcctcgactcccgatccggtctccgtaggagcgtcggtatcctcgtgtctccggcagtctttcgaacctcggttggtcccgattggcgagaaacccccgcgtcgaattggcggccaaggggcgcgggacgcatcattcgattcttggcggctgcttgcctgcttgtgcttgagcgcttaacagaacttcgcgagctgggctttctctaggtggaaagacaatttgatttggagatggggccggaaatgatagagcaggatggatggtaggaaaaggaaggggaaattcaggaattctctcaggcgtatggctatggagtgcctgtgctctggtgagcagttgaaggcgtcagatgagaccatgcggtcatctgattctacgatcacaaaggatttctcggccagtgggtactcttctcggaatggagagattgagcagtaccttgataatggcaacatagaggaagccgagttgtcgctccgggagggcatttgcctaaattatgaggaagcaagggcattgctaggaaggctagaatatcaacggggtcatgtagaggcagcactccgtgtctttgatgggatagacatatctgcattagttcctaagatgaaaatctcaattgctagaaaaacagaccgtcggaagactcattcacagtgggattccccaccaatgcccttgcatgctgtcagccttctcatggaggccatatatcttaaagcaagagcacttcatgatcttgggaaagataaagaagctgcacaagaatgtagaatgatattggatattgtggaagcagctgtacctgagggcttgccagcaggctttgggaaaggctgtaaattgaacgaaataatatgcaaggctgtagagttgctccctgagctgtggaaatcaggggggttttcacttgaaaccatttcttcatataggaggtcacttcttaataattggaatcttgatggagagacaatagcaaggatacaaaagaaatttgctgtttttctcctatatagtggttgtgaagcacgccctccaaatcttcattctcagttggacggttcatttgtacctcgcaacaatattgaagaggctatccttcttttgatgattcttttgaggaagtccaatctcaagaggattgagcaagatccctctgtgatgcatcaccttacttttgcactgtccatgtcaggacagctaattccactggctggacagtttgaagaattgttacctggtgtgttagacaaaaaagaatggttgtacagcgttgcattgtgttatttagcagaagaagatgatctgagtgccctgaatctactcaaaattatactaaaatctggagaggactccgttcaactcatagaactgcttctagcttcaaaggcttgcattgagatgagtattcatactgaaggtgctttttatgcaaggagagccattgcaaatatgcagggaggatgcaaaccaatggcaggacttgcaaacctattgcttggtgttgcactttctaatcaggctagaagtgcaatatctgatacagatagagcttcttggcagtgcgaagcactggaagcccttgggaatgctgaaaaaaatatacatgggaaagattctagggcattatacagtctcagccttgaaaatgctgtgcagaggaaattagaattagctgccttttatgcaaagaggctggtgaaacttgaggctggatcagagttgaggagttggctccttttagctcgaatacttagtgctcaaaagctgtttgctgatgctgaaacagttgttgatgctgctctagatcaaactgggaaatggtgtcaaggagatttattgcgaaccaaagccagaattcaggctgcacaggggcaatttagagaagcggttgaaacatacacccaacttcttgctatcattcaacttagaacgaaaagtttaactgctggagtttgcttgccaaagggcaacaaggatgataaaggcctggaaacagagacctggtatgatctagctctcttatacctaggtatggcacaatggagggatgcagaggtttgtgtattgaagataagatccatcagtccttattctgcattggcttggcatgctacaggaaaaatatatgaagcaaaaggtcttagaaaagaagctttgggagcttttttcagagccttagatcttgatcctaaacatgtcccaagtttaatatcaactgccactgttctacaacaacttggtgacaggccattgccttctatacggtgcttcctgactgatgcattacaactggatagaactaatcatgttgcgtggttcaatcttggccttctttacaaagaggaaggtggcaggtcagcagctgaggctgctgaatgcttccaagctgctgcttttcttaaagaaactgcaccttcagaacctttcagatgacatctacaggggctatagatcttagctagttgcatcaattaatggtgcagatattggtctctatccagcactaatgaaatggtacaccagataaccagcaaccgattgaattatatcagtcttcttgtctggatatgcccaagtatgaagggcaattgctggtaaacatctggaaagttcaaccatggatatattgagttgtaatgtatgtagctatatggaacatggagtcagtaagtaggatactagaaatgtatacgtataccattgttctcaatgacatctactagggttttatgtgtttttttttgacatctctgcaaataaggcaagatacccagctttg

SEQ ID NO: 42334 - DNA, 1922 bp, Zea Mays
gcttgtttttttgtgggaacgagattcgggactcaggagctcacttgctcccactatgacattgtatatgtaccagacacttgcatatactaattgttttcttttaaatgcactttacttaattatactgacatatgtcattggagctgtgatgcctcatccatccctaaagatgtatagaattcatcgcttggatcaataagtgttgtttaacaggcagaaatgggtgcttaggatcttaccactgtttatttaaaatttagatagataaagagcactgaagattgttagttaattaggaccgacgctttgaatcattagaccaaggaatatgaatgcgcaaattcaaacgtactacaccttttttgtgctttctttttaggacaggagtaattgtccatcgtaacgggggtagaaagtgcagaacgctcattgttctctttttcgttgtctaaaacgttgagtttctgatctgtataagactacaagttgctcagagggccttttctggaaccatttccctcgaactgattttaattgtttccttcttttccttatccacaataccaaactatgttacataaaaactaaatgatacgctgactgctcagaataaaaaaagtggtgctacgatcctccgtctgacttatgatcgcttctcttttcttcagccacttttcttttttgttgtctagaaaacaaaaatatattgttagtgaccagattgtaatagaaaatattgtctgctttattttctcgtcattagataaattatatacccttaaattgcttttgccattgattctagcatatgtcattaactaatgtttttaccacctttttctagaacgcttgtttgtctttgtcactttctgcaaccttggttctgatgttgcttgtcattcatttctcagcgtcgggcttgtaacttgtgtttcgtttgcttggtccatttattttggttgtctgtagggaagagacgacgacatggatgtagattccattctttgtgtgagcactaccgccatatagttgacaacgatgaccgacactgtagattccattctttgtgtgtacaccaaggtatcggtgtctacgttgatctggcgatgcgcttttcacggttactgcgaccgtgatgggcatctaggtgctcaaaccattagttggactgaggaacacggagcagcagcaacaatatcgtaaggagagtgcagaagttggacaaatggtatgccatatcttcagttctcttatgatgcttcagcgctacatcttcagttttctcggctaaaaagagatcatagtcaatagtatacctatgtgtgaaagcgctatgctatttgcttgtttgctgggagaaagaaaagatagatgaagttttgtgaacaaccctaacttatgtggtcctgacaccacaaaaccttgtcctgatgctcctcccttttctccacctcctccatacaaccctacaaccccgatgcaatcaccaggtgatttatttagattgtccagtgaaatccttgagttcaataggacctttccttccttactctttcatctaaatgacatcctaattgggaaaatgtatacctccaaaacaagcataatgttgtcaaggctggagagcggtaaggaataactgcacgttttcctgaaaattaagttgaaaataatttgtaatcaggagctagagcgttacatggtactatgactatgtgctgctattagtctgtggctcagcggtatgtgtgttgtactgctattaatttgctatactagaatactggaatacaataggaagctactaacctgtacctcgtgggatgcaggaatgcagaataagtcaataactaccttgtccttttggttttccctaccctacattagtacgggagtgattaagggtatggaacatatgg

SEQ ID NO: 42335 - DNA, 1991 bp, Zea Mays
gtcaagcagaagcagaagcgctgaagcagcgcgtttgcagactgcaaagacccctgtgaatttgtgatgtactgaggtgttgtccagccaacagtccttgctcccaagattcttccgtactcccccctccatcggaccatcctctaccatagatctcccgaactccgccgtaatcgggacgaatcccgcgcgtgctcttgctccctgtcgttctccgcggccggcgcgagctgccggtggttcgttgccgtcgacctcgtctggccgctcctctgccctgccagctgccggattcctgctgctggactggattgctgcgcgtggagtcgtgagtatagctccatctatcctgactgatacggatcgacctctcctctcgtgggtttttgggttttcatcagttctatcagaggagtgcttatggatgattgcatggctgtagctagctaggccctgctttcctgtttgtaaagatacatcatggcaccacgcagtagggctccatctagaaggcctctctggttcattgtcttggttgcctttgtctgtgtagtagccattggagcctatctttatactccacagcattacacagcctgttatctggtaccatcagaagcctgcaattctcggcctcctccagaacctgctagggtatacactgatgatgagattgctgctcgtgttatcatgagagacatcattcgggctcggccagtgcagtcaaagaacacaaaaattgctttcatgttcttaacacccagtttattgccatttgagaagctatgggaaaaattcttcatgggtcatgaagacagatacaccatatacgtgcatgcatcaagagatataccgagtcattcaagtccaatattcgctggcagggatattcgaagcgaaaaggtgatatggggcacgatttctatgcttgatgctgaaaagaggctcttggcccatgccctacaagatcctgaaaaccagcattttgtcttgctttctgagagttgtgtgccacttcataacttcgattatatatatagttatctcatggagacaaacgtcagttttgttgactgctttgatgatcctggtccacatggagcaggtagatattctgagcatatgctacctgaaattgtgaagaaagattggagaaagggtgcgcagtggtttacagtgaaacggcagcatgcgattcttattctcgcggacaccctttactatgggaagttcaagcgttactccaggaaacgaatggcataactgctattcagacgagcactacttgccaaccctctttaacatggttgatccgactggaatctcgaactggtcggtgacgcatgtcgactggtccgaagggaagtggcatcccaaagtctacagggctgcggacacaagcttcgatctgctcaaggacatcgcgtccatcgacgagagcgtccacgttagcagcaacgcgaagcatgtcgcgcagaggaggccgtgcgtgtggaacggcatgaagcggccctgctacctgttcgcgcgcaagttctacccagaggcgctggacaacctgctgaacatattctcgaacttcaccatcatctgagcgagcggtggatcggggaggggtttccgtcctccctcttgagtgctgcggcatcagcggccgcccgccgtggtaactggtgaggccgtccggccgtctacttggtgacgggaatctagtagctgaaggaagcaggaacacggttaccggagcacgcagatctgggagatcgggattcagatgttgccacctgcttgctcatcctgccgcactcgtgtgatctcgctctagtagatcgctggtgtttttgcaggtgtagacattggctaggctggtgttggatgcacttctgttggtgttgatgaagaactgtgattaatttaataataatacgtacgtactaagttgtactcctccgtcccaaaatataactagttttagactaaccatacatcta

SEQ ID NO: 42336 - DNA, 2310 bp, Zea Mays
gcgagctcaccttctctctcgtatcctcccgtgccctccctgatattttcactgtgccgccgctccctggacttctctccctccccttttccctgttgcgcgcatcggatcccagcttgtggagctcccttccgctcgcagcttcctctgccggcacccaagcttctagtccttcaatctgcgtcgcgcccctctctgctcgccctccccagccatggaccttcctgcgcgcgcgctcctctgctcttgcgcgctcccaattttccatggcgctcggtcgcgcaaagccttcatcggccatgaggcctcatcgtcgatgtccttgcttccctgcatctcggtcatgatctccatcgggcgttctgttttcgtgtgacatggggagcgagtctttgtcggtggcgaggttgttgggtgtgtgatttatgttttcctgcacttggacagggccgtgtccctctctgtacgtgcctagacctcctcggcatcctctccttgtttgggtgctcgtcgccggaatttttggtgataagccacgtctccctccatttgtggttgtggcgggcgaccttattgtgtcaagccggtcgtcgtccttgcctgcggctatttccgcttgtccctcgcgtcgctgccgctcaatacatgtgctatgccattggatgctggtcgaactagggacatgcttccttctccgtcatcgcaacagcagcccccttgcttctcgccgtcgcgccgtcattgcttaccatgtcgggacacctcccctcgtgctcagacgctcgtcaggggccccgtcgtcgacaactttggttcaaggtcgccgggtccgtgtttcagatagcagcaatcttgttgttgttgtgtttgctccgactctgcctctacatgctcgccttcgatcaccgctgcaatttttaggaatttgagtgaaaaagtggaacccgcggggcgcttgtcaggggctcgacaggaggcatgaacaagaatcgtcaacgttggcttggaattctagttgaatcggtaaccgttctctagttcgctatttttataattaattgagtcgatggattgaatagatatattgatcgcgacgattatattgattgaagcataaacatgtcatagttatattagatggttgccaaaatatcttgtcgcatgtgaggacatgattatggcgtactagtgtcgtaggacataggtttaaaatgctagttacgtaggagtacccgagaggacgtgtctgtcgaatgtgttcaaattggttttacttatgaagtatgccaaattagtggcgtgaagaatagatttagtattttaagaaattattcgataagtttgttgatgttgattgtgttgaatagtgaggtcaaaagccttgccttagtaattataacgttgtattatatcgattgttagaatgccctagtggaatataggttagttaaattgttcttgcaggtactataactcaggtgtccaacaatgggagtttgaatattgttagcctttcggtgctatgcattagctaaggaaaattgaggactcgcacaaggtttaaggtttcttaatgtatgagctatctccgaataggctagaaaagtgtaattattataattagtcttatatcgctagctggtacttgcttgtgattgattctaatgctttgttatgagtgtttcatcatcttcagcgtagattatttatcttatgctattcctctgtatattcataaatgtgcattgtgcatcccatgaggtacgttaattaatcgcgtgatgcggaagacgagccaagtcgaccccaagcgcgggctactccgcatggtggtgctgatggacgaacctgcctgatcaagtgctaggacaaggatgattgtcaagtagtcggcatctaacaacactaacgtagtgttatgtaggcaagccccagtgcatttgccacctccttgctgttttaaaatctttatcaccttgtttgatgcattaggtgataggagttgtgtgttaaacaactgatgcatttccttccttgaaaattgattacccttccttgataccctttttgaaaaggatttttatgatgcttagccttgctttagaaaaacaaaatgttttgttttaaaaacaaaaggtgatgcttcacagtggatgggaatgttttcaaaaataaaacttgatggtggatccatcagggccatgatgggttcaacataggaaaagatgtacctctgccaggtaccaaactttgggtttaaataataaagctgagaccgggcggttgacttgcacgagaaaggagtctcgg

SEQ ID NO: 42337 - DNA, 925 bp, Zea Mays
ccattccatggctccggccagcaaagagccggattcttcctatcccctaccaaaccccaccaccacgagcggctgccgcgcgggagaccaggacgcatggtgactgcctcctccttcactgccatcttcttcagaagtgccttcgtcgcctgcttcgcggagccaaagtgcagatccagctgcaaaggaaggcaccattaacgccaccacctgtggctgcaacagccacaactgctgctggtggagggacactagccacaataacgtgcatcgccagagaggaaggggttgccacgctctagaagggcatcatccttggcccccactgtcagttcctctatgatggcctccacatcggcctgtatgatcctgtgaaggctttcttcgtcagaggtgctgttgtgggtgatgtcagtttactaagcaagattcttgctgcgcttgccacaggtgtgatagctattgttgtggcaaatccaactgatctcgttaatgttaggttgcaagttgatggaaaggctaacactgtcaagaggagttattctagagcccttaatgtatatgctataataatcagacatgttactttaaccatcatgggcagtcactgcattgctgatagtgaggagcagaaagttcatgttattgctgatgagagaccccttgaattgcttgctaaagcatatgctatcaactcttttgacatagatcctcagaacccctctgatgttgttttcacgttagaatgggaatcagtcggtgtcctaccttgtggcgagaagaaagataatttttactaccgagggacttcagaattttaggctcattcatacattcactacaatgccttcgaactcatgaacatttatctctggctctattgtgggtttacacgctggacttctcggtcacgccactgagcggg

SEQ ID NO: 42338 - DNA, 1518 bp, Zea Mays
ttcttgccccctacgcagccgtgtgccgtacaccgtgcacgcacgccgctcctcgcctccctgcaccatggacgccggcgagtgctccacctccaaaccccctcagccctctgccgcctccccgccctgcggcggggaggaggtcgcgtggtgcgagatcaggcggaatgccggggacgcgtcgtccgccactattcggaaccttagctcggatgcaattattgttgatggaagaattgtcgaacaagaatgcgtagacatcaaaccaggcagtgagattgtctctggaccccagaaagaagattgttctagatatcgagaatgcaaaatgcagcatatgcctgaatttgtggcatgatgttgttactgttgctccatgcctgcacaacttctgcaatggatgtttctcagagtggttaaggaggtcttcatctaattcacgtgataaaagccagagcgctgcatgcccacaatgtaggacaacagttcaatcagttggaaggaatcacttcctgcataatattgaagaggctatattgcaagctttttcctcactacagagatctgatgaggagattgcgttgttagagtcgtatgcttcagttaagtcgaatatggttttgggtcaacagaaaaaccaatcaaggaaaagacgtttttcacgttctagtgatgataccgacaattcagatctaccatgtcctcaatgccgtaatgaatttggtggatttagatgcagcccaggatctgtgcacttgcaatgcagtggatgtggaggaatgatgccagccagatctaacatcagtataccacaaaaatgcttggggtgtgataaagcgttttgtggggcttattggtattcgcaaggtgtgagttcaagtcattgcaatctgatctgcaaccaggatactttgaagagtatttatcagcgacatatctctgcacttcctgacacaattcatgggggcaatccatatgaaaaagatattacagaaagatgtatacagcaatcaggcaaaacattgcaagttgtaatctcagagtggatatcaaaatttgacaacatggaaattgatcgttcaaggttgcaattgaataatgtggatgcaattacttccaggacatatatctgcaaccattgctacagcaagtttgttgatttcctgctctactggttccgtgtatcattgccccaaaatcttcttccacgtgatgctgcggagagggagagctgctggtacggtttcatgtgccgcacccagcaccatcggcctgaccacgccaagaagctgaaccacgtgtgtcgcccgacaagaggcaaccagccctagtgagacttgactgtttctgtcaccattgtcatcaccatccattgtatgtgtgtgtcatcaaaatggtcaggaagtgtggcgcgtccatgtttggaaccctttttggtttgatcctggctggacctgacaaggaaattatattgctgctggtgccggaaccgccgctctgtcggcaggtccggggggg

SEQ ID NO: 42339 - DNA, 753 bp, Zea Mays
ggacgattcggagttcgtttcggtgagctcacgcgagatgcggtcgagtttgttgcgcacttgccaaatttgttccgcggacatggggtagtccgattcgagcagggagagagagctgacgaagatggcccacacgaaagtggctgactgtgttagctaggctgcggcgtgggtccacacgaccggtgacatagtgcatacgcgtgtgggaggtggtggagaagagagttttgggccggttggggaaaatttgagcctagtacgggtaagttagcattccttttccttttattttcctattttagttttcttttctttcaattttgaattcaaattataatttggactcaagcctgagtttcatcttcaaaaacaaatgcacaacaaaaatactcaagcatgagtttaatttgtttaattaatttacttattatactatttaaacaaacgttgttaatcctgaaatttatacacactaaaataacgaataggtattttaagaaatgaaatctttattttagaattatttagaggataattagggatatatatatctcaacaaggagatgactaaaattatataggggtacttttattaaatccttattagaatctttttttgtgtttttaggagaggtgaatttcaagaataagataagtatcattaaatgatatcataattcaaaaatcttcggagaaattttattagttctcaaaaataggattttgggtgctacaaatcctaccccctta

SEQ ID NO: 42340 - DNA, 3017 bp, Zea Mays
gttcaaggggaggcgggggagccacggcggcggagggaattgtttaatcccccgtcaccgtctcctatcgccatcaccccacccgtcccccttggtccaggcgcaggcgcgagcgcgacgtccggcgtccggcttcggcggcggagtggagcgatcccgatccccacaaggaattccatcgctgtcgtggcgtttggtggcgctcctcccggccggcaagcaggatcaggaaatcgcacggaggtgaggatacacgggtgcggaacgagagctaggcgaacctgtctggtacctcgcggcggagatggacgagaaggcgacgatggagagcaagctgtcctcggcggcggccttcgtggaggggggcgtgcaggacgcctgcgacgacgcctgcagcatctgcctcgacgccttctgcgacagcaacccctccacgatgaccaagtgcaagcatgactaccatcttcagtgcattcttgaatggtgccagagaagctcccagtgccccatgtgttggcagcatatcagcatgaaagatcctatgagccaagagctactagaggctgttgaacaagagaggaacatccgagctaatccttcacgtaatactgctgttttccaccatcaaatgctgggtgattttgagatccctgtaggtgcagatgatgcagaacttgaagaacgcattattcagcacttggctgccgcagctgcagtgcgtaggtcacaccgtcatcataatagaagagatgggcaccagagcagatcagaagcaagtagccacccacagtttctggtgctctcagcagacgagcgcacaatctcaggtcaagaaggggactacgaacaagcatctgctgtagcttctggccgccctttacgtacacttgttgaacaagaacgcactcgagggttagcggatgcttccagtccatctctccgttgttctactcctgctgatagtactggtagatcaaacaataggatttctgggatcgaatctacacctgtggatcaagacggaactggaccatccgctttacaatcaatggtacagggatttcataatcaaagtgcaagtggatggagggagaggtggttttctcggagcaactctttactggatcttggttctgaggtgaggagggaggtcaacgcggggattgctgcggtgtctcgcatgatggaatggcacgatgcaagggacgggacgggagcggggccttctcctacctctgcatcaagatctggttctcagtgaaacactctgcacttgaaaggaccgatgcaaatgtaaagattaagacggtcaacgaggtacgtaaagtgtcaaaaagaagaaagtcagtagagagagcaggagcgtagacgagtggtgtgttgaacatgagcatgatcagaaactacactagacaatttagagacgttcggatcatattgtgcataatatcctacatccttttactactcattgattaatctaaataaatgtaaagaaaaaaatataagatcaataatcagtcatgcactatgaccttcgagctgtcatttttcacttggttttggtggtctcttatccacctttatgcatgttcttagatatcgtatgtgatttagaatggatttgaatcctatgtgggtgagagttgtgagggtccaaagagagaatctctttagagcatgttcggttgcatatggattagagaagattgaggggattcaatcccattctattcaattttaaataagaagagattttatcactctcaatccacctttaaccgaacaaacctttaaggggtagtttgtaaccaagaggagtcaaactcaaggaagaaaacctcacatgaagaactaaatgtataattcaattggtatcccatggattactcatcccgggaaaaaaaagacagggactacaagagaatttaagtttcaaaactggcccgtaaacgttatctggctatggatagagataacaatgggccccgatcctcgattctccgtgaggaattcctctattagagaacggggatgtagaatattctcctcatagggatgtaaacagggaaaaaatttcccggtaaacagggacgggaagcattctccatccccgttctccatgaggacccgttaaacttgtacgtgacgatgttttcatgtactacttaatgataaaaataaataattaacttgtcaagaaatcactcattatacaaatgtgttcattttgatgtaagcataataatttcttacatctaacaatatgtataagtgataatttttacattaataacaaaggatgtatccccgcgagaaatagtgatggggaagaaatgcccaccacaattgttcgttggaattttcgtcgagatttttcgtcgtgtggacgaggatatggagctattccccacaagaattccgcattgccatcagtaaacaaacatggagggcttgatgagaatggctgcccccgactaggcaaattggaggctgcgcgagcgtgactgacagtcatagttgtatcacgacgagaaagaagcactagaaaagaaagaagaaaccaatttttctttgtagagttaaggggtgtttggttgcttctgctaaagtttagcccgggtcacatcaagcgtttgacttttaaataggagtatgaaatatagatccaaccaactggactagattcgtctcgtcttttaatcttcggctgacaaattagttttataatccgactacatttaatacccggaacggaggttcaaacatttgatgggacagaggctaaattttagcggggtgtaaccaaacacccccttatatggtagataacttttatatactacattaaacttatatgtagttggagtgctccatcaatttattgattctaagatgagtgtatggaattatttaacgaaggaggtccaacggtgtagctgatagagttagagatgttcaactttaaaaaaaaaattatgcctaattttggtggatctaatgatagagctttctca

SEQ ID NO: 42341 - DNA, 248 bp, Zea Mays
cagttggtcgctagagtagtttcgtctatcccacacaatacgcagtgtagatcatccagcagctatttttattccctagaacctgattcgtatccttgtcttggctcggaacgtgtcggcttcatccttgttggtcgccgtgttgcctcgccatgggctcggcatggcgccgcccgtgaagccttcgcgttgcgcgtcgctggggcaggggtgctgcatcatgcgattccaggtaagaattcgtcctt

SEQ ID NO: 42342 - DNA, 2765 bp, Zea Mays
gtacgttagctacaacccgaaagacggacccaaggcataaatcaacaccatcgctcacaactgcatgagtgagtacaccacgatggcaaaggaggtctatgagccaaaatatgattcgaggaccgagggcatcaacggagaagtcctcatgagggttggaggaggcaagaggcatgtgtggtactgattggccgaccgcgcaatcgacacgtcctccactcaaactctatctcacgttcgagtaaggagcacaagtgcaagctcaaccatacgacctcgacaggacacatcatagtatcggatacaagaattctagctagaagaagagaggaggcaacgtgtggagttggaggtgaggatgatgaccgagcagatgtttcagtacatgcagactcttggcgctgtagcgggtgtagctccgccacctctgttgttcactccaaatgcacctcattggttttatagtcataatcaatcggcgtccttaaatgactctcatgcttcgtccaacccttcgtcgaaccaaagtaattggtcacctcgctaatgttgttcaaatatatgtttgtgacatacacttgatgtttctgaacttatgtgtgtgacgatttgtgagttttgtgaactattttggcagacatgtgacttttgagatgtttgtgaagaacttgtgttgtttgtgagatatgtggtatctttgatttatgtgatgttgatgatatatatcttttatttatttcaatgtaatattaaaagtaaataaaaatgggggcctatggtcaccttgccgagtgttgaactcgccaaagggtgtctttgccgagtgccgtggtcggcaaagaaagcatcatgggcactagggaacatactttgatgaatgctacaaccatggcactcggtaaagacactacgtatggaaggcccacataagctttatttgtcgagtgcctctgagccaacactcgacaaaatctctgtcatcgtcacttgccactgtcatagcagctttacaaaagcactcgtcaaagaaacagttgccgatggttggttcaccaaaccctctttgtcgagtgtggcactcgacaaaaggcatgtcgaatgcatttgatccattggcgatagcctgtggcactcgacaaagaaaccatctctagtagttagttgtgtggtggcagtttggtgtacatgttctgtgactcaaaaacaagagattgatatgtatgacatgttaattaagtagaagaaattgtcataagaatgagtaaaaagaagagtagtgtatgaggcggctatgaacataacaaagccatttttgtcgtcgttgggcaaagaatgctgggagagaggtccaccgtaccttatgtgttcatggtgtcgtcattcattgaggaccctatatatataccgttgctagatatatagggttagtggcagcatgcatagatcctacatatgcacacatttttttgttctatatagtgcactgtactgttgagtcatcctctccttcccctctcctttgatttcccgtgctagctagctcgatctatgaaaatatataaatctaaaaccgttttttttgtgtgtgtgtgtgtgaaaactggcgagactatatatacccgatgatggaaaatgttaatagtggtcgattatgttgcttaaattaaaagaggttctctcagatcttttttttattattccacaagtgggtagaacagcaccctagctagcaatcatgcattgtagtatgcatggcacattatactattctgtttagtacgtgtggaaatatcaccactgtaggattatgacgacatacatatatatatcactacaggattatgatgacatagcaggaataatgtcatctcttccttgttaccgacaggattagtaaagtggtcgaggttcctcaaggcgtatccaatcttcagccctaaaaaaaaggagttgggactgctacatcgtccacagtgatatataagaggctgggtcttttttatatttctgaaagacagcaaattaacctatatatatatattgtcgtaaacgatgagagatatccatgcactgaaaaaaaaatgcgacgactcgacgcaagatcaatggtcctgtttggtgtaccttttggtttggatctttgtgaaatagcagcatctatcatacacagtctgctgctccctctccggtcgctttctcagctcgctttgctttgctgcttcctcctctccttttgcctgtccatggatcgtcactgtaaggcgaggagagccatccaaagtgcaagtggatcattacatgcgtgttcatgctggctggccggccgacccttggaagccattggaagacaggcaccaaaagagctgaagcaaatacgaaaaggttcttgacctcctgtccagtacagtgtacaggaattgggcaaccatctatgcgttgtgatgagagtcagagtcagacttgttgcagccgttggctggctcatgctcctccgcccgttccagaataaaatcgcagctagcaacgtgagaagccaactaacttcaagattagctagattgtcctgtttgggagtgcttcatttgaagaattacatatttgattttccagcttcactataaaacaacttcaataaattggtaaagcagtattcaagagtgtttagtttgtatatagactccagcttctgtaatacaaatattttatgcgagtttccttaattaaccttgatgattagcgaatgcagaaagagacatgaatcggta

SEQ ID NO: 42343 - DNA, 2436 bp, Zea Mays
gggctgtgtgaggataatattggaagtgggaggcaaaaccacctgcttacgatcttgcagtcatcatcacgctattagttgaggataatttcgcgcacaagagcacgacaagccgagatttttgggggcgtcggcgtcgacctgtaggcgatggcggcgtactaccacggtggcgccggcacggacatccaggccagcaccgacggcctgcagacgctgtacctcatgaacccgagctacgccgtcgggctacaacctgtggaccccggccatggctggcggcgccgcggacatgtcgccgcaggcgcaggcgcagactcccggcgccgcgggtgctgctggggtcagcgccgtgctcagcctgtcgtcccgcgaggcgccgccggtcaccgtggccgcggtggccgcctgcaccgacgagggcaagtacctgggcgtgtcggccacgccgcaggggcagatggtcatgagctccaagtacctcaaggccgcgcaggagctgctcgacgaggtggtcagcgtcagcaagggcgtcgaggacgctaagacggccgctgccgccgcgaccaagagcctggccgcggtgaagaagaaggaggactcggagggcgcgtcaggtggcggcaccgacgacggtgccggcgcaaagagcggcggtggtgccgcgccagagatgtccacggcggagcggcaggagatgcagatgaagaagagcaagcttctcaacatgcttgacgaggtggagcagcggtaccggcagtaccacgggcagatgcaggcggtgtcgtcgtcgttcgaggcggcggcgggggccgggtcggcgcggacgtacacggcgctggcgctgcgcaccgtggggtcccgcctccgctacatcgaccaccagctccggcagcagcgcgcgctgcagcagctcggcatgatgcagggcggcgcctggcggccccagcgcggcctccccgagcgctccgtctccatcctccgcgcctggctcttcgagcacttcctgcacccataccccaaggattcggacaagatcatgctcgccaagcaaaccgggctcaccaggagtcaggtgtccaattggttcatcaatgcgagggtgcggctgtggaagcctatggtggaggagatgtacctggaggagacaaaggaccaggacgctggaggcggcggcaacgacgagggcaagtccggtggcggcggcagcaagagcagcgacaccgtcgacggcgtcatgccgagggcggacgtgatgtccaagtccgcggtgcgcgtgggaggcggcggggcgggggcggagagcgcgtccaccaacaagggcatccatggctcctccctgctcgagctcggcggcggcgatcaccagcagtcccacgcggggttctacgacgacgatgaagacgacggcgacgacgtgatggggcggaggctcaagaaggcgcgcggcaacgagccggcgccggcgttccaccacgtgcacgacatagccacgctgcacgcgcaggccgcggcggccgcgaggcagcagcacgaggaggtcagccaccgggagctcctcatgaagttcatggagagcggcggcggtggcggcgtgagggaccaccaccaggacggcggcgggtactcgctgttcgcgccggggccgtacgggcagttcaccacggagcccttcgcgttcgctgggaacggcggggtgtcgctgacgctcggcctcccgcacggcgccggaggcagcgccgagcagaccgcgtcgttcctcatgggcagcaccacggccggcgacagcggcagccacggcgccgccaccagctacgacatgaacatgcagagcaccaagtcgttcgcggcgcagctcatgagggacttcgtggcctagctcccttaggacgcatagcatagcagtcgtccacgcaattaatcaaatcatctctccatcgatcaattaatttagagcttgtatagaaataaagggttcaagcctaaatatgctttgcgtatataaagcagttaagcttggactcataggtcttgctgggaatgtaaagatgggatatatatcatggggccatgtatatataggtataggaggataggtaactagttgatacccaaacattgtacaagattttatatgtagatcatagggattggggggtatacagtaaagtatgcgaaaagggtatattggaactggacttagtgtatgctgtagaaattggcctactagtattatctgcagcaattcagtatttgttttgcttactgtaaacatagcacattgtgattcattggcagcaccatgtgctgttagatgacattgtggataatgctgctccagtgagatgtttgttggtggcctcagctagaatccagtgatctagtacctctgaatgttgccagcagtatctgttcggagcaatgacaaatctgctc

SEQ ID NO: 42344 - DNA, 1703 bp, Zea Mays
cgaagaggagactcccgcatcacgctctgccactgacgtggaagagattttgaaggtaatgactgaatccctgcctgcgaagctaagtccattggggcctcaactaacaaagttttttcagaaggaaaaggagcccgaaaaaacgaagaaaacaactaaaacaaagagacaaagaatcatcgcagtgacagaagtcattgacaagacaccaccgagagattcagctcaaaagataccagcggctgaagaaataacaaatattgaaatcacaccttcggaggtcgcggctgccgaagctacctcaactgaagatttgaacttggaaagcacaatcgaacacatcgacaaaatgctgctagacatggccacagaagaagctactactgccgccgaagaggccatggccgcaatgtctgggaaagaaaaggaaattgctgacgaaacttcagaggacgaagccttcatgttccaaaatttagttggagaagaattgtcaaaaaccgaaatagaagagcttaaagagtatgccaaatcttgtggatataaaccaggagcactcctcttcgggggtattgatgatgaaaaactagactgcatccgggatcaaactggagctaaggtcatcggtactctatcaaagagtatcggttttccgaagctggaaacggacattagccgctaccgacgacaacatatcgttggtagtttattttattccaatttcaaggtgaactacttttcccttgacttttattgtttttaataatgaaaacatgtctaacgaaggttgtttacgtgcagagtatgctgctgagcaaggctttgaaaatgcagcaagatctggaagacaaaaaacacgaggttataattggaaatttagagagcaaaataaaagagcaatcagctactattgaaaagaagaacttcgagcttcaggcaactgaaggcttattggcagaagccgaagctaaaataacggaattgaatacgaagcttctctgccaatctgaacagtttgaacaagaaaagcaagaacttaatgcgaaacttgaagccgaagtccaagaaaattcagatttgaaaaaattattggcaagccttcaagataaatgtttggaatttagcaacaaatgtattcaacgactgagaaaaatcttctactcagttggagctagcagtgagaaattcacgccgtcagctgaagatttaccaaagaccttcgaacatattgaaggtgaaattgatgagcttgacgaagttatagccgggcacggtgacttctgtgcctgggtagcttctcgaggcactgctgcagctttcctaaaagctggctgtgatcatggaaaaattgtcaataggccaaatttcactctatcaccaacaattttagatgatattcctgacctcgcccgaagcatttctaacagatttgtaaagatgatatggacaaaaggcgggcgagaaaaggctggagacgaagctcggagtcatcttgaaccagtaagaaatcataccttgtgcttaccttttccttcaagcttggttttgacccacaacaacttaatttatgtaggatgacgaagccgagaccgatgcttaaaaagtatgacgccgaagctgaggccccatgaagatcaataggagtagactgtagacagactcaagaaacttttgagataacttttgtaaatatgactaaactt

SEQ ID NO: 42345 - DNA, 1765 bp, Zea Mays
cgccaatacgccggggatagaaaaatctccaccgagacgtggaagacagcccgtcgttctcgcgtggcggcgtcactagctaaccctagatcaagacgagtgcatccaccgctctccacgccgccgccgatctcgtcgagaggcatccacgactctccacgccgccgccgatctcgttcgtccagcgtcaagaatgtttggaagaggatctcctaggatgaacctgatccaagctgcagctatgcaaagagtatcccctagatctactactaacaagcgcaagaagagaacatcaccaaaagttggtcgtcttagagcaaactggaatagtggactagaaaagggtttagttgaaattcttcaagaccacaacaatgactgttataagggccaaaatgggtggtcatcggaagcatggaatagaattgtcaagttattccatgagaaattcccttatgtcacatttacaaaatgccaaatccaagataaagagaaagagttaaagagagactacaaggctcttaaagaggcaagacaacaaagtggggtatcatgggatgagcggttgtgtagaatagaggcagaagaacccatttggaataacctcaccattagtaacgagagacttaagaagtttcggactaaatctttcccactatttgaggctttaggagagctacatgatgggaatattgctgagggaaccatgaattttacttctattgagccttatcgacctccagtcacacaaccttgtcaaggtgctgctacacatccttctcaagctgcttttatgctcacacagccttctcaaccgtctttcacacaaccttctcaacccgctttcacacaaccttctcgaattgcttacacacaaccttctcaagccgctttcgcacagccttctcaagccgctttcgcacagccttctcaagccgctttcacacagccttctcaagccgctttcgcacatccttctcaagctacaatcacacaagccatttctaatgaagatgatgacctcagagtattagatccaatagcccctacatcagtgagcaaaagggcaaaaaatgttggtgctggtagttcaaggacaagaattgacaagcgtggacaagatgggaaggtggttgagatgatggaaaggtttctagagatgaaagaaaaacaagatgaggtggagaaaagggcgacaactaatgcaaatgaggatgatttccctattacaacatgcattgctattgtggatggaatggaagagctttctgatgatgagaaggttgatgcttatgatgtgtttaaggatgcccaaaacagggccattttcatgattgccaaagatgctacacgcataaaatggttgaggaagaagattgctagaacatgatatatgatactgcttatgatgttgtttgaaacttgagggatcaaagaaaatgcaacgaagaatttggaagaccttgaaattattactagcaattgtttgaaagcaatctagtaagcgaactttcagttggaacctgtcatggcacttgtgaaatcttcattttttataagcacctctgaatgtgatccttcttgtcattaaatcaagactacaaagatggatgtttatttaatttgccataagcacctctgattgtaatacttcttgttattaaatcaggactagaacgatgaatgtttttttctaagcacttttgaatgctatgttaatttgcacattcgatgtgccatggtcagtatttgtgctaatttttca

SEQ ID NO: 42346 - DNA, 2327 bp, Zea Mays
gcgctctctgtggcggacatcaaatcctctcggagaacagccaaacgagccaccaaaatgtggcgctccgggcaggggaggtgctgtccaagttggcgtcgttcggggtgaaggtcctactggacgagcggagaggggagtcgtcatcggagaggaggcgcgccagggcggtggagttgcgcaccatcttcactaggctcggcccaaccttcgtcaaaattggacagggcctgtccacgcgccccgacctctgcccggccgagtacctcgaggagctcgccgagctgcaggattcacttcccacatttccggatgaagaggcatttgcatgtattgagagagagcttggcttcacgcttgattcaatctactcgacaatttcaccttcccccattgcagcggctagtttaggtcaagtttataaagcacggttgaaatactctgggaagctggtagctgtgaaggtgcagagacccagtattgagaaagccattgggcttgatttttatctacttagaggacttggctttcttataaataagtatgttgacattgtaaccagcgatgttgttgccctcatcgatgaatttgctcgaagagtttttcaagagcttaattatgttcaggaaggccaaaatgcaagaaggtttaagaaattatatgccgataagcaagatgtattagtgcctgatatattttgggattacacaagtgcaaaggttctaacaatggagtggattgagggtgtaaaattaaaccaacaagcagttattgaaagtcaaggattgaaggttctggatttggtcaacattggtatccagtgtagcttgagacagcttctggagtatggttactttcatgcagaccctcatcctggtaatatattagcaacacctgaggggaaactggcttttcttgattttggcatgatgagtgaaacaccagaggatgcgagggtagccattataggacatgttgtccacttagtcaacagggactacgaagcaatggctcgtgattattatgcactagatttcttggaacccgatgtagatgtttccccgattgtgcctgctctcaagaattttttcgatgatgcactaaatgcaacagtgagtgagttgaacttcaagacaatagttgatggcctaggtgctgttctctatcagtacccattcaatgtaccagcatactatgcattgatactgcgatcgctcaccgtactggaaggtttagcactctatgctgaccctgattttaaggtgcttgctgcatcatacccttactttgcgaaaaggctactgactgatcccaacccatatctcagagatgctttaattgagcttgtattcaaggatggaaaattcaggcaagtacctgctcatctgtatatattttatactcttcacagatcaaagcaccactcaggatagcgttgtttaatgttcacgtctctgcagatggaataggcttgaaaatcttcttgttcaagggcgccaagatagggagtttgcagccaaagatgcactgcagcctgttctaaagcttctccttggtcctggtggggaggaattgcgtgcgttagttgtgaaagaggcagttcgtgtgacagaagccatcgccattggaacactggtcgattcatacaatgcagctccatcatttttgaagccattaatttccagcggcaatctagctgaaccctttaagtttagtgagactgaacaagaacagatgatggagctccgagaccaggttttcagagtatggggtcttttgagatcctcaaataactttgatccgagccttttgcagccaatcgttcaggttctacaagaaccagaggcccgtgtcttgggttctcgtgtcgcaggtggtgtaacacagcgccttgcggcacgtctgctgcaacagcttctcaggacccctcctgctcctggatcttcttagcagatatatagatataggctcgtatgattgtatgaagcatgtaaattgacacgatatttttcacaggaaatgagaaggaagcacaacccagaattcgagtatatagctagtttcttggttctaagtggataaagacattgtgcatcgagctttgtccagcagaccgtgtatatagttgtgtaaaaaacattgttttgtgctgtagattacactgtttacggagtgaagattgaaatgataagacatggacgagtgagctgctaagatgtcacgcagcttagatccaccgctgttcaccctgtaaatcatgatacgcggaccaattatgcatttacgcgtatgtgtagccctaaaacttctacgtgtcaaaataaaag

SEQ ID NO: 42347 - DNA, 1507 bp, Zea Mays
tcattcgatcaaaccgagcccattgcccttgccccccagccgcgcaaacgtgagcgcgacttggcaggcgtgctcgtccggtcttcgtcctggttccctgtgcccccactgttccagcatcagatattcagatcagatcgatcagaccagaaagtttgcgctcgtctgcttggtaaaggaaaggagaagtttccgaaataggggcggcgcgccgggcgcattttggttgctggattggaaccgagcgaacgcgccggagtccggatgggctcctcgtccgctccggcggccgcggccgcggccgcgccgagccggcgcaaggtggcgctctacctggccctcctcaccctgcagtacggcgcccagcccctcatctccaagcgctttgtccgcgaagatactatagtgacctcactagttcttgcaacggaagcagcaaaggttatttgcgcaatcattttattgattgcagagggtagtctgaaaaaacagttcagtaactggactctcactggatcactgactgcgtctggactgcctgctgccatttatgccctccagaatagtctgctgcaagtatcatacaagcatctggattccttgaccttttcaatccttaaccagactaagcttttgtggacagcatttttcacatttcttattttggggcaaaagcaatcttccaggcaagttctagcattggccctcttaattggtgctgccgttcttttaagtgttggggagagcagtagcaaaggttccaagggtggtggctctgactatatcttgctatatgggatcattccagttacagtcgcttctgtgctgtctgggctggcctcttcattgtgtcagtgggcatctcagataccggtattaatgaatgccgtgggtggaattcttgttggtcttgtcacaacttacgcaggtggcgttagaaagggttttgttatagtttcagctctccttgtaactgcactgctacaatttatatttgatgggaagccaccgtcactctactgcctgatagcattaccacttgtcgcgtcaagcatattcatctaccaaaaacatccatatgttgataggaagaagaaagactgatccacataattgtcagagacgggaattatcaacaggatgtgatcctaacctcattttctccacaaggctggaatttgcaccgtcaaggggaccaaatttgactcttgaagagttgctgttcgtcaagctatgtttcaattatctactgatctatatatatagaattaattagtaggacactagcctggaatcagtttcagcaggcagttgacaagcttgcatataacttctcgaaggaggcttcgtatcaatgatgatgatgaagtgtttccatgtgcagctatctatacttgtacggttgctgaatctattgtattttttatggatttctatttagattccgactttcgaatatatatttctatgatggcagcaaattaaaaaccaattattgtgtgccgga

SEQ ID NO: 42348 - DNA, 211 bp, Zea Mays
cccaaactagaatttatcaacgttctcacaagtattgagtcacgtttgatgctggtacgtgaattaactacgtgatgcggagaaccataactaagttgacctcaagatggtgcaaggagtggtcttctttgtacaatgatgtcgtcagtcggaccaacctgaagggcagacgaaacaagtgtcagaacaaaggctgatcgtcaagtgatcg

SEQ ID NO: 42349 - DNA, 3532 bp, Zea Mays
gtttccctaaccatttcactgctccacgctccagcgaaggcacacaaccgctgccgtttcttcatctcccaatcttcatcttcctcgcagcgtcccttgctcgcgttcggcacataggcgacggcggcggcgctcaggatcgggctctcggcgacggcgctcagggtcgggctcttagcgacggcgtcagcggcttcccctcccgcctcccgttagtcgcctcgcgccctcgcctccggtcctccgcccacccgctggtgaccctgcgagcatgaatcactgacttgtgaaccattacctttatgggaaaagaaaaactccataagcagccctctggccgtctgattgaatctctcaaaatggagaggatgaggaacatcctgactcatagatatccatatccgcatgaacactcaagacattttatcattgctgtgtttgcttgttggcttttcttcatttcctcggataatttgcaaaaccttataatgaagttggacaagaattttaaatggtggtccatgtatgcttgtttgattggcttcttctatttcttctcatcgccttttatcaggaagaccatcaaaccaaactattcgaacttcaatcgatggtatattgcatggatattcttggcagcactataccatctgcccagttttcagtcaatgggcttggatttgcggatgaatctttccctcttcctcaccatttatatttcttctctaattttcttgatggtcttccatatcatatttcttggcctttggtatttgggttttgtttctcgtatggcagagaaaaaaccagagatgcttactataatacaaaactgtgcagttataagcatagcttgctgtgtgttttacagccactgtggtaacaggactgtttcaagagacaaatctattgatcgtagaactgctagctggattgtattctcactttggacaaagcatgatgacaacacactgatttcaaggctattgcgtatgcataaatttaaagaacagatttgctcctcctggtttgctccagttggttctgctagtgattaccctcttctctctaaatgggccatttatggagaattgtcttcaaatggatcaggttcctccaatgaaatttcaccagtctactctttgtgggctacattcatgggtctttacattgccaattatgtcatagagcgttcaacgggatgggttttaactcatcctttgacaatttcggagtatgagaaattgaagaaacagttgaaaccagattttgaggacatggttccctggtactctgggacatcaactgatttatttaaaactgtctttgacctcatgatatctgtgactctgtttgttggtcgatttgacatgcgtatgatgcagatactggtgatggtggcaactctacatatgctgtagcacgattacttgctcaacccttgttagttataaactctgatgactcgaggctaacatttcctcgtgggcaactgcttctcgttggtggtgaccttgcgtatcccaatccatcctcattttcgtatgaacgacgttttttctgtccttttgagtacgctctccagcctcctgcttggtataagcctgaacatatagcactggagaagcctgaacttccccttggggtttctgagcttaggcggtacagaggaccacagtgtttcatgatacccggaaaccatgattggttcgatggattaaacacattcataaggtatatctgtcataagagttgggtgggtgggtggttcctacctcagaagaagagttattttgcattgaagcttcccaatggatggtgggtttttggtcttgaccaagctcttcatggtgacattgatgtttaccagttcaagttttttgctgagttgtgtcaacagaagtatgcaggtcggagaaagtgattccgtaattattataactcatgaaccaaactggctccttgattggtattggggtgatagcactggcacaaatgttgcatatttgatacgggagtaccttaggggaagatgcaaactgcggatggctggggacctgcaccattatatgcgacattcttgcattgagtcaaaagaaccagttcatgtacaacacttactcgtaaatggctgtggtggggcctttttgcatccaacacatgtcttcgaaaacttcagggtattttatgggaacaagtatgaaacaaaatctacatatccttcttaccacgattctagcaagattgcacttggtaatattttgaagttccgaaggaaaaattggcaatttgatgtaattggtggttttgtgtactttgtcttggttttctcaatgtttccacaggagacgtgttttgcttggttttcttcatgccgctgctcatcttacttcggcagtgctactgatgctacttatggaattagctattgaaatctgcattcggaaccatctattagcaacatcaggttaccataccctttatgaatggtaccgaaaagtggaaagcgaacattttcctgatcccacaggacttcgcgctcgtctcgagcattggacctttggactttaccctgcatgtattaagtacctcatgtctgcattcgacatcccagaggttatggcagtaactagaagtacaatctgcaaaaaaggaatagagtcccttcccaggggaggtgccatcatctattatgtctgtgttttcctgtacttctgggtcttgtcaacacctgtcgtatcgctggtgtttgggagctacttatatttatgcataaactggttccatatccatttcgatgaggccttctcctcgctgcgcatagcaaactataaggcattcacacggctccacatcaagaaaaacggagaccttgaggtcttcaccctggctgtggacaaggtgccaaaggattggatgctggatccagactgggacatggaacccaagcagccattccagatgagctacaccaggaaattcccaagcaaatggagggctgcgtcgggccttgacccaatcaatgctgtgcgcattgttgaccggtttgtcatcccgcgaacgccctcaagtcctacaacaccaggaggctctgtttcaagtcctacaacaccaggaggctccgtttcaagtcctacaacaccaggaggctttatgagatgatgttcatgctgctgtgaaatataatgtaatgtacacaaggatatcttcgacttctcgggagaaattgtacagtacacaaggtcctctaacataccacgggagaaatagttgggaaaaaaaatagagggcaaatctccacaagatccaaatgttgtacatctggtgttatatcagttgtcctgatcaggtgtaatgataagtttttcaaacttagggtgtgattggtaggctgaatccggccctgcctggttgcatggatgcagcctgaacatgtttggttggttggctctgtgttgggccaagtactggagatacatttcctggccttgggcctgggaatttgtctccaccattgccactctgctgtccg

SEQ ID NO: 42350 - DNA, 2621 bp, Zea Mays
agaacatgcaagaactgaccacggccgggtacgctgtgccagcccggccctgcaacgcggagcccatccggtccccgacacaagccatgcaagatcctaccatttctgagctcatccatcttgactcctgcacggccactcgggtccctctttcgaggccgatgttgcatggcatggcatagccttcttccatgccaatcgccaaccacacaaaagcaagctgctccgttccgcagaggactcgagagcacgagaccgcagcaggcagcagctgaggcggcgctatattctccgaaactcctgatcaagatctgaagacacctcgggtccctctccttctcttctctccatctctctcctccctccaatgccccaaccacctcgccatgacataggttcagactcccgttttggcatcgctagccaccgagacagagaggagagctcggcctggcctggccttgtctggccaggatgaagtttatgaaactcggcacccgcccggacaccttcttcaccgccggctccgtgaggtctgtctgcacagaggtggccacagacctgcagatccttgtggataactgcctctaccatctccacaagttccctctgctctcgaaatgcatgctcctgcaagcgctctgcgccgacgccgtcgccggcgacgtcgtcgagctccggggattcccgggcggcggtgaggcgttcgaggcctgcgccaggttctgctacggcatcaccgtcacagtgagcgcgcgcaacctcgtgccgctccggtgcgcggccgcgcacctcgggatgtccgaggccaccgacaggggcaacctggccgccaagctcgacgcgttcctcgcctcctgcctcctccggcgctggaaggacgcgctgggcgtgctgcactccacgcgccactacgccccgctctgcgaggacctcggcctcacgtcccgctgcgtcgacgccgtggccgccctcatcgccagcccggataccgccctgccgtctaggtcgacgtcggcgtcgccgtggtgggcgcacgacatcgccgagctcggggtcgacctcttctggcggatcatagtcgctgtcaaggcgaccggtgccatccacgacaggaccgtcggcgacgcgctcaaggcgtacgcgcggcgttggctgcccaacgtcgccaaggatgggcacgggctctcggcgggccagccgttcgaccacgacgccggcagtgcggtcgtgaagcaggtcaccacgaggcaccgcctcctgctcgagacgatcgtgagcctgctcccagcggagagggacgccgtctcctgcagcttcctgctcaggctcctcgaggctgccaacatcctgagcgcgtccaaggcggagctggtcaagagggtggcgtggcagctggaggaggccagcgtcgccgacctgctgatcccgtcgctgtcctgcgtcagcgagacgctgtacgacgtggacgccgtgtcggccatcatcgacgagttcgcactgcggtgcgcggcggtcccgccggcgctggctctgtccgggagccccgacgacagcccggcgcactcggccgggcaccggcggtcacgttcggcggagagcgtgagcttcgacggcacgcgacgctccctgtcagccgcacccgtgtcgcagggcgctctggtgcaggtgggcaggttggtggacgggttcttgattgaggcggcaaaggatcccaacatgccgctggacaagctgctcgccattgccgaggccgtgccagacagcgcccggccggagcacgatggcatgtacaaagtcgtcgacacatacctcaaggcgcatccggagatgagcaaaagcgcgaggaagcggctgtgccgggtgctcaactgccggaagctgtcggagaaagcgtgcacacacgcggcgcagaacgagctcctcccgctgcgcgtggtcgtgcaggtgctcttcttcgagcacgcgcgcgccgcggcgctggcgccgggcgcgcacgccctggccgcggctgacctgccgagcaacatccgggcgctgctgtccaagtccgggtcgtccgaggacgaggaggcggagcgcgccgacgagcagcggctccgggcgctggccgccggcgcgtctcccggcggcgactggagcgtggagggcctccgtcgcgccgcgtccaagatcgccacgctgcggatgaagctggcggaggacgaagaccgtgacgccgacgagttcgcgcgcaaggccggcgtggcgcgcagcgcgtcgctgcggttcagggcgttctgcgcctttcccgccgggaagccgaagcggatgctcagcaggctgtggccgctgggcagaaacggcgttagccactagtagcagccatggttaggtacttaggtcctgtgatctcctgcctttttcttttctgagggtgatctgtttgtctcttctactagtactttctcggctcctccccttttgagttataattccaaggcaaattgtaccttgcattgcatgtagttgtgaattcaatggcaacaataaagatagaaattgcgctgggaacttactcctcgtatctgtaaataatatattacagttctctaaatattagatatacctaaaaaactggt

SEQ ID NO: 42351 - DNA, 1299 bp, Zea Mays
cataatttaaaaaaacgcaccgactcccctacagccgccagcgatcccaatccccgactcctccggcagcccgcaacgactcgcgccgcctccggtcgcgccgggtccagggactgactggttgtgcaaatacctacttttaaattattgaaagtgggagcatgaaagggtcaggacacttattgattttgaacaaagatctagcatggaaccatcctcacagcctcaaccaatgatgggtgttgggtcacaaccttatcctgctgctgctccctatgtgccagtacctggatctcttgctgttcctcctggctcacagccagcagcagcattccccaatccaactcaactcagtgctcagcaccagatggtgtaccagcaggctcagcaatttcatcaacaacttcagcaacagcaggaacaacagctcagggagttctggactacccagatggatgagatcaagcaagcaaatgacttcaagatccacaccttgccacttgcaaggataaagaagataatgaaggctgatgaggatgtgcggatgatctctgcagaagctcctgttgtgtttgcgaaggcatgcgaggtattcatattagagctgacattgaggtcatggatgcacacagaggagaacaagcgccggaccttgcagaagaacgacattgcagctgccatcaccaggactgatatatatgacttcctggtggacataatcccgagggatgaaatgaaagaggaggggctcggacataatcccatagttggcctgccgcctgctatgggggctccagctgatcatggttctcatccatattactatgtgccagctcagcaggtgcaaggagcaggtatgatgtatggtggccagcagggtcacccagtgacttatatgtggcagacgccgcaagggcaagcggcagagccccccgaagaggagcagcagcagtctgcctgaatgtagcaaatagacgataacagcaaagcaattacatcttgatctgaagttctgaacttagttctctaaacaaacaaatatgatttggttatgttaattgtgcagatgattgcaggctgaaacaattgtcgctaattaggtgtcatagcctcatagggtttcctaatggtagtttcgactcccgacgctgccacggcagcagtagaaaatgattgtaatttgcagactaatgtagtaagattagccttttctgtctaatccaatatacgattgaggccctcgtatgaactgagtgtttgtttgccttatttttttaaccattgtgctctttgcttggc

SEQ ID NO: 42352 - DNA, 6102 bp, Zea Mays
gcagaggaggctagatcgagggggagagggaccgcccgcgattgctacggcctccatcgcagcgagagcttgaaagcgtgcttgcctgccattcccagctcccagttcctttccttcttcttgctcgtccacccagtactccactgctcctcgtcctcgtcctcgtcctccctctcccgccatccccatccccgcgacgacgcgcatcggaccctgcgtcgtacgtgctcgcccattccctagccgtcagtggatgtgccgggctggccgcgggccgtccgagcctgcggcggcggcaggggagggcgacaacccggcgggcggcaggagtggcagcgggaaggaagccatccaaccgcggagatgtgggagcccaggaggtcgtagcgaggggtttccttgattggtgaatcttcgatcaaggatggagcaccgggctttgctgctcggcgtggcgctggcctttctgctggcctctggctcccagggcttgaaccatgaaggttggcttctcctagcgctgaagagccagatgaacgacactctccaccacctcgacaactgggacgcgagggatctaacaccatgcatctggaagggcgtcagctgctcgtcgacgcccaacccagtggtggtgtctctcgacctcagcaacatgaacctgtcaggcacagttgcgcctagcattggtagcctgtctgagctgaccctccttgatctgtcctttaatgggttctatggtaccatccctccagagattgggaacctgtcgaaattggaagtgcttaacttgtacaacaacagttttgttggtacaataccccctgagctcgggaagctagataggctggtcacgtttaatctgtgcaacaacaagcttcatggcccgatacctgatgaggttggaaatatgacagcacttcaggaattggtaggatacagtaataatctcactggctcactacctcgttcacttggcaagctgaagaacctgaaaaatattaggttgggtcagaatcttatatcaggcaacattcctgttgagataggtgcatgcctgaacataactgtgtttggtcttgcgcaaaacaagctcgagggtcctttacctaaagagattgggaggttgaccttgatgaccgacttaatcctatgggggaatcagctttctggtgttattcctccagagataggaaactgtacaagtctgagcacaattgccctctatgacaataatctagttggccccattcctgcaacaattgtgaaaattacgaatcttcagaagctatacctttacaggaattcattaaatggtacaattccatctgacattgggaatctttctcttgcaaaagagatcgacttttcagagaatttcttaactggagggataccaaaggagctggccgacatcccaggcttgaatttactctacctcttccagaaccagcttacaggccctattcctacagagttgtgtgggttgaaaaacttgagtaaacttgatctgtcgatcaattcactgaatggcacgattccagttggatttcagtacatgagaaatctaatccaactgcaactcttcaacaatatgctttctggcaacatacctccaaggtttggcatttatagccgtctttgggtggtggatttctcaaacaacagtataacagggcagataccgaaagatctttgcaggcaatcaaaccttattttgttgaatttggggtctaacatgcttacaggaaacattcctcgtgggatcactaactgtaaaacattggtgcagcttcgtctcagtgacaacagtctgacaggaagtttccccactgatctctgcaatctggtaaatttgacaacagttgaactaggtcgaaacaaatttagtgggcctattcctcctcagataggcagttgcaagtctcttcaaaggctggaccttacaaataattatttcacgtcagagttgcctcgagaaattggtaatttgtcaaaactcgttgtcttcaatatctcatctaatagactaggaggaaacataccactagagattttcaattgtacagtgttgcaacgccttgatctcagccagaatagctttgaaggttcgttgccaaatgaagttggtaggctgccacagctggagctgctatcttttgctgacaataggctaactggccagataccacccattcttggtgaactatcacatttaacagcactacagattggtggcaatcagttatctggtgaaataccaaaggagctgggtctgctgtcgagcttgcagatcgccctgaatttgagttacaacaacctctctggcgatattccatcagagcttggtaaccttgcactgttggaaagtttatttcttaataacaacaagctgatgggtgaaatcccaaccacatttgctaatctgtccagtttgcttgagctcaacgtctcctacaattatctctctggtgccctcccgccaataccgctttttgataatatgtctgtgacctgttttattggaaataaaggattatgtggtggacaacttggtagatgtggatcccgaccatcctctagttctcagtcatccaaatcagtcagtcccccattgggcaagatcatagcaattgttgctgctgtcattggagggatttcacttattcttattgcaataattgtgcaccatatcagaaaaccaatggagacagtggcccctttgcaagataagcaaccttttccagcttgttctaatgtgcatgtttctgctaaggatgcatatacatttcaggaattgctcaccgccacaaataactttgacgagagttgtgtgatcggaaggggtgcatgtgggacggtgtacagagccatcctgaaggctggacagacaattgcagtcaagaaacttgcttctaacagggaagggagcaacactgacaacagctttcgtgcagagatcatgactcttggaaagataagacatcgtaatattgtgaagctttacggttttgtataccaccagggttccaaccttctactctacgaatacatgtcaagaggtagtcttggtgagctacttcatggacaatcatcctcttcacttgattgggagacacgcttcctgatagcacttggtgcggctgaagggctttcatacctacatcacgactgcaagcctcgtatcatccaccgtgatatcaaatctaataacattttacttgatgaaaactttgaagcccatgttggtgattttgggttagcaaaggtgattgacatgccatactcgaagtcaatgtctgcaattgcaggttcatacggctatatagcaccagaatatgcttataccatgaaggttactgagaaatgtgatatatatagttatggcgtcgtgctgctggagctgctaactgggcgtgcccctgtgcaacccttggaactaggaggcgatctggtaacatgggtaaagaactacatcaaggacaattgtttgggtccagggatcctcgataaaaaaatggatttacaagatcaaagtgttgtcgatcatatgatcgaggtcatgaaaattgctttggtatgtactagcttgactccgtacgagagaccaccaatgcggcatgttgtagtcatgttaagcgagtctaaagataggacgagggtcagctctgcatcctcgcctgcctctgatgattcttcaaagaaggatgactcataatgtatttataatatgttcgattagccaaaggtaatacacatttttttactgacttttcctagtattgatagtaattagtagggttcttgtaatctgcattcattatttgtgtcagcatttcgtagggagaaatatgatagtggttcatagtttcgtagtgtcattgtatgccgttgtctcagaaaggtttcagactagcatgaagcatttgaggcacgtgacggtcttactgatgccgttgtctctcagaaaggcttcctcttctctgcagatgttcattgttcagttaattctatatgcgtcggtgcattcttactcgagttacaagtacactaggaacacctgtcaggtagccaattctgtaatattctccaacatgaactgcagtgcagatcatatgtaatcatcgatcatatgcaatcgctctttgtagctgttaacctgtagcctctgatcgttgttgctgagtcgtctttctcttccccttggcatgtccgtaccaaaaaataagttatgaaaccacgaagtcgcgcccaccaacggacgctgcctctaaaaaagcagatcagcgcgttgtcgcagcgtcggagcacaagcgacatcgctccccgggggccgtcggccggcgaccggcgacttccgcagtagaaccaactccacccacccatccacttggccagcagcttcttgcctgcatcaattgccatggcggcggtggaagcgaagaggagcccacactttgttctctttcccttcctggctcacggccacgtccctgtcttcctccgcctggctggcctcctccgcgcgctccgcccagggctcgaggtcacgctcgtctccaccccgcggctcctgggctccctcacgctcccgcctgcctccccacccgtgcgcctccacgcgctcccgttcgtccccgccgaccacggcctgcccccaggcgctgactccctcgccgatgtccagatccaccagttcatcaccttcttcacggcctccgagtcgctccgccctgcgttcgagaagttcgtctccggcatcggttccccagtctgcatcgtcgccgatgccttcttcgggtggacggccgaagtcgcgcgcgcgcggggcgcgtcccacgcggtgttccttcccggcggcgcgttcggcaacgccgtgttcttctccgtgtgggagcacctcccgcacgcccttacggccgccgacgagttcccgctgccggatttcccagacgtcgttctccaccgcacgcagatcccgaggttcatcctctctgccacgggggcggacccctggacggccttcttccggcgcgtcatcgcctcctgccgcaagaccgacgctctccttgtcaacaccgtccgggaactggaaccctccggcctcgacatgctccggagaagcttcggcgtccagccatggccaatcgggccagtcctcgcagagccgacggccccgtcgtcagactcgcgggacgacgccagcatcatccggtggctggacacgcacccgccgcgctcggtgctgtacatatcattcggatcgcagaacagcatcagcgcggatcagatgatggagctcgcgctggggctggaggcgagcggtcgccccttcctctgggcgctccgcccgccgctggggttcgacgcgaaggacgtgttcaggcccgagtggctcccggctggcttcgaggagcgaacggcgagggcgaatgtgggactgctggcgcgcgggtgggcgccgcagatgcggatcctgtcgcacccgtccaccggcgcgttcctgagccactgcgggtggaactccgtcctcgagagcctgtcccgcggcgtgccgctgatcgggtggccgttgggcgccgagcagttcttcaacgcaaatctcgcggtcgagtggggcgtctgcgtggagctggcgcgcgggaacctggagagctccgcggtggagagcagggcggtggtcgaggccgagcggacggtgatgggggacacggcgaagggtgatgagatgaggagggtggtggcggcgatcgcacgcaccatggaggccgcgtgggaagcgcctggcgggtcggcggcggagagcctggaagggttcctgcgatgcgttgaaccctgagatgccccgctttgagatggttgcgcgaggaatctgcaactaagtacgcgcgcgggaaatctgtgttaagaattcctcaactacaaaggacgacggattgatgggattacggctcctgttgcattgtaacagaaacggatttgtttggttcattaacgtgtagcctgcaggattggatagcgcttctgggtagagataacgagcagacagtggtgcaaacgtttacgggcataaaaaacggtgaaccaaacaacaccttaaaa

SEQ ID NO: 42353 - DNA, 244 bp, Zea Mays
ctttggctaagaagttttggtctgtaccatatcaaattgtgagataccaggggctttaacagggaggtgtgtagatggggcagtaggcctaaggtaattgagttcaggctttcatttgaaaactaacgaagatcacccctgctgctctcacttgtgtatgtgaatggaagtgaggggaaacgaagactgaatattggttgtggtgtcgactatgtaaagtttcagtatctgaaattgaattcgg

SEQ ID NO: 42354 - DNA, 2463 bp, Zea Mays
cgaagcaaaccgaaacaaacaaacccaagtgcgcgtccgagcctcgaggcggagaagaaaccggagcgagatatttgcatttcagtccctgcgaagagaaaaccgtcgcgtcctcgccgcgccgctcgcgtcgggatcccgccgccgccctactcggtcgaccatggggacggcgacgatggcgactgcggtgggcgcggccatgctgctctacttcgtgctgagccggcggctggcgggcgaggacgtctcagcccgcggcggtggagggggaggagtcgggtctggaaagcggcggagggggcgcgcgctgcggcggccggtgcagccgccggcgacgtggatcgaggcggtgggcacgctcgcggaaacgctgcgtttcacctactcggagacgctcggcaagtggcccatcggggacctcgccttcggaatcaagtacctcatgcgccgacagggcaatttacatgttgccagtgtatatgctggaagtgattgcattgaattgaaaggacctcaaatcatggaagagctgattgttctacggcggttgattgacctgtgctttcttttctctaagaagccatttccagtgtttcgggaattagctggattttcacaggaggatgttcttattgaggaaccaaaggcggggattttgaagcctgcccatacaattatacgtgatgagtgcaccaaatccttccttgttttgatccgagggactcatagcatgaaagatactctgactgctgctactggggctgtagtgccatttcacctctcacttttggatgaaggcgatgtgagcaaattagtgttaggttatgcacactgtgggatggttgcagcagcccgctggattgcaagaggtgtaacaccatgcctccgtgaagcagtcagacaatgcccagagtaccaaatcaagattgttggccattcattgggtggtggtactgctgcattgctaacctacatccttagagaacacaaagagttttcttcaacaacttgtgttgcatttgcacctgcttcttgcatgacatgggaattagcagaatcaggcaagcattttgtgacaacggttgtcaatggagctgatctggttcccactgtatcaactgcatctattgatgatctccgttctgagccactgctttaggaactcgcctgcagtctttttctggtgcgagagagagggttgcaggtgctggagcatttctacgtcctgtttcaaacaaaacccaggttgtgatgaaacaagcacagaatgtcgcacaggctgttgctagaagtcggtctgcattttcctcatggtcatgcatgggtgcacgtcgtcgaggtgtaggtgtagttactgcatgttctaaagatgatatgagagtggaaacccatgtaacatcaacagttgagtcaaagtctgtccttgtagaacattgtggcgccaagaccatagaagaactgcagtatactgcagctagtgtttctgttcatgatgcagcagaggaagaagaggctcttttgagtgaacatgaaacctccagggagaatgccgaagaagaaacaacagagggtgagttgtggtatgagtttgagaaggacttggatcgacaagctgaaatggaggcacgaacaagggaggaagaggcagctgcagccaaagaaataatggaagaggaaagtgctgtgctaaaaggtgtagatgacaggcagtccttcacaccagatagcttggagaggcagcaattctacccccctggtagaatcatgcacatggttgcaatgcctcccacagacgctgacccagatgatccggttgctgctgacgagtgctgtgttggaatatatgagacccctagagatctttacagcaagattcgactctcaaataccatgatcaatgaccactacatgccaatgtataagaaaatgatggaaacattgattgagaagttcgcgagggatgaggactgctattgtacaggttctactgcagaataacatggaagcatgaatgacctatgtacatcgataactgtacaatactccgtgttagctgttattagcctatctgacattgcaatatacaagaggtgatgtcctcctgacccgtgaaaaaaggattttagttagggtcatgtgagtgtgtgatgtgtaaatgtaaaagaaaccagaatcagcaatttaataccttttccagtcatatttgcttgtactttacaagcatgtgatgcttggatcttgaaatctaaatgtttacaaggcattttaaagtcaggcgcttagcaagaagagcgttttgacattgttcatacagaccaatgggcaatgactacagggaactaaaacgataagagttgcaatggcgcactggtgcttgtttagctagccatactatttgatacttgacatggctgttaagaactgaaatgtaaagtgaaagtagagaacggaagaaattgt

SEQ ID NO: 42355 - DNA, 4024 bp, Zea Mays
atcgcgcggtgcacgttctgccgctccgctcacgcccgcggccgaacgctcccccgcaccttccatcctccgcgcagccacagctgcgattccctgctccccgcaccttccatcctctgcgcagccacagccgcgattcccgccgccccgccgcgctcaccttccctcccgcggcagagtgctccctcgacggggccgccccaaccatcgccctcctcatccgccatcgcgatccactcctcgacgcaatccatctaccccacagaactgctgccggcgtggcagatctcctcctcggcacctagatctcctcggcgcgatcaacggctgagcccgctgcccccaccacacaaccgatatgctctccatggaaggtcagggacctgctcgcccatgatctccatggaaggtggtctactgtcgacggcctctccctcgtgctccttcgtcaaccccgtccgccgcgccgccgagccccgagatcgcgccgatccgccattctcgcgccctcgccccgacacgcgctcaccaccggccctcaccaacctccactcgcgttccccacaccaccctccaccccatccgcgtccgccccatccgtagcacgcgggctgcagccgccccatccctaaaatgtgggcgctggcgctaccacggctccgcaccatgcctccgcgctgccagacagcgccgggcgataccatgcccccaccccggcttcttcctgccagtgtaatcggccactacttctccactgctgctcgccgtctcctcaaccaccgctgcgccacacaatcctcccgcgacgtgtctgattcaagccaggatgtctcacaggaggagcagcggaagcccgaaccgaatccaaccgagtcatctcaacgactccgccagtttccaatcgccccttttttaggcgttcaagttccttcgagatgatgacaagcagaggagagagatagcgtctccttcaatccctctggcgacaccaacaacgcatccccgtggccatcctcgattctccttgccaaggaggcgacagccaagtcgtcgcggtcacggccggcgatccactcgagggtgttcctggtgagtagcaccactgcggtggggatcggggatgggggaggcggcaatggcgatggcggggtgcagctcgccgacaaccttaagatcttcaaggctgacaacttcgatctcgacgtctagattccttccaaggctctgtgcagctgttcatccatttctcccttcgatgtcggtgtttgtccctgctatgtgtgttggatcaccattgacatatatgtggaactgcctaaggaccacttcaaatgtgtatgtagcagcttcagcacagcaaccagcaatggccccatagagagaatgcagataagccatcttcagtatgccatacactccatagaatacaacgccagaggatgccatactgataagagaaggcaccaatcccttatacagcgagaagaatccttcagtttggatcatgtggcgggcaacaccaatgaccccacctaaagcttcaccaccaggagcatccatctttgtcctgatctgaaaccaacagctcaaatcaggttgattagcccttgacatttatcaccaagggacaaagcacactaactgctttatactctgggacataaatactaggatcttacatcgtttctggacaacactacagggatcttgtgaagacataggatggttgcaaagaactcgggcatcacttcgttcagttgatgggacaggtcacttcaaggagattttgcatgagataaggtggaacaatcacttctcatcacaggttttggatatgaacatgatgatgctaggatgaccaatataaatttgtttaaggaatttactgccctaagcagggtaagtgtttcctgaactacaattgttttttttggctttttgcagatctgcacatctgaatttcctattatcctgttgggctgcctcttttttggagtgactgtagcaaccacttctaattcattttcaattgtattgaactggatgttgaccttcctagcataattagctctattttttaaaaaaatagttcattatgtatgtttctattttttatggtaccgcctatgtttatataaatttagcctagcactgcttgaataacaagtgattgaatgaggctcatatgcaaccattaaatcaatatttatgaaccaatgtttgttaaagtaataaaacatttacaaggaccatcgatgacctcaagaagctggtggtggcgtagatgggaacgcaccccgagaagatttgcatctagaggtggtgaccccacctctgtcctcaaccgccacctcgtacctcgtcttcggcgccgccggctcctgccccccttggcacgccttcggggtcctcgctggcggcaagcacctccgtcccggaggcatctgccgctgcagcatagaccaccgcgtcctcgctcagcagcaccgatgtcgatgatggcaacaaggaggacggctccgcgagcacccccgagatctgctgctgccactcccacgcagctcttgcttgtgagatctgtgtgcaggttgatgtcctcgtggcgccacgccgacctcaccgccaccaagcgcgccacccatgtcctcaccgacctcgccaaaaactataagaataggtgtagtcactgtcggggtgtacatccaattgagttttgagttggtgtttagctttcccttaccagggacggatcaaagcaccgtaataagtgtcgatatagctctttcaattgcgcctattgttttgtgcgggctatatggatcaaggaaccctctttgcagcagaggtttgttttgtgttctgctgctagtagtcgcatgtcagtttaatcttttgagttctggaagctgttggtcccttaggtgtttgggagatccttttgaatcgaagcacacacactcaggtgctatgacctttggcatttcatagttgcatatttaactggtgtgcgaagagcaccaggatagcacccttgcagcaggaacttacttttggttgcttttctgttgcctgtcatatcccgatatttgtttcctgcaaatttactttgtttaattgtattctattgattttacagcttttgtacttgtacagttacattgtcatctggtttctattgcacgtgtagctgattagttgtagtcactatcttgcaagcatagatattagggaggtattatgtccagtcaagttttgtgttggctatgtgtagcgaattaggattgcttttcctgggatggatcagagcacatgtactgtggcgatatagttgtttcaatagtatagttgccaaattttatgtgtgtgctatatagaccagggaacccacttagaagcagaaaattttctgtgtgcgcgcgaaattttctgtgtgtgctaacaaattgcaggcaaccatcttaacaacaaaagaggctcgtacaatagcagagatgatgctaaaccacttgtgcatgcaaagtatcaaaaaggagaccagacacatgttgatgaaacatctaaaaaggtcctggaatctgaatgcacaaatgtggagaccttatagaaaagggcacaagcacacatgcatcttgctgatcttgatttggcggaggcagacatcaagaaagctctagataaactacagatccagacatgttaatcatatgtactactgaagttggcttaatgaaatcttttgagaataacttgcctatttaacttgtgtcctttttgatggtggcgttgtttgttagctacaaaatcatcaatcaaagattgtaattatatcatatcactgttttctattaatttttaagctgccgtagcaaggcacgggcatcctactagttcccgtatatggtacaaaatgcaacattcgtctcaggatttatgtttctcgactatggtgacaggcctgttttcatccttctttcttcgttgtcttgtattctttttgtcaagttgggcatccaagtatctgcca

SEQ ID NO: 42356 - DNA, 2568 bp, Zea Mays
ctcagtaaagtgatgtttgatgcaggttcccctcgtcctgctccacataaaagtaacagtacttctgcaccaagccatggatatcctggtagtactgcacctgcacctgtacgtttgcctccgccaaaaggaaagggagaaggaaattttgctcatgctccaaaccatcccaatcaataccattcaacgtcatattctccaggatcagctctaccacctgcgcatccacctgacattcctgcatttagaaagcccaagattttggcaccagcgcctagtcaatcgctgctacctccaccaacaaattcatactgcacgacgccctgctcagatcctctgaccaatagtcctccaggaatgacatgcctctgtgtgttgccaataaaagttgagcttcgctttggtatagcattgtacacattctttacacttgtccccgaacttgcacaagatattgcatcgggagtgttcatgaatcaaagtcaagttcgtgttatgggggcaaatgctgcacctgatgaccctgaaaagacaatagtctttattgatcttgtgccactgggaccaaaatttgacaatgcgacggcattttcagtatttgaaaggttttgtaataagcaggtcatcataaatcataatcattttggaaagtatgacgtgttgtatgttctctaccaaggccttcctccgtcaccaccggcagcaagcatgaacaatggtcttagcaatgtaaatggtccaagtttgcatccgcttgctgctgatgtgggaaattatagagaaagaaaaggcaggcacgttattataataattattctatcaagtgtgtgtgcttttattttatgtgctggagctgcactagtgctttatttcaagcttcgaaaccacatccatttaactgaagcgtcacttgtgccaacaaaacctacaggtcctgtttctgcaatggttgggaacaggctagaaagcagacctatttcggcatcaccatccttcagctcaagtttggtggcatataaaggatctgccaaaacatttaacctggttgagatggagagagctacactaggatttgatgagtccagaattattggtgagggtggttttgggcgtgtctatgaaggtattcttgaggatggagaacgggttgctatcaaggttttaaagcgggacgatcaacaaggtacccgggagtttttggctgaggtcgagatgcttagccgattgcatcataggaacttggttaagctgataggtatatgcacagaggggcatagccgatgtttggtttatgagcttgttccgaatggcagtgtggaatctcacttgcatgataagggagctgctcagtttgattggaacgctaggctcaaaattgcacttggtgcagcacgcgcacttgcatatttgcatgaggattcaagtccacgtgtcatacaccgtgatttcaagtccagtaacatcttattggaacatgacttcaccccaaaggtgtcagactttggcttagcaaggacagctttgggtgagggaaacgagcatatttcaactcgtgtcatgggaacttttgggtatcttgctcctgaatatgcaatgactggccatcttctagtaaagagtgatgtttacagctacggtgttgttcttcttgagcttcttacagggaggaaaccggtagatatgttaagacctcctggacaggaaaacttagtggcatgggctggttctcttctgacaagcagggatggtctggaatcaatcatagatcattcacttgggcgcagcattccatttgacagcatcgcaaaagtagcagccattgcttctatgtgtgttcagcctgaggtggaccagcgcccattcatgggtgaagtagttcaagctctaaagctggtatgcaatgaaggcggcgagttcaatgagtcaacctttagccaagatttgcatatccaagatgtcgaggttatgagtagagcaagtacggatgtagacgttgacccaacgctatctgctgagctgttcacttcatcagcgcgttatgatgctatagatgcccctggttctttccgaagatactcaagttcaggtcctctaagagtagggagaactggactgaacaaagagaggggcctgtcaacaggcagctcaagtgaacacgttgggctacagaggtttaggattgatggagaatagtcagcctgcaagcagctcatgatgatgtgcgcatggaagaaatacacattggattattttcttccaagccagatttcatactcatcgtgaatagtatgtggaaaattgagaaaggcgtaaaaatcagtgtgccactgttcggtgctcccgtcgccttctttggaaagctcaaacaagacttcacacgaatttttgtacagttctagagatgatagatgcttttaggaaagaaggggtgtacacgagtttttcagctgtaattccccacgaaccgtattacgtttcgccgtagcatcagtgcaaatcaattaaagggcgtgcacgcagtcaccattttgagttcaatgaaaaaaaattcatcctgattgaccgcaa

SEQ ID NO: 42357 - DNA, 1007 bp, Zea Mays
atggtacttcaacttctaccagtgaattccctatcttgtaagcaaattgagaggcgatcatgcatttctttggaggcatttatacgtgattactttttatgtgagtcccctgttatactcagtggatgcattgatcattggcctgcaaggaaaaagtggaaggacataaagtacctagagagtgtagctggagatcggactattcctgttcaggttggaaaaaattatgcatgtactgagttgaaacaggagcttatcacattttctcaatttcttgagaggatgtggtcaagtgattctgcaaacttggcatatattgcgcagcatcaattgtttgaccagataaaggagctccacgaagatattgctgttcctgagtactgttcagctggtggtggcaaactccagtcacttaatgcttggttcggccctcatgggacaataactcctttgcatcatgacccacatcacaacctttttgctcaggttttgggaaggaagtatgttagactctatcctgcttctacatctgtgggcctataccctaacacagaaagcatgctaagcaatactagtgagacctcgacaacactgacggaaaagagtacccggagactgcagctcttgagttcgtggactgcgtattggaggaaggtgacctgctttacattcccccgaaatggtggcgttacgtgagatctctctctattagcttttctgttagctttcggtggcgaacatcacagcttccttgaggggaggttcataacgatggttttgacaaatttgatcgtacgtccacgatgtcgttccaatcatcctattggtagagacttaataagaagacttcattgagctgagcccatatttcgtggtctaagtgttgtgtgcggtcgcctcactagactgggattgtaaattgttttcacgacaatgattggtttcaaacatactaagcggtactatcaggtactagtgtggccgttttatattgtgaactgattctg

SEQ ID NO: 42358 - DNA, 284 bp, Zea Mays
aaattagtagaattgcaagaaactaattcttataaatcacaacaaattaaattattcatgccattttttgttaccttcgagttattgccacaattctttgccagaatgaattgtatctccaccacatctttagattaaacatagagataactcgaggtaattgcgttcaacagttcataccctgtgattaaaacttccacgaaccaaattcttcggttacatggacatgacatctgatttgaccacatctcacagtttagatgcagtcactgaaacaagatagg

SEQ ID NO: 42359 - DNA, 3017 bp, Zea Mays
ctctcacatcatcatcatatctctttaccccttcttcccagcgacaagagaaagaatcgatcgatcctttacatgataggcgggtgtatatatgtaagtgcttgttcatggatctatgctatatttgctataggattagaaaaaggaaagatccatggacatgatctccggcagcactgcagcaacatcaacaccccacaacaaccaacaggcggtgatgttgtcatcccccattataaaggaggaagctagggacccaaagcagacacgagccatgccccaaataggtggcagtggggagcgtaagccgaggccgcaactacctgaggcgctcaagtgcccacgctgcgactccaacaacaccaagttttgctactacaacaattatagcatgtcacaaccacgctacttttgcaaggcttgccgccgctattggacacatggtggtaccctccgcaatgtccccattggtggtgggtgtcgcaagaacaaacatgcctctagatttgtcttgggctctcacacctcatcgtcctcatctgctacctatgcaccattatcccctagcaccaacgctagctctagcaatatgagcatcaacaaacatatgatgatggtgcctaacatgacgatgcctaccccaacgacaatgggcttattccctaatgtgctcccaacacttatgccgacaggtggaggcgggggctttgacttcactatggacaaccaacatagatcattgtccttcacaccaatgtctctacctagccaggggccagtgcctatgctggctgcaggagggagtgaggcaacaccgtctttcctagagatgctgagaggagggatttttcatggtagtagtagctataacacaagtctcacgatgagtggtggcaacaatggaatggacaagccattttcgctgccatcatatggtgcaatgtgcacaaatgggttgagtggctcaaccactaatgatgccagacaactggtggggcctcagcaggataacaaggccatcatgaagagcagtaataacaacaatggtgtatcattgttgaacctctactggaacaagcacaacaacaacaacaacaacaacaacaacaacaacaacaacaagggacaataaggttagtgtgccagaccgtggaagcgttgctgctataaataatgcaattgggtagtagtacccagtgaaatcaggagagactagtagcctagggtgcattttgatttatttagttttggtcaagatgacaagtcatcatgaatcaccctttttattcatttgcatgttttgatgagagttcatttgcagtaagctatatatcattggataattaatcatttggttggatcatcagttcctatgggcattttcttcattttttctattctttaatttattaactaatgtatagcttttccaacttaactacttaatttggatagatgaagcatgttgtttaacatgaattatggtagccagaaccgtatctatatactattggtaataacaatttgttgttgcatatgtatcttttgaatgttttattccttttgtttcaactttcaatgagaaaatttaacaaccttagttatatgaggctatgcatggacctcttattgtcttacatatgtgcatgaaacacaacaactacttgcttcatatatactatagtctacatgtcacacacaagtatgcatgtatatatagtatatggcacacacaatttacacatttccacaaggtgacatatgtgtagaaagaggatccacatgttatatgattcatcagatattattaaaagtatagaatataatattggaaattaactaaaagaatggactactagttaggaaagtcgcaagttgagtagcgatggggcacatgtcttggcttcccaagaaaatacaatacactggcaactgtcatggccatgagatgcttcgttggattccaactcctactaggccttgcattcatgtttccatccttgtatatagtatgaaaaggcaataaaggcacacatcttttactttgtagctatgtcattgctatatcattgtacatacaacacctacaacctgatgtaaaagtgacacacacacacacacacaaatgcaaatcaatcttgagctgcattgtcaactatggacttgtttgacatagctctacgtgagatctaggttggatatctagtctgaagcaaaaataaagtggtttacgtatttgtggttgtggtcaatctatatttaaacataatggtttatttaaaagctcttatgtaccactagatgcaaattcaaaatatcacaaactaattaggttcgtagatctcataagggatgtcgacaacaagttcccttagtgaataggtatatcactcaccttgtcatgcatgaagtcgagatatacgatcaaaccatcccatggggcttggtgaaagcgatagctttgacctaactttcacttggatattacttcttcatgtgtcctagggaacaatttattttttccatcattgctagtgtacaatttcaaaaatcatatttaccaaagagttcaccaaattaccatggccatgtttggttcaacttcttggcaaattatggtgatcggaagcagtttttaccatccaaacaatagattctcgcagcaattctcgatgaagctcttttttcaaaaaccaaaatacaacaaggacacagaagcgcgtaggaggtcgcattcgggagaagtcgctcacacccctgtctgtctatgcccgtctatagattgggtttccctgcaatagcaattgattacttttttcctacaataacaattgatttgtccggttgcagttcaactttcgaccgtgttcgtgcttcatgctcatcttcgtcttctatgacacctcgtgtttacatatatgtgtattaatattaataggtatctatttataatggagaactttctaattacgtgctcattagtttgataatgtattttttgtcatattttattttta

SEQ ID NO: 42360 - DNA, 658 bp, Zea Mays
aatagatattctttgaaggctattttggtgtgtgctaacaatgatgtctcgtttgtagttctcaagtgataaatcacctacaatcagcatagctaattcttcctgatgtggcatctcatattgaattctatcagttttgttagcgcctactattctaatgcttatatctatgcctttgtgttcttcgagaaaatcacgagcttggcggaatatttttactaatggattatattcatcgagcattttttagccctctcactatttctggatctatgtcttgctcacctggttcttcatttgttagagccctaattctattctcaatttcattttttgtatcaaaaatatatagttctgcaaatttggggcaattgtctggtaagggtagtaatgatcctattcgatgatgtatttggccattgacacgaaacacatatggtccctcaccatcatttattttttttatcaatatttccccccatggaagtaaatgcaaacatgctattatattgtcttatcttttgtagaaaatgtttacatcttgtgtccattttccgttgtattaattcattaagaaaagttgggggttctttatattttggtattctgattttgccatttttgcagcagttcgaatatattggttcctgattattgt

SEQ ID NO: 42361 - DNA, 2074 bp, Zea Mays
ccgtctttcaatttatgttgcaaataacacgtctgaatgtaatctaagcttgaccattgaattctcttacctctttgaagacaaagccaatatgacatttggcactcatctgtgaccaagaccacggcgctctagacctctagttaccagtcattctgaaattgttatctctcctatttgtcttcctctcctgcccagcaccattggctggccagacgttctgcagtgattgcaatggtgccagacaacacaattgataacgtcgtgggaattggagttttcctagtggtaatatccattgcttgcttggttatccatatctggatcaaaacacaacaacaaagagaacaagcaatattaaagttacaacgagtgtctttggcaataaaaggtgtgataaacctatggagcatggaaggtggcaacttgggattttcacagtacgattactctcatataaaagaagctacaaataacttttcggttgataataaactgggagaaggtggcttcggccctgtatacaagggccaattgagaagtggaattaaaatagcagccaagaaacttgaagcatgttctttacaaggactattggaattccaaaacgaaatccagcttatagcaaagcttcaacacaaaaatctcgttaagctgctgggttgctgcactaaaggagatcaagaaaagatgcttatatatgaatacatggaaaataaaagtctagattacttcatatttgataatgtgaagggagcagatctaaactggtcaaaacgcctgcacataattaatgggatagctcaagggcttctttaccttcacaattattcacggttatgcgttgtccatagggatttgaaagcaagtaacattctcttggatagtgaaatgaatccaaaaatatcagattttgggatggccagaatattctgttcaaacgcgaaagaatcaaatactacaagaatagtgggcacacatggctacatacctcctgaatatgcttttcatggggtttgctccatcaaatcagatgtttttagctacggggtattgacattggaaattctaagctcaaagaggacggtccaattctatgagtacaaccaaaagctatataatctcatctcatatgcttggcaactttggacggacggaaaatcagatgagctgatttattctcctccaggcaatgtacgtgaagagatagaaaggcacattcaggtggcactcttatgtgttcaagaaaatgcggagcatcgacctgatatggagcgagttgtcacaatgctaaacagtaaggatgtggacttacccaagcctatgcagccagcttacttccatgtaaatcctagtgaggaagaagtttcatcacgaagcattaatatgactatgagtatcacgctggaaaggtagaagcacattgtcattgttttttgagaaaaatgcttgtaactatctgcatcaagagggaaaaaaaattgcaccgatatagtcatgtgagtaagtttgattgttatgcatattcattaatacaacatatgttttttacatttttgcttggatacgcagattgattcttgggctcaacctgaatcttcgaaattttaacctcatgtctttaacaacaaaataggtcattctgatcctaaaactcattcattttaaaaaccacagtaccagcagttgcaacagtttcagataaaaacagcagcaacaccactctgatcttgagttgctttattccaagagtaaacttcacaacgggtagtatatccacttgaatgaatcagacaaaattcatgagcacgaactgcaattgggatttggggagcacataaagagggtacagtaaccgctaccgtagtgcgttatcaactcatagcatcagcagacggcactccccacgtggttatttcttctgaatgcctggctcgaatcgaaagcaaaaagcgaaaagaggggattcgtaaggccgaacctcggttcaattggcgcaatgtctgtgccagcacctgcgcgaagctgtacccggagaatgtcgcggtggtagtccgcggccgtacccgtcgca

SEQ ID NO: 42362 - DNA, 1091 bp, Zea Mays
atgcctagcattgcaagcaaccaagcaggggagggtgtgtttggttcactgccccagatgccacagcctaaggttaggcatgccccatttttgtcggtaagtgtttggttcatgcctaatattaggcagccacgaaaagtgtggcgtgttacacaacccttgccgtatttttttacgccgcacctggggcgctcgttttggccgccgcacgccgcacgccccactcctcctctcacctcacttgctcgtcgccgcacctggatctggctctcgtctcctccaagcacggattaggagtgcacctattttgattctgcgaactgagtaactgattctaaaggatagggcaagaaggctcctttctaagcctatcaagtttttcaatgaaatgcaagagttgtttattaacagcagtgctgatggctctctagccatggaagctacaacttgtatgaatgaaactcatcctggagatgacagtgacttcaatgatgatgtgtgcagtgacttctccaactatcctcagcctgtgcatgatctagctcgtcaagttctggactgaagcgcccacaaggagagggagtaccagcgaagaggaacgtggaaccaaagagtcgcacaacaaaggaatgtatctagcacacaaagatcaaaagggtatgcgtggtttcttatctgctgcatcagacataacatttgagtcatgggtactaaagcatctgagtgatttggacctatgaatcgactagcaggatgatccatgtaggagatgaatggtgtgatagttggggtttttgcatttcttctaggttgatggatgtcaattgatggagatatttggtggttgtgactagtgttacattgctctttttgttgatttttaactttgagggtaccaatgagcatagtgcatagcaccagtaccttttacaattatggaatctctgcaaagcaaggaaggcattggactgtaataaattttgctccaatttcgcattgcaaatgttctagtagtgtcagatttttctctaatgcttctagtgaaaaatgagaccttttggagacagtttctaaattttgtgtgctgctag
